United States Patent Application Publication US 2013/0034624 A1 - sequence listing, part 19

SEQ ID NO: 55721 - DNA, 868 bp, Bovine  19866880833867
  misc_feature (1)..(1): n is a, c, g, or t
ntttttttgtgagctatctctgtttccagttttcatttatttgtaaagtttaacaattttcttcctccatagctcatccaatctatgagctaaaagccaaaagcctaactaaccttttttcctttggtatcattttctaaacaaatgcagttcttgttcaatggagaattctggatcagctattaagaaaatattttttcacccccactggctgaaaaggtcagtttttactttcaaaaagatttgaaaatatcttaagaacaatttcagtaactattagaatatttagaaaaattgaaattaaaaattaaaaccatgcttaaatgttcccaaagacattcattaagaatattaaaattactagcagccttgatggattttcatatgcattttttggggacttcaaagagtataatttcaatttagaaaatttattgctactcaaatgagtttttatgaatatcctctcaaagtcttacaccaaaacaacagtgatcccactccaagtttataaaaattatctttcgaattttgatgtcaattagtacttatactttaaaatctgacacagaattgaatggacagcttaacattaacattggaacaacattgtacctctttttgattttggtgtgatagcactgtataacacaattcttttattttaaaactgtagttcttttataagaatgatgctctgttaatcataagtgtggcagctcattgcttggattgcagcatgaaatgtaatttattaaagtctgtttcaggcagatctgagacagggagttcagtatttattaatgctttctccattttaggcttagggaaagccgaattaaatacagtaaaacttggacactctttt

SEQ ID NO: 55722 - DNA, 1152 bp, Bovine  19866881200047
  misc_feature (1)..(1): n is a, c, g, or t
nttgaattctacacctgatactttttctaaacattgacgttaagacatattattgttattcacataaaaataagcatttggatatatatattgttgaatatcattttggggggtgaaaagtaagggtagcttgtaaatttgaaatatcttggcataaatattctatttggaaaaagaaaacaaaaattattttgagaataaatcatgatttaattttctaccaggatgtatcagctgaaaagcactgaatattttagagaattatcaggctggctattgacatttgagggagacaaaaaaattcagctggagataagacctatatagtgtatgacctatttaagtatccataacaccaagagacaagctcaaagagacaacaaaggcatggaggagtcagggaagccagactaacagtgggagtgaaaataaatctttctttaaacccagtgagagaaaagaatcctcatggaaaaaggatattgcttatgaaatgaatgtggccataactacaaaacactcgagagaagaaaatcacaggttaacaagtaagggtcacacatttccagatttcagatattagctgtgactacagacatatttccaattactgcaaaaaggtattacattgtgcagaagtttttataaacagaccccaggaaatattttccaaaggcactgccatgttatctgttgaaaggagactacagcctagatatgataaaagggtcattctgtcttttgtgtggggccaaggcttgagggcaagacaagaaggggtcagatttaaggatagcaaaaatttcaaattggggtcacaatgactaaaagccagacacacgccttaggcaacaaagaactataagctagatccactgaaaatctcggtcattttcaagatgaaaatggtgggaggctagagagagaggaaagagatcacttaacttgtgaaatgtagtcaaatactctaagaaattcaacatacatcgccaagactgactagaaaaagtttgtggaaatatgaacatgataatgactgagcaaaataaatgaacacgaacacaacagtctgggaaattttcatttgttttttggtataccaaatagtgtgtccctcatcagctggctaacctgatttatgtctacagcttc

SEQ ID NO: 55723 - DNA, 2873 bp, Bovine  19866881268255
  misc_feature (1)..(1): n is a, c, g, or t
nattttttgatgatggcctttgacagtggaagatgatatctcattgaagttttaatttgcacttcactaataattggtgatgctaagcatcttttcatgtacctcttggctatctgtatttctttcttgaagaaatgtctgcttaggttttcctcccatttttggattgggttgtttattttttttgttattgagctgtttgtatattttagagcagaatcccttgtcgattgcctcatttgaaaatattttctttcattctgaaggttgtcttttcatcttgtttatggtttactttgctgtacaaaaagttttaagtttcattagttccatttgtttatttttgtttttattttcattactctaggaggtgagtcaaaaaatatcttactgtgattcatgtcaaagaatgttcttcctatgttttctactaagagttttatagtggccagttgtacatttatttaatcctttttgagtttctctgggtgtgtatgtgtggtgttagtgagtattctaatttcattcttttgaatgtagcttaataaaacaaacaaatggctactttatgtgctttgaagatgactcaggagtggctcacatgcagagcagatgtctatcactaggacacaggtctatatactgatttcttatttgcttgcagtcctcaagtatttaaggaaataaatatcttagaattaaatttttacatcacacagagatgcatgcagtttttattatcccatatttcaacattgtcagctattttgctaaaataataataaagaatacattgttgaaataagtagacattttaaaaaatcacttctacagtgttagtgttcacttgcacaaccgaatgcatttttttccattttgtccagctttgcgcatgttatgattttctaggtcaaaaatctttttacaatgtaattttcaaaacatgcaaaccacctttttgtgcctggaagctggatgctgatcttctagctttgtgtctttttcattcctcaccctaatcacaatcaaactcttcacttggttccatgattggcttgagaacgatttggattgaaatcagatgagcaacacagatggcatctaatattgcatcttagattttggctttactctgcaagctgcttactcagtggtagaggagaaggggaaggctgctgacaaatgacactattatgaccatcatagccaagctagactggcaccgttagagtgctcaacaatctgttttatatctctatctttctaagcccatcttcttaaacaaaggtgttctttcctcatgtaacataatacctgggactggggacactttttcctcttgaaatggcttattaagcataatgatttttaaggatgtttatattgaaagagagggtgtatcctttggagattaactctatgttgtagtaatatattaacttctactaacttaagtctcattttctcatttaaatctataatatacatttatttgacatattttgaagacaaaaactttgttataaactcatgaaagctaagggtgggcatataatatcaataattgactattgattttaaatgaatatgcattatgacttaagtgaaagtgttagtcactcagttgtgtccactcttgtgaccccaagaactgtagccttccaggttcctctgtccttggaattctccaggcaagaaactggagtgggttgccatttccttctccaggggatcttccagaccaaggattgaactcaggtctcccacattgcaggcagattctttaccatttgagccaccagggaattcctatgatttaacatggatattattttgagaaaaggatacgtatttcaaaagggtatttcttttacgtaaattataattagagtctcttttctgattatgagatttatgtataagccatgaagaatatgtttttaaatcaaagatagagaaaagaaaatgcaagtcaatcatatttcaatcaaatgagtgttaatttaatgatatagttccttttgtattttatgcctatttctcaatatgtatgacatacaatgtacactgtttaggaatattatctccaattttatttgtaagataagttagaaaatgagaaaatttcattgtgaaaatgtagcaatttatgcataattaataacagttgcaaccagagttatgagggtatgcatataaaagagtagcatgtcaacagttgtgtttatcatttactaagacatttttcacattcatatcatctgatttttttttttttttgacgtttatttttagctctgctgggtctttgttgctgctcaggcttttctctagcggtggtgcaggcttctcattatggtggcttctcttgctgcacagcacgggctccagggcacgtgggcttcagtagttgtggcatgcaggctcagaagttgtgactccccggctctagagcacaggctcagtcattgtggtgcacaggcttagttgctctgtggcatgtgggatctttccagatcagggatggaacccacgtttcctgcattggcaggtggattctttaccactgagccaccagggaaacccttcatctcatctggttttgatagtaactttctaagataagcatcttatttttcacttttaatttgagaagactcttcaaaaaagataaaggaatttatccaacttgatgtagcctggaaataatgaagtcagaacatgatgctggtttttccaaatttaaatactatattctatctctaccctttggtgtagaagaaatgaataaactttgtgaattttgaagaatacatcagcaaaatgaactaaccggtaatattttagggagtgcattaaagaaaaaaatgtgt

SEQ ID NO: 55724 - DNA, 1183 bp, Bovine  19866881334792
  misc_feature (1)..(1): n is a, c, g, or t
nttatgaacataagcaaaagtaacttatgaacacaatatatgccaggtatataggtacatatgtgtgtggtttatgtgtgtgttcatgtgtgtgcttacatatgtgtaaacataggagttcttgaggtcttttgaagctaaagccgctgttgctgaataaagaataaatgggggaattaacgttctcaataatttttaaccatttattcctagggaaaatgtcctaatacaaagtctctcattttactaatgatacagctcatataaaagaaactttgaggaatattctaaaccttacacattttcaggattgaattctcagactttttttaaatggaaaatacatatgtaaattttttaacattacattcagttctaatcactttctctccctactgtggcttccttgaatcagaaatgctttcagattaaattaattttacatgtttccataaataacagtaataatcatcattcaccattcaagcataccaaagtatatttcaatattcatatcaattcaccaaattgaaagaaatatcaatttaactcaaaatcataaggagaaatgtggcagttttcaaaagaagttactcaaaatatttagattatttaggacaaaaaggccttcatcagttagaattatttgcataattaatttctatttccatttcaccttaattccatttctcctaatatagatgtgccttgagtgaatatagactaggcaactttctgttaattgtattaatatctttcatttaaaaataatatattgtgatttttttcctatgattaaaatgtaaatttattaaatcttaccttttaaacttttacacatatttatgaaaagtaaattactctgaagataattttggagagtattttctttactttggggataagacagtgtatatttgaaaaaaatcaattgctgccataaaaaataagttctttctgaactgccttatagatctattacaaactttaatgagcaagtaactgcgtttattaactacatttctggccagctccatctgctttcattttccaaacagcctggtgaagcaaacagagataagcaggtaataaaatatttgactgaatcactacctctagggtaccaccaaaataaaaaggcactgtggtgatatttgggcttacacttgagattaaaatctag

SEQ ID NO: 55725 - DNA, 799 bp, Bovine  19866881402849
  misc_feature (1)..(1): n is a, c, g, or t
nttacatttgcctgacctgaatgaatctccctgtgtaatttccctaatatttttattcctccatctgtgcaaaaaatgactcgatattaccaactaaccatctgaatgtttatggaaaggcagcatagcgcctgcttatgtgaaaccacacatatccttcccctttacaaattgaattcgctgaaagaagaggctgtaaaaatatttttaaatgttgtttctcttattaaataaagatacgtaagatggctaatgtaatgtaatcaagctgcataatataagggttaaccacaatatttcagtttcattctttgtgggagaaaaagagttttaaaaattaatgtacaaaataaggagatggttttaaagcaaaactatgctaaattggcagctttgcctcacaatattttgttggaagataagaaggcaatttctgccaattttgcaaaaagacctccatttctctgccttagttactatcccctgggcattttatatcttttcaagtagactaaggagatgctattcctctagggaatgaagaaagaagtaatcttaccatttgctattcaccattccaagctctggttttctgagattttcaaaagcagagctatgatgttgggaaccacatctttcactcctggaaaccattcccatagacttagtccaggctttcatcattttgcagttttcaatgttttctatctttcctcacaacttcctgtttcttttgaaatatttgaatatacttgacaactgaaatcgcatattttactaattttcaaacatagcttgg

SEQ ID NO: 55726 - DNA, 1218 bp, Bovine  19866881461230
  misc_feature (1)..(1): n is a, c, g, or t
ntctgagactcccgttggaaacagactttgctagagtaaaagcagatgcacagatcagaaacactgccaaagtggaaataccagtaagaatacaaaatatttttctatgagtttgacaatgcctaaacaattttgggttgttttcagcactttagatcctaggaattagtttgattaggaaagcatatataatgctaaaaagaattataataattttcagctacctattagtctcaagttaggtacagcacaattgggtttccctggtggctcagacagtaaagaatctgcctgcagtgcaagagatctgggtttgatccctggatctggaagatcccctggagaagggaatggctaatcacaccagtattcttgcctggagaaacccaaggacagaggagcctagcaggctatcgtccatagggtcgcaaagagttggacacgacagagtgactaatactttcagtttcactttcatagcataataggcataccacaaaaccaactgacactgagataaggaaaagtctcactatctgcatgagtcaagtttatgggatgggaacaattaccccatcaaattattgtccctatccccaacaccacagttacatcttgttcaataatgctggccaaattttaggttggaaaaaaaaaaaaattgctgtcatactgtgtaatttctcaggttctgtccagtcagcttgattaaatgttgactcccttgatatctttcattcttcaggttcatcaccttcttctcacctacttaagtcatttgttatgcaggcttggagcccaatgtttaactgtgctcctgctgataccttacattttctcaccctcctgtctttgcctctcttttagtcctgtggccaaggtggctaataaggctcaactattttctctcctacatttacatgttgtcttgaagggatttatgtgttcacccagattgatgctgtctctacctgtttctacctgtctacccttgatgttttgtttttatttatgtttcaactgtgaaattattttatttttttagtgagctctttttcacccaaaactgttttcaacttctttgatccagtctgttaacgtctttcctttcatactcagcagaagatttcacgtcctgagtggaataagtgccctcagtaatcttttcctcaaattatagccccactgtccttttttcctaatattttgtcgtgatga

SEQ ID NO: 55727 - DNA, 1232 bp, Bovine  19866881503790
  misc_feature (1)..(1): n is a, c, g, or t
ntataatcctgtaactttgcaattgttgcttttctttcagttatacaaacagtcttactttattattttttaatgtaagaaataagatgtgcatttcaaatttgtgagagcctgacaattttttttttttttttctatcagctctttggcaagggaacaaaaaaaagatatagagttagagtaaggtacagagacatgtttcctttaagtgaggctgttcaaattttaagcaaagcaatcacactaagctagcaatagcacccattgtttgctcgttatgactacacaattcagtctgttaaattgtaaactagcaatagaaggtctacatggatacgctgataggctaagatgcagaatgtaaatatctaacatatgtttaaatcctctggtagatgaagaattatttagaaacataaggaaacattaataaacacacacatatacaggaaataccccattttcaactgccaattcagtctaatatgagtaggaatatcattctaataccacaaagttaaattgcattgcacttccctttctcagcaactggttaattcaatcatagcacatagatttttcatcagtttttaatttgcttaatttttatgagctggtggtttagaaaatttcccatttttcaaccctaagactgtacggataaagccatgcgctattctttctgtgtcattttcattttaatatagattttatagttcattacctgtcaatcagttttaaatggcacagtattcattttatcatgttcagtaaaactgttttatgcttctttcaatgtcttacattcattttagactgagccctatttatttctctaacagccatagccatctgtagctgtgcacatttgaacttgtatttattttagcaaatgcaatattttgctttatgtagtatattcatttaggatatttattcaagcaagtaaattctgaggaagcagagctgtgtaaatgctttatctgtggcaagccattttatgtcctgtgtttttatttgtctcaaactttgagggatacaatttcaaacacaacttaaagtactgacacagtatactttgtcacctgactatttctaatctaacaaaccatacttacagaattaacattcaaaaccattgagcaaacaaacataagttttgagcctcagagttttcacataaattaacacaaatatttaacaaaggaaaataggatatttttttaaattac

SEQ ID NO: 55728 - DNA, 1556 bp, Bovine  19866881559591
  misc_feature (1)..(1): n is a, c, g, or t
ntcataaataatgatgcttgtataaacgagacagtgctacaatgattttataaatcaataacctgagaattacccagctgtgcattttgctatcatgcagtgtttatattccataatgaaacttttaaaaaattattcattaaattgatcacttagttttaaaaagtatttattaagtgaaacacaccaggttagggtctttgttttatgacttaaagaaacaaagtaattatcctcatggaacttatattttaatgacatttaaaatgttgaagtatttagattttcagaaataactaactgttgcaaatcttaatggtatcagtgttaaaatggtgaaagttgaatgatgcactctttgaaatttaagtttcaaaaaaacctttccagctgtttttgagacttgaccaacagagtgagaaaatctattttattcgtttttcaaaagttgcccttttctaatgtcaagctactacacaatggatgaactttggatgtgtcagtcttggagtgttatgcaatttgttctgagtatgaattagtcaggctgagtctttgggtgaattagaaataacgaaaatgagctgagctgaacacttcccaaaagggcaaaaatacttgtatgtttgcttagctcagtgtgtgcatttcagtagagagctcctggttttactctactgttgtcttatctgccaacatatctttaaaatattataatcagtacataatggacagaagacttggaataaagaaatgacatactttattgggttgacttactaccccaaaatgaataactctgcttctgtaaaagacaaaagacataaggatgttttttctatagttgttgtggtttaactttatctcagtttaaaattaaatagtccatttactcaatcagcattttatctgaacatatgaagccatttgtatgattgtgttttaactatattcacacattttctagttgaagtgtagttaatgtctttaatattgtaaaagtacacaattatgtcctaaaaagtcccttgacagtgaaaggtctaggacaaatgtagtaatactcacatactaaagcacagtgtgatcctaggatgctgggaagtagagagagttattgaggcaccaagaggagggaaaagaaaacaatggagtaaaagggagaaatagtagaagcaggtgagtagaaggacctggcttgaaaaatgttaacccatgtttttcttccactcattctgccttccctagaccctgacagcttctacctgaacactgaaatatacccttgtttttaggacagtcttaatgaagacagttcacagctaattttttttttttttttctgctctgattctgagaattaccctcccccattttcatgtgattcctgtgacgatatcagagtatgagatctgcactttccaccctgtgtattggctgcgtcatcactcggggcacagaggtcggttcatcggtgactgagtgcattccccaggcagtcagccaggaatattcattggaaggactgatgctgaagctgaaactccagtactttg

SEQ ID NO: 55729 - DNA, 1032 bp, Bovine  19866881716320
  misc_feature (1)..(1): n is a, c, g, or t
naaaatactttaggtaaattttccttgggaattgctctctgtgcctatagcacatatatttaaatatccataatcgtgaaaatatctgccccttgagagctgatttaattttgaaaacatctcggaatcatctggaggcaagtgttaggaataaattttgatgatcaggctgaacattagagtctgggtcaggaataaatctaaagtaatgaaaactaatttgttttcacagcttacaacctatttttatggtaatttctccctctccccaaaaaaacaaaataattttggaaatggcagcatttttagtaagtatatagattaccaaagataaacctcattggatagggaagcttgagtgtaatatttaaaatcaatcttattactacagaatgaattaacatcctctgatgtgcctggcacgtagcagaaaaaaaaaatactagcagaattaaggaaatgacacagacatcaataatacttgtaggaaaaacaatttaagaaacccatagggcttttaaatgtactttctaaaataatatatatcacatatacttcatttataaaactgaaacatataaaacttatacttacttttacttttattcattgtacctattttttgacagtatatgtactttttctacttagaatgtataataagaaaaacaaaggtaatttaaccaactattatagaccatgtgaatacctgctgtttcatagatatatattgctatttaacttaaactctctggcaacataagaaaaatcaccttaaaattatttaatcacagcttgaatatcaaaatattttcaagaattcatggcacctcccctcctgttcaatttaacctctctcattcaaaacagccattttgaactacttacctttccccgtcctttgaatgtgaaaatacctctccactgcacaacttctatttattatatctttcaagccttaaacccagttattacttcctctgtgaaattatgcaaaaccaatcaaataaactcagtatccccttctctaaa

SEQ ID NO: 55730 - DNA, 1027 bp, Bovine  19866881734991
  misc_feature (1)..(1): n is a, c, g, or t
ntttgagggttttttcctctctgcttttccggaatagatcatggtttcttagaggaattctgaaacgtattatcttacaaaaaacacatcaatttgctgccccgtttaattttttcttatagccttaggctaacttactgtgaatggagtaaacttgattatttagtattgaggattggtaataacagttataattatagggcataaagtcttattcatctatcatttatttcagaaatcacatttttctagaaatgcaataatttcacagaacattaaaatggaaacaaattataaaattgatttaacacagataattttctaaataacatgttgctttcattgaaattggaactgcttcaaggttttaaaacattggtcaatgcttatttttgtgtttgtttcttagaactctttatcttttatgttgaaaatacaagaaccaatatgctaagttgagatgtttcatatttaaattttggtttaatatgatcaagtcattttgttcaagaaaaactcagtaggatttttatgtttgccatatattgatagatatattaattttgtaagaaatctgtagattttactaaaaaaatcagatccacatgatcaaatatttctaggaagtactggaaaaataaagtcatagtttttcaatgtagttcttaattgtcaaatttatcagaaatggtattaaaccaatgtatataccaacctttcaaaagtaggttatagaatggtaacaatttttatttccctaaagtactcaactgtgtaatgttacataagacttgcttcttctagaaaaagcttttggaaagttatatgctgtatttgacaggtaatctaaataatagagtaatttgaaaatgttgtattgttatttaatatgccaatgatctgaaacttgttttgttctttaataccatctgctttgtattattctcctctggatatatatttctaatttcatttaaagtagatttcaccatctcccatacttaagttttctgtaaatttttgtgtt

SEQ ID NO: 55731 - DNA, 886 bp, Bovine  19866880386462
  misc_feature (1)..(1): n is a, c, g, or t
ncgaacatgaaatacatgaggtaaagtaaaagggcaaagtaatgagatcaatcacgccaagaggataatgaaaggcagacctacagagtctactcagggaaaaaaggcatggaagcagatatttatagcacgctggaagagatgttgatagaattttgcacaaagtgctatgggaaaacagaaggaagcaacattaattgtgctagagatgggaggggaatgaagataagaagagaaagctttatttaaatctctgttgccatcaaaacagcagatttttcagttattcccagcacaaaacacttagtctgaccttttaaatgtatggcacgagaccctgaccttcagctatttaattcagtgttgtaaagtgatcctgcaacaacggatttctctgtttccctgaaggagcccatttgtcatatatgtggaaatgccatgtatgtagaaatggatggtatatgtttcttttctttaaaaaaaatattttagatatttatctagctatttggctgccgtaggtcttagttgcagaatgtaaactcagttttggtatgtgggatttagtcctcttatcagggatggaatcctagcctcctgcattgggagtaaggagtcttggccagtggaccaccaaggaattccttgtctgtgtatgtttcaaatttgtgaatttcttagcaggtgggtagacaggcaactgggagactggaagatgtggaaagtgctccccgtcttttgtgctggggaaagagagcaggttgtgaaataataagcacagctgatcctgaagatgagatccctcttcttggcagttctacccaggataaaggtttgggaggagaggcagaatgataatattggaattctcatccaaatcaggttg

SEQ ID NO: 55732 - DNA, 850 bp, Bovine  19866880414440
  misc_feature (1)..(1): n is a, c, g, or t
naaaaaattttaactttattttaccaaaaaaagtatattatagatgagagaagttaacccagttttttaatattgtgatgctaaagcatagcagatgtgaggttaagtctcaggtctgtttattctggctccccttcactaaggacaaatgcgagtcatttttcataaacacaaagaaaaggaataaaattgcaaaagcctaaaattaagccagtatgatgacttatctatggtgagagatttaaagatggagattctatcactagagataaattcacaattttctatattcttgctgaatatgtaacatttcaatggttgacacagcataaaacaaactaatgaaaccctgaagcttccatgaatccattgcaagttgtctgttagtgtcataggattaaaggctgctgggaggaaaatcaacagttgaaaaccctaaaaaacaagtgatagatgatgtttctcatttctttcttcaacttaagtatatgaattgtaaaaaaaaaacttttaaatttatattaatttggttgccttatcttcttacagtgttcaaaagacagaagcaaagacaggcatcacagttgatacatcacttttcatattttgtcttttctttgcctgagtggcaaggttagagtccattgcaaaaagaaatataaattgatgttccttgtgtttggaaaatattggaatgtcattgaatatttgaaccttaatgtgcagtcttttctgaggttttcttcaaaaatcatagctcagtattaagctttgggttctgctatagaatatgttatgatatttttaaagcaagaccattaaatcattctaaaagcaaatatgtagcaga

SEQ ID NO: 55733 - DNA, 2008 bp, Bovine  19866880448513
  misc_feature (1)..(1): n is a, c, g, or t
ncaaaaccctttcattgctttttttagtcttaagtaagaattgttagtaggatggtggaaggcatcattaagatgatccatttcgccctgcagtcaccatatggggtttatcatccaagtgtgatttgagaacaatgagggtggagaaataagttactcttttcacctaaccttcaaagaacctgggacttcctgtagctcaaatggtaacgaatctgcctgcaatgcaggacaccagggttcaatccctgggtcggaaagatcctctggagaagagaatggcaattcatgctagtattcttgcctggagaatcctaaggacagagaatcctggcgggctacagtccatggggtcacaaagagtctgacacgactgagcaactaacacacacacacacacacaaagaacctaatgacatatttctctcctttactactttaatctgccttgtatgtctctaatatatagtgatttgagtaatgcttaaatatgtggaaaaataggtaatgatatgaaaatataggaaaagtgacaatgatattgcctcctatttctgttttcactgtgcctgcttgggccagtgatttattataagtaaggtgaaggcaaaatattactcagtgaggtgaattgaagcaagttcttcaaattactttaatctctttccacgtgaagaaaatatacattttagacatgtgatgaaagaaaattttttttttatcatcttcctttcccaatgcttagtgggtaaagaatccacctgcaatgcaggagacacaggagactcaggttcaatccctagttgggaagatcccctgaagaagaaatggcaacccactccagtcttcttgcctgaaaagtcccatggacagaggagcctgacaggctacagtccatggggtcacaaagagttggacataactgaagtgactaaacacaagcacaaaccacttctaaagattaaaaacataagaaaactttttacctgtatcttttttcagcattatatatattttggaaatatatattagtatgggcttcgcaggcagctcagtggtaaaggacacttctgccaatgcaagagatgtgagttcaatcccagggtcatgaagatcccctggaggaggaaatagcaacccactccagtattcttgcctggaaaatctcatggacagagaagtctggcaggctaccatccctggggttgcaaagagtcagacacatcttagtaactgagcacacacacttggttagtgtccatgtggttatttacattttggagaagaataaggagaaagattcggaagtgatgacgaataattaaaatatcatttattattttaaaaaatatgtatttatttggctgtaacaaattgtagttgcagcactcaggatcttcaatcttcattgcatgggggattctggagttgaggcatgtggaatccagtgtcctgaccagaaattgagcccccagtccctgcgtttggagaatggagtcttagccactggcccaccagggaagtggtttctgagtcatgaacttttgttgtgggggctgtcatgtctattgtagcactcctagtagcattcctgtcctctccccaccatgtgtcagtagccacctcctccaccagttgtgacatcacaaacataagcagacactacaaaatgttctctgacgggtaaaatcaccttgagttgagaatcacttgtttggagtttgtcagtgttttgaatattcctctattctttattctgtattatttctctcatcctaacttcacagggacactaaaaataggtgatgtattttagaaatgagaagatggaatgttagtgaagtaaattgctgaaggcagcacgactactgtttggtacaattaagattgccagccacgtcttttatcttccatattatagtaatttttccacccttgaccagtggttttgaaacgttgtgcaccagaatcaactggagggcatttataacattatataacatttcat

SEQ ID NO: 55734 - DNA, 2106 bp, Bovine  19866880477524
  misc_feature (1)..(1): n is a, c, g, or t
naaaaaaaaaaggcgggggtggggggagaaacgaggttgatgaagaaaaatccaactgcaattatccgtcaattttagtcaacataggcacaaatccaactgtcctctgctggcttctctcccccaatcaatgcctcattctgccgcggtcaacttttcttctccgaaatttctttgcagatgtattattaattccctctcctcttgtgggaaattcaaaaagaaaacaccaccatatcaagtctttactttcctaaaaaagccccaaacttttcattccaaaaatatctccttggcttactttctcctttatagaaaaaaaaaaaaaaaaaaaaagcacatacttttgtttgtgaatccacggttctccatttccaatcatccttttggggaggggggatcgctgtttttatggttaattatttatgtcagaatacatcaacccccgcgggtctgacactggtttatttcatttttcaatgctccctgtgtgcacatatacacatgtgtgttaagatccaggtctcacaagaaaaagcttcattcttccttctctcttgcacaatcagtttatccactgcgttcggttccaagagatagctgcgtcccgcatccttcatttttgcaacacacccaaccgccaccgccaccaaaaaaaaaaaaagtctcgttttacatcgccgattcctctccccaacccccacctcgaagaagaatttggggctcaactccccccactcgccacccttccggccggccccttctccaaagatctgattagatttctcatcacaacccagtgcgcaattggatttttgatttcagccacccggccagccaccttcccctctccctccaaactctctgttatatcctgtctccttccctccaccgcctctgcaatttcataatctcacgttaaatggagtgcggggggcgggggcgggggtaggggcggaggtagtggaggaaaatttcaaggctccgtcagctgtcaagaagaaacccattccttcccccagctacttcgttttcttcttctttttttaaaagctcagggtggcttgcgcttcctctgtccccgcccccacccccggcacccggtccagattctccaggtgtagcagaactccacggtcagggctgggatcacgggggagacgcgtgacgctgtccctcgccggtggcccctgccagccaccgggtccccttctcatccatcagcgggctgcgaatccaggggcgccgcgacgaaagaagttcagattgggcttttatttcaaataaggagggcgaagcgaggggctccacgggggtgtgaggcaagtgaaaaaaataataaggaaagaggatagaaaatggaacgaaggcggttaaaaaaaaaaaaaatccttagtcgctggctcctctcatccttctcgaatgaaactgcagctctgatctcatttccagctgcgtcgggtacattttggagccacaagttggtccctcttctcgcagaccttcccgacgccggctagtcctccgccaagagatgcgttaccgggagcgcagctgctccgcgcggtccttagcgccatcgccccggctcgcggctcccagcgcggcataaaccccagtccccttccatccacttcggctggaactctctgccacccccgcccgatcctctctcccctcttttccctccgatattaaatgcgctcccagggcgggcggcagctcctttctctaagccaatgccacgtcccgaaggtttgcgtccccgctccccaaatctcctttcggactgcggtccccttccctctgcccctctttctttccctttttcctttccctttctctgcttgtgatcagtaaaatacaattacccaattacctcccatcatcttagcactgattggtcaattgcattaacacttgaagtcggggacgaggggattggagcctctgcggtgtggcaccgctgccacctggagggcagagccggaacagccgtgtttcagagccacccccgcgcttggaggttagtaatcagcagagaaactcaggggtggtggtgtgggagaagttatcttttttttttgttttttttttcctctcaaa

SEQ ID NO: 55735 - DNA, 778 bp, Bovine  19866880762492
  misc_feature (1)..(1): n is a, c, g, or t
naactgtagatattatctgtaaactatgccaattccattcaagggattggctcctaaatttcaattatcttttgatatttatactaaatttaaaagccaagggatttaaattatacatacttactaagatacaataacagtatgcatctgttgatggttcatatttatcacctatcacctatcaaactgtatgatgttaattccagagataaaattataaactctactttaggataagtatacaggaagagagtggtataattgcttggagaaggttattaataaaccaatgctcaaacgataagagcaactttgttattacaaagttctatgccaaaatgcatctgcttatatatttgccaatttaattttgtccaacagttcactgggttcgattgctgagttgtttcattttactggaaactttagaacattgccaacatcacaaaaataactaactaaagacatgaagcttgatattaaccccttatagaatatacggtttgtacatatttctcccatatgttgcctttttgctttgctacttgttttctttactctgcagaaatcttttagtttgttgtggtacacttatttttgcttttgttgcctgtgtatttgctatcaaatccaaaaagagaaaaaaaaaaaaaaaaaactcattgcaaaggccaacatcaacagtaaaataatgtagctttcagaacttcatgatggattccagagtcagatctaaactgcttgattcctatcatttactaggcagtagtaaattatg

SEQ ID NO: 55736 - DNA, 1000 bp, Bovine  19866880848247
  misc_feature (1)..(1): n is a, c, g, or t
nattgtcagatattcacaatgcagacaaaaatgccaattttgacatggtgagaacaattaatttcattgtcattgtgatttttcaaatatttattctatttaaagtacctgagtgggttgtatgaggtatagacatagctccattttactttttatatctggctttgcaggccaatacatactatcagtaatattttaaatcagtctcagtaggaacataccttgcatacactctcatacatatagtataaagttcagttcagttcaacaaaatttattgaatagtaattgaggaattcaacatagcttatcagaactttatgagaccaggattctaatctcaatataaccaactagcttcaatacctagaaaaatatgttatttaactttgtgaaaaacttttgtcttttagaatacaataagatttaattagattattctaattaattactgaattagattattaaggttgtttctggttataaacactgcatattctatgtatccatgtactcacaaatgtaccagaaactgagaaggaatcaaactagtataaaatgtttcctacctttgagaaaattataatttgattgagtaataaatggtgtacctatttaactcagaattaattatcagaatgtttattatgttctaggcttggtacagtttgaaatgattagaataggcttacatttttagagagatattgccagtcaggatttttgaaacagccttgtaaagaagttgagatttaagatgaaatttgtagaatgaatggtgttaacctaagaatattgtgaaaatatacatcaggaaaatggtaagtttacagagaaaaattttaaaaaaattttacccatattatatgtattatatatactatatataatatgggttatatatatatatatatatatatataaagtttacaatagatacagagatggcaatggcaacccactccagtactcttgcctggaaaatcccatggacggaggg

SEQ ID NO: 55737 - DNA, 787 bp, Bovine  19866880924361
  misc_feature (1)..(1): n is a, c, g, or t
naacttctaattatctcatcacttagggctgccagatgaaatataagacaccacacatgtatacctgtggcggattcatgttgatgtatggcaaaaccaatacaatattgtaaagtaattaacctccaattaaaataaataaatttatatttaaaaaaagacacctagttaaacttgaatttcagaaaaaaatatcactttggttttttcttaatacaagtatattccaaatattgtctgaaatccaattttaatagagtatcatccagttttctttgctaactatggctgtcccccaaatctgctctacccacagaaccgaattggtgattactccatccttccacttgattaggccaaaaatcttggcatgatctctgattgcttcttttctgaccctacatccaatctagcaggaatgacagaatatattcaaagtctgattacttttgaccatcaatttactaccattctggtccaagtttgaagttaccatcatttctcactgaattattgcaatagtttcctaccagcctccctgattttatatcacctctctcccacttccaaataattctcaacatagcagccaaagcaacatttaaaatgtaagggttgatcatgtttcttttttttacaaaactctgtaatagctccccatttcatatagttcttataatggtccataagtctctacacgatctgacagctaccgagtaatgtgcataatctttcttaccttctactactcactggtttacttcatatgcttccgctatattcttgg

SEQ ID NO: 55738 - DNA, 1022 bp, Bovine  19866881029606
  misc_feature (1)..(1): n is a, c, g, or t
nagtctgttttaattactcaagttaaaagaattgagatgcataaagggtgatgaaggagaggaattagaggaacttttaaatattaaagtatagatttatgccaaatattagagaaagtatggaatatttaatggagaaacacactagtaaaaatggacatgattttgaaattacagtttggtgatatgtattagatgcttattctattctttcaagtgataaaaagaagtaagataaattttttaaaagcctgttaatacgattttgttagtaaaccttacatttgccttttgacagataattttaaggatctcctcacaaacacattctagttacctcaagatcacttatgatttgttgaagaggtaaaaataaaaaagaaatataaggttccctagaggtcatcctatttgaattacaacatatctcagtgttctgtattatccaagtattaataagatccaagttttttttaattatactgatacatgaaccatgaatagaatcaacccaaatatattaggcgaaaagtaacctgagctttaatatactgtaaattgaaaatacacttcaaatttgaaagccatctaaaacttgctaggatttaatgggtttgccatttaaatgaatcccatgtaccataagattcagatatcctgtgatttataacacagatttaaatgatcaggatgatttatcatcccctccccaaactctggaaatatttcaaatagatataattttaaaagaggtttttatcttctaatctcagtgtgacagagagtgttcataatgttttgatgatgaggtggagaaaaatcttaacttcaaaaaatgaattcaggaaatagtgtaattaagcaaaaacatatggggtgatataatattactggcagtcatcctagacatcaatttttgaagttaactaaaagtgaagaaagggaaaggagttctgctgtaacaagggaaaaaaaaaaatttttaagaatttagacacatgaaatttacagctctgagtaat

SEQ ID NO: 55739 - DNA, 1006 bp, Bovine  19866881104902
  misc_feature (1)..(1): n is a, c, g, or t
ntttagaattttcttttatgtggtacttaccaccaataaccataactgctattatgctattataatcaatatctattcacaggatatattgactgtagaaacaatttactgtccagttcctacataacattgtattgaatttcagaatatacacatattcatgcatatatagagtgaaatatatgtataattactttcaatttcacatcctaacagaggactgggatcagccacagttcaatctgtacacttgatacctggacaccagatgtctttagaatggaaatattttactcagtgatttctttaagagagagtttatgttaccttactctcaccttcaatatgaataagaagagattgagaacatcaaaggcggtgataactccttttgaaatgcagcacactttgttttaaaccctctgacaggcagccaatccttattaaaatcaagccttcaagatactgtgaagctgtccttctctctaggctgttttatcaaatttggttcaaaatagttctgaaacttttcatggatatagatgtaccctgtatgtggtacagtggtttgggtatggataagatgcacccggctttctgggaaataggccaagcactggcttaaggggaccactgtaaggacttttcttgcttggctccttgacaaataggatgcctgcttgatcaagacatggtgcaatattgttgctgccctttaacaaaatgaccatagaagacacaagacaaaagagacaggtagtggacgtgattagagggataatggagcctgcagatgaggtgagatggcaaatgagaacctcttagccagaaaggctaagggtaagttgggaattaaattaaatcctatttcatgaaaatgaccacagtaaaggccaccatatcctttccttctgagtacttggtgcttagaactataagttaaagtgccttatctttgattttggacagcctgggcttctggaaacctggctctgctgatcaccag

SEQ ID NO: 55740 - DNA, 2493 bp, Bovine  19866881187822
  misc_feature (1)..(1): n is a, c, g, or t
ntttaatatagatagacattgatataaacatcaacatatagatgcagatacagatgtagatatttgccttagcttagaaaaaagaaagtgaagttgctcagtcatgtccaactctctgcaaccccatgttctgtagcccaccaggctcctccatccatgggattttccaggcaagagtactggaatgggttgccatttccttctccagggtatctttccaaccctgggattgaacccagtactcctacattgcgggcagatgctttaccacctaagccaccagagaagggtccttgtgttgtaatattgaagtatgtcatgtatcatatgtatttcattgaaagaagttttttatctatgaataaatttttgtacataaatcttgagaaacttcttacttaaaaaaatttatgtatttgcctttgctgggtcttagctgtagtatgcaagttctttggtctctgttgctgcatatgaaatctttggctgtggcatgcaaacccttagttgtagcatgtgggatctagttccctgaccagtgatcaaatccaggccccgtgttttgggggtgcagagtcttagccactggaccaccagggatgtcccaagagacttctaactcttccctcatcctttgtcatgagctcagagcaacagagatgattatctgtttattttaaccctaatagccaaatggacattaaaaaaagtctagaaaatacacactgtaatttacagatttctgtttgatatataaaagaaaataagtaaatatgggcattggagtaataatcagaactagattcaattcataaccctactataattagctaggaaattttgggcaagtatccaaacttctctgagtctttatctctccatgtatgaaattaagagctttgtgcagaattgcctccaagtcctctcccatctttcaaatcctgtgataattttccttctgaggatgtgttgtgatgtaggtagaatggtcagaaagaatttatggttgcaaacccctcatgtttagataaagactgaatttttcaaaaatttattccaggtactcaattactggcttctatctctgctggacaattagtttcttgtaagtgagtgatacaaagttgactgtaatcaattattttcaggtttttctattgagtaaatcaacagtgtatctcatggagcttaacaaaattgaacttttaattcacaggattcataatcctctggggccggtgatttagctgtctgtcttcctgctattctaacattgagagaaagaaatcctgaattctctagaaactgggaaaactaaaggctacttgtaagacagcttacagaatttgacattatatcacatgttccctccatccctgtcagatatcttccaaaggaaaaaaatattttggggagaaatattcatatttaattgatgtttcatgtatcattgtcctgcaaaaacaataattactaaaattgagaattgagcaataactgaaattactatttataaggataacttgaaaactaaatcatgaacattttttgttgttattaatgtatattaatttaaactctttattttatagattaagccttacaagtaccctatgtatcctgaaatttttgatttatgattctcactttataggtgaaaaaactgaggcatgagtcaatcgcacaaaaagagatgataagtggcagacttagcacgcctgtgtgaacccagtgcctatagtccttactatgctatatactctagctctgcaaccttgttgcctacccctgctgctgctgctgctaagtcgcttcagtcgtgtcggactctgtgcgaccccatggacagcagcccactaggctcccccgtccctgggattctccaggcaagaacactggattgggttgagatatttaatttgagtaggttctctcggtctgttattatctgaatgcactggtaatattcatctcttgacatatggaggtcttgtctgatttctctctaggactatggtttttatatttcatttctgtgttcatgggaacaaaatgctgctttctccatcttagcctaagttttctgcctggcatttagcaggtttcaaagaaatgtgttgtgagcagaatgtttactttgtctgcatgtgcctacagagaactgatctaggtggggctgcctgcagggccagaggcatcagatgtgaagaaactctggagtgggtgtttgtgaagggaagaaccaggcagaagctttgttgatcagaacaaaatgaatcatatcattacacaaattcacagaacgtggggctggaagaggcctcgctaatcaattagttcagatttcacagtgtgtaggtgaaggagataagatacaaggtgtttaggaactaggaactgggcttctggatttcttccagccccccaacttctccattgtgacaccaaatccttaattacacgttcatatgcatctcttcagaaagaaatcca

SEQ ID NO: 55741 - DNA, 2042 bp, Bovine  19866881292141
  misc_feature (1)..(1): n is a, c, g, or t
natgagggagtgcaaacccaatagcctaaggatgaaaatagtccatgtaagaatactaagccaagagaattacagagaaaatagagcaagaattcccatgacattgttaacatctggatcaaatcataactgaactccatgcactgcagaccttttcaattgcatgtcagtaaattctctgtttttgcttaatctagttagatcttttagttttttccaatgtgaaacatcacagctgatacaagacaacagtttcacacgaaaactctaacatggttgaatttaaacttttgatctagaatgaatgcaacaaaaatctatttcaattatcctatctattcttctttcaaactgtagagttataccaaatgtatcaggaatttaccattccaaattcacaaattcatcttccaatattatttttcctttttttcattaagcaatctgcccttaactatttttaattttgttctgccttgaggcacatacctagtgattatttcataatattgttgtatgaaaacacctcttacatttttacaaataatagcttgagtgttttctacatgcaagcattctgctaaaagcttcacatgcattatttcaattataattcaccacaactttgtactatattaattctcatgctgcacatgagaatgtgaggttcaaagccgtgagtaaattgaccaaagccacagatctaagcggggacaggtctccagtcaaactggctcctgtgtctatgctgtcaaactttccatcttacagaatcattggccagtctaaataagaaacatgcacagtacctggaatacagcatttagcatttggcagctactaccaatggggctattgaatatgaatattcactggaaggactgatgcttaagctgaagttccgatactttggccacctgattagaagagccgagccttataaaagcccctgatgatgggaaagattgaaggcaaaaggacaagggggaaacagaggatgatgatggttagatagcaccaccgactcagtagacatgaatctgagcaaactccaggagatggtgaaggacagaggagcctgatatgctgtagtccatccaatcacaaagagtcagacatgacttagtgactgaacaacaagaacaaatgcggctatgctttgggagataaaatttgattctaaaatttctagtatatgaatctccccccaaagcaaaaagttcctctttatttaacaatacaaagtctctgatgactcagggcttccctggtggcacaagtggtagagaatctgcctgctgtgcaggagaaacaggttccatctctgggttgataagatgggaagatcctctggagaaggaaatggcaacccactccaatattcttgcctgggaaattccatggacagaggagcctggtaggctacagtccatggggtcgcaaagagtcagacacagcttagcaattaaacaacaacaacaatgctaatgactcatttagccctgaaatacccatcatctctttcaggtgagtatctgggcatttgtgccgggaagtctagagacaactttgatgccagttgtagggaaaagaaaggggacctctgggtgtcagaacccactggctgctccaacctatctgtgatgctcaaaacccttcatgtgtcctttctacaaacacctagacgtgttgtgcttcatcccggcccacactgaaaggcccggagccaccttacaatgaacagtagacagagaagaatgagactgaaagctttaatacagacagagcctctgtcccttcttggctgcagccagcagcagcagggttgggcctgaagtgatgggcgcggtgccggcaaagcactttggcacatgccgggatatgaaaggctctaatgagacccatttcacaattcactggccacgtgcattcagcaggcaaagatttcttctgaacgtccccacaatatatcctccggcccaggtctgcaacgggtcccccatcacccacgaaaccagatctctcactgtcccctcacgtct

SEQ ID NO: 55742 - DNA, 1615 bp, Bovine  19866881297014
  misc_feature (1)..(1): n is a, c, g, or t
natgctagattgattcaagcttcctaagtgtctttctccccttacccaactataaattccaggaggataagcttcccttgtctttttcattgaataaatttggtatgtaacattgtgcaagtttaagatattctacatgttacttgaatacttttacatattgtgatgtactgtgactggcagtgtagtgatatgtatcatcctgcatacaggtattgtacagtctcgtctatattcattgtgccatatattagatatctgtagcttatttactactcattacgaacagcatcaattttatccctcttttacaccccccagtaagaaacattttactctctgatttttacgggtttaacttttttagattccacatataagtgatatcatatagtacttgtctttctctggcttatctcacttagcataatgtgctgaaggttcatccatgttgttgcaaatggaagattaattctttaaattttatatctccattgcatagcataaagaacctgcacacagcaagtgctcagtagatatttagtaaatgaaacactaattgttagccatggtatccaagcaataagctcctagaagtctgagttttctatttcaaacttatgctctagcacaggaagcaatctacatagtgcgaaggattagatttaattatttttttaaattacatttcctaatacattttttatactttggcatcagtacacagccatttctcattctctctgtctctctcacacagaataagctcttatctgaccacaaacatatgtatttgcttgaagaacacggtacaaatggggcattgacctgaaatgttatatttacgaagcagtctgccatcctatgtctggtctgcattcactgataggtatgtgggatgtggcccacgaaaccacgtggcttattttggctatcacttactctatgagtacctttggaaattggctgtattaacagaagccgccaacatctcacattagaggttccagagggttcattgtgtgttgattgctttctctgtcgattcattttggtttgccagtaatgaaatcagtatgaaactatcacaaatataaaaagcaagacaaacagcccatcgcttctgactgaggaacagtcacgtgggcgttctttaccactgtagacccatgcacacgcatgttttctggcaggaaggagaaacataatgagaagacgtaaaatgttcttcactatgtgaacattgtgtgtgtaaattcataatctgataattcataaggcactacagccaaagcccttgtgtatatgtgggttttttttttgttgttgttattgttgttggatttgctatctgcttctttgtatataatacataagaaatattacttttcttctgaaataagtatgtatacatctgtgtttttcagacaaagagaagatggactgaagaaagcatggaaaaatgggtagggtggttgagagtgaatggaagtcaggtaactggacagtggatactggagtttcagagaaccatttgagcagagaacagcgtgtagacatagagctcagtggtctccatccacatcctggtaaatgtcaggatccccaaggcaaa

SEQ ID NO: 55743 - DNA, 1117 bp, Bovine  19866881335868
  misc_feature (1)..(1): n is a, c, g, or t
ntaatattagtaaattacctgcaatttacttgaacacataaccaacgatttgaaataagttgataattaatattttaagttgtactttgataaataccctcccaatgttttgatcttttctgacaattcctaatgctcttcagctgttgtaagtatagaatatatgatgcaattacactgagtttatgtttcttgagttaataaattggtctcaattgctaatggattctttatactgattgaatttgcatgttgaattggtttaaattgcctgaccatatttcaaggttaaatacaaatgtatgtggagctattaattttgtgttgctgttgttggtttgaatgatttaggtacttgaagctagagcaggaattaaattaatttgtgccttcaccttagcccagcctttctctttgtataatgtatctgtgacatttgtcttcattccgagagaaaatgaggaaaactcatcagaacaaatgaccagttctcattaaactgatgattttgagggggatttcctttgattccatgtaatgatacattaccttcccaaagaatgaatttagcaatgagaaatctaaatctgaatgtataccaacccaaatcaatcaaatcatcctaacaatttcaagggcaaaaagaagaacaatatcatattctgcagctgctgacaaagaaatcaacatgtctggtgcttgggtctcatgtgtgaggaacaaatatttccagcagatgctctgctttctcaaatccacatgagctggacatttacaactttgttctagaggctagaagaagtggaatagtttttacctttcagattataaaatgtaatcctatgcaaatgtcctttgagactagcccataagattctctcatagtctctccagagaagtgaaatttcagttgcaaaaacaaccttaatccttaaagcttctatgaaaacttaggcagaagacaggacaaataagcctttgcaaacaagccccaagggaatatatgtagcccacatctatcaaccacagtgtatcccctgtaacacacaaatttgtcttaggaagaagcagaccatattggattttcttcatctctctggggatagaacttcagaat

SEQ ID NO: 55744 - DNA, 1132 bp, Bovine  19866881461842
  misc_feature (1)..(1): n is a, c, g, or t
ntcaataaagtaaaaatagtattccccacttacagccatagtgaccgttatatgaaagaacacttgtaaagttcctaacaaagtaggtgacctggaagaaagtattcaaataatatgagtctcttatcacactgtactatgatcagctgcttatgttgtctgcttctcccaggagactaagtgctctttaagggcagggccacaggcatgaagatccagacctgtgcacacagcagatgccctgaagatgtcagttacatgaccattgaatgaacacagtacaccagcagcagagagaagacagaactctgaggtctcaccagataaaaccagaatataaagcctcagaatttgaagttcaagatgttataatgaaagataggaaagtctactttgatctttttggcttaacaatgttgataacacctgtcttgtgtgtgtgtctgtgtgtgtgtgtatttgcataaacataatagatagctgatagataggtagatagaaagataatagatatatcacagtctctcagtcaactgttatttggcacactttcaacaagaatgatgccttgaaaatgaactgtaactaattaagtagataattacacagaaaccattttcaattacctaatatcttaaaaaaaaaaaactattggagcagtaattaaagtaagaatgaattttatttctaaaatttgattgctaaaatctgactttgtatttatgatccaaataatataattatcaaatcagccaaggtattagttcttaaagattaaaaagctaaaaatcatgcattatgatacaaacctagtcacctatgcacatacatataggaaaattgaaagacatattttttattaaaaatatgacattgaataacctaatatgatggtttgctcggcaatttccactgttaacttagagtggaaatgaatcttttaaaaatcccctcataccccaacctttcaacctggagaccctaaagtcagagggagcatatgttggatagggattatccttgcagcatatccagaagtctagtctatgcaacatgcaccaagtcagcagaattaagggaatacataaagaacacatttactggggattatttcctttcagaataggcgagc

SEQ ID NO: 55745 - DNA, 2464 bp, Bovine  19866880392481
  misc_feature (1)..(1): n is a, c, g, or t
nctttttacaaattatgaaagcaaaacgtaaggtgctattcaaatcttaaaaggatccctgactgtagggatgaaccagatttggaaacaaacaacacaatgtgtttccacatcagcaaaatacaaacagttaagggaagtaagttatattttgcatcagaaacaaaattaagtaacattagacactagcatataaagctttttttgtcagaattgagtgggcaagaaatattgtagagttttaaatagttctctttttaccgtgaaattatggaagaaaaagaccatcactaaccttagaggtggagaaggcaatggcaccccactccagcactcttgcctggaaaatcccatggatggaggagcctggtgggccgcagtccatggggtcactaagagttggacatgactgagcgacttcactttcacttttcactttcatgcattggagaaggaaatggcaacccactccagtgttcttgcctggagaatcccagggacagggaagcctggtgggctgccgtctatggggttgcacagagtcggacatgactgaagcaacttagcagcagcagcagcaaccttagaggattgacagggatgttttcagatgctgacagtctcctcctttgtgctgtttaaataccacttatctctgttctcaataggcttaaatgcttcgtttctgatgcctatgactcatacttgtaaataataaatgtatgagacgcatattttgtgcatcatcatacactttcattttgaattaaacacttttttttttaacaaataaatctttatcctgagaacaatcatacaccaaaaccctagggaaagtcaatataacgtcaatatttttatgagcactgtccttaagaaatacaacattaaggaaaacagttactcttatcttctttctcctacttcccatatgtaggggaagaccttaccaagggatggcctcccattgggtcctaggaactccagcctgactcaaggggacaagtaggcagggactggagatggctgcaaatatggagaccttgaaggatttgccagtgagcggcaatccacatgtgagacgcctagagaaagaggagatggtagtcagcgaggaaaaaaggaaaatacagacatgggggaaaacaaggggaatggacacagatagagaactaaaatggtatgaaagccagcagacaggtaaacttcacctatctcaaaagaaaatcaggctgttgaaaagatccctgggctgtggagaagataaacgaaatagtttatttctaagagtactgaactgttaagtctgagctgagagatataatgtacggagaaaattacaaaaataagcctcttaggtagcctgttgctttgtgtttacaatgtacacactctactggactgcaagcaattaacttatctataggtataaacttgacctggggtttctcccacttttcatctgtggagtgtggtttaatcactcggacatctatgtttgcagatttggagaagtggatgttatcatcgaagcctggatgtgactgagtatttcttgtatagtttagcttcctagattcatttcagccatcctggaactccctgagtttcagattagtattgagcctccctgaaaagggaaataaatattgggtagaaagaagggaaaaagattcagaggggtggggatggagaatgggccatggaaagggatcaggtttgctaatacacttcagaaaggatgaatcttttctctaacaagaccctctgaacactgacccccaaaattccctgggtctgtgctatctcacacttttgtatatatacaatgggccttccccagtggctcagtggtaaagattctgcctgcaatgcaggagatgcaggtttgatccttggatcagggagatcccctgtagaaggaaatggctacccactccagtattcttgcctgggaaatcccatggacagaggagcctagtgggctacagtgatggagttgcaaagagtatgacatgactgagcatgtacgcatatacagaatataatcgctccctgcctgacaatggcttatctatgtgtctgtctccccatctagacagtgcatttcttaaaggcagagatggagtcttattcatgtttgtattcctagctcctagcaccaggcttggtgcatgactgctactcaatatctatttgttaaataaaggaatcattttccccttcgaaacattattatttatgaaactttttaaagcctacaaaataaggtggaatgcattgttttgtgctcaaaatcccttcagtctatatggaagtcaatggaaatttatgtgatctgattatttataatgtcaccaaacctccagaattggacacagactggagagtaaacccagttaaaagagacagagggacatacaagtactttgcacagtactttacacaattgtgtatttttaat

SEQ ID NO: 55746 - DNA, 2554 bp, Bovine  19866880584276
  misc_feature (1)..(1): n is a, c, g, or t
nctcctttgtgatatgtttaatatagttgctgtgtatgtgtgtttgcatgtgcacacacgcacacatacatgtataatcatctctggattgttagaggaactcaaaatgaaagtgctatgtgctaagttgcttcagttgtgtctgactctctgcaacgctatggacggtagcccaccaggcctcctctgtccatggcattcttaaggcaagaatacttggagtgggttgccatgccctcttctaggggatcttgccaacccagggatggaaccggtgtctcctgcattggcagccagattctttaccactagcaccacctggtctgggtaaaaatcaaccattctcataccttgtcactaataggaacaaattttcctccagtggaatgactctagaaggaggtaatttggataactacagattactcataggtgattgaaaaggttagtgaaggaaataaggaaataaaagagtagagggcttcccaagaggaccggtggtaaagaatccgcctgcaatgccagagacatgggtttaatccctggatcaggaagatcccctggagaaggaaatagcaacccacttcagtattcttgcctggcaaataccatgggcagaggagcctggcaggctgcagtccataggtcacggaagagttggtggtggcttagggactaaacaacaggtttttgcaatgggaaaaatgaaggtaggtgagccagacaatgtcctggggccagcctgggtacttgtgacactgagctgagacagttcgaggacccagagtcagaggacaggcaggagaaggaggcggaaaagagaaggattcctcagccacaaaatcagaaaggcaccaaacatctgaggtagtttctgtatttgaggctagattctgggtcaggggctggcagggagtgcttagcatgcatactatctgccaaacaaatttacaagcatctcttaaaactgtgggggaggaagaggaagatttttttaattttctactaagaaagtcaggggaaatgaaaatagttcacaacttgttattacgaattgaaagatgcaaacactgcctttgcttttggctttttttttttttttaacagcgctgccttattttatttctgtgatcacagaaatgtttgtaaatacttctctaatggccaaatttatcagcctttcgtgccttggagtgtgaagaagtgaaaaacagagcctgggctggcaggactcactgctttccaccgagggcttagagggatagcgagaggaaccctgaatcgcagacattgtcaggctccctgcaggatgcagtggcaccacaggtttgtcattgaatctggtcatctaactagtaaatggtgcagcccgcatttgaatgtgagtctttctcctcagctgcttttcactatgccagaggttctcagtcttgtgaatgcgtcagaaatctccgaatggtcatgtcaaaacacagagggctggacctcacccccagaatttcacttaaccatgctagtgcttctctgaagtgtagtccctggactcctatcatcaacatcatctttgaacttgttacaaatgcaaattattaggcctcactccagaccttgtaactggtgtggggcccagccgtctgtgttctgacaggccttctcagtggttctgatatattctcaagctttagaacctctgtactctactaccttgtcttccacaaatccccacccgcaccttttttttctaattatccccaacagaaataactctactgaagcaaaagttcttcccagtaaattaagtgatttatgtatttatgttttgctttcagtaggagaggaggctagaaaaaaaattaataggattcttttttgattactgtcaatttgtactgaaatttaaccagatactactgggttggaggtggaactaatctcatttgcaaactactctgtgcaagggcttaacctgcattttctaaattgatcttcactaccccactatgaggttttatggccttaattgtacagaagagaaaaactgaggtttagatgaagtaattgacttaaaggccacattcttattaagggggagaaatcagggttgttcaaacaaagatccctctaattccaaaactcatgatctctctacttcgtggcaggagcttgtggaaccaaattccactgtgggcttcaccaccccaactatgcaacattgagtaagcgatttaatctctatttcaatttctccatctctaaataatgttatcataaatctgcccctcccacactggaatgttagaacaaatgaggaaataaaagcataagtgctctgaacttttttgaagaaaagcaataagaagacaagttattgtagtgctaatatgtttagccaagtgttgctatgtgagcctgagcactgactctttcctggttatctcccgattcgtacataagaagttcaaagattgtagctgatgccacagaaaaagcattgacttcatatatcagtatctacggaggttaaagaggataacaaaggcgtatacgtatctct

SEQ ID NO: 55747 - DNA, 2137 bp, Bovine  19866880645619
  misc_feature (1)..(1): n is a, c, g, or t
ncctgcggcagagcacgaccgccgtgactccacggcctccatccagagctccgactttacagggcttcagcccagcaggcctgggcagcaggaggaccctgtggggtcaatcccgttctccttcgagaaaggcatgcctcctagggaccctcgttcccaggctgttccagccaaagctgagaaaaacagcctcaagtctgcctctgaggaggaccctcatgagaaggacaagtccccccaaaagtggaggctcccggactccagccacacctccctggcaggcctaagtctggatcccatgaaccctgagccacttcctttactggacccagaaacatcctcagagaccagtggaatcacgtttgccgcgggttctcgagtctctcctgatgtgctgtatttaatagaaaacctggacaccaaagaaacagatattgtagagttcaacaatgaacagacggaggagtctcccaagggaaggccagaacgttccaggacctggttctagcctagattcttacttccccaaaagttcaagcagtagttccagaacatacctgggggctggtcaattttttttgaaatgatcatattgtgtaagctacttaaaactttgaagggcattacaatactgacattacgggaagatcaaacacattcatgctatctaccacaaagtgactttcatggaagttacacagaccacagtgatgtaccttaaacaaataaggaatcatacaaattcatagactgttgtaaattataaattcatagattgttataaattataaattcatagattgttaagctgtgaaaaaggctttatagatcacagtccgatcccctagttttgccaaaagggagacgaatgattctctcttcccttcttttcccccctttcttcttttcttcagttataaagactgggagatggatcatataatgcttcaaaagccccttcctaatgctgatttccctgtgtaaggctttctaaccatctcactccgctttcataactatcttaatttcctaattcttaagtttcatcagcatcagaaagctccatctcccttcaattttcttttcaattttcaggactttattttcctctcatctgcctttatttcctcatccttttatcctctcttccccctagtctttctccctctccaattgactctattccctcccctgctttcaggttgtaaccttttctcagccgactctgttgcttacttcctgccatgattttcaaggaggttttggcaaagtttccaatggagcaattaataagtgtcagtaaatccagcctgacttcacccagcctcgcaggaaggggcgtgggaacttgctgtgtctccaccgtggccatctccttccataagcactcttaggtcctgaacactggaggagcaatgaggccatgaaagctgcataaccaaatgcttcagaagcaaatgacaaggtttgaaactgttccactcagactctttaagtaaaaatccccattatgtcacaacacgggaccagctactgtgtctggcaggttgtctgggatgaagtagggtattggagctgggaggttaagggagtccaggatcacaatgggaggggatgctgactaacttcctccaaggagttcttggtcttatctgctgggggctcccaactttgcccagaaggccatgtctaaagaatgctgctctatttctgtcatatgatgaagctcgactgcaagcttaagaaacaaaataatcctaattgctaccacttactgagtgttcacaacagcatgtaaagttcacagataatcctactaatcctcacaggaatcccatgaattgatatactattatctctatttttttttttttttttttttttttggaccttggctatggcagtcacatttattttttagttttttaacttatttatttttcaattaaatgataattgctttacaaaatttttttgttttctgtcaaacatcaacatgaatcagccataggttctattttttacctattttttacctattttaatctactttttaaaggagtctttcatttcttaatgttagttgttattggtattctcttattgaaataatataccttaaaccaatgcttatttg

SEQ ID NO: 55748 - DNA, 1374 bp, Bovine  19866880662313
  misc_feature (1)..(1): n is a, c, g, or t
nacttctgaccaatgaaataattgaaactggaattaatcttgaacagctggaaaatggaaaaaaatatatgaaacaacttgttctcagactttgtacaacaggcattgtgggactgtgacccctgagaaaagatggccctaagatggccctcagagaaggcaatggcacccgactccagtactcttgcctggaaaatcccatggatggaggagcctggtgggctgcagtccatggggtcgctgagtcggacacgattgagcgacttcactttcaattttcacttcccacttccatgcattggagaaggaaatggcaacccactccagtgttcttgcccggagaatcccagagacaggagagcctggtgggctgccgtctatggggtcgcacagagtcggacacgactgaagcggcgcagcagcagcagcaagatggccctgactttctgccctgagacacatgcctggccatcgagtagggaacccatataaaccacaatgattgtcttgaattgaggaggcaaaggtcggagttcaggatacctaaagctgatggaagctgtagggcagagttgcagggaggaggaagctacctagaaagaaagttccagaaatctgtttaggctcattttgaatctttgctgaatacagtgaaactccatagtttggtaaagaggtttaggagctgtgagctgaacagtttctgagcttacacaaggaaaactgctcaagttctgactagccagagaagagtgttctcgatgatcactaggaacatttaatagtgactagagaaaggccatgctttaggagtcttactaaactagtcctggaagaaaggctactttatatctgccctaaaaaggcttaaaagcaagcccccaaaggatcaagtaccctttactacctgtcagaataaaacacaaatctttaaggaaaagcaacaaaatctagacactcaacagtgtaaaatgcacaatatccagtaagatattactaaacatgccaagaagcagaaatatgtgacctataaccaggagaaaaattgctcaaaagaaacagacccaggaatgatagagatgcatagaattcacagacaagaatgttaaagcagctattatgtttgactatttaaatgaaaacatggtcagtgaggagaggaatggaggacattcaacaaaagagaaatgaagtttcaacaaagtggtagaaagggatatcagaccgaaaaaagggaagggatgaggagggcaagatgaagatagtgggcaaacacggattatttaagaagtctgatttcttaagtatgtatgtatgacaaagactgaaagggcagcaagacctgtcaaaggcttgggttgttggcttatttat

SEQ ID NO: 55749 - DNA, 1945 bp, Bovine  19866880666426
  misc_feature (1)..(1): n is a, c, g, or t
nttgaaagtgataaaccttcaaggaccagatttggtagagaaggtcaggagctcatttttggactattgaatttgagttgcctttcagatattctggcaactggatgtgtgagcttggcattcagtagaatttaaagggagttttattagtcaccatttttgatgtaataaaaaactccaaaatctagtggattacagcaacaaacatttatttcttgctcttgtgacatatgggtaacaggttgattacttttctgctcgaggctgtgggccagctatgtgtttttttcaagtctattctaattttgggcctaaactgaataaacagccactgttcaggacacgccatgctgctgctgctgctaagttgcgtcagtcgtgtctgactctgtgcgaccccatagacggcagcccaccaggctcccccgtccctgggattctccagtcaagaacactggagtgggttgccatttccttctccaatgcatgaaagtgaaaagtgaaagtgaagtcgctcagtcgtgtctgactcttttcgaccctatggactgcagcccaccaggctcctccgtccatggattttccaggcaagagtactggagtggggtgccattgccttcaggccatgagagggggctaaacaatgaaattcaatttgaagcttctctttgcatgtggcatctatcacttgattccattccattccattacccaaagaaagtcgcatggcccagccctgcatggggcaaagatgtatattgtgcacggaagaggcatttcaagacaaaataaaagggtagagatgtacagttctcatagaaagaaaatagttgtaaaccataattcaatctaccgcaaaatgagtacattgaagagaagaaatccaaagactgagatttttcagtgttcagaggttggaaaaataaagaaaaaccaacaaaggagactgataaggagcaaacagtgagggagagagaaaaccagattggaagtcaagtaaagaaattgtctcaagaagttaggagggattaattatgtctcgtgttgctagtaggtaagcaaggtgaggactgatattgacgattagatttagccgtgtggcaatcttcgatcatcttgacaagagaattaatgacatggtggggcaaaaacctgaccgatgtggattcaagagagtgagaggagagaggttagagataagagataatggctacaagcagactactgcctatagccatctcaaggactttggctaaaaggagaaggaaggaaacagaggaataactgaagggaaaagtgaggtcaatggtagtttcttaaaaattgttttaagatgggagaaataaaaccatggtttcataatgataggaaggatccaggaggcccaggggttaggactgcacttccaccgctggggtataggttcaatcccacaagttgtgtggcacagtcaaaaaagtaaaaggagggacttcccttgtagtccagtggctaagaccccacattgtcaatgcagggggcccagattctatacctggtcagggaactagatccaacatgcttccgctaagagttcacatgctgcaactaaagatgccacacaccacaaatgcgtgctgcaggaaagatccaagatcctgagtgcttcaactggcatagccaaataggtaatttcttaaaaaaggaaagatccagtagagagggaaaaactaacaatgccagaaagaaagcagaggattactgtactgaggctctggctaaaggggatgggctctagagcactggtcttctttagaagtatagacagtccagtgagagtaataggtgagaaggcaaagcgtacgggcacaagtgcaggccaatgaggagatatgatgatgggaacataggaaagttctctttttattgcttctatttttcagctaagtaagacacatatcatcgg

SEQ ID NO: 55750 - DNA, 1842 bp, Bovine  19866880707664
  misc_feature (1)..(1): n is a, c, g, or t
natcagtcaggttttcactccctataaaagatttttcttatattcctagctgtctccacaacagagaacatgcgtattaagtcgcttcagtggtgtctgacactttgcgaccccatggaatataatatagcccaccaggctcctccatccatgggcttctccaggcaagaatactggggttgccatttccttttccagtggaccttccagatccagggatcaaagccgcatctcttaaatctcctgcattgtcaggcatgttctttaccaccagtgctactggggaagtcccacaacagagagcatacatgtttaaaaagaaaaaggccctcatccacgccatttggcaacatttaggaaagtcacacatccagcaattctcttctaggagtcttacccagaggttgcagtaataatatcacaaaatatatggctttattctgttccttgaagcttggggtccatgtcttgattgtcttttagttatggactttgtttgttggagaaaagaaacaatactaaagatgtattcagtagtcagcactaacattaatggtgtatgtgtggaagaaatgatgttttgaaacgttgctgctttgacatactgtcaggttaaatatttcatcaattaacattaaataattcatagttttatttattctttcagtgactgtttactgagcacttagggcatggcagtcattgtcttagatgctcgagagatagcagtaaataagagaagaaaaatctgctctggagcttaggtttctgtagatgtgagggggaaatagacaagcttaataaataagcaattattatattattttcaaacattcaattttaggaattccctggctatccagtggttaggattcggcactttcactgccatgggcctaagttccatacctgggcaggaaactaagatcccttaagctgcaaggcaaggccaaaaaaaaaaaaaaggcccaaaagccaaatgtgcaacttcaggattccttttccacctcttccttttctcgttttcctgtcgaaagtggcatccttaggaattgcacgattgatgggtgaaagggattgaggactgaagacattgttgatttttatactcagtataaaaacagttaaacagtattaactgtttaattctggggccctcccacctcatcctcaacactgttaattttttttagaagcttggttaagaactcttgacagttccctgtagtcactaatatttagataattgtccttaaaaattttatatttttgttataatatgttcttaattactacatctttatttcagaaatgacctttaagaagtagatgcccagatgcaaaagtgatgaaacagtcaatttgtcataaagatgcagctgtggcttttcaaccagattagtaagtgtataaatttaaaattcttttttagctttatatgtactttgtctactttgaaaaacatttaacaaaaaatgtagttgacttaaaaaagtgtcaacttgtatttttgtttttcttttggattgcagtacaaattctagcatatagctctagaaaatgtattgtcttagctgtaccttttttaagagctatataaaggtaatataaaattttagttttgaggaaatataagaaaaagagtaactgtaatactgctgtccacatacagccactcttagaatttttaggtatttgtttccctgatctttgttctgcacattaaaaaaaaaacaacaacaacttatgaccgtagtgttgtaaagaatatgctttttgtatatattttaaaattaaatttgttaagatgtttcttcctgggaataaaaatacccttcagta

SEQ ID NO: 55751 - DNA, 1757 bp, Bovine  19866880829746
  misc_feature (1)..(1): n is a, c, g, or t
naacccctgaggtcagagctccaagtgcccgacaagacagtcaagatcacctcctcattttccagatgagaaaatagagccaagagatgatgaaatcaggaaattttgagcatttaagaacaaagagagacacaaaaataggacttaaatataaaaagaggattacaatggataaaatgaaaagagagacaagaaatgtgaggagctgtcccttaagcccatgtctagactagataatgtctcctttctctttgtcatgttgtagaaggtgtcaggcttcagagtgggccaccgccattcttttgaggtaggcctgggctcctaaagaaggttatttacccacaggataaagaataagtctgtttgaatatttatttgttggagttcattgcttttcatgacactgcctcatccttagcaggcaaagatagagtaagaacccaagaaaaatacttggagtgtggaattaatcaataattttcaattaactgtgattagattttgacagatagacttctgagtataataattctaaattccaaattctgagtataataatctatacctgaagagcttctttactggtctttcagcttcttgacttcttcttaatattcacagtcaccctgtagtaggtattactcttgctgggcagatattttaaagatgaaaatcttatcataccctttcactgttaataatctttcagtgattcctcattcttcgacaattgactcattaatccttccttggggaactgtgttataagcttaacctaatagaaaaaaggaggggcaatttggacaaggatgtacataatagctttactcatgatattaaaaacctggaaacaaaccaaaacccaacaataaatggcagggctaagcaaaccctgctgtatcaacacactggaatactctgtacctcctgtaaatgataagaatctggtctgtactgaggcaggaggtgtatctaaaggtgggaaatgtgaaataaacttttataccctgcttttgtctctgtaaaaatatacatgttcacactgacaaagactagacagtaataaaatatttggtattgtatgtgaattagattttctgtttaactatgacataaaatttttaatgggagaaataatgcccttggaattttctgctgggggcactcacataggatttttatcctatgaagaaaaaactagatgtggaacttaaaaacccaagacctcagtacagggagttccttagttgcccagtggttagtactctacactgctgaggatgtgggttcagtcattggttggagaactaggatccttaaagccatgtgacatggcccaaaaaaatagataaaaatttttaaaaataaattaaaaggagacaagaggaattagatggtttaaaaaaacagagacctcagtacaacaggttgggctaaggacacagtgagagttttatgttgggatgttagtggttgagtcaattcaagtcagaatggggtcaggacagacagcccacagcccatggggcttagtgtgctcacagatgcacatgcacgcttgggccatggtcacgtcaggtactgctgccatagcagctcaaagccactggggaagttacagagcagcaaaagaactgccctcctaaccaagagaaaaactggtcagacttgatcaagcagaacattagtctgtgatgtcaaactgaccttaagcacagtttccaagaggctccaggaacagttcaccaagttctctt

SEQ ID NO: 55752 - DNA, 1687 bp, Bovine  19866881060663
  misc_feature (1)..(1): n is a, c, g, or t
naaactccatactttggcccctgacgtgaagagctgactcatttgaaaagaccctgatgctaggaaagattgagggcaggaggagaaggggacaacagaggatgagatggtttgatggattcaccaactcgatggacttgggtttgggttgactccaggagttggtgatggaccgggaggtctggcgtgtttcagttcatggggttgcaaagtcagacacgactgagcaagtgaactgaataggcctcataaaggatagtttattctgcttggggtacagttgagtttgtataatcactctccctatgtatacttattttcaagtttatattgtcaaagtgaagggtattgactgggtttatatcacttaacaaaatgctgttgaaggttgaccttccttgtatccaatcaaaacacacagggctgattttggctcaggcaactacacaggtccagtattaatggtcaacacagcatggttggtttctcttacttgtataatggcatgagtcacagcaaccttgtgcagaaagactacctaccctcacaagaatatggtgagtatcatcagcacccctaggctttcaaactgaatattatcctttcaaaactgttgcttcatgggaactgggaacattacttcattagtaatacatgtgtttcaaatgtatttgaaagctttttagatgtcctgttttgaagtgtcagaatgatacaatgagtagtagactagtattccaaaaatatatagactagtattccaaagacctgggttgaagaccagcatatattagctctgtgactttacataaatctcatatttctaagtctccttttcctcgtttgtgaaaacaggtgaggaggtgagatgaattaatattctcctccagctcccatattttatgactcaaattactttcagagctttcatagtattgtgaacattcccagctgtatagcacatcttctctttgaatgtagatttggttttttggaacaggtaaaacttattagagccaggtcttttaatactatgtatgacaaaggtagatggtactctttttaaggcttggaattattatgcttgcctttatttctgtatattcatttgcaaatggcagaaaacacaatacaagttggcttaagcaaagagaaaattactggctcatatgactgaaaagttcagggtctccagcttcagtcacagcttgacctaggaagtgaaataatgtcatcaggacccactctcgcttttctcatctctcagttctgccttttccccattagttccattctcaggcatgttctccattgggtggcaagatcactgctggtagccccaggcttacatttaatggtctcagcaattctcagagagagattcacttttccccaaaatttcccaaaactctcagaattgactttttattagccctgcttgagtcatttgcttatcatgagctaatcacagagatcaagaagattctctgactggtaaagcctgggtcacatactcaccctgaaagtaggggtggggaattcagttttacatgggtcacttggactgaacatggtggaagggtactttcccaaataaaatcattgtgctgatctcaaataggtagaatgattctgaacttttgagaaggaggaggagagagggagggtgagagagagagagaggaca

SEQ ID NO: 55753 - DNA, 1936 bp, Bovine  19866881068248
  misc_feature (1)..(1): n is a, c, g, or t
naatctgattacttatgacactcaataccagagtaggaaaaaatatccagcgagatgaagttactcagatattcttacccttagcaattctgctgcgagaacagtaacagatgtagtgccatcaccaacttcatcatcttgaacccttgacatatctaccaggaaaaagctagttaataactcacttatatgtgattctgcttttgaaattattaatacttcttggtacctcatctaattctccaaacatactcactaccagtctaaatcttacttatctaggtgtcctcacctaacaaattctttggaactcttcagtctgaaatacagtagtttcaccgtcagtaagtacatcacactccaagactctatttaaaaaattttgcttaagtatagttgacttaaaatgttaatttttattatacaacaaagtgattcagttgtacacatattctttttcatattattttcagttacagcttatcacaggatacttaatacagttccctgggctatatattagggctttgttgtttatccattctatatacaatatagtttgcatctgctaatctcaaactcccaatccttccttctttcacctctcccttctctcctggcaaccacaagtttgtctgtgtatctaagtctgttcttatttcataaatatgttcatttctgtcataatccacaaataaatgatatcatatggtatttgtccttctctaacctacttcacatagtttgataagctctaggttcatccatgttgctgcaaatggcattatttcattcttttttatggttgagtaatattccatcatgtatatgtaccacatctaggagtttgtattttaataatgataattatcagtaaaaaagtagacatcgattaatcaaaaggacagtcagtcaacacagtctgtttaaaaactgtttccaaatgctaacaaatgccgtcctaagactcaccaactagaactttagcagctgggttgtccacaccaatgttttttaaaatagttgcaccatcattggttaccataagagatgcatctcgtccactgcttaacaatattttgtcctgaaaggaacatatttgcttcaggttaagacagaagtacatctggaatgatgcatggattaatcagtaacctcagattgctaatgtgtaaatactctgaagggttatatggcagactccaaactgtttcactgtatatacccgctcccaaagcaaaccttgatgtcctacccttctccagtcctagagacactagaagagcgagacattaacaaggctgtttgaatactgtaagagaaaaactaagtgtacctcacaatacaataataaatacaaatgataaaataagcaagatgcagaaaagtatttgacagagcagagggagtatatctagttatactgaaaaaaaaactaaaaaaacagaagctacagaaaaagtacacatcaatcctatctttgacgagacaaaacatcgtcatgaaaagaatatataaacaaatgtcttataattcataagatacctgtacatccacataaagacagccgttagatttatatccaaaggatataagtggttatcactggggaagggagtggtattggggatagtgatcagaaggagaccttagtcctaggggtacggtcttgattttcagtaaggagaatgtacctatgtctgaatttttataattaacagttaagttttaaatatgaaaaagcacccacaagtttttgtattcccaagggctctataacgacagtaaaatactaaaattccctgtttttcttaccatgcccttgggtcccaacgtgctctttaccaagtctccaatagcaatggcaccaataaaagaagacggaataaaaatcagagatgaccaaaataaacttcagtcttaaaatcgtaaaaca

SEQ ID NO: 55754 - DNA, 1626 bp, Bovine  19866881253827
  misc_feature (1)..(1): n is a, c, g, or t
ncagttctgcattttgttggctttttattttagacagtaactactcacttccttctaagaaaaatgaggattagtcatcttaatctctctaccgcctgcaaacgtttatacatatttcttcttctctattcttccttttataggatatcaggtttggggggggtaaattctttatttagtatttaaatttttatgactatgcaaatttttttgcagctgtgtcacaagattcactatgatcgtatttcttttcttatccaacttaatgttttctcaaataattatctgagtttgaaattttatgtactttgtgcctattcatttgcaattctctaacaaatataaactataatatggttggatacatcagataatcagataatctcttatttcctttttcttcttggagacaaccttctgcctatgtagaatacagaccttcaaataattctcctgtttttcagtaattgttttgtccagctttcagttttggcctatgttccaaagatcagagtctgtggtccaccctctccagcgatggtgagaagatcagttttggggtgaggccacttaaatgaactttcaaccagtcatctagtttccagccgcaccctgcatttttgtcttcatcatgattttaatacctgaatctctccagcatgagtcatcttgctgctgctttttttaaaaaaattgtggcaatgtggtaaaatatacataacaaaatttaccatttaagtgtatagttcagtggcattaagtgtattcaccttattgtgtaaccattaccactgtccctcatctctagagcttttatatcatccctaactgaaactcagtacctattaacccagaaatactcattaaccacacctaccccccccgcccctccccccctctagcccctggtgaccattattaaactttttgtgtttatcagcttgatgacttcttcctttcaggtttaggcttcacctgttttgttctagttagtttagttacctctctcccattgccacatttctagcatccagaatattgttgacttctcttattttctattgtgtccttccccattctcatatccttatgaattttatgtttctaaaatgtcctttaactttttaagatgaggtttcaggaaagagtcaaggccagtcgtgcttaactgaaggtctgctccccccacaccgatttcttattattagttttaaaatttaggtttttctaaaattaggaatttaaatacaaatatgttaaataaaggcagttttgtagctatgttggctataaaattaagcttgatagataggctccttcttattgatggttcccatagttgacaggggtttgatcacttgtacctattgcaatcccatactctcctccagccaacataagatggttcttttgtgctgagacatgttctctgctactgcagcagttttcatagcagtgagaacctgacccttctgtggggagtgattttgggagacagactattacctacaaattcccttagaagtctgttactcaaggtgtagttgaggtatttcctcctctctacaacttctctgaatgccctaggcagaactaattactccttctatgccttgacacttgtga

SEQ ID NO: 55755 - DNA, 1229 bp, Bovine  19866881555299
  misc_feature (1)..(1): n is a, c, g, or t
nagaagccacaaaggcagcaagacaggctctattgaattctgcagtcgaccatgggttggtataccacagtactactgtattaaacatttaatattcttttcaaaatatacttagttcaggaagtctagagagcagtggaaagcacacagggacatggttctgttacctcatcctgcctcaacagcaaccagaaaagccccacattacctgccagaggtagtccctaagttaaaatttggggttctggctttttgcatatataatcacaataaagtagtattatatagaagattttttagcctctttaacctagttgaatagcaagcacaatttttaggtgttggtgtactttattaattttagtagaggtatatgcatttgattatgttactgctgtaattcacttatctgtaattggagattttgagttttgacaattttttattttataatgttgtgacaaagtcgttacttaaaaaagtagtataatttctgggtcctttgtttaccttacaagtagttctctagaaaaagatcgttaatttacagatccactggctgtgtaactgtctcctttccccgtgttcttgaaatttttgtttgcttgtgtctctgcttcggtagcttgccagcttggtggggaaaatagtattagtttgtttgtatttcttgattactgataaggtttaatttttttctatgactaaagaaccctgactggttgaggtaacagtatctattggcaaacactatttggataagttttggaaacgtaaagcaaagttgataactttggagaagcattttaagacctgacgtgaatttttttgcttggtttttttttggtttgtattttagttccgatgaagttaagttccgtcaagatttaatgaacattgcaggaacaacactatcctcaaaacttcttactcatcataaagaccactttactaagttagctgtggaagctgttctcagactaaaaggctctggtaacctggaggcaattcatgtcatcaaaaagctaggaggaagtctggcagattcctatttagatgaaggtatgtatatattgtatatgggaaaagacgtgttgactagatgttgaaagctaaatactgagtgaatccttatttatttagtcaggactagtgacactttacaaagcgagaaaacttgactttaagggaacaaatcatgttgcaatgatttttgtcatcttaatcca

SEQ ID NO: 55756 - DNA, 1062 bp, Bovine  19866881585322
  misc_feature (1)..(1): n is a, c, g, or t
nattcttcttgaacccgaaggagtcaatttgtcttaggaccacaccagttcaaagcaattaatggaaaaagagaaactggaacaacttggaagagatcaaatcagtggaagtggtgcaaataacacagaatgggacactggctatgacagtgatgagcgaagagatgcgccctctgttaacaaactggtgtatgaaaatctaaatggcctatctctccccagtgcctcagggttcaggagaggtcgtctgccgtccaccagtacctcagatacccagaatatcaacaactcagctcagagaagaactgcattgttaaactacgaaaatctaccatctttgcctcctgtttgggaagcccgcaagctaagtagggatgaagatgacaacttaggaccaaagaccccatctctgaatggctaccataataatctagatccaatgcataactatgtaaatacagagaatgtaacagtgccggcgagtgctcacaaaatagagtattcaaggcgtcgggactgtacgccgacagtctttaactttgatatcagacgcccaagtttagaacacaggcagctcaattacatacaggttgacttggaaggtggcagtgactctgacaaccctcagactccaaaaacgcctaccactccccttccacagacccctaccaggcgcacagagctgtatgctgtgatagacatcgagagaactgctgctatgtccaatttgcagaaagcactgccgcgagatgatggtacatctaggaaaactagacacaatagtactgatctgccgatgtgagccctggaaagcatttacattatttgcacctttgtgaagttttttttttaaaaaatgaagacgcaagtgcttcatttttatttctgaacactaactccttttgtagactgatagaaaaaattttttctgaatatttcatgtgcttctttaaagggaattaatgtagagcaggtactcataaaagaacactaatttcattatatactactcattactgtacagcagcattcccattttcacagtgcctatttaaaatgaga

SEQ ID NO: 55757 - DNA, 2003 bp, Bovine  19866881601012
  misc_feature (1)..(1): n is a, c, g, or t
ntgtggacatgtctattccctttactatttaaatgatctacatcttgagttgtacccaaataggctttgcagtgccactaggtgacaacaggtttggaaccccagcctaagaactaactactagtttgaatgaccaagaagataaaagttcttgagagtctggcaaatactcaaaatttcatttcactctgaaacctaatccttgacccatgatatgttcactttgaaaatggaggtggtgatatgagactaagaaataaaacctcttatcataaagtctcaagaaacgtgtaaagtataaatacagtgaaactttaaacaggtagccaaccaaacttttattggggttttattgcaatctactttcggcaataaggggaaagtaatcataagaactctgatcagattttattaaacaaagcagtttttcatgaatgcttaatgttagttgtatagtcaagctcagcttccagtatcaacttgagtaccttgtcatgggaatttatgccagaatgacaacagtaaggcattgcaagatcctaaatcatctaagatgaaaccatattttacatataatttttaggacagtatactaatactctacaataaataaggatttaaaaaatgtgttgcttagcccttgttgaactaaattcagttattagctcattctttacgtactccagttaataaaggcttgattgtacttccagaactctgactttcccaaagataaaaaattagttaaagacaaaaattaagcttaaaagcaacattcacacttgtctttaaaagcatgttcacatcatatacgagataatttcctcatgcctggaaacatggtttatgtggcagaaagtcatatacaaagcataactagagggcaatcctcccatctccatatcctccaaaaagccacacttggcctcagtgtaaaagttatattttattgccatgctacaaaatgtatgaagttggcactgacagggagaaatagagaacaagggtggggagggcaaaagatgttgttacatatacaacaaggtttaatcaacagtggtaaattttgccaatattaaaaatgcaaaccaaaatttaaaatgctgatatgaaacagcattaaaataccatttatgcatagtacagtatcacttatgtcttattagagaaatatggaatgtttagaaatgaaattaaccgtaaggggtaaaattcatatttcatgtacaatttggcaatggtagtcccactgttagacaatttttttataaaatacaaaatcaaaaatctaataagctacctttatacaaagttgctatatttatgcctttacgtaggaaaaaaacatttataatgcaaattaggacatacaataatcttacaatattatacaatgtaatgaaaataaaaacataacccaaaatttgtcctttataaaatgtatattttgcatttactaatgcaaatgtggcacactggtgactactgtactattaataccagtccgtttccatgctgttattatccaattgtcatagaattgcaattgtaatgatgctacaaaagactttttataccaaaaaaacgaggaagtagggatggggaagagggatgtaaagaagagcaaagacagggtgctggtttgggcagagtatattatggtatggtcataaaatatttgttagtttttcaagccaaaaacattttctatacattctgtgatttcgtaccaatgcctttattcaaatttggcaaacatcagggaaaaggtaatttagtaccatatacctcacatatcagagataagaaaaagatgccaatacattagttacttctgaatgttgtctctgatggtatgtctgtttcaaggagatatacatatatatatatgtatatgtgaatatacatatatatttatacacacacactatacattgcacaaacacttggacattatgggttaggaacagcacaaggggaaatgggcatgtattttttagcct

SEQ ID NO: 55758 - DNA, 888 bp, Bovine  19866881623640
  misc_feature (1)..(1): n is a, c, g, or t
ntgccttcctcgctctcttccgggtgaacagtaaattgaagttctaagatctatgctcttacatcctgggcgattattgcaagcaccctgtgtactgttccagtccacccttatattttatagggattattccatacagcagagtaagctttttaaaatacaaataacataatgtcattctctttcttaaaaggccataaggcttcataatggatttagaataaaatccagaatttgtactcatattttatttgattattagaatgtcttcagagtgtaagctccttaagagttatcagcacctggaacggtagctgaggaagagatgttatgaataagtgtttgatgaataaatgttatatgaataaaggggaattaaatatctagagtttcatatgctgctgctgctaaatcgctttagtcgtgtcctactctgtgcgaccccatggacggcagcccaccaggttcccccgtccctgggattctccaggcaagaacactggagtgggttgccatttcctccaaagcatgaaagtgaaaagtgaaagtgaagtccctcagtcgtgtccgactcttagtgaccccatggactgcagcctaccaggctcctccgtccgtgggattttccaggcgacagtactcaagtggggtgccattgccttctccgagagtttcatatatttggtactaaaaaattaagatcttatgaaaggataaacccaacctttttcaattgctctgcacaaaatcaagatttaatatcgatttgtgagtatttttattggaagctctaaggcttctcagctgttactcctataaactacagcattactgatgtgttaatatttttgcttgtttctcctgtatgtctttgctgtgcatagtaat

SEQ ID NO: 55759 - DNA, 1478 bp, Bovine  19866881774603
  misc_feature (1)..(1): n is a, c, g, or t
natggatgattgagataacagtaagggatactctttagtaaggtaggctcctgtcttggatcatgcggttatttgtctcacatcactgtgaacatgcagttttaagaaagctccaagaagaacggcttaaagacttgcccttatacagatgctcctgctgacgctgggagcaacagtgacctggccatcccattccagtgttgcactgacgtctactgagtgacaagatgctaaaactgggtgcattttatgagacatggaggaaaaaattggaacagcataatattggtaacctgaaagggcaaagtgagtggacaaagacaacgtcattcctccgtgttaatgaataaaagatggacgattgagatgattaactggctaaatgtggtgggatggcatcggattaccaccttgtactgttattctaaagccgtggcagtgcgcttggctaccagatagccttctggcccagcctccagcctgcacagctcagattctgttacactgacttgagaaacgccaggttcatgcttcagcagccttggtgacactacttggtgcatttcattaggtcagatctccagtcatactccaggaacccatttagttacagaggacatgggagcagtggatccctaagattgccatgctggacgtgctctgggaaccgaggtgtgcctgacaacgtctctttataagacaggcctctgtcctccatgtgggagcttgactttttatttgggatttgttttccttaaagtgaaaatgttagtcacgcagtcatatctgactgtttgccaccccatggactgtagccccccaggctccactgtccgtgggatttcccaggcaagaattctggagtgggtttccattcccttctccaggggatcttcctgagcaaaggattgaactcagggcctcctgcattgctggcagattctttaccatctgagccaccagggaagcctatcttctttaactacttctttttttccccttaactatttccaagccacacaaccttgtaagaatgacaaaattttctaggaaaaaatgttaatattattacttcaaaacttcatgaaccctatagaaaaacctttctaattatgcactgatgtagtggatgtatatactcaactgaggtaaaggattaaggccttgggtcatacactggagaaaaccaaatcagttgcaaagagtaaatgccagaaaggtctgtgttcttgctgctgttctactgattatcccgctgacattgggcaggattacccatgaggtcctattgcaccttcctgcctctgagactgtggtatggacacatgagatttatccacatccctaactgaatgcattgagcatctaccacaaacacatttgttgccttaaactctatatcacagtaatctaaaaggaggaagaagacatgcttataaatagctaaattggggacaaatcacattaaaaaatattta

SEQ ID NO: 55760 - DNA, 1724 bp, Bovine  19866881956809
  misc_feature (1)..(1): n is a, c, g, or t
nggtatttatatttctttcaaaaaacattagtcttgttttttggtgcaaattctcatcctggattgaaagctaaaggactcatctgtcaagttcccagagagtggtttggcaattatatcaactacaagcaggtcctcttaggtcgatagacacctgaggctatttattttattggtgaaagcttggtgtgagagcatttttggtccagttcacgaaaacagcagtgttctaaccagcagctccaataaatcttacacattcttgagcccataagtcctggcctcctgcctctctacacatccattcatccaactaagaagaacctcttgttggagcacacaggggcacttgattagtatgagctatgggaaggagcacaatcttctttcctttctgccctggggataagactttagagcaaccaactttttactcaggacacacagactgtgatgagaaagactttatgcctctctccacatataccagatggtttatggcccactgtccagaaacagataaagttaacacacagagcccttcactgatatcatcttattccaaggcaagttgtgtttacttctgggactggcagttactacatggccatcagagtctatatagaaatagtaggctgagagatggttcattcaaaatgatgtgtttcctaaaataattttctgattccaatcttcctatgcctcttgctcatcatttgccccaataaatacactagcagtttcttatagctgagactatggcttatcaatttggctacaaagtatagtagttaagggcgtgaactctgaaaccagtctgtgtgggtcaagtcctagcattagtaccagccgtatgggcctgggaaacttatttaacctctttgtgcttttattttctggactattaaatactaatacagcctgaaattgttgtaaggataaaatgtgttgaaatatgcaaatcacttagtacaataccagatacataggaagtataattgacatacatatatgtgtgtgtgtaatacacataaaatatatctataaatatatgtataatataaatatatatttttaaatgtgtatatatgtatatgtacatatacatgtgtgtatagtaatttataatttagaagcactttgtgacttggcaaggtgacagaaattatcctagattgtctttcagtgtaacttttgcattggaatcaagaatgaaccagctgtttggtaaaaagactctaacaaaactgtaaggagaaaaatcagtgactctgtgtgtacacttcgagaacacatttttgccttccagcaggacggggccagtcccatgaaacaagctctccagcagacattctggaagggagacctcagggaactggggattttgtgtgacatcaccaaggagtgaaggaggagaagcagtggcaaagtttgggacacatttttaatttgcacccccttcctccaaaatgaatattaaatcttcacgatcatcatattcattcttgagtactgtaagcttagtgtttactcccatccatatgttgaagccctaagctcccagtttgattatacttggagatagggcttttaggagataattaaggttaaatgaggtcatagggttgggggtcctaatctgacagaatttggtggtcttataagaagagggcttcccaggtggctcagtggtaaagaatccacctgccaatgcaggaaatgca

SEQ ID NO: 55761 - DNA, 1708 bp, Bovine  19866880518651
  misc_feature (1)..(1): n is a, c, g, or t
ntttgttgatgcagacacagtagtatatacttgataagatagactgaatctggactctctgcccaggtcaaagtcatactaatttgtttttccatctgcagactcaatttatacttcatttaggaatttcggtgctctcaatctaccactgaaagcaattaagaggatgaaattatttttaaagaccctagcagagagcggggggctcttccaggggattttctctgaactgttggaagactaaacttgcagaatgtgttagggaaatcagagaaggtcctctcacgtcccttgggaaatatttttcatctttaagtgtcctctttttaatagtattcccatcattcacatttccagctgagagaagtggttctgaaaaaagcctttttcttagacactatgctttccttctactttctcccttctaccccccaccccttttttagcagtaatgccctggtagatagggaagtaaggtctgttatttaaagaatgcagagatttgagcaaacccttccagaacctgattgttgatagagtcttaaagacttcaaaatccacatagagataccctcttttccagatattgggatacttcctgtctctcctaggcaagaggttgagaaagtcaaagtgtatgtgttttgtctgttggtacctcacaaaaggccattacttggtactggcatgtttccccttaagttagaaaaacaggactactttaagaaaataaactttaaacgttttgttacagtaaagcacataagagccttaattgttgactggcagcatttcagctttgtcttccctttgaaattttctccccctgaactgcagccagtgcactatgaagagaagaactggtgtcaggagcagtactccggaggctgctacactgcctacttccccccggggatcatgactcaatacggaaggtactacccaaacactgtaccaatggatacaagacgtgtgccaagcttaaagctagataagccaagctcagtggggattttagaaacaggaatcagcattcctatatgtaatgtcccagatagtttgtattctctaggtgtccataggaaaagaagtatgtccatatgtagaacagtgcctggcagcacatagaacaattgcagagcactggtgaggaattcaggagtcactggtacacgtgagaatcctgcaagctgcagtgtcctccaaggagccttcttgagctcaactaaacatttagtcttgcacgactaccctaggctcctgggcaccaatctacagaaaaggacatgggctaaagatgtcttgccagcagagcagcatcagacatcatggggaagcatctcactgtgtacggctaaggtgtgagcagttgacgtgcgcacaagatgggaaaattcaccttagcttagaaaccccttagctcacaggagcctttgtgtcttaaaacagcctcataggcagtatctaggatctccacaaaggatatgcccagttacaagaggcagcatgctcaagaaagcccaaacatttcccagatatttagactctttccagatatttgcaatttatgagttttcccagcctagatacaagttaccagtgaggggggtgggaggacaaccatttttaccataagcagcagttgcctggtaacatatatggcctcatgccttcatcaggtttctagagaaacagacctaaaatgtta

SEQ ID NO: 55762 - DNA, 1312 bp, Bovine  19866880671939
  misc_feature (1)..(1): n is a, c, g, or t
nctacaaaagaaagtgcatgaaacccagaagttttaaaatagccaaaaagaaaaataggaataacttaatccatgggctctaaggaaattacaggtttaatcttgctgaagatattagactacagcaaattgaaaaaaaaaattgctaagcatgatcttaatattaatccattgtaattaaataattagctctatcagacaaatttttcttctactcaacccaaattccagattttcttattcttttctttccctggaatggtgtgagaaagcaactttttgtataattaattctttaataattattttaatatattctgcatttctagcctcatcattttaaatgttaaaagaaaactgaagcaaacgaattgggagaaagtcctgtaggaactaaaagtaataaaatgtgaatatttctattcaaaaaagaaaggccccagagtgaaaataatcacatagcaccaacactgtagtcaaattgttcttttcagatgggagattggttctaatttatccttttggcctaagtttgactttgaagcaacccagaaaccaagaatgaataagtgcaacactagttttataatgcactttagaatttataaatcatttttgcatttttttcccatttgatcagcaagctaactctctgagagagatggtgtgggaattttggttctcttctggcagataaaggccttcttttctcaggaaatgttggcaaaatggttgagatagaactaacaggacattcaattgttccctgcattaggattctccagagaaacagaaccaataggaaataagagatacacctgtaactattgatacatagataaaaggagattgattataaagaattgacttgagattatggaggctgataaggccaaagagctacagttggtaagctggagacccaggagggctgatggcatagttcacttcaattcagttgtcattcagtcgtgtccaactctttgtgaccccatggactgcagcacaccaagcctccctgtccatcaccaactcctggagtttatgcaaactcatgtccattgagtcagtgatgccatccaaccatctcatcctctgttgtccccttcttctcctgccttaaatctttcccagcatcagggtcttttcaaatgagtcagtttttgcacatcaggtggccaaagtattggagattcagcttcaacatcagtccttccaatgaacattcaggactgatttcctttaggatggactggttggctctccttgcagttccaagggactcccaagagtcttctccaacatcacagtt

SEQ ID NO: 55763 - DNA, 3272 bp, Bovine  19866880792775
  misc_feature (1)..(1): n is a, c, g, or t
natagtacaggccaggagatgctgcttattgagttgcttgtgcatacttattgagaacttgtgttcttattgccactgatacttatttccttactgatgtcagaaaaaaaaatgtagaaagtgaaaaagatgaaaaagagttagagatggggattctgataagaacgtgtctgtacaaatctgagccaaagccgtgaaccatgtcagggaatcacagtttgcccatcaaatgtctgtccttttcttctctggacccactatccacccttttccactctcctgtttgcacagggcagtctagatcccatgctgtacagtttccacttgcatttcactaatagggaaccccaaaaagagatgaaaaagggaaggggagggaaattaggttattttccccttgttgccttctgcagaggttccctcagtctggctgtgtccctctaccaaagatcagactcaggctaagctggctctcctctctccatcttggttctggaaacactttcctcttgctgcgtcaggcttaggcctgctaatagccattgcacacccgggagtactgcctactgtctcgtggttctcccatacctgcccacagctctgtaagtattccctaaatttggctgttcttgaatcagccttatttgagtgcatcacaggcttcctgaccagcacacccagaaaatcagagccccaagaaggcaatcatcatgcagctttctttccacttcattttatgaatgatggaaatgaggccagagagaagtcagcttttcctaagaatgtaatctaatggtaatgactggtctaaaatctagacatgccgattgctactctttctagttctcacttcccatttgctttgaaataatataaatactatttttttttttccagttttcaaatgtaagacctgttgcttctctgccttttggctaagatcaagtgtagtatccaaatgtaagccttttaaaactgaggcaatgaacattccagcattctgcttttaaacttgtggaaataaatgaagaccactcaaatgagaacaaaggctgtttattcagagattgctgtagcaagggagtcagccaccatgacttctgtttggcagagattcagtgcaggcaggggtgtgggaaagctttataatggaaagaagttttaggtgtgttctgattgggggttgttggcaaagtggagctggagacaggagctaaatagacataagacatccaagattgatttgaaagcatatctggcttcctcttcttggttctgagttggaagcagaggcaaaaaaaatatagggaagctggtagtcactaagtcctgactatttggggtgataactacagagtttgtagatcagagttgtgttgccacatgtgaggagaaggaaatggcaagccactccagtattcttgcctagagaataccatggacagaggagcctggtgggctgctgtccatagggtctcacagagtctgacatgactgaagtgacttagcaggcatgcatgcattggagaaggaaatggcaacccactccagtattcttgcctggagaatcccagggacagaggagcctagtgggctgccatctatggggtcgcacagagtcagacacgattgaagagacttaggagcagcagtagcagcagacacatgtgaccagccattatcagttgtatggtcaggctcttaagcttgaaagcacttcatttgctctgcagcagtttttgctcatcatctgaatgaattttggcctctgagtagattaactatagagttctcagggtatataggaggagaaagtgtggccaaatggtggaagaaagaggcagatttggcatactttggaacaattctgttgacagtctgctagactggaacaaataggaactatgcttgcagtatttggggtcacacacatttatgccttaaaggtacatttttggcacagctgactttatgtagaagctttgtcaattattaatgtaattaggttgcatctttgcccattcttttattatatgggtggcagcaacatttctggtgagagccagcagagagagctttattctcctctgagaatctggagttggcatggcagccgcatgtgagtcaagtgttgagtgtagatgaaatcctaaattccttattctagtatagtttcctgacacttactcactacagctgatatggacttcaaccacacacttgaaaaaggccctgagcccacctcatcctcacccagattagcatacagaaatgcagctctcaaagatgtggtagcctggtggctaccattctcatgccttcatgactcttgctctacaggttttcacttgtgttgttgaatcgcttctttcacaaaatcttatatatttgcatgagattggctgcacagtgaagctatagagtcagcttcccccttaggttcactcctgttgcactgaagtccccacaggaactccactttgtttcatagacattttaagagaaatttcagacaggataagtcaaacaagaagtttcatttgggagataaggtggagggaagaggaacttctgaaggatattacagagattgggagcaaaaggagctgacacgtctctctcctgatacctatttggccttctggctgagattgcagggactagtcatacctctctaattagagttaccagcttttagaatgccagaggtagaaatcttccttgggacttaatattccatgtgaatttttgatttagcacagggctgactgtagccactcttgtccagcagttggcagaagtagagattctaagctgtcaaactggagtgatttcattccattcaatggtctgtgggctactaagggcaaaaaccgagtcttatttttacatacctagggactacctggggtttcccgggtggcccagggaaagaatccacctgccattgcaggagacacaagagacgaggtttgatgcctggatcagaaagatctcctggagtgggaaatgacaatctgctccagtattcttgcctgaaaaattccatggatggaggagcctgaagggctacagtccacagggttgcaaagagttggacgtgactaagcacaacacaacagcagagggactgcctaattcatcaacacgtaaagggttacctgttacggctgtgcttttttttttttaatgttaaaatgttgatgcatagtattgtctttcccttggaaataaagacttttcttttttcctcaactcatttccacatgtaa

SEQ ID NO: 55764 - DNA, 1182 bp, Bovine  19866880862480
  misc_feature (1)..(1): n is a, c, g, or t
ngtgtaaatgtttttacactggtctcttccgcaggaactcatccagccggagtgttagggccttttaaaggatgctttggaacttggctaaggttttggcttccccgtgggtaactgggcttcccaggtggcactagtagtaaagaacccgcctgccaatgcaggagacataagagatgtacgtttgatccctgggtcctgaagatctcctggaggagggcatggcaatccactctagtattcttgcctggagaatcccatggacagaggagcctggcgggctacagtccatagagtcacaaaaagtctgacatgatggaaacaacttagcacccacgcacctgaagtaaccacttcttttctctccccagatggtactcctggcccggtgtgagggacactgcagccaggcgtcacggtctgagcccttggtctccttcagcactgtcctcaagcagcccttccgctcctcctgtcactgctgccggccccagacgtccaagctgaaggcactgcggctgcgctgctcagggggcatgcgactcacggccacctaccggtacatcctctcctgtcactgtgaggagtgcagctcctgaggcctgctattgagtggcttctggatgggacagacccctcccccttgctgaggcagttcaaccagccagggaaggactggcaagggaagagttaaggcaaaagaaaaaaaaaaaaaaatatatatatatatgtatgtatgtatgtatgtatgtatgtagcaattcccacgggattctgcatattctagtaataaagagtctacatgcttgttgacagagatactctgggaacttgttttccattcccatctcctttccttggtaccatttcttttggttccttttcagattcgggcatttccccctttagtgctgaatgccatctgggctccaaccattcagcattagtgggaaaagtgggctcccaggcaagagtggatcaggctgtcacagttttagtattgatgacggaagcatttgctttggaaagcaggaaagctgaattctttctgggacatcctctggctttttttttttttaagtcttgtgactgggtctaaggttgcccttgctgctaaatattaccaatttcaaattccgggcaccaagcataggatatgttagccaggttcattcacagcca

SEQ ID NO: 55765 - DNA, 2107 bp, Bovine  19866881108267
  misc_feature (1)..(1): n is a, c, g, or t
nggcccagttgagaagagagtttcagaggagcctgtttggtcaaggagagaatctttgccaccataaatctggcgggaacacttacatgcagcttaacttgctagaggctgagtgtggacaatgtaggggtagaaactcctggggcccctgcagtctcaggggagccccaaactttcatgggctttactcctcgaaccccagcaaatacacctggaaggcactggagttttgagcagaggagtcacccacactgggattatctctgcaaccagcaagctccaaagaaggtaaagcagacccctggtgatctaaagcgaagtcactcagtcacgtccaactctttgcaaccccatggactgtagcctacaaggctcccccatccatgggattttccaggcgagaatactggagtgggttgtcattttcttctccacctggtgatcgaacagaactggaaagaacttcctcaccaatactgaaaaacgtctgacttcctgtcttgcctgaaattctgccattaatttcctctctgggtccaaaagatttatctgagacccatcgccaaacgtaaggaccaccactgagcagcgccttgactgctgagcttacagattggggtggggatgtcagagggagctgagcacaggggtctgggaaggattttctggggtgaagactcggggacagagagtaggagagcaggagccaaggaaaagggagggacacacttggcaaccaccttctttctgatttattcccctgaagataaacaagatccagccctgccctctaggagcgcacagtctgagggaggaggcaacactgagaacagaggctcgcatgcggtaagagctgggcaatggaagagcacagagaagaggaagcggccagcctgggacaaggggtagtcagagatgctctcctgaggcggggacactggagcagactaggcgagttgatacggaactggaacagtgttccaagcagccagaacagcacgtgccaagacccagaggaatgagaatgcacagagcgaccagagcccagatggctggggggaagtggtgagagacggtcctgagtgccagctgtgggccctgggaggaccaggggcttgagggcagcaagcaggagtggaacgtgacctccaggagacctatctcccaagggtcctgacagctcctagtacgcaggaggggctccaccaacgtgaaatgaaggaatgaataaatgattgtgacagggtaataggaagacaaggaggacattgcagtggtccaggcgacagctaatgaggtcacacaaggtcatagcggtgggcacaaacaaagcaggtgacttgagagcaatctaagaggaaggcactgggtgggtggggtgtataccccgtggtggctcagacgataaagaatctgcctgcaatgcaagagacccaggttcaatccctcggtcaagaagattcccctggagaaggaaatggctacccactccagtattcttgcctggagaatcccatggacagaggagcctggtgggctacagtccatgaggtcacaaagagtcggacacaactgagcaactaacacacacatgattgctctccacacacttgctactcttccagtcatccccatctcagcaaaaggcatcaccatttatccacttgctaaggccaacactagagaaatcaactttaatttctctttccatcactctccctcccatccaatccattgggaaatcctattgtttctcaccacatcactccatcttcatcactaccaatttggcaacctctcttgccaaggttattgcaattatttcctccagactggttcctggacaaggttccatttgtcctcacctagtatctatttaccattcttgaagccaaaatctgtttattgcctttgcctctgtgatgctctttttaaagtgtaaatcaagtcacatcatccccctgcttaaaactcttcagtggcatcctttcaaaaccagaataagattcagatcttttaccacagccttcaaagtcctaagtggtctaacccattcctatgttttctattttatcccataccttctctccttattctaatttctcct

SEQ ID NO: 55766 - DNA, 1382 bp, Bovine  19866881344425
  misc_feature (1)..(1): n is a, c, g, or t
ngatgcctgggagtgatgggaaaggagctgggggtacagacttgagactggagcttatcctcaaaaatgtgacttgggctaaaaataaagtggtttagtccacacgtcatagagtttcactaagcaaggtggtagtggatagagtaaatgtggtacctgagttaagtctgacatataccatttgtttgaagatgtccactagtgtagacacaacaggcactgggaaaattcatacaaaatccagagatgttcagagcttggaagggtgaaagatcttcaagttcccatgcctggttctaagccaaattcaggtgttacaaagagtttctcaaaggttgtcaattatgtcactaggtatctctatattacaagtgtggtgaaaggaagaggtgaatacaggcttcttggagctattgagtctacctgaagcagattctcaaggagacaacgcccaggtgaactgcccgaattccattcatagtcttgggttttgtccttactgttggtgggcatccagccattgtccagaccaaattgttttctcctgcttcagtaacagctagaagtccttgctgaaggctggcaagactgggggtatcccagaggtatagtttgataaagacctgtgaccttcacatgtgaagaatcaaaaacaaagggtgagtgggctatgctctgatcttggtgacacgatagaggttgaactctccattagccaaaccacggattaacaacccctgctgcaagttagcgttagcaaacctcatctggcttctagaagggaatctccttttgctatggactgggtcctgggaactaagtcagctctgcaggaatataaaacatagaggcaactcccttgtctctgtatttgaaatatttgtagagatggagcatttaaaatatgaatataaggagcaagatgttgtggaatacataaataggtctggtggcacagctgaaaaaatagtggctggatcttgtggtcacgctgatgaagcttgttgcttaaaggatcctagtgccaaaggctcggtaaagtcagtaaggtaagacactagtctgtttcacagggtggtcttgtgaaatatcaccccatccctggcaggagttacccatcaacaggtgcctttctttcattttctactggactgttgaaccaaggcttggttcacaaatctgtggattctctttgatagaccatcatgttggacaggagatgggtgtattcagcaacactgctcagagggatgaaatgagcatgggaaatgggagatacaatataagggcctgcttgtcagtgtctactattggcccaaggtacttcttaacagaaggggcaaaggctttctgagcctggggcatcacactgtagcagccca

SEQ ID NO: 55767 - DNA, 764 bp, Bovine  19866881494443
  misc_feature (1)..(1): n is a, c, g, or t
ntaggatctcttttaaatttctctggacaaaggagatgatgactagaaattaaattcatttttctgtctttgtgagggcagggtttcttggcaatcaggggctatgttcaggacactttgtttttctggaaatctttccgccgacactgtgttccttgtttgaaagagattgctcacagtcatcaactgtggcaaggatgttatacttgaatttttcagagtgatgaccaaatatgcttctttctttagctatttcatataatccacatgcagctaagaaaataattaagcactatctctgattttatacagaatacatatgctaacattggtcttcatgaaattcaaatgaatgttattgctttctaattattacaaaaggaaagcaggtttattgtaaaaatataagaagaaaacttgggtagaggaaaaacaattacaaaaccccttcaataatcttatgtagagaaaatcactctaaaatattcttttggtacatagattttcatgttcctgtattgctattttctgacctctgctggaggaaataagaaatatcagtacactttaaaatattgtatacatatgcatatgtgtatatgtttgatatacttactctttaattctcatcctgagacaattaaagcactaatgaatttatgaaacaaagatttcagttttcagtccactgaaaactggttgtatccagtgaagtgttacttgatgataaataataataaagattttagagctaaaaagtcctc

SEQ ID NO: 55768 - DNA, 879 bp, Bovine  19866880470840
  misc_feature (1)..(1): n is a, c, g, or t
natattccacaaggataaaacgaggaaatagtggggtcttaataagtatcattgaatgaatggctttgtccaataccccctttttttaactccttggctgcaccatgcagcaaatgcaatcttacttccccaaccagggatcaaacccgctccccctgcagtggaagctcagagtcctaagtgctggcctgccagggaagtacctccaacacctcttttttactagaggcagaaagtggtgttgagcatacagtttgtaaatgggttcaaattcttaaaaatgacatcctcgatttacaagaaaggagcatgatttatattttaaagtgatgctactggcaaagaacaattattactttgcaaaatcgaatttatttgcagcagttcatgttatgataaaaagctgactgctgctgttctgaatgagtgattaatatttctgctgatggccctgagaaatgtttgtgtcaggtgtagccagacttggaggtagaacaagtgaaatagtccatattgcaagaaacagcatgatcccaattgacttaaatttcgtgcaacatccagggaacctggggcgctgtacaataagatctgaattgtataaacagtgttccacttttgttcctctgctctgtctttttttctcgtgaagagatttcataaatttcataaataattctataatgtcatttagggctacaactgtcatattagggaatgcaggttatgtattatctctgcaaatgaataacaggtcgcatagctttagttctcttctgttttggcagccgagagcttactttatgtgctgtcagcaccagaatcagaatttaaagggaaagagggaagaaagcggggaagggggagcagaagagaggg

SEQ ID NO: 55769 - DNA, 2689 bp, Bovine  19866880540328
  misc_feature (1)..(1): n is a, c, g, or t
ngttcttacggcaacccactccagtactcttgcctgaagaatcccatggacggaggagcctggtaggccgcagtccatggggttgctaagagtcggacacgactgagcgacttcactttcacttttcactttcatgccttggagaaggaaatggcaacccactccagtgttcttgcctggagaatccgagagacagcagagcctggtgggctgccatctatggggtcacacacagttggacacgactgaagtgacttagcagcagcagcagtgtggtaccctaaatggatagtgatattttgttgttcattcattagttaaaataatagttaatgaagacacatatgttaggcatggggtaagatgaagacatggcctgtgctctcaaagaataaaaaatatagtgagagtcaagctttaattttttttgttgggattttatttcttttatttttactttctggccataccttgtgacttgtggcatcttatttccctgaattattttacagggatagagcccatgtccttggcagtcatcatggagtcctaaccatcagaccatcagggaattcccataattttcagtcttatccatttaatggcaaatcttgagcattatctgtcattaaaatcttttgaaaaaaatttaccagtggcataatattgtgatatattttcatttatttagtcatttccctgttattatttaaaattcttttactattttaagcaatgctgtaattaacatccttaaatgaaatagttcttatttttagtgacttccttagaataaatacttgaagtgaatccaagagttatgtattttaaggctttggatagaatgcagcaaaaattctttctgtgaggacagattgattcttaatttggtagtaatttggaaatgatacagtattaacacagtgatttttatttttttattttttaggttcccctcttgtagtatctttaattggtgcacttttacgagattttcccaaccgctgggagtactacctcaggcaacttcagaataagcaatttaagaggataagaaaatcttcatcttatgactatgaggctctagatgaagccatgtctataagtgttgaaatgctcagagaagacatcaaagattattacacagatctttccatcttacagaaagatgttaaggtgcctacaaaggtaatagatggatcaacaatctttgtcatccccttacgtgtggcatgtaagttttggctttgtactgaggatattgttacagaggatattagcaagataaaacctgtgtgcctgaggaggtagggtagaggatgtagaaatcccgctactcttagtttccttcaaggatttggtgttgaactcagggtgagttgcctgtttctcagtgattttcatgaacctgaagaaacatttgacttcttcagaactttctcttttttatcttgctgcatatttgtacttcttatcaaatggagatattattcagggatttaaatacatgatttttttttgtgttactctctttatctgcaatcctggctcattgtacattgtggcacattaaatgcttaaaatgttcctaggtgttatgtatcctctgggacttggaaacggaagaagttgaagacatattacaggaatttgttaataagtctctcttgttctgtgaccggaatggaaaatcatttctttattatttacatgatctgcaagtagatttccttgctgaaaagaatcgcagccagcttcaggtacttgcatctctgtacattcctttttttttttaagtttttattttgaaacgattttatacttatagataagtcttatagaattttagtatagaaaatagtatagtttctgtgcacatacctttaccttgcttccctcaatgttaacatcttaataactgcaatacagttatcaaagccagaacattaacattgactaaatactgtgccttactttccctggagatgggaatggcaacctactccagtattctagcctgggaaattccacggacagaggagcctggcgggctgcagtccatggggtcgcacagaattggacatgactgagcgactaacaagaacaagaaaagaactgttaactgatactttatttgaatttcgccagctttcccattaatgtcctttttgtagatcagattcaattctgtttcccatattacatatattgtcctttccttagtttactcaaatttaggaaaatgcctcagcttgctttcttccctggtccctttggaagagtactcaccagttattttgtacagtgttccttagtttgggtttgtctcatgttttttcttgactagagcaaggttatatatttttggcagtaaaggtgctacagaggtgctgtgtgtccttgtcagtgcatcagacccagggtgttgataatggtttatcagtgatagtaacattgattacctggttaaagtttctccactgtaaagttactgttttttccttttgtaatatgtgtcttgtggggagattcactgtaccttttctttaatacgtagttttatttattttggtctttgtttgcacgggctttctcttgttgcagcaagtgggggctactctttattgcagtgcgtgggcctctcattacggaggtttctctagtagagtatgggttctaggtgtgcggc

SEQ ID NO: 55770 - DNA, 1408 bp, Bovine  19866880593762
  misc_feature (1)..(1): n is a, c, g, or t
nccattttgtgattaatgaggtttattaagtcagttccctactgatggtcatttgggattttgctgttaaaaacaattgatgcagtgaataatccacgcaagttattttgtatttttgctaatgtatttttgggctgtagtcatagaggtggaattgctggatcattcttgctgtttttaatattcttgatatattcaaaatgcttatgaatgtgatttcctatatattgtgtttattctgtagttgtggagtatggactcaggtttaaaagtagctgattgcagaggacatttaagttgggtccattgtgtgatgttttctcctgatggatcatcgtttttgacatcttctgatgaccagacaatcagggtgagaaataattgagattttcattttaaacatttaatgatggtaagcttaatctcctaccaattgagaaattgatgggcactattggggggaagtaaaacagaaactgctggattcacatttatccttgaaaagtgctggtatatggactatatcagtcacattcattcagtacatgtacattgagtgttaccatggcgcaggtgctggaaaaatccattgataaaactgcactttggttaatttaaatatatttcatcagaataacttttgactccctaccttaaattcccacatccaattacttgccagtactgttagattctttgactgctcctttccctgggtcctggtgggcacaaggttttgtttgcgccctccgagcatctctggcaggtatgatgtttgaatggattctacctttccattttctatcatttatttctacttttccatttcaagtttaggtactcattacctgttgtctttcttatattaatctctttgcaagtcttttctttcttggttttctgcatactgcttgtgagacattttcctcatgtacaatgcagatgtgtcatttttgctcaaaaagatagtgactgccttgcctaccatttggagtaaataaattgctgttaaaattctctgtggttaaggctattctataccagtctgtcttctgatttattccttcaaataacctacactggactgctcacatttccccagacaccttgtacttccctgcttctgtgtttcttatgtttggaataccctacttctctgtatctctccatgttgaaatcctaagaatcctgagagtcccctcaagctttcagtaaagcctttcctagtattctgttcagaggactgtcttttctccttcaatgccatgtaactgtatcattttcttagtgctgtcttgctaagtcacttcagtcgtgtccgactctgtgtgaccccatagacagcagcccaccaggctcctgcgtccctgggattctccaggcaagaacactggagtggagtgccatt

SEQ ID NO: 55771 - DNA, 1131 bp, Bovine  19866880614515
  misc_feature (1)..(1): n is a, c, g, or t
ntagcccaccaggctcctctgtacctggggatcctccaagcaagaatactggagtgggctgccatgctctcctccaggggatcttcctgacccagggatcgaaccctcagtcccttatggctcctgtgttagcaggcaggttctttacccctagtgctgcctgggaagccctgatattgcttcttacttgggggcatctcagcttccctgatcacctgtcttactgacaggaggcaacaaggaggagaactgcagacctcccagggagcagcttttgggcatttgattgaggcaccaagacatccagaggacaactgagtattgacgatggatagctttgaatggcttttcttttttaaagatttatgtgtttttatttatttttggctgcactagatctccgttgctgtgcaggattttcactagttgcagtgcatggacttctcattgggtagcttctcttgttgccaagtgtgggctctaagtgcacaggctgcagtagttgtgtgctgtagagcgctagatcagttgctctgctgcatgtgggatcttcctggaccagggctcgaacccatgtcctctgcattggcaggcagattcttaaccactagaccaccagagaagcacctgaatggcttttattaccatgttgtgaactgactttggttcttaagagtggctccatgtcggttcactcttaatctcagtactgagacatcactccaagctttcctaaatggtaggacttgcaagatgcatgttagttagtgcctttgggcttgtgaagtaacagctccttggccatctgtagacctcagtggctgcactgccaccttcggctggggtaaccctcctggagccgtcaaatagagaatctctatttcaatctggtgtgtgtaagtctttacatcaccagtcattaatcatgcttggaaagttaaaatgcccatgtggcttttacaaacataggtctcctgggttttggagagaaaaacagaaactgtttggatgataatttgtagctatgattatttatgagtgacatacagagtacactgtgttgagctgggaataatcatctttgcactaccaactctaagtgaaatggagctgtggtgagtacagagtgag

SEQ ID NO: 55772 - DNA, 1083 bp, Bovine  19866880621249
  misc_feature (1)..(1): n is a, c, g, or t
nttgctgctgtttagtcatgtgtccaactctttagcaaccctatggattgtagcctgccagactcctctgtccatgggattttccaggcaagaatactggagtgggtagccatttccttctccaggggatcttcccgactcagggatcaaacccacgtctcctgtcctggcaggattctttaccactgagccaccagggaagccaattttgatgacagtaaagacttgatcaggctcctagagtagtaacttaagacggatcagctgtaactggtgtcttcataacatggaatggctcttccaagacacatggttatcagactgagtgttggaatgaattttttaaatgcaaaagagcttcccctgcagaatttcattatatttgttgttgttcagtcgcccagttgtgtccgactttgcaaccccacggactgcagcatgccaggcctctctgtccctcaccatctcccaaagtttgcccaagttcatatccattgcattggtgatgccatccagccatctcatcctctgactccctcttctccttcactatatttatgaagataacatttcagagtacaacatgtattgaagtactgagtgttcaaaagctttgagaaagaaaatactagtgataaaatttcagctggggcccaaattcctagaacagaagtgagttaaatctaagctttaattaaacactagaatatcctcatctgagaagattaataatagcactcggcctacttatttcaccaggttgttgtgcagctcatgctaagcttcacgcaaaagggaacttttccacagctaggtttctaggacctgaaatacagaagctgtcaaacgtattgactgagtgaatggaatcacagaatgtgttcagtatttcttggcaaatgatcaagcaccatggaagcattaattactctcctcgttataatttttagtcgatctactttgttgctgccacttgggccctcagtaaactacatcactgctaacacacttctggcaaaatgcatcagagattaaccttgcagacttcttgttagagacggtctcatcttttcctgataaagg

SEQ ID NO: 55773 - DNA, 1355 bp, Bovine  19866880790929
  misc_feature (1)..(1): n is a, c, g, or t
ngttatgatgttctccagatgtcagtagttaagtctcactgggacttcacacatcaactgaatacgaccatctgtaccttggatgtttgcgcagcatcagaatgcggagacggtctttagcctcttcaatattaagtggaagcctctgggagaagctctcatcctgatccaatcgtgcacaaaggttctgtagtttcatcagaagcccggatttgtcctgtttcccaactgacacccaatgcacgcctcctgggaaacaatctggtgaggaaaaggaaaataaatttaaggtctttaaacaggagtccccctttgaaagattttactgataagcagcagtaaagatttgttccaatctttgatttcatcacatcttcaaacttctcttgattcagagtttatatttgtttgtagactgttattgagcttcagagcccaaatctaagaaaagttgaagatgtgaatcatctgaagtttggtgttaatctgctacgtatcagtaaaatcttactaaacaaactttcaaatctttgtcctgtgtcctcaatgattactgtacaacagtttctcaacagaagcactctggacattttgggccagataattctttgttgtgagggaaatgtcttgagcattacaggacatttagcagcctccctggcctctatccactagatgccagcagcacttcctctccccagttatgtcaaccaaaaatgtctccgaagtttgtcacataccccttgaggggggaaaaaatcacctctgactgagaaccactgatgtggttcctgggaacacataactcgttaattatcattctcatataaagacttcaagtaagaagttaggctcaagtctggctctactgcttactagctatgatacctttagcaaatcactaacttcaatttcatatacaatactagaataagactgtttacccctatttcagttattataagaaattaatgtatataatatgtgatttggctatgttaaaaggttataacagataagattattagtgatacggatgagactacctttcatataattaagctttgaactagtaagcagtataataagaacagacattattattactgctactgtcaactgacattgtcatcatttttgttaatcaagccacatgtgctaagtcactacgtccgactctgtgcaaccctatgggccaaaggctgccaagctcactgtccattggatttcccaggcaagaacactagagtgggttgccatttccttctccaggggatcttcccaacccagggactgaaaccatgtctcctgcacggcaggggattctttaccactgagccaccaaggaagcccaa

SEQ ID NO: 55774 - DNA, 1215 bp, Bovine  19866880973328
  misc_feature (1)..(1): n is a, c, g, or t
naaaatgatgctgctgcctgaccccaaaatacctgaagagcgagatctgtccctgttcggatctcttccatgattcgggtatggatgtctgggcctctcctgtccccaggtcactgctcaaaaatttaagtcagccatagccaaatagtggcactgtcgctaaagcactttccgacggcagcttgctctgcagtgtcaccctgagattcaaagctgtggatctgttgacgactattggcagaatcaactcttttcatcctcattctaggttcagactgatgtgttaagagacttctctctgcttcgcacacctaagatgagaatcttgaggtgaaaatttgagtgtaattgctttgccttggttgttaaatatttttctcatctgtttggtgagattctgttttttttttaaagcctttggtaaacattcaatgctgccgctcgtgaaagagaaatgtgaaaagaatgttctggaagccgtggctattctgcctacaaatgccctggagagaagggggtctgagatattgtgtctcctttcagcttgctcagtattgaattggtttcagggttctttgtgcagagaatagcagtgttgggattatggagaatcttttattgcagtgaggtggaaaacgtaggagagacaagaaaataataatcttccctctctctcttgttcagtattgtcttgtaatccttattactgttttcactgattatttttttaaataacgtatctaaaacttcccccccccaaaatgttcatatattttctgctatttgttagtatttggtggatcacatatgtgggtgaatttctctaatgacagcagagacatttgttttaaccttgaaccatgtagtctttatgtatgaatacaaactggatctttcctgaacccttacctaccctgctggataagggaggatcgttcattaaggagaattagccattattgaccgtgccaaattcagcaacagaatcacctggctgaactgctcatgcaatttatgaaatttctccacatagtgcgttttttttccaaagaggaaattaattactcttctgcctgagcgtgaaccctcagaggtaatctagcaattgctcccttatggtctttatgagattcacaagctaggggaagtattacttttttgaagagtcgagatctttttcttgtcgttccaatcagaatgcatccctttcaggaa

SEQ ID NO: 55775 - DNA, 1223 bp, Bovine  19866881369267
  misc_feature (1)..(1): n is a, c, g, or t
ntgcctggagaattccatggacagaggagcctggcaggctatagtccatgaggttgcactcaccccactggatgtttcctggtcaatcagatgctcagaaacaccaaaagccaaactcagggtatagaatgccctctcaagatactcattctagtcctggtgatgagaaattacagagaaattttctttcacttccatgtggttaagtagttctgagggcctgacgtcaaaatgaatttacaatgaacatgagcgactcattttcctgaatcataactgaaacgaagatgtcccaagtcttgttctagtcacaatgtcatctgactcagcagtaagtccctgctgatgtcaagtgacttcaaagggctggtctctaacgagccccatgtgtgacacaaattcttctgctcctgccctgtagtcttgggcttccctggtagctcacatagtaaagaatctgcctgcaatgcaggagacccgggtttgatccctggactgggaagatccctgaagaagggaatgaacccactccaatattcttgcccagagaattccatggacagaggagcccagcaggccacagtccatggagtcacaaagagtcagacgtgactcaacgactaacactttcactttcatatctatagtctgaaggacaggggttacaagcaagggaatccattcaagtaccatcttcagagactaagagttcttagaaaaccatttctccttctctaaaagttggtaagtaaattataataacaacacagaacatatgttgaatagatcaccatacttgccaactgaaacactccaggggatatgtttattcattttatataatctggaagcaaatcttttttatcgaagtaaaattttacttttgcctaacgatgcttcacaatcaagtgccaaattaaaacaggaagataaagaaaatgctggtgatgtgatacatcttgacagccttgtgacatcctagtgcagagggagaacaaagaacgcactatgggcatgagggtatccgagaattccaatcactcagcaaagaggtgctcaggcaccaactgaagctgggcttccagcagactggaatgaaacacctggcagacctggcttttgtggagtttgtgatctaatgggggctccactaagcaaacagtacagggcaataaaatccatgacagagaaaagagggggctacaagaggacaggggagcctt

SEQ ID NO: 55776 - DNA, 748 bp, Bovine  19866880621547
  misc_feature (1)..(1): n is a, c, g, or t
ntggtaacagttagtgttatagatgtaatttgtacattgagatccatgaataattgatgcacacatcctctttatgtcattttataaaatttagaacataatcttattttaaatgactgtagagattttagtatttgttagtttttaactttggatcattttgctgttgaattcatgatcagagaagccaggcctaatggtaacattattgctaaatgaaaaaaagatccatttcacattgatatccttaatggtgtaacttgcagcaatgtcttataaagaaatgtggagattccttataggaaatggataattggagagacaagttaatcctggaactaacaagtagagagcttccttcccaggtggctaagtgggaaagaacccacttgccaatgcaggagatgcaggagacatgggtttgatccctgggtctggaacctcccctggagaaggaaattgcaaaccacttcagtattcttgccacgaaaatcctatggacagaggaggttggtgggccccattccatgggattgcaaagagtcagacatgactgagcacacacacacaagtagttataataacccatgaggtgattagtaaaatcaagtattttttcttaactagagaagtctttattgcattcattttccatgtgtataaaaggtttctagaaaatatggtaacaattggacaaatgtaactcctgtcagagacagacaccttcaatctgtaaaaaataaaacat

SEQ ID NO: 55777 - DNA, 1135 bp, Bovine  19866880663937
  misc_feature (1)..(1): n is a, c, g, or t
ntagtagagattgataccagcagtatgaaacagaggcccattagaaagtagtatgtatagtgtatttaattgaatttaaggaagtcctattttatattttatgggcaattagtgttaaaacactataaatgcaggattttttttttaatctaaatcataaaataattgaaacttgattttcatatctcttccttctatcaatagtttgcatacttactttttgctatttcctccctactcttaacttttacttggatctttcgtggtaagaatgaactatgctaaaattccagtgtaaccacattttgtttttcccttctcctcttcctcatcttacgtcagagatttttattccattttataacctcaaaattggaaaataggaaatgaaaacttttacatatctaagtaaatttgataattttaaatggagtgatagttctggatatttccagcactcttcagtgaactatggaaaggctactacgaagatttgttttcattaaacctttgtgaagtttgcttctatagtactatgaaataaaattgtcctacactgtataaaaaggcaaattaatatgggcagaatctcaggcttgtgtttccaatttttaaattagaaagaaaaaaaattcctcttgcatttgtaatgaatgcatacccttactcttcaagtcccatttctttcctcatttatcctaggacctctagagaatccctcagattctcacttttcctctttagctattgtaaaacagcatgccctgtttttttttttttttttttaaactttacactattgtattggttttgccaaatatcgaaatgaatccaccacaggtatatatggtgttccccatcctgaaccctcctccctcctccctccccataccatccctctgggtcgtcccagtgcaccagccccaagcatccctatcgtgcatggaacctggactggcgactctttccatatatgatattgtacgtatttcaatgccattctcccaaatcatcccaccctctccttctcccacagagtccaaaagactgttctatacatcagtgtcttttttgctgtcttgtatacaggggtattggtaccgtctttctaaattccatatatatgcattagtat

SEQ ID NO: 55778 - DNA, 1963 bp, Bovine  19866880812397
  misc_feature (1)..(1): n is a, c, g, or t
ntggggcaaatgagatacattcatcagtctacaaacaatatgcttaggatataagtttattcattcattagttcagttcttactgattactgatgtagtagtgatgctgaaggccaaatcactgttcattcttgccatggtttcacatctactacagaagacaagatcagtaactatatattattttcatttatatttggtttatttttcttctgtgatgtgatactccacatttccaacaggagtctttatagttttgcatcaaaaaataacattccatctaatttaatgtagcttagacctgtcaagaagaaagggcaagaggccaacctgctgactgactaataattttaggcagggtctcttggggattcagtatctgtatgtggttaatataggccagacatttagctttgcagtttgctaaaatcaattccatcagctcatctcaagtgtgatcaaactctgggggaattatttggactggaaaaaccacaagagatgggcatgcaaaccagagtatcaatttatttgcatggttgatgtacttggcagagtaagcatcattgatcagggtaatgcactaaggaaactgaattagagatgaaaaacagttgctcgcatgctcagccttagaattatgcaagttaaggattctcaaaaagtggtccatccagctaaattaattgttaaaataatatttttaaacagctttactgagatacaggcttccctaatagttcagttggtaaagaatccacctttaatgtaggagaccctggttcgattcctgagttgggaagaagccctggagaagggatgggctacccactccagtattctggcctggagagtccagaatgtatagtccatggggttgcaaagagtcggacaagactgagtgacttttactatcacttactgagatataattcacatgtcatacaattcatccttttaaagtgtacaactgaatatttttattgtattcacctctaattttagaacatttccagcacctcagaaagaaatcctatacccgttaccagtcattacccattcattccctcttgccctcagccctacaccttgaggcaacaactaatctactttcttttctattgatttgtgtatcctggacattttatatcagtggcatcctgcaatatgtgtttctttgtgactggcttattcacttagcatgttttcttggttttcctatggtgtatcatatatcaatactttgttactttttatttctgaataaaatcatattttatgaatatactaaattttatttatctcttcatggctgatgtatatttgggttaatactaatttggggccaccatgaacaatgctgctatgaacactcacatacaagtttttgggtgaacatatgttttaatttctcttgggtatttcataggataactctgggctttcctggtagatcagatggtaaagaatctggctgaaatgcaggaaatcccagtttgattcttgggtagggaagttcctctggagaagccatggcaaaccaatccagtattcttacctagagaatccccatggacagaggagcctggcaggctatagtccatgtggtcacaaagagtcagacatgactgagcgactaagcacagcacagcacaggttaactttgtgcttaaatttgggggaggcctaccaaactcttcttcaaaggagttgtaccatacttaattcccatcagcaattataagcattccaattttctccacatcctcaccagcacttgttattttctattgtttgttagtagacatcctaatgggtatggggtagtatctcattgtggttttgatttgcatttctctaactaagatcatgacatccggtcccatcacttcatggcaaacagatggggaaacagtggaaacagtggctgactttatttttctgggttccaaaatcactgcag

SEQ ID NO: 55779 - DNA, 1500 bp, Bovine  19866880929823
  misc_feature (1)..(1): n is a, c, g, or t
ntaggccatgattcaagctgacattttgcttccaaaagacattcttttcccatttattgcttttgacagttcaccccttattccctgaaatttaattctctgaaagaaaagcatctgactgggaaagagcatttttctgtaaagaagaggtttccatcatcagctgaaggcttgtcaattgttgggggcatgctcctgaatctatctacaaaataatctaggatacaggttccatgtgcactgtgacatctattatgaaagtatatctccgtgtgattatctagtcaattctaaccaacacttctcttccaagtaaattccgccaatacattgattctatttaaaaaattgaaactgtccttgtggaaaaacctcattgcatctttgtcaattatttgttgctttgactctaaacctcatctttattctcatcacaaattctttagaaaaactgttcctcccattcccataatgaattaaatagatcatgcttaaggcagtgacaatgaaattttgttctgaattcaaaataagaatacagaataaatacatgaactcattgctctagctaacattgaaagttagcaccatataaggtgttgtatgtgttttcaagcttgatcctaagtaaaattatgagaatgataaaatttcctttatatggtcctctcctttcttagcaattgccaccttgcatttatatccacctcatgtcgctacatctaacaatcttatttcttcttcttttttttaatatcagaaagctatcttctggattttatttcttactttcatgtttttaattgaagtatagttgacttaaaatattatattagtttcaggtgtgccacaatgatttgatatttttataggttatgtgcttagtcacttagttgtgtccgactctttgtgaccccgtgaacagtagcccaccaggctcctctgttcatgggattctccaggcaagaatattggagtgggttgccatttccttctccattataggttatgtatattgtaaataatgtttccaggaatgcaggggtgcctgtaactttctgaattggtgtttttcactttctttggatatatacccaggagtgcaatggctggatcacatgatagctctgtttttaattatttgaagaccctccatactgtttttcatagttgtcaattaatgtttccctcaaccatatgcaacagttactttttctctgtatcctcaccaacacttgttatgtattgtttttttgatagtagccattctaacaggtgatatctcagtgaggcgctatcttgcggttttgatttgcatttctctaaatcatagtgatgctgagcatcttttcatgtgcctgttggcctcctgcatttcttctttggaaaaacatctattcatgtcctctgcctagtttttaatcagtttggtttttgatattgagttatatgagttctttgcatattttggattttaatccattatcagacatataattt

SEQ ID NO: 55780 - DNA, 685 bp, Bovine  19866880972914
  misc_feature (1)..(1): n is a, c, g, or t
natttttccggtgaaggaaataattttttaaaaaattagaaaacgctaatgtgctatgaataaattcttttttatcaacttgaatatggctggttctaagaccctgtgttcttggtcgctcacaaagatggtaccgttattaaattgaaacagctgtatgttttagatcaaggttctacttctggctcttcactgagccattatatatggttcagagtagagaatcagtttagatgtaaagtgagttttcccaccaagtctttttactcaattctgtctctttataacaaagattcaaccagcagatggcactatttatttcagtgagacatttgctgcagaaataagcaattaactgctaaaagggaaaatgagtggaatccttcacattttattgtgagtctccccttcagtttatttgtattcaaataccatgaaaagatgaaaatcaacacagatttccttgtttaaggatggagagatacttgtttctgggaatttgtgtttttcaaataatgatataaggaaagacatgataaatttaaaaatattaatttgaggactttgctatcagcctttaaaatgtgaaatgcatatatatatatatatataaatttatataaatttataaaatttaaaatataattcagtcatatgatacaatgtgaaaattggttcctcaatg

SEQ ID NO: 55781 - DNA, 1329 bp, Bovine  19866881069310
  misc_feature (1)..(1): n is a, c, g, or t
nctggatttaggaaccagagatcaaattgccaacattcgttggatcatcgaaaaagcaagagagttccagaaaaacatctatttctgctttattgactatgccaaagcctttgactatgtggatcacaacaagctgtggaaaattcttcaagagatgtgaataccagaccaccttagttgccttctgagaactctgtatgcaggtcaagaagcaacatttagaactggccatggaacaacagactggtaccaaatagggaaaggagtatgtcaggggtgtatattatcactctgcttatttaacttatatgcagagcacatcatgcgaaatgccaggctggatgaagcacaaactgggatcaagatggctgagagaattatcaataacctcagatatgcagatgacaccacctttatggcagagagccataacaggaactaaaaagcctcttgatgatagtgaaagaggagaatgaaaaagctgacttaaagctcaacattcaaaaaactaagatcatggcatctggtcccatcacttcatggcaaatagatggggaaacaatggaaacagtgacagactttattttcttgggctccaaaatcactgcagatggtgactgcagccatgaaattaaaagacacttgctccttggaaaaaaagctatgaaaaacctagatagcatattaaaacgcagagatgttactttgctgacaaaggtccatctaatcaaagctatggtttttccagtagtcatgcagggatgtgagagttggaccataaagaaagctgagcactgaagaattgatgcttctgaactgtggtgttgaagaagagtcaagcgtctcttggacaacaaggagatcaagccagttcatcctaaaggaaatcaatcctgaatattcattgcaaggactgatgctgaagctccaatactttagccacctgatgtgaagaactgactcattggaaaagatcctgataaagactgagggcaggaggagaaggggacaacagaggatgagatggttggacagcatcaccaacttgatggacatgagtgtgagccagttctgggagttggtgacggacaggaagcctggcatgtttgcagtccatagtgttgcaaagagttggacatgactgagcaactgaactgaactgaatctttagggaaagaaaaacctcagtcatctaaggacacaatcagctttaaaaaaagacagtgcttttttgggaagtatgtttgacattttccacatatttcaagaaggtcctatacagatctaaatttgtagcagatggagaagcagcaggtgtgaactcagcaa

SEQ ID NO: 55782 - DNA, 866 bp, Bovine  19866881073375
  misc_feature (1)..(1): n is a, c, g, or t
naattgggcatttgcattttatctggcagccctagttcttagtaaagcatggaagatggaaaggggtgatgtttttatggaaatattaattactggatggataaattggcactgaagtgttccatgctgtggttcattaaagatcaaatgagaccagtttatttttttcttatatagacacacataattaattcagaataacaggggaaggtcagtctgaaatggtaagatattttaaagtaaatgatacaatttaaggaaaggagtcttccagagtgaagttaaccaccaggaactcaaaaatatttattgaaagaattatgtgagataaattgttcattatcatacagttggcatgactgttaattaattacaattgaggctgatagagtaaatttattcccttgaagaaaacagataattgtcatttaaggtccccagagggttagacagcaacacagaaaggaagaaataataaagattattggacaaagattaaaggaaaaaactctcttcttgaaacaaacccacaagataatagcactttattggatgcttactattgttcatatgtttgggttgcacatttttgccaaacagtttacataaatcagctcattttctcttctaatccctacagtatatctctatgagaaagatactcctatggtctccattttctagataaggaaatcagggcttaagactgattaagaaaattacacaaaggcaggtcagagtccttaatccagattttactaatactgtaaaattccatactcctagccatgaagtgatatcaactccaacaagtcaaagaccaatctgatgtgtatttaaacataggaaatatgttagaatataat

SEQ ID NO: 55783 - DNA, 771 bp, Bovine  19866881318222
  misc_feature (1)..(1): n is a, c, g, or t
ntgcaccagttacattcaattgaatgaaaaatattaagtaaaaaaccatttagataagagggcttccctggtagctcagttggtaaagaatccacctgcaatgcagaagaccctggtttgattcctgggttgggaagatgtgctgtagaagggataggctacctattccagttttcttgggcttcccttgtggctcagctggtaaagaatctgcctgcggtgtgggagacccgggttcgatccctgagttgggaagatcccctggagaacagaaaggctacccactccagtgttctggcctgaagaattccatggggtcacaaagaaaactattaagtaaaatattttgtaaatgaaaatattaagtgaaaaatcatttagataagaagtacataaaccagaaatcatgagagaggtacacaaatgtcgcaatctgtgcaggtggtatatgaaaccattgccctacgcagtgccctagggcaaatgtcattgccctaggcatctcagattctctctaggaatgagaaggctggtccagaaatccctaagatcaactctagctctaaagcccaattatttttaacaggcttgcatttttttctttatccttgggcccatttactgaattttaagtctttcagccttttccagatcttaaagacacccttcttaactgcccccctcctctgtcagcaccaagcactcatgcattcattcatttatgccgggtactcctgaaacaaatactctatggagaacgtacatcctagg

SEQ ID NO: 55784 - DNA, 919 bp, Bovine  19866880498054
  misc_feature (1)..(1): n is a, c, g, or t
ntgcaaggagcccaggtggcccctggaacgggcagcccgtgacctctccaccagggacccaggccgcccggggccggccccttccccactgcctctgtcttccctgctgtccctctgagccagccggccctccactggggtttcctcgcactgtctctccccacctcccattctctgccctggctgatctgtttggaaagcccttgctgcctccatcctcaggggagctccatccgtcttcaaggcctggctccctgccacctcgagactcccgaggaccccaggcttcaaccatgtgggcgtgctgggccccccggccttgagtttgtcaactcccagagaacagctcccatgtgtatgttttacactggaagcaaatccccaagcttcatgacaacctgccaggggaaactgaggctcagactgggtaagcaacttgccacattagacctaacttccaagctcccctgttctggcccctcctggggaggccgctgaccaaggcttgatagtctctaaggccccccacccccattgcctgcaggacagcccggctaagtgacaagtgacaagactgccgtggctggttctatggaaacgtcttggagttggacacggtggtccacccaacccttgtcctgacgagggtgtgtggtggggggggggtctgggacctcctgtggacacacagagctgaaccattcgaggtggggacactgctgttcctccacttacgggctgaggagaggacaagggcgggccagagggcttccttatagggttgccagattcacaaaatgaaaatacaaggcactcagttacactgagtatcttaaatataagtttgtctcatatacttcatggacatacactaaaaaatcagttcaaggtttatcccaaattcagcttcactaaacat

SEQ ID NO: 55785 - DNA, 983 bp, Bovine  19866880517305
  misc_feature (1)..(1): n is a, c, g, or t
ngtagtgaattcatgaataatcaatgaaccagcaaaggacaaaaagtgacatatggcagcctggtgtggattaagtgtgattgtcactttcccccttcccacctttttcctttctttgatttattgaaagaaacaaaggcagcctcacgtagccagaacacagtacctctggaaaaatccatgtagacaaagtgtttaccagcgagtttattcattaaatgtctcctcttctctttggttgttttaataggccagcccaagttgtttgtgttaattgaaattgtattcaaaatgaaagtttaaacgagtaaaccagtttctgtttttttaaaaattactactgtacagtattttcaaatcagtaacacgtaactagttacgctaatgttgcacagtgttctcatgcttttacctagtgtgtaaaccaggcgaggtagaaggcattcttggtttttccctttgtagcaaccaacagtttattggagtcaatgatgattttattatttttaacaaaaaaaaggaaaccccaacagatttcacgaaattccttggtaacaccaaggttttgcagaataataatctgaggggctgttaatgggaaggtgtttgttcacagcccaaataataaccatagcattttaaaacaatattcttcctggcagctattgaagggtgggattttagtccagtgagtcagtttgcaccttttgttcacctggctttgtgccagggatctgatcctgaaagatttaacattggagagtctctgaatagtctgattctccagtctcgaaattctgctctagtttttccaaaccccttgaaattgtcagaggaatcagtggtaagattaaaaaagagattatttgctttgaatggctcctcctgttcctctactttccaaaaagttctggaaacttactcttagacatgcagattcccatctgattatgaaatattttgttgatttatttgtaaataat

SEQ ID NO: 55786 - DNA, 836 bp, Bovine  19866880520080
  misc_feature (1)..(1): n is a, c, g, or t
ntggagaaagggggacagctggtgaagctgccttcattatcttccaaggcttccagttctggaaagttctggctttgagagagaactcaaaaccaagagttgagtcgtgagaagcagcccatcacacaatctgggacttgggtttctgtcctctggtgttcagtcaggagtctggaatcagggcctgccttttgtttagcttagggaggattacattcaacacatgggaagaaaaaaaaaaaagaagataacttctcagaatgtgaacaacatctaatggaaacgatgctgaactgggaatgggagaaatagaaaagctttgtgaagaatgcagttcggtcagaaagtcagagtctggagattatgtccttctagttccagcattctgactgcgtgcagttcaatgtaaaacccagtttgaaagctagtcttgcccaacaatagattttcccgggaagagggctattttcatcctttgcatttgtaattaccatgtttgttttgtgtgtttgccatgcggggacaagaagatgcccaggtaggtgtgagtgctcacaatgatacaaaacaggaaagtgtgtaagaacgaggccaggaacacctgtcatagggtacccgctggggtgtctgtaccacgtcctttctgaacgcactgtttgcacacacacaaaagggttggggctggatatgcccagtacgcgtgccgagtgttggaaggatggggcccggcggtaacaagaatcaatatatatttacggcaggggcgggggagaggggtgcgcggaggctgcagggcggggcagcgttaatgagagcaagcccggctttgtggttgg

SEQ ID NO: 55787 - DNA, 1386 bp, Bovine  19866880535256
  misc_feature (1)..(1): n is a, c, g, or t
nttgccaagactgcgggcccaggagcagaccagaacattcatgcaccttctcatcacgacgttgtctataatcatgaataattagaccaaaaaaaacacttaaatgtctttcaaaggggaatagctaagtaaattatgaggttttttaaaattattttattgaggcatattttacatagtatataattcccaggcttcacagtgtgtaattcagtgggttttagtaagtttaccaagttgtacaaccatcacagtaaacccattttgaaacatttgtatgctttcagtagcatcctcatgcacattacacccccctgcccaggcagctatttctgtgctctctttctctataaatttgcctttggggatgtttcatatagaaactatggtttatctattcacaaggttgcagaaatgaaaaatcatgaggtgggtagattaaaaaaacccatcatggaaaaaacacataagccatgtttaaaaaaaagtaagaatcagtagaatgtgtcctgtgttaccatttatgtgttctttaaaaatgcatgaaactgatacttttgtatgcattttaagtgtggtttttaaaaacaaaactgcaaggatggagtatgcccacatgctaagagcatgcctccaggtgtggctcttggattggggaatggcttgtcaatggaaggtatttgctttattttcattatttgcattttttgcaaaaataatgtttttatgtattttgtaaccaaagattcttgaaatatttttacttgaaactttgttaatatattttaccattttaggtttagttcttaaagttcttaagctgtttttatttagctttggaaatgctaaaatgagctcatattaaagattttactgtttattttaaaaaatggatttcagcatgtaaatagacaaaagtttactacacacattcaaattaatagtctatctaaataagaattcctagtgtgtataaatattagaaacaaaaagactcaactattttcagtgagtccttttcctcttaaattgtgcttctcctcttttctagtgcggctggaggtgaaatctttgaccagtgtgttgcagatagagatgaagccttcacggaaaaagatgttcagagactcatgaggcagattttagaaggtgtttgcttcctacacgctcatgatgtcgttcatcttgatttgaaggtaagaaaactgaatcactttacagttttaaggctgctggaaaatcataccccagatgtgaagtgtttcacagtgatttattcaaacatttgtcaggtctgcatgtgtcattgggttacaaggaagtaagagttgaatctttattcttatcctctagccagtgtttcagggagaatatgcacacgtgtgt

SEQ ID NO: 55788 - DNA, 981 bp, Bovine  19866880578739
  misc_feature (1)..(1): n is a, c, g, or t
ncgtgtccgactctatgtgacccaatagacggcagcccaccaggctcccctgtccctgggattctccaggcaagaacactggagtgggttgccatttccttctccagtgcatgaaagtaaaaagtgaaagtgaagtcgctcagtcgtgtccaaccctcagcaactccatggactgcagcctaccaggctcctccatccatgccatttccaggcaagaagtggggtgccattgccttctccggagctgaatccctaaagtcatatatttaatttcatgcaagaggagactctgattttcaatgagacaaagagtttgcttccatgcccagaattatatagaaaaattgaataaaacatgctgcttgcctggataactaaaacattctgagatctgctatatcctcatccaactgattaaaataggaaggtaaaggtttaaaaggccttgattatctgagctgcacagcccagagaataaatgaatagtggtatcactgtgctccaggcaaaactcacagtgccctattgaccccttaactgtcataccatttccttgtctatgcttcattatataatgcacagtattacatgaaaactgaatcaggttaaaaaaataatcaactggatataacttaagcaacttttaggtttttcatccatccatccatccattcaatcttctaacaaatccatgaaaatggtttcaataggccatttgtgacgcactgtctagttgctggggtccttagagtgcaacagacaagcgcgtacagcctagtgacattatggttcaggaaagtattagaattactgaacgactacctaagtctcagctaaagtgacattttgtactttctacatgactgtcgaaatagtaatggctctgacaaatcacatcctcatgctattctggaagtactggtgcaaccagataccgggaatacttgaagctatttatgtaatggctctaaattaattgta

SEQ ID NO: 55789 - DNA, 1885 bp, Bovine  19866880595961
  misc_feature (1)..(1): n is a, c, g, or t
natccagttaattagtgcctagcagagtgaagtaaagcttggccctggaagacatttttccttttcccatgtggaataaataagacacttttaaggtcagtttctttgccaaaaaacgatttctaaaggttactttaatatttgtaaggcggcttgtttttaacgttgtaatcactgttataagacctttttccaagaccctcaaacgaaggctgttgtaactgtcaggcccattccccattacaacatggtgagattttgcaaccttgataaatgtctgcaacagctgctaacacttatcaaatgctgtgtgccaggaccagtggtttgacctgtacagcccctgcaccttctggacacccccatgagggaggtactgtcactacactgactgattttatgggtgggaaacgtgaggctggggagactaagtcaccgtccaaaggcgcacagagcaagcagagtggggatctgagctcgggtctgaccccaaagccagtgcttctgacaatttcttcagaaattgtcttttttctctgttcttagagaaaaagtcggtccccagacctctactgttccctcgtcggtcagcagttaaaaaaaaaaaaaaaaggcaagcaagagagaaaaatccgcctgcacggagatgctggttcaatccctggtcgggaagatcccctgcagaaggcaatggcaaataccctactccagttttcttgcctgggaaatctcatggacaagaggagcctggtgggctacagtccatggggtcgcaaaagagtcggacatgactttacgactaaacaacaaaacctatcactctgtgacccctcttcaacgtacaagacgtaaagtatccaaacagccttcaccttttgcgattttaaaagcagaccaaattctaagcactccctacccctacaaaacaacaacgagatggggaagaaaagcaagggctgaatcacggcgtagaaagagtcagacaagggcccagagtccacaagtgaaaccgatctgaacttgaaaaagcacacggccctaaatatttcagaatgcaaacagcacaaaccccaagaaatcgcaactgaagtcagcagaaagcggctgacggaaactggcccagggctggtgcgaaagaagctgtcacgctcggggttctgcgctcctctgtcacagccacggagggagaagcaggaacccacaagcaaaaccaaagctgactccacacctgtgctgacttcagactcgctgccgcggggaaaggttcgcagcgcggttcccacgccgcctcgttaagttaccgcgcaagggaccacagaggctgagacgcccgcagcagagagagggaggggtcaaggttctggggggagcctttctcatggccgataccacggctttgggggacgccgcgcgtggactcgtggccagggggccccgccgccctaatcgccgcccgcacccacgtctgtacccggtcccggcgcgctatctgcccccgcgccgccagcctcccgcacttatctgcgcgcgcccgccggcctcacctgcccaactcccggccgggggtcagggtgtaggcgtcctgaaagggctcggtgcgcacggcggtgcggatctccgtcagcagcccgcgggcctgggtcgggggcggcggccggcgcggcgtgctcagaccccggccagctcgacccgagccggaggcgacggccggggaagagccgccgctgcccggcttctcgagaggaatcatggcgctcgggcgtgcttttcttgcctgccacccggctcgctcggagctccggcgggtaacggccccgcctccagctgcctcgagccggcgcgaggatgccacccgctctgcccggagctgcgcacagactgcggc

SEQ ID NO: 55790 - DNA, 848 bp, Bovine  19866880639014
  misc_feature (1)..(1): n is a, c, g, or t
nccccgggagggcccctcccctcccaggtccagccgctcggccagttcttctgcacttagggcgggctctgtgtcctctggcccaggggccagcagctccccagccccctcaggccccacagagactatgccatcatcatctcctgcctccgtggtacctgccgctgcctcaaccagactggtaagctccaggccctcgatctctggagggcccacagtgctgccctggctcggctgctcaggctttggggtccctgagggctctggtgcatcacacgggggctccccacagctgcttgccaccaggttattcatggggctgtcctgaatttccgcagactcaggctcggtactcagggaaatctcctcatcatctgtggacaagaagaaaatgtcacagcagtgttagtctactcccaaggatgtgtgagcatcttagggatttctgccttaggatattgcatggaggggttgatgagcatttcccatggaccaaagctctgctaaaacccattctgtaagaaatggttctccttatgcaatcacgatgtatttgacaattctgtttcaagggacttcagtttttggtcaaaatgcccaaatcctagtactacccctgttctgggcacaaagtaggtgctcaataatgtctgttattcggaagacctcagagatgagagggtggggtttacagttccttgttggcttcaggcagggctaattatactagtttagagtgttttctatggctgagtcccccagtgtggcagaatggggttcttaggtgaccagagagaaggaaagggggcaaccacagtcattcagggctcagagcggaagcctcccaa

SEQ ID NO: 55791 - DNA, 1344 bp, Bovine  19866880652692
  misc_feature (1)..(1): n is a, c, g, or t
ntaaatgcacccaaaggaactacttgatatttttaaaaggcttctcagtatatctttacatccaaagagaaaattcagaagtcccagcagggtataagcagatgagagtgccatgcattgggaaaaatgttcttttagcaaaagtcaagtgttccccaaatggggaagactaggggtgggagtaaccgggtgaacttcgagaaagcaactctgacagcacaacagactgggatgtgccataagaaaaggacatttaaagtcaccacactctgactgtccctggacatttagcagcacacaactaggtcccaatttaattcttcctgaatataatacacaaaatgctcattctctaaatgcattcctcaaaactcactcattaagaaagcacccctctgggtgctctggaagtggtgccctggggtgagatggaagagaagggctgagcttgaggcctgctcatcctgctacaggctgggcaccaccgggacacttaaggaacatcccccatgcattcttatcctcgctgaacggttatttcagggattagttgaatctgcacttgaatatgcttagtacatatgtgaggcactgtgcagatgtaacttttattatttgtaaacaaaagcctcatttcaagattggctgagtgcatgctcccagggcagcaccagggcccacggacaaggatgctagctcagaaagcctggatgcgtttgaatccctgctcctcacttacccactgggagacttagagcagtgactgagccctctttggcccagttctctagtacatcaatggtcatatctacctcttcagattgtcgtgagtggagaggaactgacacaagaaaagtgtgcaacacaaacgctgatgcaccatgcatatgtgcaaataagtaaatatgagctgcgatttttacaagccagggctgcgcccacaagtcataaaactgtgcaatcctagcagcagaggacttagagggacgtttgaggggatctgaaagaaggatcctttgggagagccaccagctgcttgaggtccactgcaatgagctggtaacctcccagtggctggttccactcagaatcagcaggagaaatcattgctctggtctccaggtgtgcttctccatgcccgtatcaactgcaaagtattcacccacaccccagcagagctccgagctgtcattccagaaggagcgtcagagagtgttcgcttccgggtacaaattcacttgtgacaaccgtacattcacatcacacaagaagaacgcaacatgcaaagaacatcatctcaaaatggagcacagtcaaatttggggtgagggggagatgcaggca

SEQ ID NO: 55792 - DNA, 908 bp, Bovine  19866880682888
  misc_feature (1)..(1): n is a, c, g, or t
naggaggatgctttaggtgaaaatcacgaggattcttttatcacatgagcatttggaagacacttgctttccatttttccccatcaatatctgagtgtcattaataagaaccataaagcattttcattggcagcatatttctctagttattcccacagaaagaaatcacattacaaggaagaacatattgtatataaatgtaccaaaagccatgggagtgtcctttcatggtgtttgcaactaaaaatgcagggaacacaacaagctcattttacatatagatcatgttcagatgccacaggcagaaatggcctcaagatctatcatgccagacagataagttgaacatatttaaagaaacagggagagtaccatcaggttgtatctatgagaggtccagttgaaacactaaaacaaaacataagcagaggtaaacaccttgactcatgacataaaaatacttggaagtttgttcacgatgttcagattgtataatataaaaatgaagccaaattcatccttaaccaggcctctagagaagtgtacaggctttggtgtataaagccctgtgccctccagtggagctgaacatgctgaaaaaggccagactttgatgaacatgaagctatatttgctgcatccatttggacagataaagaaatcgagcaatttgagaaggtgcttatttcttgtgaaaaatcctacctagggaaacttagataaccttgagataagtatccaggctcttcaatgcttattttagcctattgccctccagcacttacagtttttcagtgatttggcctgataacagcagccacacgaagtatactgtcagtctcgtatccgttgcggatgtgaccccccatagcgggcatttgtttgatgacctacagttataaggaaat

SEQ ID NO: 55793 - DNA, 1262 bp, Bovine  19866880729068
  misc_feature (1)..(1): n is a, c, g, or t
ntccagatggaattgggcatggataagtggaaaagagcagatcaagatcccatgtctctatcaataaggaaatcactggaggtcagctttgcttgtttatactgcagtttgcaatgtaaattaccattaataaggaaggataacagaccacacaatgtttgtttctttcaccatcttatcttggtcaagtaagagaagtcattagtcatagaacatttctggaagggtacatataaaaatgcttaacagtaattgcctcaagtaaaggacaggagtctgacaggaaagagaaattgacttttcactctcaaagcagaagtcactgtgaatcatactttgcagtgagctgcttttatgacaaaagtcattgtatcaactctaatgacagaggtcatcatgctggaaactggcctttggggagggtaacttttgcacagcttcttaaaattgggaattttcctcttgattccatgtaacctatacttgattacaagtttctttggaagtttgtaaaatccagataacctatgaaagtacacttttgaattaaaagtggtatctaatgagtgtagaaaatataggcacagaaggaaaagaaatcaaaaggctggtataggcctccatctggagaaaattcctggtacacaatgaagtaaaacagctgacttgtattgtctatgtttttgtatcttcctttaccattatagcgcattgtagatagtttccaccattaaaattcttctgtactttattctatggattgccataatttaattcaaaactttctcttgtacattatgtttgttgcccactttttgccattagaaatatgttgaaaaacctcatagatcactcttatttctgtatagttctgcaaacgttgttaatgatctacttttagaatacaaaaagaatctagagatgaacataatttcattacttgggcttttcctctgaacttgcaatttttatcaccaggtctccagcatttttgagacagcattagctgatgatgaacccaaatttagtctaaaacctgcagttttcaatcacagattttttttaaaaaaaacaccagtttacatttccaaattgtaacacagaagagaagcttgttttccagttgctggaaacttattttctgagtatatctattctgttttgtctggaaagctaaatgtttgaaatttgtatatttgcaattatgattaaagctatctcaacatcaaaaggaaaagaaatctaaaaagcagtcaggtggg

SEQ ID NO: 55794 - DNA, 895 bp, Bovine  19866880763464
  misc_feature (1)..(1): n is a, c, g, or t
ntatgctacacttgaccaatggtaataaatgtttacttccatttctatgatttaaggggaaatttgagcattaagtattccaagcttttctacacccatgtcttctgagcagaactaccatttttttttgtttttataatttctaacaaccaacttcagaataggagctgatcaactctttcttttcttcccattctaattttccctgggcatccaatccatccaaaaacagcagtggctaaaccgaaattttgatatattcaactcgtgatttgtatgtggcatcagccccatcagctggaactagcctagacatatggtgcaaatatcatactttccaaccaataataacagcaagaaaaacacctcctgctgatgcaatgcagggcatcccagtggttgtggggattatggttcgacttgagttcagagaagtttggggggtggggacacaccccctgtgaacacccaccacccaagaagcacaaacttgtgcacacgtccaagaaggagatcacattatgtagcataaacaatgaggcttctaccccctgatgttgtatagaagtgctgaagcaaacaggagaaagggggaaaggacatcaggacggtttagaaggacatattcagttgctctgaatacctgggttctgtactgttttattttgctttgtttgatcacaggtctctttcccagaggaaaaaaaaaatgtcttgataatatcatgacttccattcaagccaagtaattacttgtttggcaaacaaacttttatttcaactttgatagcatttttatttttcatgtttacttttcagtttttcttcaccatggtgttcaaattccttcacatctgattgtccgcagggaccacactaaatcagaagctgcaga

SEQ ID NO: 55795 - DNA, 951 bp, Bovine  19866880785599
  misc_feature (1)..(1): n is a, c, g, or t
ntggctgttagggcaccaatatagtattcagaaaatagattagtaacaaataagcattcacctgcattttctcgacatatatttcagttgaagaaaggaaattcttctgaatagagaattccaactaatgaacacaaggagaatgacaggtttataaaatcacctggaacaagataagcagctggacatagagggtcagagctcaagagggcaatgatccctggaggtacacccttggaagtcattaggatatgatgtatgacaaaacccttgggaatctgtgggactccaggaaagactggaagaaaaccaagagtgtaattacctgtatgaaggaatgggtggaagaatcctctggaggaaggataactagtgagaataactgagttgaattaggcagggatgtatgaagagaaacacgcaagaacaaactagcgatacaaagtcaagtgggaagggaaaaccctttccctttaaggaaacgatttggaaattttatgagtcacctattcccaactgaaacttaatctcatgactacatctgggctgccaagaagactagataacatggtctgttctgggcagagtgtgcccagctaaaatttggggcaccaaaagcaggagaatggatattgaggttgatgagtggtttgtaccccagtattcaatttagagccagttatgattacggagcagacatctactccaaacaattaaaaaacagtggtagagaagtccaggttcccaatgcaagtgataggaggtagatgcgtttctcagtgtggctcaaatcaaaatctgagtttggaaagacagagtaaaagaagtgaacaaagtcatgaaactcgtgaagaatttaatactttactgcctcctgatatcctagaattgaagagcaaccttgaaacttaaaggtcagaattagagtaatgggtgagggtgaagggtgag

SEQ ID NO: 55796 - DNA, 1363 bp, Bovine  19866880814795
  misc_feature (1)..(1): n is a, c, g, or t
nttggctcttaccaatttatttgtaactctgaaagcacacttgtagcactttctgatcattggtggacttgagcagagtgtcaaaaaaattaacttgcccaactgtgcacgtttccagctgaggtccaacaagataatgctctgccttcttgttttatgtctcatactaaaagtatgaaaagaagtgtccttttcatgggaaattgaatgccatgtgttttgtatttttgtgctttttgttggtaattttgttgtttaaaatggtccccaagtacatgaagtgttgccttgtgttccttagcgcaaggcagctgtgaaatgccttatggagaaaatatgtgtgtgagataagctttgtttaggcacgagttacactggtgttgacttaaagatcactgttaatgaatctataatatatattgaacaaggtgtctttaaacagaaacacacagaaaacaaggttatgtattgactggttgacaaacgcattgtgaccagaggcttcctagtcctgtatttcctctaccagcagttgttcacaattcacaaattcagtgtttgcagtagcttaacagaacatactacaccaaatgaaagttgactatatttaaatacttgaaacatggtttagaatggcccaatctaaaataccagaaagagttaattttcttatgaataccattctcatgagtatggaccaagattgtcctaaaatttaacaatttattatacaggcctcaaacccattctgcctattttaaacattctgttgattccagaacaatcaactctcattccataaataaatgatgaactcgacaatatagcttgatgtggctcatatatatgaaggcattattgcttaagctattataattctcttggaaacaaaattctaagagtctatttttgtcgtttatttcttatgaagaaaaaaatgtgttcaaaaccacaccatcagtgtgacagcactgagttctcaagtgtagtgtatggcccacagttagctgtaggaagcatttttatatctaagaaacatctgaaaaaaattaaaggatatggaattagttactacttaatctttctgaggaataagaagaagtttattattgcattgcctaatgatctgagttgatttttataaggttattaatcctcccaaagatttcattgaattgccctaaaatacattcctttgcaatgaagagaaagaaatctcctaaacagccaactgaggtatatgctttctcctgggaagtggtagaaagaaaactgagctagaagtcacgagccccatatcctttcctgacgatcatatttagagtcattctgagttgtgtacatgcactcttgatatatattt

SEQ ID NO: 55797 - DNA, 1177 bp, Bovine  19866880823676
  misc_feature (1)..(1): n is a, c, g, or t
nacttacattacagataaggaaggagatgcctgagacttgccttcccgtgatcacatctggccttttagcatttcccataataacagtaatactgatgcaagtaccatagtaggtaaatcttaaagcagtctttgaaaacacccatctttcaaagccagaagtgtgaaaggaaccaagtgatgctacatacacacatcacagcagctgcagtccctcaacactgatgcggtgataggctatttcagctcaggatgtggtctccttatccagtcaataacgtcacaatctgaacaaacttaggcaatttgcctctatgaaataactaccccagacaaaaacagcagtcattccacagagctgccaacttgtactagcctgggatcccagaattagtcagaacacagtttattaagcataaactctgaagtccaatatgcctgtaggtaggtctaggaattaaaacagtgctatattgtcccaatgccacactccggaggaggcagcaagcagaggaagggggcaacagggaattctacacattatatttctctaccaaacaggcacacacaccataccagggtagacatgtggactctaatcccttcttagtggaaaacacacattttcaaaatgaatccccaatctagaacgaattaccgtaatagccacagccggagcgagtccgctgaggagaaacgcagatctggccacctgctttgagacgccttggaccacgacactgccggggtctttaaaggctggccttttcgggtagggcatctgccctcctaaatcgccttaagattccaggaaaagagagaagatgcctctctcagtctttgaactatgctgctcttcctgtatccatttctgctgaacacagccttatcttttcaaagagaaaaaaagataaaaacaagaggagaattgcaccactgcagatcccaagagaagtaagcacaaaactacagcaacgtcaaataatatcttcagcaactaggaaaatccccacatgctgtctggtgtcagcccaatgcagactggggtgcgctgtgcccggaatcacaggaagccgggcagctctgcagcctgtgtccctgccagctccccccacgcgctgaaattcgccaggaagaacttatgatgcccagcttctgtatgcaagacaggcaggca

SEQ ID NO: 55798 - DNA, 1760 bp, Bovine  19866880853051
  misc_feature (1)..(1): n is a, c, g, or t
nattttgtggaaaaacccgaacaaaccctttggccacccaatactatctgatgccctttccaggcaggaaggccaggagatggggccagctttgaagctggtacaggaagtatctctgatgctgagtcatgcagagagagattgatagcttacaggtcaagaaaaccctaaaagggtcaccggaacctggaaggagacactgtgggataattgttacagggcaaagattaatgccagaggttcaaaccagaaagaccacagcagaacctttcagacttgaatcgttgcctgggcgctgttttgagggtgttattccatttttatatcgctttcatataagaggattaacgagaagccttttaaaagggatttgctgcactatccaaaatgtccttccagagtaatttggtatttctataaaattttattgaagtatagctgatttatactgctgtgtaattaggccttttattttcttcacttggcaaaccatcctacttccccttccataaatctgatctgtgaacaagaaattcctctcccaaacatcctgaattctttgccattatgcaaactgcttttgtttaaacaatcagttgaaaagtacaccgtgaaatcatgacatcctacctcctgctaaaacatgtttccacacaaagttttgttagagagacagacggaggagagagaaagggagggagagacctgctagttcagcttctgggggtaaaacatgcatcacatccatccattgactcagtgacctcaaatctctgcagtttgatctttctgtacatctttctgaatagagacctactctagatataagaaatgtgaacaattcgcttcactgagcaaacttcaaatggtgcttaaaaaattttcagtaggtttgtactgaaaagtacaaagcaaaagtttgcagttctgcaacagcaggaatgtgccggctagtcctctggtccaatccatattctcatccttcagtcaggcctggatgtgtagtctagggtcctgagcctgggaaagggatcagacatgccatctctgaatgaatacccaggtaggctgactactagtgggaagtctttcagcagttgccctgtactgtagatgctattatgatcccatatgcagatgagtaaactgaggctcggggatggtaagcagcttccccaaagtcacacaggtcagaagtgttaaaccgagacagcctgataccagaactttcaactttgtcctcaccaccacactgcctttcttggattactggcaaactgcccaaagagtaatgaatcaacagtaattcactcaaggggagagtcatgtcttttctgggccttttaagccatgtgagaagatgtgctagaaatgtgtgaaactccattgcctttgaacactcactacagtgtacaaaactcagatggaagtgagataaacccttgccagtaacattggttgctttcagatctgttgccatgatctccctcagcgttgttaggaaagctcagagtggcccgcagttgcttatcagaggtaactcaagttcatctcccagacatctggtgaggtgctgatgagactgcttaaagaatgatatctgcccatttcaaagtttctcctgtggtcccagagttgactggctgtatgctgtccctgctctaatacctgtgagcagacgggtaaagatgaaaaccagttaggtgtccatcagaatgggaggggctaaaccaagcacaggacattcataaaaataaata

SEQ ID NO: 55799 - DNA, 2675 bp, Bovine  19866880886768
  misc_feature (1)..(1): n is a, c, g, or t
ntttgtgtttcgtttcccacggtagggactcaggatgaagtagtattttgtggctgaccccttcatggaagacagcaatttgtattccttcttactgatgttgtcagtcaagatgaatatggccgaagagatttctgtcaagagcttgaactgcagccagtgagacccaatgtcacctctcaagtttaggaaggccatgggctctgggaaaatgtccaagtcctccctgccactgggaagaaaccaggaaatttctaccagcccgtctgctatctcccgagggttagtgcccaagttcagatcccgatgccagaaacagtcctgctgcctgtggccagggctgagcacgtcgttgagaagctgggatttagagttgctgctgacctccatgcgcacaaaggcgaaggcaggtgctcgggacaggaccatgctgtcttctctgaagcttcccatcacccttgggggctgtgacccccatgtccgcacagtccccctcatggcccacagcagaaatgtgtggtagtggttttctgggtcaggcaaaatgagagggagtgcaaactggcagagagacatttttgacacaatttcctgttgcaggaaactatcagaggaaagcagaagggcacagagaaggtccaagggattcacaggtgtgtcgggtgttggcagctcggagaaggaatagatgtctgctgagatgtcctcagccgtgtcccagtagatgatctcctcttccatttggctctccttctccacaggcctggtgtccaggggaaggtccaggaccatggtggtattcctggcttcagcattgagggcctgcagcttcctgaggaaattccagggcaagtctttgggagtctgaggagcccagttcttcatgctgtcactgctgatctgtaaggcgtcctggaggctgagtttctgtgtttggtatgtctctagtcccaaaaggaacagcatttcttgtagtctgctcctctcctctgtggagagaaatgaagatataattacatactctgcatgtcagaggatccaggttagaggtggggagggagagccgaactcagcaggtaggagatggcctccttcagagcaaaatgcaggcacccctaggccacctgagaacaagacaaaggtaacatcacccaccccagacccaagtgtggccagatacatgtgacattagagacgaaaaagaaagggacatccaggcgctacatttaagaattgggagattttatgtaaaaaattggctagagtgagcagctatgcacttgagatgtggaacacaggcctcattctctggccataccccgctcccttcaacatactcctgtgcttctggcccagcagtggattccctcacactgttaccaggaactttccacagtggtcacaatcactgatgcactgtggttttctggttgatgttcttttctgtctacaaacaagctggaaattttgtaaaggaaacagggagttactcttggtacagagtaatagcaatcacttttaaataacatttctccaaacttgaagctgctagtatggttctaaattttcactgtattaaaatatttggtagagatcataagtctgtacttatttgttcagattttcagccataacatccaatagagtatgaattcttacaagcactagatgctcagaacagtaatgtcacctgcaaaggtttcctccaccatccctgttcttggccacagcaccttaccaattttcattgcatataatttactgcatataatttgttcagtcgccaagtcatatccaactcttcgcgaccccatggactgcagcacaccaggcttccatgtccctcaccatctcctggagtttgcccaagttcatgtccattgcatcaatgatgtcatacaaccatcttatcctctgtcaccctcttctcctcctgccctcaatctttcccagaatcagagtcttttccaatgtgttggctgttcacatcaggtggccaaagaactggagcttcagcttcaacatcagtccttccaatgagtattcatggttgatttcctataagattgactggcttgatctctttgcttgagagtccaggggactctcaagagtcttctctagtgccacagttcaagcatcaattcttcagtgttctgccttctttatggtccagctctcacaaccgttcatgactactggaaagaccacagccttgactatacggacctttgtcagcaatgtgatgtttttggtttttaacacactgtctaggtttgtcatagctttcctgccaagaagcagttgtcttctaattttatggctgcagattttagagcccaagaagaggaaatctgtcactgcttccaccttttccccttctatttgccatgaagtgatggggccagatgccatgatcttagtttttttaatatgtagctttaagccagctttttcactctcctccttcaccctcatcaagaggttctttagttcctctgtgctttctaccattagagtactataagctatgctgtttcaaattaccttataaaatacttttgtaatacgatattttataatgaagattcattgagtgcaaccaaatgccaacactttagtaaagtatttaatcattttagttaatattgagttaatatttactcattttaggt

SEQ ID NO: 55800 - DNA, 1282 bp, Bovine  19866880887150
  misc_feature (1)..(1): n is a, c, g, or t
nccaacaatcatccccttgtaatcatgcttcaaagaagttagatgttttttttctttcttgaagagatacaccataaatctgggaagacttaaggattgatattttatcaatttcacttttttttgtttaaaattttgagatgcttttagagtcacatgtacttgtaaagaaattaataaagagtgatctggtataccttttagtcagtttcctctaatgggtgattaaaaaaagattaataaaaatactgcagatataacttttttctctctctgattataataatgtgaatccaaatcttcatcataacttgcttgctttcaggtaaaatataatgaaattgaccttttggtgtgggtactttttaaggagacaagagaaactttttggcttcaacaaagatacacaaaataggattaaacagagaaacgcactgtggtccaacctgtcagtatagatagagcaccgttgtggtaaatgttatttccaaaacccaggggtgctcatagtagcttctctgatgggggatttggaaattggaccaggtgaaagcccgggcaggggtgtgagaaccacacctcctccagcagccgctcctccttctgtgtctctgtgtccttgactacatgcgcccgagtgctgtcctcaaatcctgacaccacctaacagccctcttctctggaggactcttgtggaccctgctcctctggtttactgacttcagtcccatgaaggactgtcaaattgatgtgttctcccaatggcaatgtccctgggacaagtcactctgctaccccaacagacccatatctgggtatgcccctggtcttcctgcctggggaaaaagggagagaacattttaggggacactctttattcccaggattcctggggaaaagaagaccgaagagagtcaagtccacgagggcagcagggtgccttcctcaggcaggggaagaggcgtcccctgcagtagttctaccattgctccccacactcaaaccacatccacatgtcagaaatccaagcagagttttctgagagttttggtggctcttcaggggacatgacaccctctgtcatgtttgtgaaaatctcaggcagatctactagtctaaggggcctccaaatgcccctgggtccagcccaaaggcactggggcctaggtgtggggagatctctgaaggtgagaatgccatctgcctctcttgcctgcatcccatcaagaactctccagtgcaaagttcccatcagagctctagtcagtagagccacctgctt

SEQ ID NO: 55801 - DNA, 2604 bp, Bovine  19866880899837
  misc_feature (1)..(1): n is a, c, g, or t
nctgtgagctgcccatgttcctgccctgaaggaagacagaccaggccctctcacaagacccatgtttgactgactgtctgtagaggagttttttcctattaaatatggggttcgtggtattttgctatacgatcatctaattgtgatgtcttaggtccaaatgggtttctgtgaaatcatctctgatcagtaaataaatagaaaaaaatggctcatgtgtttcttaaagtcagtaacacaccttaaggtgatggcaaatcagaatgtcctagggagttttcatgtgacaccaagagggagctagaggaaaacactctcttcctccatcccccgccttgaggattactgatggagagaggcatcatttctgaccctccagggtgttgtattcttcaggtagttaggatggaggaaaggctgagccccaccatctagtaccaggggacggtcacagtgagacccagcctggtgtagctagcatgtggatttagacatgcctgggacgtgcagttgggggacagccttgtctcctcatgtcctccatgtcatgtgtgcgtgtatctgctgatttacctgatagctgaggcctgtccagtgaagagaagcggtatagtgcccatcactggaatcagaccctgtgggcacatcccacatgcttaggaaggagcgggggccaacaggaggcacactgcaagcagggcatctggggtttcagaagtgatgtgatccaagaaaagcagaagagccacccaacaagtggccagcagcactgaggttcagatgtgaatgcgtgggttaggtgccccttagccctccatgactttttcagcctcaggataaaaggagagagagtggccccgtaaaaccctcaggggcccagcaactctgccgtgaggcccctctgacccgagcaggtcgacacagaggaactattgccctactagccctatagaaatgagcccaggccactcggaagagcatgtcttgggcagcagcctgggggccggtggcagcggtgccagagcctgcagctcagtaaccatccttgggggtgtgctgagctcagtgtgccttcaggaatggcagcccataacaaaggaggatcgataccacaccaggagcaggactggcctgcagcctcagagaagacccccccatgggtcccctgagaggaaggggtggctacggccctgcaggttcacatggatggtggaaaggggctcttgaactggagaccctggggcctggataaataaaataacacatgccccccatgcactggggaggaggaggctgctccttctgtagggactcactttcatcgatccttagaactctttatttgtgcctagtcacttagatcaaaacagaaactttgggggtattttttgcttaaattatctggatagtttctctaataatcaatctaaagtctaaagaaaaggactttctttccatctcataattcctacacattaccaacctgtgttgacacgagacacaatcaatttcccgggaagtagttgtccaggctgggtgagacaaaggagatgtacaagccctgaaagatgttttcttgttcttgagattgtcaaggcaattcatcaacctggaatggtttgccattccaatctctgccttctaagctgttgtttggatttgaattgtacagtccccgcagtgtgctttatacaaacacgtcccagatcatagttcatcactgtggaatatattttactgtatatacttgactggctgcaagccatcctgtctgtgtttatataaagccaaaccacattatcatagattgcttgcacagctatgaaaaaatatcgaggacctactagttgcccccatcagcctgtgaaaccaatataattttgtctagaaattccatctatgcccaaccccattcaaagcagataaacaattctcattgggtggtctgtgttgcagccccctttgctaaaaacagccccatctgcctccctccatctgatcccagcccctggttgagaggcaagccatggtaatcctggctataaagtgctgaacatgatacccagatctgagctctcctcaccagaccctactttcaggtttggtccagggtgggcatccaacgtgagttggataatcaggaaattatgctggaaatctgaacctaggtcaatgaaagtcaagttggtcactctggaggcttgaactccaagctgaaaaacattagcagtgttggcagtgcgagagaagaaagaagcagatgtccacagaaaggaacaaaagggagacttcggatgagggtggagtcacctcagtatctgagctcaactgcattcctgaccctggatttcttgagacaccaccagaactttgtaacaaattcccccttctaatgatcataaggaggtgttggaagctaacataaaataataatagctatcacttgaagaatgctgttttccagaaaaggtaatgaagaataggtggttaactgttggcacaaggtcacacagtgggcagctcagcccctggaccagaggatgaattttgctgctctgtggcttctcaaaatgggcacaaaggaaaagacttggtctggcatca

SEQ ID NO: 55802 - DNA, 1492 bp, Bovine  19866881032886
  misc_feature (1)..(1): n is a, c, g, or t
naacacaatggaaaggcattgagaagggagggacatgatcagatccgtgctttaaaaagaatactctggttacaattaggtgtcatctcataatggtcagaaaggcaatgatgaaaaagtctacaaataacatgctggaaagggtgtggagaaaagggaaccctcttacattgttggtgggcatgtaacttggtagagtcactatggagaactgtatggatatttcttaaaaaactaaaaacagagttaccatatgatccagcaaccccattcctgggcatgtatctggatgaaagtataattcaaaaaggtgtatgtacccttatgtttaaaaagatacatgaatccttatgttcatagccacactatttataatcaccattacatggaaacaacctaaatgtccatcaataggtgaacagataaagaagatgtggtgcatacacaatagaacactactcagccacaaaagagaaagaaagaatgccatttgttgcaagctggatggacctagagagtatcacactaaatgaagtaagtcagaaagagaaagacaaataccatatgatatcacttaaatggagaatctaaaatacaacacaaatgaacttatcttggaaacagaaacagactcagacataagagaacagacttaatggttgccaagtgggagagtaggggaggagggatgggttgggaagttgggattagcagatgcaaactattatatatagaatggataaacaacaaggtcttattatattgcactgggaactatattcaatatcctaagataaaccataatggaaaagaatatgaaaaatatatatatacatgtataactgaatcactttattgtaaagtagacattagcacaacaatctaaatcaattatacttcaataaaataaactttaaataattaaagaaaaagaagaactcagagctgagagtgtttggagagagaagttggggctgtagctggcagccttagcagaggtgtgttgttctgatattatgaaatcaaattatggggatttgggctgtaagcccagtggccaggtgttaccccagaagctcccttcaccagaagccccatgacacatcatcagtaagttatgtcagataagaaccatgtcagcagtttccaggactcatttccctcctgatgacaggagctcctgtagtgaaatccggggtacttttcaagtcgcgtgtgggggtgacaaaacaggaaagtgcatgcatcctagttctcccatgcagttttctggagatttccacccatatctgaggaatctcagccacagaagtgcacagaattgaccgatactgatcttcttactcatttcagtttaagtggtaattgcctcaagatgagaggacatgttgcactttcaagtcagaaggatgctgagagatcatctaacccaacagccttattttaaagcaagatgcagaagctgatggccacagtacaaaagccatcagtc

SEQ ID NO: 55803 - DNA, 1269 bp, Bovine  19866881044070
  misc_feature (1)..(1): n is a, c, g, or t
nttgactcctggaagagacccttttggagaaggcttcagagtaaataatgaagaactaaggagaagagaggtttataaaagtaatgtggaaagtggctaaagcctacctaaggcttaattctgtgtagagagaagattgaattgtagttcactggcacctggatagtaaagaatttaattttgtccttaaaatatctggcttttgtccctagcctcaggaaggcgatgtctaaactaccctgcctgataggactgtctgtttaactgaaggccttgacccaaaccagcaatgtgagttaggtgggggcaggccacactagacagaccagccagctggtttaagatggaggttttggatcattgccagaggaactggagacatagatcagccatgtgaatagtccattaatccatcctgctaacctgatggagttccagtagaaactctgtacgctgagccaggggtgagcatccctgtaggcagtattctgtgtgttgtcacacatcaatgccaggactccagggaagaggacagttgaaggtctacgtttggactctgcctgttactttccccatgagctctttccttagctgacattgacctcagcctttcactgtgaataaatcagagctgtgagcacaacaatctttcatgagtctggagtccaattaaattacagaaacccttatagaagtggttggtgtcagaagtgagggcaggcttgtgtgtaaacagcaccctctgaacagagcagctcctctttggtggagagacgtgtttgctggagaggctcaccttcctgtctcttttttgtcttgcagtgttccactggcaagctaccatcatgggcccggtaggtagcagctgctgagcgcagcccttgctttgcctgttgtgcctcttgcacttgtactaatctgctttcggtgtctcatcctccagaatgacagtccttaccaaggaggcgttttcttcctgaccatccacttccctaccgattatcctttcaagcccccaaaggtgaggacaggggacagggacagtgtgtgatgaagtcactggtacagaaagctgcacctggggcttttcccaggggcccttatccaccaccaggagtacagctttccaggaattaaactctggactttcaggactcactcttcatgtgagcaagggctggcgtggtgagggcttcctactgaagccatgttttcaggggtgttccttgtcgggtggctgagttaagatgtgtctcaggctccagctcc

SEQ ID NO: 55804 - DNA, 763 bp, Bovine  19866881074529
  misc_feature (1)..(1): n is a, c, g, or t
ntagggtgagctattgtattgtttctaacatatattaaagatctaaactttttttttttaagtttatagtgccaaactttaagggtaaaaagaggtagaaaaacccaggcaaacaaatggagtattgttttcaaaggtgactttgctaggggcaataatgtcaaaaggctcccatgtgacttgctatattgaattacagtgaaatcctgacagctgcctggctgttgttttagggtcacttgtatattccccagtggaaaagctagtttttcagttcacttgtcaaataaatatcacatagatattagcagtttgctatggtagaaagatcttagcaactgaaacgttcagttaagatctgatactcagtactttctttcccattctgatttttttcatttgtagtttgggacagcagtaatacctgctagagttggtaggatgagatgagataatttatgtcaagcacttaccacagtgcgtagttgctaaagaggtattagttcatagactattaattctttgagtaccctttgctcaagccagatatttgggaattgtccatgaatcttttctctcctttacctaccaaagatctattcatttcatcttcttaatgcactagaatgggagtaaggcatgacccacattttaaaacaattgggctttaagcaggaagtaactaaatcaatgcttcagtatatcaacttctcttgtacctttattagcagtaaccacatttagtttcttagaactctaaaag

SEQ ID NO: 55805 - DNA, 976 bp, Bovine  19866881111062
  misc_feature (1)..(1): n is a, c, g, or t
nctgcgccttcttccccacgcacttcctggcagctgtgctcttacccttcagaggtaggtggggctgcggttggccactgaactgtgtcttctttcacactagttagtggaactttctcccagattttagtaatatattactgtctgaagtagctctgctttctgtcttttcttgtgtgtgtctttataggtgttttaaatgggatttaaaaattcatgtcaggtcgcctggtgccctcttcagctacattttgttttcatcctatatttcattattaaaaaaaaaaaatgttaaggagctttctaggtggctcagtggtaaagaatccacctgccagtgcaggagacgcaggttcagtccctgggttaagaagatgcgttggagtaggaaatggcaacccactgcagtatccttgcctggaaaacttcatggacagaggagcctggcgggctgtagtccatggtgtcacaggtcagaaacaactgagcgactgagcgcagtcctttttattggcaccaggatctcttccaggtagtcactgttttcctggaatcactaccaggtacttggatctattatcaacactggacagccttttatcagcattcctaactcacctttacccgggggaaagttgcctcctgccaggttctttcctcatgattatcctgagttcggaacagaaagttttcttctagaaacacttggttattctaagacttcagagccaaaactggttagaaagcttaatttttaaaatgcttaccttcgtagtcttttaattcagggaaggggtttaaacaacaaaaatttatattgtcagagttctggaggctgggagaaccaagaccaaggtgtaggtggatggctccctctgaggccgctctccttggctcgcaggtggtccccttgctgcctcttcacgttgttttctctgcacacctgcatccctgatgtctcttcctcttcttatga

SEQ ID NO: 55806 - DNA, 1080 bp, Bovine  19866881345179
  misc_feature (1)..(1): n is a, c, g, or t
natttgaatgttaggaaaacacattacaaagttcatttgattaaaaggaaaaatcctatttatctatagacttattggaataactgccagattggagttgaaggttataaaaaagtcagaatgcatgtgttgtaattaaacagagacaaattgatgcctatgcttggattgacgtgggaggttctcctgtattctggggctggaccctctctggactcagtatggacttaattcattttccatcaggcataaggtttctcaagagacgtccccctgactctttcctcccatggcttctaaaacaccatgggcccacagcggcccttccccagctccactcccaactgcgtggctctctaaggacccaccagtgttgtgctcctcagcttctgtccccatgtgagtctgagaaatacagttcctagacaagcatcctgggaacctgtgatacgaacctaagctacctcaaaacactctggacattagaacatcactgttcagccctactgaaggtgaaaagggggttggaaagggattcactccttagcttttatgtccgtgcgtaattcttattttctttcccacatttatcctagggagaaaatccattacattcggactgagggtaatcatgggcttgaaaagttgtcctgtgatgcagatctagtcattttgctgaggtaaggggctgagcctgaaacagttctggaaaagcaactggagaaactgctctgggtggttctccacgacagcctggactaaaacacccactgtttgttctagaggagtctagtggctgtgactgaagtggggcacccgccttacacctgctgttcatttccttctttacgtgtacggctggggtatcctaagctacatgtgctccttgatggagaccttgctgtaggactaattagggtttaaaataatagggagagtttgcatgcaaggatgtgcccatctaagtgaatctaagcgcttttgttgtctcatgagaattgtacctactcttacagcaattcgtgaacattctctcatggacagagaactaacttaattgtttttctactttgcagtctc

SEQ ID NO: 55807 - DNA, 779 bp, Bovine  19866881522982
  misc_feature (1)..(1): n is a, c, g, or t
ncacatgttatctgatattagggtttctatctcgtgtgcttcctttccatgataaaatctgtgcccttctccaagtacgtcttccctcagctgtccaggcacatgataaggtgtcattcctggtccccttgtgtttaggagggccactggaccaacgaccatgcagcacgtttaccacttcatgttgagctgtttaaatggctctgcagaacctttctgagctctccctccctctgagtggcaggtggcagccctggagatggtggctgtctatcactcagcacctatggtgactaccatgtgcagagcagaatcatggactagtaactgagtaagcaaacgtaatatttgtttaagtcactgagatttggaggggctgtttgttaccacaaataacccactgtaacctgacttactttctgtccactttgttttcccagtttctttattatatgaacgatataattttgcttctatgtgctcatgttttcatggtaaataagaaaaaatggagggatgaatttaatatactaagtcatttagtctaattacctttataaatttcatgaagggaaagcagacagtagatacattcatttcttaataatagtaaatatttcttactgaagacagatgtcctaagaaaagcaaagagcaaaattgttagatttatgcattttatcatgtctttgtattttatgagtggttaataatgaaaaagaaatgcaaagtatagagaaatatgagcttaaactttaaaaaatataatactagaaaga

SEQ ID NO: 55808 - DNA, 970 bp, Bovine  19866881621731
  misc_feature (1)..(1): n is a, c, g, or t
naatatatttcattgtcattattcttttgaaaatcactcaagcttatcaggatttaatcataccatgaagaaattctccctcccctttcccactatgactataaaatacatttcctcaccaatgagcatggttgcgtgaaggcaatatcagagtgaagaggattatttactttgaatccacttagctcagctgcttctctccccagaataattctgaagtgttgaatatctaccacagttaataatcttccctgcattagaagacaaagcaatacacaaaacactctaaggttcaagatatgctgcaggtctgctatcatattctatataaaaggtatcctggaaacttagcaatgaggtagcgttggctggaattttcagatgcatctgcttggagcctggttaattgcataaagtgttcgtgactttcactggtaaatagaaatggaatattgcctgccatatcagtaaacaaaggatgtcacaatcatcagcagttgcagcactccaacaggtgctgatgagccctgaaggaactcacgaaggaaaagaatacctgctatggagcagctttagacagcagccatcccccgaggtgagccctgaggaaactcaggatgtgaaaaacaaaggatactgggccctgagaagagctgaggtgcaggtgcacaccaaaggagtgatttcagcgagtccagagagtcatcttcccatatacagaaaactgctaacttccttaacttgggatatatggttttctttgattaacaataattttttgacattcagacctcctgcccattgttgcaaaacttttatataatctggttccccaccttgcctccttggaattctttcagggtttcttgagatgctgcctccagggcctgaagtcctaaaaattcctgtaatatggaactagccttgtaaaaccacaaactctatggaactagccttcttctccaatata

SEQ ID NO: 55809 - DNA, 713 bp, Bovine  19866881661901
  misc_feature (1)..(1): n is a, c, g, or t
nttttcttccaggagcaagcatcttttaatttcctggctgcagtcaccatctgcagtgattttggagcccccccaaaataaagtctgtcattgtttccatcgtttccccatctgtttgccatgaagtgatgggaccagatgccatgatcttagttttctgaatgttgagttttaagctagcttttcactctcttctttcactttcatcaagagggtctttagttcttcactttctgccataagggtggggtcatctccatatctgaggtttattgatatttcttccggaaatcttgattccagcttgtgcttcatccagcctggcatttcgcatggtgtaaaaacttttaattaaattgtaataagtaccttggttgtatgcagaaaggtgcattgaatgtctcctctcgtatatgcacttcccgttgttttgcttcctggaaaattcaccaagggatagagtgtgacttctgcatttgatcctagtgtgtcagagtgcaggattcacctttaagggtgtgatcttttatgagtgtctcaattaatgtctttacctcccattcctgtaatttgatgaacccagtcaagatataattgtagctttcctaacccaccctgttgtgagttttcccaagctctagatagtaaagccaagccctgggaatttgaaattttttggtagagagttgcaaaaatgtgtatgctaatataag

SEQ ID NO: 55810 - DNA, 1232 bp, Bovine  19866881901543
  misc_feature (1)..(1): n is a, c, g, or t
natcccattgggcacacattcagctctcagatgccctaatttttaataatatagagctgggattctaattgttaattcattgtattgattccctaggacattgtgtttcccattcttgacttgtaatcgaacttttccatacatgtctgcaataaagaagaagggagtgggttactgaatggagtgcacagagatgatacagggtagcccactgaggaaagtggtcccagagaaagtaactcaataccctcattttagtaacacctcagggtcttaggggtataagtgactttgatggagacaaatttaaacagctaacagttacaattggttctgtggttttcaaggaagtagagagtgactgtttctggcggagggagggccagtgttaaggaggagagaaatgatgatttaatggaagtagagctgacaggggcctggctcctcgcacactttcacacagcatgttccaaggtagctggaggtctgaacctttgctgaagaaaatggggaaggcaaggaagtttttattgagttcctgtgaatatgatgtcagcagatcgtatcctgacttaatgctgatatgtgtgctttctagtatattctgttgaactctttgacacaactttccagtgagagtgcatgagagaattcatgaaaaggtgcagatacatgtgctacaatataagattggtagaccatgtcatacttctaacaaatacctaaattgtgttatccttcacttatgctattttacttcactatactattttaccctgagtggtcattgattttcctgtgcaagaaggatcctctgtgactggtctcctcaggtttgaaaagacctgaagataagatgaaatttgagactgactcaggaaacaaagatatttcccggacaattgttaatctaacctttggagacttattaatagtcaatcaagattttccgggaaactcccccttaatatgagcttttggttgaaagacagaagtttttctacatagatcctgggcgcaaagacttgagccctcttccaggttgctcagggggcagctctaaggaagtcccttgcttcctcagttatcaaatgaaggcaatttcctgtgatagctctggtccacctcttaagattggagggaatgttgggggattttaaagcacttggaaaattgaaagtaataaacaaatagaaaacagtgttattgtaagtgtggagtaaagcttgatg

SEQ ID NO: 55811 - DNA, 1479 bp, Bovine  19866880357105
  misc_feature (1)..(1): n is a, c, g, or t
natccggtgaatggttttctggccccatagttttgcctttgcaagatggtcatatcaatggaaacatccccaatacctagtctttatttatctgccacgcagcagcttgcgggatctcaggttccccgagcaggcatccagcgcgggccccctgcagtggaagcacagagtcctgaccactggaccacagggcagtgcccaggatgtggttttgagtctctcgctgagcacagggcacctggctgtgtgtcgcggtagtgtgttccttctcatcgccgagcagctgtcccgtgcacggatgtaccgcgggtctatccgccgaccggatgagaagcatttggattgtttctggttttggcagtttcggatacaagctctgttaatgttcatgcacaagttttgtgcgaacataggttttccttttccctaggtaaacacctcacagtggggtggtggggtcacgtgctaatgtgtccttagttttctaggaaactgtgaaactttccaaagtgctggtatccactttgcattctcaccagcagagaacgagaggatccgtttgatccacatcacttccagcattttcctttttaaagtcattctagtgggcttgtggcgtcattttgtttagctcaaaaagtatgcaagcagtattcctgagtcatgtagtatacgatcatcagcctttgtctataatgttgctttcttcctgttttttaaacttgagttttctctgtacctataatctaaaatgtctattaagaacaattaatctccttgctatacacttaacacaagttaggcggtttatcaatatgatcatttccctggggacatatttcatggagccctccacccttttccctcctggacggacgtccttgaggtcggaggctcagctctcctgggaactccctccaccgtcatccttcggggtactcgttcgcgtgtggagcccgtgttatctcttgttttgagggcagcacaacctgcagttgtgctgaggggtagaccctgagatactcccgatgggtagtcctagatacgacctgtccgcaaaggtcttactgcttatttaactcagtgtgactaggtacaggattttagactagaaataattttctcacagattttaaagatcttcattttcttcttgcttcaaaggttggtggtgaaaagtctgatgaaacttaatagacttctttcttcatatctctaggagtttttcagttcttcttttcatcctatgtatttcaatatttagtaatgacatcatctggagtgggtctccttcatccattttcctggacactggcgattccttctcttccacaaactcggtcctgcatccttggaaaaattctcaataacacatgaatgatatttatttgggatctttcctgccaccccagtttgttgattctgttccttctttcagaaagatctatgatttagctgttggacctccgatctctctat

SEQ ID NO: 55812 - DNA, 2326 bp, Bovine  19866880402110
  misc_feature (1)..(1): n is a, c, g, or t
nctctttgctgaggtggccaagtactggagtttcagctttagcatcattccttccaaagaacacccagggctgatctccttcagaatggactggttggatctccttgcagtccaagggactctcaagagtcttctccaacaccacacttcaaaagcatcaattcttcggcgctcagctttcttcacagtcccactctcacatccatacatgaccactggaaaaaccatagccttgactagatggacatttgttggcaaagtaatgtctctgcttttcaatatgctatctaggttagtcataacttttcttccaaggagtaagcgtcttttaatttcatggctgcagtcaccatctgcagtgattttggagcccaaaaacataaagtctgacactgtttattactaacactcaaataaataaaaagtcttagtcaaggaacatagcatcatactgtggaacactaccacaaactaattttgctcaatacttttattaaccctactacagaatataaattttttacaggtgtgttgttcataattaaaataataataacaaaagtagctgatatgtatcaacggccaatatatacaggtactactctaagggtttttcttggattttcttatttaatcctcacaataactctctgaattagacccggctcatgccccactttcagatgaggaaaaaaggcacacaaaatggtcaagtaatctgcccaaagtgacaggaagtcatggggtctggacaacaatttataggcaagcccacacgtgtccttcaaaagcgttcttggtataaagacactgacttcttatttaaaaggggcaccttcctgttgatgagttcagtcaatgagaacatatgttgtgtttctgagataaagcagacaaaaatatatggtttctactctgctaactctagatccttatctcgtctagtttacagcaaccactctttataaacagattcacggaaatttgaaaatcaagaaaacagcaaagaaatcggcactggagaattcctggaacctttctcctccagtctttcttacattcatcagataccacctccaataaatggcttcctttcgtatttctctcaggctgtaaaaatactggctcccctccacctggactgaaagacatctaccatgttgtaaaactctgggactttctgtgccaccctgtcgaggctcatgaccatgctgcttaatagctgttcactctggaggtggcagtgggggccaggcagaacagtcacggagaagaggggagagtccatgctgacatgaccgccctttgcactggccaggttccacgccaacctgtgatcctcaccgaggtatcactttagcctgatgtgtcatccatctctagccagtcgcaataagtgctaagagtcataggggtgggaaacggcccctgagatgaagaaaaaaaggaaaaccccaatctccaaggacacccaaagggaaggaagggaaagggtctgtgctgggctttcttagcaagagttaagagctccaagtcacttagcagcaactacttagcagcttcatgagacacggagattgaggctcccaccaaaggacacagcaccaaccagcctccaactggagcctctggggagactcagaggtgagctcgaaggtggggagggggcatgctcagcttgcccagagctaccagctggagtttctgacccggtgcatgcttcctggctgggtcacaggtggcctgcggggtccgcccccaatcgcgggagcccccctcccctccagccctctctcaggtccccaggctcgcccctagttctctcaggaactcaagtgtccactctgcagccccctcaaagcccccttaaagccccctttgcctccccgtaagctcccaggccccatacgcccctgggacccccagatgctcccgcctcccgcccccaggacttcccaggtgtccacccagccttggacctaagcgtgcgccccctgcccccctctcccttgctgaagcggggagggcagcgcaccgacgggacccaggccaggcccagcctttgcggccgtacagtgcgacgtgtcacacaggccgggccggctcctcctccccgcggccgcggccactggcgccgtaggggccgcccgcgggatcccgcagggatgccaggcgagcctgaacactcctggcggccgttaccttgttggtgggcaccgagcggaggcgcttgaagatggtcaggatgtcttgcttgctggggtcccccatgatcacccaagaaccggggcgcagcggccccgccaaccgggaagggcagagctgc

SEQ ID NO: 55813 - DNA, 1253 bp, Bovine  19866880532984
  misc_feature (1)..(1): n is a, c, g, or t
ntgaaaatgccgagtcctaaccactggccaccagggaattcctctggctctggtttacaggctatgaggaaaaagggttaacatatctggcctgcctgttctcctttggaagtcctgcttccaaagttgacccttagctcacgtttgggatcttggattctgggagggcgctcatcaccataactggtaagagtggcaacttgcaactaaattgtgccaacaatgtgcttcctgccaaacacttgatttccttctgtgtctggaattttggtatgtggcaggcagacggtgcatatgtgattagtccctgagaaaaactctggggactgagtctctaatgagcttccctggtctttacaactgactgctgggggagtaagtgcatcctgtgtgactcccctaggagaggactccagaagtttgagtctgctatcctctagcttttcctccacaagttgtctccctctgctgattttgctttgcatcctgtaatgcatctcagcctggacacaactctatgctaagccctgtgagtcctcttagacaatcagctaacctgggggtggtcttggggacccttggaacagaagtggcttgagatctgaaattctggcaggccacagtactcacaacaatgtcctcctcggtgactcgagggtgcagattattcacggtcatcttggtgccttccaaagggctgaggacaggctgccacagatagaagaacgttaccagaagttaccagagaacagaacgttaccagacaacagctgtgctcaaacggcagaactcatttcagcaaacgaccaggaaggcccagaggaaacctctatggagagtttcctaccacagctgggcccctctaatcatgtcccagtcaacttatgctaaggaatggaacttctcatgtttcccaaatattccaggcccttccaggcctgaacctctgcacagaatgccactcgtgtttcaagaaccatccggctcaaatggcactttctctttaaagccttcctgtatccccggtggaatgagaggctctttcatcggtgctcctggcagccctgtgctgtggcagacacagtgctctatctgcagctctgtttccctactggcttgcctgtgggctctctgagggcggggtctactggatcttggtttgctcatttgtaagacagaggtggcaacacctacctcccagaggcactatgaggacccaacgagatgcacactgcccacccagctcaggttaa

SEQ ID NO: 55814 - DNA, 2015 bp, Bovine  19866880547255
  misc_feature (1)..(1): n is a, c, g, or t
naacccacaatgaacaggaaccctgcagttggcatgggaggacatggtgggcctggaggcgggtgaatggctccaagtggagatacggctgtggagcctgcggtgagaatgtgggtttactcagtcatttctgggtggagagcacttgtcaaatttcaaggtcttttccagacttgaccccttctttcagcatgtgctgtggtggagaggcggggtttgacaccacctgaggctggatggcaggcgtgtgtggggggcgtggcgtgagagggggcgctattcttggtgctgttctctctgttagcaagtgtttcaacaggcccttcggggcggttcgctgaggggtggtgtgtgtgatcggatgggggttctggttggtaaccggtaaccctactgagccctggagctgggtctgggtgtagaaggaagggaagccaggggtgtgtgggaggctgggaccaccacggagcccctgagcacacccgtctgctggctctagtgaacagggtatggagcccaacaggagcagcctaggggagccagccaatctctcggggtgagcaccccatcctgcaaggtacgcagctgcagggaagggtctctggtcacgtcatccctgcacacttcctgatatcattttttataggaagcatctggctttcctgacctttggctatcaaacagaacaaacaaaccaatagatatccatctctagggtttaatttagaataagaaaaatttaagtatgggccccatttctgttttccagccattcccccacccccctgcttttggggggcaagcacttgcctctttcggtgtagctagtcacaacagcttgacttctcgatcccatcgttatgaaattggtgggaggacactgtctgtttctccataatggtgggggggggggtgttcagcgcttccccaggctaagtgaatcttgtagcagataggccaatgcgttgtaattttggcacaggtgaagtgaggcaaatttaatttccatttccttctggtttgctttgcccgttatccccagatgtcctgacgcaccaaataaagggaatgttttcccgcttggagctgtcttcgcgtcaggcatagctcaccagcagtcctggtcctcacaccatgcttctgtccctggcagatgggtttcatgttgtctccagctcagtctggggaggtgggtgagtgccagggggagcagggttctgttaggttaacatagcaatgtcagagcaccttcaggaaagcctggaccttttctcttttattcatcttactttctggccacactgcgcagcttgtgagagcctggtttcccgaccagggattgaacctgggcccacaagcagtgaaagcaccaaggccaaatcgctgggctgctagggaatttcctggggctttctcttttagattggaaattgagacttctgaattaggtatttttattaatttgcccgaccttgaagcaaagtatatagctgttctgtttacactgatggcaaggaagaacgtttttaatgccatgctaagtgaggtgcctcatagcctgtgcatagctccaactgttacactaatttattctatacaaggcagtgctgtccccagtacttgacatgacccctgaccagtggtcacttagcctttgtctcatgggactgggactggccagcagtcagctcactgaaaaagttagataaagcaagaatcgttaaaaacatacacagtttaggcattttatttctaacttaaaaaattatatttcatgtgctagtctttcactgaccctttcttttaccttgaatcttctgatctgaattgtcaattgttttcttccataaacatgcctgttatttgtgtttgatattcagtttttgcctgagaaggatacagaacttagatgcatgaagcaaccttgagttgctcaatcctagattttacaaattttcacacaatcctttacacttgtcttacctgtcttaacacacacctataatttagttatg

SEQ ID NO: 55815 - DNA, 1063 bp, Bovine  19866880574350
  misc_feature (1)..(1): n is a, c, g, or t
ncttctattaatgcatgatggaaatacctggaacatgtctaatagttcggttatttttcaccaaagctgttgctttccaattaatgcagtgtgatatgcactaatttcagattacatttccctgatactgaaaacttagagattaagttcacctacaataaactcagaaagaacacgctaagagttcttgagtaaccaggactgacgtggctgctctgccctctgcctatgccgggacataaaccagcaaatccaaaagcatcaagagcagccttggccaggtgcacaggccaatgcgtttcccagccaccaagcggccaaaagtgaacagcacttttcgtttaaatagatctcattacacggaaagttctaggcacaatgtacacacaggattcatttttttcttaattaacctctaaagcagactacagggtaacacataccacctacagcagcctttgttggtacattaagaccttccacacttggtccttgctctggtacacctgaaagttaaaaatattggtatcagtgcagaaaacagattcatcaaatgtgcttttgaatatgtaacacatccaacttgttcagtagtacaaattttatccaggtagatcaatgattgtcttttctttttagctccatattttatcactctaagaattttaatttaaaagtccattaaaatagaagtgtattttgtatccagttgctttgttagtggtctccctaatcattataatctggaatcctaccttatggtctggtgttttaaagtaaaccgttctgagatacctagtacatatgtgtactataccccaacagatgttaacatttggcaagtctaatgtgaatcacatcaatgatagaaaacctaaattttcacttgccaagaaatctgctgagttttctagttgatctaaaacactgatcctggttaggaattccattaaggcttctcaggaccatcacctgatcttgaggttgctgactctatttagtccttcctgttacactaaattccttaaagcagttccaggcttgactctcacagaccagcacg

SEQ ID NO: 55816 - DNA, 2276 bp, Bovine  19866880582201
  misc_feature (1)..(1): n is a, c, g, or t
ngcatggagacccggcagcagtgctggaggagacttaagaagaccatgtgggccaggccggggaggaaggctgcggggggtggcacagaccctgtgggacgaggcctcggacctggcctgggcagtcagagggcaaaatcctgcagtctctgcaggagctcctcgggcaactgagaccggtgtgcttgaggggtactgtgtgagagacgggggtctttaatctctcagagccacccccgcaatggatacacaacttcagacgcgacttagtagaggaagagtcaggccctcatcctgccaggagaatgcctacgcctcccacctacgttagagaccctcagcgggcccagggtgagggcttgccaagacagctccctttttgtcttgcaggggacgagctgaccaaaatagaggatgaagatgagcagggctggtgcaaggggcgcttggacagcggacaggtcggcctgtaccctgcgaattacgtcgaggcgatccagtgacgggctggtggggcttggcttggcggagggacggagttggaggtccagcagctctgttagccgttggccccgggcagcggcccctccagccagccatgcgggcatccactcctcttcctgcaaaagatgatggttccattgctgttggcttcatggtgtctcttgaaggcagacaagctggtcatttcacctggagctcggccccctttccacagtgcagatggagagagccgatcacaggaagctgcaggacaacaggaatcaccgccccccccgccccgccccccacgctgtgtgttggcttatcatggatccgtgtattcttgaccttgtctttcctcctctcctccacgtcaatggtaacggtgggttccactaatccttgctccactgattcctttctctgacaagtcccatcacctgctaaaacttaaatgaacaaacttacatgccattttgtgagtgaacactttgaggtttttaatttaaaggctgtgtacagttacttttttatattcccattcttgcattcatttatacttaaattatgacaaaggtcgatgtccaccagtggtcttgaggcagtgtctctgtttccatgctcttctgttaatcacccatgccactgcctggggcgagagccggcagcctggacagaccatgtttgaagcaagagattgcagtagaaagatgggaacacatggctgggtttccaaggtgaatgctctccgcgtttggggtgtccaaatgtgagttttgcaaataaccttatgtagtcctctctaaagccgccatatttaaaatctattttcactctatttgtgcttaaactttactcttgcaaattaacaattttatcagtgatttttgaaaagttaaaatataagactaacgtttcaagtgaatgcatctatagttaagatgctttatattagactgtcacgtcttggtgtatatctgtatatactatttgatattcagagaatctaaagagcttgtctactgtgttcatgagactgagcagcttttgacagtggcttcaatttgtaaactgcttgaagaccatccgggcatcagcctggctggttggctgggcccagtggagcctgccagagggacgtctgtcttcgctggccagccgggagtccagtgtcctcagcccagctagccttagtcccctgtagcagaacactgtacaaaactcccgcgtctttgcgagcagctgcagatctcactgtcatccgtgttcctcgtgagcaaagaaaagctgggtctcaccccacagcaccagggtctcctgagcaccctgtggccatcagggagccgacaggctggggcaggaagctgccctgtaaccacgggccggcgagggagggcaaacctttcctctgtgtaactcagacatgggagaaatggctgccgccaccacaagctatgcattctactcggtgtttccagtgagcttgatgtcttgcttggaaagtggatgtgtctgtctgtcctgaggatgcgtgtctatctgtcctggaaacttaccagcagaatcctcattcctttgctacagatgtaccaaaaattgtcaagtcttttcagtttaggagtttctttaaacatatagtattttagaaaaaaaaaaatcaataaacagttgatctcgtgattatgaccatctctgtgcccgtgcgtgtgcctcccacccacaccagctggtgggatgtgtcttcaccggcgtctggagccaggtaagaccccaggtgcaagagcactgcccag

SEQ ID NO: 55817 - DNA, 1431 bp, Bovine  19866880606757
  misc_feature (1)..(1): n is a, c, g, or t
ncgagagcaaggttcttcccagcctcgtccttcgtgctgcagggccccgtggtgacagagtcttctgtgatggggcacctggtttgctgtctgtgcggcaagtgggccagttaccggaacatgggcgacctctttggaccctttttacccccaagattatgcagccactctccccaagaatccacctcccaagagggccgcggaaacgcagagcaaggtgaaggtccggcacaaaagcgcttcgaacggctccaagacggacactgaggaggaggaagagcagcagcagcagaaggagcagaggagcctggccgcgcaccccaggtttaagcggcgacaccgctcggaagactgtgccggaggcccccggtccctgtccagggggctcccttgtaaaaaagccaccaccgagggcagcagcgaaaagactgttttggactcaaagccctccgtgcccaccacttcagaaggtggccccgagttggagttacaaatccctgaactacctctcgacagcaatgaattttgggtccacgagggttgtattctctgggccaatggaatctacctggtctgtggccggctctatggcctgcaggaagcgctggaaatagccagagagatggtgagtacgagaaatccccccgccgcggctctcggttacttcctttgggttctttttcttccaccttcatttgtttcagccgtacttcttattcttacaaattgcacgttgcacggtaattcctccacagtaaagccccaagactaatggacagcacagggaatacagctagtgctttgtaataactctgaatggagtgtaacctttaaaaactgagtcactgtgttgtatacctgtaacttatacagtaagtacatcaataataataaagcccctaggcctaaatgatggacagaaaatgaagtaatttagacatttgtttagcttttattttcatcagtaatttgtgttcacaggttatgcagggtcatattagtctcctccggctcattaaaacaaacgtcagtgtttcacgccccttctcaaacctgacctctgccagattcctctgtttctgagcaaaataagcttttactgctgtttgagttatctgtggatcttttctttcatttttcaacatctgtctctgtaatattgatgaaattaatactgtggttataacttctttcttttaaaactttttacttccctagaattactcatttgtgtttttatttgctttttattttcttggaccacacgtttcggatgcagactttcaagggggggtttttgttcttcaggtctgtttttctggggcattctttatcgtcgcatcatctacttctttcctctgttgaatgctgttttcttacccatgtcttcaccttacttgatctgggccacatttaatggtgtgcatcatg

SEQ ID NO: 55818 - DNA, 1119 bp, Bovine  19866880758923
  misc_feature (1)..(1): n is a, c, g, or t
ntgaggacggaggggtggggagtgcgcagcggtggtcctagggcccgaccaggcagcggacagtgggcgctgggtgaagccacaggccggaagaggaactgggccaagaagaggaggcggatccgagaggcttcctaagggaaggcgtctgttcagggcccaagaagagtttggattttctaaacagaggtcagagaggacaaaggccagcaggtggggggtttacagcatggtaacaggctggggattcagccggccagctcttaaattgtgtgagcctgagtcacgttaggaggaaaggtcttgagaatgggggagatgtctggttatgagcccttttaaatcaggagagttgtggttgagagaggcacagtgatctgcttcaaatctttggcctccacgaggccttgggcctccctgctgccctctatgaacctcagtttctccacctgtaaaataggatgctaacttgccctgctgactgtttagtgacacttgcatagccatagctgggtctgtgagtacgatggtctcatccaactggagagcctcaaaaccagtggatgtaacccctgggctcacaagactagataaagtccttgcagttgcttgctgctggagggggcccagaggtgcccagaggctaatgccaggaggctgggcccacagcctggcggggcctgggcttgccaaacaccctcgacctttggcctgcagttgcggcgccgtttcgggaacgtgttcagcctgcagcaggtctggacgccggtagtcgtgctcaacgggctggcggctgtgcgcgaggcgctggtgtaccgcagtcaggacactgccgaccgtccacctcaggcactctacaagcacttgggtttcgggccgcgcgccgaaggcaagtggagagggcaggccacgtccctgcaggcggaggcagggtcgtggattttcggtgcaggaaagagccaacgaatttgagggggcggcaggtggagaaaggagactgtgccaagcatttggggaggaaaaattggatgaggcagaaggcgggggccttactaagaccgttgcaatcccgaaggggacgtcggtgtgggcaggaaagaggacaatgtcggggtgggg

SEQ ID NO: 55819 - DNA, 939 bp, Bovine  19866880762671
  misc_feature (1)..(1): n is a, c, g, or t
ngtggccaaaggattggagcttcagcttcagatcaatccttccaatgaatattcaggactgatttcctttaggatggactggttagatctcctggtccaggggactctcaagagtcttctccaacaccacagttcaaaagcatcaattcttcagcactcagccttctttatggtccaactctcacatccatacatgactactggaaaaaccatagttatgactagacagacctttgtcagcaaagtaatgtctctgctttttactatgctgtctaggttgatcacagcttttcttccaaggagccagtgtcttttaatttcatggctgcagtcaccatctgcagtgatactggagcccaagaaaataaagtctatcactgtttccccatctatctgccatgaagtgatgggaccagatgtcataatcttcgttttttgaatgtttagttttaagcccagtggtccttgagaaggcattcaaatgccagatatacaaaaggacatacacgaagataccgggcaagaaaagggcaacaacagacagttactgaattctccccacaaaaggatgctttgttttaagactaacaaggtcctgagattcctaaacgatagtactttttgattcaatgattcaggaaatcaagatgacaaaagactacaataaattcaagctttaaaatgaattgttattttattaatcataatcatagcatcatttttatacagtaacatataaatattttgtgtgtctgtctgtctttgtgtgtgtacaagggcagttaaaaaaaaaaacccatctacaaagtacagctggtgggtacagtcctctgtaaccatcctctaatgccctggagaaccagggtccctgttgggaaccaccaatgcactggagagagaactttaaggtggatctgggtctgaggagttactaagctt

SEQ ID NO: 55820 - DNA, 1032 bp, Bovine  19866880762950
  misc_feature (1)..(1): n is a, c, g, or t
nctgaaatcccagagtgggcagataaaagaggaagactttgaacagtccaagtcccaagctagtttcaacaacaagaaatcgggagaccactgccaccctgctagcatcaagcacgagtcttaccgaggcaatgccagccccggagcggcgacccatgattccatctcagactacggcccgcaggacagcagacccacaccaatgcggcgagtccccggcagagttggcagtcgggagggcatgaggggtcggtccccttctcagtatcatgacttttcagaaaagttgaagatgtcccctgggaggagcagaggcccagggggcgaccctcatcacatgagcccacacatgaccttctccgagagggccaacaggagttctttgcacgctcccttttctcccaattcagaaagcctggcctctgcttatcacacaaacacgcgtgctcatgcttatggggaccccagtgcaggtttgaattcccagctccattacaagagacagatgtaccaacagcagcaagaggaatataaggactggggtggcagttctgctcagggagtgatcgctgcggctcagcacaggcaggagggaccccgcaagagtccacgtcagcagcagtttctcgaccgagtccggagccccctgaagaatgacaaagatggcatgatgtatggcccaccgatggggacgtaccatgaccccagcggtcaggacggtgggcgctgcctcatgtctagtgatggtctttctaacaaaggcattgaactgaagcacggctcccagaagttacagcaagaatcttgttgggatctctctcggcagacttctccagccaaaagcagcggccccccaggaatgtccaatcagaaaaggtacggaccaccccatgagaccgatggacacgggctcgcagagtctacgcagtcatccaaaccgagtaacgttatgctgagacttccaggtcaagaggatcattcttctcaaaaccccttaatcatgaggaggcgtgtccgttcttttatctctcc

SEQ ID NO: 55821 - DNA, 575 bp, Bovine  19866880884453
  misc_feature (1)..(1): n is a, c, g, or t
ncttgtgcggtttttacagttgctcggggaactgtaagtctgcgttgcctgactcctgtgtatttaaattctcagccatcacgttatattaactcattttttgcagtttcctgggaggccgtgtgtactttcctggggtggtggggggagtgggaacggccgtgtacgtgaacaaacacagctgtgagcgtggctggtcctgggccctgacagtggtgcctcatgagcccccatgagagggtgctctgccagccaggcgctcaccgtctggagtctgcccccccaaaagagcagatcgcgccgtgaggttgggggactcaggattcccgttagaagtggctctggagcccgggtgaggcccgtgggtcacgtgcccctcccgctttatgtccaggcgtgtccatcctctccttcatcccctgacacatgccgagcacctgttgcacacccggcctggagacacagcagacacacagctggcagtcctgtcttcccgaggtggtctgccgggtgatggatattgacctgacagacagatggtgctgggaactgagatggccttgagagcaaaggaa

SEQ ID NO: 55822 - DNA, 567 bp, Bovine  19866880909919
  misc_feature (1)..(1): n is a, c, g, or t
ngagacctgctcctagcaggaacgtttacttgaaaagttcctgatgactaatgcctgccatataagcagtaccgctgcctgctgggatgaatagctgtcttctcacgcagggagaggagcagtgattagaaaaatcctgaacactgaaacccccctaaagctgctcatgaaaggagttgagaagtgatgtaaccagggaaccgaatatatgtaattgagggaaagtagcttatttaggctcctacatccacaactgtatcacctccctcctgaaaatttaccttttgtgctcttcaagtagataaaaatagcagcatgggccatcatggtggcatttcttgccagacaaggagtatggtgtatgggtctctggtgagcccaccatccttagtgtgtgtgtgttcaccctctggtcactagagggtgcactctgtccctggatgtaactggtgttctcattttttttcttagtttgaggacagtattcacccttccttaacttttctagtcttgttcgttgtttttgacccatgcttgatttattggtattttaactaggtgtggtgg

SEQ ID NO: 55823 - DNA, 1161 bp, Bovine  19866880987268
  misc_feature (1)..(1): n is a, c, g, or t
ncaggggatcttccccaaccgaaaggatcaaaccccatgtctcctgcatcgacaggcgggttctttaccactaatgccacctgggaaacacatgcatgcatgcattactaataatccccaatatctgcataatctccaccttttggctgtgccaatgctcacagactcagtttcctcttccacaaagcgggaaccctcgtcattattcttccccgagatggcaggacaggaatcacgcgtcccattttgcagatgaaggaactgaggctcagagaagtggcattcagtgcactgaagccacaactcgaacacaggtctgtgatgcttaatgtaggaggcgaaaggcgagaaaagatctggggtgggctgagattgtgaaccgagcacacttttatctgctggcagtctgccgatggtcacaaatgcggggtgattggcccgcccgggggccatcaggggcctgcagcctgccccgggcacagctgccaccctggcagacccccaaagagccccccgaagaatctctgcgctctcaagctttttttcccattccaaacatgccagagccccacggaccccagaggctgctacttagcgccagattaatcacaccgaattctccatccagatattgcgtgcaggccgaattcccaccgctaatcgccgtaatattctcctcggcgtgtgcaggcggccggggcgatgttccaggaatattaattctccaccgctggctcactcccgccacacgcatgcgccccctgcaccgccggctgatgttcagggatcagggggctgggcagggggacaggagaccagcaggaggcagagcccaggtgggaagcccttcctggggccagggcccccctgggtgggaagcactggccccaaggcctggctgacagtttaacctgagccagtgcagggctagaggtggctcatgcctgcggcgggggttgccccacttaccctgtctctccttccagttttgccccagagccccccgtccctggatctgcagtagtctcagggctcctgagaagtcacatggtacgagtcctctgatgtcctctcaacacagcagagctttgaggaaatgggcagccagggaccagctaatcccagccaaaaaaaaagcacacacacaaaaaggagtaaaat

SEQ ID NO: 55824 - DNA, 1065 bp, Bovine  19866881166502
  misc_feature (1)..(1): n is a, c, g, or t
nacgctggctgcactgttgctgcggtggagtgacgagtgacaagccagcatctgctctgtgtgcaggaagctacaacctcaccagtgtgctgcccacagctcccgacatggcccagttcaagcagggagtgaggtcggttgccggaaagctctccgtctttgctaacggagtcatgacttccattcaggtcagtgagatggggactgcggtaactgagtttggtggtgggttcgtaatttcgaaaatgagatttggaccactctttaattgctagaaaattaggttttatattctcgatttatgtgtttgctacagtgtaacccaggacatcatgaaaaccagaacttgtaatttcatatttgtttaaattttctagtttatgactccagaggaattgttacaggaattgtcatgatcattactacttttctcttatgttaaaaaacaaaaataaataagaacaaagttaaaaattgcccataaccccacccacctcccaaggaaaacgttcattaatattttggtttattctaattctagatttctatgcatacctgtttaaaaacgttaaaggattatattgtatatgtgattttatatcctctttttcttcctgatgttttgttatgagcatttgcatgtaattcaaaattctttggaagctattcagtacattctgttgagcaaaaatgcatgtaatttatttaactattccccaagttgagcatttagattgtgtgtttcaatcttttaaacgaggcgagggtggaacacacttgtgtataacacttgaaggccagctctaattatctgaaggctattccgtgaaccttcctgcttacatcaagttattttaggacactcatgaacgggaaacgcagccacagagagcaggacctgataggcgtgaactgatgcctctaagggggggtcttccaggtggggaggcacccctgctatggaagcttcctccgccctgggccagcagctgctgtcggcacaagcttgggttagaattcccagagactcttacatgtcccttaggtcagccgggcccacctcag

SEQ ID NO: 55825 - DNA, 1848 bp, Bovine  19866881286575
  misc_feature (1)..(1): n is a, c, g, or t
nccctccagcccatggccaaaagcctaatgacatgagacagctgctgcaaagcgcacgggacgcccgtccacttacgaagatgttttgctgtcccgggaccactttttgatctgcgagagcttgttgatcaggaagatgccctttccctgggctttgccacagggtttcataatccaggtactcgaggggcttttccggaactcctccacaaacaggttgtagtcggcaggcagcatgtaggtgacaggaacaaagtctgaggacgggagaggggacagtgagtgagtcagcccaacagcggccacggacgggaagacaccgcgcctgcctttccagggcctgtgccgtaccctgcgcccctgcccagcgtctgatggagcaaggacttctgccgttcaatccgtgtgagacacgtacggcttgctctactgcgcttcacagataatgtgttttttcacaaaatgaaggtttgtggcaacccggcatgtagcaagtctgctggcgctatttttccaacaacattggctcaccttgtgtttctgtgttaccttttggtaattctcacactatttccaactttttcattatgatgtttgttattatgtttgatgaactatgataagtaatcttgatgttactgggtgggctgagacttacggaaaaacccaagggaaatttctggccaagccaatactactgcaaaaaaaaaaaaatgacaactcactgaaggttcagatgatggttagcatttctaggtaataaagtatctttaaatgaaggtatgtgcattgtttttttgagacataatgctattgcacactcgaaagactagagtttagtgtaatgataacttttacatgcagtgcaaaaccaaaacaatcatgtgacttgctttacagcaatattcgcttcatttattttttataggttttgttttttttatttatttttggtggcaccgcacggcttgtgggattttagttccctgacccgggattaaacccaggcccctggcagtggaagcatggagtcgtaaccactggaccgccagcgaattcccactgtggtatttgctttattgcggtgttcttgaactgaacccaccgtctctccaaggtctgcctgtaacgagttctcttttggctgcatgccagttactttttaaatctgtaccatttaatccccacagcaacctctgagctcggcattgttattattcccatttatcagataaggacactgaggcccagagaagtcacacatcgtcttccccaagtgtgcaaagggattctgaaactttccgccaggccagcttttctcacaggatgctgaatggacacaccactctctccgggccctcccagacacaggattcacccctcccggcagtctgcagcccacggaggggcccctgccctcctgagcacatttccaaggcactgatacaaactcaagattccaaagctgaagccctccccaccccctgccctgctcctccgtatcctgtaaacactaggaaagaaacaggtgctcacaactcgcacagacacactcatcccgcagagtcaacagctgccacccccatgccatgtgctgatgggggaaaaaacaccacggctatttatttaaaaggtgaagccggtggaaaggacacgaacccaggtagaggtacttcccgctttcgtccttctctgccagcgggctcccttccttctccagctccttcctgtatctcttgatgtttttcaccatcaggtccttccgcgtcagctcatagtggtttgggaaatggtgactattgatcatccgagagccggtagccagtttcgacactaaaaacattgcgg

SEQ ID NO: 55826 - DNA, 873 bp, Bovine  19866881332963
  misc_feature (1)..(1): n is a, c, g, or t
ncatttccctcctcacacacagatgtaaaaataaatggcatttggaaagcaaatctcagagtcacttagttaacagctttgcgtgttacatgcgtgctaagtcacctcagtcctgtctgactctttgcgaccccatggactgtggcccgccaggctcctctgtccatgggacagtctccaggcaagaatactggagtgggttgcatgccctcctccaggggatcttcctgacccagggatcctgcattggcaggcgggttctttacccctagtgccaccttgggaagcccagttaataactgtcgtcactagaatcgtattatgatttgatcacacttacatggattcttccttaggtgctgcccgggacagaaggtcttcctgtgcattcattttatcgacagcttgggcttgcttttcaatttcattaaaacacgtatttgatagtttctgggctcccaaacttccttttttggccccaagctggaggatacagtagaagattacgttttacccaaactgtttgaaaacatttgcaacgacagctggcagttactgagggttatcacttagtcctcacgcctctgtgaggccggcgcggtcatcgtctccaggtgacggaggaggacctgagctcttgtcagtaaagagacttgaccaaggtcacacagctggcaagtgacgaggtcaggattcagggctgacaaccctcccagcctcgctgcgtgacagagatcccagggagtctcggctgattttttttcagagttttaacgcagacagagaaatgtgaaacactgcagaaaattttcaccacgtataacgtcaccccattgaacaaaacgaactttttatcagagccacatttatcag

SEQ ID NO: 55827 - DNA, 1686 bp, Bovine  19866881345325
  misc_feature (1)..(1): n is a, c, g, or t
ntggtgggcattcagttttggtctgtagtaaaaggtcctacagagtgcctcattcgcaaagcaggaaagcgacaggaagactcatcatcccagagatcatgtaacaatgtacctgcagggctcaatgaacctggcttaataaatgttcactgcttcagtagttcctattaccaaagttgctgtgaagattaaatgatactgtttctattccctttggggcagtggctctgcaggtggccaggactctgcactaagagccaggtctgacagggcttctatcctgatgcgtccactgaccagctgtgtaactgtgcacaaagattcacatctttgagacttagattctcctttgataaactgtggtaataactggggttgcatgaggaataaatattcagtgtctgcacacagcactagctcaactagtctgtcctctcctctcttccctctaccactatttcacctggaaagtcacttaatttctctggacaaatccccaccaccaccccacccattttcttttacacaaaactgagatgatatcttgcctccacatatagttactcttcaaacagttggggggactgtcattttgcttaaacacacctggtctctgcctgattccacagttgttactggtttcgaggagtttttggcaggagtctcaacctacctggatggttttagtgagcttcagagcaggggtcactgtcccaatgggtgggctcatgaaggcagcaggggaattccgcttcaagctgattttctcccgggcatcagcaacctggtggggcttctggggcactgtgctctgctgcttgcgcgagttcagcatctctctggcatcctgcactttccctttgatccggaaccgagcatctttctgcaaaagcttttcccgggcatccttgactcccagcttgaggcgggcatctgagaggccaattttctgccgggcatcaaacctctgctggaaggtggctgtgcgtgctggctggctaagaaggctctgttggatcccaacacgcgatcggacacctcccactcctggtctggcattgagcctgcaaataaaaactgcaatattaagaagatctggatatcaacagtagcctgtggtagtagtagagtcgtggtaatactgggaacaaaggaggtcctggagaaaccagaaagctgcttcctcttagaggaaacaattcagtctatacagagacttctttcacagttttatgccttttaagtctgcatggtaaacaaagggaggagggcctggtggtttctatcattaggcaagactgctttgcaccccagaccaggtgttttgagacactatcatggataataacctctaaacaataccaaatgaaataagaatatttcccagatatcgtaaacccacacagcgaaagactaactttagtttccaaaattctttcattccttgttctccatcagccctctcaacaccctgtgaagcaagcagtattatgcccattttacagtggaagacacaggcttagagaggttcaatgatcaacaaagggcgcccagctggcctatgacagtctcatgtctccagggcaggtagacacccccaatgggctgggaccaagaaagtcaacacatgggtctgtctcggagtcgaggtctaataaaaacataaagactggaagaaaagaaaaa

SEQ ID NO: 55828 - DNA, 3880 bp, Bovine  19866880201655
  misc_feature (1)..(1): n is a, c, g, or t
naagactcttgagagtcccttggactgcaaggagatccaaccagtccatcctaaaggagatcagtcctgggtgttcattggaaggactgatgctaaaactgaaactccaatactttggccacctgatgggaagagctgactcatttgaaaagaccctgatgctgggaaagattgagggcaggaggagaaggggacaacagaagatgagatagttggatggcatcaccaactcgatggacatgggtttgggtggactccaggagttgatgatggacagggaggcctggcgtgctgcggttcatggggtctcaaagagtcggacacgactgagcaactgaactgaactgaactgaattcatgcatcataagcatcaaatcttcaaaaatagttggtacagtgaaagtattagctgttcagtcatgtccaactcttcgtgacttgatagactatagagctcacgaggcttcctctgtccatggaattttccaggcaagaatactggaatggattgccatgctcttctccaggggatcttccagacccagagatcaaacccatgtctcccgcactgcaggcagattctttactatctaagccaccagcgaagcctccaaaatagttggtaggccctgatgcttcaagaaagctttgattccttaagcccttggtttgtaaaatagtgacaactttgatgaaattcttcacatttgtaagtaaaattctgaaacttttgagataaagggttatttcaaatctttcttatgaggatatacacacaaactgtctctgtttactcaaattctaaattagttgcagtgtgaactaatcatttcaaacattaaagttcggcctcaggatgaatttaaaggagaaacatttaggcagaaccactggagaattaccctcaaagtaagaatgctaaatccataaatattttcctgagggaaaaagtgacagtatcatcagtttctaattccaaacaggaaaaaaaaaaaaaaagtctgtggaccatagaaaacaaccttgtgttggaacactaaattatataatatttcctaatatttgcaacaaagaaatgtaaaatagaaacccgcattagagatctttgatttattaatatcaaccacaatagcccaagtaactgttctggtacacgggtattatttgggtagccatgccccaaatgcacaaaatccagcatggtaggtatttccagaaaactaaggaggcacccaaaacaatgagtttaacaggagcaatgtgagagggagagaatgaataaaaaacaggaggaaaggaagcagagggtaccactcacatctcttatcactcttttcagaaaaccttctctcctgtctttgacagagaacatgccccacttctgcctcccaggcttcgattcatccatcaacaagcaccgactgagctcagcctatgagctggacacagagctaggtccattctataaagatgagtcacacatggcctccatcctcaaggaaccacagacttgctaagaaatgggcacagaaacaaaaaatctggaaagagctctgagagagggattgccaaatgctgagtgacttcatcgtgggctgtaacaacttctttgctcacagatgctgtggggcaggggactgcgtggtgaggatggcttgtctctggatctccatgatgtcttggatctcaaccaggaaaacacaaagcctgactggcagactttgtgactgggagctggattcatctggtgcctggagcgaaaaggtttaggttcttctatgtcttacgtctgggtgaagggacctttaaaacaatctcctgctgctccatgtttctctgtttctcttttatttcttactgtattatctgactgtgaccataaaaaggcctccaatatgtgtcctacccagcccttttcagcttcagcttccataccttttccctaagtctgaagcagacagttgcttggagttgcccaaagacactcaattctttctcccctctcgcctttccactgaaggtttcctccaccttgaatcttccctgtgggcctagcaacctcctactttcctttccagaatcaaccctgctgtagtctggtctctgaaacctttgctgaggtcccagctagagttaatgccctcctcctctctgcccctcacacagtgcattctcttctggtctacatgttcagtactgttgtaataaactgtcttcacgtctagctctctcaccaccctgtaagccctgaacacctttaaaggctagagaaggagtcactcccatttgtcatctcttctgctctcaagcatctgggcacgtaagagatgtttagtcgatatggacttttcatggtgaccttcaaaatgaccctttgcagcccatgtgccacagctactgagtctgtgctctagagcccgggagccataactactgagcccatgtgcagcaagtactgaagctggtgtgccctagagcccacgctctcaccaagagaagccatgcaatgagaagcctgccacactgcaactagagagtagcccctgcttgccacaactagagaaagcctgcgcagccacgaagacccagcacagccataagtagataaataaaattattcttaaaaaaaaagatgacccttcacattctcgggcttcttgggcttcccaggtggcacagtggtaaagaatccacatgccaacgcaggagatacacctcagcttcaatttctgagttgggaagatcccctggaataggaaatagaaacccactccagtattcttgcctggaaaatcccaaggacagaggagcctggtaggctatattccacagggttgcaacgagttggacatgactgagcatgcccgtgagcgtgcgcatgcgcatgagcgcgcacccgcacttggagcatttatcaggcttacattaggaaagcccttttgacagccttcatcttctacacacaacagtcttgcaattattagccccatttagagaggagaaaacagaggctcagaaacatgtggtgatttgcccaaagtcacttagcaagaaagcggcagagcttgttcctggatggtctgtctgctgcactatagggaagtggcattgagctcaggtttagagatttgccttgaacccaggatccatcctgagcccagggccacgtctgctcctcggctcacttggtcccatcactttcactctgagcccccctgaggatagacctcctggaacccagagggaggagggcctgtgggaggtgactggggttggcctccagcaggctgactcaagttcaaattatggtcaagtcagcaaagctgaggctccagccaggactgcactgggaaagggaagggtgagaacttaaattatttctcctgcaactccatccctggcattactcttcgtggaaaatctacattagagtccctatcctacctaaatgaccagaaaatcagggccaaattaatgataccttcaaatacttatgaatggtcttcattttgatttacttaattttttgaacaggaaatacatttacagggtctgacgcaagaaagtagaccgcaaacgtggtccttcccacctttgtcctgacaccaatttcctcttccccaaagcgttacttcaatattcaagaaaatacactgatacacacacatacatattcttttttctcatttttacatggacaggcagcctatgtatgtactgttctacatcttgatttgttttaccttgacaatgtcttggaattccttctgtatcagcacacgaagaagggcctccctcttttttttacagctgtacagtatcccattgtctggctgtgtcaaaatttgcttaactggttcctgggtggggggggggggg

SEQ ID NO: 55829 - DNA, 879 bp, Bovine  19866880381459
  misc_feature (1)..(1): n is a, c, g, or t
ncatacgcatttcccaaacttattctctccaaaccactttttctgttgtaaatatgaccttcccaaggtttttagcttatgattaaccagatgaagccatcagtacatagacctccaatctaggttttgaattacaaaaggtactttgggggggggaaaatgctaactcaattgcgtcagttaaaacatcagcgttagcaacaccacggtgtcatgatgcaggaggttaaagatccatgggctcagggagtcacagcagggcttaactggggcagttctggttctgccattagaaccatgagcactccaatctcaatgaaagtgcataagacaccacaattatctccggatcatcgactcggtaaacccaaacagctccagtctatcgtgtcaacgtgtattctgggagtctttaatgcacggatcattggcaagctgcgccataaaagccctgtaagagctgtggccgtgtgtgcagtcaatgcacactcagggactcccccaggtccgcatcattggcagcacatcgtgtcaatgcatacttcaggagccctgtgcatgctaaggaaccatgtacaccaaaaatacttctgaaatagttgttacaggacatacacagcattcactcctctaaacggcatgtcagcaagtttagtgtgcaacaaataactcctaaaaggcactaaacactcctagaggcccaacttcacacacagatggttagtccaggggactgtggcatgactgtggtgggagcatgggtctctccttacagtgaacaaagggataggaacagccagtttatgcaatcgaagccactgcttctactcagtgctgtcaaggttttcagtataacactgactacttcctaattatctg

SEQ ID NO: 55830 - DNA, 1059 bp, Bovine  19866880387848
  misc_feature (1)..(1): n is a, c, g, or t
ntggggttgggagaagtttggctgagcttatgatattaatatgacaatctcaaggtaccccttctacagaaattccagagggagcagtgggaggggagaaaagagggcttgcacctgagagagaccctgggttgcatcttcactgggagctggctctctgtaataaccgcctcccccacccccacccccgcaccacagttgaatctaatgcctgagtcccttctcctttcatggggttgggggtagagtgcatctcccgcccttgcttccaactcgggtcagttccaactgaccactctctggaacctgctctggggttcctcctctctatgttccgggtctcagtagtactgccagaaaactgggtttagataaggatggaatcttagtcatatttcacctgcacataatttccagatcttttccttgtcattcactctctccccacatgcccgccacacctggttggtggattcctcccaccattattattttaacacaaaaagactcatatgaaaattagggtggcacatccattaacatgggctgttctttggaacaacaaccacaaaaaggcatggacaaattaactatattttgagccacaagttgaccacatcccagcgggagatgttttgcttgtaggagattaagaggtacagtttccgtgtcaatcacaggtaggaaaccagccaatccagtgctgatctcagttcctttctgtctggggacatctgagcagccttaccattcttactgattgaggtaggaaagtctattcctaacacaggccagcttgtgttcaaaggagaagggcatgtttaggttttcccgactgctcctggggtttggtttcaaagactgccaattgtgcagcctctcacaggatttacaacagcagagatttggagcagtccacactgaaagaacaacggctggggcctgtgagagcctgggggcctcttattggttgaaagagaatttgcatcttgacccattacccacgggaagggctgaggtcttcagacaatgtattttcttagcacatcacagcactag

SEQ ID NO: 55831 - DNA, 1860 bp, Bovine  19866880433678
  misc_feature (1)..(1): n is a, c, g, or t
nttcctggtgtagatggatacttgaatcacagctgaatttagagcctttgaacccaaggtgttgctcagcccagcccaccaccacctccacccacttctacagggcaggtgggttcccccactctcccccagagttgacgcctgtgagttttctatcacaatcagcttccccaccctctttctctcctccttcctgccagactcacaatgctgcagtccaggtgcttctctcactcagtaaaagctccaaccacatatgttactgaactactgaagtctccagttcaccaggctgctctataaaaactgaattacactactaaaactgcatttcaagagagacagaaagatgcaagaaataaatgcttccattctgctggagggactgtgaattaccgtcctccttctttgcaatacagaagatatgacacataattataagttaatgaaactgatttttacatgtgaccagagaattatgaaattatagagctgaaagggtcctcaaagttagatcattcagctataagttactgcttgtttacaaatgcaaacacttttactagcagccatggcttcaaacttaaaaacagaaactcagtgatcttgatgcccttggatacagtcctgtccattgtctgatcctcggctttctgaatgatgagaagtgggcacagtaatagccaagcggctccctggtccctgggtcacagctagggcgctgtgttcctgaagtcaggtgttcctgtcacagttcagtggtcaccttcctgatggtggcacacaaggcagctctccagcaggccagtttggaactgtgttccctaaaccattcctgcagccaggagcctactgctctagcctttcattgatttctatgttcctaatttcatgcatcaaattccttttctgcttcagatactcagagtggttcttatttcctgacaagagctctgcctgatacacttgcactgattcatgtaacaaccctactattagagggggcagtattattattccctgcttacaatctgaggaaactgaggcataggaagctcattacgtttgaaagcagcagaactgggttttcaactcaatctagctccaaaaaccctgctctgaaggggacactgcctcctccatctgctagtttaagtagcaggacttaatggtgcctcactggacttgaatcaatttcctaatctaatgctatttcacttgtaattcaaatttgcagaagagtctgattggcccacttgggtctcagatcctgcctcccctatcttccatgattgacagttccaccaagactgcatttccagcgagagggagtctggtggtgagacagatcacttgaagtgatgaatgagcagcagaaccagtcactctggggtgaactataaccatgggggcaaccacccattaggaagcaccaaagaggaatccagccttgccatggcaaaagctcaattcatttgcttgaaagtaccaaaggaaggcctgcctgacttgctgtctgaaatttctcagctatgtgtgaccttgagcctgggcacttcccttctctgtattgggccataaagggaaacaagaaaatatattttccttttcatatcaagatttcaagaacaatttattttgttacctctttttaatttttaaataaaatattctaatgtaatgtgaatactaaaaagatacttggggaaaacccatcactttatcaaattgctctacccaagctaccttatccctcctttagttttgcaaagttaaaaccatagtggctatgtgcactgtctgtctgctctctttacttatcatttgtcgggggttgtctagtcactcagtcatgtccag

SEQ ID NO: 55832 - DNA, 1483 bp, Bovine  19866880518450
  misc_feature (1)..(1): n is a, c, g, or t
ntgatgaagttcccagcattagggctgggatctgaactcagaccagccaaatcctctcctctcactgcacgagattccttaggagaattgtttttctgattggttgagactaacaagtcaactgaaagaacaatacaccagaatctggagttttggatctttcttccgcatgctctttctacaatatggaaaacaaagggttaatctccttcaaacacaaacctgtttttgaccacgacctcaaggtggtgcttctgtctttcattgttgctggtaaaaggaaaaaaaaaaaatactgctaacaagtttagaggaagtttgtaatccagccttggtgtatattaaaagcaaatgactgctttaaaacagtataacattttcatttaaaagttgatggtgacatggattcctttccatatcttcatagtatcatcaactctatagctggacaaataaatagatagacctataatatcaccattcaaatgattaaaaagaaataacacgatgccagatgtttatttggaataacccacagaacacattgaaaacaattcctatttctgcaactggaaattggaattgatcattactgggcattaaatgtgcgtatgtttttctgaagttcctaaatctatttaatttctatgttgacagagatattagacagctgttggaaaatctgtctctctttcatgagctatgcgcaagaaatctttatgttaaaccacgaaatgtcagtgagagctcttcagtgtactaatgagcctgggaatgggatgtatggggctggaagcagtaactgaacttacatcctcacggtcttgattgtcctgtgtgcacctcctaaagatgtggctgttgaaggcaataactccgaagggctgccatgcaagccggctctggagattagagtcaaagtgagttaggagaccagacatattctctggaaatggcttcactgtgcatgtaccctaggggaatgttcctgggacgctcctgaccctttgcccttattacctatctcaactccacacatgtcctccagatgggcttccatgggcaccaggtacaagaaaaaagacagctaactttattcttcaaattttgaaaggcaggctggcgaacttgctaattggcctcatcctagcatcactgagctcctttgaaaacatttccacagccccaacaaagaaaaacaaaaacctctgtacacatgtgttctttgtagtacgctttataaaaatgcaacaaaaattggattaagcctagatgtctctctctctctctctcacacacacacacacacacacgtctagatgtcttacactaaggaaatggtaactttagttcagttcagtcgctcagtcatgtctgactctgcgaccccatgaatcgcagcatgccaggtctccctgtcatcaccaactcccggagttcactcagattcacgtccattgagtcagtgatgccatccagccat

SEQ ID NO: 55833 - DNA, 1983 bp, Bovine  19866880733030
  misc_feature (1)..(1): n is a, c, g, or t
naatggggaatgtgcatttgctactgaagacaaatacttatgcactggttagacaaatgagaagtaatagaaattatcagaagtttaaaaaacattgatgagcacaagggagaccattgcaaattatgtgggggtaaatgaaagtaggcttcatgattttgaaattaaaaaaaaagagtgaatattcccagatgtatttttattaattcaggcacttgactttcccaaactacagcactttaaattttaaaatatataactttgcccttttcagccttaatatgaggtccatatacagagcttgtttgatttaggggtttactattttttgccttttaaaaattaagctaaaattttttgttgaagtatagttgatttataatgttgtgctactttctgctgcacagagttggacacgactgaagtgacttagcagcagcagcagcagcaattttctgctatacagcataatgactcacttatgcacatatatacattattttattatattcttttccattatggtttatcccagaaaactggatacagttccttgtactatgcagtagaaccttgtttctcctttctaaatgcaataatttgcatctattccaacctcaaattcccagtccctcctcctcttgcttgataaccacaagtctgttctttatgtgtatctgtttctgctttgtaggtagtttcatttgtgccttattttagattccacatataagtgatatcatatagtatttctttcttacttacttcactctgaacgataatctctagttgcatccatgctgttgcaactggcattatttcactcttctttatggctaatattccattgtatatatgtacaccttctttatcgattcacctgtcagtggatttttccatgtcttggcttttgtgaatagtgctgctgtgaacataggtgtgcatgtatctttttaaattctagttttgtgtgggtatatgtccaggagtgggattgctggatcatatggtagttctatttttagttttctgaggaactttcatagtgttttccatagtaactgtatcaacttacattcccaccaacagtgtaggagagttcccttttccccatacctattttagtttactcttttgaaagatccttttggaatttttgaatggtagcaacactatatttattacaagcccaaatttaaatccagtctccccccaccccctcgctctctatcactcccttcctcaaactgatgccaggccctcttataggggctagacacactatagtgaaaagacaagtacttgctcccatgacacttatattctagaaaacgacagttcagagttcttttctgccttcatttggtaacatccacctgtagtgagatcaatattctatttatccatgctagtataagaaaatataatttaagaagcctctcctattagggctctggtgctacaaagttgctgaggatggctttctctggagaaaaattggatttcagagtaaaactgagttttcctttgtattgccactctgtacagcaaaatgcaagaaagctacagtattccttctgcaaaatttacagattcttatccctttcagcacatcagagatacatttccagaactctgaaattcctggtgcagaggaattagatgtccatgaaagctaaataaagagaccagaggagtgaggtgtggtaggaaccttatggtgacactatttgctagaaagatgaattcacttaaaagtgagtccaccctgggatctatccagatagagttactgaaataccaaaaaggccttgtgaatgctgggagggattgggggcaggaggagaaggggacgacagaggatgagatggctggatggcatcagcgacttgatggacgtgagttttgagtgaactccgggagttagtgatggacagggaggcctgccgtgctgcaattcatggggttgcaaagagtcagaca

SEQ ID NO: 55834 - DNA, 1242 bp, Bovine  19866880747404
  misc_feature (1)..(1): n is a, c, g, or t
ntttagacatacttcttttcctggtggcatttacattttaagatggacactagtgagaatacccaatcaggttgacctaaaaataaagcattgaataaaacagacattcagttgtgaaaccatgttcagtcaaccagaaaaaagaatatgccacatttaagaatcatgcctctggttgaatatattgaaagtcattgaatcgtacactttaagctggtgaattttatggtatgtaagttatatcaggagaaggcaatggcaccccactccagtactcttgcctggaaaatcccatggactgaggagcctggtgggctgcagtccatggggtcgctaagagtcagacacgactgagcgacttcactttgacttttcactttcatgcattgggggaggaactggcaacccactccagtgttcttgcctggagaatcccatggacagaggagcctggtgggctgccgtctatggggtcgcacggagtcggacacgactgaagcaacttagcaagttctatcaatagtttttaaagaaaaggctgggatatgagaaggctcaacaattttttaactttggcagactttcaggttttcaatagaaagttaaaaaataacccacttttttttttatcattcatttacgaattgatttttactgatttctccttgacccttcccccgacccaccaaatttcaaaacgaacatgcaaagcaatctctaacccaaagataaatcctacaataaagtattttttttaagttggcaaatttttagaataatttcacctaatgtgtcaaattattattaccaacttgttcctatgcaacaacaagccagcagtttaattctcaaacacaggaaacaaatatctttaggataacaggctttcctgatggttcagatgataaagaatctgcctgtactgcaagacaccagggtttgatccctagtttggaaagatctggagaaggataaggcaatccactccagtattcttgcctggagaattccatggacagaggagcctggtggactatagtccatgggattgcaaacagtcaaacacgactaagagactaacactttcactaggttatgaatcataaaagaatccttagatcttaactgaaattttcctgagaggcatcatacttaatgctcattgaaaggattcttgtaccaaattggtcaactaaattttagaagaatttttttttaaagttgtgtgattgtcatagtact

SEQ ID NO: 55835 - DNA, 1802 bp, Bovine  19866880872975
  misc_feature (1)..(1): n is a, c, g, or t
nttttcttgctggttgttatttccaaatagcaggagataacccgtatctgtagtgcaggcatggggttagttttgataaatcagcaattattttacacggaaagaagagaaggactgccttcttatcaggactttacacctcttcatagccacatgtcagctggggcaaggtctgccatatcatcccatgtcctgcaaagagctatagatgggggtcgcctccccttgctgatatggccatacatcactctttcaagctgtcaggggcagggtggacaagaagtgtgtgttcaggaagtagctttccagagtccttcctactgtgacatgtggaaaggaaacagaggcctgacttccggacctggacaggaaagcaggaacaggttggtgcaagaggtttgggtgtgcttttttcagaaaggaagtgaggacgaagtcattagatgtgagtcctctgttcctgcaaaatgcagctataaacaccatgtctgagcaaaaccttgaggacgacattcaatggcagtggaagtacatatgttttgttatcatgaagcttctgctaaaagcatgtcattttcttttttaaatttcagtgtaggtgtggaaactggacacatacagatattcttcccataaatatagtattttggtttaaagcaattgcatttttcaaaaatccttttaaagtaactctctcccaaatttttgcctttgagggaaggaaaaacaaatcagtttttcctcaaaggaatgcaataaggagatctagcttttcatgcaatagccataaagcactgcaataattcttatctttagtgacacgaaattcttttcaagcaacagttttaatgcttttgcatagcagtgacctttgctctccgcaggctgtcaaagatgtaacacctagaagtttgtttgctgtgcagggcaggtgagttgacaagggtattactatcttgctgagcatcacatgatgtgaacttctaaccttactcaagaatgttatatatttttcacattgactgatttttagtaaaaaaaaaaaaaaaaattttttttcagactaatgtgaaatatgtatgcaaaaacagaattaatcttatatttcttacaagttcttttcatgcttaagcttatagagcttgcatatatttttatatatatgaaaaaaagattccgtgtgatttttttgaactttgtataatatgcttatttctctaaaatagtttttaaacctttaacactactcaagaagacattcttcattatctatcattgtgtgtttcatctattgtcatcatgtttttaaaatcttttcatttttgcaaaactaaatatcttcaacatttagcttagtactttcgtaacagttctgtttttattgcccactgttctgtttttgctagtttaacttacaggtgcaagtacattgtttaaatctttcacaagctggctagtttagaatgttattttctttctttaccttcttttaaccatatatgcctctcaggacaagaaacataaggagatgattatttttggtaattttgaagatgtcggtcatgacgtggatagaataggaaaactaatttagaatataaaaattaatatatgcagtaaaaacaactaaacagatttaagttgtattcagaaagtaagcttattgatggcttatgacattgtactccattccattttttgttgttgtttgtaaaaacacatctcacatgggttattttttcagtgtataagtggtgttaacctttgtgaacccacagtgcttccaaggatatcgatgtgcg

SEQ ID NO: 55836 - DNA, 1355 bp, Bovine  19866880894372
  misc_feature (1)..(1): n is a, c, g, or t
naccctcagggaggaagggcgcgctctctctctgtttatgaacaaggtaatgtgtgtcaaattgtcttggcttaaccaggcaatcgtgcacctttaaagggtactgggaaatgtttctctgtggtcagattggcccattatgcacatctgttctcttgaccaaactccagcaatctgcccccgcttagccgcaaactccacaacctgctcctggccagcagcccaggccctgcaggagtgtcaggacacagccagccagctggatttctggctgtccagaggctctggagggtggcagtcagaggaatcaaagttcatgggtccccatagcttcagggcatccccaggaaacctacagagatcttaggagggacccagaggaaaaggaggggagaagggatgatgatgtgcctagagagaaagaatgagtgttgcctttttatacagttcatggggttctcatggtaaatacactggagtgatttgccatttcctcccccagcagtcatgtatggatgtgagagctggaccataaagaaggcagagcactgaagaattgatgcttttgaactgtggtgctggagaagactcttgagagtcccttggacagcaaggagataaaaccagtcagtcttaaaggaaatcaaccctgactactcactggaaagactgatgttgaagctgaagctccaatttgctgaccacctaatgcaaacagccaactcattggaaaagaccctgatgctgggaaagactgagggcagaagaagagggtgacagaggatgagatagttggatggcatcaccgattcaatggacatgaacttgggcaaactcaaggagatggtgaggaacagagaagcctggagtgctgcagtccatggggttgccaagggtaggacatgacttggggactgaacaacaaggtgtatacactgctttgggggagtctagattggagaagactcttgagagtcccttggattgcaaggagatccaaccagtccatcctgaaggagattagtcctgagtgttcattggaaggactgatgttgaagctgaaactccaatactttggccacctgatgtgaagaactgactcaatggaaaataccctgatgctgggtctgattgaaggcaggaggagaaggggaccacagaggatgagatggttggatggcatcaccgactcaatggacatgagtttgagtgaactccgggagttggtgatggacagggaggcctgttgtgctgcagtccatagggttgcaaagaattggacacgactgagcaactgaactgaactgaactgagtggaaactaaaccaatatctgtaggtttttcctttaagaag

SEQ ID NO: 55837 - DNA, 1144 bp, Bovine  19866880937521
  misc_feature (1)..(1): n is a, c, g, or t
natcgttttctttttttccttcctcttcttcagggaaacgtctgttcatcaaggcaaacttgtgaattgcttcttctacagagtacttagtctgcccagaaacacatgcctcgatgtcttctgaatttagatgactttgcaggaagaggtgaaggctgctatctgaaagcagaagtgcattctgtagaaccctatgtaaaagaaaaaagaagacatgatcagtgcacagggagggacaattataggacgggagagagaaaaacattagaaatgtgccactgaagtgatttctctactatggcaaacttggcatcaattacagactctccctattaaaaggatgaaagcatatgttaacttttattcgattatttggaaatttaggtgagtaaaaacatgaagctaatagttaagaacatctgttaaaagaataacttcaaggacatttcttcaatttaaccatctgttatgaccatgtggattaattatggaaatattttgcttagatagtcagagaaatttattctgcctttaaaaaatttactgcctaccagcatgtcagttctgtgatctttattggttaggctgtcatgaaacatcaaaactttcaacaactattaaaaactatattaaaaagtcaggacatttctcagcatgtcttacattttcaaactttacaaagatgcttatatacaggttcacaagggctcaattgagagggagcattttttgaatacttaaggtttacctgaaatttctccagaatcttcagcatattttaaaatgagtcactaaataaaattgctcccagccagttttaccatatatgtaattaaagtatgataagtcagtaacaagtacatactagccttcccacattccaagatcaaaatttacaaagggaatacagatttcagctagtacatcatggagaatgaaaaagtgccctgtagccaaaggtacacatcctcaaattcgttttatcagttaatgtgtcttttctgaaatgcatatcaaagaacacccttatgtttaaataaaaattggttttctctttttagcaacgattttgacatatgataatttagtctctgttaatagttcaataatggcaacccactccagtattcttgcctggaaaacc

SEQ ID NO: 55838 - DNA, 1144 bp, Bovine  19866880985825
  misc_feature (1)..(1): n is a, c, g, or t
ntggcaagaactatgggctcttggaatatacaagcccacatcccttcatcttgtgtttccctcactgttttccctggactcattccctagcttggtccattcctgaaacagttgaacttccaagtgttgggtatcatcattcatcaaaccatttaaatgaaaggtacattttccaccttctttcttaaaggctgaagaattattttctcaaacttctgtttctctattgaactaataaaacaaaacacttttaaacaagtaaaaatatagaaaaaaatgtgaccaaatagaacaggctgtgagatgccgagcaatttaaatttgtttgctatattgtattgattcttttcgaattcaggcaaacagtgcaactcagaagactgggtagctcataggcctcctgctttgggtgcacctcccaggtacatcctgttttggaaggaggctattttgaaacctgctcctggccatctttccagatctttagtgaattaatttggatttagggggagaaaaaaggacaaaaaacctcaccttctctgtatgtggtagaatttcactgggatgcaaagtgggagcaagaggaatatgaacactcagcttcacttaccttgcaagattttaggggctggatgaacatgcttcctagacagtgcaggtagggggagttagggaggccccaccggtgtgtgagaaagcaatggtctatcttgagtcctttgactgagagtaataaaagaataattgcatcatatgttggactaaaagttttcaacagatgacctgactttggtttttcaaaaaatatataaaattgcaagggaacccacaactcatcaatgagaggagcacatacttttgttcattggaggtgaattttatggaaagttgtactttgcagattcggaccaacccgccccatcctccccctcctactccttttctcacttggctctgaggaaacatgcttccaagtttgagacttcatcttttctgattaatgatgtgtacacagagatttcggtctcatcttcctactcttggtctttcttattccgttgtttgctatgcttcaaccctgcggatagatggttctgctgtgataaatgtacagtttgcataagccatgtaacagcaggacagc

SEQ ID NO: 55839 - DNA, 949 bp, Bovine  19866880989062
  misc_feature (1)..(1): n is a, c, g, or t
ntgttaaatttcagtgatccatttctttttcatttgagtgaaattgcatttagcttcctattttcagacaataggaaagtaatgaaacagtagcatatgaatttgatcaaaataaaccttggccttgagaaccattaactggattattttgtcagataaataaggactgccaggtgcagtcaaactgtgtattcttttgacattccaaatggctccttctttggcttgatatttgcatacttgatgaccaaaaaacatagatacatggttactacaaagtaaaactaagaccaaattttataattaaaattacattttaaatgtactaggaggtgacttttaagaatacctgttactggatcctattttgtaggtggataaataatatttttgtgacagttgttctctctttttaaaattagcttattagatatttaaaaaaaaataaacctgtattatatagctacatttcataattaaatacaattaaagttgaactattgttttcttgaactgtatcaactggaattggtactggtatttgtaaaattatcctttgggtgataaaaaatacatgaaataaaagttagtgttgctattacatataaaatatttggattttatttactagtaacttctttagtttaaaaaattttcacaataaatttcttgctcttgctattcattgagcttttatatgatgtctctcatcatgaactattttttctgttgacatttttttactaagtttgaaatgcattttattgtatttttatgtatctttaaaggtataggaacccattgacctgtgtaagtgcagacacttctgtgaactagctgtattcctctgaggctatataaacattgctagtctgttatttaatacagaaatatgaagattgaacagctgtttatttcaaaattatatcaatggaatgtatcctcagaa

SEQ ID NO: 55840 - DNA, 1987 bp, Bovine  19866881005885
  misc_feature (1)..(1): n is a, c, g, or t
ngcttctcctgtgatctctctccttggcttgcaggtggccactttctcgctgtgtcctttcatggtcatcccttggcttatgcttttttctgtgtgtctgctgttcctctctgtgtgccagaatttcatctttttataagaacaccatttatattggatgagggccaaccttaatgacctcatgttaacttaatcacctctttaaatatctgacatctaaatatgattgtgtggcttctcttgtggctcaactggtaaagaatccacccacaatgtagtagacctgggttcaatccctgggttgggaagatcccctggagaagggaaaggctacccactctagtattctgctgctgctgctgctaagtcacttcagtcatgtccaactctgtgcaaccccatagacggcagcccaccaggctcccccgcccctgggattctccaggcaagaacacaggagtgggttgccatttccttctccaatgcatgaaagtgaaaagtgaaaactgaaagtgaagtcgctcagtcgtgtcctactcagcgaccccaaggactgcagctaccaggctcctccatccatgggattttccaggcaagagtactggagtggggtgccatcgccttctccactctagtattctggcctagagaatttcatggattgtatagtccatgatatcatggatactagttgttgggaatccaacacatgagtttagggtgtgtgggaatgccattcagctcatgacatgcatcttctttattagtaggtaatgatgctgcccataaagaaattgttttacattttaataattaaaaaactttgttttcaggccatagacagacatgctaaaaaaataatttcttataagttagaggataaatttctgttagctcctttgttcattccttaataaagaaatagaatcccagttggcaaagggaaaatgattgactagaattcaaggaatttcaaaatggctcacctaatcctctcgttttgggcactcaataaaatgcattctgctatccaagcagagcttaaattaaatagcaaacttattgagatcaagacagtatgaagaatatccagagatataaaccccttcaaggaacttacaatttgtttgaggagacaaaagcataaatatatggaatattgatagcgaagcttgacagtaatccaagaaatgccacaaggcagaatgggatgaattgtggaaagtggaccccagaaagttgatgctgtgaattcagaaaaaggccagtcactggggaaagtgatccaggaaggcttcctggaagaggaagaagttatagtgctgagtaactggggagtgaattctcttagaagcatctctcagggatgcaagcacccctcctccccatctcccccagtgctagaagagtcaagacctgtccagtgaagctatgtatctgaaaggagctggcacgtagacaggaacctgggagggagggagtgggtaagtgtgggcaaaatctgcatcggggagtggggagaaaggaagtgtctagaataacagtcgtgaccagaaagagtctgtatgaatttggagattcagagtgatgaacctcttgggctgggtcagaggcatcaaccgctgtggcgctcagggcggccagcttggatgagaggcgagaccgagctgaagtctccacttgtgatggtgggagagacacaggaggaatccaaggatggataaaagactggagctggccgccggtggggatgagaccaaggatcacatttacagtcttcagtccctgagcttcagtggtagataaacaggtttcgttttggaggccatcgaaagggagaaaatgagacaggaaagttggcagaactttatcactgctgttccacttagcaggtcaaggtcaagtactctattctcttcaagggggaaggagtggacaccggggccctgtggcatgaaggacacagacggtgagaccctgcagggag

SEQ ID NO: 55841 - DNA, 1085 bp, Bovine  19866881071483
  misc_feature (1)..(1): n is a, c, g, or t
nacttagtattgactttctttctctataccaactctccagagaaaatcttaaatgttcaatatatgtggcaaaatagcctcaaaatttatgttttctgaccaaggtaaaatgacttttatgattaacggtgtctaaagcacatactttaatatagctggttttgttgacggcacaatcaactattactgaaccaaaagacaaatacagtaaaagacactgtaatcacttttttcaaaaaccataaaaatatttaaatgaccactgtgactatcccctctagttacaaaatatcactactacgatttacacttcaccatgtagaactcagtggtcttctggcaaattacacagcataaaacaactttcacgtgaagagagagcctgaggtgaaatctcaatccttacaaaccagcacgcatataagctacattaatagctctgtattttgcgctatcagttaaggaagcctggaccactgtatttggttttcagttgactaggttaaataacatagaaacacagaaaattagccaccaagtgcatgtagttaaatttattaaatagaactacaacactcaacccatagttccatgaagtttctctccatgcatgatattatcccaacagttcagaaaacagtgataattcagagatttctttgcctgtatagctacttttaagattctgacatttttgaaaagacaaataaattctcaaagtagcttacgaaacacttaaaagatctattaaaacggtaacttggcatactggtatttgtacactcaagcatattttatttattccaaatacttgtcagttaactggccttttaaaacccaaatagagagactaaaatacatctacaacattacaaatcactaacaaaaggcaaaaactcattacttacctcattttccaaacttaccccgctgtccactatcgattacaaacaaagttattttataagcgtgcttagggtcaatgaaaatacccaggcagacccccttcgcttgagaccttatgcttatcaatgtaatcatcaaccatgattgcaaacataaacgagaaaagcaagtgacaaagt

SEQ ID NO: 55842 - DNA, 786 bp, Bovine  19866881161932
  misc_feature (1)..(1): n is a, c, g, or t
ntcgtgcagttggatttggggtctgcaagtttaatctggatgatgattttcatatgtctgctgaatagtcattagaagaatataaattttactgaatatgtaagttttctcaaataaattgatcagaaacccattagacatcatagagtagtcctagttatatcagtggaaaatatctcataagatccatttgactttatattccagacttagtcaaatggcaaatcaaatcccaagttttctccactggatctcaactgtgtctcacaatctcttgcagagagtctccaagcagacaataccgattgatttgagtttgcattccatataaaatttaggtgctcctcctgttctagaacttttagctccctacttttgaaggagaggaatttacagaattttccatctttttctattgccaggatgattttcttttaaactagtagaattgtttatcaaagagtatgcaaatctatgaacccatctgactctggtgtatttttcaatgataaacctttaatcatctttcttttatggcatttggtctactcaagttttcatttcttcttggatgaattttgatagcctgtgctttgttgtttttgagtcactaaatcgtgtccaactcttttgcgactccattgactatagcctaccaggctcctctgtctatgagatttctcaggcaagagtattggagtgggttgccatttccttctccagggaatcttcctgacccagagatcaaatccacatctcctgtactggcaggtgaattcttcacca

SEQ ID NO: 55843 - DNA, 909 bp, Bovine  19866881314360
  misc_feature (1)..(1): n is a, c, g, or t
ncatcaggattagtggttccaaaggaaagagagagtttgctagagatccagatttgggagtgagaaatggaataatgttttgtagaaagcatctacttaaggcatctatactcttaaacccatcaatgaagtcatttatttctctcataaatctgtaatgatggcacagttgcacataatgatttgtaatttcccttggtcagcaaagagaaaaatgaaagaagtgaacaagcacttgagtctagtaatacgcacccagtatttcttaatagcccctgaggtggcaaacctacatggtcttgctttctgaaaatcatggcaatatttgaggggacgagtttccagtcatgagtgagacaaataatgagctaatttcttctgtcctgtataacctgaagcattagccacaattccctgcaactggtgggcaaacctgtaacagaaaactcattgtattcctattcttagtccatttcctattttcattgtgtaaaaatttattaacaggcttataaactaaaccatgtttattaactaaaaactgaagccaaaacattgactttgttccactaaactccatatcttgtcctttcatgataatttttctattcccctccctcagaactgaggagtttgtgttatatataataaataaataaactttacttgaaagtgtctgttttaaatcaagatgcatttttagatacatgttattaggaacagtaggtaaaaatatcaacttatctacctgaaagaattattttgtgaactggttactgggactaatgtataataaacacactatcatcttaagggtaaactctctttccctggagtggttaattaccagtcagatatttttttttacttcttatcaggtccatcatactatccccattacttgactgt

SEQ ID NO: 55844 - DNA, 910 bp, Bovine  19866881345766
  misc_feature (1)..(1): n is a, c, g, or t
ngaaagaatactgaggctcagaaattcaaaataatttgccccgggttatccaacgccttggtggtgggaccagcatttactctccttcttattagaataatgcaacagtactgccccaaagcccacattcttcagattgcaccaagggctgcctctgtcctctccaaatgccctttggaaaatggcccataagtttccccaaaacaacagttgaagacaaactccagagactcagggttttctggaagggctgtctctcaaaaagcttctgccctgaactggaatcttatttgcatttgtccttccatggtagtttccaattcccaagcagaacacacatttaactgtaaaattcgccttaactaggcagctgtctgctgcagtcaggcacaaggctcaggtgcagctcccagtagggtctcctgaatcagcgtgccagcctccgtaaagcaatgtaagtcacctccgagaaatgagaggccgcttggaagagacagacgctgccgtgcccgcttgtcagaaccgtgcaggggatgccagtcatgactcaattactcccgggacttctctcctgaaggtttccctgtcatttatgagaaccagtgcagggaggactaccacatgtcctagaccaggaacctatctaggaatgaggagattacaggtttaattggcctctcctcaccacagtgtcaacaagccatcaagataagagctcttgacatccaatgggcaagataacaccattcaacaaatggcatctgagcctctattatattcaagaccttatgccaggggacacaaaggtgaatcgaaagcataatctcagcctgatatgaccctacaatttagacagctatataaagtgcctttagaaaggtataaccgggtgaagtacaaagatacagtg

SEQ ID NO: 55845 - DNA, 1168 bp, Bovine  19866881372120
  misc_feature (1)..(1): n is a, c, g, or t
ntgccatttccttctcccaatgcatgcaagtgaaaagtgaaagggaagtccctcaggcgtgtctgactcttagtgaccccatggactgtagcccaccaggctcctccatccatgggattttccaggcaagagtactagagtggggtgccactgccttctccaactgatgacacagtgaccacaaattcagcaggagcctgtctcatgggtgtattcatatatcgaaaagtaatatcaaaacaaaacaaatcctagacatacttcacaaatgtaaaagattcaactcaattcagttaggttttttaaaaatatatgtcaccaaaattacataaaaatgtgtaaattagactttttatgcctctgcaagagatataaacaaatatcaattttttattggtgttcttgaaaatgaggaatataaactctaattttcttcctatatttaaagtccaacaactctttccagcaatcaattagctatttccaaagctcattcattataatcacacaatttaaattaatatccatgatttcctaaacccttatctgttggtaacaattgtctccattagtttggtaccaaatgaaatttccaataatttatcacttctgatctccaaaaacaataactttataggattcaggggagaaataaaacttcaaaattttgacaccaaagtggtagctcaattttcttagatacatagcatctattgtctttataactggcctgcaagtgtatcatttattgtaatgatacctttctaaccagaaaggttctgagtaaaatctacatcctactgtagcgcattcaagcataaacaaaatactgttaatatttaatatgaaatcagctgtcacaaatgtagccaacagtgaaaaagccatgatacaaataaaattactttgtgtgattctccctatttccagatgacaagttactatgaggtgatatcctctctcttaataacaaacaacttctgtcacataatgtttatgtcatgtaagttttgtaaatcaatagtggaaaaactggtttgactttctgggagagaaaatgattgatcggcacagggcataaaatacattatttaaattagaaagacttcatttgattggaatgccaaccccatttttaagtcataccctcatataaccacattaacct

SEQ ID NO: 55846 - DNA, 968 bp, Bovine  19866881397071
  misc_feature (1)..(1): n is a, c, g, or t
nagatgtctacattgctagtcccctgggctacttgttgtcccctgttagtctctgaatggcagaagtctgttctgctcaagcacaaagtatacacagatgtctatattacattcttataggtttgacagcaactgcatgttgtatctataaactgtcctttagcagtgacacttcctcaatgatgataagctaatttatgcaactaaatctcctttgtgcagaaatgaaagctaattgagtcattacaaagtaattcaggaaggaataccttgtataaattggcttactttataaatccttctcaagtggttttcatgcatcctaaatgggtctaagcagcttatcagccataagagatccagacccaaggacccaactgcagggagctgaggacacatctttagagtagggagaaagtgatgaaaaggaaagtgaacaagaccaaaataagcttttcccaccagctcattacctgtggtgtggtgaacactgtcctgactcatcttcctttgtccctccactttcaccagagctccgtcctcctcctcttctgtaaataaacaacaaatggaacacttgaagtccagtacgaacaacgcagtactcaccccatcttaagagcaaaactaaaaatttataacacataaatattccttttcaaagaaggaaaccactcaacatccacattcctttttcaataatctaaagctgaataaatgaacctatagctatatccaaatagcaacctgaccagttgacttgataaaatttaaggtatgtactaacgtttcacatattttgttttaaatgctcttagaaattcatctggaacaatcttaaatccagaaaagccctaaaaatccagtaaaatgatacccagcattatatggattgaccacattatactgtggcatgaataccacacagaataaaatcactgtccctaaaacatcaacagaacagagaa

SEQ ID NO: 55847 - DNA, 991 bp, Bovine  19866881421497
  misc_feature (1)..(1): n is a, c, g, or t
natttaagaaacataataatgagatgcaatacactaacctaaatggatcctagtttgaacgaaaacactatcaacatttggaagacaaagggagaaatgagaatacggatgggttattagataattaataacccaaattaggttatttgggttttactgttaattttcttaggtgcaataatagtattgtggataggtaagaaatttccttacttttaggaagtgttgaatttatttagggttgaactaaatacttcatgatgtctgaaactatttgaaatggttcagataaatagataataggtaataaggcaaaacattaaaaatgagtgaatctaagaagagactatacattcttctatgtttttaaatttttgaaaatacaaacttaaaggaagctctttttcgtactttacttagacatgctgaaagggtgatctaggagaatacgtatgcagactgatgtacccttttgacctagaagagtatttttaaaaccaggttacttactgacttactgcccaagggttccatagctggggaatacacaatgagaaatcaagcccatcacaaaggtatcagtgatggttatcatcacttcagcaaactgccgtaccctcagtacacagtgccctcagccaccatctccagatcaatatggctatcaatgacggatggccaaagcagccccatccactcaggtcattcttagttcacatggtccaaaaggatttaggagtcttgtgtcactagacatctttagaaaacaacctagccattaaaggcggaagcagagtaatgttgtatgtcagacagcacactgttgacagtttaaatatactcagaaagcttaaaatgtgttgattttctgtgtgctacaattgcatttttactggcggagaatgtgtcattaaaatgtaaatgcatgttgaaagcaaagctataaaaagactttctgtcacaagccatttctagacacaccatagctaag

SEQ ID NO: 55848 - DNA, 775 bp, Bovine  19866881426418
  misc_feature (1)..(1): n is a, c, g, or t
naaaataataataataaagagaaaagaaaagcctaagaacatatcaggattcaaatgaatggcaaagaaaactcaagaaaaatgtatcctcatatctatataatcacatgaaggaatgaaagtaattaatgacttctaacattctgtaaattaagatcgtacgtttagaagcaaaaagcaacaatttttctggtttaccggggaggaaacttggggcagatgactattctgagcctcctaatctatccctttctacaatctcaggcaagtcttatctttctcgtgacattcaacatgtttaggcaaataaatcaatgagtctccatatctctatcccatatctcaaactctctcttaacatttctttgaataaatttctcaatactccttcaagtttaacagacttcatctttatagacggcattattatatggccttgagaaaagaatgtaaatgtcaggattcatctcaggtctaacaatgaaatccactgttggttcttccccatactgcctctgagtactttctctcccttgtcccttgcctctatcatcaaagtgaccaacaagcctctagttaggtctttcccaggcatgtactccccagaagggtatacactcctgtcccttcttctccactttccgccccgcccctcacaacaagccaaatttttatttgtcttctgagtacattatttacagcttccctgggggtcagtggtaaagaatccacgtgccaagtaggggacacggttctatcccgggtcaggaagatc

SEQ ID NO: 55849 - DNA, 975 bp, Bovine  19866881481422
  misc_feature (1)..(1): n is a, c, g, or t
naaggaaattcaaggtcctagaagtagaaaaggaggcccttttggttttagtgtttcttctaatgggggtggaaattttggacgagggccaggaactaaatttagaggagaagctgatggatatggaaatggtcccggatctagggatggctgtcatgggtatggaggaggacctggaggtgggaattttggaggttacccttgttatggaggtgggaattttggaggttacccttgttatggaggaggaggtggagaatatgctggtcgaggtcctgggtatggcaaccagtgggaattctctggaggtggttatggcaataattttggaaattacgaccagcaaccttctaattatggtccaatgaggaatggaatctttggtgttggcaggaacatagtggccccatacggtggaggaaattatggcccaggcggcaatggaggaagtgggggttatggaggcggaagtggatattgagcttcttcctgtttgccctgggcttcactgtctgaatagcagaggatgagagcccagacataacagaacagtttcaggttcttgaaataaggacattaagaaaactcttatctcagccatgaataaatatttagtgatgtgtcagaagacctcagagcagattcaaagagtcatttttgtgaatggactggattatttaagaacattaccttcctgtggaggaaaaattgtgaaaaaaactgactttgagacagtttcctagcttcttaattgtttatttctagtgagtgtagaagtattccttctttgataatgttaaatgtgtaagtttcaggtgacatgtgaaaccgttaaaatgtttttttctcaaagttttgaaactattagccagaataagcacaatagacagaatgttgttccttttattggaaaaataaaaatatattaaacttgaaaaaaaataaaaataaaactgtctgtagagttaagaagca

SEQ ID NO: 55850 - DNA, 1632 bp, Bovine  19866881601637
  misc_feature (1)..(1): n is a, c, g, or t
nttagagagggtgcattatgaaggactctgtaggcctttgagtgacatagggagtccctgccaggtcaaaagtagaggaggcagagcatctttcatagaagaatagcccatagcagaccagggtaagtgactgcaactatccaggagagaaaggatggtggctaaaggcagagtggtcgtttctcccctagtgcagtgcctgcccaatgttgttccaaaaataatagatggggtcagtcagagtcaaccaaagcaaattcttcatgatgagtcagcaccaggaaaccagtgctcgggaagacccaacacattgtcatgcatggcacaaatagcaacaaaatgaagaatcagtcactcagaaccacccagttatgaaaaacagcaccccaccacccagaccacactgcgcgtgaagctgtaacacctgcattattgaaacctcagtccctacgccctactgtggaagcaatctgctttgtcttcattgtcctggaatcttcccactgggatatatgggctgtgtccgagccttccccagatgatccctgccctcatacagcatgccttggttcccaggaaattgtattaatctggagaaattcactttgttctaacagattgctttaactacatacctaaagtataatctcactaaaccacatgggaagtattttgcatttgtactgtattttttgccaaagaagtcactgcaagtgtttctttgcattttcttgtttcttaaaacaatttcctcttgctgtattgtagttacagaacattttattaatttcaaagctcaattgttttgtgaaactggggtgcccttgtgttaaaatactgattgttaaaaaggggcattgcctggtaatgggaacatattagttttgaaagaaaagtccacttggttattgcttacatagatcacctacaacctacaaagctgagcatggagaatacacatgaaacattttaaatttgccacctgttttcttgctcaatgatttctcagtcttagattagtcagaattgatttgatttgaccatttctcgggagttaaagggcctatagtcctcttcttcttggctttagtggagaaggacggataatcctggcttttcaggatctctgctctatttcttgacccaacttcctgcccaggtgaagctggctgttgaccaggagtttggaaactcaacccttctaagctaacctggctctgcccagccatcgtcaaggacatcaccttatcaatgcaggttccagagagcttcctatgactcccaaaagccagccaataaactcccatttccagggagagcgtttaggtgagttctcacatgatggaaaagcaattcatcatttgatcaatatttattaagcatccactatatgcctggaacctgcctccaaggatcccctatccagcagctctgaaatgctgcagcagatcaaccctccctactgggcagaccatcaaagcctctctgcaaattgagttatggggctgccgtggacatgtggacccattcccacagtgctgcctacaggccagaaatgcccagcatgcaatgctgcatgacctcgggcaagccacctcacctccctgagcactggtctcctcatctgcaagg

SEQ ID NO: 55851 - DNA, 1122 bp, Bovine  19866881825225
  misc_feature (1)..(1): n is a, c, g, or t
naatcagaataagcccccagaagaataaaaaggaagaggaaaggaagacataataaataaccttaataccttacaatgttaactttcacataagtatattgtttctggagaaggcagtatgtggatgggagccaaaagctgaagtgataggtaaacacactgttaagttgaatcctgttatctgattgtgtttaaaatttgattatatttcacttgacaaaataattaattatggtgaactcccaattgttaacacggatctagaagaattccagttggcatttttccccagtgtcctcgatccaaatggataaaattcaccctttccaccctttacagttgtcatactggtgtatctgcttaccttgctaagaatgtaaatcacatcaccacgtttaaatgacaattcatcagaaagagctcctgtgcagtcccacaaaccctggtaaaaattagcataatcggtgcttttatctcctgggaagaagaaagagaaaacaagagttaattttcctgtaatgggccctcatttttaaatgaaccaatagtagttaaagggccaaaaccgtcttaaaaaaaaatctgtcctcattaaaagaacacttcattacatccacacaagaattctactccttgctctcatctaaggacccttttcaaaaagatctattttgaatgtctcttttttcctctctccctctcttgttcttacctaaaacttgcaactgcagtaagtttcttcaaacaaagttacttcccacttattttctataacaaacctaagcccacctgcaacatgttttgaaggtaagtcagcctccctgcataataagcaatatgcatgagatatgataaacaggctgtgaaataagcactggacagaactggtactgaaactgcagaaataagcactgggcataaaggagataagatataaacataaacaaacaagataacacacacaaaaaattttttaagttttttaaaatgcaaagctagttaaaggaagagaataaactgaaagtaatctaacagataattcccgctcttatctttgaggacttttgtatccaaagcctctcaaagtgtttccaaactattttagcaacttgaaatgccagg

SEQ ID NO: 55852 - DNA, 703 bp, Bovine  19866881935292
  misc_feature (1)..(1): n is a, c, g, or t
natgtggcaaatattcttaactgggtactccaaatggtctttgtacctcagatgtatttttctaagccattaacacattgaagcccatccccaaactccccaagcaaccattaattaacagtgtaagacgaaagagccaggcctcccattgtgatgtagctggaactaaacctttcagcagtgatggtgttcagaaccagtcactggatgaggtctcttattcacagcaaatatttctatcatgagaagaaggagactgcggaggaaggctattaaaacagtgcttttattcagagcactttttaaacatctgggggggggggggagtacaaatatgtttttgaaagattcaaggaatctcaaccttgtgaggaattttgaaatgaactccttagcctgaccctcaaacagctcccatatctgaggacccagtaggtgctaagccctacattaggtgtttcaagtattatcactgatgcttaccaattcctgcaaggtttctgttttatagatgaggaaaagaagcttagagaagagactctttccaaagtgtcatggcaatctagaagataaaacaaagatccatacaggtcagtctccaaaacataggcttctattgcacactgaccccctaaaacagcaatctagctccaagcttatatcctatgccagagggtagcttgttcaagcacatatctaagaa

SEQ ID NO: 55853 - DNA, 1343 bp, Bovine  19866882027946
  misc_feature (1)..(1): n is a, c, g, or t
natttacatgttcatgtgtaataatggtatccatgaaatgtaaactataaacaactatgaacagtcttctttcttctgctaagtcttagttaagtaggtgattttatcagaaaatttagagtccatgttaaattatgattatcatagataataagtgtgttactgttatagaaatataattttgtacagtattgtgaactgagatcaagattttacttctctgtgaagaaattttttctatttcataagaccaggagagggaggtttcaaatccttgtgacttcggttagttaagcttctcatttctaatttctgtaaaactcaatgaatactaatatctgcttccatcactcatagtcctaaatggtatatactgttaggtcaaagattagcaacagtcttccccaaatctaatataatttatccccaaatataatccccaggacctatttatatttatttcaaaagctaatactctaaattctagttatttgaggagaaagtgatagtgaaagtcactcagtcgtgtctgactctttgcaaccccatcactatatagtccatggaattctctaggccagaatactggagtgggtagcctttcccttctccaggggatcttcccaacccagggatcaaacccaggttagttaaattcccatttctattcttgttttttgaggcctgaggtaataatattctttttaatttgtattttaagtactttgtgatccatctagccactaccacagctttttaaaaactactattctctcattccctttttatgtggatctatgaaggtttggtttatatttccttaagctcttccctgtctgtcactatgaagcctcctgtttccactgagatttcagatctgtttttagcggttcgttggaattcttggccacttctggcttttagggacttgggaggtgggtatctatcttcagacagtttttaattacttgtttgacatgatcctaatttccttagtgttgttttcttcctaagaaaatgtatatgtcacatgaaatttttgtttttatatgtgacatcagatagctaatttgtacatcagtgtttactgtatgtttgaaccattaatctaaactttggaaagagctatttggatatatgagaactatgatcccccagctaagtaggatttagataaatggattacagaggtgcagaaaagttgataccacttactgggttaaactgtactttgttactctttgacagttacgtggttcacattttctaactcactgtgtgccaaaaaacattcggacccatcaagataatcatggcttagaaagactagttccagcctctag

SEQ ID NO: 55854 - DNA, 1657 bp, Bovine  19866880466640
  misc_feature (1)..(1): n is a, c, g, or t
nttctgacatctctttcctcttatttgtgcatgaggatggtatcagttcagttcagttcagtcgctcagtcgtgtccgactctttgcgaccccatgaatcgcagcataccaggcctccctgtccatcaccaactcctggagttcactcagactcacgtccatcaagtcagtgatgccaaccagccatctcatcctctgtcatccccttctcctcttgcccccaatccctcccagcatcagagccttttccaatgagtcaactcttcgcatgaggtggccacagtactggagtttcagctttagcatcattccttctaaagaaatcccagggctgatctcctttagaatggactggttggatctccttgcagtccaaaggactctcaagagtcgtatccaataccacagttcaaaagcatcaattcttcagcgctcagccttcttcacagtccaactctcacatccatacatgaccacaggaaaaaccatagccttgactagacggacctttgttggcaaagtaatgtttctgcttttcaatatactatctaggttggtcataactttccttccaaggaggatggtataggtgaactgtatttacttttacagtattcatactaattatcttcaccttttatgtggctgaaaaaaaatccctatctaattaaaaaaaaatagaaacttatctatatgaataattggagctttccagttggtgcaactggtaaagaatctgcctgctaatgcagtagacttaagagatgcaggttcgatccctgggttgggaagatcccctggaggagcgcacgacaacccactctagtattcttgcttggagaatcccatggacagaagaacctggctggctatggtccataatgtctcaaagagtcagacatgactgaagtgacttagcatgtatgaatgcattattagccatatgaatataggactttcataaattctctgtaaactaatatatatatatatatatgcctttttaattattgtggaagtctgccaaataatctatattctttttgtaaacaaactgcataattttatttcatcagttctttctgatacctatacttatagccactttatagcttaaggttctacagaaagatggaaccaatagctgaaggataacaagagggagaggaataaaaggagaaatgggaggagggagaggaatggtgagagagggagacagaaatggagatatacttatttttatgaattggctcacatgattatgagggatgacaaatcaggaagctgtaaccaggctggcaggaaactcattcaagaatttattctcatcttaaacaatcttgagatataattttctttcccctgggaaactttagtttttgctcttatgactttcaaatgatttaatgatgcccaatacattatcaagagaaatcttcttgacttaaagtcaactgattgtagatgctaatcacatctacaaaatagatgaggtttacattaacacagagattgctgtttagttaaataactgatattacagtctaaccagtatgacacataaaacaaaacatcataaccactgactataagaaaattatgcaatttcaagtacctatttcacctgtcataaattctcaatagcaatatactagat

SEQ ID NO: 55855 - DNA, 1123 bp, Bovine  19866880522092
  misc_feature (1)..(1): n is a, c, g, or t
ntagttccctgaaattgttttgattcctttggatatagacacttaatatcccaatttttaaatttcttctactttatggcaatgcgttattcatgcatgcataaatatttttctgagttggctttaaatcaatctttttaatcctccaaatctctacatctgatatgaaggattaaccaataatgtatttgtatcacatcaaaattactttcaagttgtggaaaactaacttgaaattaattctgtaccatagtggatctacttaaggcacacagcaaaattcaaaatgaaattaaatgtatatataaatttttttctatatatgggttttaaaaatgtaaatttaagacgcacttatgtaagttgagaggcttcccgggtgtcttagcagtacaagttccacctgcaatgtaggagagacaagaggcgctagttcaatctctgagtagggaagatccccaggaggagagcatggcaacccactccagcatccatgcctggagaggcccatggacagagatacctagtgggctacagtccgtggggctgcagaggtggaagcaactgagcactcacagatctgagttgaatgtgtaagaggctatcaaatcgacaagacaagtttctcctcttctacacaaaactggacttcatttcttagcttctgttgctgttagatgtggccatatgactatcgggttgactataagtagaatgagggtgaaatgatgtatgtcagagttctgtctataaaatcccaacacatgggatccactgagatcctttctcttttaagatagctgaaatggagaccaagcctatggcacacttgggagacttttgctgaggatattagagccataatatggaataagcaagaattcttaaggagcttccccagtgactcagtggtaaagaatctgtctgcagtgcaggagatgcatggtttgatcctggggttgggaagattccctgaagaaggaaagtcaacccactcccatcttcttttttgagaaatcccatggacagaggtggctgagtccatgggggtctcaaaatagctgggcatgatttagcgactaaaacaacaaaaagaatttgtacacattcccttatttgaaga

SEQ ID NO: 55856 - DNA, 3782 bp, Bovine  19866880524208
  misc_feature (1)..(1): n is a, c, g, or t
natcctctgtatatatactgtgctgtgctcagttgctaagtcatgtctgactctttgtgaccccatggactgtgtaacccatcaggcttctctgtccatggggttttctaggcaagaatactggagtgggttactgtttcttctacagggggtcttcccaacccagggatctaaccagtgtctcctgctttggcaggcaaattctttaccactgagctaccagagaagccctgcaatgaacataagtgtgcatatatctttttgattttgtgtttctgttttcttctgataaatacctagaagtagaattgctagattgtatagtagttttagtcttaattattttgaagaaactccatactattttcataggcatatactaatttacatccccagcactagtacatgtggtctcttctctacatcctttgccagcacttgttatttgtggtcttttagatgatatgctgggaaagattgaaggcaggaggagaaggggacaacagaggatgagatggttggatggcatcaccaactctatttacatgagtttgtgtaagctctgggagttggtgatggacagtgaagcctggtgtgctgcagtccatggggtcacaaagagccagacatgactgagcaaatgaactgaactgaagtgagatgatatccattctagcaggtgtgaggtgatatctcattttggttttgatttgatttccttgatgattagtgatgttgagcatgttttcacatgcctgttggccacctgtatgtcttctttgaaaaagcatttatttatttcctctgccaactttttctatcaagttacttgtttttctgatttgagttgcttcagctctttgtgtattttgggtattaactctttatcagatgtgttgcttgcaaatatcatttttcattcaataggtggtcttttaattttgttgatactgtcctttgctgtgcaacaatttttaattaggtcccatttgtttaattttgcttttgttttccttaactgaggagatgtatccaactaagacccatgtcaaagaacatactgcccctgttttcttataggagttttatagtttcaggtctcacatgtaaacctttaatccattttgagtttgtttttgaatacgggagaaagtcatccagtttgattttttgcatgtagtgaccagttttcccaatgccattaatttcttaaggttaaatagaatagatgaatttctggttttcaaccaaagtagcctacttgccacagttactgaaaaagaagagaagtgacatttaccagaaatattaggaaaagtataggaaggaaagccttactgagggatagtgtttgtgagctctctggatattatctactatgtatgggtttttgcggggtttgggcagaatggtggagaatgaaaagcatctaattttgattagttacttcatttcaagataggtgaattagctgtctaatacagcttcattatcgcttccttatgacatcagtgctccattctcataccataatattgcccacaactcccacataccaattatataataaactgtgtcagaatcttccagtagccaatcttaaattagatacctttgaaagttatattaaaattttaactgaaaacataaacatcactttcagaaattgcttaattattctgcaaacactggggaaatctgactgaatacatcttaaataattggtgtcatgtattaagagtaaggtgagtgcaattttcaataaacaattattaagttatcatataacaaggcaagattatatttcccattagctgaggtataagctatccttattccaaatattgaatctacatattcagttacggtagacaaaaagagcgtgtacacatatagttgaactaaacatgagcttgcatcaaaaatgacaggcatttattagtgatctaatattgaatgtgatatgagtacttctaaagaatcataaaaacttttcagtgtttaagtaaaccatttacttagaggaattaatttaaattgatctttaggaagaatggtaagatgcaataagttgcatttgacatattcacaatatgaaagctgttgtttttccctaattatttctttaaagggattcttttcttacagaattagtttcaaagtgtggttcaaagattcttgggaatacctgagacatttcaagtgcctatgagatcaaaactataatgccaagatgctatttgactttttcactgtgttgaccttggcactgatgataaaagtcaatgatggataaaagcagttgattccttaacttaaatcaaggcagcggcaccaagatactcagtctaagccattatattctccagtgtcatatactcacaggggtaaaaaaaaaaaaaaaaaaagttaattttatttaaggatgctgaagcagtaagatgtaataattttattaattattaattattttatatctatagtcttgaggattattgtttgcttaatgtgggccaggttatgtgttcttcacactttcagtgaaacaaagaatctgtaagattgcagtaaagaatatgaaattctcttctccatactatattgttctaggacaaaggtttttaaagaaataaaatgtcaaaatttgatgcagtatgatgaaaaaactgttctaatgggcattggtttcagaaggcacagtgagtttctcaactccagagttatcctacaatatgacagatgacagcttgggggaattctacagactgtggtagaagggaagagtagcatgttacctgaattgggagaagtcattcccacatggaatttcagagcaacctgctttcccctgaagtctgaaaatctgagcataaacttgactgagtagaagctatgattctcagaattggttgaaaatttgggtatcttgatcaaaaataaacatacgaaaaaaaaaaagaacagaagaggcaagggaaggaagagagaagaaaaagagaaaaaccaaaggttatcacctctaggcattcaagtttgtgtttatgcccatatgaggtccaaattctctctggggttaagtccaccaaactcaccaactttattcaaggagacagtatgggagcttttcaggatctgtcatcctagaagctgaacataaagtaattcctgctttgtagtctacattctgattggcataaaataatttctaagtgcaaaattttgttttcatgattccttattctctgaatatgtggctgtgatccacctactttaggtcatcatctgtgtgaagcttggccttcaatttttccattttttttctcatctcacctatttttcatttgcttgtttgtttgtttttttctttctttagtcagtagttcttagactaggtattcttcatagcttattattcctgtcctactgaaatggtaaacagtggtcatggaattgtctcccataaccatttttacagatcaactcagcatctggattttctgagacttctgtttctttttatacttcaaaatattcccattttgccacatgtggcactccagtgtttgcccacttctaatcaaatgccttccctgtggtctttacctgaaagaaaagcccgatgcgagtcagaaacttggccagtttgtgcctcaggtacccgctttccacttattcagcatgcatcatgcaagccacagacggcttgcactttggtggtctctattaccttgcagggggcattccaggggcactagtataaaaaaatccacatgccaacacgg

SEQ ID NO: 55857 - DNA, 2207 bp, Bovine  19866880538008
  misc_feature (1)..(1): n is a, c, g, or t
natttagggggaaaatgagggtctttaaaatatacattttgttctttattgcctcccaaagaagcttcagtgctgtactgtaatgaataatgataacatacattcttaaaaactgatgttagctcagtcattacaccaaatagaatgagaggccctgctgtgtgaagcaatgagatgtcattagtaagcagcatctctgctaaaaggagaatgcatattgttacttgttaaacatattattaatattggtaaaggtaaatgacaattgactactttcataagcagctgattttgctgaaatattttaactaatccttgaaccctaagaaaagatactcaaatcaaaatttattgtgtgaaaaatttcaagtaagttgaaactgacactatataataaagatgcattcaggttaaactattcaaaaatgccaagctctaaaaatatacctaaatatttttcactgatgtaatgttttccccttggaaactcaaaacattttggaatatattacatggaaaatttttctaaattttctctacaataagttaaatatactcttaattcaagtatttttcccttgtgggaatacataatttatgcaagaattttaacagcattatataggttcacaatatatctaccttctttttttatttctatgaattttttacatttaaaatcatcaacatgtattcaaaaataagcttgcttttttggataaatttatcatacatcagtataattctgaattgctgttgttcagtcactcagtcatgtccaactctttgtgatcccatggactgcagcaagccaggcttcccctgtcttcactatcccctggagtttgctcaaactcatgtccattgagtcagtgatgcattccaactatctcatcctctgttgtcccattctcctcctgccttcaatcgttcccaggatcagggtcttttccaaaatgagtcagttcttgacatctggtgactaaagtactaacacttcagcttcactatcagtacttccaatgaacattcagagttgattttctttaggattgactggtttaatctccttgctgtccaagggactctcaagagtttcttcaacaccacactttaaaagcatcaattctttggagcttaatcttctttatgatctaaatctctcatccatgctttactcctggaaaaacctgactttgactagacagacctttattggcaatgtccctgctttttaatacattgtctaggtttgtcatagcttttcttccaaggagcaagcatctttcaacttcatggctacagtcattgtccacggtaatttttgagggagcccaagaaaatagtctgtcaccgtttccattgtttcctcatcaatttgttatgaagttatgggaccagatgccatgatcttagtttcttgaatgttgagtcttcagctagctttttcgctctcctcttttaccttcatcaagaggctctttaattcctctttgcttgctcccataagggtggtatcatatgtatatgtgaggttattgatatttctcttggcaatcttgattccagcttgtgtttcatccagcccagcattttgcatgatgtactctgcatataagttaaaaaagcatggtgataatatatagccttgatgtattcctttctcaattttgaaccagtctatagtctgctgttccctgtccagttctaattgctgcttctcgacctgcatacaggttactcaggaggcaggtaaggtggtctagtattcccacctctaagaattttccatagttcgctatgatccacataataaaaggatttagtgtagtcaatgaagcagaaataaatatttttctggaattctcttgctttttctgtgatccagcagatgttggcaatttgatcttttgttcctctgcctttttgaaatacagcttgtatatgtggaagttcttggttcacatactgttgaagtctagcttgaaggattttgagtatgacctttctagcatgtgaaatgaatgcagttgcacagtagtttgaacattctttggcactgcccttctttgagatgggaatgaaaactgaccttttccagtcctgtggccactgctgagtttttaaaatttgctggcatattgagtgcagtgctttaatagcatcaacttttaggatttgaaatagctcagctggaattccatcac

SEQ ID NO: 55858 - DNA, 1735 bp, Bovine  19866880677860
  misc_feature (1)..(1): n is a, c, g, or t
ntttgttcttccttgaaaatattatatgagtcatattattatgcactgttaattaataacttgtttcttaacattgaaatagggttttaaaaatagatattataacttaaatccaagattttgtccttctaaattaaaaaatatataatttgattatacttcaagttatattgtgataaaagatctcacctttcactcagagcatatgtgacttggtggtacagttgttgaaaagatgattgtataaactaaccaatataaaaaataacacttgagtttctaggaaatttatgcttttgagagtttttgtagtatttggccacctcatgcaaagagttgactcattggaaaagattctgatgctgggagggattgggggcaggaggagaaggggaagacagaggatgagatggctggatggcatcactgactcgatggacgtgagtctgggtgaactccgggagttggtgatggacagggaggcctggcgtgctgtgattcatggggttgcaaagatttggacacaaccgagcgactgaaccgaactgaactgagaactggtaagtatacgagccaaggctaaactggattttaatacttcatacataatgttttcttaaatcaaattaaggttttcttgatactgttttctcaaccaaagcatactaacctttttggattatataagtaatattagttttgccttctaaaaagtatatatttatttgagactcaaagcaacactccattgaaaaggttggtacataaatactccagaaggtctgaattaaaatcccataatccgatatatttgcatttcttaagcaaattatatgaataattaaaccatgcgggattaatataggctaaaagtcacaccccttcccatcatatcaggttatattttgccaccaaatgagtttgccacaatctcaccaaagtactttaggaattactttggatcataatactatgagtgatggatcatggtggtagcattccatgagtcttgattaagcatggatagtgaatttgcctctggggagcaattttgacactggagagggtttgtgtatttccttgaattctgcttattgagctgtgtctaagtacaagggaattctgtttatatgatatataagtattatatcttatacctaggattttagttctttctatcagagcaaaaagttatttttaacacaagaaacatttgatttgcccttgcatctctagtgactctagtgcagagaagcaaagttcattattgcagtagagtgaaaagaagcctagaaagttcaagtaagttagacatgtttctattgattacaacactactgagaatagaaagggatagataaaagccagaaagttggaattagtttaaaattatctctctaaggactgagccctttggagaaagcactggataaattacaagtcacatttgaataaccttcaataacagaactatggatgcacagtatatgtgaattctaaaagaacataattgtagtgctatttatattcttctatttcttagaaatactttatagatcttctaaggaagattgcaagaaatgcctcacagttgccatagtagcagagtcaatattttttgaatgcagtaaattgaaaaggatgttgaaaagggaagaagatatgtaaccatggtatgcctgtggaacagtactgtccaagaaaactttctataatgatgcaaacaggctagccc

SEQ ID NO: 55859 - DNA, 1218 bp, Bovine  19866880702796
  misc_feature (1)..(1): n is a, c, g, or t
ntttatagcgtaccctgttattttaggctctagaaattcttcaagttttcacaatatgttattgaaaaacccttttagatacaaattatagaaactaaacttaaactggggagactacactccgtgggttcagtcactactggattcatgaaatcaatgatgttgaggccatgattctttcattctcaaactctctattcatatagttgataaagagcctgcagagggaacaagactcacattctaacagcttctcagggacagtatgaaagggacgttgaataacaatgaaaacatgcccttggaagaactttgattggtctaattttgtcacagatatttgttgagtaaatgaacccctatctcttccctgtgtctttactgcagcttagggttgataaattctgacttgttgcacctttacagtggccccaaaaccatgaacagggagtgactgggtaagctccttatagagacaagtttcacaaaaataaatggctctgcttctagaataaaaaatggcagaatgggtgttgaatatctcaaaacaacagatgtcaaagctatcaataatagatttcctaggaccctataataatttacatgttggcatatccccattatcaagaattcaggaaatgaaacatcctaattgacaaggatctcatctatcaaacaggagaattggttcctataaagagagtcatgaaaatgttgatactttatgtaactatagaacaaataatctatcatataaatgctgcttttcagatagtcttacatgtatatatctaataccatagttttgttctttaaaaaattatagagtttataacattaattttagcagacaatcccctattcctttcatttctttacaattttatccattgaaggccactgactattcaatataaagaagctcccacagtctggattggctgttcttatatgctcagtgtagctcaaaatttggtttttcctttgccttttctggatattggcagatgaatatagagacctgaccagactcaggttcatttctttggcaaggttatgaatggtggtacattctttcatcaaggacagggagtggtaatgtctgattttctctcatttttatttgtatgcaatgtccacatccattacttcactggtatggctgctgctgctgctgctgcatcgcttcagtcgtgtccgactctatgcaaccccata

SEQ ID NO: 55860 - DNA, 1359 bp, Bovine  19866880728933
  misc_feature (1)..(1): n is a, c, g, or t
nattgtggcttgggacactgtagcagtgagaagactaaaagaagaagaagaatcagaatcagtagtagctaggtaggactgtccagtgagtggaagcaaagctagggatgcagtgtcctgggagccaatcaagagtcgtgtgttaaggaagggtatatagccttaataagcaagaactatgctgcccctaacctccaaccccataacaattatgggaatcctgatttctaatcactgtgcagagctcttcctgaacaaatgaccgggccagaagatttagcagaggtacgatcttccaggtggtttattacctaccaaatgctcctgccattactcaaaagccctttcttctgtgcttctttcaagcatctgccttcatactttgctccttttctggagattttgctcctttgttatctcaagccccttagaggtaatttacatcaacatgtccaaaatgattgactgattttctgatgggctgaaaccaatcagaaaggaaaaagaaaccatttcagttttaaccatagatatgttctttttttaagctttcaaatttgtaatcaactacctgaaactggtagttcaatatcattctctctcccttagaatttaaaattgtgttcgaatcaaaaaacaaaacagaattactacttcacgttacattgtagcattcttcttttataccacttctgacctatatttcacagaaccctgggtaaaagtattggatggtaagcaatttaacaatgttattgtaaaattgattagcccttggcttcatcttcctcaggaactcctgcagaagttgtatagttatgtgtaattgcaatacataagaagaaatataggacaactaattagcatatcctttgtatcattacactgtcaaatacaaaaagaacaaatacttttttatgtgttttttctttttcttttttggtacgtgatggctctgcatatccctggctggaaaaaaagcattcttagtacttaaatttcagttagttcaaggatgagtctctgcatgtgggttttatttagtctatccagagggcatcttcaccttgtttttccccagtataattactgttactatcattaggggagaaataaattaattttgataaaagtccaattagtattgttacttggcatatagatataaattgtgcagactctacagaaacatttttatgactggtattcctaggctaacaactgaagaaaatgggatacaccattatcatttcattttaaaaaacaccctatggatttgcttaaggagtattagcaatttccaaagccaggagtattttaattaaacagttatattttgtataggcaataattattctg

SEQ ID NO: 55861 - DNA, 1115 bp, Bovine  19866880753495
  misc_feature (1)..(1): n is a, c, g, or t
ntcatgagactaaactttctactatgaaggtcaagttggatttccattatactgatatgctcatgattgcagagcaacactgctgagcctttcaaatgatgtttagaggtagctacactactaatgctgaagctgaaactccaatactttgaccacctcatgcaaagagttgactcattggaaaagaccctgatgctgggagggattgggggcaggaggagaaggggacgacagaggatgagatggctggatggcatcaccgacttgatggattttagtttgggtaaactccaggagttggtgatggacagggaggcctggcgtgctgcaattcatggggtcacaaagagtcggacatgcctgagtgactcaactgaattgaactgaacactactccttatttgctctattcagaaatatgtatgtgatggatggtgtgttcttatgtggcatcactggcttccatgttacagatttttgcttaaatttcttcccttgaggagtatctaatgttttactggcttcaacatagcagaatatcttgaaagatccttcatgatgtttctctaatttctttattcccaatgtcaccagtgtcctttctggtattagcacttagagcaaatataatgaccatgtaactggatttcatggacctagattattttccatttctccatctgtttatagattcttctcaaaagtcttaatatatccctgctatctaagatataaagcttgttttataattaagctagcatttaccaacttccattagtgtctcacaacatttgactggcattgtaaatttacttctgctcaagtggatcactgcaactttgtgtctttgctaattctattatgcccatctagaacttatttcactcattcttccaaatgctgaaatttaaagaaggtaacgataaccctgtatgtgagacagcaaaagagacacagatgtattgaacagtcttttgaactctgtgggagagggtgagcgcaggatggtatgggagaatggcattgaaacatgtaaaatatcttatgtgaaacaaatcaccagtcttagtttgatgcatgatacggggtgctcggggctggtgcactgggatggg

SEQ ID NO: 55862 - DNA, 861 bp, Bovine  19866881051032
  misc_feature (1)..(1): n is a, c, g, or t
nttaatactaattctcttcctatatgtgtgtagaatgggttgaaggaagaaaggagaggattttctttttcttttttttcttcaacaagaatcaaagacataagccagaaagttaagcggaatttcttgtactggtataagaactgtgtagatgggcagaggtaggaaatcttttttacactttatgaagttacccacttttaaagatatgagactcactgcaacccagttctacaagttctgtgtttagattacctgtgcacacactgaaggacaccgaatttagttaagagcatcaaaatctcccctctttcccttactgaattttcttagaatgaattcatatttactcatttagaaatttctttcaagccaatatgcttgaggaataaaactttgttcctaactttggagaactcatcagctagtgaattttcctccttttttttaagaaaactttttggtccctgtgtattatccaaattctatgcttcccccttcaattcttgtactcttatatcctcttccttctttcctttcattcacaaaaagtatcaaagatgcttttgtttacatacactcagtaaacaatgtgcttagaggttccaaaccagccctgacagaaacatcaatgttaagtacaaaggtctggagtgggaggtgggatttgtaagaagcattagatatgccttcttttttatcataggttaagtaaatgtgaaggaagccctgggaaattaagtgctttttgacggtactttcttcagaagatggagagaggaaaaagaactaatgatgtagcttcttatgcaagaggcacttaagatcaaatctcttatatactcagcaagtctttccaat

SEQ ID NO: 55863 - DNA, 1871 bp, Bovine  19866881188532
  misc_feature (1)..(1): n is a, c, g, or t
ncagtatttaaacctattattatattgttaacatataagaaaactagagagagtgagaagaaattaggatggcagaaagataattctggagaaaaaaaattgatacaaggatttcagttcagttcagtcccaatcatgtccgactctttgcaaccccatggactgcagcatgccaggcctccctgtccatcaccaactcccggagcttacgcaaactcatgtccattgaatcggtgatgccatccaaccatctcatctttagctgtccccttctcctcctgccttcaatcttcccagcatcagggtcttttccagtgagtcagttcttcgcatgaggtggccaaagtattggagtttcagcttcagcatcagtcgttctaatgaatattcaggactgatttcctttagtattgactggttggatctccttgcagtccaagggactctcaagagtcttctgcaacaccacagttcaaaagcatcaattcttgtacaaggatttggaatatagtaaaaagcattaaaattccttttacatttcctcacctaaatatgtatacaaaaataaatgtagtattaatacatatttgagactcatcatgtttgtaagtgtatttgaggtgaatataataaaatctgtttagaagtggcaatcttccaaatctgaaaaatgaatttctttcccagtccttactgagacagatattggggagtacccttactagtggcaaattaataatatgtaacccctatccacacatacaaataaatgcaaattttgccttgaactaacaggcagggctagccctcggtaatggcagagaaggagggcttcttcactgattcatcattttgagctgaactttagtgtcctccatgttccactaatgcagagatagggctgcagattttcttttcatttaaaatagcaggctgagtttgggaagaaaactgcataatttgagaagaggggtgaggagatagggaaggcagcattttattcactaaataagtgctgcttattcagctgtaacaagccagtgaagttggaggttgcaaatgagagaggagaatcactggggcctctattaaattcagcttctgttcttgattcagttttatcacttgctagacaaagcttggatttcagcgatttagggttcacaaattcagaccaagttctttctactcagtgagctgggtcagcttgtaaccagtctaacttaaaaattcataaatatgacttgtttaatctgtagtgtagattgagagtcactcaggattttaaatctccatttactttccattcctgcaatgctccagcatgagaaaaattcgactcacacacactgggaaactctaggctgattttgcctctgagatatattcagtgtatttgggttccttcattcatcatttcatactacccttgattgaaactgcacttgaacagaactctcccgagttactcagacctgcaaagcttaaatctagtcacagtttattgatggagacagtaacacataatgaaatgccattaattcacacatgtaatattggtttctaatttgaagcatcacatgtaattatcagtagattagttactcagattcatagcctggtgactatggggaaaatgtgcctatttctacaacctgaactgtaagaaattagaatgtctatttcttacgaggacaactacaaaatctctgaagccttcacattgttataggtttatggctcaatccataaagagagaattcaggaaaatcagctctgccgcttgttatttccctgcaactctcatcccagacagtgtttgcaaagagattcgtcaggaaaaaagcattttatttcagtaaacagttaga

SEQ ID NO: 55864 - DNA, 754 bp, Bovine  19866881234730
  misc_feature (1)..(1): n is a, c, g, or t
ntgtctgaagctcctgaagcctcccctaccctctgttcctgggaaaattatctgccatgaaattggccccaggtgccaaaaggctggggaccactgcctgagacagtagcttggaggggtaccgcagaccctgtggtccagaggaaaacacaccctgcccaaaagtggaaaaagccctcttcatagtcatcccaacactgaatttcgaggccccttgctttctccacaaatgtcatcatatattgaatcaagtaaaaactaacagtctcacaactgaccaaacctacagtgtgtacgctgcataacaagctcaaaaataaatagtgaaaacaacagaaaaaagaaaaaccaaatggtcatttactctaagaatccaggcttgtgtttatgctccacatgaggtccgaattgaatctgggcttgaaatccaccaaactcacatgctttctcgaaggagacagggtgggagccattcaggatatcatcccgagcctgcaacacaagaggaagcaaaaagcatcaggagcttggggggaccaacacgatctctccagttccatgttcctggcacccaagcctaccctctctggggagatgaggggaagcgtgccagccaagccagagtgaggcattcattcgggacgctgtgagtgactgtagcgtcacagaactaatgcaaagggaaaacaagtccgtgcccaaattgcctatgggatggaaggcatcagcaatgcccagtatattaaaactaaag

SEQ ID NO: 55865 - DNA, 1020 bp, Bovine  19866881237438
  misc_feature (1)..(1): n is a, c, g, or t
nattatattgttcacctcccaaacttatataagactatatatgaattatatctcaggaaaaacctaaaggaaaataaaagacctaccattaaaaatggcaagaatatcaagtgattttagaattaaggttagctaaccttaaccagggaataattccagtgccatttaaaatagtttgtgcgtacatgcacgctaagttgcttaagtcatgttcaactctgtgcaacactatagactgtagccccctaggcttctctggccatgggattctccaggcaagactgctggagtgggtttctgtgtcctcgtccaggggatcttccctacccagggaccgaacctgtgtctcttaggtctctcagcattggcagatggattctttaccacttgtaccacctgggaaacccaggctagtccatagtaatacaattatgacaacttacagtacattctgtgatgctaacataacctaaatagcatcacctgatatagcgagaaacaatatggacaatatataatagatataagaatagtgtgagtacactttggaataacatattttatagtcttcagagcttctctatcatgaaatacgttgaatggagcatactaatatgaaaaagtatattgtcagtcagctgcgatgtcttcacagagtgccacagatttagcactctaacataaattcaaaagtagctctattttccagagctctaaaataaatacacaacatcaatttcttctgcacagaggaatcatttttgcacttctgcacaaaaagtaagacctcttctctaactatttttctccagttgattaaaactcttaacatctgatgcaattgaaaactcagggacttaggattaaatgaaaattttttgtgaaaaatgtgcataaattttcttacacaagaaaagtgactgctaaacttaataaagaataagactcagacaaaaatcagcaaatgatacaaaactaaagtgacataattttaagcagcagaaggtcaaggacagaagt

SEQ ID NO: 55866 - DNA, 1044 bp, Bovine  19866881346009
  misc_feature (1)..(1): n is a, c, g, or t
ntttcctgcattgcaggcagattttttaccagctgagctaccggcgaagccccacatcctcctcgcagcccttgaatttccacgaaggcatgagtatgtatgtcctgttgtgttaccatacctaacagtatcataataattgcttgtttaaagaattaaaaagtagatgactgagtaagcaaaagctttgaaccatgattgaaaattctatataatttcattagacttttcagttaccatgcaagcagccatagtccttactacaatcataagtaggatatataattcccaaagtactcataaaaagggaagccatgtagatctgaatgggaagatggtataattcttctattacacctagtcccataataaaaaaacaaaacaagcaaaaggtcaatggtggggatggattatatcatcaggaacagtagacgttgcttgaaattcaatgtgaatgggctaataagaaattagctaatactttgtagcataagatgtcctgtgatgaattatttaaattttattgctttaggtgatcagcttaaggaaatctaatgccactatctaaatactacacttcaataattaatagtcattcaattgctgttgtgaatgaaccattattaaattctgtttaaacaaccagctatttaattgatgcccattatcccttctttcctctaatccttctggaacatgttgtatcactacaacatgttcctaaattctgtgtatctttacgtctaaaggctgttaacctaaaacatataaacatccacacattctgactcatgtgaattaaatgcttccctttgtttttcacctccaatccccagcttctgacttttctcacttcagttgctttttaagattcttggaaaaaacttaatccacattttcacatctagtattattgagtctctacagaaaattaaactcagtccattttcttttttggtattttctttataattaaatcttattctttgccacatattttactacttttcttagtttttctttaacatctccaacaattctttt

SEQ ID NO: 55867 - DNA, 1363 bp, Bovine  19866881373215
  misc_feature (1)..(1): n is a, c, g, or t
ntatgtgcatgagttgtttattgtttaatattgttattgcatattgtcctaacaagacctgaaaaggaagcatgcatactccatgcaatatgcactttaattcaaattgacaaatatatctgctcaaattaaaacagtcagcaggatgtgcttgaccatgatgatgcagttcataatttcagtgatttttaatcacatctatccatgaattaaatgtttgatgttttggctctatcatttacattatctatttttcaacaaaagtacgtggacacaattagtatgtactctgggctgaggttaatttgggcactgttttttttttttttttttctgttttcttctataatactcctttatatctcaagaagttatgcatcacctattgaataaatatatttagagactatacaggacatgtgtgaattaatgaaagaagaaggtcattgttaccctgtcagttaatctcaagtatagcatccttgtttcctggcagtggcaaacggcattcctgctgtctccctctctttatctccctgtccctctttagattagggaagtttttttacctaaagttttgtcagtttgggggatttaagaacattctctggtatgtggaagtctcagtttctttcctgtataaagggaaaaaatacttctttcttttcaggtttgccctgagtctaaaatgagaggatgcatataatgaatacaggatagacaaatgtaattctcctcctttctcattttgttgaacctagtaattaacagtcacaagagaatcccctaactataaatttaattcgagatgcaattacaaggatacgttggcctctgaaagagaaattgatacttgatgaaggtgattcttactgaaaagaatagaatcacatggaagattagagacttcaaaaccatgagtgtaaaatcaggacacaggtctccatagttgcagagactgattgtacggcatttagggattattatgtgccccaaattatagattaaatatatgttttagaaatgctttggaacaaactaattacagtttttaaaagatagagaaaaaagaaagagaatactgctttggggttgtaaatctgactaacaaactatggagtttgcagcatcattggcacaattaaggatacactaactttctcaaaagttacattgttttttagaagaaaagtccatcagtttacataattcagggctacaaatgttagcttgagtaaactgaaagaatgtctaatctagatacaactaagagacaaaggatcaatgatcaatttcagttaagacatcatgatcagagacagatcagtttcagtaagagtcaggtagggggcagtatcggact

SEQ ID NO: 55868 - DNA, 987 bp, Bovine  19866881500148
  misc_feature (1)..(1): n is a, c, g, or t
nacttaacattaagtaaaacagaatacctttacataaccatgcttttatacatttcttcactgagaagcatcttgtgtaattgttcaaatatataagcaacctgtacgttctttattaatgtagattgattttttttagcactaggcagtgtgctgtgttcagttactcagtcatgtctgactctttgcaaccccatgggccatagcccaccaactcctctgtccttgggattttccaggtaaaaatgctgcagcaggttgctatttccttctccagaagatcatcctgagcaagggatcaaaactgtgtctcttccattgactccattggtgggcagattctttaccactagtgctgcctgtaaaggtttgtgtgcatactcagtcactcggccttgtccatctctttgtgatcctatggactatagcccacctggctcctctgaccatgggattctcaaggcaagaatactggagtgggttgccatgcctttctctagggtaccttcctgagccagtgatccgacctgtgtctcccatggccactgccttgcaggcagattctttactgctgagccactggggaagcccatataggaagttgtagattaatataaatgtgtgtgtgtatgtgtttacattctgtctgtccataggaagatggacacttaataaaagacatttttggaaaatggcattttcgtaaaagacattttccccaaggaaatacaagaagaaaaaaaaaaaaagataaccatttataatttgtttcaagataattctttatgtgaaatgaatttcctattaaagatttagttcatatattctaaggagagtgaacagtagaatgtaaatagctgtctacttttgatgaattatccaaatattctaagggtatttttccatcttaaagatcgaaggctggttgaaattatataccttttatcagtgaacagttgtttataaacattggctgatatttcttaa

SEQ ID NO: 55869 - DNA, 1183 bp, Bovine  19866881508022
  misc_feature (1)..(1): n is a, c, g, or t
natgatactgccttaaataatcccctctcacaataaataattcatctttttgtatattataaacattccatggtagattaaaattattatagctattaagcccttcaaagtgttatgcaaattctccttcaactataactgtatttcacacagttaggagcaatgaaagataagatagttttattttaaggaaagaacatatcattattattaatttttttacagataaatgaaaataagatgtgaatgccattctgttttgtagtcaaggttatcaggattatagtgagcactctatagggctgttcagttgacattattgcaaactaacaatattcatgagtgtcagctaatactaattaatttcactctaatgctgtgaaaaagcacacaagtgagcctttgttcccaaccagtacttgtctctgacttttaatataataacataaacggcaaacctttagattttccatctgaagtgaccagatgttcaaatgaatatgctttactatttttaggactatgaaatgtgcttttctcccatctgaaatgtcattatgatatgtattactctttcttgatatttagctgtaggaccacttatctaaaaattgatttgtgatctttatataacaattcagagtacatattatttcttcaggtgctattgaaatataaaatagcttctgtgaataagcctccatttatatatttattcttttatatcctatctctgttcctgttaagtttatttacaaaagtatgtgtttttatcccaaagtattccattttatttttatttctcttttatctaattccaacaaatttagtttgcatttgttcttggggtcaccattcaaaggaagattctctgtacacagtagttctgctcttatagtaaagcctagtcaaaatattggctatgcattgcaattaaaaagtttccacctagaaatggggacattctgttctcccagtaaatatttcaaagcactagaaataaaaaaggatattattgtagatttaaaaggagtaaatttgggctttactcagaaatatttaaataattaataataaacagaatttttctactttgtctgttgaggggagtgtagaattgtaaaaactaacttctcaatgtctgtgaccaagacctagtctctgtttaagggatcttattttt

SEQ ID NO: 55870 - DNA, 1082 bp, Bovine  19866881853955
  misc_feature (1)..(1): n is a, c, g, or t
naatttcttggaagttaatggttttcaatgggtcaggaaaggatgatgaaacacagagcaacaatttctcttatgaattcttctacagtgcatgcacagaaataaaatgattagacttatgtttgtctactcatctgaggaataatgtatgttatttggcatagaggtaatggcaatctgaagcttttcaattaaattgaaaatgctgacacaccaattctcttatctcatacatatcattagatagatttgtgtttgactgaatcacatggaggcatctttgtgtatcttgagaaatataccttcaattaatggcatactacacaatctattgaataattttcttgaaaactaataataattatttttacatgtgtgtttggtaaatgatattatacatgaactcagaccaaagcaattattaaacagaagaaagaattaatttgcccttttttaggattattgtataaaaattaaatgatatctagtcattaactagcaccagttgaaattcatataatgtcatctgtctgcctactgtatataatgtaaaggcttttctgtacataaagagtgtttcccagaagtgttttattctttaattttctttattaatttaaaaataattttgttcttttgtcatatgtcctacagagtagacacattttcttctagtgctaatttttcagtcacatttatgtgaatgttacattctaaattgatatattagagctaatcactaaaagttatttctgctgtctttgaacccaataagaaaattctgaaggtcaaagcttctcttgctctctcatgcatacactcattttatctctctctctttctattttgtcctttctccagttcgtttcatctttatatctctcattaatgttctaaatcattaatgtattctgaggcagtggaaaagagggatttttctgtgttagggataatagattggcaggaatatagggaagagaggctataattgtctaaacttacaatcagattaaatccgggttttcccccatggtctatgctgagaaactttattacttctgagttatagatatgaaaccaaa

SEQ ID NO: 55871 - DNA, 928 bp, Bovine  19866880411745
  misc_feature (1)..(1): n is a, c, g, or t
nttctgcttgagtactcccagtgacaggggagaaatgctgtaatatggagatgaaatataaactgttcatggataaatgattgcataataaaaacatgcctaatggccacgcttccctaatacgttcatttgctagttatgtttttatacgcaaactcatcttgatcaaattgtttcttaaaaaaaacttggagtgtaatttgtcttgagatgtctgcattttcctttcatacctccttattaatgggcttattttctgagaggaaagtgtaacaaagataacagagcaaaaacagtcatatttgctcctactgttgtttgggggttaaaagtgaatgctaacagtgtatgaatgatcttttcaatatttgcagttgatttcccacatagactttcaaaagctaccatgatactgtttcctcccactatttaaaaaatctatttgaaatgaactactggaaatgttaggacagaataaatccttctaagaatttatttgatatttaacccccaattataatggaaatatcaggggcagctgttcatttggtatgtttgtagtctgtgtttatgccccagcagaggaagaaaaactcaggatcgatcccttactttttaaaaagaatatatctttattattatttatttttctttaatttttttggctgcactgcacaacacgtgggatcttagtgccccaaacagggatcaaacccacacccccttcattggaagcacagagtcttaaccactggactgccagggaagtcctaggatcccatacttttcaaaggaagtcccaggaacccatgcttttgaagagatatctaaatgctatagttacagaaaacttacaaatatggtcttcatggaagacaatggtaccatcccatctaagactgtgggttctgaactggatggtctaagt

SEQ ID NO: 55872 - DNA, 2420 bp, Bovine  19866880436462
  misc_feature (1)..(1): n is a, c, g, or t
ncacgtgctaaatgacacacccacaggctctatgacagttccaaggctgaccatcgaaggtcagaaagtgggtggtggcccaattcctgtaagtccctgcccttcccaccagtttttggaataatcctcccactcaatagcctatgaaactatccacccctataaaaactgacaaacccattcagtggggcctcttgccttctgagatggtccacactctgtctatgaagtgtgtagctccctgaacaaaccttttcccattttactatagcttgctcttgaattcttttcctgctttcatgaagccaggaacccatactctgcagccatcccagggactcgcctgagacctgaaatgtgaccatcctctcactccactctttttcctgccacaatttcacagactcatggtccacttggctgcatgcctccccgccactctttttttctatagtgataataatagctggtaactggagaaccagagaaagaagaaattaaaaaaggaagggtcttcaatacaatgggaccattttgtagtcttctctttccatattcctttcttctgcccttaagaaagtgttattttcctggattgacagaattatgcccccaacccttttccagagcctaaatattcatatacaatcctaacaggctgctcttgggtccagtgtgagttttattctcctctccagaaagcctttatatgctttcacttgaacactgaatctggtgatgacggggaggacgatatgggttattttccttcacagaggtgtcataaggataaatgaaatgatattcatacagcactttaggatgttcttacaaactgcacctttgtaaacatgacatattctaaaagaccagtgactgcaatttctgttttaaatagaaattgctgacaacaatttcaaccctggaaagtaaacacatcagcttgaaattgaagtgcactttgccaagtagcagcaagctgatcacctatctgggtccttaccgcaaataaagttaaatgttcacatagatcgttgtgtacaattcatcctgctctgctatttggaagtatcagaagctagtggcctggtcctgcattctttgtgatccaggaacatctggaagtatgtcttggtcttagaacctccaagggcattgctgtctatctcaagaaaactatgattagagacatcttgagaatactgaactgtagcagggtccaagctatgggagcacattaagagcaaaccagtcagtcttaaaggaaatcaatcctgaatattcattagaaggactcatgctgaagctgaagctccaatattttggtcacctgatatgaagagctgactcactgggaaagaccctgatgttgggaaagattgaaggcaaaggagaagggggcaacagaggatgagatggttccatggcatcactgactcaatggacatgagtttgagccagctctgggagatagggaaggactgagaagcctggcgtgctgcagttcatgggttgcaaagagtcggacacgaccgagcgactgaacaaaacaacaaaaccatcctactgaggttactctgaacccagataaaactctggaaaatcttcagtttggagacaggagcaaaaactctcatccttcaggtggccctggtctgagaatgaggccatgtcctggaacacatttggagatctttgtatgaaaacactaaatgtcacccaggtagagagtaccagaggatgttctaacactgtcccagggcactgatgtgttttatcctctattaagccaagggtggccgaggaccaccagacatcacgcagctagttagcatcccaggtacagagggcaataacctggcagcagtgaagcgcacgtgagttgacgtgaagcttcgctgacatgtcagagggccaagctagcaagtgcaacagggagaactgggaagagagtcagtcttgaagatcacatccctgggagagatctcaggtcactatgcaagtgggacctggctctcaagtaacatagagtaagtttcaccgactcagcaatggaaacacaggattttaagtaaaagaaagaggaagtgaaagtcaaagtgtcggtagctcagtcttgcccgactcttctcgaccccatggactatagcccaccgggctcctctgtccatggaattctccaggcaagaatactagagtgggttgccctgcccttctccaggggatcttcctgacccagggactgaacccgggtctcctgcacagcaggtggactccttaacatctgagccaccaatggcttcttcacaacaacagctttgcaagctgcatgtgcacttgcttgcttataggggcactctctgctctccgttggggggatgtcctcaggcccctgatttaaatctgtaatgagatatcta

SEQ ID NO: 55873 - DNA, 1829 bp, Bovine  19866880526900
  misc_feature (1)..(1): n is a, c, g, or t
nggaagcctaaataagaaggagcctcccccaaaggtagaacaatccaaagggataacattaaaacactgcagtctgacgctgagttaactaggtaaatagtttttcaaaggttggactctctccaagccccactataaattacaacataagagactatctaaacctagtcaacagttgaggaattactgttctcttgcaatctctgtaaggctctcagtttttgagagctgccatcacagttctgatagccctggcatcataaccaggctatatatccataagtagcaggatgaacggagaaggcaatggcaccccactccagtactcttgcctggaaaatccccatggatagaggagcctggtgggctgcagtccatggggtcgctcagagttggacaaattaaaccaggtatggtaaaatactcatagccctagagtttagaaaggcctggatctgcatcccagcttcacagttctaggcatgcattcagtcagcatatttatttagggcttcctgtgtgccagggacctttgtaggcactgcaaatataggcagaataggcaagatctccaccttggggaccttcaccggcgggtggagggtgagtgaatagtaagagtaacaaataatgggcaaataactaaatatcaatcaagcggtgttaacacaatgtacttagtgggtggtcagggaacatcttctaagagacatgaattaaggaaaggaggaagaagaaggtagaagaggagcaatattccacaaaccaaagaccaaagtgtttcaagaaggaggaagtcaagaataaaaaaaggaggaggaagtcagatgctgggagggctgtcagtagccatgtgacccctagactagttatgtaccttattgaagcaataatagtccgtgataactttctgaagtgaagtgagtgaagtgaagtcgctcagtcgtgtccgactcttttcgaccccatggactgtagcctattaggctcctccgtccgtgggattttccaggcaagaggtgcggactggattgccatttctgagcattgagataattctgtaaatcacctgtcacttagtagaccagtaactgaagatttttttttcacatttcatgtgtgtaataaaacacaaacttaaaaattcacagtgaaagatattttttaaatggtctccattccatttctcactgaatttgcagtatcttcaattaattgcacataagccaaaatacggaagtcaggaagttaaagcataatcatagtgggactgtagctttgtctcttttaacagactatgttagtaacaagcggttaactcgacgtgtcaagtcatgtgtttcgtatcacgtgtgtgaactgtcatgtgtttaaatatgtcggaatttttcactttcaaactggaagagatcacttgttaagagaataagagctaagaaaatcagatatttcagcatttataggaatctgtcttgctaaattacagcttctatgaatgatcagcaaattatttccattttaaatctaagaaataaggaaattgatttggttcctatctgtttcaggcattccctaatgacttagcattgatttttaaacatgctttcaattttatagaatggctgaataatatgacatttgatctaacctctacaggaatgacaaaatgagactgttacagactctttaaagtaatagaaaattatgatatctttgtctggctacttcaccatattgtcacctaaattatttttataaaatcaggcattaaaaattctaccaaaaagtgttgaagaacaaagatatacattcaagtgggtgcttttaaa

SEQ ID NO: 55874 - DNA, 1573 bp, Bovine  19866880576589
  misc_feature (1)..(1): n is a, c, g, or t
natctgtgcttcagttgtgtttaactctttgcgaccctctggactgtagcctgccaggctcctctgtccatgggactctccacgcaagattattggagtgggttgcagtgtccttctccgggggatcttccagacccaggggttgaatccgcgtctcttgcgtctcctgcgtcggcaggccggttctttaccactagcgccacctgggaaaaccccctgtgctctgtaaatccacttaagctaacacaaataaatgtctgtgccagaccctggaagctgtgggatgccacagtcagtgcctccaagctgtgacgttcctacttttccgtagacacatcccctatagtgagtgaagactgacagtctcacatctctaccaagggttgagtgttggtgctgctgtcagtccatatactgaatattcataatgcttatttccccttttgtgaagggggcgtgtcacacagcgcggcttatagaattttagttccctggccagggataaaacctgtgccccctgcagtggaagcacagcatcctaaccactggaccaccagggaagtccctcccttctttctaagatgatcaattttgaaaagttctaacattttcttctcataatgcaatgactacactgagaatcccaggaggggcaggctcacaccctactctggagaccttccaactggtagacagcctctcccctctcccctggcttccctggtggctcagtggtaaagaacccacctgtagtgcaggaaacataagagacagaggttcgatccctgggtggggaagatcccttggagggaggaaatggcagataaccagataaccattatgttgcaaatatactacatttttgtttgtttgtttggggggaccccttttgattaaattagcaaattaactctgtcctaatcctcaaggctcttgaagtcttaaacctgtgtgggttgactcactagacagatggattagagctctcctcccctccggggatcacttgggcagcacagaacatgaggcttctacttgttcatcattagcattgggagcttgatcaacagttttaatactaaatgccaaatatctgtgtttgtagatcaaacagatggtctgtgttgttcttttcttatttctcagactcaaaatgaaacactgccctctctaggatgtcacttattctgaggatgcccccttggctgtcttcaggggcctgagacccagttccttctcgcttcttcaaaggccagagagctttttgctgtgtaatgcgggtctctgatcaccccctggcctccagctgtgtccccagccctcttcactccatcaagtagtttttgtctggcctgagaatgtttgtatgacactcaattcaaattcagttagataagttgttttggtggtggtggtggtgagtttagttgctaagtcgtgtctgactctttgacagcccatgggctatttgcgagcccgccaggcacctctgcccatgggctttttcaggcaagaatgctggaacaggttgctatttcctcctccaggggatcttcccaacccatggactgaa

SEQ ID NO: 55875 - DNA, 995 bp, Bovine  19866880672989
  misc_feature (1)..(1): n is a, c, g, or t
ncagcatgaaatgagcctcagaatttactgctcgtttcttgagtactgagatgctgaatctcgagggtcctagggaagggtaataaatataaagtatttttgctgggctgatttcttacagctagtttcacttaaaggctctcttgaaactgcaaccaaatattggctttaaggcaccaagaactgatggaaagaaaacctgtgacaatgacacataaagttagggcaaatcactctgacttacaaggaactctacttccctgttcccaaaatgcgggtaatgtttgctgctgctgctgctgctgctgctgctaagtcgcttcagtcgtgtccgactctgtgcgaccccatagacgtcagcccaccaggctcccccgtccctgggattctccaggcaagaacactggagtgggttgccatttccttctccagtgcatgaaagtgaaaagtgaaagtgaagtctctcagtcgtgtccgactcttagcgaccccacggactgcagcctaccaggcttctccacccctgggattttccaggcaagagtactggagtggggtgccatcgccttctccaaaatgagggtaatagccactggtaactctgcttcacaagttgaattaatggtataatagctatgaactcacctgagctctgctaagccaagagctcttaagaaaaagatgttagattaaataagtagtacattttaaggaagagagaatttgagagtgtcaaaacatatttatgaagtacctaccatgtgtcatgtactctataaagcattgcttcctaatatttaatttgctgaaataccttgttaatgaaaaaccatgtagttagacatttagggtcttttaaaataagcaaattctgcaggggaatatatattaatttacataagtttctgtgaagaaatgtctgtgggtaacattctagtttgactgaagcaaaatgtattggacattaccgatcttgaggtcctggacatgcaaag

SEQ ID NO: 55876 - DNA, 1221 bp, Bovine  19866880729580
  misc_feature (1)..(1): n is a, c, g, or t
ntcataaaaagctgagaaaaaatagacgtaaaaggcacagaagacgatgagccaagctgcaaaacaagaatataagaggagctagaattactttcaatcagttatcaagaatactgtttattagtgtaataaatgaattctctcacatgtaccaaaaacttggtagctatagacaaaaagcaagtgaagttacttttattttcgaaatttagcacaagataaactgagtagcttaatatataattttgtattgtgagactaagattgaagaaaaataactactgttttgcaattaacgtatatggtttattacatgtctgactctttgcgaccctatggactgtaacctgccagtctcctctgttcatgggattccccaggcaagaatactggagtgggttgccatgccctcctccagggcatctttcccacccaaggatcgaaccttacatctcctgctttggcagctaggttctttaccaccagtgccacctgggaagccctgttattaaatacatttctgattgtaaagtcattctgtgtccacactgtctatattcacatggcatgatatttcatctgtaatcatagtttatgtgatttctattttacccatctgcagatacctaagccaaataagtatgtctcattattatcaagataacatttttatttatgtaaattaaatagtttgtaactcccctgatcctccaaaacaaaggcaatgaatctcatatccttaaaaatttattcttacacaaaaccttggaaatgggaaatcctgagacaacttatttttcaacttaaaatttcaatgtaccgctcctaaactggtatgcctgaacattgttcataattcttgttttgactccatcctcgttttctggttcctgctttgctaatgattgcagtctcagcttcataaacatgttactgccggaccataaggcagcgtttctctgtgaacacagtcacacgctcgcattaacctctactgccaagaattgctgccttcctattaactttctttttttaaaaaaagtctttattgaaccttttccaatactgcttctgttttacgtcttggttttttggccccaaggcatttgggagcttagctccccgatcagggattgaacctgcaccctgcattagaagagcagggtcttaaccactggactgacagggaagtccgcctgctaactttctcaaactttcaaa

SEQ ID NO: 55877 - DNA, 2881 bp, Bovine  19866880775569
  misc_feature (1)..(1): n is a, c, g, or t
naattgggctctgtactgaataaagacagcctaccaccaccccagtacggccctagctgcacaaaatgtgcacagcgtcctcccaagcaccgaggcttgctcttatttacacttatttacatatcgagccagatctccatggctgcctgcccggaagccctatttttaattgtttgacgccccagccacccctctgacccttcctggcacttttctgaggatttccggccactgctggcttgtgagggaaggcacccaaccaaaccagaggcccccagatttagcatctctaaagcctctttccaaggggattctccaggcaggccagggctgcccccctatggcgaggagggggtttggggtgagggggagcgggcagctacatcccctgtggacaaaacgaccggggagggaagcagctgcctgtgggttctccagctttcttctctagctgtgcttctggaagaatcaggaatagctccaggtgaagaaggcaaagggcttgctctgaaatttacactgggctgccggtgtcccccgcccccttcttttttaaaaacagcacttcctagactgagcaataaaatatataaatattttccaagagtgccctctagtggaaatctgaaggcaccggcacgtttgacaaatggcagtgacttggcctccaaacttcggaataaaaataaagcacctttcacccagaccttcttcacacgtgacttgaaaacagatccagtttcttccacgaggccataaaagtgtcacatggccctgactggaaatgcaggctgccttaagtctttaaaaggaaatagtgctccacttttagaactggaaatcacacaggttgttttaagaactttcaaggcagggaagtgtgtggaaggggacaaggggagcgagccatgggttgtattcctaggctgcgcctgggttgctggccgacggcttttattttggctggcgaagtgagccaaggctgcagtaacgtccagccccaaaggccacacacactgctgggtttttaccttggaggatgtgggacaatgagtcatttgtgcctcttcctggttcttcctggccaaggtcagctttcccactggaaccgagcagcctggcgcacagcccgagccgtctggagccttcccctggtgccgagcccaggagagggtgtggcccccgccggctccccccagaggccccagttcaggctccgagacagccctttgtccacgtcagaaaaccactcacgctgctcagtttagcaggaagggccccctggcggaggccctaggaatcgccggccctgaagaaaggttctcacgcagaactctgaggaggaaactcaacctgcttctgacctttctggtcagagccaaataacttttctcagtttggatggattccagttcatcttgcaaccactcctatcacgaatagtaataaaatagacgccgttccttcctttctcctgtgtgtgtgtgtgtgtgtgtgagtcgctcagccgtgtctgagcgaccccatggactgtaacccaccaggctcctctgtccatgcgggtctccaggtaagaatactggagtgggttaccattccctttgccagaggatcttcccaacccaagaatcgaacccaggtccccgtcatttccggtagattctttaccatctaagccaggaggaaagccccctttccccactagacaaatgtatttgagcacccactttttacccggcactgctctagattctgaccatccagacagaccaggtccgcatctcatggaaactgcaatctaattctgagataaatggtacacaagcagatatatcattctgaggctctgaaggaaaccaagagagtgtaatgaataacttgggaagtcctgagaggaggcgtttgggcagaatgctctgagaaggttacatttaagcatctattatgtgccagttgtttactgtgttagaggttaatgacccaaagataaaagccaatgcttggagtaggcaacccattccagcattcgtgcctgggaaatcccttggacagaggaagcctggcgggctacagtccatggggtcacgaaaaagttggacatgactgagtgactgagcacaaacaaataagccagggcccaccctaaatccaggatgatctcatctcaaaatccacaattacatgtgcaaagattatttttccacatagtcacctttgcaggttctggaggttacaacttggacatacctttggggtccaccattaaacctactcagtctggaaaggaaaaaaaaaataatgctgtctaagccttcaaagagctcagagcccaatattggaataataattgcataggattcaaaaaatagaggatttcataattgccctaagatctattgctcacgataaatcggtccagtaaattgcatcatcttcattttttaaacatgacaactgagtcaaaagacttgccagaagttttagggttcatcagtagtgacgtcaagtttgaaatagaggcccatcttgctccccaatattgtctttcttttcctacgccttgtttcttggtggaaacagggagataaacaatgtgatcctaacctctctcccagcccaaacgtttcacagggcgtcatgcacggtctgaagtgggctcacagtaacgccactctctcgcagcatctgctgaaggactctcaggaattagcggaaggaccacacactgctccaacatgtcgcttctgcagctcttgtcagtggtacacaagtctggcagctgatgtcagagtcccttggcttccatcccgcagacaggctgctgagacactcctccaccaaataactcagatccaagtccacacgcagggctcctccttcg

SEQ ID NO: 55878 - DNA, 1593 bp, Bovine  19866880783302
  misc_feature (1)..(1): n is a, c, g, or t
ntttatttttttagtaatctttgaaattttaatgctttagtaatctttgaaattttaccatggttacttaacttgagaaagcttcaagctaatcaatatattaacccctcttctcccaaaatagaagtaccttagaacaattttgtttcaattgtccgctccccagattgtattgatttgtttttaacaggataactttggcttctgtgtggagaatggaggcaggaagagcaaacgtgaatatgatgagaccagtcaggaggcattggcactagtccaggcaaatgatgatggcagcttagattgatggattgggtgcagtaagacaattagctgcaattgcttcccagcgtaagatagaaccagagtactgtttcatgctatgtagctgacttcagtgttaccataaataatggctattaatattattaattgaaggtctctatgggccatggaataggactgaaaatgcatttctcctttaattctcacaagaatcctgtaagatagatttatttttttgctttacccagagacccaagattgcagactaagtgctcggccacattaggaaggcaagaagtcagaccacggtgtggacagctgagccaagggtctatgattcataacaggaataaaatcatctccttgagaaccagagatctaatatcaccttgcttttgtttgtttatgtttcggtagtgggtttgttgtttgattttgatttttttagctgcaccaggatcttagttctctgaccaaggattgaaccttggtcctcagcagtgagagcatagagccctaaccactggaccaccaaggcaagtccttgcttgtttgtgttatatttcaaagtaaggttaaatatccttgtctttccattcttgaaactacaaagcatgttatagaactggaataatggtaaaaatagagatttttctcttttggctatgttagggtagaaatataaatattcgatttttctgtgaatatactccattgttttataaacatatgcagtatctattttgcatttcattattacaactctaagttaatagctattgaagactcttctttgtattaaaagggtggaagatttgaaaggatgtcccacattaaacagtttttttttttgtcagtaaatattaagaatgatgaaaaatgttagtgaggcattgattatactgctgctaagtcatttcagtcgtgtccaactcttccagaccccatggactgcagcctaccaggctcctccttccatgggattttccaggcaagagtactggagtggggtgccattgccttctccagtattgattatggatagtcccaatttataaatagccagtgttcccaaaattagtttgaaatttcatttgcacatccatgtaaaacaataattatagtcaacatatataaagtgtctgctatgtattgggcggtttactagaaaatatgattttctagtctcccagaaaatattataaaggatgttagttactcccattttacagataaggaaactgaaactgaaagaggtcaaataacttgggtatggtcatgcagcttacaaatagcagagttgggatt

SEQ ID NO: 55879 - DNA, 1124 bp, Bovine  19866880826814
  misc_feature (1)..(1): n is a, c, g, or t
naccgtaggatgatgtaaaacctgcttgttgactttttggctaatttcataacatctccctccagaagtagcaaagtataagaacatgagacacaccatgtgaatgtggctttttcatattctttataatggatgaagtcatcagtgaaaaataaaaaaaaggatagggtgagaaaatgtggcttgacattaaaccaagaaccacacttcaagccaacacaaaaccaaggctggaagacaaattcaagattttttattgttttcctttaagaatattaaatgatttataaaactaggatgatagttctggcactcaaggaaaccttcacatgcctttttgtagaaaacagtaagtatctttactgactagccagtgtgttcacctatttctatgctgaggatttgtatcctatttacctgacataatttacacttggttacagtaagaatgtgcatgaaggccacgatactggtatcatcagtgaagtgcccaaccatgtttgctttccaggtggcacctgctggtaaagaaccttcctgccaatgcagtaaacataagagactcgggtttgatctctgggtggggaagatcccctagaggagggcatggcgacccactccagtgttcttgcctagagaatcccatggacagaggagcctggtgggctacagtccattgggtcacacacagtcagatacgactaaggtgaaaggcaatggcaccccactcccgtactcttgcctggaaaatctcacggatggagaagtctggtgggctgcagtccatggggtcgctaagagtgggacacgactgagcaacttccctttcacatttcactttcatgcattggagaaggaaatggcaacccactctggggtcgcacagagttggacacgactgaagcgacttagcagtagcagcagcagcagcatgcacaatcacatttctaggttaacagttctattaagttggataaataaagcttgagcttctgtgtcactgctcctcatcggggtctgtgatctccaaaaggcaagatgaattagcttttcattaaaaaaaatttcatgatggtacagatactaattcggtaaggaaaataaactatattgggaaaaatcag

SEQ ID NO: 55880 - DNA, 1121 bp, Bovine  19866880851759
  misc_feature (1)..(1): n is a, c, g, or t
nattaaaacactatgtgtctccttatagaggttatgttaatatattgatcatttaatgaggtcttttagattattattattttgtatcagtgggactgaggattttgaaaaggaagcatgacccagctggtcagaaagggaatgctaattaactgtggacatgtcatttattttgtacatttccctgtcaaagaagctactgtcttagatacttctgagaaatctatgtgaacatttgaaatgaggaaataactaacgagtcatttgcaagaaaatacagtgtttttgacatgtgaactataagttgtatataaaaagattaaaatagttcatttttcataagtagaactattgtaattataaggacaatcctaatttagcgttttttaatcattatctctgaaatagatgatatgacaaagacttggtttgtgttatggaagactgagaaagaagctgagttttctgtcagttgagggttttatttataccctccctaaaacttggctcaaaattcatgaaaacaaattagaatgctatatatttagatatatagctcactaatagggatggggtgcagtgatttacaaaaaattgagaatggaatcagtgaggtagataaactggttcatgagtctaggcaaaatatcagttacctctgtttaaaatgttctttatgtcactggttattttacgtttttaaatgtagttgaagctttaaaacatgttccgtggtgttaattctgcacggtgctgtgtaacttgtaatgtccccatgttacagagcttctagtggtgaccttctgcgaaatacatgcttagattctaccttatttttaaagaagtagtaatgttattctccatggtgtattcttattattgggttttagaagagagataatagtctatttaatgaaaatgatctctggagccacttattttagactcagtaatattttgtggtcattatttcacgtatccaagtattattttctgaatgttgtcacaattgataacatactgtctgtaagatatgtccttgttggaagccagttttttttaatatgggttgggttcatatatatccactaataaaacatggtttcttaagcctgggatcc

SEQ ID NO: 55881 - DNA, 2809 bp, Bovine  19866880890454
  misc_feature (1)..(1): n is a, c, g, or t
naaccagcccggggccagaagagaacttcacatgcatggtactagggaccacaggaggtagaaggtcagtcgtgtgctggaagcttctggaagtcagcttccgtctggagttcccttgcagctatgagaataggcctcacggttactgagctcctggctgatgtgaaatcacaggaacacccctgtgagaagcaggggagtccaaggtctgctgccccgggtgcactactgggaggaacccgaggggagagagtcccaaaaagactctggatcagagagctctttgcagcccaggtcctcttctgcttcatggagccaccatccccaggacgtcttgaagacctcagaggccttgaccccagcctgacacagagaactggaaacgcaggggacctggattgcagtaaagatcccacctcttgggaaagttacagcttctaggcatttcattcatacaggagagcccttgacagcacctggcatctagttaagcgcccactgcactcagaaacattattgtcatcattactgttatcttttcatcatgctacagtgagctgctgaggtcctttccattacgataccttgtgtatcttgcttattggagaggtagctctgcgactgtagctgtgaacttgctttggcttactgaagaacgacacagagcctgccgggtgtagccaagaaaatggaactcaggtgatttagcccagcagccatgggccttgaattttgagtaagaactccctgctctgatcacttttagaaacaaatacttccgtatttatatcatttgctccctttatgccctgctgttactccaccccaccctccaactcattcacatcatccttttgggccatataacctgagaatttccctggtggtccagtggttaagaatccaccttctaatgccagggacgcaagttcgatccctggctaggaaactaagatcctacatgcctcagcacgacaacaaagatccagagcagccaaaaaaaaaaaagtaatagtcttttctgaaaataggaagaatatatgtttagattttcttcgtttctcattgtaataactttctggaaccgtaatattggatgttgctaattcaaatccaataaatggagtaagcatattacattcaaaaacaaagctcctctgttctttatattagtgagaagacagaaactgtgcaagactaaacatttggagcgtggagagagacattgtttgggaagagttaagtgtttgcagtttatggcaatgatatgtgaggctatgaaaaagaaagcagccatgaaatacatttttgcataaaggtttgaaatttattagaaggtaaaaataattggaaaagcagagctttcctcaccgggttatgataaaacgttatttatgggccatcattgcatgtgtttaggagcttggttccttttcagtggctggtctcaaagaaacagaaagctcagctcttaaagctgttcagatgacagaactgatgtgcatacacagtcttctgatgactgggccacattaaagcaattggtgataacagtcaaatcaccggagtctgaattctgttatagaagcttaataggtacacctgctaggtaggtacttacaaactctgcatgctttgccatggtgcaatagagccgcagactcatttagaagtagtgtgcatttacctaagttccggtaagaccttcactgtggggtttaatcactcagcacagattttagaattttcatctgccatacacaatactgcttaaagcgctttgagcttcttggccaaaagagtgggcaaagcctttatgactgtctctttggctaaagtaccctcctctttatcttatcaaatcctttcagccccgaagtgaacttaggtgctttgaaatggtgtctagcaggcccccctaaagaccagtggagtgttttactactaagcaaatgatccatttttaacctctactggtacgcctcagtcttctcaaagcaactgtcttccacactgtcttctctcctctctttgttaggcagtgagagttacccgtgcccttgaattgaccccgttttcagttttaatctgttctagagcttacagctttacatagtaaaaggaagatggaaagatttggtgattcatttgagacattccgtttggttctgtgaatatccacaggagaaagatggtgcatgccaatgtccagttttaacggcccgtgtctagtttgacgacagactgaatttgcctctgggttttctgtcttctttgttcatcaggaatcccaatgctgaagatcgtgtttgcaggccacgagtacctctctttaatatccgtccccttgctcatctaccacccggtgcaaatcctcctgggaagcgtgctcgtgccgacgataaagtcctggatggtgtcaaggcagaaggtgagactctagaaggatcttctttggatccaagtcacattgaagtgctatttctgaatcttagccattcaaacgtgttagcatttgcacatataaccttgttctcaagtacacattttcttaactaaattcagtaataatgatgcattagtccatttcaatttgaacaagagagttgaggaccaattgttctacatcaatataaaagcacaatgatacttaaaatgcagtctttaaaactgtttttaatttgctcatgttgaagggcatattacagtggagtaaagggttcagtaaatatactcaaaatatacatgcccaccactcagatgcccaccgtctttgcctcgcctcttcattcacatgtgtcctgatttt

SEQ ID NO: 55882 - DNA, 1667 bp, Bovine  19866880908488
  misc_feature (1)..(1): n is a, c, g, or t
ntgtctcttgcgttggtaatattgtattggcaaagatgaaattacataatctagacaacctcgtggcaaccacagaaatcttgtaccactctgatcaagggtcagatactgcaggagtagcatccgtcttttaccaacttcacagtggttgcgtggaagcaccagccaagtttctgaagcaaaaagtcagccacgcagctcacatgaaaagcactgcgacccaatctaagcattacgacagctggtttaattactaacaggagaaagcttattttttttttccctgtagagcccagaaagtgagtgaaaaggttacattttcatcaagctgtgtctgggtagggcacgcaaaaccagtccctgcttgcttaagaagaaacagaaattctgggtgtggacggactttcaagttcaggcgtggagaccagtgatgggattgccccagactgccttcatgaagcctttcctgggtgtacacaggggaacagtccccagccttcagggagatcctttggctgtcctcattcaccatgttccccactctatttacctaatatgtttcccagcaaaaacattagttaatacattcacacatgaaactcattatgatagaattaaaattttgcttgctcctttccacaaattgaattactgagactcagactgaattctaaaaaatctcttcttgagtcattctgtgaagaaaatgaattacatgtgttgcgagccttgagcgccatggtttccttatgtggccgcctcggcagggagctacatgctccgggggagtgggtaaccctgtgtaacagaaatcagaaaaggggagtgggaacttccgctgcatctttaaaatagcccctctggagcacagaatttcagagagtgacatgattgatcttgtagctgagatttagacagtcttaagtcaacccgtcatagactggtttagttgtgactcccttgagagattgtaatgtctgtcacgtcttggacactttgcaggttccaaatcataaaatagaatgtccagaatattctcaatggctctatttacatcatccattttaaccggcatgtcaacatttatgttgctggagaatagctttgggaactgttgccctgaatacaaattaacaatggaatgcactgacccaatagcacagggtaggggggaaaacgaaatactgttcccccaaactctagatgaactatgtgtgagagtgtgcttgtatgccagtaggcattaatcaactgatattggccaacacaattaaaactcacttcgtgggaagtgtctactacattaagatttttccccagtggtatttctgagcaggatgcttttatccaaagtacaatgaaacatgcagtgatgaaattctatagctcgtcactcttttcaagtacctagtaggttagatgcaccatgggaaatacaaaataatcaaccccagatctcaccttcagggtattaagaaattctaggtttttcccaataacggagaaaattaaaatacagccagttcccaccccccccatttgtggtcaaaaatagaaagaaagccatactctgctgaaacacattattatttgcttaaaaaattatataaacagatgccagcatagtaaacttaaagtatggtggacccggaagttcttcgttcata

SEQ ID NO: 55883 - DNA, 1426 bp, Bovine  19866880951619
  misc_feature (1)..(1): n is a, c, g, or t
nctgagcttttaagaatgttgttttatctattttttatgaccaccttacacttgttaagtgtaattctggctttatgtaacatgaaaaacctgtgatagggtgccctgtgaattaacaagattgggtggacaaaagacaagaaatcatttaaaaacaaatattcacattaaataccttggataggtaggccttctggggatttttctctaatgcaacaaaagcacactatttctgttttcagaaatagtttctctcagatccagagcttgtctaaagccatattacataagtaagggctttgtttggacattggcattttacatcttacaatcttactaaatccttttttgatcaatctgatattgaacagatctatattgatttcttgtatacttgtttatggtatttgttttgctatatctaggattaaaagccaaattaacaagtgtaatcaattttcttagtgataaagaaaagtcctctagtacccttagacacattcatctagggattaaaaaaaaactaaagtgaagatgttgtaataaatggatcgatttattcaatcactgggcggaagaacattagctctgggaaagggctttcctctaagagctttagttacccgagtttctcttgtgttgcaccagatgatttgcatttttagagaaatttcatgtctgcagcaagttccagtgaaaacatgaataaattgcttttctttctctctttttctgactttatgaagctgaatccttcaggggttgagtcaaagtataatgaaataaaggcagcaacacacccgctggaaaccctggcttacgttcctcattgcccaagccgttgtcctgttagtggtcttcagggagatcctggggcatgttgcaaattttttaaaccactactttagaaatcatctctagaagacaagaaaatagacaaacaacaattaggaacttgacagcctttccacagcaattcttctcaaggtcaaataaatcttcctctctgagcctaacacaatacagctacctaagaggctttcctgttactcaccttccttcttttgcattcactggagtgagggtgaatatggccttcccagctggtgctagtggtaaagaacgtgcctgccagtacaggagatgtgggttctattcctgggtcgggaagatcccatggagggaggcatagcaacccactccagtactcttgcttggagaatcccatggacagaggagcctggcgggctacagtccatggggtcacaaagagtcagacacagctgaagcaatttaacatgcatgaaatagaatacaaaaaaggatatatatctatgtattatggggggacacctgaattactttgctgtacaacagaaactaacacagccattggtcttcatctactcttcagtaaaatacaaaa

SEQ ID NO: 55884 - DNA, 820 bp, Bovine  19866880959390
  misc_feature (1)..(1): n is a, c, g, or t
ngaaggatctccatggacatgctgtgtcatttgcttcagtccctgtctgagccaggatgggattggcacatcgccttgttgaaattggctccacaccttgttgaagtgggcatcccgccatactaattgatgggtatgagtgcagacatgtcagagaaccagaatgaacatcagatcgggataggaggaggatttcaggccagaaacatcaaaacagtcagttgtgctgagttcctgtgctggagaaagggaaaagatggtatcaatgtgacggcagcagtccagagttagatttatttctaaatgcccccaaatagctgacaaaacaatgaaagtgtgggcctgagaggcagcaggaaggggcaaggttattgactttcaaaagatacagctattactgggatactgccagctgggatgcaagaagggtttttttaaaggcaagcaggagttctcgatagcagctaactttctagctgagtactttggtcagctttaaggaatcagagccactgtatggagggtttctgggttgattgcagtgagaaccgctgcagatggatgcagataaccacctagggagtgactcttcctgcttgtctgtcctgtgggatccactgtctccccagcaagtaggtccagccagcgggccagccctcagagcatagccatgaatcctgtcctcgtgttaattgcatgtttgatacagaagggtccctccagtggaaaggcagctcagtaacaacccaattttagtatataaaagagaaactttccaagacttgggaaagtttctaaaggttaccgtttctctctacag

SEQ ID NO: 55885 - DNA, 1338 bp, Bovine  19866880980817
  misc_feature (1)..(1): n is a, c, g, or t
ntgttgatgtactactgtattaatgttgatgtactgggcttaattccatggtgttaattctatatgatctgaatacatggggcaggggtagtgacttctccattttttggaaatcagtttctgagactctctactctcggcatgataaagagctatttctactaaaattgaatctatggctttaagtaaattgtgctgtgatgcaaaagtaaaatataagctcctcattaacaatgtcataatgctacaatcacccagaagatacgagcagttttcatacatggtatttattcttaatcattttcataaaacacaatctgaattttattttttaacaaaaccctttgagacattttgataaggtcaacagaaagcacagtcttttaacatgaggtgatcaactttttgccaatagcaggaccagcagacctaatggagtaatagctgcagggtccagctaaatataatatacgaacgtaatcaacctctatgatgactattcagaagtaatccctttagctttgaactgcaacacatatttcaacaaggaaaaaaccttatgaagaaattctctgcagaccacactgatacaatacagccttcatatcctgctcgatgtgtttgctgcttatagtgagttttaaatttaaggtaatgactgctgtatattcatgtgagcatacaacaatacttttgatttgttgtggaaaggttgaatccattaccaggggtctagtctataaactctgacacaacctttacatatgagttattatttacccttttctagtaaggccactaagatgttttgcatgacaaaatgataaaatttcattcaccttttcagccacagaactaccaggtaacatcttttccatttcaatttatactcacttccagatagcatttttaaaatctcatttgtgtatcatactgtattatatgaaaattatatgccattgtcttcatgtaaaggaatgggattgtaggtttattgcaattcagcattgttgacttattctattgctctttggtacaaggttaagctaaaagctagtgaaatcagatccttttcttgcccacttatgggaatctatgctttgagagtctttggctcagatgataaagaatctgcgtgcaatgcaggaagacccagttttgattcctgggtggggtagatcctatggagaagggaacggcaacccactccagtattgtcgcctggggaattccagggacagaggagcctggcgggctacaatccatggggtctcaaagagttggacacaactaacactttcactttcactattactaacaaggagatacctgtttctg

SEQ ID NO: 55886 - DNA, 1521 bp, Bovine  19866881008120
  misc_feature (1)..(1): n is a, c, g, or t
ntagaatcaaatgtttatgctaagatgctaagaaagcattttcttatatccaaagctggaggtgaaaaatattatgaaggaagcctcaggaatctctaaagatctataatgccaacttgctaaagcaataatgttccatttacagcacaattcagtgaaggattccaaaagaattctggttgaaatttgtcaatgatcttctttaaccttaagcaattcactgaagacctgaacagcttctaaatgttctgagaacactgtatttgcctaccaaggcttcctcacaactcacagtccttctaacaatatctctaacacaactggaggccatattttcttcttggggtataaatagattatgaaaaagttatttaagaattctttaagtcttgtgatttaaccctcttccaagatcccataaaacctaatgctgaagtgtgtttatacataatgtcatttaacccagttttgcatatcacttgcagtggaatttagcagttatgagactaatgactttatcacaaacctacttttaaaaaatactatttaaattttcttgtttaatttttctgtcagacaggtgcaataaatctaacattaaaatattcacttagaaacatttagctctggctgttccatccacacaatgaagcttcctcatccaccatcaatgccataagaatgttaaaatgaatgtaaccttttgagagtacctattagtccagaagtaaagaaagagagaagcagctctgaaaatagcaataagttaaggagaaatttattccatggtaggcgctaacccaaagaccagtcttatacataacgatcacctaatcaaaagcatcttttctcacatgtaaaaattatttgcttacaaatatcttgcttctctatttgggcttagataattaggtatttctttaacttaacaaacatttgtttttaaatgcaaccatctgtaaagttatgcctattcacacattaaaatgggctggcttaatctggttgctttttccctaacatttaatggaccacagctgaatggagacacagtgagtctgagtaaataattttttgactcaagacctctctactccccagatgtactccatttctgaaacccccaacttgcccttagcattctgctctccttgagaattcagctatctgacctgcctatgtgcctatggcagaggccatatattctgagcaatagtcccctctagagagtggaagctttaaaaacatttcagtcaatattattgacagttgatttatatcctttgaatgtgcagtcctagatcaagattttttttttttatttccagccatagagtatcatcatcatttaaaatggtgaatctgggcaaatgccaaggtctgcctgtcttttgaaggctgcctgtctaatcgatttactcggtttgaagccacagtacaagccaaatcaactgcatttcggctgaaataagatgatgaatacctcgttatcgttgagagagtgtgtccttatatgcagag

SEQ ID NO: 55887 - DNA, 959 bp, Bovine  19866881108061
  misc_feature (1)..(1): n is a, c, g, or t
ntcagtgatgccatccaaccatctcatcctctgtcgtcctcttctcctcctgcctgcaatctttcctagcatcagggtcttttctaatgagatggttcttctcagtagatagccaaagtactgaaaagggtaattgctttcaaatctgactttttgcatccatgcctcttcaggggcaacaaagctctcggaaccttcagtgaagcttacttttcacttttctacctggacaaaatccacatcagtgcctccttcagcacataaattattccctaatcacaagtgaaggaaaactagagttttatggatgccaactcacccacccccaaataacttaaaaatgattttctagaataactcagtgtgagcaaaattcaacagaacactcataaaaattcaaaagtcaagacagaaagagattctggaggaaaattgattgctctttcagaatagaaaggcagatgacttttgtattcttagggtgtatgcatgtgcttttaaaaataatattttcttagtctttactagctggagcgcaggaaggcttggcaaagctctgtgcatggcctttttccatctttgaagttccttcattcctaaacctctggcaacttgccattggcccaagagccctagcctaactttggggtatgattgacacagtaccagatcatggatttcatacaaactcgcaccatgtgtcatattagaaacagtgaaaccttttgcctagaagcagctgctggacaaaactcaagcagagattattttccttctttgaccatttgcaagacttatcccagaactaaagcttaatatttacatctgacatggatttgcaaggattgctaaaacggtggcaatgggttaagtaggctgccatagctcaccaccccttaatgtgagagggacacgggccggtcagatactgctccacagaacaagaacatccactggag

SEQ ID NO: 55888 - DNA, 746 bp, Bovine  19866881126363
  misc_feature (1)..(1): n is a, c, g, or t
ntaaaaaattaaattatcctttatggaattgtgcaaaaaaattctaaaagtatctcaaatattttttaaaaggctgctgttactgtggttatctgattcatatcataaatagctgtgcatctctaagtatgaaaaaaaaaatcttgggatagaagtgaagcacatacttaaaacaagatcttctgtccagtagctgtgtctgaacagaatagtgatgagccccaaataaacacccaacaataatcactgtatatacaccagtccctagtgagctgtatattaatgtctggcaattcatgacagaattcctaatttcatagcagctctgctgctgctaagtcacttcagtcgtgtccgattctgtgcaaccctatagacggcagcccaccaggctccgccgtccctgggattctccaggcaagaacactggagtgggttgccacttccttctccaatgcatgaaagtaaaaagtaaaagtgaagtcactcagtcgtgtccaactcctagcgaccccatggactgcagcctaccaggctcctctgctcatggcattttccaggcaagagtactggagtggggtgccattgccttctccccatagcagctctaggcatgaataaagatttattaaggtagtcagtaaatattcctaaacaccaaattgtttttttttttttaattttcctattctgctttaggagattaaagaaagcctgtattatgatactaaaagatactgattgaa

SEQ ID NO: 55889 - DNA, 831 bp, Bovine  19866881172493
  misc_feature (1)..(1): n is a, c, g, or t
nagttgctgtggttcccagtttccctcctttccctcctcctgtcggtcaccagctgccaatctgcccctattttttttttttatttggagtttattgctcactgcagtgaaagcctttgtttaagaaagagggctcccagggtctcagctgcctgggtacagcctgctgcctacgatgagtagcaactgtcagtttattttatctcaaccttttcatcattctgctgaaactgatcgactgaaaccacctgagagaactgaggattccgtacctacaagtcattagctgggaccgcagcctcccagcacagggcaagtcaactgaacactcccggaaaggcagtccactttaaccccatgtttccccaggaacacagggattctctcacttttttgcatctgaagcagagtcgatgggagaggatgcctctgacgtacagacccgtaagtcgggacgctcggctttaggtaaaggttgcagataatgtcctctggactgactgctgtggtgaccccagcagtggggcacattgttccaccaacaaaagcgaatgtgaaatcatctcaaaccccattctttaccgatatcgaatgtgccagactgaagcctgatttcacatgcgtgtgacccacaggacagctgcttagctaaagacgaacttcccacacactttaataatacattgaaacctttttctagagaaaccttctaacctacctattgtatccagaatgcatcaaaacagaatgacatgacatggcctgagccacagtggtgggtaatgtttagtaaatatcaaggacatgcaaacctactggaaaatgatattt

SEQ ID NO: 55890 - DNA, 1257 bp, Bovine  19866881220189
  misc_feature (1)..(1): n is a, c, g, or t
nttctgtcatgaactatacaggaaaagaatctataaaagagtggatatatatatatatatgaatagctgaatcacttgtatagcagagactaacacaacattgtaaaccaattatactccaataaaagcaaacgaacaacaaacaaaaactcaggccacgtgtacacatgtgaaatgaatgggtttggcacagctcatccatttcttttggatgtgtctaaatgacagcacacgctgccactagatttagctgtgacgatcaataccaagtgtgaagatggacaaaatgaatggagacagctgcactccacttgccttgtctcatatatcaatggtctgatttactctagtttttataatacccctaagccagggccaagtggtcctgaactttatgactcagagaggcttcagccaggggaagaggcagaggaaccagtgacccctaataaaggctattcctcctgtgagtgtacttagtccacgaaccctcctgccatcaccaagacagaggctgtaggatcctatagtcaggctgaatttgggcagtctttttttcctaaccccaagccccaccattgatgtctattttaaacaggcttctcctcaataacacatttggatttattaaatacaagcaggtgggagaataaaaacatagaatgtgattctggggtcagaagaagacagaatctaactattgaacctctctagggcagtgctacccaaagtctgacaggattagtagaagcagagggaaaagtacagatgaggtgaggaggaacactgtctttaccaggttttaagaactggtaaacagactatgccaaagcctttgactgtgtggatcacaataaactgtggaaaatgcttaaagagctagaaataccagaccatctgacctgccttttgagaaatctgtatgcaggtcaggaagcaacagttagaactggacatggaacaacagactggttccaaatagggaaaggagtacgtcaaggctgtatattgtcatcctgctcatttaacttatatgcagagtccatcatgagaaattctgggctggaagaagcacaagctggaatcaagattgctgggagaaatatcaataacctcagatatacagatgacaccgcccttatggcagaaagtgaagaagaactaaagaacctcttgatgaaagtaaaagaggagagtggaaaaagttggcttaaagctcaacattcagaaaactaagatcatggcgtctggtcccat

SEQ ID NO: 55891 - DNA, 2202 bp, Bovine  19866881269212
  misc_feature (1)..(1): n is a, c, g, or t
nctcatccctaaacagtgatttctggagctatggtatcaggtgccgtcactaagaaggaataggcaatgttttcattaaaagatgtccgtaggtaccctttttgttgtttagtcgctgagtcgtgtctgactctttgtgaccccatggactgtagcccaccaggttcctctgttcatggaattttccaggtaaaaatactggagtgggttgccagttccttctccaggggatcttcctgtcccagggatcgaacctgtgtctcctgcattggcaggtggattatttaccacatcagatatttattttgatatgtactctgataatcatttcaatatctttgaaacttaaagtgccagagagcaagaagtgatcattaagtaaatcatgtcaataaatttaactaagagtctttaagaaaactggaaatctatgtcaatataatttttctagttccccagtagagggcaacttttatacattttaacggtcaaaaaaaaaaaatctatgcacactgcatcagtaagaaccactgtacatttaaataatacgatttatgtctatgaatggattttcactaacaggtagctataaaatgtcatgaaattttaagtatgtaattagaaattgaatatacttaataatgagtaattagcattttacgattaatataagtactattgcaggaagtagtaaccatttgggtaactttgaagtagcaaccatttaggtcactatgatagtatgaaatataaactgtaagtgatgagagttctgttctttagtaaacattttgattgaatttcattatgactgagttccaaatatagctaacatgaatacataaaatctaattaagaacagcaaaaaaagccataagcatctcaaaatataattaactacctttgtgattataaactttgaagcaataattatcaatgttcatgttttaaatggtgtcagatataactatgcaactaaacatgtgtatgtatatatttgtaaacagagtaaaattctactataacagctcattactattagacatttggacataatgtgttatgttcacattcattcactctttcagcatttatttactgagcacttactatgtcccatagaccattctagaagtcaaagatacagtgtgattaatctgacagaatttcttgccttcttggagcttatatccctgctcataaaaaaatatatcatgaagccttctgaaaagataagtttataagatagatacttacaatgtctcataacactagtttctttttctaattaaaaaattatactttgtttttaatttagaaaaatattacaaggaaaaattaaatgcttcatgatcttaatattcaaagaacccttattgaccttaaagtaatatataaatttgattagaaaaatattaattgtatggaaaagtgaaattttctagcactctactcttcccagagatgttaacagtttcttgtgactctttccagaaaaatataccagtatttatccatcctcttcccactcatccagtcttcttaaattattcaaacgtacacgtttgagacagtcatattttacacagtattctgtacatagctttgttttttcctgtttcactatgtttcttgaggtgctttccataaagtaatatatatgtgtatctccttttatttgactcattttattttttaatatagaagtattttataacattctatctccaaaatcctcaaaattctagttttaaaactggttacataattttgcctggaattgataagagctgtggaatatgtcattaattggtgtgttttaatttaggaagaccaggaatttacagatttcaaaaagaaacctggaaaaattacctttcctctagagcagtacatttaaaaaaaggaatcaccatctgctttggataaaaaacttatcaataacttcattagatcgcatacaatgtaagtgtgtctttggttgtgaattagaaatgatttttttttgtagtcaatttttataatggttttgtgttatataataatttttcatgttctactcaaaattcttcaagtaaacatgtaagaattactttatctcatcttatttataatactgctttaaaccatgtatttatttcagtgtcagatttgatattaaaatgtgatcataagaattttttactttatcaagatattatg

SEQ ID NO: 55892 - DNA, 693 bp, Bovine  19866881338637
  misc_feature (1)..(1): n is a, c, g, or t
ntctctaattccttttttatcaaagtaacagcacctaaaatacagcattccataatgtaccacaattacttgagctttcgtgttcttctttaaagaactggtacaatatcatcatgccttttcaacttttcatactttctcataagaatccctgaaagtggtaaaaaaaaaaaatgtatcccaggttacaataaacaaatatttttgtgctcccacattttaggttaacattgataatatcctggggtagacatgcgctgatctaatttttaaaggaccctttatctttattctcttcctttatttcttcccttctaggtaccttcctttcctctcatagggcggtgattgcgtctgcacaggaatgatagtatatatagaaatgtagaagacatttctggttaactttcaagagtctcctttaaaggtgaaatatagggagtctttagacaaagaaatgacttccattaagttgaaaagttttaaatgccttccttctgaagttactttacccagatatttttttaaggaatgtattgtattaacattattactaattgatagttatctcttctccccctgccccctacatacataccacagaaattataaacagtgacctggagaataatgtggtcgtgtaattatttggagaaccttactttgttaaaaaaaagaaaagaaagaaagaaa

SEQ ID NO: 55893 - DNA, 1070 bp, Bovine  19866881353977
  misc_feature (1)..(1): n is a, c, g, or t
nctgacgcaaatgtagtggccccagggatcctggggactttgacacagccagttgatgcagtgggaccttcgtagcagacagagggaagttcttgatggtcttccatcagcatggggaaaatcgttttctccatttaaaagatgaacaaatgtgacctgtgtttcccctggagttcactcctgggagcacatacatcactctacacaaccaggagggagggtttgctggatttctcttccataagaaggtgagtgttgcacacaccacataatcaaggcaaactagttaattaaaaaagttactggggacttccctggtggtccagtgatttaagactccgagcttccactgcgacgggcacggcttccatccctggtgggggaactaagatcccacatgccacactgtgtggctcaaaacaaacaaaaccaaaaaacccacttaagattcttggttttgttggcatagaatttaggagatgaataattctcagatggcttaatatgagtttcattgagtaggagatgactttttcatggaagacgtgcaccagcttattaagttggagcccattttagggggctagaagggtttcccagcacaggaagattaattgtgttgccgaatgtcctccccatagggcaccgataccagtcggatcatctggtggttttctttccattacttctgcaaagaaaatgttagtaataaattgaggaatttaagactgaatattttcttttctggggagaaagacatttggcatgggaaaaaaaagaaaacgctagagggtgagggaaaataggtaggacgtcctttccttctttccaaatcagaaacagcttcagtctgccttttctctcatgagtcagaaaaataaagtgatacaaaatccagtctatgcctatgccttgaggcatgagtgtaactaaaccattaggggatgcaaattgaatcctctctgactaaaattcagtgtataacatactctttggccacatgtagaccccacccactcacaaacaggctttttctctgcacattcacaggcaggctctgctcaagcaag

SEQ ID NO: 55894 - DNA, 953 bp, Bovine  19866881354845
  misc_feature (1)..(1): n is a, c, g, or t
ntggggccggggcagcccagccactcctgccctccacacctctgcccctccaggcccaccactgctgatggccagttagaggcatcaagaccctctgccagcttcctgcctcggtcaaagcacaaggagcgcggagtggaggagggcaatggagcggctggggtgggggaccccaggaagaccaacctaagacctgagctcgggcaggatggagccagggccccatgggggatccagctcaggactccgcagctgggtatcctgctctgcctcttggccgtgctgggcatggccgtggttgttggctttcgttacctgcacgcccagtcttgccgaaggcagatggaggtgtccttttgtgagcctgccggggatgcggttgccacggttgacggtggtgagaccgtgcacgtccggagaattggagacaacagttttgttttggtcgaaggggaatgcaactgggttgctccctctgtgggcagcaagaaaacagtcctctgagaaaatcgtggtcccaggcctctctgggttccccctgcatcctgtagagagtctcagccagaacagacctactgagaatagttgatgcgaacagcgattcactgtgcacccaccccccacccctgtcagggagcagttagtagaggaagcagcacaaggaccgttctatcatcagagggaattcttccccagctttgttgtcttaacatctgtaatttagctgcctttttttttcttctcgcaattagacgttctgtttgaagacttaaacccaacacaatgaatattgtataacctgctcattaactagactcccgtggccgccgagcttcctccgttgccttaaggaacctgcagaaatagaacttctgtccctcctcagcgttatcagcctcatccctctaactctttgaaaaaaatagcaacggcggagttgtgtctccttcagc

SEQ ID NO: 55895 - DNA, 1147 bp, Bovine  19866881366951
  misc_feature (1)..(1): n is a, c, g, or t
nctttcaaaaaatgagaatttacttcagttttgccttttgtgcaagtcttactcctgagagaagtgtagtcacagtggtgttgtttttgttgttatttgcagaggtaggggggttggcttgtattttaatgtggctcaatctcagtgtctcaggtttgacagtgttttggttttttgttttttctctcctttccactgaagtcattgaaatatattcaccctttcattcacatcagaggtgtaaatggattttctaaaggtttttcagagacaaagtcagtcgctttgtgacttgacttcttcaggtgttgcaaaaagaaagcttagcacaccactaagcacaccatctcaattgcaaggatgctaaaactatgtttgaccttgactctgcaaagagatgggcacaatcttttgctagaagtggcccattcaccacctctttgctttatccatctgtataggatttacttgggaaagagaaaagagaaggaatcagatatattcgagagaaaagagcatgtttatttgattttccagcttctaatgatggttacattcacagtttaaactttttagtttacccttttcaccattgatatttgcaaaatccaaacttaaaaatatatatatcagccatgtcacacaaaggcttatatctcgatttgtttcatgtcattaaaaagacatactgagtttgaagctcctttcaaatttattcttaaaatataaacccagggaaatagtgtaagactgcaaaggttttatttatagcattcaggatcacaggctttggagtcaggccaatttggagtcagagattcagtgcctgacattgccttttcctatttcactcagtgtctctgaggctcagttttcttccctagctgttgttcagtcactaagtcatgtctgactctttgcgaccccatggactgtagcctcccaggctcctctgtctgtgggatttcccaggcaagaatactagagtgggttgccatttccttctccaggagatgttccagatccagagatcaaacctgcatctcctgcattagcgagcgattctttaccactgaaccaccagagaagcttagtacctgcttcataggattgttgtgagggttccataagataacatacataactt

SEQ ID NO: 55896 - DNA, 1055 bp, Bovine  19866881373843
  misc_feature (1)..(1): n is a, c, g, or t
nacacataatcaccatcaccaccaatcagaccatgtgaacagcacacactacaaccctggagtttgaaaaatcacatttaaaacaccggaatgaataaataacaatcacaaaatagaagctaaccaagtttctaatatttaaatgaaagtaatttaaaatttaaaagccacaaaataagactgtcaggtcagctataccctcaaacagtctcaatctaatacctcaagggtgtgctggcattctagcatacatgcactgctctgcacgcacaccgagttcccacggccactgcaatgcttatagttggctcactgaaacaacagtgatgtaggttatcaaagcagaaattgttccttaattttaacaaaaagtaataaggctattctcaccaaaggacaagacgtgagtttaagggaggcaataactttcaactcatgacaaaaccttttctgtaaccaccaatcttatggaaaaggcatttacaatgagaggtatataagtaacagaaaaaaattcctactaaattatataacaacttcacaaaatgaatgaacagaatcatttcaaatgacactactctatctgcatacatcccccaaatcattaaatacaaataggctacacagttacacattttaacccatgagttcagttcagttcagtcactcagtcgtgtccgactctttgcgaccccatgaatcgcagcacgccaggcctccctgtgcatcaccaactcccggagttcactcaaactcacgtccatcgagtcagtgatgccatccagccatctcatcctctgtcgtccccttctccacctgcctccaatccctcctagcagagtcttttccaaggagtcaacacttcacatgaggtagccaaagtactggagtttcagctttagcatcattccttccaaagaaatcccagggctgatctccttcagaatggactggttggatctccttgcagtccaagggactctcaagagtcttcttcaacaccacagttcaaaagcatcaattcttcggcattcagctttcttcatagtccaact

SEQ ID NO: 55897 - DNA, 970 bp, Bovine  19866881393217
  misc_feature (1)..(1): n is a, c, g, or t
naaaacggaatactcttaatgggaatgagatgtgagcagactgctaatgagaagttaaccaaggactgtgaatttgccaaaggagacgagttccttgttcccctcacacacacacacacacacacactttaacgctctcagagttggcttggaccttccttttccatcagcatatacactgagtgtcggtttatgcagcagaaatctcttgagcaataacaatagggaccttatcaaattgtgacgatcaggggcaccagatggtttgtctattaaccatcctcactgacaaatatttataggtgcctaagagattcgtgcttctgtaatagattttggttggacaattccatcccacaaggatttcacaaaccaatgaccctctaaagacagcatttgtttctgttccttgcttgtgatcactttttttttaaatatgtcattctttaaggactcattgtcatcctttttctttgtaccttatacattcattgtactcctcaccagaggagttgcgttccagtatttttttaaatgtgcgtattaatttttgtgttacctaaattagattttctttccagtatgaattttccaatgttccaaggctttagagcagttttccacgtataatcatgcagtaaacttttaatcatgcagtagacctttaaaaagatgttgggaggaaagatacagtgactccattctgatttacactgcatattcttctttattttgtttgagtcacatgggactgccctagagtgcttggctgatgtttggagacactgggaggaaatcaaaggagccttgcggaaagcaaacttcactgcctctttgcagagataaagggaattcttacaaaaggagagatttgcagacatacaactggaattcaatgaagtcatggctgaggcatctgctgagaagctaccaggaagtggagacctacagcccgtgtcaaatctttcca

SEQ ID NO: 55898 - DNA, 1991 bp, Bovine  19866881483005
  misc_feature (1)..(1): n is a, c, g, or t
nactggttctaaataggaaaaggagtacatcaaggctgtatattgtcaccctgcttatttaacttatatgcagagtacatcatgtgacatgccaggctgaatgaggcacaacctggaatcaagactgcggggagaaatatcaataaactcatataatgcagatgataccaccgtaatggcagaaaatgaagaagaactaaagagtctcttgatgaaagtgaaagaggagagagaaaaagatggcttaaaattcaacattcaaaaaatgaagatctggcatctggtcccatcacatcatggcaaatagatggagaaacaatggaaacagcaagagactttattttcttgggctccaaaatcactgaggatggtgactgcaaccatgaaactcaaagacactttctccttggaagaaaagcaatgacaaacccagcaagcatattaaaaagcagagacattactttaccaacaaaggtctgtctagtcaaagctttggtttttccaatagtcatgtagagatgtgagacctggacaataaaaaaggctgaacactgaggaactgatgccttctaactgtggtgctggagaagactcttgagagtcccttggactgcaaggagatcaaaccagtcaatcctaaaggaaatcaaccctgaatattcattggaaggactgatgctgaagttgaagctccaatatttgggccacctgatgcaaagagccggctcattgaaaaagaccctgatgctgggaaagattgagggcaagaggagaagggggtgacaaaggatgagatggctagatagtatcactgactcagtggacatgaatctgagagatagtgaaagacagggaagcctaatgtgctgcaatccatgggatcacaaagagttggatacgacttagcgattgaacaacagcagagtaagtgtgaagggacttccatgatgatccagcggctaagacctctgcttccaaagtagaataagtgtggtgtggcagctctgccatgtgctagctagatgacctgtcgtctgctctaaataaatgacaacagtaaaccaatggtgtaattcttaacatcataatttctcacagttcctccttcatctttacccccaagttcaaacatgccaacaagacacaaggcccaatcccttcaggatttgtcctaaaccctggacctactgacacgaagcacgtcatgcatgaagaaacgtggcagaagatttgacaggccacgggagagacaataatgaggatcgcttcacttccaaccatctcactagcatctcttcctctgccctagggccccccccaaagactcacccccgccttaccacccacagtacagagtctctagaaggaatggcccagtccttgccaaacaaaacctcctagaagattctcataccagctgcaacagaagtaaccttttctatgtatcattagacctggtaacagacaatttttttttttctttcccaactgaataatcacttgaaccttgagtgccagggcaatacctaagaattatacaagtttgccctcagttaactttagaagatatctaaagcaggaattctataactcagacaaagtctaataatccaaagataatgaagtattcatgctcaattgcgatgaactttgtagagaccgaaaagaattacaactctaaaatcactaaaacttggagtttgaaggtccagattattgaaatgttatacctttgggcgtcaacaagcgtcctgagttacagcacagtcagaaagacattcctctcaaaccacagacattgccaactatttaaggctctaatttaccaagggaagaatcggtagttaatttcctgaagccaggggataatttccttctaagttcttttctatttcctcttggtttcttgaccttgtgaatctcttatctccattacttctttatcccaaggctattagactgtttccttttcccaccctttctaaagtttg

SEQ ID NO: 55899 - DNA, 1145 bp, Bovine  19866881576370
  misc_feature (1)..(1): n is a, c, g, or t
ncgaagacttactgtttaccagacattgtgtactgtttcatttctggttattaagggggaaaaaacctacaaagtaggtatattttacagaccgtgaaaacagaggttcagtcacttgcccaatgagagtaacagggtgataagtggtaggcgtgggattccacccagggctctcttgtgtcttgtatcagccttcctaacagcttacactgtaccgccctcctgtaggctactggacataataaattataaacctctgtatgaagcaacagctatgttaactgaaaattagcttgctttaggataatcctgaaagtcttttctaatcaaattctaaaactattgtgttttggaatcatcatttcatgttctataagtggcacgtaattgcccctttgttggtggctcagatggtaaagcatctggctttaatgcaggagacccaggttcgatccctgggtcaggaagatgccctggagaaggaaatggcaacccattccagtactcttgcctggaagattccgtggatggaggagatagtccatggggttgcaaagagtcggacacaactgagcgacttcactttcactttcattttagtggttggaataaatcagcatcaacaagtttaactttctgtgagcatttgtctctgaagagaaaatgtgtgtgtgtgtgtgtgtgtgtggtgtgtgtgttggagagggggacccagactagcatttagtgatgctggaaaaagagtggccttcttggattacattatgatggggagaccatgtatcccagtgactcttaaaggcaaacatgggcttttaagctgagagattcacaaagaaggaagagatagaattcaaataacaatgtgtaggacatttgaagagtaaaattatggatgtttctaactaagaacaaagtgaacaaaagtgggaaatctccatgacaactagagagcaaagcaactggattccagattcgcctgcaactgtcttcaagactccttggaaagtctgagaaagcatttaaatggaaaacaagtcaagtgaattcagacgaatgaatctctgagagataggaaatgatccaggtgattggagtatactctctcttagggaagtgggatagtaagtgaaataagttcaaaa

SEQ ID NO: 55900 - DNA, 2085 bp, Bovine  19866880435555
  misc_feature (1)..(1): n is a, c, g, or t
nctgcagtactcttgcctggaaaatcccatggatggaggagcctggtaggctgcagtccatggggtcgagaagagtcggataggactgagtgacttcactttcacttttcactttcctgcattggagaaggcaatggcaacccactccagtgttcttgcctggagaatcccagggatgggggtgcctggtgggctaccgtctctggggttgcacagagtcagacgtgactgaagtgacttagcagcagcagtatatgatctagctctttctgacttaagagaacctttcatttaatcatcccattctttctctcaatgactacactcaagaaaaaagaataacttttctcatatcctgatctcttctccacatgaaggcctttgtttctctctctacctgtgttatggattaaatatttgtgtccctcaaaattcgtataagtcctaacttctgacataatggcatttggaggtggggacttcggggggtgattagatcatgaaacgtactagaccagtctgctgtatacttgctttagatttccacctcactaatcccttgacacccagatctccactcagataccgtatccttagaataacctcttttcactatcttccttctttcactatatctcttttaccatcactttctaccaaatttttcaacaaatgcaacactttacaaatctattttccattaaagaaaaaaattttaaataaattaatcacaaactaataatctctcaaagtttgttatttttgtctttttgattgtatcaaaatacatatataagggaaatattagcaactttataaaaaatatttcaatggctatccaataatttggtttaatttataatataattttttaaaaaatatgaatatatgtgcgttatatatttgttcgcaaagatgaactacataaatagaacaagaacattttggttttacagttttaaagaaaaatctactcctcgtgacgcagcagtaaagaacctgcctaccaacactggggacacgagagacatgtcttcaatccctgggtcaggaagatccaggaaggtccaaggaggaaatggcaaccctctacagtattcttgcctagggaatcccctggacagaggagcctggagggctacagtccatggggtctcagagttgtacatgattgagcacatatgcaagcactctcatttacagtaatatactaggcagtaggttgataagattctgcaactataaaacatatacaaaatagaatttaaaatgaataactgtattgcatgaaagagaagataagacaataaaggaaatcattaggagtcaaagatataaggaaagtgtaaatcaaagaagtaagcaagccccaaagcaggtggctgcctaaagggatatgataatcttcataataccagaatcaaagcaaatgcacaattgagaacaatgataaataatgatatataaacatgtggaccatgatgatgcagagaaaatgaaaaaactttggatttatacttgatcatagcagaattcagccctggagtttctttggaaggaatgatgctaaagctgaaactccagtactttggccacctcatgcaaagagttgactcattggaaaagactctgatgctgggagggattgggggcaggaggagaaggggacgacagaggatgagatggctggatggcatcaccgacttgatggacgtgagtctgggtgaaatccgggagttggttatggacagagaggcctggcgtgctgtgattcatggggtcgcaaagagtcagacacgactgagcgactgaactgaactgaactgatagcagaatttccctaaaacctttgaaggtgaaaaatcatttcacagaagaatcagtactatataattatttttatgcaagattcaaaatctcacgtaagtatatgtatagatacacagatacataagatacatatagataagatacataatagtcatccaatacacaaaatgtacacaaatgtatacacagactcacacttacacacaaaactctaaataaaaatgaagaaatagtaaacatgacacttaggatatt

SEQ ID NO: 55901 - DNA, 1277 bp, Bovine  19866880627371
  misc_feature (1)..(1): n is a, c, g, or t
ntggttttggtctaaaaacagaaaattaaatgatagactattcctgctaacattatgcatagcatccctacagaacacattaccaaaatatagccacaccaagagatataagatatagaccctctctaactgtccaacgtcactataattcagccaaggtcttcagaaatcaaaagaacctcctaactgagagttatggaacatgggaatgatggttactctcctgtaagctaggcctttatcactttactgtgatctttaaattcttccatgacagaaatgcaagttcagtctttgtttcagagtcacacagtctgcctagagtcaaagcataagctcatacttttaagactgcagaggctgctaaccacttcatttcactagtgagcagggggaaatatcactaaactgaaccaaaggaaagaggacatttaaagaggaaagatttgtttcataagaccaagatccatgctccatggaccctattcagatggagggttgcagccaagcaaaatgtgagggttagatgctgtgcccttgataccactgaatcagcagggcagagtggctggctggcaagtttgaattgtgcatgcttcagcacatttgcaatgccatttacaaaataaatgattcccttgccatcatgtgaacattcaaggcacgttggtcattaatttccaggtcaaccaaaattaagagcgtaaatggcattgagaagtcttttgtcttctaccttgtggtggtaatacagggctttggggaaatattctgttaatgttccttctacccggttttatccagacatccaagctctttctttagtctcagtgtctttcttaaggtgtgcttttttatttgaatcctgaaccagaacatgcacatcacatgtatattttcacattcccaggagactgcaagttctatattttatatgtatgttagactgattgtcccttcaaatcctgaatagttcaatgtcttttgttctcagattttaatttatatgcttcaatatttttgttatgactaaatctaatcaaacccaggaaatgctcaataacaaagttgtttcacacacagctgaatcttttgagaagtcaagttatgaaatgtaaactatgattctcatttccagtgatgatttatatgcaaaatagtaaaagctgcagtgttagaggtttggtatcacaagagaaaatcaaaaatatataccaagatgtaaaatagaggctgttcagaaaataaaaaatgcatggtttggggaggaggacatt

SEQ ID NO: 55902 - DNA, 930 bp, Bovine  19866880632005
  misc_feature (1)..(1): n is a, c, g, or t
ntacaaggttatttatgtatacacaagaagccctttgttccataggcatcttttccttccagcctgacttagttttttgcaatatcacagtttatcaccatagagataactataatgtgacaaacattgaaacaaatcaaatgggaagaacatgattagaaagcagtagtaactttgttttttgaatgaacagcctcactgtaaccagaatactccttaaagatctttatcaattcagttcagtctctcagttgtgtccgactctttgcaacctcatggactggagcacaccaggcttcaccaacttccggagcttgctcaaactcatgtccattgagttggtgatgccatccaaccatctcatcctctgtcagccccttctcccgccttaaatcttgcccagcatcagggtcttttccaatgagccagtttttcgcaccaggtggccaaagtattggagtttcaacttcagtatcagtccttccaatgactattcaggactgatatcctttaggatggactggtttgatcttcttgcagtctaaggaactctcaagagtcttctccaacaccacagttcaaaagcatcaattcttctgcactcagctttctttatagtccaattcttacatccatacatgactactggaaaaaccataattttgactagacacacgtttgttggcaaagtaatgtctctgctttttaatatgctgtctaggttggttgtagcttttctttcaaggagcaagcatcttttaatttcatggctacagtcaccatctgcagtgattttggagcccgagaaaatgaaatctatcactgtttccatgctttccccatgtatttgccatgaagtgatgggaccagaagccatgatcttagttttctgaatgttgagccttaagccaactttttcactctctttca

SEQ ID NO: 55903 - DNA, 1960 bp, Bovine  19866880670259
  misc_feature (1)..(1): n is a, c, g, or t
nttgattttctgtctgaatattctattcttgatgtaaatgggatattaaaattccctagtgtgttgctgtctgtcactttagatttgttaatatttgctttacatgtttaggtgctactaaactgaactgtactgaactgaaaatgactctagaaagatttatttctttcaaatagaaaagtttggaattaagaattttgcttctcatctggcaatcccatagcattaagtattcagagattcagtctctttgaatttcatttctctgaattccaagatgtagtctcctcctcataggctagactgggggctagagttatcatcaacatatatgtatttaaaaatatgaatatagaagggccaaaggaaaaaaccagtaataaacaatttcctgaacctgttatagaacacttctactttatgccattggttagtatatttttacctagaaaccatgaaaaactatgaaagtgagacttctattcctgatgacaacatagacagctgaagtccagttattttattaccaggggcaaagggaaggataatagtgggggacaatgtccaaaataggtcataaataaaaatggcttatcagttaagcaatttgtttacctgtattcttgcctggagaatcccatggacagaggtgcctggtgggctacagtctataggttcacaacgagttggacacaactgaagtgactgagcatgcacacacccaatcttgtaatagctaattataattaaactattcatctctttaataatttttattaagcatctaccatgtgatagatactgtgctttgcttcagggatacaaagttgtatttttcacaattattcccttgagaatactacattctagttctaattacgcttttatgaactgcataattacacagatcagtcttcatggattatttaaacttaatttttaattaaataaatgataaatgaaattactcaaactatttaagcacctgtttcttattttctcttttccttttcattctacattgtttgtatatgtttcaaaagaaaaagaaatgtttcatttccattattagatgattcctcttcatcatctgcctgctgaatacacacaatattctgccaagactcctctggaggttaaattcattatcttgatgaatttactaagcttcagatatggccctttgttttgctggctcagcacactgtttttatcaacacaccaagaaaacattaatatctcagaggtagacacatattaagcaacctcttaagacacttataaattcagaatgggaaatggttaattcactatgagaagtataactgtcatcggaacaacagcatgtgcacccttcatgatcagcccgttttgtctctccaggaattgtatttgatctcacatacctgtcgataatgagagctgccacagttttaaggactgggaaaatttctccttttatctaatgtggaaaagaaaaagaaaacaaaataaaaatatgacacctgtactcatcattgttcttcactaaaacagaaccaataaggagcatgtgtgtgtgtgtgtgtgtgtgcatgtgtatgtatgtgtatgagatttatggagttatgtcaccaaaatgatgacattggaaacccctgcctccagcctgccacaaagtgcattagacatctatccatgaataaaaattgttcattaaaaaactgggatactccagattccacttaagaaagtttagtgacacagtgcaacagaagaaaagaaggaagagcatcattttgcttgtaatcatcacatcccccaagctaactatgctgctgcttctgctgctaagtcacttcagtcgtgtccgactctgtgtgaccccatagatgggagcccaccaggctcccccgtcccttggattctcaaggcaagagcactggagtgggttgccatttccttcaccaatgcatgaaag

SEQ ID NO: 55904 - DNA, 852 bp, Bovine  19866880778864
  misc_feature (1)..(1): n is a, c, g, or t
natcttttaaaacctaatagctgtttctctatgatatcttgcttctggtctgatcatatttatagtttccctttactatcaccactgtctttaaaaaatgttttatgtgttatttggtctttaaaaccttgttttctttctgtaaacctcaacaactcatctaattccaatatctgggaccctagccatcctataaatttttcttcgatcaaatttatggcatgcagaaagtgagttgagtgttgaattctgaactgactgtaaataacttaagtcactacaaggagaggattggttactagggtagaagttaacggtgtccgacatccccaaccttctctctcttgcctctgcccttgaacattcctgccctcgagtcctttcagatgtttatggacagaactatgccagttgatcccagactcatttgcacaaggataacgatactttccaaagtggcctggggcttaaggagaggaattgcacgctatacaaaaagaaggaacattaaatgacattaattatgctggagcacaagtttctaggcccataattgctacaaaagaattataggcaactgcctttcaaatcttgtcatgcgattctgtggcagaaacctgccagaagaatcatttcttcaaggaaaccttctttgataatctatgggctatatactaggcatatttctgtcatattttccatgacaatatttaatacgttaaaagataaaatctgtagaaagcaaccaaatacagactgtgcttcaatctgaaagaggtgatgttttaaggactgcttttataaatatagtgtcatgattgaatggaaaaaccattatttatggacaagcga

SEQ ID NO: 55905 - DNA, 1396 bp, Bovine  19866880800471
  misc_feature (1)..(1): n is a, c, g, or t
ntggttatggaaaagggtaatttgtttaataatatattcacccagctacgcataatgtgatttaatcagtacattatatgcaggcttcaaatgtaaagtagctcaaatgatcaaactgaatgggggaggggtaagatggaaattcatcttccctctttataaatcttttacctttcagaaatttctaaagacatattctgaagaccacctgccataccaaacaacagaataattgctctgctggaggtagacaaaatcgaagctatttttgagatttgacattggtttgttcatattataagttcatgtcatttgatggttatataccagtatggtcttattcagaccaaaactcttcttcccttgtatcccatattgagtctgttgtatatccttcagcactacctacaaaatatttttactgctgttaccctggtccaagccatcattatttctcacttggactcctgctatagatatctctttcatcttcctgcttctgacctcacctctcttaagcatattctagttcagaagtcaaaatgatgctatttaaattaaagtcatttcttgccattcctcttaaaaaattctccagtggctcttaatttgagagcaaataccaaagacttagaatgatctaaaatatttgctagtcatttggttcccaactaattttctgatttgaccccatattactctccacatcattcatattgatccagtcccactggcattccctcagttgagtcaacacaccaggcatctttctttagacctcagatagaatttgcatcttgataagctacctttctctcagatatccaaagcttcactacctcatatcttgtagatatttaccaaacatcatctccatcaaggcctttttgacattttctctaatggtcttagcccaaattttatgccttgatccttccctgttccactatgctttatttttcttcttcagttcagttaagtcgctcagtcatgtcccactctttgcgaccccatgaatcacagcacgccaggcctccccgtccatcaccaactcccggagttcactcagactcacgtccatcgagtcagtgatgccatccagccatctcatcctctgtcgtccccttctcctcctgaccccaatccctcccagcatcaagtcttttccaatgagtcaactcttcgcatgaggtggccaaagtactggagtttcagctttagcatcattccttccaaagaaatcccagagctgatctccttcagaatggactggttggatctccttgcagtccaagggactctcaagagtcttctccaaaagcatcaattcttcggtgctcagccttcttcacagtccaactctcacatccgtacatgaccacaggaaaaaccatag

SEQ ID NO: 55906 - DNA, 873 bp, Bovine  19866880821308
  misc_feature (1)..(1): n is a, c, g, or t
ntttgtttaagagaagcctatactaccactaagattgtatgtgagctgctataagagctactatctcaaattgtgtagaggtttaataaatttttagtgaaagtgaagtctctcagttgtgtccgactctttgcgaccccatggactgtagtctaccaggctcctccgtccatgggattttccgggcaagagtactggagtgggttgctatttccttctccaggggatctttttgacccagggatcaaacccgggtttaccgcattgtagccagatgctttaccatctgagccaccagggaagtcaccaataaatttttaaacatttaaataaaggaatttatctgtcacagagtggtagaaaataaaccgaattatttagccatatcctttggagagtcattatagagcttctcatttcttgagagagcaaaccagaaattcaacatttaggttgtattcagtatgcattccttcttacttactgagcatacttcatccactctaactcccctatgtcattatgtttcatgaatctagaaaacctatataaaaccaacaccagggatgcattttgagtggcttggggaaatatttttagaatctcgtattaaaaggcacgaaatagaatagtgttactccgtgtggagtggcaaatcacttgtattttgtgcacacaaaaatgttggcataagcttggtagaatactttttagctatctgggaataagagggactcttaatacattagatagcatttgtctcccaaccccacctcgtgcctaattacactgtatagaaagttaagtaggcccgaactaagagatgggaatcacaggcagcataatcctattgtattttccccagcacggcat

SEQ ID NO: 55907 - DNA, 1403 bp, Bovine  19866880944150
  misc_feature (1)..(1): n is a, c, g, or t
ntaaataaattcaatacaacgaggtgaggtccttgtatagattctcagatgcacaatgagggagaaaggagagaggagccacttgcttcttattcctgtaatctttgctcttaaagctagaattggcttttgactctcatatattacaactgctaaagtaaactgactttgcacattaatctgatcacaccttcctagtttaaattatattaacagtctcccatcatataaattagaacatctgaccaagatagaagtctgtataaattctgatccttcactacctttcatttctctttacactaaaataaataccatcagttttgccatatcacaaaaatatcttaaaggctattcctctttcttctagctaactcctagttaaattttctgatgactcttttttactaatatcctcttaattttagctcaagatttgcattctctaggaattcttcctgaccctagagcatgatttcagtgcacataacttgtgctcccaaagccgcatgattataaggctaacactaaattgttgaattagttttctatgctgcatagtaaattaccacaaacttagcagtttaaaacaatttaaaacaatttcacatttatctaacatttcctgtggattaggattctgggcacagctaagttgcaggaatacaatctggatgtcagtagtcagtaagtactgggttctcactgggaagctcaatggggacttcaaatgcttacatctatacttcaggcaaaaatgataccttttaagcgatcagagagtttacattctgaacttgcttttacagtacaataaagaggttcaagtttgaaatgtagttacagggagataatgtcagtagagtagatgcagtcaacacaagtaattaattgatttgggctaaaaatgtgtacaatagtagctatgacatcagctgacttaaatctacacccaggaagcaggactgaataccttggctccagggatttcattcacagctggtgagaccacttgaaaaactttcatagagctgaatgcatcaaatcattgactataattcatgatagataccctaggttctctcctctcatgactgacccaatggatgcagccacgacacagcagtgatgccaccatttcttcaggtgaagctcatacaggcacgcagcacaaagtagtccgggaccaagcaagtaccctgtgatgcacatgtgcagtgctgtaaatgatctcagctgttacatagccattatttacagaacgtggggtaagagcatctgaacacgccatcttatctacagttgttctttctctacaggtggctgctgctgctgctaagtcgcttcagtcgtgttcgattctgtgcgaccccatagacggcagcccaccaagctccccaatc

SEQ ID NO: 55908 - DNA, 1175 bp, Bovine  19866881079047
  misc_feature (1)..(1): n is a, c, g, or t
ntgatttaagcacatgagcagatgtagcagggaggagtctagactggaataagttccagatggggtgcttatgtcaataaacccctatgaagagttagtggcaagtgaaatccaaccctttgagactcaacactttcaattactctactaataaaatatagttgacaggctctaagattttgaccagcttgggatataattattattatttctaaaaaaatttcaacaaagaaaaaagcattagaaaattcaatattggccaaagaggaaagaatgcaagattattagagtttaagaaattttaaaaattaaccagtaatgtaaaataatttttaaaataactaaagaaatgtggaaactatgtgatttcactacatcaaactataacttagttggcaaaacaagcctagaaattattgtcagttaaatggtgaagattaagtgttctagattcattttagacaaataatgcacacaaataattaattttgatactaatcttttactctttgatttacttactacacctatactgtatttcagaatgaaataatataatattagtacactaatttcttcatcactagtcatttactttgttccgggagttggtgatggacagggaggcctggtgtgctgcgattcatggggttgcaaagagtcggacacgactgagcgactgaactgaactgaactgaagctttatttcaaacattttgatttatttcatacaccatggacctcagtataattaacttgtccaaaaaccatagcattgaagtatctattaactatttttactttgaaaatgatataaataagcatttttgcttttatgaaattggtgatttcagattttactttacagtactattcagtttatcaaaaaaatcaactgcaatgagttgggagaatgaatttttcatttctgactccaaatatatcacaaaacttttccagttttacagatttggctgcagcctttgaagctcacaagcacacatacattatacacacacacacacacacagacacacaccacacacatacacaaagccaaacctttcccttgggggcttgacatttttacgcagaaatgtttgcctggactgtggctttgtcttcatgtggtgcactctataatgagcatgtatgccctgagaaggatgcccatg

SEQ ID NO: 55909 - DNA, 824 bp, Bovine  19866881079799
  misc_feature (1)..(1): n is a, c, g, or t
nttcatgatactagcatccttccaaaagcatttgtagttgttaatcactaaattttgtttggctcttttgtgactctatggactgtacccctttcaggctctgcatcccttgggatttcctaggcaagaatactggagtgggttgccatttcctcctccagcagatctcccccaaaccagggatcaaatccagggtcatctgctgggcaggtggattttttaccactaggccaccatggaaacccatataagcccattgacaaattttaatggattagttcagtgctgggctaaactagaagttcctgcatttagaaagaaatggtgtctaaaattaaattaatttgtataaaaatcataaatagcatcaaaccaccagttgatgatagtatccagtgtaatatttttatagatgaaaaaaaccagaattttatgaaattgtaaaatgcaaaagtcctgaagtttaattcatgtgagagaaacttggctttcaaaataataatttgggaaatggaccttaaaagataaaaatcaaataaaaaatgatatgaactctaagttcttgactagtttcctatctttagccaatcttcattgcctatgaatttgatcagacatcttgcctatctgaatattccagtcatttcatagtgatttcttcctaattaatggaattttattgcatgccttttttattttttagacttctcttccaaatcccaacagagccactgaggaaagatgctgattccttagaggtaaaatttgtggttttaataccaggagttttaagtaaccaggaataagaattttgtcatcacaag

SEQ ID NO: 55910 - DNA, 688 bp, Bovine  19866881121693
  misc_feature (1)..(1): n is a, c, g, or t
nttttaaatcaatttgctttaggcaacatagcatagcaaaatcaactgtaaatgaaaagatattatgtggaattgttttaggttcaatttttcccccatttcagtgtagtatatacatctttaaggacagcattgctacttgtgatttaatcagttatttgaaattgaatctacttgtgatccaaatgtgaagtgcttgactgattgtccatttggccaatgatatggtcaattttggcagtgaaataaatttcaaatatcagatacacatatttctctacagttggagcactaaacagcatggcacattttctgactagtaataaagtttaagatacattcaaaactccatctggatataaagcaggaagagagtacccacatttcccagttaacacagggcgtgctcagtcactcagtcatgtgaccccatagactttgcaaccccataaactgtagcccaccaggaactactgtccatgggattcttcagataagaatactggaatagattgccatttcctcctgcaggggatctttccaacccaagcattgaatctaggtttcttggtagattcttggcagattcttggtaaattacatttattttcatgtaaacaaataaaaatagaattgcaatatataatacaatcatatagaagtatattcctgggtatgtctgttatga

SEQ ID NO: 55911 - DNA, 3189 bp, Bovine  19866881263974
  misc_feature (1)..(1): n is a, c, g, or t
ntatctttattatccctgaacttttgtttactacatatacaaccctccctgtttccatttggcatatcaaaaaacaacaaacaaaaaacaatataatagagaaaaggcaaaaaaaaaaaaaaaaaaaaaaaacccaagtcaggaaacgatgataatgtgatagaaagagaccttcacgaggagttaagcagagctgaatctaaagcctgggtgctcccaattccactccagaagtctcccatcacttaataaattttggtttcaagttctcctgaaggccatggccaatgccatgcgccacacccaacagtagcagcagcagtagcttgtgtggcataaattcactaaaaaaacatttttcagagaaacacactagccagtgaaaaccccttcaaactcataattgatatcctaaaaaagaaaaagcaagtggagttgtatatcaaataaaagaaatgtactgaaaagcatctgggagacacttttgtacactgctcccacttattttttacctgtttctaaacaagggtccaagacattttgtcaagttgaagatttgttgctgttattcagttgctaagctgtgtccgcctcattgtgacccccatggagtgcagcacgccaggcttccctgtcctttgccatctcccagagcttgctcaaatgtccagtgagtcaaagatgccatccaaccatctcatcctctatcatccccttctcctcctgccctcaatcttttccagcatcagggtctttttctgatgagtcaccttttcacatcaggtggccaaattattggagctttagtttcagcatcagtcttctcaatgaatactcagggttgatttcctttaggattgactggtttgatctccttgcagtccaagggactctcaagagtcttctccagcaccacaatttaaaaacatcaaatctttggtgctcagacttctttatggtccaagacaaaaacaaaagtaaaaaacatgggcaagcaacctattcaaagagaagtttgtggccaagaagacagtgcctggaaaaagatgaacatccgggtctcagtgaggaggatgctctgtgagctgagaacacaggcagcacataacctcagggctacctatgcaccggcagcacagtatggtgagagggaatccatttcactcagtctttaggttagaggttcagcatttgggcttcttcctgccacttgcttcaactaaatcatctaatcagtaactattgctagcttcctagaatgggttaaaatatggcaggatggccaagaagattgcttaccatagtgcatataaatgttaatgtctcgttagcattaggtctagcgttagagcattaagtcactaatgaattaggatcactagcaaatcggagttaatgataatgtcaactatcatcgactgatagctactggtttccagggactatgcttaatgttttatgtaattatcccaatgaaaacactattttgcaggaaagaaaagtgagttagatagacattacacttttgcctacagccatacagatggcgattagaagacccaggataggaaccaggaagttgggctgtagagttggaactcctgactgttggactaagtagctgttcctcctcacaaaacatttactatgtgtaaggaactatgccaagcacattattgtattctatccctatatttattatcatttccattttccatgtgataaaacagaagcttcaagaagaattaaattatgcacgtcacatataactggatagtagtgaagcccagataaaatctatgtttgcttcacttgtttgtctctcgagtctagtacccatccaagcatgtgtgcaatctgccactttgcctctggttggcgagcagcaacacaaagtaacaaaaaataaaatgtaagatctcgcccctttcttgttcaaatgaggctcaagatgaatagggacttactcaagataagagaactatttaccacaaagctgtgacaaaaatttcatttatccaaaaatcatcctagaaggctatgttttctctcgaataaaatatgctttctgatcttttcccattaggatatatccattgtgggatatattcactttaaagttcagctaagttcagtagctcagtcatgtctgactgtttacgagcccatggactgcagcatgccaggcctccctgtccatcaccattttccagagtttgttcaaattcatgtccatcaaatcagtgatgccatccagccatctcctcctctgttgtccccttatcctcctgccttcaatctttcccagcatctgggtcttcttcaaagagtcagttattcgcatcaactggccagagtattggagtttcagcttcaacatcaatctttccaatgaatattcaggactgatttcctttaggatagactggttggatctccttgcagtccaagggactctcaagagtcttctccagcaccacagttcaaaaccatcaattcttcggagctcagcttaaaattatatggtgtcatttatggttatttgttatcattttgtgtttaaagagaaaatttttttctaaggagaaatttttttcacttgtattattcttttaatcctctggggtggggggggggggcgggaatagaaacagatgatggggaagacagttcattttattcttagacctaggttcagcttctacgactaatttaaaagatggagtctgtcaatttacttaattcaccatctaaccaagccagtgaattcccggaaaatgtttggacagatttatgtacacttaagttcatgccaaagatttaatgccacatcaaggtttgctccttatgagaatgtctgaaaggaactttccctaggtatatatgtgagtaaacgtgcacaagtttggatggcagtcagggggcctcagaccttaagagagctgtggagatggcaccgtccttttagggaaggatagagtgaccgtcaagataccttgtttaatatatacaataaaaataaatcaaggatggatgatatggaggctgaggacattacagttttcccaatttcctggtgtgagtcagtttatagtgtgaactcgttcgtgaagtatatctgactcttttgtaaccccgtggactgtagcctgccaagcttctctgtccatgggatttcccaggcaagaa

SEQ ID NO: 55912 - DNA, 751 bp, Bovine  19866881347540
  misc_feature (1)..(1): n is a, c, g, or t
nagaaaggtttagtgtggaagacgatatttgcgctatagccagttttggaacaattaattttgctttctctgcctagttccacccagggcaccgtgaggacagacctgccgcagccaccggggaatgtgagaatacaatgttcattatgctctagacacgagacacagccctgccctatgttgtgcaccccaactgacatcctgaggaattttgatttggtccagatatgagcacagaattgtatcttcttaataaaacattcagcataaaaggctgaaatgggtggatgatgagaaacctgttcagccacggatgttacactattcttggaaacccagggaactggtccttctgaaactagctctgcactctcttcagtatcatttggtaatgtgcactgacgctgaaagatttctcccaaaatggggttgtatggctttttggttaatcgatcctttcctttctgcatgaaaggttgagaaatacaatttcacaacctgaatcattcggtctctggcatccttctggtcactaatactcacaaacaggtcccggatgtgtaaaaaactctgcctatgtttctaaaagagatcttttttcaagaataactgttggaagaactacctttgtaagatccaagtctaacctgtgacaacagatgcatgataacgcttttgtgctcttccgctgaccttgcctccccttcgtcatttccatcatcatgtgaatcgaaaaggtcagcatcacttg

SEQ ID NO: 55913 - DNA, 1198 bp, Bovine  19866881366531
  misc_feature (1)..(1): n is a, c, g, or t
ntatttttatgatgggaaaacttgaccatgtcaccttgaccagtgaccgaatgtaacatcaccagccatgggacagatagtgtaacacacgcccccgacacgtgcggtcaaggcacaacatcacttccatggttggtattcctgctaaaaatgcataaaatgaatctaatcatgagaaaattatagacagacctaaattagggaacattctatgaactgtgtttatctcttcaaaaatatcaaggtcatgaaagacaacaagtgaccaaagtatgtttccagctataaggagactaaggatctataaccattaaatgcaatactattttttatataaaggaaattaatgggttgtcaaaaattgaatactatctgtagggtggaatattgaactatatcaattacactgtactaaccttgatgttcagtggttatataaaagaatgtattttgcaattaaaatatgtagggagaaagggcatgatgtctacagcttggactcaaggtttcttactttgggtatctctctctctatttttcgtactttctctcctgaaaaaactaatgtggtagaatattaacatggggagaatgtgaatgaggtatatgtgaaactttttattactacttaagattgtttcaaaataaaagtaaaatatatatatatatatatatttcatacctcttgtaacagaatctgttgtcatccctccctatattccaaagggagtttacatgtaaatgtaaaagggaaagcagtaacattatataaaaaaaaaagagagtgatttgctataaaagataagataattatgacctatggagatacaaggggtagtaatttggattcaaaagaggggagttctgaagtcagaagatctctgtttcttgtccaaggaggtgtgtacatggatgtttaatttgtggtgattatttgttctacatgtttttgctcagcatgaatttttgtttgtgttctgtaattcacatttgaaattaaataaacaacaacaaaaaagaagataaagacagcatttagcatttgatgccagcagtactgaagccatggatggttcagaagcagtcactaatactgcattcttaccgtccacattcatccagatgaatgctcacatctgaaagcaacatgagctgagcccaagagcaaatgtttagggtagcatgcaacagggctatg

SEQ ID NO: 55914 - DNA, 861 bp, Bovine  19866881366994
  misc_feature (1)..(1): n is a, c, g, or t
ntaaggaagcccaaggtctaatcatatctcattattagtcatgagagaaacagacgctatcatttttggaatcctcaaagtgttgtgattattatggatttgtaagattatacattaaaagaacaatacatatctttctaagttcgtgaattcataggtatgataaatatattttcatttaaaattggtagaaagaaaaaatgtgagtgtgtttaaatgttacatatcttttccaaatgaattttaagacaaaaactgttttcatgtggagatgacttatgtcaagacttgatttcaaaggctggtttgtattcaaagaaaacgttcatagcaagaattcagaattcttgctttagttataaaacaaattacactagttgttgagaaaatggtagatcatttcaaggaacctcatctgtagaattagataaattatttaaggttgcttcctaattaggcctaataacatcaataattaacaattccccaaactcacagcacaagtgctttattcttttcaaagggttttttttttttttttccttattagatactcacatcagttctctgaggtaactgagaaaatgttaccctcatttattgggtgagaaaactgaatattggagatgtctgcagatagtttatcatatgagtacagtcatcacagattacaatggaattggtgttgtattgtaggctcagtgcctatttcatagtctgtgaaacatcgtaacattttattatagtcaccctgcttctttctgagtccatacagcctataataacttgtgaaatcaagcttacaaatgtaccatgattaaatttaaacaacaacaaaaaaagaaataagaaaacagcaaa

SEQ ID NO: 55915 - DNA, 1305 bp, Bovine  19866882035304
  misc_feature (1)..(1): n is a, c, g, or t
ntgggagctaccctttagtaacttaggctgctttagctgtagaggttataatagtgtccatactatatcaatcatcttgataaatatatgcatatatgaattagaggatataaaaataggtaagtgtatcttacctgtggttgtctatctatatagcaacaaaagacagaaaactacaatctaacttcgaaactagaaaatggtaagataagatgatttttggttgattataacaaacatatatatgcacataaaaaggtactatgaggcttggaagtatttttcttaaatcactcttatataaaagtacttcaagataaaggggaaataatttacctatgtttcagagcatctgaaagtgacaaattagaaaaactagcattggatatacatattcatttgtcctaataaaggtgacccaaattattacatatttttcttagcctcaatgttttttcttatgaccagcaaaataactcagctctatagctcacaattccacaacaagttaatgactcattaagattttatcaaattggtgacatgttattgaacctggcctcctcaggaggctgcctaatgattacaagaataactagcaaatgtttaatcacctactttattatcttcccattaataataaatacctggaggtaatgtatctagttacattgctagtttaagagtggcataagaagttaaagtttgcaatattggaacactaatttaatctgaacagcatcactttggtacttgggacaacagctaggtaaaagtataacaatataaatacccctatttcaaatctggaaaactcattgcaagattccattcatggaatacagaacgcttataaacagtatttctttaaataagctgttgtacaattttatctctcaagtgatttgtgaccttaggtatttgagaagatattaaaatgtctgactcctttatggcagatatatagggacctcaaacaagggtcgtccctctgaaatgataaatctacctgcttagttatctcagtcttctgattataaatgtagatagtaataagacagaattttgaataaatattcatggttctttctacagtctttgacacaataaggccatattatatttatctttcttccaacaaaaagcattcccacctataatttgtttaagcaccaaggattctgttatcaaggagcatcccagcctgttggtcaggtatccttttggtcaaacaataagtattttccagagtatcttctatgtgttaggtactagtctttaacacaaagattttcagcttttata

SEQ ID NO: 55916 - DNA, 873 bp, Bovine  19866882170773
  misc_feature (1)..(1): n is a, c, g, or t
nctctttcctggaaaatacatggatggaggagcctggtagtctacagtccatgggggtcacaaagagtcggacacgactgagcaacttcactttctttctttctagctgatctaaatttacaaatataacacagtcaggagtatgagggatatactggaaagttctaagattaaaggtccaagctataattttatataatactatacatctaaacccagagaaggcgatggcaccccactccagtactcttgcctggaaaatcccgtggatggaggaacctggtaggctgaagtccatggggttgcacagagtcagacacgactgaagcgacttagcagcagcagcagcagcatacatctaaaccaacataataaataatctaggtgcacatggggagtgccacagatagttttgaagattccatttcgtgatttttgagtttagtttcttgatgatgtaaacctcttcgggtcctagttaactgaaacattaagatggaaaatgggatagtttcatatcttaaaacacttctttgtgtgtgatttattttgtttcaagtctctcttttgattcacatgggaataaaacatcatcaaaatgaaaccaacaactgttttgctacaatttttattggcactttgtactcggagtacaggtcatttcaaactgtcaaatacttcactgattctttcctttaatttacaattttcatttttgacctgcattggaataactgctagttgcctgctgggagatgacacaattcatggattaagcacccgctaatgtctcagggattcaaagattttctttggcccagatcagttaactcttcatctttttccctgatcttaaaaatataaacagaaata

SEQ ID NO: 55917 - DNA, 1874 bp, Bovine  19866880123433
  misc_feature (1)..(1): n is a, c, g, or t
nccatttccatcattctgatattttcacattagcatttgcaaccacctaatagttgccaacaaaggtccgtctagtcaaggctatggtttttcctgtggtcatgtatgaatgtgagagttggactgtgaagaaggctgagcgccaaagaattgatgcttttgaactgtggtgttggagaagactcttgagagtcccttggactgcaaggagatccaaccagtccattctgaaggagatcagccctgagatttctttggaaggaatgatgctaaagctgaaactccagtattttggccacctcatgcgaagagttgactcattggaaaagactctgatgctggaagggattgggggcaagaggagaaggggacgacagaggatgagatggctggatggcatcactgactcgatggacgtgagtctgagtgaactccgtgagttggtgatggacagggaggcctggcgtgctgcgattcatggggttgcaaagagtcggacatgactgagcgactgatctgatctgatctgatctgatctgaatagtttattatttttaccttcctatctatcatctctctaatctaagctagctactagtttatggtataatttatggggtaatttgaatagtggctagctgtgaactaattcactaagcatttctgcaagtgttagactgtaatacacaggagtaaggattttgaatcgatcctcagatcctgaaacagtgctcagtacatagtagtcattcagtaaatatttgttgaataaatgaaacagccgaagtgagtaatcaaaaaaagtagaggatagactcatctttattttctgagcatatgaaatgcatcttacctgtcacacatatttaaaatgttttagtgttttctaggaaacactagtttcctgggagactagtgtttcccaggtaatgtgcaagtgctcttctagtgcctcttttaatacttaacagcagccatctgagttacatactatattatttccattttatagatggggaaactgaggcttaaagagattaagtgaaagtgaagttgctcagtagtgtccgactctttgcaaccccccaatggactgtagcctaccaggctcctcagtccatgggattttccaggcaagaacactggagtgggttgccatttccttttccaggggatctttccgacccagggattgaacctggtctcccgcattgtagccagacactttaccgtctgagctactgctattttaagtcaaagagcagcatctttgatcacttgatgttatctagtaatctgtgactatggtttcattccagtaaagtgatttttaaagttataattttttaaataaaaatttatgtcttatagcaataaaaataatcataattatagaataataaatggtcaaaagcatcttttcttgcttctttcctgttctgggttgaagtactaccttttggcagaaacagttatcaacaaatgaccagattataaatatcaaatatgggaacaggactctgtctgctccattatatattgttttttcagctttcaggaaaggaagaaatacagtgaaataatctcaagttaaagggtatgataaagagacctaaaatacttactaatcccttcctgtccagtaggaaaaacacttaaaaaaaaaattctgggccccttttggaggcagtttggaggcagtgtgggccccttttggagcacctaactccacagggtgctgggctcccaggagcagcctgctttggaaggcagccccgcagccagctttcagtaggcctggcatttgtctccttgtgtccatcccactgggttccatgaaaacagatgggagttgattcctaatcgacctgctg

SEQ ID NO: 55918 - DNA, 1926 bp, Bovine  19866880365107
  misc_feature (1)..(1): n is a, c, g, or t
nagaaggaaatggcaacccactccagtgttcttgcctggagaatcccagggacaggggatcctggtgggctgccatctatggggtcgcacagagtcggacacgactgaagcgacttcgccagcagcagccaaattctttatttgtagtttaggcaaaagaacactaggtggggtaattctttctaatcattctgttcttttaatcattttaatcggtaccagatggatgaattactgccaattaaggagccatactctggagaagggcatggcaacccactccacaattcttgcctggagaaccccatggacagaggagcctggcaggctacagtccatggggttgcacggagtcggacacgactgaagcgacttagcatagcatatcctaaggagccatactgaacaacagtactcaaaactcttcagccttttagtgctcctcaaatgatctaacaaactcccattatatacctgaccaccatggaacttgtgtaccagagaatggcctggacttcattcccaaatccctttcacagaatcaatgggctccaggaagcacccccttctccccacccctaggtatgtctccaacatcactcaccgttgatctctgcttttgctctctgacacagatccttcaggttcatcttgccaaagatactgagagccacctcccaggcttgctctcctggataatacttgctcatcaagtcagccaaatccttccgcttggctttcttcacttcagaccagggtatcctgcaggacctgggttccagggtctcattctttagaaatgacttgaatctaattaattcctctttgtttagctcctccaaatacaatagcagcccaaaatcagaaaagaaggaggaagacgacaaatgcgtcatcttgtctatggattaatattcaagcttcagtggggaagataatccaaagaacatgggataactgggacctgtggaaaagtaagattagagaatgaaatacctctaaaaacacagactaattcaacaaacttattgaagcccactgtttcaggctcagtactaacctcctgtctactgtaatatattttctatcataaaagcatttctctaattatgtttctttcaccttccccagagtttctcccagccccatgcttatgagctgtaagaaatcaaggaaggcaatccatctctcattactcttctgcaaagcaaggacatcagaaccaatttcagaggaccatggtctggattaaatgaggcagagttcatgtatcacctggctcagaacaggctcctactaagtactggcaaatttcttcattcactctctcccctaccaacacccagcatacatctcaaactataaaatgttattattgtacctccaccattactcttaaagcatgacatgcaattggcatatgtcatctttttcctagtctggtcatgtcaactctagtcataaatccataccagctcctgataatctgtgttcccgagctcacaagctcctttcacatctattcaataccaaaattattataggtgaattcaaatgtaaagcccttccaaaagagcattctcacccatccctgacctcgactctcatgacctcattccactccagcacttcactccaatgttctcactcagactttatcatcaacaactactcaaactctgtagaatcttttaaactcttaaactaatactttctagttaactgaacagtttcatcccctcactcccatgacagttcttcagatgctattaaatcttagtcttctgagccctgtgttttccttatttatcagccatcttaagagccttattcaatttctcatttagcacaggaactccagttaatcatttaaatcttaagttcaagttccccattacctcttcaggattgcctaaagagacagag

SEQ ID NO: 55919 - DNA, 1608 bp, Bovine  19866880369572
  misc_feature (1)..(1): n is a, c, g, or t
naatgatcgatagaaatgtattacttaatttatgttcaaccaagaaggaaaacatctccctgcctggggagagggagtgataacagatgccaggagacatccagtagaggcaggagctatgccagaagatagagttgggcaggtagcccagtcctcacagtggaggataagtggaatctagaaattcaaggcttttgatcttggtgtccattcctggtgaagtcctaagctaatttagcagatggttggtgagcacctagaaaaggtgccccataattggcttattaaaaccaagtcatgggaaacttcctgtgcttctattattggtaggatcactcttgatttagcaagacgtttcatgagattgcttatgataaccagcaaagtcctttttttcccactggaaacaaagaaatctagttggtgaaagggtcagtgggggtgaggttcatgtcaactgaagagagaagtcaaggaggcaggaagatacctccaagcttgatggagtaggttagagtcagcttaaaagaaaggagtggggagcttagatgttcacttttgaagcatctggtaatactgcatttttcaaactaaaccgtgatcaatctgcctttagaggtaggtggttgtttgttggtggtgggtggtgttatttagttgctaacttgtgggtgttcctatctatcagggctaactctcagggcttccctgatagctcagttggtaaagaatccacctgcaatacaggagaccgaggttggattcctggattgggaagatccgctggacaagggataggtatcaactccaatattcttgggcgtcccttgtggctcagctggtaaagaatccgcctgcaatgcaggagacctggatttgatccctgggttgggaagatcccctggagaagggaaagtaatactacccactcgagtattttggcctggagaattccatagactgtttagtccatggggtcccaaagagatggacatgactgagcaactttcattcatttgtgagtgtttatttagaatgtagatacctgagccccacccagaatcagtatctcgggaggcaccctagaaatctatagctttaacaagcttccctaacaattatcagcacatgtatatttcagaactgttgctttaaagataagattatctgctgtaaagagtgttacctagttagagaagtatagaagttctctagttttataaacagttcaatgttttttatatgattgtggcccagaaatttctgatcttcctgtatctgcccagggtcaagcccaactctgttgccatctgctgacagccacttatgctgtaaaagcggaacttaaaaggcagatcttttgagcttaaaatgataattttgcatcaggtcaataccttatgtaaagaacagtgaggcatattgcaagaagcttaattctgtacagtttcttaagaaagttagtctccatggtgcctggattgaggacagcagcttactgctacctgtgtgataacagttctccagagttaaaaatgtgtgaataaatataaatgcacgagcttattataaattttactgttacaaaggatgtgtattatataattc

SEQ ID NO: 55920 - DNA, 1445 bp, Bovine  19866880841700
  misc_feature (1)..(1): n is a, c, g, or t
ntgccttggtagggcagccttagtgtgaaggtggtgtccaccgcagacaccagaatgccactggtccatgatcctacagccagctggatgcacaccctccaagtcatggtgctagggtaatgcagagggttgcagatagccacatatcgatcacaggacatcaccgccaaaagggcacactgggtacaccccaaaaatgaggaagagtagaagctgagctgcacaacgtgtgaatgaaatcactttctttctggatagcaggtggactagggcttgaggaacaatgttggtagagaaacagaggtcagccagagataaattgcaaagaaaaaaatacatgggtgtgtgaagctgagagtcaacctgaataaggaacatgagaagcagatttccaagcacagtgaccaggtagacacctaggaataaggtgaaaagcagtttctgggtgtgttggtcatcagagagtcccagaaggaggaattctgtcacctgcgtttgattggtctgtctcatggttttatcagtgtgaagtcactatacagtatatataggtgggtatagcctatacgattatacaattcagaactggaaggcttagaaattgccccaagtcataccaactattttaagaattccctttattaggctgttagaagatgactatactgcttttttggaatgttttcaatgttgtaaaatttaatacttcataagaaggtacattcatttctagtgtcatctgacaagcatatcatagatcaaaagaatcatcttcatcatcttctctatctgaacatcatacttgtaatgataaaaacaataggttgaattcacctgtaaagtcatgaaatttaatttctctttattatcagcaaaaatatgtgagtcttattttgctcttgtgacacctcccccatctcatgatggtgtagatattttttttagtttttcaaacactcaaatcttcctattgtttcttccctgaaaaacaaaacaaaacaaaacagtcacccaccaaggtataagtaaaagaaccaaagtaccttgtagaattgatttttttttttcttggacaaaatagcctattttgaaagagctaggaaaccaaggggtaactctgcacggtgtgctataatctttctgacagtcctgtcccccacttcaactggagctcctgaatataaatcttagccatcagtgaactttcaaaacaccattataacataatttccattttaagccagcaccctgtctggttttgttcagactaagcagcactaatctaccacttccagcccatcatctctcgcttattattgcattatcgtctgtcttgtattatctgtctactcttctcagagactaaaaactcctttgataactgtgtctatgttttttcatttttgtgttctttaaaagacatagcatcagactgtattcaataa

SEQ ID NO: 55921 - DNA, 1468 bp, Bovine  19866880889578
  misc_feature (1)..(1): n is a, c, g, or t
ntaagattccctttaagaacctgggaagaaggttgcacactgagttttaaattattttttttaaatgatggtttgcattagagatatgtaaagtcacaaaacagagacagaataagctcttatcaagacaggatggggaacacgtgtacacccgtggtggatgcatgttgatgtatggcaaaaccaatacaatattgtaaagtaaaaaaaaaaaataataataataaaaaaaaagttgaaaaaaaagattggaacaaaactatattattaaatatactaacacatacagggtaaaaacatgacaattttaaagagattaattggcaaagtaaattcagcaaagggaaagtcagacattggtagtgttttatttcatggtcagcagagagggtgtcctggcccagtatgatgaccagccaggtgctatagcaggtatgaccatgtgcacttggcaattttcagggctctatgataccaggcattaagatctccaattggctgctctttttctaaactgcaggctcactaagcagccttctagctataattaacttttccatttccattgatctccagaaaaggcatttacattatctacctaatggttacacgtttttaaaaaaaagttgtggtacaattaatgtacaatattatgtaagtttcaggtataaaacacagtggttcacgacatttgtagctactataaaaatataggttatattccctatataatagtgtgttgtacaatatatccttatagcctgtttgttttatataatttgtaccttttaatcccttaccctacttgccccttcccttcttccctctcccgactgatgatcactataaactgactttaaattaattaatcagcattttatattttagtcattggcctctataagccttcttaaagggagtccctttgagaaagagatctagctctcaccacaccgacaatcatgtttccaagctgatagtttgagagcctggcttgggttttgaattttccaaggaaatgcctatccaaagggatctatctgaatagaaaaccaaattcccaatgggataccaagttttactctaagtgattctgtgttaaacctgcagcaatttacatggaaagcctacctctacctgacactgaagagctgcctctctccttccctgctggagaagacagaagaaagaatcagtgaacttgaagaaagaacaataaaatcaaattggaaaaaaaagaaaaaataaactaaaagacaaaacaaaccagaaacctctggtgtccccagaagagaggagaaagaaggagtaactgaaaaaagtaccaaagaagtaatagatatcttcctaaattgagccattaacttacagaattaagaagctgagtaaatctcatacaagataaacccctaaactcacccaaacttaaataaataaacttctgaaaatcaaaaataagggaaaatca

SEQ ID NO: 55922 - DNA, 903 bp, Bovine  19866880897426
  misc_feature (1)..(1): n is a, c, g, or t
ntactaagaaaaattaattcaaggacagatggaatatctgaaggataatagaacatagaagacttaaattaagcactatttacttaatatatgcctggagaatcccagggacaggggagccttgtgggctgctgtctttggggtcacacacgactgaagcgacttagcagcataccgtgtccaaagcactaagggggacacaaagaaatgtgaagtgtggcttctatactaataacatgtaatacaccgatttatatatatgaaattcagattttcatttttgagaataatttaccttctagccccattaatttttcatcctctctgcatatctaaatttcttctaggtatacaagccaccaaataggtatcattttcctaaggaaaaccaaactcacccaagcctctgaatattgcagtttggatgtctcaaagcctcaaacagaaatttcactccatcatcccgcaagtcattgttcccgaggtccaggctctgcaagtttgggttgttcaaaatagcagaagccagatccaggcagcatgcactagtgagaacacagcccatcaatctgtgagaaataaaaaagagaagtgagattttcagttgtgaggctttattagtttattcctggaaggcacgcccaggggagcctttttttccctaagccttttctatctataacctaggatgcacacaggaaggtctaatgttataccactaaaaacagatgggattgcttagtaagcaagaaaaaaccaacaggtaaaactgctttctcccacaaataggctattttctagtaagcttcccaagtcaagggtataaacacttatttctacctctgccaaaaaaaaaaaaaggatcggatataacttccctgaggaatccacagatctctatgt

SEQ ID NO: 55923 - DNA, 1638 bp, Bovine  19866880920260
  misc_feature (1)..(1): n is a, c, g, or t
ntgagtggttagcccacctgctctaaacaagcaagaggactctgaaggctgtatcactggcattgatactagcttgctaagaccccacttttgccagaagtttaattttgaacagtcatcccaagtttcctggatgcagctttccatccagcatctactatgggaaagaccacccaacatatctttcctcctactttcttcacagggctgcatgctttggcatgatcctgacttcatggctctctagtcaaatggaagtgtgagtgccccttttttctcccagggggaaacatctgccctccctgagtgcggccatactgtgaaaagagagattacagagtactgctttatagccgcttcttcagtagctcatcaccaggcaaaatgtcacagcagctggtgctcatcaattcaccctctgtgatttcaaataccaattaaaactgtgaactcctaattgcctcatttctagccacattttagagtaattaataagtaattgagtaatgggttaataatagctttaatcatttttctaatgatcagttcctacatatagtcacctttatgacccatggggaatgctgcactcaggtcatatctggctaatagcccccaagtcgatcctgcaaggaaatgatttcttaccagggaaatttgctttcattcccccaaagcagttaaaaaaaaattcaactttcacctgtgaattgtcagacatcttaaaaaattttttttccttctcttacatgtcctgtccctttactctcattcagtttattctcccactgaaactcagagggaggtgtcaacatccaggagtgatttctaattgcagtgaagccttatcgcatgcccactcctgaacacaggcttccttccttggtaaaaaacatttacctggacttccagttctgtttcatcataattacagcataaatcagctgttagatatgaagggagttattaacctttgggttttgagtcaagggaaaggattgccactgcaaaagtactcggaccatcaggaaagctgtaaacaagaagtacagagtcataaacagatctcccaaagaggatgaaacttgccaggctcatgatgaccccagcagttaaggactaggatgaccaggtcatttagaaatgggtcagaaaaacactgggtagataaaatgggtgaagggggtcaaaacgtatgaacttccaagtggtaaaataaatgagtcagaaggatgtattttatagcataattaataatactgtattgcatatttgaaaattgctaagagaacagatcttaaaagtcctcaacataagaaaaaaaatttttaactatgtatggtgacagatgttaactagatattgtggtgatcattttgcagtgtatacaaatactgagtaattatgatgtgcacctaaaactaatatagtgatatatgttagctgtgcttcaatttaaaaaagccataaaatatggcaacacacgctaagtcacttcagtcgtgtccgactctgtgaccctacggaccgtactccaccaggctcctctgtccagggattctccaggcaagaatactggagtttccatgccctactccaaaggatcttcccaacccaggaatcaaacccgcatctctg

SEQ ID NO: 55924 - DNA, 1641 bp, Bovine  19866881144910
  misc_feature (1)..(1): n is a, c, g, or t
naacggcaacccagtccaatattcccgcctggagaatcccagggagggggaacctgttcagctgccgtctatggggttgcacagagtcagagacgactgaagtgacttagcagcagtctacccacatcccaggcacaggtttgtgaaagacccagaactaatgaggttttaactttgttctctcttgctcttcattcaaggcacaattcaatcacgaagacaactcaacctgtcaaacccagacttcaatatccaacaacttcaaaaacaggaacagttgactggcattggtcgaattaaaccagagttatataagcagaggtcattggataacgatgacgggagaaggagtaacagtaaatcctgtgggaaactgaacttcattttaaaatatgactgtgacttagagcagctcatagtgaagatccactaaagctgtcaacttgcccgccaaggacttttctgggacttcagatccttacgtcaagatctatttgcttcctgatcggaagacaaaacaccaggactaaagttcacagaaagaccctgaacccggtgtttgatgaggtgtttttatttccagttccctacaatgaccttgcagccaggaagcttcacttctctgtctatgactttgacaggttctctcgccatgacttaattggccaagtggtggtggatcacttcttagacttggctgattttcccagggagtgcatcctgtggaaggatatcgaatatgtcaccaacgtgagtctaacatttcttcatttgggatgagggtggggaggggggagcttcttggtcagcatgcaaacagattacttataccttattttatttgaagggtagagtacaaaatttatctcactgtacttaaaactattgcttcaaatctccttcagttaagtttagtcactcagtcgtgtccagttctttgcgaccccgttgactgcagcgtgccagacttccctgtccttcaccagctcctggagctcaaaatcatgtccattgagtcggtgatgccatctaaccatcccatcctctgttgtccccttcttcctcctgccttcaatctttcccagcatcagagccttttctaatgagtcagttctcatcaggtggccaaagtattggagtttcagcttcagcatcagtccttccgatgagtattcaggactgatttcctttatgattgactggattgatctccttgcagtccaagggactcttaggagtcttctccaacaccacagttcaaaagcatcaattcttttgtgctcagctttctttatgatccaactctcacatccatacacaactactggaaacaccatagctttgactagatggacctttgttgacgaagtaatgtctctgctttataaatatgctgtctaggttggtcataacttttcttccaaggagtgtcttttaatttcacacctgcagtcaccatctgcagtgattttggagcccaagaaaataaagtctgtcactctttccattgtttccccatctatttgccatgaagggatgggaccagatgccatgatcttagttttttgaatattgagctttaagccaactttttcactctcctctttcactttcatcaagaggctctttagttcttctttg

SEQ ID NO: 55925 - DNA, 708 bp, Bovine  19866881192677
  misc_feature (1)..(1): n is a, c, g, or t
naaatgccattggtagaagcatccattgatcctaactccatgctgctgctttagaggccatttgtgtgtggattactggaggcttctctgggaggaatctaatccccataggtttggtttgagaggatccactctgcagctgataaagattaaaattgcagctcttttccattacattggttttttgatcttttaatttttgtattattttacacttcagtggctcaatcacagctgtctttcccagtgtctcagtatgtgggaactgggaagttaaattggacagattcacaaaacaaaggttttatagcatatgctagtacagtaaaaggtgatgttttaaggtatgggcagtcatcagatttaatccagggaagcacatggagaggagtaggtattaaatagtgcccttacaataatgcgacttagagcacagtggaatgtcagagaagggtcagaattggctgttatactgtttgattcttttaaagaaaatttaaaaaaattattgatgtatagttgattaacaatattgtcttagtttctggtgtacagcaaagggattcagttatatatgtgtgtgtgtatgtgtgtacacgtatatatacacacccacatgggcttccctggtggctcagtggtaaagaatccacctgtgatgcaggagacacaggagaccccggtttaatccctgggtgaggaagatcc

SEQ ID NO: 55926 - DNA, 1135 bp, Bovine  19866881309159
  misc_feature (1)..(1): n is a, c, g, or t
ntatatatatatttctgaaaatatatatttcagaatgctgcctctagattttgttattcattgaaatgttaaggaaatttcctcccttgcttattttctaagaagactttcttaaggaatagatattaaattttgttgaataattttatagcatctgcaggaacaattatgttgcttttctcctctgacctattactaatggacaatattaataaatttactattaataagtgaatcttatattctcagattaaaaactacatactattttgggaatattatgtttctaataaagtagtgtattgttttcattggtttatttaagattttttacatttatctctgaagtgtcattgtggtaatggtgacagggacccacgttccctatattctagggtcctcttaccaggaatcgtttttttaatgggattggctagcatgttatgatgtaagttctataagagcagagagccttgttttgttttttgttttgttttattttaattgaaatgtagttgatctacaatgttgtgttaattttgctgtacaggaaaatgattcagttgtacatatatatgtaatcttttttactttctttttcattatggtttatcacaggatattgaatatagttccctgtatatacagtaggagcttgctgcttatccattctgtatttactagtttgcacctgcaaaccccagattcccactccttccctttcccacccacctccccttggcccccacaagtctgttctctctgtctgtgagtctgtttctgtttcatagatgagttcatttgtgtcatattttagattccacataggagtgatatcatatggtatttgcctttctctttttgacttgcttcacttaatacggttatctctatttatatcaatgttgctgcaaatggtattatttcattcttttttatggctgagcagtattccattgcttatatgtggcacatcttctttatccattcatccattgatggacttttaggttgtttccatatcttggctattgtgaatggttttgctatgaacatgagggtgcatgtatgtctttgaattatacttttgccagttatatgcccaggagtgggattgctgcatcatatggtaatc

SEQ ID NO: 55927 - DNA, 1644 bp, Bovine  19866881346256
  misc_feature (1)..(1): n is a, c, g, or t
ntaagtgctattattatctctatcttaaaagtaaggaggctgaagcctggagagattaagtcacttgcccaaagtgacacagccagtaagcaggagaaatggcactcaaacccaggcagtctagaacctagagtttgctttgcaaactgcaaaaccacatcatctgactgaccaggccctgttgcaggcagattctagaaatagacttgtaatgtgaatattatataaaatcacagattaaaaatagactagaacactgcaattatgtatttgaagactgattaatttttaggattataacatgacaaatataaggatggaaaacattgagagtaccttgtaacagcctatggctataataaaaaaaagtactgatcagagcaaggaggcttcagtgctttctgtctctattcttttatgctatcaacttgatatctctggatacattgctccaccatctgtctacatatgccatcagctatgttgaatcctggaaactgaattccctaaaagtatgcagaaagagacttattaatgaggagaccactgtatggggttggaagggggaggagtgcaaggacagtggctcttctgcagctgttggcaggtgaaagccctggactgctaggcattctcatttaaggccccctctgtactctgattagtggctttccttgggatctactggatttttgaccaatattcctatgtaactttgtgttttcatgggatgtcattgggaggggaggaaagacaagtcaggggttgtctcactaggctccaccaaagcctttgtctcttctaaaacatatttatatacatatcttaagaagccagtggaatcatggaaatggatggtttgttataatatcccatggcttactgctctgtatgatgatgcatccttgaacatatcgttgtatttcctaactctgacttgattaaacatttgattccatgcagaatcccaaatcaatctttgcccaaacaatcaactatttgtgacacacatttgattatttttctaactgaattaattatctgtcgttgcataacaaattaccctccaaactcaccaacttacaacacacatttagtttttcacagtctctatggttcaggaatccaggtattagttaggttctggcataagacttctcatgaagttgtagtcaagccataaatcagggttacgttctcatctgaaagcttaacggaagaatctccttccaagcacactcatgttgctgtttgcacacttcagttccttgtaagctgttgaactgagagccttagtttcttgttgactattggctggagacctccctcaattccttgccaggtgggtctccccactgggcagtttacaacactgcagcttgcctgcctcaggatgagtaacagagaatgcctaaaatgaaatccacagtcctttcataacctaatcttggatgtgacattccatcaccttctagctgcattttattcactagaagttaaccactaagttaagcccacaatcaaggggagggatgatacaaggaagtggggtcaccggggccctcctagaggctgttcactgtacctattaggacagatgagaatcatttgtagtcaagtacttgtaaactgatgctctccaaa

SEQ ID NO: 55928 - DNA, 893 bp, Bovine  19866881370160
  misc_feature (1)..(1): n is a, c, g, or t
nattgtaggcatcactttgaactttgcaacaagtgtttagttctatgctctctacttctttgcatcaaaacacaaagatatttgcttaccatttaattttccctgagatctagtcacatgattgatacagttgcactaatttctattctgggaaggatgtgtggcagagaaataagttaagtctaaaggacccaaactgaactatatcctggagactaagaacctatgaagtaataacttccactaaatgggtaacaattccaaaagtatctatcttaacatagcttgtgttctcaaatcttgtttttatatcagctgttttgacaacagactatatttccctttagaagcaattctatatcagtttgatgtaaggaattgttaggtgatacagactaacttggcccagtgcattcattcattaaaccacgatatgctgtgaatctatgttctagggacgactatggcactagagatgaaacacggctatagtttggtccctcctatctgagggcctctgctttgggtcttctatctgtatcccctttactaagcatgcgcttggccaataatgctcagaaatcaggtaattgaatattgcaagagtgttgaatgctcaaggaaaacaatgctatctctgtgtagcaagccggcttgcctgttaatagagagactacgctgagcaaaatccaatgaggtttaaaaatgcagtgtgtcctgggtatgtggcaggaaaaatagctagaaaagtgacttggggtcggataaggaagccataaatcaagcagagatgagattgttcttattaatgttttatttggtcatttattatttcaatggtgaattgaaatctttcatcatattgacccatctagaaccatccagaaaactaa

SEQ ID NO: 55929 - DNA, 2713 bp, Bovine  19866881576446
  misc_feature (1)..(1): n is a, c, g, or t
ntttgtattaaaattatactatatccttagaatatatagttgcagaactttgagaaaaatgtaatcttttcatatcagtatcttagaaatacaattctgataaaatgaaaaaagaattgcaaataggtaaacaaaataggaaactattaacaataacctaagtaaaaataataattactgaactaaagaattagcagggataatgaatattaaagagagaagtacaagaactgatgtctctgcagatgtggtagagagagagaggaggaattcaggtaattccttggtttctaggaggtgaatgtattgagtttaagatgcctaagcaattatcttgaggaggatttcaagtggctggttgggatgcacagctatagcgcacaggatatttacaaagtgaaaaacacagctgttatttgcctgaatatacataaaacttgaaactgtaattgcataggtatgactgcccaggaacatcttgcaaagaaagcagttcaagaaaggccatattcttgggatacaaaaaataatatgagagggcagagaaagaagacccttcttccttcaaaatagaggtcggtgctacagaagaaccaaaatatggtgtaattacagaaaccaagtgtgagagcttcaaaaattgaataaaacagaaaatgtgctatagacaagtgcaataagataacgactagaaaataactggtgttaaactttcttctggcttctagttttctttaacagtttctgttcccaaattgggtagaattattctcagtgaattattaaaaagtaaaatgcatacttataagtgatgattatcctatgccttaaattcacaaaataatatataacagacttatttctgctataagcatttgactattttgtttttatatgtttataccatacaatacacacttgtttaagaatttatgtataaatttactccttttttttttttttttttttactaggaagcatcttgggtctgtacccactacagtattttgcctattgtgatttcttatcaaatatttattggatttatttaattaaatctaagacataatttggagcacctaaaagataatcaacagatgtttactgaatgaaaaaaatcagtgaattaattagcttaacattttaatccacagagactgaatacttcactttcctcctttcaaagacatagtgctgtaccatatagccggggaacactgctgaagctagaagcaaagtggcatgattgaatgaagtgataaacgttaacaatcactctgtgctagtcactgggacaagcatgttacaaacacctctccatctactagaatctgcacctttattcattctcttctttctctcacatagatgagtatttcctatgcttatctaaggccatctgctccccttacagaaaaagcacctatacatgctacatacagttcttctctttctattcttcctcaaactcagactctgcctctaccactccactaaaattactctttccaagatcaataatgacttcattgttgctaaatgcagtaatacaaagtttaattccatattttaaatccatttgatccgaatttaactctacatcctcatgttacttgactgacctcagcagtattggacacttggcttccaatgctactttggtctcctggtttctctccagcactactgactactgcttaacatcctatgttgattcttcctccagtcttaacttcataatgctggagtacttcagggctcagaccagactgcttttctctatttacactctctcccttggtgacttgtctcatggctttaaatatcatctataaaaggacaactcctaaatttatgtctctcccttgaactccagactcatatatccaattgctttctcaacatctacacttgactgttgaataagcacctcaaatttattgtgtctaaaactgagcttctgcctttgcccagacacattctgcttcactgtactctttctagccattccagctaatggcctctttctcattacttaagccaaaaacttctcagtcatcatttatcctccttttccctctcatatttcacatctttcaccaagaagtcctttgagctctgtgttaaagatgtatctggactttgaccacttctctccacattcacttttataatcctctctcatatggatgagttttctaactgttctcactgcttctacctttgttcccccattgttcattctcaacttaatagccaatgtatacctattaaaatttagatgagatcatgtcaccctccacacaaaaaatctccaatggtctttcatctcattcaaattaaagtgaagagccttacaagggctaacatcacccacatgatctaggccttggctagctctctaatttcatctcctaccttccctcctatccactcctttccagccacaccagtttccttgccattcctggaatatgcttcgggttccttgaccttaagagcattgtaaaggctggttcccatacctggcgcattctccctgcaggtgtttgtctggtttagcccagtgcatttcccagactctgctgaaacattcctttctccaccttacaactcacagtctctctcaaccttctctgtgtctccacagcacttctagtgtactgcaatcattactgttcactagaaatgcaagtttctttagggcagggag

SEQ ID NO: 55930 - DNA, 816 bp, Bovine  19866881949451
  misc_feature (1)..(1): n is a, c, g, or t
nagttcagagaaggctttccataaaacgggagtaagccaagtcctacttataacctctttctcttacacaaaggcagaacccaggtcacttggcatgtggtcaagacttcacccaggaggaagggaaagccagggcttctgcatatggcctccaagctgcatagggcataacttgcccaattgtacatggaggccctgggaaagactggcatgttccaaggcctctcaggccagctttgccaccatttatattttgtgaccctgggtaagtcattgctcctgtatggtcttcctcatctgtcataaagggtctgctgggcaaagtccttatatcctgtggttcttgtggacttgccaaatgaccttgagctcacagcaatgtttctctagagctaaagccattgtaataattcctattagtgaccagaagtcaattgttgctctctacctggaagctatgttttagggccattcctggttttcattcttggagctgacatgaggttgtcttagctcatggaaaaacattgcctcctaatgcaaactgccctgggtcgggaatatccccaggagtagggcatggcaactcactctaatactcttgccaggagaatcccacggacagaggagcctggagggctacagtccatagggtcataaaaagtcagacacaactgaagtgacttatcatgtattcagtgcaaactgcaaggattattaaggggtattaacttgggtctgcagggaccataccattattaaggtactgagccaggtaaacagatcactccaaggcctaactctaagaagtccatc

SEQ ID NO: 55931 - DNA, 3550 bp, Bovine  19866880144006
  misc_feature (1)..(1): n is a, c, g, or t
ncctccctgtcctaccactcccggagttacccagactcgtgtccatcaagtcggtgatgccatccagccatctcatcctctgtcgtccccttctcctcctgcccccaatccctcccagcatcagggtcttttccaatgagtcaactcttcacatgaggtggccaaagtactggagtttcagctttagcatcagtccttccaatgaacacccaggactgatctccttgcagtccaagggactctcaagaatcttctccacaccacagtgcaaaagcatcagttcctcagcgctcagctttcttcactgtccaactctcacatccatacatgaccactggaaaaaccacagccttgactagacggacctttgttggcaaagtaatgtctctgcttttgaatatgccatctaggttggtcataactttccttccaaggagtaagcgtcttttaatttcatggctgcagtcaccatctgcagtgattttggagcccaaaaaataaagtctgacactatttccactgttttccccatctatttgccatgaagtgatgggaccagatgccatgatcttacttttctgaaggttgagctttaagccaactttttcactctcctctttcactttcatcaagaggctttttagttcctcttcactttctgccacaagggtggtgccatctgcatatctgagttacatttacacaatactgaagtctattaagtgtgcaatagcattatgtctaaaaaaacaaatatatgcaccttaattaaaagtatttaattgcaggcttccctcatggctcagtggtaaagaatccaccagtcagtgcaggagacacaggtttgcctcctgatccaggaagttcccatatgctgtggagcaaccaagcctgtgtgcataactattgagcctgtgctctagagcccgggaggcaaaattctgagtgcatgtgctgcagctactgaagtctacatgccctggagcctgtgctctgcctcagcagaagccacctcaatgagcagcctgccaagcacagagaagagtagtccctgctgccacaactggagaaaagctcacacagcaatgaaacccagcagagccataaataaataagtaaaatttaagaaaatatttaaatagttttatataaaatattaaaaatattttattgctacaaaatgctgtcacctgagctttcagtgagtcgtaatctttttgctggtggagagtttgaaatactgtaagaattacaatactaactgcaattagtatctacatattaattacagctattacacagatgtgtttttccagagcttacagcctttttcccaggctctcttctctgcctgggagtccttccatatttccccacttggagagctcctaaacgctcagggccctttaacaagcaaactccaaggcacatggtgaacaaacgctgttggaataatggtgtcaacagacttgctcaatgcagggttgccacaaacctccagtttgtaaaaaatgcaatatctgggaagcacaataaagtaaggtatgcccgtatgtgacaggcatgatgctaagagtttaaatacattatagcatttcaccgtcataactacataatgaagacagtattcatatcgagttttatagatggggaagcagaatcaacaaggtcagctagttaggcctactttccacagtaagctgggggcaggcccaggttcccttccaggtctttgccctacaccctggagggcagtgcaccactcaaactgctcttgtgcaagcctggcatccatctctcaggcaaagtcaggacttgggagcatgacccaagaatggcaaaaaaaaaaaatacagactctgcagacaaatgtaatactgacattgttacccctcatgcagtcattccctatttgctagaaacacaggacagtttagctaaggtacactgtagctgagaccttgatcaatatattgatattgtgtaacattaaaggcaaaaccgatatgtggaaaggagttaaccgaaagcctcaaacctgacactggcatcagaacaccaatactgagcacattgcgagtgtactgacgggatcactacaaagaactttatttttgctctgcaaaagcaggtgtactttaagatgctgacacttattacataggcactggaaatgtgtctggagttctccttagcccagagaccaagttctagaacccaaggctctgtgctgctagggaaagatgagcatccatgagcaggccaaccagcctctctggccaccagttactcttctctgcgctgccggtggctcacgtgggactcctccttaatagtcttctagtgccacatgccggagaaggcaatggcaccccactccagttttcttgcttggaaaatcccatggatggaggagcctggtaggccgaagtccatggggtcgctgagggtcggacacgactgagaggcttcactttcacttttcactttcatgcattggagaaggaaatggcaacccactccagtgttcttgcctggagaatcccagggacaggagagcctggtgggctgccatctatggggtcgcatagagtcggacacgactgaagccacttggcagcagcagcagcagcagtagtgtgcagctggggaggagggtttcgtatgtgcttttatatccctcttcgaggacccacacctgtcccagttgctgagttccaccaccgagttcctattctgggaacacttgagcacatcagaaaaatgagtggttccattctggctcacatcacatcactgatgcaccccttaaagcatgtccctgagttcattgcagaaaattgttcctccttgtaccttccacagcaaggttagaactgttcccctcaggggaaaaaacagtgagaagcaccaacttaataacctcctctgacccctactccacctttaccataagtagatccaaatccttctagaaaatcagaaagacagatccccgtgtatcagcggtataaatagaaccgctctgcagactctggtggacggtgactctccaaggtggattgggaatcagctggccttggctgggcatcaccctctaaatataacgatgagtttgttcagcctttgcagaagggaaaggttttgcccatcctagagcgcgatgcccttgtcctctttacagggaggagagacggttgaggcttcatctagtaagagcacctctcagttcccaccctagggctatgacacttgcctttcctccccaggactgggaagtcggtgagccccgccaaggatgcgggagtagggtgctcagctcggcctgccatactccagagccggccagttagtcactcaacttcactcccttcatgagctcccgagcccacaacacgtccccgagacgggcagctctgggtgtcctggctcagtgccagaggctgcgagagccgctgcggggcctgtgccgggagcccagcgcctcctccccggactctccacagttgtcctcgcgacagctgcgcgcccgccggccgccggtgaccct

SEQ ID NO: 55932 - DNA, 1620 bp, Bovine  19866880554205
  misc_feature (1)..(1): n is a, c, g, or t
ncctcagggcctttgcacatgttctttcctctgcctgaaatgctcttgtcccagacatctcccctgcttatacctccaagaaccttccatgtttctgcttatatgtcacctcactttcaggccctcactttcagatataaaaagtgattcctccccctccccagtccttcacacagctcctactttgccccctgccacaactgcagcatttaccctgtgcatgaattattagtattaatatagtgtctgctgtcctctaggctgtaaactctgtaaaggaaggggatgtattcatcttatttcctgttctatcctcatacctagaatagtagtggtcacatagcttcaataattaaaaagctgttgaatgaggaatgactggaataaaactcagaagctctttattaatttggattaatttaatataatgaacttaattttaaacttgttcatttatgggaaatttaaaagtcagtgttttatatgccaccatgtaattatggaaagattgcaagaaagccatttgaaagtatcatctaatactatttattgaggacttaagcatcagatgtagtgctaagtgctttacatgtattataaagcccaatcctcacaacaaactcataaggtaggtatcatcgcattttgcaggtcaggaattaaaggtccaaatggatatatattttgccccagttctcactgccagtatgtagcaatgttgggatttttcttgaaagccaaactaaactagacatgtcttccttttatctataatctgggtaagaggaaaaaatgcagtataaaagccatcaaaaacacagaagcatgacttgaaaaggcattaaattgtttcaagtaggggaacctaagaaaacaatgctccatgtggggggctgtctgtctcttctcttgacccccacaacacctgcccaggtagctcttgtcaccctcctttgcagccaaggatgtgccaatccaggtttgcttgggcaacaccatgttgaatgtatggagatgtgagagggagagagtttatgggagcacttctgattgtgagacagaataggcactgaagactgagctcaaggctttggactttccctaaaagcacgcagacttgttgacctgaccaggatatacggcaaatgctctatatgagtacacatggacagtgttcagttgaggatggagctgtgggtacaattcagtgacgtggtcattccccaccttcatcttttaatttgacacttacaagtgaatcttccattagttctaatggtagtgcttttctgcttatttctgtatttaataacacttatattcagggattattcatgaattcttctaattttttttttcagaagaagattttctggttcctctttttattatattttctgtatcagattaactatgtgcctgaactacagaacttttttttctttccatttttctgattaaaataccatggaattatacttattctatttttctatttcttttctgtgtgtgcgtgtgtgtgtgtgtgtgtgtgttgttggttaggggcttccctggtggctctagcgataaagaacctgcctgccaatgcaggagacataagaaatacaggttccatcc

SEQ ID NO: 55933 - DNA, 2189 bp, Bovine  19866880593318
  misc_feature (1)..(1): n is a, c, g, or t
ncttttgtgtaattaagttttattaaagtataaaggagatagagaaagcttctgacataggcatcagaagggggcagaaagagtacccgcttgctagtgttaacaatgaagttatataatccaaagaatgtctggaggttgtaaagacctcatcagacctactcccataatgtacattttaagataacactgtcctcaggcaggatacatccttgtaaagaccaggtctactcccataatttacattttaagataacagaaggcttaatccagagactgtccttgggcaggatacattattgttatataatcctaagggcctggcgtgctgcaattcatggggtcgcaaagagtcaggacacgactgagagactgatctgatgtgatctgaatcctaaggaatgtggagaaataaaaaaagtttgtccttccttcctccttgagaattccagacccctctctccttgggaacccctagacttcttatcaacctgcctaggaactgactttctcaagggtgagctgcagattttgaggagaaagttctcctcctattaggatgtggggggtccttggaggaaggatccaaatctagattgaggcaaagaaagtgatattaaagatggtcttaggagccagtgggcatgactgctcggggtctgataggaagatagagttgcaggggtggaaaaagagtttctatcaccccagggtcctgcctctctgagcacatggtctgggaatgtggctgacctgacataaagtgccagtggcccttttggagctcccattggaatgccggtgctgggagggtgagagccctgctggcttgttttctgttgtgtccccagagcccagcccagagactggcacctggtgagtccttctcaaattattgaataaatgagagtattacttgaggaaatagtgtaatgccacatgatcacaaattcagttttgtttttttttttaatttaaggacttgcattttataatcacaatagcatgtagatttatctggaatatttttgggtgaacatgtgtaggctagttccagaggccaccctacttacaaaaggttcggtctcaaaggctgtctgtaggtctctttgtccaaaatgggattacacaagcaacagtggtggtggagatgatgcatttttgctgatattaacatgtaacaaatttggtgttcttaccacataccagcattcacgctggtgctttatatgtgttacttcctccaacccaacaacagtcagaaggcgctgtaataacacccattttacagctaagaaaactgaagctcggggaggtaagtggtgcagccacttatctgctggtaagcccacagggtcagaattggaatagcagcagctagtctggagacttaatcactacacactgctttcgtttatcatttcagtttctgaactgaaaagctgtgatggaatatttcccattttgatttgtttattggccatgcttggtgctcagatggggcctgtgtgtagatacagtttgtcctagcttaacccccaaaacacagtccttgtggctgtttattcattttcaatccaacatgtgaagcaaacttatctacaagtccattagaatggaacttcccccaacctgggcttcaggacagcatttagggtcaagtttcctaattagagctcctcttccaaatttctctgctcaaactagagctcagaatgtaagctcccacacctggggcctagggtacccttctctgtgggtctatatagaacccccataataaatagtttccaaatgcacaacaggtcaagcacattggaagtttatttcaccttcaaatagttaagcccagtggtggttttggttgttagggggttctgctcctatagttattcagggattctgactcctttaagtttgtggttccaccactatctaggatgtgatcactgtctatacttggaagaagaggatcaagaaaagggaggagtaactgccatatcctaaaagccactcagattcccacggattagaatttgttcagttcagttcagttcagttcagttgctcagttgtgtctgacgctttgcgactccatgaatcgcagcatgccaggcctccctgtccatcaccaattcctggagttcactcagactcacgtccatcgagtcagtgatgccatccagcca

SEQ ID NO: 55934 - DNA, 1401 bp, Bovine  19866880678861
  misc_feature (1)..(1): n is a, c, g, or t
ncttaggacattggttttaaatgctctaacagaacgtgttaaatgagttaacagaagactgaattttacccattaacaaggtgacaccattccctgagagaggctgacagagtgaaacagaacacgtgaccaaggccccccagtcagcccatacccagagcagaccctggccctgctctgccctggccatggcccaggaggcctctcttcctacaaagcccaaggacatctgtgggtgtgagcataccacggcccccgctcgccaccgcagcctcccatcagggcacagagaggtcggtgtgcactgagggctgggctaggctggcggcccccgcccctcctcagacgatcctaaccagcccccacctcaggaacaagcaaacgagaagccaacaggtctacggcaactgggacagtgctgccctgatgagatcacgttagggatggactctggtctgctgacctctgacctggggacagcagggagtgaattctgcatgaagacactggccgggtttttggtcctgattagctggcctgcaaggctgacatccagctaaaacactgcaatgacatcatgggctgagccgctgtccaatcaggactcagggccccacaatggccaggaccacagagacctgggggacaacatccgccctcacggaatttcatgaggttccctataaattaagtcacctgcaattttaaaaggttggcaggtttaatctttcttaagtccactggtggtgctgaagatctgatactggagagcctacaaatagggatgaagctgtctacgttgacttctggggccaagacagaaagactcaatcagagaagagtgattcaaaactataaactagaacgacctccaaaataagtaaagaactaaagcatgaaacaatacatctagaagcctgctatttgtgtaaaaagcagggaaacaattgtgagtaactgctcacatgcacaaagggagacactagaaatgaacaccagggagggcttctaccagctcctggtgtagtaccctctgaaatgcatgcctgtttcaaaaaagggggtgggcagaaagtcacctggctgccacccagtgacctttcaccaaaagctctacagtacacaagtagctcaagagaaaacgtctcacctgcaaggacttttctcacagaatgaaacacggaggtacacacagaatccttctgaggatgtagttctgggaccaaaaagaacagagttaaaaactgcacggctgcctggaaaagatgggggatctcccactagggctggcaatttccaacaggatcttgagcatagatggtctgggtaaagggtggtgcaggcggacagccgctttgtctgtccctttcgaaacatctgtccattttgcctggagcgtag

SEQ ID NO: 55935 - DNA, 1363 bp, Bovine  19866880681303
  misc_feature (1)..(1): n is a, c, g, or t
naaataagtttctcttttttaattactcaaaagctcagttaaaacattcccacttaatttttacctcatggatattatagtgatgattttcctacttcgggttaccataattttctaaaattgaagttagattatggagtaaaacaaatttcaaatgcagaaagaatcaaaaagtaatcctacaggcctgtgctgagtaattttttgtaataatagaacttgatgtttcagataatctcagggatcctgggatccctcatttccggcatgtgataacacatttcgttttccaggacatgctccaagctgctagtcactatcgacaaaatagaaactccttgtatagaagagaagagtcaggagaaaaagaacctgagtatattccatggacaggtgagattgcaagcattgatcccaattttcagattcattagcagttgctcaaattatatatttttttcttttttgggggttgtgccggttctttgttgcacacaaggacacacgggcttttctctggttgtggctgcaggggccactctccgttgccatttactggctgctcgttgcagtggcttctcttgtcgtggagcacaggctctaggcacacaagcttctgtaggtgcagcatgtgggcttagtagttgtggtacatgggctgtcgctctgtggcatgtggaatcttcctagaccagggattgaacctgtgtccctccattagcaggtgaattcttaaccactaggatgtcccaaaatatatttctaatggtcagttatttttggaagtcatattattctcctagtacaagtttgtaaatgaaataaaaaataacataagtgacatctccaaaatgagcagatcttatgaaaaatcactttattcccttgaaataatttgcagctgtctctatagcttaattttttaactgatacttgtgcatctactaggttttagtatgtatagttattcatagaagcaggccctgaaagtagtgactatattttatgttgatttaacacacagaagtaagtggagtagcattaaaggaatttagaaggaagaagagtccggtttacttgattctgctgaggccatctccatagagaagatggttttgagcagtacatagacaagtgtctactgaccccctgtttgatttctttttccatcaaaggtgacaggatgtaatttttaggcagttggtcttccctgtagccattatggaacccttacttgtcctattattttgtgtgatttcacagcaaccagcggtcctgctggcatccgaacagcaataatgcgccagcataggactgtccgaagaggtttatcctcaggcagacagcaacctccgaaacgttc

SEQ ID NO: 55936 - DNA, 981 bp, Bovine  19866880830007
  misc_feature (1)..(1): n is a, c, g, or t
nctttcccagtgagccacgaccaatgtagtcctcttcaaagagccagggcagctgctggcggagaagagctgtctccctctgcgcagcggcacacaggatgctgccgcagcgtgcggtcaagcccaggaagaacgcagagtggagggactgcatttcggggaagagagggctgtggaggacggcctgggagatctttccaagtgtgatatctggttcctcctccactaagccttcctgggctttgctcactggtaaagttctcagcaggatgctggccaggtactgtaggtcatctggaccaagatatgatattaaaatcatgatattggacatgaccaagtgccagtgggcaatggggtaggtgtgcacactcactgtcccgacctggccatcccaggaagccgacatcccccgggtcacactcgctctcccagagcccaggatgtaggcggcatcacgcctcagagcacagagggcttcttcagactggaaactggcttgcagtaaggtgttcttcattctctgcaggtggagctgctccaagcagtaccgactgagggagtcggactgaaccgtgaactcctctatctcctcccaatgcttggcctcgacgccagggagtagcggaagggggcctgagggctctggggtggcgcccgccaaggtcccgggctcagagcggtatgggctgcagctcaagcgcagcacggtgtccacctgggcccaggtgtgggcaagcagaagcgcagagtcgccaaccttctgctgccagagctcaggcgttgagggccagggcttgcgaagaaggtccagcaggggcttcacgaggccctgcagcatcccgtccatggcctgccgcatgcgcctgaccacaggcaggggtgagccagcatccaggctccgcgcgttgaccatgacacagcacagcagcgagctcagcgacagggacttcagggccatgtcctcgtcacccctcaagc

SEQ ID NO: 55937 - DNA, 1094 bp, Bovine  19866880990194
  misc_feature (1)..(1): n is a, c, g, or t
ngaaatagcaacccactcaagtattcttgcctgggaaatcccaaggacagaggagcctggcaggctaaagtctgtggggtcacaaagagtcagacatgactgagcaagcactcaagcccacatataggggacttttccagaaatcttcaagacaagtagatagataatggcaatgctctggagatgggacattttgaggaacctcaaacctagtctggttcctctggtggctacaaggttggtgggtttcacaaccactgggattgtcaggctctagttatcaaggctgacatggaactggacatggtgggaggggatttcaaatgccacaagtctgttgcttttaccttcagcaatgtatcttggataaattctccttgaattgttgtaagcctttcattaatttacagaatctgaaagtttattttcccattgtttttgtggaggtccttgctatgctgtctgtaaatcctgcccctcttctatcattagacaggagccactgtattcgactgcactagaaagccctatctagacatgtttctcccccaaaaggtattttggaaaaatagctgaccaattaggtctttcagtttagttcagttcagtcgctcagtcatgtccaactctttgtgaccccatggactgcggcataccaggcttccctgtccgtcaccaactgctggtgaggtctttagtaaaaaatattctatggtcaaacaaattcagaactatcttttgctttcattcttggagagccccaatgtatgccagcattttcaaggtcgtgagaagtactactctaagaaacctgcttaattttgtttacaaagggttttctaaacccatttccctgcataacacctttgtttttaattacttcttagtgatcctcagactacaccatgcatgtgtatgcgtatgtgtgtgctaagtcgtttcagtcatgtctgaaccaatcttaaatatgaattccaaacttagtttctggcactattttttggaactaatgcagttgggtgtctaatgagagtggccaaatacttacaaaatacaacagggacattttgggccttaatttctgctttttaata

SEQ ID NO: 55938 - DNA, 648 bp, Bovine  19866881044751
  misc_feature (1)..(1): n is a, c, g, or t
ntttatatttgcagaaatacctggttataaggacaaaattctattttgtctgctaagagaataatatattaagcatgtagttatgagttgaataattgtgattatcttctaaatatggcttcatgttttgtttgatgttgattttagagctgatgtttctggaaacgagtgcactaacaggggagaacgtggaagaggcctttgtacagtgtgcaagaaaaatacttaacaaaattgaatcaggtaagaacttcccattaataaactttcctttagcacattctcctctctagctcagtagtgtcacttttcagtatttccaggagtgatttggtcatggagtttcctctctctacctgccgacctgcagtggcctcttaggggtttgaaggtcttgtctgcactggaggtggaagcccaggcctccttcgcagggacttcttcagctgtgtggtggcagggaagcagctgtgtgacgggaaatgagttatgggcacctcgcttaatgctgctggttacagatcaggcatcgtggaaaatttgtttctgaagctgactgagcatgtcacagtaataacctgtctcattattgttctacttgttgcttcagtaaaaataagtttaaaacaaccctactataggcagcga

SEQ ID NO: 55939 - DNA, 2767 bp, Bovine  19866881077767
  misc_feature (1)..(1): n is a, c, g, or t
ncctagtgtccagcagcagagggcacttcttgaggcacgaaggtcctaaagacagacattctgtcctttgtgtggcttatgatttaattggagagaagagagaacacacgtgtgacatatatggacagggcagtgttggcccaggtcagggagtcctagactctgaggaagaagttcaagggcacagcagtcaggacaagcgcaggtgagaagatgccagagctactggggtcctgggaatgcatcctgcctggccactccatcaactcaagtcgtccactgcctcttagtttcagcttttgatgagaaaataatacactgcgtccctggaaaaaggggatgcttaaaacacataatactctcaccgtgacttggtattccacagcatgtttccattggtgtcagcacatgctctgagttgggctggatggggagacacactttccaaagggggatgtgtggggagagagcaaattagccaagatggcgttttcaggctctcttcccccatgttttgtaaataatgactatgcagcagatcatttatagcactgcacattgcatcacgaggtactctcttggacacgggctacttttgtgacatgagctccacccagaaaacagcagcacttactgcagcatcacagctgtgatgggtcagccacgagaggaaagcacatagggtgtctactgctacagctgctgtgtcagccaggaaagaataaatgtgtctgcagttcctacagctccttgagtcttcttccagcctcctagttggtgcctggcctaacctgggttcagtgaacagtgtgaacagcaaaacaattggcgtcaggagcaggagcagcaagacaggatggctgtggtttagagtgatgtacagttcccggactcctgggcatgtccgtcacaccacatcgcaactggttctgcatctgaccagccctgggtcctcagcagccccgagatgccgagtggtggaactcaccatggtatccctgagaaggtgggtggagtgaggtttctgggccagagcaccccctccatctttacctcaggggcattctagaagaccaatcagaattcttggagaacttaaaacatgtctccctcatacctgctgtgccagctcctccctcccgaaggagaaggaacgttcctctgaaaaacactagcaacccttggcaggagcagcccagaggaggcagctcacggccatcagtcgtcatcatcattcttacaacccttactccatcatctcgaggaaaaggtctgtatgttttgtaccatctgactggcggatccatttaaaacaactgtcgaaacaagactaaaaggaaaatgctcattttattttaacagaatcagaaaaccacagacttctcaagtttgaaatgagctgggctgctgattttaatattaaaatttggactgccaagagttgggtagggctggcatctgctgtgatactgaggggcccccagtgggtctgcccaggggttgtaatgatgtgacaggagtttctgactttattctcacacaaccaactacctttgacttctcacaccaagcatttgggttaatggtggttaagggaagcagcgtgacctaaattagacacacccaggccagcacacctggagaaggcaatggtaccccactccagtacttttgcctggaaaatcccatggacagaggagcctggtaggctgcagtccatggggtcgtgaagagtcagacacgaccgagtgacttcactttcaattttcactttcatgcattggagaaagaaatggcaacccactccagtattcttgcctggagaatcccagggatgggggagcctggtgggctgccatctatggggtcgcacagagtcggacacgactgaagcaacttagcagcagcagcaggccagaacaacaacggacaggaaatcagaacagttaggaagaaagggggagattacaagtaatgcaatgagttcttcatgatccaacactaaattttctcagcaacttttattccaaggaatcagggtagaagtcttcaaaacaagtggaggttccacttcagagcagtgaaacggcaaaaccaaggcacggagagggtagagctgtgttcaaagccacaaagaaagatgcatttgggtgggtcttacattgggtgggaccctctttggtaatttcagtaactcgctcattggaggattatcagtctgggttgttgcagagatttatcacaggttcctgggtaactcacagaacccctaggagggtcagagaatcatgccacagggccacacacaacagtgtccacttcaaaagtgaaaagtcccttttgaacctttaagggaataaaagtagattgaactttgaaggcaggcaatgcaaccttctaaaacattgccaatataaactcttccagggaaatcagactagacacctgagcccctggttgccctccttgtgggaactctgagtaacaagctcttgctccaatggcaatctgctctggattttcatgactcaagttttccattcatacactgtgttttcaaacacctgcagcttgaattctggatggagagatgaatcaggagtatatgaagataactaagaataaagggaaatgaggacttcgttgtggtccaatggttaagaatccgagttccaatgcaggggatttgtgtttgatccctggtagaggaaccaagatcccacatgctgtgaggcaaccaaaccagcacatcccaactagacaaagc

SEQ ID NO: 55940 - DNA, 1396 bp, Bovine  19866881248565
  misc_feature (1)..(1): n is a, c, g, or t
ncatagtcattgtggaatagtgtccaggcatctgtcccttcccaggactcagcagccaggccaggcctgggcaccggggtgcctctgtgcccaccagggcagtgcagtcccaatttcaaaaactaactctccttgtagagtcatggcattaattgccccagtaaacataaacatgccctagtgttaccagggaaagaaagcagtgaagcctccatcagccatgaactagtttatagaacagaaaccagctcctgggaggcagtgggtgcgggtggggatggctgagcatctggagctcagagacaggtggcagaacagcaagaaaaggcgctgatagctcccgaggccccttctcaatctgccagcaggagctggtcagcctgtcctctcaagtgggctggaggacccccgacaaagtgcaagttccgggacacgttcccttcacagacaggctgggccccaccctccgaggatcgcccaggactgcaggagtcctgagacctaataatacacacaaatcagaacacgggctgcgggccctggccatgcaaggacagagggaaagctgacgcccagcctggcctgctggccttgccctaaagcagcagggcacccggccttggaaccaggcccccggctgtgccagcagcccctatatcgagagaatgagcctgctggggggaatggcaggcatgcggcccagctgtcactgaggcggcccagaaagccagctccccccacaccctccttcctgtccccaagctgcagcccagactgaacggtaatgaacttgtgaaatggcaaagcaggagcacagagtgcagagaggccacttagaagaggggaaaacagcaaacccattaaaggaaatggtagctttgtcctcaaagccgactctgactgaggggacgcaggagggtcatgcccctttaatccttcctcataaggaccctgactgtttccagggctgtcccaggcttgtgcaccatcctcaccaccacattcccccatgcatcccaggaaaaataaccagcttctatacacaacagcagcctgagactgtatcatcacctctcaaccttgactttccaatctgcaaaatggaaaacttctagctttcctctggggctggcagctccttgacacaggggcagggggcagggaagacctcccaaccacaggtcactatgggaagcgacccagcgctgggccagcggcccccaagagccagccccctaggaggagtggcagggctctgggggctcggccccgactcccgtggagtgcctgagattaacgagaccgtggccaggcacctgaagccaaggacagcctccaaggagctcaagacccgactgcctctccctgggggccatgccttgcccactgactgggg

SEQ ID NO: 55941 - DNA, 1161 bp, Bovine  19866881316858
  misc_feature (1)..(1): n is a, c, g, or t
nacacacacacacaccgcccacctccccccctccccaccaggatttcatacctgggtctctgaaaaaaggtgacagtgccattagaaataggtcaaaagaaaaatgagttttgtaagtcaataggagagaagagaacatgagcaatttttttctagatatgttaaggcttaggttcaaagaccatttaaagaagcagataatgatagcaatctgaaatcagagggaaaagcacagtttaataaaggatgtggtaccacagtatttaacagggctaatgcaaagggacctgctgcatagcacagggaactctgctcagtgttacgtggcagcctggttgcagggggagtctaggggagaacggatacatgtgtatgtatggctgagtccctttactgtccacctgaaattgccatagcactgttactcagctatactcctataaaataaaatgtttaaaaaaagctggggtcaggggaatgtgctcttagttcacacagatgtgtgggcatgcatctgtcgctgagcagctttgaactttgggcaattttggtaacctcactgaggccatttcctcaattatttaacacaaatgcgacatgaagctctatacattacagatcacaataattacaggagatcacacacacagggcacctggcagagcagatgcccccacatgttagttcccagcatcgtcactcactactccagagtctgaggcagagcccagcagacatcatccacacacacagctggaggctcgggggtggaaacacacttttggttacgtctagaaagcaaaactaatccttaaacacatgcataactttacatcatagttttaattcaaaaaatgaacttatgagataatctataaaacttaagaataattaatgttacagaggatgcaagagggtcagtatgaactcatctaatcatcataataagaatgcttcactgaaagatcaaagttttcatctcacggacaccactgctcatacagtggcaacgctaacttcataggagactgccaacttactgatttcactaagaaacaagctagtaaaacaaggttattttatcaacttacaatgagatcactactaggagataaaattcccagaagagaagaaaccttccgaccaattcctaaagcacac

SEQ ID NO: 55942 - DNA, 1609 bp, Bovine  19866881370661
  misc_feature (1)..(1): n is a, c, g, or t
ncctagtttctgtattgctgacaatgggtaagacagaactcaggggaatggctcttctggagaaacttttattcacagaagtcctgaatatggtgagactgacttgcctctgccctgctgcaggtgacctggaggaagcttcattgtgaatattctggaaaattagtgccaaagccacttgagtgactgttcattcattctgactccccttagatccatgaatcagcattgcgagccaagagcagaaggcaggtggagaagaggaggctggcggctcagaggcagcgggctcactctgctgatgtggagaaaaataggcgggtcaagcctgcctcctcagagaacccatggatgacagagtatatgagatgctactctgccagagcttgagggaaggaacagttgcttggacaacctctttttaaaagtgtaaatgaaagaaaagaacaagacaaaaactatcaaaagcaattggacacaggtttaagaaaccaactgattatgcaagatttttcttggggaatttccaaaagattgtctcttttgatgaatcctggtcacctacctcagcagtagggtgacaactgaagccatagaaatttggttatttatgaggagaattccctaaatctttgatattcttataagggttttgttttaaagcatcttaatcttttaagatactgacaccaaatgcctttaaatggctgacagatgcttaacttcagtatctatgctcagtttaggtgaagcctgttttcctcctgttctgaacagcttctcagattccatagctggtaaggtcacgccagcttgccacagaagattccctttccttatgtgtagtttgctttgaacatcaagttaaaagtgagtttcaacactacttttgattccatgtatagtgcaagtattgtagaacattggtagttcctaaacaattaaatgttttttgcgtttcagttcaagtaccacttcatgtggactgtgatatttaagaactatccgggctgggtgagggtcatcttttctctttaaattgtcatctaggcacttatattaatagtttagttcaagtgcattccagtaaatgaagtgtttagaagtagtactgaagtttcttttgagtcaaagagtcactttttaattgagattttttaaggacacttaatggggtaccagtcacttgctacagtctcgccttttggcagtcacccactgtggacttctgcctcttctagaagagtttagcaatgatacttacaatttaaaatctgaacttttacttagtaaattgagattgtcttgcttaccgggggtgggggacagattttaagctacctatgagagatgtgggtcacccctactttcctcctccacggaattaccaataacaaagccttgatgatgcacattgttcagacttttggttgaaatacatgcctcacaggttcctagctgataggttttgtgtagaagctaatgtgaggggatgccgctgtgtgtatgggcatagatgtgagcatttcaatgaagtgtttccttctctccagtacattgcttttggggtagaaagggttttagaaacatttttttccattcagcagag

SEQ ID NO: 55943 - DNA, 1655 bp, Bovine  19866881414979
  misc_feature (1)..(1): n is a, c, g, or t
ncccccgttacaaaggtctcgcaaataggaccgtgtgtaggtttcccagtacagcaggatggccagtgctgtgattctgtggccagatggtctcgactctggctatgacctctcaaacgctgtgtgaccctgggtaagatacataaccctcctgagcctcagtttccccagctgtgaaatggggctgataatagcacttcttattttcaagtgtaggtttttaccctttttccagtatgatgaggccagtagatcaggaaacaacttagcattggatagtttgttattcacagctcccaaaaggagggggcacattgtcccatgcaggggctcatggggaggcaccagggtcagtcaagagccagaaggagcaggaagagaatataggcaagagccattattgcggtttccccaggaaggaatggatgaggcagggtaagcagatttaagattggctgctttgactaacttcagtgggcacagagtctgagagctgtcttaagtaggacaggagggtaccagacctgaacgtgagagcttgatagagaagatgggggacagagctttggattggttagtttgcatatgaaaatcacccacttacagatcagccctttactgtctctagaaattggctggccctgagaggggcaaaccctccagggtcagctagaccccagatatcaaagcatcagaataaaaaggcttgcttaatacagcccctctgtaatcataataaatacaaagggcttagattagtgtccagcacagagtgaaaactcagtaagtgttattgtttatgatgacgatgactagacccatccagcaccttaacttgagaacttcctggcatctgactcaacagcccaacacctgggcatcaccacccctgcctgacccagatggatgaggttagcaggggagggagtatgctgagaggcaggcccctggaaatagctggtttgatacagtcttctattggctcagttagtaaagaatctacctgcaatgctgaagaccctggttcaatgcctgggtcaggaagatgccctggagaaggaaaaggctacccactccagtattctggtctggggaattccatggactgtatagcccatagggttgcaaagagtcagacatgactttcacttttcatcattaaaaaggatgaccaagtgctccgtattctttaaagcaaatgtacataaattaccttaggttagaggaaagatcatttcctagcgttgttacagatatttcctgagttggggaatcttctcagtgagttgagacctgtccccatggtccaactcagtgatagcccagcatcctctgacacccctacggcatccgccatggtcctcagtgccgcccacacctctcccagcatcccttcagcgtcagcccatctccccatccagcccatatgtgctgctcacaagcagtggtttcttcagtcattaccatatcatgatgtatgaaacagagatgataacatagttgatccctctagaataatcccagccttgagttgttctgatattcagcctcccagataaacattcttccactgcagttttatcatcattctcatttggcaggtaaggaaacctggattcagaagggaagcaacccacccagtgacatactcctag

SEQ ID NO: 55944 - DNA, 754 bp, Bovine  19866881516603
  misc_feature (1)..(1): n is a, c, g, or t
nactggtgtgtgttgcattttttgtagatgcaatgatgtgcttaataatgtacctttcattgaacatttgagttattttcatttttctccttaaagataaggttgctataaacatcctgggatacatcactctttattttttcttagctatgtccttaggcatatgcctgaagactcccttctataggtcccttcctcacatccaccctgtcactctactgtgacatgccatcagtgtgacaaatgtgatgagttggttttccttctgtatagttgatagcgtgcaactcaggctggcgtatacacagaagagaccttattggctcatacaactgaaagtccaagggcggggctggccacagtacttcaatgcagaggctcagagcacatcagctggccgtttttctaatctctttgttctgcattctccagcagttgattttgtcctctgctacatactccatggaactgtgaaggcaacagcagctgctaagctcacaccttcataaaatacagtagaagaaaatgtacctttcccacaagccccagcaaacatctttattcgtctcattggctccaaatgagttatataccatctctgaaccaattactgtggctcggggattgaggtggttggtgaaatacagtgatagaattaaattaagggtggctgggtgagtggtcaatctattcacatggtggaattggaagatgtttcctaaagaagatttggacttttgttgtcagaaagaag

SEQ ID NO: 55945 - DNA, 1367 bp, Bovine  19866881527360
  misc_feature (1)..(1): n is a, c, g, or t
nctgaatccatggccgtctccctgtgggctgcctctgcaggcccctcatccagggtttatctcaccttctctaaagacttgttttaagaggatgatgaacaggaaggcgctgcacaacagccccagagctcgagggggtcagaggtcagttctatccgggggtgaccctgctcttgactgggagaagtggctccatctctcccagttgcctcattcctaccggtctatcacagtggaggacgctggcattcactactgccctggggccaatgagtagccgacagtgatcgctgcttcttccactgagcctgactgctcggcccaggccacagctgccccaagcacgggcttccagtgaagcagctcatgaaggagatggttcgaagccaattagcatcagcgtcctccacccaatccccaaagccaagcaactcagaggcttttctatgcatgaaccctcttccttttctccctgcccccaaatgtcaaaatcactaaggaagacaattctggtggcctggccaggcccttcctgtctgcactcctgagcggcacacacttcctcctgctgtgtgtggtaacacatcacctgcagggagggaaacagtgggggcacattgtgtggtcaggtccccacctccagggacaccctggggcccccagcagcacccaataggaatctgtcctcactgcccaccctctgatggccccatccgtccctgtcatggtaaagatggtgtctagttcatgctcatccttcccaggtagggcaggaagctggtctcactgtcctaaatcacacatgtttaatcccagcaaagaaaagcaaacgcagttcagacccaccattgaaaggaagctcaggttctctctcgaggagctcccagaggcggcttccggcacccagtcccttcattagctctgagtagaaggagctgagacctgaggatgagaagcaaaggcacacatccatcatcggccaataaatggccctctgctaccccaatccctctgggcacagtggcaacagcctgcctttaacacaaaatctgtcactttcaggagaaggcagtggcgacccctccagtactcttcctggaaactcccatggacggaggagcctggtaggctacagtccatgggtccgtcagaattccctctgtctcatacccttgttttccttcagcttctcctcctccaatttcattatctctcataaggctttggtctgatcaggggatttacaaatatatatagtcatactagttaaccactgaattaaaatcacaatgttacagaaaagactgcttcgtcaaaagcaataaaaataaaatataatgctatctcatattaaaaaggaatacaag

SEQ ID NO: 55946 - DNA, 1550 bp, Bovine  19866881532639
  misc_feature (1)..(1): n is a, c, g, or t
nactgaaaagaaatctggcaattttagatacactaacaacctctgcttaaaagtcatctttgaactatgatttaaaaccccacgttcactggtccatgtcaactgccagaacatatactttgtaacactttccctcagtaagggtgctaaaaaaatgcaattcaaatatcctagagtatattgatatttgtgtaagatagagtggactaaaaccttcaggttaaattaaggatgcatcgggcagaaacagagccacataaatatagtcaatgacccttcaatagttgagcaaacgcaattcaatggagaaagggtagacttttcaacaaacggtgctgcaacaactagacttccgtgtgcaaaaaacagatcaggacacaggccttacatctttcacaaattaactcaaaatgatctaaacacaaaatgcaaaaccataaagctcctcgaagacagcataagagaaaaacctacatgaccttgggttcagagatgactttttaagtatgttaaaagcacactccatcaaagaatatgttgttaagttaaagttcattaaaatggaaaacttctaagaaagatcaagtcaaatgtggcagaaagcacaagactgggggccaggaggaaagctgacgatggctaagtgtgaaacgggcacagaaaggtcacagagagggcaggtggtggccagcagatctgttcggagcggggaacatgaccacacggtatgcaaccctatagcccgtcagacccaaccccagggatgcaaagaaagaagcaagactatcatcgctccagcatcctgaactggtctgtctcgcaagtcactcggcaccagaaacatcttggatcagatttttcttcaagaccagccagcagaagtaaaatgttattttaaatagatctctggaactctcagtccagaaaatatccttacttgcctgcagatgtctaaggaaaagcctctcctttaaccaggagaaaactctggaaccctgaaaacaaaaagttgaggtgaccctgtgggatacctgagctcctttaaccagacttgaggctgttgatctaacctttccatcttggttttcaaagaaaggaaggaaaacaaaaagcaggaaatcatttgctccaggttggctggggctttgcagactccacacagttctgcctccaaggagcttgcttcccttcactcaggggtggacaaggaaagcagggctctgagagactctttacaaaagcaagcaactgtgtctcatggactttatcacttctatttcggattgttcactagttttgaacatggttggcttctccccaccagcaacctgccaatcatgaaagcatcggggttcctgcacataccatccttcctccccagcatccatgctacaatgaaagggaacaggttgccctgcatgctggctgggaacagatccactgagaccctgtgctctgtgagcttgggggggcagggggcctgcaaaaatctaacacctctcaacccagggaggatcacactcgtctttattctgtccttcaaagtcagg

SEQ ID NO: 55947 - DNA, 982 bp, Bovine  19866881571971
  misc_feature (1)..(1): n is a, c, g, or t
ntcttaaatctccgtagctgtgacaggtcaaggccacttgccattttcctgagcaaatcgggaggcctccaggaaagtgacttcccgatcggtgtccaagtccttcttgttcccgcagaggatgatgacgatgttctggctcgcgagcattcgggcatctgttaaccaattagtaagcgcattgtaggtttctcggctgcgtaatataagattgtgagaacagtacatgtattttataaagctagcaactctttccagtcactcacaccactcagaccgcctctacacacgcagggcagtgcccacaaccttcaaagcgctcagaggacctgggtgccccaagagcataccacatgctaagggtgtgttccgccttgtttccagggcgatgccacagcgagtcagcttgccacctgttgtttccccaagcagggtgcagtatttactggggtcttggttcacacaacatgcgagcaagacctaaggctaactgctgtcactcgacgaatccgtgcaacatgatggtcctttgtttcacaggaatttatcacactgattctttgtgacacactcttatcatctcccatttacacgagaaacctgaggcccagagagactagttaagttgcccaaagtcacacacgcagagccaggacttgaccaggtctgtctgcctccaggactgtgttcagctcttatctaagggcaaaatcctcgtatgttctaaggaccgaccaaggaactgaatttttaattaaatttaattgtgaaaccaaggtgacagctacatgcaggacagtgcactcagatccttaagatgggccaagagctttataggaactaatttaaccacccaacagcctcacgagtattatgtggtcatcatgactcagtggaacagacaaggaaactacagtccagagggctcacactgctttgggacaggaaccaggattgaactcaggccatcgcagcatagagc

SEQ ID NO: 55948 - DNA, 930 bp, Bovine  19866881654062
  misc_feature (1)..(1): n is a, c, g, or t
nccaggtaggaaagtgggagtgagaattaggaaagggggcagggtcatcctggcaaatgtctttccttttctgtgattacagagaaccaggattttttattattgttattataattattactgagaagaggaaacctagcactggcagagggggccttctctgctctcatctttcaggttttactcctggcactggctgtgatacttggaattttgaggttcagggaattcagagaacttggtcatacagtgtattgggagaaagggaaaattcctgggtgacagttggatcactccagctgacatgtttctagaagtgggtgggcacatttgactgagaaagtcttgggctcttgcagcaatggtgggaaagaaagattctttttgtggctgcacttctgttaacaattctctcccccgaaaggacggattgtggtaaagaaatgaaagtaattagaagtggaaagtctaaaagtgaaagaattaaaaaatgttgaatttccaaatgattccgaggtgtggcttttccagcatcttttcctcctgagatcatccctcccacctgctttgcaatagcagtttaataaacagtctgtgaaaaggattaaatatttctgttttctgaaaagagttattttgtattttgttttctattaaaatgtgtttagtttccaaaaaacagtgttggcatctcttttaacaggcgggtgtgtgggccgttctggaaggcacagggcacctgtctttggagtgacagccagttgtgcagactggactccccagctgccctcctgtctccccttgtattctgttcagctggcctcaaattgtgtttcttcttggcattcacagggattattgaaagcatttaacacttttttacacatccaagcttgccagttgcgaccagagatacatatatttttttat

SEQ ID NO: 55949 - DNA, 885 bp, Bovine  19866881768590
  misc_feature (1)..(1): n is a, c, g, or t
nggcctccttccggagccgctccttccctgctaatattttcccttgtcccctaggctgtgttgtcggctgcaacattggttaagttactcctgaactgtccatgcagtgaagagaaggccagtttattctggcgcacatgcccgcagatggtcacggctctgatggtgagtacctctcggttgtgcatacccctgtccctgcctttcagtcgcttctgcttctgtcatgctctggttttcttatgcagagcgtgtttctggggctgtgtcctgaagtcagctgtgagcactgtgctcacagcttgtgcttacgtcattatcagctccgagtctaacttgtgctacatgagcatagccctggattagcacattctctgggcatagggtctaagccttctctctgatcttctgttttgttgctttgttgtttcactgggaacctgcattagtgggcaaagcccatttgtacttaggtatggttagagggagcatcaggaggaagagggtaggggtgtggatggagattagggtgggacctggtcagtgctggagtctggactttcttacctctgtcacttggggtttggggctatttccctggagatttgccttcattttctgtcccttgttccttgccctgtagctgcagacccgagaggcttgtcaggagcagccctcagccctggctctggtggggcctgtcttggacgtcctggctgcgctgctgcggcagggggaaggggccatcagcaacccgcaccacgtcagcctggccttcagcatcctgctgaccgtgcccttggaccacctgaagccccttgagtatgggcatatcttctcgagggcacacaacgtgctcttttcaatcctgcagtgtcacccgaa

SEQ ID NO: 55950 - DNA, 638 bp, Bovine  19866880463270
  misc_feature (1)..(1): n is a, c, g, or t
nattctccaggcaagaacactggagtgggtggccatttccttctccaatgcatgaaagtgaaaagtcaaagtgaagtcgctcagtcgtgtccaaccctcagcgaccccatggactgcagccttccaggctcctctatccatgggattttccaggcaagagtactggagtggggtgccattgccttctccgatctaaatgccttagtcttatttaaatttctatgttaagagcaactctaccaactcaatgttaaggactgtcctaggcctttacggtcatgtgttgtttgaatcctcaggaccgagtagcctcaggaggtaatatcacaccgttttacagatgaggaaactgaagttcagagagggatttcaagaaattgataatacaaagtatacactcagtacctaaaacactatgttaaggaaaagttcacactgacttaagaccttttactccccaagtctaaaatgattatgattaagcacatcatttttcatcttggaagtgatgtcaaggatactattaaaaccaaaatgcacattattcaatagagtctaaagcctgactaatgatgatatcactgtctccaagagcttcatattttcccaaaatagtttctcaccagccgtattcatca

SEQ ID NO: 55951 - DNA, 738 bp, Bovine  19866880483338
  misc_feature (1)..(1): n is a, c, g, or t
ncataggccgggagaggtaagcaacaaagaacacatcactcagctaataaggttttatgaccaaccaagcgcacccggggagcaggccggaggttctcagggttcccttacacactctgtaactcatcagtgcttctcaaggtcatgctctttacccaatggtcaagggagcacagcccaggaccggcgcacttcttctcccctttaaattgacccccaacttggcttcaaaactctcagactttaagatctcatactagtgcactgggcaggaatccaaagcatttctttcgggcatatatgacacacacatccaagcccgcaatctgttcaagttacctgtttttctggttttgactgacaaagttctatatgatttgaatcttgattattctaaaaggaacaggacgaaaaggtagagaggggaactgtaatgcctttagcaggtgattctgcacttaaatttcaaaaggatgtttaccataaactcacttcattatcagatcagactcaacttcttgtgtgttacctggcattctctatttagatgactggtaaatttacccacagtccaggaacagagaaccaggctccacggcccagcagactaccactccctttgcacaggggacctagaagtgagaagctgaaaataagaggccaggccctaaaagtttaaaaataaaaaggattgggggcaagctaagtctgttctgtcagtgctttccaaagtaagtg

SEQ ID NO: 55952 - DNA, 792 bp, Bovine  19866880494674
  misc_feature (1)..(1): n is a, c, g, or t
ncctggagaattccatgggctgtatagaccctggggtcgcaaagaataggacacaacttaagcgacatttacttaatatgtaattctttacccccaataatactgcgatgatacaaatttgtttataactaaagtaattccctaatcatgaagccgtctttttttatagtggccttcctgtagaaaggtaagagctagtgtccttcaaacactggttcagaccccaccatcattaggttctgcactttacgattttaatttctaagctctaagaacatcactgtaattggcttcaaagataagaatactactttcctcaaacaggtttatagattgaaaaagaaagcctgtagcatacctacccagtgaccgatgcaaatagactctcagtaatagttagcattatttttctttctacacacatcagattaaactatattttacttcagtggcaactagtgataagccgggtaaaaagaactgatgttaagtttatcttataatcatatttaatattttcatattgcttgctcaataaaaattcccaaagagggtatagacatttgcaaagaagatttcacaaaactccttttgaaaaattgtaacatcaatgaattctatgttcagcctacaaaaaagagacgatagagacaagatatagtactaattttgatgtctgagttcagatatagtcacataatttatagttgcataagaggaaattagatatagttaggagttagatatagagttatcatatagagttacttatcatatagagtctttacagta

SEQ ID NO: 55953 - DNA, 3543 bp, Bovine  19866880553197
  misc_feature (1)..(1): n is a, c, g, or t
nacccttcctgatgattgaacctgcatctcttgcatctcctgaattgccaggcagaatttttttttttttaaccactagtgccacctgggaagccctacttcttttaataaaattattttaatataaaaatcgacttattctctgcatagttcttcttactaacccaaatatataagcacacaaagtagagaagcacatagccagtcctgtataagcctttgtggatttctaggtggaaataacacatcattaggttaattttatgtgtttccaaggaggctcagttgtaaagcatctgcctgccaatgcaggctggcaaagtaatgctcaaaattctccaagccacgcttcagcagtacttgaaatgtaaacttccagatgttcaagctggttttagaaaaggcagaggaaccagaaatcaaattgccaacatgccctggatcatggaaaaagcaagagagttccagaaaaacatttatttctgctctattgactattccaaaacctttgactgtgtgggtcacaataaactgtggaagattctgaaagagataggaataccagaccacctgacctgcctcttaggaaacctatatgcaggtcaggaagcaccagttagaactggacatggaacaacagactggttccaaataggaaaaggagtacgtcaaggctgtatattgtcaccctgcttatttatttatttatttttaaaattcaaataaaaattttattttttattttatttttttaaattttattttatttttaatctttacaatattgtattggttttgccaagtatcgtaatgaatccaccacaggtatacatatgttccccatccttgaaccctcctccctcctccctccccataccatccctcttatttaacttatatgcagagtacatcagagaaacactgggctggaagaagcacaagctggaatcaagattgctgagagaaatagcaataacctcagatatgcagatgacactacccttatagcagaaagtgaagaggaactaaaacgcctcttgatgaaagtgaaagaggagagtgaaaaagttggcttaaaactcaacattcagaaaacgaagatcatggcatctggtcccatcactctgtggcaaatagatggggaaacagtgaaaacattgtcatactttattttggggggcttcaaaatcactgcagatggtgattgaagccatgaaattaaaagacacttgctccctggaaaatcccatgaatggaggagcctggtaggctgcagtccattgggtcattaagagtcagacacaactgagcgacttcactttcacttttcactttcatgctttggagatggaaatggcaacccactccagtgcttttgcctatacaatcccagggatggctcagcctggtgggttgttgtctatgtggtcgcatagagtcggacacaactgaagcgacttactagcagcagcagtagcagcagcatgcaatattgttctttacagcatcagattttactttcaccactagacacattgtggacatatattatttctgctttggcccagttgctttaaattagtaattgccctcagctcttacccagtacgacagttgacactttatgacctgggtggctcatctatctgtgtcataactttttaccttttcatactggattaggaaatggcaaaccactccagtattcttggtgggagcaaaccatgaacagtatttatgtatgtatgtatatatcatctatattttttatctatccattaaattgtaaccatatatttatatttattttaatactttgaaggataatacccatctataatcaatttgtatgataatgtttgttatctgaaaatatgttaataaacaaatttcagatcagatcagttactcagtcgtgtccgactctttgcgactccattaatcacagcactccaggcctccctgtccatcaccaactcctggagtttactcaaactcacgtccatcaagtcagtgatgccatccagccatctcatcctctgtcgtccccttcccctcttgcccccaatccttcccagcatcagtcttttccaatgagtcaactcttcgcatgaggtggccaaagtactggagtttcagctttagcatcattccttccaaagaaatcccaggactgatctcctttaggatggactggttggatctccttgcagtccgagggactaaaaaacttattgcaagatatatataccaaaacagatatttttcaaactataataaattctctttgaataaatttttcagaatttagttctatttaactaactggtctggaaattttgttgtatatattatgcaatctcaaagaataaatggaaattcattctaaattaaatgttacaaagtaatactcaaagttttgtgattccaaaggtttaagttcattattataaataccaattattatatgatgaccttacttatcaaatctctggatgagtaatatgaataacataaaattcaacctctactaacgtcaattttttggtttctacctcagaattaggaagtgtaaaagattcgtaagcagataaaagtggtaccacgtaacaaatctaccatggtgaatatactttattcatcagagagttcctctattctacttattttgcacataattgtaattagctaggttattagcttgccaagctcaagattagagacacaaaattagaggcagtagagtatgacacaagattcaagcttcttcactgtatattatttacctagtaaaatcattaatttcactgttactttgttctatcatgaaaggtttttatcaatattaaatatgaaacatgcataactgcaatccaatgtgcgtgtgtgtgtgtgtgtgtgtgtgtgtgtgtgcacgcgcacgcgcgtgtcggggggtggggtggcgggataggtgggcttcatctttgtcactctttccagacctatggggcacactgaaagctagtttagaccttttatgatattacttttttctccttttcttatctgaccaaaatcaaagattaactcttggttgatttaaatatctcttaaccaaaaaagagaaaaaaatttaaaatattaaaaagaaaaggtgaattttccctatcactctatgaactgagtatctatctttacaaatcacccaaaatttccagaccaaatattcagattttaggagtaaagtttttaagaaaaacttccaaaatggatattattttctgagacataaatatcaagtagataatatatgtcagtggcgtctcaactccagggcagagatctgttgtacttcaagattacctaggaaacactggacctgcggcacgtctggtttctagaccagggtacttgcactcttcttgaggaaacctaccagaaccaaacatttcctgacccgtgaagggaatccaaaaccagacactgagctttaggagatgctactcttgcagacctggagtttctacagagtgactcgtaaaagtacaacttttatatcat

SEQ ID NO: 55954 - DNA, 1299 bp, Bovine  19866880626685
  misc_feature (1)..(1): n is a, c, g, or t
ngttaatttattttgatgtattaagactggttataaaacattgatgcaggtataatcagataggacaagatgttctcagtggagcctccataaaaaatctcaagtaaaattaatctatcctataatgactgatgtgaggcaggagaaaaaaaatatattctttgcaatggcataaaatagtcatgaatttgaatttgcatatggaaaagcaatttcatagtaaccaaagtaatgagactgttctccctttatgaaaggtagcattttgttggagaagagacttagcataaaacaaacaggcatgattcaggacctccatcctgactgtatccctggtcctgtgtgcccttaaaaaccccatacattttggtggaaatctcagagtactactctcagcctctgtatttcacagataagaccaaggtccagaggtctgcaaatggctttccccagtacctgatgagtgatctgagcaacagagacagaaccagaagagggtctttctaactcaatccccgaaacccctaatacagaaagtaatgttctgtggagggtccagggtcacccagagaaggtcactgccttctaaaagctttccagcacacctcagggctttgtcctctgacacatctagcaaatcacctcagtcaaaagcatgttaaaccactccattaggaagtcgagggcccccattctctgaggcttttctgttgaatggcaagggagacttcagcaacttctttaaaaagggggggtgggtagcaagggaaagaaagctaaactcaacacctattgtttctctttccacaggatcatgtgtttttactgccagtattgagaaattcatggaagttgtcagcaggaagtaaaaatttacagagaagggtgtatgtgtttgccgcttccacacattaatggcatgatttttttttttttaacgcaaaaagaaaaaggaaaaaaaaccacccacattttaatttagcatgagccaatttacagagcatggaaattcactttcattcccaggattggcacgtatgcaattagcaatgcagtgtatatacaagaagccatgctgttaacagtttatctcaagtaatttggtgtcatttataaaaggaagaaatttctgccgccagaagggacagaaggagaaggagatggaacgatcaaatcacggagaaacactaaaattactgaatccacaacagctcgccttatttttcttggacccaaactgtcagggtataaacactatttgtttcttttttaaaacatctatagttttgctgtaaataa

SEQ ID NO: 55955 - DNA, 1042 bp, Bovine  19866880690114
  misc_feature (1)..(1): n is a, c, g, or t
naaaaatccccaaactctgcatacattatctttgcacactagtttaattatcttaagataaattttaggaagtataaactatattatatactatatgcttattcaggtacaatcaagaatatttcctatgaatagattattttgtatattttatcatttcagaactgtattgactgccatgctgagctaaaatctgtatcaagagaccaaatgatcatcactatttaagtgtgtacaaacatttttggaaagcggggagtctatggttccaaacaagaatatttctatcacatgtgagccaggagtgctttggcaaaaagctccccacagtatcttaatgaacaccagtggtcagggctgtggttttgcatttcgtcaaggggatgcccacggaccaggatggcacagcaggtggaagggagatttcctcattcagcattctccatttacctccagcagctggcttcgggcaacgtccagaggagccacatgcctacagcttcattcattcttccggcaggcctccctgggcactgtgaatggtcctgcggcccttgttcagggagcatgctctgttgagctgatgacaaccgcaggacccagtgggacagggaaaccttctccttgagaaattcaggggagagtccacagaaggcacattgcattacagctgatcttgggaggatggatcggttgggctaactcgggtggtggtagacctgttgcctggtactttactggtcctcctgttcttgttttgctgcctccacagtagaaacagctgctcccttttcagcctgccttggacctagaggtttctggaagaggcggttttggccagtgagacagatgtgcttaggggtttctggaaaggaattttctttttttaataaaggtactgaagtagctagccctgtccttcacttcttttgtccctcaatgcagatttgacgcatggagctaggcaggtaaggagcaaaggccagtatcattaaacctctgaactacattcaccagcagttgtctaccctcagattacttg

SEQ ID NO: 55956 - DNA, 2715 bp, Bovine  19866880776427
  misc_feature (1)..(1): n is a, c, g, or t
naattggactgcaaagaaagctgagcgccaaagaattgatgcttttgcactgtggtgttggagaagatccctgagagtcccttggacagcaaggagatccaaccagtccatcctaaaggaaatcagtcctgaatattcattggaaggactgatgctaaagctgaaactccaatactttggtcacctgatgcaaagaactgactcattggaaaagaccccgatgctgggaaagattgaaggcaagaggagaaggggatgacagaggatgagatggttggatggcatcaccaactctatggacatgagtttgagcaagctctgggagttggtgatggacagggaagcctggcatgctgcattggggtcagaaagagtcagatgtgactgagtgactgaactgagaatagccagaatattagtgaggacagaagcccaaattaaactggcttaaaacctcagggggtgggggcagattgagattaatgtactggtttatataatgggaaagtctgggtggtgcaacatcaggcatgactggatctagctactgcccaaaagatggtaggaatcgttcaccttcatgctccgtctctagccttctttgggtttatatcacctttccatttagcaaccccgaaggctgcacaaactctcattagactggctgagattttatatttcaccctgatgtagtctttgtaatttaggacaaggaatcctctgaatagccaaaatcgaggcccatccttggaggagagaagagggaggaactcagccccttctaaatgacaccagttggtgccagtggtaaagaacccgtctgccaatgcaggagacataagagacgtgggtttgatccctggatcaggaagataccctgcaggagggcatggcaacccactgcagtattcttgcctggagaattccatggacagaggagcctggcagtcgataggatcgtaaagagtcgaatgcgactgaagtgacagcacccagcacacatgagttaaggtacaggcgtaggagcatcagatgctggcactgcatctaaagagagggggctggggattctaagtgctttctgctctcattccatctttgaataactaccagaaatcacactgatttgaatgtttctgcctacagtacacatcgcgacaacttttagggtcattcaaaggaagtgtaattaactgggtagccttcacaatatttttagaccactattactttctgcttcatatctgtgtaaaggtcaactatttccattcctttaatgatgacttctaagccctaatttttagtataatcattttctccataattttcataacttgttgctgaatataaactggaaatgttgtcagttccttttaaagcacattcaataagaacttattactagaattagaaacataataaagaacatgtgtctaaatataatcttccatgccaaaaaaaaagcgaatgcagaggatggcaccacacccatgttaagaatactaacaagtctgagatctggagggcagaggataatggtcttagctgactcccttcccacatggagcagtggagactgagagtggagtagtgttaaatatatatgtatagtcgagtcactctgctgtacagaagaaattaaagcaacactgtaaatcaactagacttcaataaaacttcctttaaataaagaaggcaaagagaaggcaacatggggccctatggctagtgactctgccatttatcaactgtgtcccctggggtgagttgcttcagctgcttgtacctcagtttcttcatctttctgaatttcttttacttgttctttttaaattaatttttattagagcatagttgctttacagtgttgtgttagtttctgctgatagcaaaatgaatcagctatggctttacctaatcccttcttttttggatttccttcccatttaggccaccactttgtgtgactcttgattgcaaagtgaagggaacgtaaaggaatgtagagttcctggataacccagtattacagtacaaaagagtccactcttgatatccataggggggattaaagtggtttatggactcatcatgactaagacccagcagggcatggggatggcttcattctcccaactctgctcctcagcactggcctccacacctgccctcaaatctgcacaggtttcaggaacctggggtggcaggcctgtgctaaccatcctgggtctcaactccactttaactgtagttaatgtgcaaactgattaatcaacagccgggataataaagaggtagctgtgcttgtatgggtgagctctaccattgcaaaaaaaaaaaaaaaaattcatggtgagttaatttttattcatttgtcagctttccttgtcaaagcaattttaactgggcaatgatagggcagttttacatctgacactaaatcatatatcactgctttaggagttataaatatttaagatttcttgcgtgctttcagacaaaatcaacaccgtggagaaactccgttttaaaattttacacatgcagattttgagacatgatagacataaactaatattttttgtcacttaattctaacaaagtacttaaatgcacttctgaagtaaatgcttctcatgagtcgtgcccagtgtaactagactctttcctctgaaataaagcctgtcttttgaggaattagtctttttttctctt

SEQ ID NO: 55957 - DNA, 1326 bp, Bovine  19866880937059
  misc_feature (1)..(1): n is a, c, g, or t
ncacattgaagtcttcatattctgaaattttgtttgttctttgaaatttttaaacctagtaataacttagaggtgaaatttaatataaatgggaagagttagaagagggtatcagattccctctcaacatttaattaatttataatttgttttcagtttcaaccatatcaaggagctaaactaaacgaatcatcatctctaactatgcagaaaactttgattgataccatccacttattctgtcactcagtggtaaccacgcccgacagtttttaagaaaaagagagaaaggggagaggttggagatcagtaatcaactgccctttatatatttaaatgaaatgaaaagtctgctgtttattacagcacagcaaataacatagtaacatagcaaatggagctgaattcactttggggagttgcagaaacgatcttgctttggtgactattttgtaaaggagcttggctcctattcagcttggttttgcagtgagaattgaggcgagaagagataagccagcaattccaccgtttcccagcagaggcagctgttttgtgcaggtccctgtttctcaatatggcactcacatgtttccattgggtcctatcacatatcaagttaaatgctacctgtgtctctatcagctacggcacccctgcctctctttcgctgctgagctcagccacaggccttctaaagtttcacagatttagcccacacttctgtaacacttttgcatccatcctaagaactgctggttttagcaccttcctgaaatggcagcccactccagtgttcttgcctggagaatcccagggatggcggagcctggtgggctgccatctgtggggtcgcacagagtcggacacgactggagcgactgagcagcagcagcagagtcacccacaggttcagatctgcgtgtcttttctacccaaactatttcataatgtcttggtgagatgcagtcatctcatgtatttttaaatgtctctatgataatgtaataggtgacacttgtgtttaataaatgccaagcaccattcttaagactgtgcttattaactaacttagtgctcatgatgattctatagtatagatatcaatattatcattacctaattttgcagatacaggaaaattaaatacactttcctaagcttatgcagctggtatggagcaggcctgggatatgaatctatatctggctaatgaatgagtctggctatagaatattagctctcagctcctgaatatcctgaccacaatacactccatcttcttagtacactggggaggtactccagaaaagcgctgatagtaag

SEQ ID NO: 55958 - DNA, 1927 bp, Bovine  19866880937071
  misc_feature (1)..(1): n is a, c, g, or t
naaatgcagtgcacacatttgtatctcgtgattggacatgtgaccaagtgatttgtgttgacagaatggttatacgccactgcacatcgctgccaaaaagaaccagatggacatagcgacgactctgctggaatatggtgctgatgcaaatgcagttacccggcaaggaattgcttctgtccatcttgcagctcaggaaggacatgtggacatggtgtcactgctcctcagcagaaatgctaatgtgaacttgagcaataaggtaacctttttttttttctctgcaaagcataccatgcaatgaaacctcacctccagaaagatcactaagaaatcatgaaaaattcaagtcaagtagaatgtggaaagtgtagtatgcacaaagatatttaccaaaatgttatttatcatagaaaaacttgaaaaaaatgtctttaaacaataagagaatgctgtcagtaattgcaaagtcatataggtgagcatatatgctatagccataaaaaatgaggtccataaaatttttctaataatgtgaagttttgttataatgttaaatcaaagggcaacattctgacctcaccagaatacagtaaataagaagcgataagctgtaaattacaagttgtaaggtgaaacatttgaggggtacctactccttgcttgtcctagttttaagtcttaggttacaaaaagaaattaggagcaggtctgccttcagaaagttcattttagtaacagaaatttagagtagctcttttattcagtagatcgaaaagttagtctttgtaggtaaattggcagttccaggcaaccctttaagtctctgttcctcaaagtctttagattccccacccttgcatttgactctccttggttagtaaaaaggtttgtgaaaagtccagcccacagttagcaggaatgaggttacagcctctcactgtgttatcagagaatttggttatgttgacctgcttattaatacctgagtctgagatttacccagaattccagactcatgttcctaagtcttcagatagaacagaaatctgcaagagtttcctcaaatacccgataatccaaactccctgacatttagcttttcctctacaggatggtgacgtcacacctgtgacatttctcagccatagctcagatattggaggagagtttcaacataacagtagttttatggcaatgagttataaggagttttaatattttactatatgtggcctatactttgtaatcgtggaggctttaaatctcctgggtatgaatcctaaatctgacttctgcttgatgtataacttgattggacaagtcatgtgacgtctccgagccttagttctgtcctctaataaacgtgtccacaatatttacttcctagaaatgtcatgaaggtgaactgagataacatttagtaccttcttctaagtagaaaaagaataattgtcttaattttagactttttacagtttgggggaaaggttacacactaatcttaatcaccaaggcgatttaacaaattctataaatgaaaagacatacataagtaaatggaaaccttttctcacttttcgtatcttaaaaatacttcgtgatcattgcagaacaaacacaattttctttttttttttttctctcctggtttactgattttcttttcttatatctttcttttcaaacctttcttttgggatgtgtgtcctagcattaatgggaatcacaaagcaatttcaaatagtcattataatcagtgttggtttgagctgttgaatttctaaggttcatctactaacgtacaaaccagatttataatagtctgttgtaaaattctacttgtcttagtgagatggaggacctggtgttctcagattgaagtgccttctggcttccattagtatatgttttcttagaagcccag

SEQ ID NO: 55959 - DNA, 798 bp, Bovine  19866880961677
  misc_feature (1)..(1): n is a, c, g, or t
ntttgatatagaaaagaggatttagagaaagaaaccagaaaaagaaaaaaagaataattggaacttatacaatacaaagagaatttctatttgagaatatgatccaaatctggcccacagatccgtcacaatctttccaagccacacggacggttcagaaacaactcagagggcagtgggagctgctggatcacgggtcggctagtctactacaattaaccctcatatttatgtcattggtttcttctagtgtgatagcatttttcacttgacaaacattctttcaataatcaactgcagaagatttaggccgttggttatcaactgatatcaaccgggaagtggaaatgccacttccagactcttctgaaaccaccctctgccaagtgggatggatgggtcagggtagaagatcttatatccctatttttagttttgatctgttgccatctggaaaccccagctgacctgagaagcatttggccctctgctcagacacaccctaaagagatcgtcttcagagccgaacgcagagctctggactgagcccaactctacagtgagtgacaggaaggggtgagctgttttactaccctccccatccctgaagaaaagggaagattcacaaagcagtgctaggaaacttgattagtcaagactctaacactagctaactagagtggtaagcacagataaagtcagggtccagcttccaaccatgcatcttatctctttttgcttttgctactgacataaccttctagttcagcttcacctctactggcgattgtgacaatc

SEQ ID NO: 55960 - DNA, 788 bp, Bovine  19866881310588
  misc_feature (1)..(1): n is a, c, g, or t
nttccaaaattcacccccctgtgattctttagactcttcagtagagatgaaagttcctggatcttacttaacatgtgagaaaaaaagagtaatgagtgatgacattttgagtgctccagctcttccaccatgccagctgcccctgtctctgaatggctatagtcccatgaggtcaaatatgttgctcaccctctagtccctgccttgtgcttggagccctagtggtgcatggtgactaactggctgatactcagatccttgtaggaactggaagtaagggagaggagctactcacctctcggcatccaactcacatatttattgggatagaaccatgtgttatgattcagttcatctgcagtcgctgaggtgtgagaacttctgactcctacatacaaggaccaggtcatatcttcagacatgtattaatatatacatgcagaaatagaaaaaagggtgaagagaggctctcttctggtgatgtgagattatgagaggttcagacttgccctggatttttccaaaccttccaaatccaaactgggcttggaccctgcaacctattcttcccacaaggtgaaatccccaaatggcccttgaataagccccagctccatctttccaaattcatccgtgtcagatacctgaggagtgccaagattagtatctcgttgtggctgagccagcagagagagaaagattaaatatcctgctcatcttcgttgaaaagggagactgtctcactgttgtctaccagtccttgatccttaaatataggctgcactgat

SEQ ID NO: 55961 - DNA, 1688 bp, Bovine  19866881369819
  misc_feature (1)..(1): n is a, c, g, or t
ntactctggggctataataaaaagaaaatatagcaaataaatatttgcattaagataacaagagttggcaaatatattttgttttataactgaaaaggccttaacattataaagagaatgactattcaaaaaagacatgacagattttaaattctcttttgttcaaattaatattgattaaacttggttattgcacagatttataactgagaagaggtagtatctgtatattgtcacacaaaagaaaataaatttagctgataagtaaatatcatactaactatataacaaagttttcacttcagtacaagaaactaaagggttggcaaaagagtttcctttttttcataaaatcttgtacatagatagtctcagcagtaaactgataagttttgtgatttctgttttaagctagattatataaaattttctattttctcccaacttcttagagtgaaaatcattaacaataaaattagggagtctcctaacagataaacatgtatttattaatggattattaaaccaaatctacaaaatcaaacacatctgagttggaagatagaaagtaataacaagaatttctatctggtattatcataaaatacctttataggatttaaaagtaattcacagctattgaaagatcttattattaactgcctctaaattgtacattaaaattatattaaatttgagctttgctcaatattattagagtctagattttttttttttggcatgagcattatttaaaagttcaactttaagacttgatttttcatcaaggcttaatggtaaaattagttccataaaggcttgattattagcaacccatgagaatttctagcattggcaaaggtatacatatgtttatatttttaaaaggtttgtgctgcaaatctttcacaataagaagctgtaaaatcactggaagtttcttccataacacaactaagcagtcctgtagaaaaatctctaaagaactctacagaaaccccaagccaaacagaaggagcaagaggtttaatgatcatttgggaaaatgtaattatctacaataccctctctgcaaggattttatccatagttcagctcatgcagacgaactgttcagtcttcaagccagagttgaaaccaggagatgaagaatccttattcattgtccaaccaagcccagtccagcaagagtacatgctactctattgtgacgcgactcctgtgtgatctgtatcgggtcagtacccttccagagtcactgcttaagggcaggataatttcaaattcagtctgtcgttttactacatgctttttcaaacagcatgcccaccaaaacagaaaaatgctgcacatatgggctgagatcaaatgctttcaccattcagttgatatattctgacacaaggcagaaacaagatggtctgcttttattcattttttcctttcagatctcagatctttcctttttaaattaatttattactttgtaaaaggccaaagtttttatatgctttaatatctgtcatatttgcgcttggctcaaaacttcctagcaattaatatttctcaaagtcaagtctcactaggtaatcagcaaagtgtcattgtattctaaaattttcagctctacaactaattgaacagaagtgcagtatctaaaagtcaaccttcaatagagctcataattt

SEQ ID NO: 55962 - DNA, 1418 bp, Bovine  19866881371257
  misc_feature (1)..(1): n is a, c, g, or t
nttgggaactgcctaccgggtgtcagatgctccaaaatacccagaaggaatgtaagggcttctccagcaggattgcacttgactggtgttcagcttggccttggctggttgcggcagggaattcagagcagagagaactggccttccctctccagcactttgcagcccagagagttgtgaggtgcggaaataaccaacatacaagtggaagccagaaaggcggtccaggctgacaggtgccaaggttccagggagggctggcttaccttccaccttccaaaataaagttcatctcttatggtgaatacctttaagggaaacaatgtgtcgtattcactcacagtttaattagcttagagtttattttgtaaggcagcgatggagagaactgttgctcaatttgtctgtatccaggtggcaccgaaaggctttttgtttgtttttaattttcttttaatgtggtgatgattgaaaagaaatgtcagtgatgtttttaatttcataatttacatctgcccatagacagaaattatctgggtggttttttcatctattcctattacactccggggcccacccactttccttacacagacattattggatagaccaaatttcttaactctttaatggtaactgtgaaaacaaagccttcttaaggttaaaatggattagagatactagtttatgggcagttgcaaactccggttttgtaaaaaagcagtgttgatggatgggataatcttgcacacgcatctgctccagatcagaccagcctccatgggtgccaggtgtgtgtcccgagtgagcgggttaacaccctccggggcatctcaggccacttgggatcagatgaggccattcggtactgagtagcagagctgggatatttagccagacagatgtagctcataattcaaaaaagttttccatagaaggaaggaggaaagtgagagaaggaaaacagcatgggctaagggtgaggctgaggaaagttcttagaaatctactacctgcattaaacccttcccatgtttatttcactagtgagctgagtcttgggcagtcaaggattttgagaatgaattagaagggctaaaatagtcctgagaggatggggaacacatgtatacctgtggtggattcattttgatatttggcaaaactaatacaattatgtaaagtttaaaaataaaataaaattagaaaaaaaaaaatagtcctgagagaaaaattacttggtgttttaattatagaaagagcttctcaacgtatgaaattatttgcatataaacaatgttttttttttcccagttatcttaatacactaactcaaataataacttattctattgagatttttttgtttgggtttttttttggttcttcactaggcaggccttaatttatctaaacaa

SEQ ID NO: 55963 - DNA, 999 bp, Bovine  19866881392778
  misc_feature (1)..(1): n is a, c, g, or t
nggaagggagtccggaggcctagagagaggagaacagtggaacaatgcagtgacagaggctccttctcagctgcctctagccccttgcagccaagacctccccagccaacccaagctccctccgcctctcgccttctccagggactcctcagggaaggaggaccagttagtgactttgatcccatcagagagatgaaagagttggtgcaggagataaaacagagcctccactccatttcccctgcttgtctcacttctcctttcctcccactcgagagagaaacagcagtgatgagtgctttctccagcactgcttggagagctcttgctgcttctctctgccccacagtttcccaacctcaacccgagggcaggccctccctccccctctctctctctctttttttcccctccttccacctgacagggaccataaataacccaggctcctggtgtttccagctgagaacaaaaagttataaagtttgcctggagctctctgccactccctgccggggccacttctttgttttcttctcctgtttttcctctctacctgctttggccgtttctctcttcaggttggagaagagtcgcctccccattaagtgcagtggctcgcttgctggctctccctagatttcaggctgtctcggctacccggattaggcaccgggcactggtatcaaattaccgaaagtctactctggagcagtcctcatatttacatacaaataagtctggggctcgcatttatgtcaccattcggttctgctagaggcttgccagaggagttgttaatccaatcagaaggagttttaaaaggatgtcttcggagtgatcaaaaaggatcttgatctcaatgaaatgtggccagatttgggggggatttttttttttttttttccatctgaaaagctgaaagtctgttaacactgatgaataggaaaagatgtgtaattcttcacttgccggcgaggagacgaagatgctgagagg

SEQ ID NO: 55964 - DNA, 675 bp, Bovine  19866881817510
  misc_feature (1)..(1): n is a, c, g, or t
ntttgtctttctctactggctgagtagtgattatcctgaatgcaggaattcccatgacaaggcagggacttcagcactgaatgctttagatccgagcatgagtattgatcatcccctactgatactctaatgcaggggagcaaataggaggaatattctgggtcactggtgtttaattacagcctcagagtgcttaccttttgggggctgtgcccttaaatatgaatcctagataccgatttggaaagtgaggcccgaaatcacttttcttccatgacagttcataaaaattgactaaaactctgtgatctgaatatggaagtcaggtcataaagcatttttatgtctctttgtgagaattcccaagggaaagatcatcttaatttgctctgagcagtgatccacatgccttgcaaatgacatgcagatttcatccaccacatgtaccttccttcaggagtaatcatgaatattttcagggcctttgctgttttcttccaagtaaaggtctagagaaacctctttgccttttgttactggcagactttctgagactgagttcagagagttgtggtggttctgccacatgacattaaatataggtgtttcctgcttcagggttcttgcaaaaaaacttcttgaacatattttcacagaagtacagacttaagttag

SEQ ID NO: 55965 - DNA, 1345 bp, Bovine  19866880446343
  misc_feature (1)..(1): n is a, c, g, or t
ncagatgagatcctcataagggttcctctgccttcaaccctgacgggcctctggaggagctttttcctcccttcccgaaacaccctgagaatgagcagtcaacccaaggaggaagagatttcggtactcacgtggagggaggagctggggggttgggggccagggaggagggcaggtgcaataagccaaggagagccttggacttcccttcaggcctgacaggtacacttccagggaaattgaatatgtacatttcagcttcatttgcagttaacgcatctggttagcagtgtgcgggaggcttttgatgtttgcgtcttggtgcccaaacctttttaagcctcttttctttgaagccagggagatttgtgtttctgccaaggagtagacagacttgcatatcctccagtgcctcagtctttggagacctggctccttaagggccctgggaggctggggaccctagtttttcattcaggacttagtatgtgaaaacttttggaaaattgcctttgatagaaggggatggggagaaacctggtagatttcagaatgggactcaccaggctcacctttctaagaagccaggcaaagaggctgccttccttcaaagcttctggagtggtttttgtggacttccctggtggtccagtggctaagactacacattcccagtgcaggaggcccaggtttgatccctggtcagggaactagatcccacatactgcgactaagagtttgcatgctgcagctattaataaaaaataccacgtgccacaactaaaaaaggaaaagaacctgcatgctgcaacaaaaaccaaagattttgcatgcctgcaaagaagacccagtatagccaaataaataaataaaaattttaaaaaaatgggggaaattgtatgggaagggaaagttggcatacaggagttctctacgctttctgttcaagttttctgtaaacttaaagctgctccgaaaataaagaccattaacttaaaaaaagttgcatctcctcctaactccttcttgtaaacccagagttctttggagaacatcatgcctacttgagatgggatctggaaagacaacatcctgctcttgaatcctgggagctccaagaggaagtcgcatcagaatctcattaacactggaaacgaggaaaatttggatctgtgtgattcagagtgaaagagaagcaagtgactcagaatgccagatagggaaaaaagtctatttacatactcaatgaatttctattgagtgccagctatatgtcagaaactgatctaaaggcttaagagacaatagtaaacaaattaattccctgtcttcatggggcttgtgt

SEQ ID NO: 55966 - DNA, 751 bp, Bovine  19866880535063
  misc_feature (1)..(1): n is a, c, g, or t
ncgcggctttcttcctccccaacagtcctgcaacagcagcagcagctccagcataaaaatcccaggttaggcgcaaatgaataatttctttcgcaaatgaaagggaaaatccaagcaactttaatccatctagagaaggaaaagtttccgtgcagtgctgagaccggcggcgcgggtcgccacgaccctagacaacgcccgcactgagggccccggggtgggcggccagcggctggtcccttcgccgagctcccttgcttggctctctctccagtctcgaccagggcccgggctccacacgggcaggctcagcgccgcctgcccgggcagcggcaccgcggctggggcgagggtggggcggccggaacgagctgccccatgaagatggggtttggagaagctacggagcgggaaggcgggctacatcgcccgagcccagcctttcctgcccccgagcgccgactccagcctcctggccgcgagcgtagtgggatggagaggggttcggccagctcgcggcaacccctggtccgcctccctgtcctcccgggtctcgctgtctcagccgaggggcgcgctgctccgccgcgctcctcgccttccccgggggagcctgcacaaaccttgaacttttccggggttcagagtctccgacgcctccttctccccgccgcccccgccctgcccccggacgcccgaggtctcggtgcagccgggcatccgcttgtgctctctcttcctctcgcggagt

SEQ ID NO: 55967 - DNA, 1303 bp, Bovine  19866880568651
  misc_feature (1)..(1): n is a, c, g, or t
ncccatatttactgaaaatgagaatttgcatttagcaagatcttccaggagactggtgtgcatattaactgttgagaagcactgggccagaggacagagctgtaggaggcttgtctattcctttaagaagatagtcagattccttttgtattatgggaaaggccttggaggggttttaatgcaagaccttctggaatggagagaggatgccttgggaggagactaaaagtgatgattgtcatcatgtcatcatcttcaccagtttattgagccttgactacatgcagaacactacacttgacattcgtgatctcgttatgtctctacattgatccaaccaaggatctgtcatccttattcccatctaagagatgagaaaacccaggctggagggacaacacaactgacccagatgacacaggaagatctgagttctgactctacttcgactttggccaaaatacttgggtctcctggctaggctgctctctgccttcaaaccagagagaacaaagcccagagcctcctaggaagcaggtgagagaagaatagcaaatatgcaagaccgcaaggtccttcgaagccgagatgtcctatttctaacgcaacagaatcatttaactgataaacatggatgctgtgtcaagttggcaataaattgccttgctatcaagctaggcctttgtgttgtgttcaaaagaaactaattaaaggaatttttctttaaagtatatttgacccagacatttccacatcggcctaggaagccaattcagtttgaaaacttggtgtgaagcttgaattattaacgcacacatgaaaaatgatactgcatatttgctttagaacattttggggatggaagaggattaaatgtatctctggagggtttggccagggctgggggtgggggaggggaaaagcagagaaggatgtgagtgtgggcaaatgcttgtaaaacatacatcataaaacttggcgttttatcggaactcccgcattcagatgactgagacaaattttaaagaaaatttttcacagctaatacataaaacatgatccttgcagtctccctctttaaacagctttgttaaatagtcagttgaatgacatctcccttgcagctgtgaatgcattagggaattgtatttatttagggaatttcacctgatcgccttgaactgtttggaaaacattagtccgttcaccctcttggcacctagtgggagctgtggtaatgcttctggcttatttctcctcccttggtgctggagcggctctgtgaaaagtggacttggcagaa

SEQ ID NO: 55968 - DNA, 1851 bp, Bovine  19866880653570
  misc_feature (1)..(1): n is a, c, g, or t
nccatggtgatgagggcctcaaaaagtccttccccataggccaccttgccgagggccgctggccccgcacggcccctgccaggccacctgagcggctattccccatcacacaagggccaggaaagaagttggcggtaaggccgtaggcagaagaggcacccgtgcaggcagagaaaagaaaatgggatttggaagcaaaagagccaagcttgagcttcaccctttccttcctgtgtaatcttgagcatgtcacttcacacctttgagactcaatggctttggaagtggggcttccctggaggctcagctggtagaggatctgcctgcaatgcaggaaacccaggatcaatccgagttgggaagatcccctggaaaagggaatggcaagctaccccagtattctcgcctggagaattccatggacagaggaggctggcgggctttcaaagtaaaatgggaatgttagcacccaccgccgagggcccctgggagggacagatgagccaggggacaggaacttggtttggaaagtgacttaggaccccctcccccgcatctgcccacgctgccacgtctccacccactgactgcaattccactaatgcaaggaggtaaaaaaatgtgtcagggctttaaagatgcctgttcatcttgctttgcatgcatttgcatattgagttcaagaggctcgtcctaattctgaggatggaaaataaaataaattaacgaacgtgagattaacaaatgggactcctgctgcagttgtctctccggctgctccaggcttgacacctgggagacaatgttctcagggcaatcaacatttaatcctctctggaccctgcccctctgacccccagccagaggtcagtactgggggagctggaggtggggagcttgaaaagtgggggccaggcccaggccccggggcaaggagttcccctcagcttgctccgttgtgaatctgcagtgcaggtatggtgttcaagatcatgccccccggaccacgctgcctaggtctgaatcccagctctgccacatccagctctacggctttgggaaagtcacgaaacctcttggtttttcaaaacccttgagagtcaaacaggaaaaattgtgacacctaacgcattgagtttggtgtgagggctgaatgagttatgtatatagtacttagagctgagccctgaataggcaacttcttggtaagtgtcctggtgtttatttatctattttcatcatcaccatcacctcaacatcaccatcaaagccatcaccatcatcagcatgtagtagaaaatgtctacaggactaggaaccagagacccaattcttgttctcactttgcccttcatccactgtgtggctttggggaaataccctggcccttctggccttcgttccccaaagggaccgacccaggcccccttcaagctgtgacacaacacatcgagctgagaaagctcccagcttgctccaaggctgcctgagaacagactctggggcatcttgtcatatgcaaaacacatgtaaaacacatacaaattaccatctccattgcactccaggctcctacagctcctacacctgagaagggccctcggggccatccttgtgcaggcccagaagctgggacactgcctagccaccagctccgtcttctttcttccacccctgcccacattgcccccctcccctccgccactctgttctccttactgaatccctcaccacctgggagatggcagatcacatatcaccaagatgtacatctgccctatgctgggcccttcacccatttttttttttcacaattctctctcatcgcgggagggtgggtgtcaagacccc

SEQ ID NO: 55969 - DNA, 1853 bp, Bovine  19866880723347
  misc_feature (1)..(1): n is a, c, g, or t
ncaggaaggggttgcccattttggcagcaggctgaagaactgaacagtgaagggcctcaaagcctgcctggggcatggagtgcatgcccacctccttcctgctttttttttttttttttaattattcatttggctgtgctgggtcttagttgggatacacaggaacttcaatctttttttttttttttttttaggaacttcaatctttgttgtggcatgtgggatctagttccctgaccagggatcgaacccaggccacaagcattaggagcaacgagtcttagccactggactatcagggaaggcccaaccaccttctttttaatccatgacgtcccctgacagaacatttagactggatcttagtagggtccatcaacgccactgataagaatccagccagcattgtggccaataactctattatataacctcaaccatctgagaaggtgacccccaaaactacttgcaaaagcataattatctccttaatgtgtaaagatctttcattctcaaatacagaaaagtttgaaagactcaaccccacgggatgaatatttttagatgctgaagtgaagagtctgtgcatattggtatttcaatatttgtaatgttggagaatttggcttatttgagtagcaagccagcctttgatgccaatctaaattgtaaaaattgagttagatatgtgattttaagttgaaaacaaatcatcaaactcatatacagtcttggaacatttaagataatttcatattctcttggatttataagaattacttaaaattacttgggaaggtttatgagtcagataataaagcatactacttaaatttctcaaaaagcattttacatatgtgaaggtgtttgaataggttggtaaacgaaacaaacatcatcctaaagccccttaggaaaaaaaaaaaaaaaaagaaaatttataagctaaatctcaaaacttaaggaagaattagatttttatgaaatttataactttaataaattaaataatccttttaaaacccaaagtacagcagaaaccaacagaatactgtaaagcatttaatcctccaattaaaaataaaatttaaaaaaacaccaaaatatcttctggatatttttttctgtgcatacaaactgtcttttgaggattgaaagaaatctcacgctgacatagagtgcttcctacatgctcagagctaatgctttaaatgaatgatctcatttagtccttacgacagcgctataaaagtaggtactatcattatctccatctccgggcagagaatgtgggagccaggattctgaactggggcagttgaaatttcagagccatttgtcttaatccctgtgccacaagttcctgtgtaagaaaagaaacctgtctcagggctggctcagaaacaccattaaacagcctggtagctggcctcttcatcctacattcattagtgcctgagtcacagctcctgtcctcagctctggacttatctctatagctctgcttctcactgtgtgttccaagaaccagccgcctgggcatcacctgagagactgttaaaaattcagtgtctcgggctccacctcagtctttctgaatgagacctcgtattcacaggctgtccccgggatgtagctgcccacccagttagagaagcctggctctatagtattatgaaaacttaggatcagcctcgctctacctggcaaaacaagttgctgctccactgtccccttccccagagaaccccacctcctgtggtcaagcagtgttaataggagggatgcaaagccacttggcccagccgtttagaggctgcgaggctcttccaccatcaaagttccgccagcca

SEQ ID NO: 55970 - DNA, 797 bp, Bovine  19866880768391
  misc_feature (1)..(1): n is a, c, g, or t
nctcagcagagtccttgacagtacagaattgagcttgatgacaaatcacagtgaacaatgaccgcagtctcattccttctgggactttctcagcatttctcagttgcttagtccaagagtcagctggcatagccctgtgtctactcattgcctgggccaggatggagccaagtgtcttgttggacaaatagcctgtgggcctgaatctggctcctctccataccttggagataaatcttgatgtgaggttgaggaacaggtttgggccatatgcttgcctggcaggtgcttcacaaaagctcaggatgcataaagtaaggctttaaaagcagtgagcttcagaggctctttcccgttgctcctcctacctccctggagctgcgtacaagagccagtttgccgtgctgtgtttgttagtggcagtgctgttgacatctgggaggcactgtttattgtggtattgttctctccactgtggaatgttgcacattcttggcacctgggcactaagggctggtatacccccattcattgtgacagccaagaatgcccctgcatttctagaggtcctctggaagatggtcccactaaaggaagcttgaactgtctatgatccgctcacttgtgtatcattgcttgtatgctttgtcttcactaaacttcagcctcagttagtgctcttttgacctcacccccagtcccagtcagaggatgtgacaggctatcctgtggggaggatggtgttggaaaccccaggtcatggtgttgtctttgtgaagcggggttgtgcttggcag

SEQ ID NO: 55971 - DNA, 1887 bp, Bovine  19866880779298
  misc_feature (1)..(1): n is a, c, g, or t
ncattatgatttatcacaggatattgaacatagcttcctgtcctatacaggaggaccttgtgatgtatccattctgtatataatagtttgcatctgctctttggaaaatttccccaacttctctctccctccccgcccctcccccatggcaaccacaggtctgttctgtctgtctgtgagtctttttgtggtttgtgagtaagttcatctgagtcctattttcagttctacatataaatgatatcatatggcatttgtctttctctgacttcacttagtgtgataatctctaggctcatccaagttgctgaaaatggcattatttcattcttctttatggctggataatattccactgtatacatgtaccacatcttctttatccattcatctgtcagtggacatttaggttacttccgcgtcttggctatcgcagagtgctgttatgaacataggggtgtgtgtgactttttgaatgattgttttgttctgatatatgcccaggagtgggattgctagatcatagggaagctctgtttctaggtttttgaggaacctccatcctgttttcctctgcggctgtatcagtttacattctttagcggcattttaagcaacatcaacaggaatcaatcttttgatttttttttttttgtctctactagtttccgccaatgtcatgtccctgggcagtgacaaagtcatagaagagaatttggagtgggatttacagaacatcacaagatttaggagaatcaccattttgaataagcaagtggactttgactcctcttttttctttttcacaactattaacttgaaagtgacacaataaatttttttcagtaagaatatagctgctcatggccagaacattattcaggacatctgaccttaaggctacaaggaaaacaagacagtgggaaggaaattatggaaggcattatgctgaattctgcattttgtaacatctgccttatcttagtcactcaagatcttattccatttgaaatttctaggggatctctagaccagtgcgacaaactacagcataaatcttggatgtgccttgcaataaatcacaagattcttaatcagaacatgattcttagattgaaaaaatgcaatcattttataaaaatgctgcagtgtactgtttagctatatttttataatatgaataaatctatctgaggtttccagcctcctccccctcaaaaaagaccctgggtgatggaatgaaaagcaaaggtctcaatcacagccttgtggttgatacaataataaaacagccagcttcccagggcaggagtatccagctctgcctgcagagatcagggaagccttcccagaggaggtgactttggactgagtcccgaagggtcaataggagattggaagcccaccaagggagagagagtgacaggacttccaggcagatggaaagacagaacccagtgcaccagatgccttctatttgccccttagaaatactctttttgctctgctctgggtcccctggctggactgagtttagctaaggggatgctgaagatgccaatgtgttacccacgtcagctaggattgaccttctgcctgaacttatgtggaatccttatatggccgacagagagagaaagggagagaaagagagaggtcatctgccatgtgtctcttttttaagggcactatcctcatctttagggccccactcccatgacatgattatctctccaaggccccacctcctaatatcattacattggggattagggcttcaatgtgtgaatgtggggttgatggggacacaaacattcagcctatagcagcaggttataaacaaagagccccatccagcctgctcatcagagctcttaattattccag

SEQ ID NO: 55972 - DNA, 1347 bp, Bovine  19866880869902
  misc_feature (1)..(1): n is a, c, g, or t
ntggagcgaagtgcagagggaggggctgctgtaattggtgatgaccagcagccgctggagcaggaaaccttgggtccccagcagaggctggtttgtagggggctctttacgtcccccatttgacccttcccctgccgtgtaagctccttatcctcgggttggggctctctcatactgtgctgagattgtgcaaaattattcaactaaaatcgtccagctggaaaggcaactgagcaatcacggtttactgctgagaagccctaaccttaacgtaggctgggaagcaggagctcagcggggctgacaagctggctggtttcagtcttaggagccccagcacctctcccccagcacgtgtggtcagcagtgagtcccgggagtccagtgaccaggcaatctgagcccctctcctcggcatcaggccttgcaggtgacttcagccagggcccctgttttgccggctggagtggctggtacgagcaaaggagtttggagctgaccgccattgttctcgggcttggagaagcgttttcccttctgcgtctggagggtaatggggaagggagacagaggaggaagtgagggtcaagggtgggagagcaggaagcgggaggggagtaggggtgcaggaagagagccaggaatgaaagcagcaccctatcagggtgtgtccaggttccttctgacccctgccccgcacccctgcacgcacacgctcatccaggggaaattgctcctgttgagttaggattctcgactgctgtggctgaatggcttcaatcctctattttcagatgaagaaactgaggctccagagggggcggggggaactggaaacatgcctcttgccttccagttgagtgtcttcattctcttaaattcctagatgagtgagcttagtacagaacaggaggaaaaaaaaaaaaaaaggcaaacgctcccatcagggtcaggatgtggttcccctgagcgggaagtgagaagacgcctgtgaggatggagacttctggcaaagtcctaggtcctgggtccgggagatggtttcctgggtgttcactttagataactcgttaagctctacaggtatgggttattcactttagggtacttgtgctatgtttcacaataaaaaaggtttaaaaaccctaataaatcttgctgaaatcaattacacatacaaaagaaagctaaagaggcctcgggaggcctgaggaggtccctgtccacgtttccagccctggcaggtgctctgtgctgcagctgcctcccctgggaaatgggtaccgacatccccacccctcccttctgcagggaagtgagtctggggttgcggaggggcagaacatc

SEQ ID NO: 55973 - DNA, 2113 bp, Bovine  19866880924138
  misc_feature (1)..(1): n is a, c, g, or t
ncaccccccttcactccccttaccgtggaaacccagcaatgccgagagctggaatttggatgttttcccagcattggggctgttaattaaaactaataaatctgtcacttggagttgggttgaagaggagaaagggtgagacgggagagggagggggaccaggctcctcacacacacccctgcgagcctctgtcccttttagtcctgcctcctgaattatcttctcttttggccacttcctcattccacgcctgagcctcccagctgccagccgcagcctcttcccaggcacactctgcttcatagaatggaggaaggaagaaagactggcttctaaggcaagggctgactggccaccccctgccactccatgggatggagcaaaaagcattcaaaccacctggacaaacccgggttcaaatcccagcattctagtcatgtgaacctctgggtgtcatattttcctctccaaggttccctttcttcaaatctaaaatgcagattatatttcctcctttgaaagaatattgcaaagatgacatgcaaaagtacacaaaataacctgtcaccaacagaacggtcgctctctttcctggtctctgtgatctcccgttctgatctccacttccttctttcccatctcccctgactcccagtctcacaaacactatcagtcatgttagtaagaatagaaataatgccaccttagatctgcagagtgtgtgtagtcactcagttgtctctgaccctgcaactgtagcccgccaggctcctctgtccatgggatttcccagacaagaatactggagtgggttgccacgtcctcctccaggggatcttcccgacccaggaatcaaacctgggtcctctacattgcaggcagattctttaccgtctgagccaagatacacaggaagtgctcagttaatgtgccttggatggatgaatgaagtgctttcacagctgcgggggacatccattccacttgtctgcccaatactctgtcccctttatctagtaatggcttctccttcacttagagaactgcaccccccactccaatcccactgagttttccttcctcttcctgctgtgcagatggtcatgtgaccaggctggtccaatcagagcctttcccaggatttttctctgggggactggaagggactctttcctcttcactcaggaggtcagagcgtgggtggcccagcaccagcttttctcactgacaagggtgaagttatatgcacagaaagacagagatgagagttgaaaagaggttgcccaggtccactggttctcctatgactgggttatgtggaaaaatgaaattcccgtgttttcattaaacagtaaagctgagattctgccattcacagccatcaactcacaaaacatctattatctcatctaatcttctcagtaacatccccagccaagcccggagggattgtccacattttatagatgagaaaatcaagtctggagaaagtgaattcatttcctgaaatcacacagctggtaatgatggaactagatccggtaaccaggagtggtcttttatccagagtgataggtgctgtgattaggggcccctatatatttaattccatattatcaataacccagtgacatcacctgctatcaatatctgccctcacacagatggggaaactggttggagaagtaaattacccaacgtcaccaaactggtcttggcctagttctgtctgcccagagccagtgccactagtcacctgctgcactgcctctaagtccagtctctgaggtcacctttctgggacaggagcatctcgagccagtgaaagagcacggggagataatgaaggaccagggacacgtatggttctgtgcaaggactctggggatgcagagacggcaaaccatgctactcacctcaaggaaccccaagacatgtctataaattccatgctgcagactgtgagggtcctaaaagatgctcaggtggcgtgctctgcagcccaggggaaggagaggtgactccagcttggggagggaaaggaccaggaaagcgtgatggggcaaagagcactgaaacagggccttaatataggtaagatctgtccatgtg

SEQ ID NO: 55974 - DNA, 1633 bp, Bovine  19866881202667
  misc_feature (1)..(1): n is a, c, g, or t
nctctctaaactctaggcaccaagcaaaatgtccaggaatgctgtggatggcctagatccagtcttcctactgttatcatcttgcaccattgccttcagtcaagggcctttcttatctggacctcaattttctctgctgtacaatgggcgctaggacttgaagcttcatttttatttttttaaagtttttttatatatagaccatttgttaaaagtcttaattgaatttgttacaatattgcttctgtagtttgtgttttggtttctttggctgtgaggcgtgtagaatcctagattcctgaccagggagtgaatcctcaccccttgcactggaaggggaagtcttaacctttgtacagccaggaaagtcctaggactagaagctttagaaaggcccctttagccctggcactccagggttttaggccagccgaggggtagggttgcaaccctccatagcaagctgagttggtgtatccactgattttctgtatcaaaagaatggaaaggatggcaatgagatgagcttctccgggggccaccaacccaggcctgggttaactggggcaggagagagtttaaaagccacagatgacatgggcttaaattaagagcagcctctccatggtgcctgtggagctgtttgccaagctctgtagcatatttgcaaacactccagaatacacatattaggaagctaacaagttgcctggcattgaaaccatattacacacagtgtcagatatatttaatatgcatttgcaatggttctttttttctcccccgacttgcagcagcaaattttgcttacttttttgaagagtttatttcccatgatgctacaatcagccggtggttatgaactcggcaacttggccaggcttggagcagtaccatgtacaccaatagcaggcaatggatgcttctgggggcaaatcacactctcagcagggctggccttgggctctctggtcacctagagccgccaaggactacagctgcactttaaatttctctcccttggagaatgcggtaagaaccttggctttattagctctggaaacatgacttcatccactcagagaacttcttgtttcttggcaagtcactcctggaaccgtcctagcccagcctgaagccctaagtgttggatttctcaaatccagagaaataggaacgctgcagctctggctttcccccttattagctgcaggaatgtctttcatgcttctaagccccagatttctgggttgtgaaaggaaggtgttatcggccatttttggagttgctgtgaggatttcatgggcttgtaggcagggaaggcatttgtattcccttatttagacatgcacacattcctgtgacacacactaagtggatgacccttatatgccaagcgctgtgcttgaatgtagtgcacagacactgcagataaggtggctgtgggggcccacggaagtgatgggatgaggtagtggttgggggcaggggggagcgggaggaaccggcttgggagataggtctcaggaaggggggaagtagggggacgtataagataaagaccaggagtccagcatgcacaccggggaatactagggaccacacagaggccgggaatacaggaaaggagcag

SEQ ID NO: 55975 - DNA, 1647 bp, Bovine  19866881270409
  misc_feature (1)..(1): n is a, c, g, or t
ntgtcagatttctaaaatatgcatacattggaatacacatgtatgtgcacatatatgtttttgtgtatatacaaacacgtatttcccagttctgtctgctcaaagggcccagaagcaaggatatctcatgcacccagggcacagagcgtcaacatttttgtctctaatgtcatttcccccactaacaggaacaaggactcttcagagaaatggctgatttcacggctgagataggtaatcctaagagtgagcatactgttaggccagaaagcaagggggtactttaaaacaatttttaaaaagtgatctggacatcaaggacaaaaactagctcaaaggggttcccaactgaccaaatatgggacaatttagcaccaaattaataaagtacaggacaatgataagccaccaggaaaaagtagcaatctgagtccatacagaaaataagttgagagagaaaagggagtagtgtaggtactcttttcttcaaaaatgtcaatgtcataaaagaaaacaaagacctcagagatgttccagattaaaggaggccagactcgacaactcagtgcaatacctgattttgtatcaggattccatactgaagggagaggaaaagttataaattatctgatcaactgacaaaactagaatacagacggtagattaaagcattatatcaaagataaatttactggttgatagctgtattacagtcatgatatcctattcttaagatatacacattgaagtatttaaaggcaaaggaccatgatgcatgcccaaatggttctgggggaaaaaaagtcacctgtgtggaaggagagagtaacaaagagagcgaaagagtgagcacaaacatgaacacaaatgatcaagcggagagcaaaatgttaacaggtaaatctgagggaattccctggaggtccaggggttagaactctgcactctcactgctgaggacctgggtttaatccctggtcagagaactaaaatcccacaagcctcacagcacagccagaaaaaaaaaaaaaaaaaaggtgaacatgagcattctttgtactatgtactatttttattcttgcaacattcctgagtttgaagttatttctgaacaataaacttaaagataggatgaaagaaattgagctctactctcatctcgtggcctctcagagccagtaagatgagaaagcagtattctccagcccacctgcaatgtgctgacttatctgctctttctcgttctcttccagctcttcccagccttccagctcggtgaggtcctcaattttttttgtggtggcccgggcccgctccagtttctcaaacatgcatttaatgtggtaccactctttcatatcgccccccgactctgaaaagggattgggcaccactttgccgattcggcatacgcccttgacaatcttttccttgcattttttgcagccagccgtgccacgcttggcgtagtccacacagaagcgttgctctgccatctcacaggggccactgcagagtcccacatgcgaccctggcaagtaaacaaggcaggtggcacgtggttttaggttgctttcctggaaggacggaacaggctttcttctctggaggaggtggtgtccacaaaaaactgtctcgaccaccggc

SEQ ID NO: 55976 - DNA, 1805 bp, Bovine  19866881283034
  misc_feature (1)..(1): n is a, c, g, or t
nataaaatgtaaacactttttccataagtttgagattgttttaaatatgaagcactgaaagagtacttttataaattacatatctacacttatatttagtggcattgatgtgggtaattactttttttggacaatcctattaataggaaaggatcgttacttttactttgtataacttactttatagttttatgttgttgtgttagggcctgcaccctagaataatagctgaaggctttgaaattgcaaaaataaaggcacttgaagttttggaacaagttaaaattaaaaaagagatgaaaagagaaatccttttagatgtggctagaacatctctacaaactaaggttcatcctcaactggctgatgtgttaacagaggtatgtagttaaacttttgcagaatgagtacagactaacacatggtgacatttttctttttcttataagataatcaactattcgtgtgtgcttgtgtgtgtctgtgtgtgtgcacgtgcgcgcacgctcagttgtgtcctactctttgcaacaccatggactctttgcttctctgcccatggaattttccaggcaagaatagtggagtgggttgccatttccttctccaggggatcttcccaacccggggatggaacctgcatctcttatgtcccctgcattggtaggtagattctttaccactgtgccacctgggaagcccccagtcagctatgacatgtggtccttttgaacatacaataaaatatagaagacagatatttatttataggcttacttatagaatagatttgattggtcagaacagtatgtataatttttcaaaagtgtcatgttaaaccttttgttattaagttgggcttggctacctgtggatcaccccctctggacaccactggaattatatactggtctcctaaagctagaggtccatatttattatgcaaggttggggacatagttttgacagtgtaccttgtaattgagattaccactttaatgaacatgagggagttgatagataatattcaaatctgggaaatgtatacatgtttacttataaaggtagaatatatataaatatataaggttgggaattctgggaaagtttttttttttatcagatacctatagtttgatgatgtcatcattgttcctccgctttactgtttttgaaacgagtgtgttagtgtatcaggaatgaagagatcataagacattgacatatacatcagaattgtatcttactaatttactttggaaattagaaactgaactgaactgaatttactttgagaaatacaaataccagatggaccgaaacacctgagttctttctactcagttcttcagttcagttcagtcgctcagtcatgtccgactctttgcaaccccatgcactgcagcacaataggcttctctgtccatcaccaactcctgaagcttactcaaacttatgtccatcaagcgagtgatgccatccaactatctcattctatcgtccccttctcctctcattttcaatctctcccagccttagggtcttttccgatgagtcaattctttgcctcaggtgaccaaaggattggagtttcagcttcagcatcagtccttccaatgcatattcaggactgatttcctttaggatggactagttggatctccttgcagtataagggactctcaagagtcttctccaacaccacagttcagaagcatcaattcttcggtgctcagctttcctttatagtccaactctcacatccatacatgactactggaaaaaccatagctttgactagacgg

SEQ ID NO: 55977 - DNA, 1498 bp, Bovine  19866881337526
  misc_feature (1)..(1): n is a, c, g, or t
nctcgtgatcagggcctgcctggtatccccatttgggaagcccttcctctgggataaaggttcctctggggaggtttcttgttcccatagctgtccccctccttgctgctgtggagctcgatccttacctgcctaggactcctcatctcgttgttcttgctccttctggtctgcttgggctcctcctcccacagaggctgtgatgatgcttgctctctcgtcacagccatctatggcctggcctacaagattctgacccagagccagtgcagcaaagccaaatccccaggaaactttatgaatgtctgaacttctaagtcccagggtgaggcagcaggaagacatgaactgatgtttcaggagtccagggaatcctttccttcctgtgagctgaggcccagggtgtggtcatcccggtgagcagtcacacacatcgtctgatggcttgatccctccctgggagggggtgggggaaatgggcagtgtcttggggtctggagtcaggctggagtctctgagctgctcgttttggggacatgggcaaagggtagcaggcattcctggtccttccccgcctccctccccctctgccccttgctggccctgctggcgggtgaagtggaaaataacccagctcttaggggagtgtgtgtctcggctcctttccctggctgctaatggaaccagcagctgtcctcagccatgtgtggctgccctgaccctcggagactgagggtggagaccagctggggggaaaagggctgtgctgggttcgtttcctgtggggcacagagctgacatcaggcagggagcgtggagaaacagagcagtcgattgggaggtggagacttgagcgtaatcattccaacttccatttactgagcgcctcctgtgagtcgggcaaaacacaagtcgttctagttgcattatctcatttaatcctcaatcccgggagacaaggtcggaattgttaacgctcttcctctgtggcaactgatactcagagaggtgaagtacttgccttgagtcacacagctagagggtggcagctggaacctgaactgggactgcttgactctgaagttctttcctggggatgcgggagggttccaagagggtacagaggtgtgtaactcctgttgcacagggctggatacctgattccaccttggaagggaagaaagacaggcgggggtgggggtggtgagagaggggttttccaagggagcccgagagaccgttaggtcctggttgaaggtgcacccggccttacacaggaactcaggaatgtgtgtcctatcttttgaattgtcattaaagtcactcttgccttttactatggtcacactatgggtttccccgatggctcaggtggtgaagaatctgcctgccagtacaggaaacaaagtttcaatccctgatctggaagatcccctggaggaggaaatggcaacccactccagtattctgtctggaaatcccaggacagaagagcctg

SEQ ID NO: 55978 - DNA, 2419 bp, Bovine  19866881372273
  misc_feature (1)..(1): n is a, c, g, or t
nacgctctagagcccgtgctgcgaaacaagagaagtccccgcaatgagaagcctgcgcactgcaataaagagtagctcctgctcactgcaagtagagaaagcccaagggcagcaacaaaggcccggtgcaaccaaaaaaaagatactaaactttatagaacctcaatttcatctgtaaaatgtgtgtggttaacgatacctttcagaattaatatgatacaaatgatttctctaaatctctaacctcaggtcggcatacaataggtgcttaagcactttgtccacttttttttttttttgaagatgacttttatttatgtatttatttattttggccatgccgcacatcttgtgaactcttagttccccggccagggatcgaacgcatgccctctgcattggacgtacaacgggaagtcctgccagggatgtccctctctgtgttttctatcatcctccccaagcccctgtgaggtagggagtgttatcacgccgcccctcttcagaggaggaaactgaggcactgagtgaagttacttgtctaaggccaagtagcagaggttgaacagccctggctccactgtgcaccactctctccttctaggtgggggtgtccttccgcgcacacgctgccctcattcagactacgctgctggcggcttccatctccagcagctctgtctttgcctacatggtccgcactctgaggtctgtctccacagctgcccgcttcacaaaacctttcctgatttgtgactagaacggaatttctctccctgcgccgagcctgtgtctttcttggattttaaatgtaaagattgggacccttgtggtccagtggttaagaacctgccttgaaatgcagggcacgtgggtttgatccctagttggggaactaagaggcttctctggtggctcagatggtgaagaatctgcccacaatgcgtgttccatctgcgggttgggaagatcccctggagaagggaatggcaacccactccagtattcctgcctgaagaattccatggacagaggagcctggcgggctaaagtccatggggtcgcaaagagtcagacacgactgagcggctacgacgcacacgtgcatgtggggaactaagatcccattggccacaaagccactaagcccaagtgcctaactagagtccgtgcaccgtaatgaaggatcctgcaggccacaacaaaaacgctgcatgccacaacgaaggcctgacccggacaagtgtaaaaacaaacaaatacataattcaaacaataaatgcaaggatttgggctcaagccctacgtctgctgcttaactgcagggagtgaccatgggtcactggttcaaacgctgccctcacctttgccttggctgtgtggccctgggtggtttgagtgagtctctatttctttctgttgttatgagtggagatagcctgtgctcagcactaggacaagtggcgccgggattccagcgccagagtgcttgggctcaaagcccagcctggtcactcggtatccacgcgaacttggcaaagttacttaacctttcaatgcctcagtttttccatctgtggcatggagatgctgtaatgatacctaccgcatcatgctgttgtgaggattaaatgagataatgcctggggacatttagaactgtgcccagcacttaataagagcacagtaagcctcggttgctgtaacttctgaggcttgcttggggattaatggagactgtgaaagtactttgtaaatttccaagctctggacccgcacgcagtatcgattgttctccttctgccttggacctgggccatttgtgtctggcctcgttcccctcaaggggcagggatcaagccccaccatctgcgtccctccagaggctctgccttaagccccatgttctgtacatgggattcagggaccctgcttgagcaagcagccctgcctcagtttccctgaggaccccagctgcggccacactgggagctgatcggccagccacctggcatgggcccagcctgctgcttggggctcccggtcagcacttcctgcagagccccagtcagcatctctgccgatgccccgcagtgcgccattctgacccagggtccaccgcagggggtgagcccactgcaggggcgaggcctgcctggagggaggcaggaggcagaactcctaaaacccttcctgctctgactttccaggaatccagcctttggaagttccagagatgctcctgtattccaccccctccagcctggggctctggtggggactcctggccgggggcaggtggggggcattgtggcaggccctttgctgaatcagcaggaccagtggcaggcaagggagagagggttttcccctcttctgcagtttgcatttacttttccaacaggtcagtgcgctgccg

SEQ ID NO: 55979 - DNA, 1295 bp, Bovine  19866881372726
  misc_feature (1)..(1): n is a, c, g, or t
nctttggagcagtctctcagtagtctatctagggtgctctatccgggctatagtcctcattttgcccccaaataaaacctgactcataactcacgttgtcctttgttgttttttttaaagctgacagcactgtgctagttctcaggagcttgcttgcacctccatataccaggaacctacactggcatatttggacaccccccaccattgtaaccttaaacaaacacatccagctaatgcaccccaaaactgcaaaacagaaccaaggctaggtctggaacaatgataactgcaatcgtttgcacttgctctgaccttccagactgccttccagccatctcatgggtaaggtgacctgggtttcttacgagtcattgtaagaattatctgcaacgatcattctgaatcacaagatacttccatctggttctgaccggcgactgagatagggggaaagtgtagcgcctccattgattaatacgatcacctctgctcttggatcaatactgtctgaactggctgaaaaatacaatttttatctatttaggcagcattgatcaggccctactaaattgattcagaatgatgatacggaataatttatgaaacaaaaatgtcagtgtgcagaatagccaagagaaagaaaccgagcttagtcacgggggcctgtgctcagcgcagcccagctctgcaggagctgatgagcttggggagtgagatatcatatgtgatggtatctcctgctggaatgagaggaaagtgacttaagaaagatcccagggaggctgaagcataaacatcctagacccttaaacaggagggatatgcacgtggaaaaggctggaaatataattaaaagatgcttgctccttggaaggaaggttatgatcaacctagacagcatattaaaaagcagaaacattactttgccaacaaaggtccatctagtcaaggatatggtttttccagtggtcatgtatggatgtgagagttggactataaagaaagctaagcgctgaagaattgatgcttttgaactgtggtgttggagaagactcttgagagtcccttagactgcaaggagatccaaccagtccatcgttaaggagaccagtcctgggtgttcactggagagactgatattgaagctgaaactccaatcctttggccacctgatgcagagagctgactcatttgaaaagaccctgatgctgggaaagactgaggtccggaggagaaggggacaacagaggatgagatggctggatggcaccaccgactcaatggacatgggt

SEQ ID NO: 55980 - DNA, 1081 bp, Bovine  19866880410163
  misc_feature (1)..(1): n is a, c, g, or t
ntatataaaatatgttgttacttgtaagtatggcaaatatcttttagtttatggctaactttttaccttcttaatcatatctttttgcggagaaggcaatggcaacccactctagtactcttgcctggaaaatcccataggctgcagtccatggggtcgctaagagtcagacatgacttgagcgactttcactttcactttttcactttcatgtattggagaaggaaatggcaacccactccagtgttcttgcctggagaatcccagggatgggggagcctggtgggctgctgtctatgcggttgcacagagtccgacacgactgaagtgacttagcagcagcaatcatatctttttgatgaacagaagtttttaatttcaatgaggtctaatttattaactttccttttagagttagagctttttgcattctgcttaagaaatctttgcctaccccttggtcaagaagatttcatactatgttttcttctagaagctttattgttttaccttttcattcctaggcctgcaattcattttgaattacattttgtgtttaatgtgatgtagggctcaaaattctttatattcattccctatggaaacccaactgttccagttcaaattagtgaaaagtctgtattttccacccagggtaggaggggtgcacttaacctatagatctagtctttaaaagggatctggacccgtagagtgttaaaatctgagagggtctctgaactagggagagggtctctgaactgtgcctcagaagaaagagatgaacgggcaaggagtctagatgctctgagctgggatagtatggagccatcaactctaagatggatgggacatgtaagggaaaaagtttggttctttccatttctaaaattctgtctccataatgcttagaaggatattgcaccaggccagactttttaggtgtttctggcaaaacaagatttccaagaaattacccttggagaaaagaacctggctttgcattttacaatgttttcattactcttcatattgcccaggctaaatatttgcttccggagaacacgaaagactttaaaca

SEQ ID NO: 55981 - DNA, 4727 bp, Bovine  19866880596961
  misc_feature (1)..(1): n is a, c, g, or t
ncagtgatgctgccctcactccacaaaggttaagtaatggggacaagatcccacaaatagtaagagccttcaggcaaggtttgaacccaggtctgtatgttagtcactcagttgtgtcctactctttgtgactcagtggactgtagcccgccaggctcctctgtctatggagttctccaggcaagaatactggagtgggttgccatttctttctccaggatatgattccaaagctctcccctaaattaggttatgataaaaatttgactgctgcccacgtatgattccaaaacactcccccaaattaggttataataaatatttgactgctgcccaccagttgttgacagtaaggttctaagcacacaggttagagaaatgctactcctctccagcttagtgttttcagcaccacggacagcgcccagttctttgaaatagttgctgtgggaatgaatgagtgagtgaatgaatgaatactgaattgtgacagcctcttccctccgtgtggagcaagctcccagagacactcacattgtccttggctttcagccctcagattacaacaagtggaagttcaccaacagccccacatttctggaggtgctggaggagttcccgtccctgcgggtgtctgccagcttcctgctctcccagctccctattctgaagccccggtactactccatcagctcctccagggacctcacacccacggagatccacctcactgtggccgtgctcacgtaccgcacccgaggtgaggctggggcagtgactgcggagcagcccaagtctgctacttactggacagccattcaacacctctgagctttgatctcctcatcattacacacccatcttccagccctgttaacagcagtgggaggagtatgggagagatcactatgaactgggcaccaagctaacttctttgtagatgtgacctgagaagcacattcacatggtttctgaaaaccaggcagagaccctctttgctctgctaaagaacatttgcaggagacctgggttccatccctgggttggaaagatcctctggaaaaggcaatggctacccactccagtattcttgcctggagaattccatggacaaaggagccttgcaggttacaattacagtccatggggttgcaaagagtcaaacgtgactgagcgactttcactcaaagaacatctgaaaaggccagggctcagtccttggggaggggaggcaggtgcacatcctgtgaaagcaggattccaccttgagggaaaccaacaggacttcttggtaggagcactggagtaggagttaggaaagctgagttgtgacctgattctaccgttacctgaggggccttgtacaagtcaccttccctctctgagactcagcttctgcagtgagatagccttgcccgctctgagtccctttcagcttttgccaactctgggcacatagagagtagagctcagaaccgggaggaaaagcagccctctgattaaaccctgttgagcgcctgagcgggcagttcagggaggagccactgaaagcgttcatgcacgggtggcggggaccacgttggtcagtttgtgctgtccttgcagatggccaaggtcccctgcaccatggtgtctgcagcacgtggctcagcagcttgaagccccaagacccggtgccctgctttgtgcgaaggtaggcactcctccactgtgtctattgtgggaccacgggccccggggaatactgggttgaaagggaggcttctggggtttagatgccacttggggtctattggcctataaagaaggcactggggtcatcacactgggtgtctcctcacactgggtatctcccctagcgatagagcacagccaggtctctagcagggaggttgacagcagtggtgggctcagaaaacgaggctcagcctttttcccaaaggaccccagggtgaggtgatggtgaatgtagttcacctggatgggggacatgaaatagcctactggacttgggaaatcaaatttgagctcgttgtctccactgcaaccccctgcccctcaacactgctgcctccaccacaccctcagttcccgtgcccctgtcctgtgtgcatgcatcggacccagagtctctgaggacaggacctctttccttctgtcccctcagtgccagtggcttccagcttcccgaggaccgcttcccgtccttgcatcctcattgggcccggcacgggcatcgcccccttccgcagtttctggcagcagcggctccatgaggctgagcacaaaggtataaccggaaggctcccggggatggggaggggtggtgcccagcgcctgcctgggagtaaaactgtaactgtaaccatcccacagacatttcctggcccctctcccaagtttacctcagcatgtgtggaaaaatgatatgaatgccctgggcctcagtttcctcatctgtaaaatagggacagtactattttagataggatgtggtggtgaaatgggattccagttgggtgcccagctcagccagccttgcaacatgatccgcctgccctctgctggccaccctggtaactgcacacctgctctgggtcttgcagggctccagggcggccgcatgaccctggttttcgggtgccgccgcccagaagaggaccacctctactgggaggagatgctggagatggcccgcaagggggtgctgcacgaggtgcacaccgcctattcccgcctgcctgaccagcccaaggtaaatgccacaactgtgcgtgtagaaagggcggagcatttaaagaacagactatggtgggtgtctggctccccacaagctccttacttctgtgagccttcacctcctcagctccaaaatagaggcaagggacttgcctggtgttctaggggctgagactccatgctcccaatgcaggggaccgagttcaatccctggtcaggcatcaagcaactaaagatcctgcatgccgaaacaaagacccagtgcagccaaataaatatttaaaaataaaatggaagccatggtgcagtcaccagagcagtgctgtgaagctactgatgtacgttcactcttccaggagaagagacaggtcctgagatggtcagggctaagtcagggtcatgtatgggttcatccccagtgcccagcctgctgaaggctcccccctctggatgtacaactgttgggtgggtggtggtccaggcaccgcaaggctggagggtggctgctgttccctgaatggcctgctgactcactctgctaccccagtgggcactttgccccaagagcctgggcaggcagaacagtctcttggctcagcctttgtgaacttgtcccattgggcccctcccatgctggtactccgtgcctggtggcatctccatgcctggtggcatcacttgtgtgaagcaagagcagggagtccccgattgactccaggacttctgaatatctggggaaccctgctctgaattacaaggagggtcccctggacagtctgcactgagaggctccgttttctggggtgtaagcagatgggcctcagatccctgggcagggcaagtggcttgattgatgcctctttgaagtgtgataaattcagagcaagtgtgctaaatctgggagctccactgaaggtcagcttctcaaggacagggctgtggccggtgttcacctctccagccccaactcaggcctgggccaggcagggcaccagtgcacctcctcatctcgaccttgattgtccccatgcaaggccctggctgggagggtgctcaccccatggccccttgtgccccctccccacctccccatggccaggaggcctgactgcagcctttgccctcaatggcgggggcctggacccaccatctcctctggtttcaggtctatgttcaagacatcctgcggcagcggctggcgggcgaggtgcttcgcgtgctccatgaggagcaaggtcacctctatgtctgtggggatgtgcgcatggcccgggacgtggcccgcaccctgaagcagctgatggctactgcgctgagcctgaacgaggaacaggtggaggactatttcttccagctcaaggtagggccgctggtggtgtgtgggctcgggatgcaggtcacaggcatgggcctgggagctggaaccagggaactcaggctcagactgaactcaaaggaatcctagagagggcaggaggtcagagctggtgagctgttagaaggcctgactctccatcctgatctggttgctcagttggacaaaggcaaacatgttgattttctgcaagacactcagagtccctaacatgctgctgtgcatcaaagagcttgaagactgggagaaagtgcacagcatttcccaaccatatttatctcagagcccacagtgcctggagccctgtgggacaagcacagggcaggctcagtcgtgtccgactctttgcgacccggtggactgcagcacaccaggcttttctgtccttcaccatctcatgttcactgagtcaacgatgccatgcagtcatctcgtcctccatcatccccttctcctcctgccttctatctttaccggcatcagggtcttttccaatgaacagcctttaatggccatcataaagcttggggagatgttttgtggttcacaccagagtgggtactcatgggagctaaagagttttaagtgagattcaaatctaatctaagcattg

SEQ ID NO: 55982 - DNA, 1253 bp, Bovine  19866880209063
  misc_feature (1)..(1): n is a, c, g, or t
nactggaaaaaccatagccttgactagacgaacctttgttggcaaagtaatgtctctgcttttgaatatgctgtctaggttggtcataactttccttccaaggaataagtgtcttttaatttcatggctgcaatcacaatctgtagtgattttggagccccaaaaaataaagtcggacactgtttccactgtttccccatctatttgccatgaagtgatgggaccagatgccatgatcttcgttttctgaatgttgagctttaagccaactttttcactctccactttcactttcatcaagaggctctttagttcttcttcactttctgcgataagggtggtgtcatctgcatatctgaggttattgatatttctcctggcaatctggattcccgcttatgcttcatccagctcggcgtttctcatgatgtactctgcatataagttaaacaagcagggtgacaatatacagcctgacgtactccttttcctacttggaaacagtctgttgttccatgtccagttctaactgttgcttcctgacctgcatataggtttctcaagaggcaggtcaggcgctctggtattcccatctctttcagaattttccacagtttattgtgatccacagagtcaaaggctttggcatagtcaataaagcagaaatagatgtttttcttagtttcaggaaatagggtatctagttagggagagcttgctctacctgggtgaggaaatctgttcccctggccctggcccattgacctgttgtttccattgccagacttaataggctctttaaaaaagacctggcagatctttatctataaaccattagctaaagctacaccaaacctatgaaattcagtcccagcctacatgagattttaattttatgggcccaagagtcaataatgaatactatccctcaatgtgacaagaggtgcaaaggctgctcacttccttgactatctggattatttcaaagtatttactctcttgttggcaatcccaaacaatagcgaaggcaactaagccatttttaagacatcaagttgttgatttgtctagaatgactcagctgagctttcttttgtttgctttgttgcttgaattaaattttttttcactcctccaaagggatttgctaacctattctttcatattagagaaaacagtacatatctaacatcacatctattatattttttcttttgacttggataattctaccttccttagtagaagaaaaa

SEQ ID NO: 55983 - DNA, 1314 bp, Bovine  19866880220860
  misc_feature (1)..(1): n is a, c, g, or t
nacatcaggaaatattttataaagacagttttctaaagaatatgtgcaattgttctcagagatgaaataaatagtaaatgtgtttcttgtattggctaaactgctgctgctgctgctgctgctgctaagtcgcttcagtcgtgtccgactctgtgcgaccccgtagacggcagcccaccaggcttccctgtccctgggattctccaggcaagaacactggagtgggttgccatttccttctccaatgcatgaaagtgaaaagtgaaagtgaagtcactcagtcgtgtccgaacctcagcaaccccatggactgcagccttccaggctcctccatccatgggattttccaggcaaaagtactggagtggggtgccattgccttctccattggctaaactggtatttctaaattttaaaccaaggtaggtggttttggtttatactgttaattgatagcctgggatatattataattttaagtttatttgagcaaaaagtgacacacattaggaatcattcaatctaccagataaaaaggagttccaaaagagtttaataggcagaagaaagtagaataaaaggaagtaatactaggcaaaaaggtggactgataattgcaaagttatttccctttggggattacaggctactatcaagcagattatctaactagtgctaatcaggcaatttgtgatcaaccagtttaaaattccatttctggaagagctgaaagtcttggtttggtgatatggggtttagtataaggaactccattttgggcctattatctagtttttaacaacatttaaggcaatttccatggtgtgtgctcaggggtatttttagccatttaaaaaatacagctcagggtttccatctagatttcacatccccctattcctcagactagagcttagtcctaaagggactggtgctcagaaagtatggctcatttcccacaatatttaaggtttcaactacacagttaagaatgaaaaatgaataaacaaattggacttgccagagcttgtattaccagtcagaaaagcagagaaggagaacaaagagaaaaaaagcttatgtgtctttgtcccattttaagcaatgttaacacacacagtttaggaaaaatctctttgcctccatttacccaacatggagattgatattgcagttctaagtcatgcaggaagcacatactcacacaaggaatgcaacagtgaatgacttctacaaaaatatcccttgcttcactctattttcctctaacgcaggatcacatagagattgctgacaatgttaattcactttgtg

SEQ ID NO: 55984 - DNA, 846 bp, Bovine  19866880372469
  misc_feature (1)..(1): n is a, c, g, or t
ncaaattggagaatcaaagctacaattagccatgtagacacaactacttaattcaaagagcagagtaaataagatggaatggaatagaagagtgtttgatttgattagcctcattagtgtaggattggtgctctcaccttttcactctgcagtatcagtggtttcatttccctaataatctacttctgtaagaaaaattgctgacattttatcattttcaagatgaagacagactttttcatagaaattttgaatcatttacataaatttacttctttttataactttcaagtaagttttacccttaaagtcagttgactaaaaaaaaaaataaaagcaaaaaaattaaattttttttgtagtcttcagtttgttgcttagcctgacaatttttatttttacataaaactggccgcttttcactgaaaatttgacctcttaaagcacatatgattcttcatattatactcttcctaggcaaaatgttattcttcaattaatttaagaaatatttattcatcatttgttactaccttgtaccctttcagtcactgccagtgactcacgaagcttaaaatctacttacatgatacatacattaatattcaaataaataagataatttccaaaagtggtaagtgtcatgacaaatataaaatagggtaatccgggaccttgagggaaatgacagactttggatacggtgctcagaatagtttctatctagctcaggcttctctggtgaccctaggttaaaaaattcacctgcaatgcaagagccacaaaagactcaggttcaatctctggggtggggaagatatccctggatgagggcatggcaaccca

SEQ ID NO: 55985 - DNA, 714 bp, Bovine  19866880408355
  misc_feature (1)..(1): n is a, c, g, or t
nggccccttagagatttagatatggaatgttaatgaatgtgttatctaaatcacttagatggttatgttttagtattattgccacaagattcctagctccactttacattatgggaaacatctcatcaagaagtcttttctttactgtaggagacctggagagcacaattgtgagtttctttaccctttacacaatagaattgggagattatcatcaactttctattcatattttgtggaggttatctaatttatgtgtgtatatatttatttatttatttattctgacaaatctttgtctgccaaagctccctgttcaagccagattgctctgatgatttcccctgcaaaggtttgagagagaaatgttctatttctttgtcaataaagattgatggcattttgagaggtgcagaatatcctttgattgctccatgaaacagactggaaaagatgttcgtgggtagtggggggtgggctcactcatcagctttcctttgtgcagttgctgcagttgcacacaccctcatcacaagcatctttgtgtgtcggtcccttttctccttcacctgtccaaatgaaattttccattgtactcctaacacaccagtgttctcaagagaggctaatgtgtgcactgtagttctcactcaaacactgtagacagatggctgtgaaccaccctctcattatactttagcaaaggttgaattg

SEQ ID NO: 55986 - DNA, 1635 bp, Bovine  19866880447386
  misc_feature (1)..(1): n is a, c, g, or t
nagaagatcccctggagaagggaaagggctacccactccagtattctgacctagagaattccatggactgtttagtccatggggttgcaaagagttgagcacaactaacgactttcactccatttcacttccagatagtaatatttgaacaccaaggaaagtggatgaggacactatttaaagattcctgaggttggcaggggtaacagaatttttccttcatttcctacaatttcttaaaatatttcttagaaattttatgcatcacttttcccaagattttgaaaatttccattggtaaaatttgcagaacagtctccttgtgactaaaaaatttctcttaaagaaataaagaaatgaaaacaataaaataaaaaagtatgttaaaaagcatatatgtgaggagccactgctttcctactaaataaattacaagtaaaaaactcacatgtctggatcaagagaatactaaccatgctatggttcttccctctgattgacctcttgtcaatatgattacaaatgagaggagtgaatcttgtagtgtccacactctctcagagaggtaaacctaaaatggattacttctgctccttaagcaactgatcaataaagctgtggattgcagtgagaacggaaatgtctgtgggttgtagcagttatcctttgtgtctctttagaaattaattaaaaatcaatgaagtgtgcagcctattaatacagcaacctctagatcaacagatagaaactgagcctttctctgagcatacatattgtgcgaatactctcgaacactataggggaggtggcttggatgtctgatgccttagttatcattgaacacaaacagatcgttcctaacattctctattttcacagagtcacatgcgactggttggaaaccatcaagttcaatgtgtgggaatatgtatgctatagtttccttcttaagacgagtatataaatttttatgagttatccttatacaaagaaagactttggctgcaatataaaactaaagacttactataacttttattttgtgatttatttacatatgagtctaggcagttgatttataactactgaatatttttaaataagcatcttcctatgaaaaaaaaaagtaaaattcctagatgctaaaagtcctcatatgatataagcaaattttggtgtctacatgtaatacatgtcattcaattcagttcttcctctgttctatttggatgccaatggacctggtccatctatgcaaatgcttacccagcacattgaaatttgaaattaaaatttgaaatagtggtcctaaaacacccccttctgcaagtcatccagctacttcccaatgcttgctctgactgctttcctcttgcttagggtccttcctcctcaaaatcttcagaaggatctgaactatagcttccagttttcatcccaatcccttgcacttgatttggaagcccattttgatatatttccttatttgaaactttatactctccctctgccagaatgctaggactttagtccctgagtaagggcataggagaaagacacatctgctttataccttgtctcattttctatcctgacattactataaaaggagcagatatcatcacaaaactataa

SEQ ID NO: 55987 - DNA, 2880 bp, Bovine  19866880525141
  misc_feature (1)..(1): n is a, c, g, or t
naacagcttttaattaaattagaaaaaaaaataccgccacaggcaacacttaaactgacaaggaatgcattttgttaatctttgcagagaggcactgtactctgcacttaatttaattagatagagaaaaggcctgtttagtcctagggggtttaccaatgtccttttaaattgaggacacagcatttatataaagtcattttaatatcaggcaatacatttctaaacagtaatttaaaaatattacttgctattattaaatgataccttgttgtaacttctcacttcatgaaacgactttcatttcacagagaaatttcacccaccaacaggctttttgcttccctccaataatttattgacttttaaagtgttaaataattaggattaggttccctggaaaacaactgcactagggaaatgcatgtcaaaactatattacaatggataatgtatttggattatctttctcttctgggccatggtagtgaatgataactaacttttatattaaaaactatattacagttaagaagtaggttatattctgatgccactcctggtactacagacagagaagagaaatctttaggatgatttattcatctttttatttcaaatcatactctccaacactttaaaattttcacttaatatttatttctacctctttcaaccaccctaagaagctagatgggttatcattatattacattaaattataataaaaatcatccagtatcatattaagtaactaagtataagcaactacagttcaaaaagcaagttatacactaagaaatgttctgtttcatgagattttgtttttaaatacagaaatgtagagaacactgttgctctatatatttgggagaaatatatatatatatatatatatatatatatatatatatatatatatatggaatcccctggtggttcagtagtaaagaatccacctgcagtgttagagactcaggttcagttcctgggttgggaagattcccagaagaaagaaatggcaacctactccagtattcttgtctgagaaatcccatgacagaggagcctggcgggctacagtccatggggtttctaaagagttgagtcaacttagcagctaaacaataacatttatatgtgtatatatgtacatatatacctgtattttaattccttggactttatttgctaatttactcttcatgtcagtagttgagagtagacactagcctaggtgatagtgatctgaactagttaaacatggcctatgatagcataaaacttagaatcctactgcctgggggattgtttctgtctgtggtttcaggtttaggtgaaggttggagcaatttttgagcaataaactactgaacaagagattgattggaggtatgttaatctctcttttggttatctatccttacaacatgttttgcaattacaaggatgatatatgttgacgaaattagtccacagcaagtgggacaaattcactttcagtaatagctcgtcagcatgtaatttttcagttctgatctgaaaacctagcagacctctgatttaaaattattgtttggggacaaattaagaagtttgttttcaagaagaatgtttcctggcatttatttgcacagagacttatataactagtccaaattcatgccccacttatgtaataataatccattgttaactctttagcacaaaagtaaggaccaaagggacaaatgctgagcatcataacaacttgggagacactgtatcaaggttagcaaaatgggcttgttactatgtggacctgtacgtgaatctcagtcctgtcatctgggcttccctgatagcttagttggtaaagaatctgccagcaatgcaggagactcaggttcaattcctgggtcaggaagacttgctggagaagggatagactacccacttcagtattcttgggcttcccttgtggctcagctggtaaagaatctgcctgcaatgtgggagacctgggtttgagccatgggttggaaagatccccaggagaagggaaaggctacccactccagtattctggcttggagaattccctagactgtatagtccagggggtcacaaagaatcggactttcactttcactttctgtcatctattatctgaattattttaggcttattccttaaactctggaggctcagattctctgtgcttaaaataatagtaacaaccatgcataaatgttgcttaagaattaaatttttaaatgtaccccaaatattatagggcttcccttgtgactcagatgataaagaatctgcctgtaatgcaggagatcagggttcaatccctgggttgggaagatccctcagagaagggaatggcaacccactccagcattctttcctggagaattccatggacagaggagcctggtgggctatagtcaatggggtcgcagagtaggacacgattgagtgactaacacttccactttcacttttcaaatacttattactaaactttcatgtatgttgctaataatgttggatgttattgtgttcgttggcagtaactaggactttaaaattgttctacatcccttgatgatttagagtaaatgcttttgtcacagttaacagaaaattgtacttgattttaaaaacaggcaaaatatatcattttaactaaaatgaatctagagtagaataaaagttgttatcatagatttatcttcagtaacccaggttctctccatatgtgtgtgtatatatatatattttttttttttttttttctctgcccacacatgtgttgacttttttgtcctcggatttgaatcttcatgatcgtcaagtgcttgctacagcctgctctcacaatttcacagg

SEQ ID NO: 55988 - DNA, 1750 bp, Bovine  19866880598203
  misc_feature (1)..(1): n is a, c, g, or t
ntataatgtcggtgttggacaaagaggtcttaacaataaccaacaatgctgagtgtttcccattgaccaggtgcttttctaggagttttacaaggactaacatttaattctcataacaactttgtgaggaaagtactattaatatccccattcaatgacgactgctactgctaagtctcttcaatcgtgtccgactctgtgcaaccccatagacggcagcccaccaggctcccccatccctgggattctccaggcaagaacactggagtgggttgccatttccttctccaatgcatgaaagtgaaaagtgaaagtgaagtcactcagtcctgtccgaccctcagcgaccccatggactgcaaccttccaggctcctccatccacaggattttccaggcaagagtactggagtggggtgccattgccttctccgattcaatgacaatgagactggcaaattgagaacctcactaatatggttaaggtcacagaggtgtgtttactgagtgattgagctaatattgaagcctgtaaagttttgttctgaagagaacagtcatcattatatttcactctctaattgtcaaagatgaacaggaatgcattgcagataatcctttagaacatagtttgtgtgatatgtatgttcaactttcttctatgtgagatattaactgcctaaatctgtgaactaaaaaaaagcacaaataaagatagaaactttcaaattccattttggcaatgggcatgagcagcactctgattttttgtagaagaatagatagcatttagtgcaaaacccccaaggttcctgaaagtaaagatattactaagcaatttgcaacacatgtaagtaaggttgaatatctgcagataatttaacatctaaaatttttaaaagaaagcaaaaagcaattattctacaattaacaaataaaaaaaaacaaagggacattataataaaaatcattataaacaatgcaaatttaattccaataatattaaacatatattatcctttttgtctttctttgcttgtaattgtaaaatgatatgtatgtgagtatatttattattgctttgagttccttctctcctaatctggtgattcagtggcaatagaaagagtatggatgaatagatggagtagagagaaaaggtaatcaatcagtcgactattatttactgactgtctaaaatgtgatgaaattggtaaatgggaggagagtcaaactgaattatgtcatctcagcaggagtacaccattcacagctccaagagttcatagtccttaagggtttgcagcaaaagaatgaaaggcagtcagattaaatctttagcttttagattttgaacaagccaaaacatagctttttatttctactcctctctttggtacttaattatcttaaaaaaatagttttataaactaatcatgtcagtagatgagtgcttatttgggaatcatggttttgaggttttcttctacctttcgcctgaaattgataacattgtataagatgttgtgtagtatttctaaagcttagcatagaagttgcagcctaataaaatataagtggcatgttctttctgttttataaaggaactttgatttagccatacaaaagaaagttgttttatcaaaattgattatctcagggctaagtttaagataaatggatagtcagggactactatggcagtcgactcagggggcgtgggtttgatctcggttaggaactaagatcct

SEQ ID NO: 55989 - DNA, 1287 bp, Bovine  19866880763667
  misc_feature (1)..(1): n is a, c, g, or t
ntcttaaaagggtgcaatgcacagcacaaagccttctactccagaattatcttctgttacttcagcttttctagcctattactcatcagtgcacccttactcacacacacacacacacacacacatatatatatatacacacacataaatgtaaatacagagagacagaggcagagagagagaaagcaagagacagagagatacagggagacagaaagatttgctgttggttttctataaatatttaaagtgtatattagagggggaaaaagacagacataaactgtagtgtttagggatgctaacttgtgctgaaaaactgtaaaggaagcaaagtgattatcataaacatcaaatgactgattacctatgaagtgagaaggacacctgtgtttgagatggggcaactgaaaggggcttccagagtgtctgacaaaattttatttcttgacctgggtgatgatagcaagggtatttgtcctgtgaaaatgtactgggctgtgcatattttggggtagttttttctatatttgttttagattttataataaaaaggaaaagagtctagagaagaagctaactcaaatcagagaataattgccttggaaaccataaattcactgagggttttaagtattaaagttcaaaagcaacatttactgtataacatttcccttagcctctgtggaacaactgacattatttaactgacctattggaataaaagaatgctattgtaacagttaaataactttttgcataatagttgtcactgaagttcaaaagactgtttggagatgagaaagcagctcatcattggtagggttagaagtagtaaatccactaagccgtggtctcttgagcagtctaagctacaacacccttggctagtgaattcttggcacttaaagccaacaggaagccagatcagctgtccagtttctgcaggtgcacacttagccaaataaaaagatgccaaccacattcatgggatcactgaaaaatagtttataaaagctaaagggtgatctttgggaaatgatattacctatactagaaccattgtctataccagcattggacaatagctctgggtaaggaaaaataatttactgaaccctaaggattcttaaattaatatatgagtagctggagcggggttggtggtgtcaaggaaagaatgagtacacagcttaatgctccaatattaacagacaaaactgaattcccagatatgcactggctatgtctacttgaatgtgtcataaacacctgaagtatatatgt

SEQ ID NO: 55990 - DNA, 1245 bp, Bovine  19866880765162
  misc_feature (1)..(1): n is a, c, g, or t
nttgcaggtggattctttactgtcatcatttccttctatctctagacaaatatccccagtccaaagacatgaggacacttgcttttgctctaaatgtttatactatcaaatttctatgtttcttataacacttaacacagcccatttttcatgtagtctggtgctagaatttaatatttcctatagactcgagtcggacaagactgagagactgaactgagctgacagactgtatactctctgaggcagtactcatgtttacaatttttaaatcacagttccacagtgcaaagaaagatgtctttatgagacagaaaatgttttctcattagtaaataaatctgaaagaggacataatgatgctaccacagataaccactggcagataaactgcaaaaggtaatataaagccccattttggtgcaaagcttggttttcactttgcatgtgtctgtaccctggtgggctacagtacctggggtcgcaaagagttggacatgactgagcgactaatacacaccacacacacacacacacacacacacacacacacacaccttgccaatgaattctgggactcctgccgtgttcccatctgttggaaccaatcacgatatttgggggcaaaatattggggcaaaatatttaagcatccagttaaagaattttatcatctgacataaaagaacacagcatttgctgttcaaatatcacatatttcacgtgctttctctttttcttcagaggaaggggaaatttcatagcaaagtgatcttgaatgagaagactcttggtctcagggggaatgtagaacaaggtggcaggtgatgggtatgctgaagtgtggcgtaactgactgccaaagaatacttgaacaagcagctgatccatctgccatcagtggagctggcttaatcctttctttttcttcttttttttaagtcacaatcaaccactatgtaaggcatttgatcttcatgtttttcctcttgctgtctttagagaaatggcatgtcatcctaaaagactggtcagggaatgaggagtcctgtgttctagttttgctgctgcccctgtatagctgaaatattttatctcatgagacttttcagtccttatccatcaaatgacagggaaggggtatgttccatttgtttctgtaacttcataaatctattccttttctcatgagagaagtaacctgcatggtactggaacatggtactgatacttgtacatgggaca

SEQ ID NO: 55991 - DNA, 1066 bp, Bovine  19866880782826
  misc_feature (1)..(1): n is a, c, g, or t
nactcctttgatagtttatattaaaatgctacattagaatgaactctgactctatatttgcttctcttgaaattattcaaaatatctagaattcatggatttctttcatatgacacattatcttaaaactggcaaatatttttagttatgtctgccaatctctgtggctaataaaagtcatttcacagatttacactcatttcattatttcaatattgtagtattgcttcagtggcttattattttctttgagaaatttcaagatcagaaatactaataacattttctcagttttaaaagaaaatgataatctagtttacctttttttcctgatatagcatatatattgctatattacatttacatcttaaaccaaatattcaagaattatcttaaggtaatacattgtaaactattttaaaaattcatgctttaaattttaaaccttgatgttaaagcaccatcacattagaaaaaacaaacaaaccaaccaaaggatcaaaatgcttattggactagttaccaccaatttaataaactccaagctaattttcaaatcaatgtattattagattaaaactgcctagttgagaacttgccaaaatagaatacactaaaatttaaatgagacatttaaaaacctctttaagtactgggggatgtatattaccctttttatatcctcaacattgtctagcattgtattttccacttggcaaaagctttaaaaatacattaagctaattgtaggtgacatgatctaatagcaatgtcaaaggttttagttattattgttgtgttctgtagcatgattatgtacatgttcttgaataaatacaagtagaaatgttgcacaaaagcaatgcagggattctaagaagcgatatgaaaatgaaaatggaccatgagtattactgaaagagaataattggatggaaaatttctgtgatgttatactctgagaaagcaaaacttgagccatattgaccataataagaaatgacaaagcttgaaaagctatctataaaatgtctttcaagcagtagcttttcagataagcaaaatt

SEQ ID NO: 55992 - DNA, 876 bp, Bovine  19866880803283
  misc_feature (1)..(1): n is a, c, g, or t
nattaatatttgattaaataaaaaaattacacagctgtcatttagtaggaatataattatattcagttctttaaagaataaggtctccgaagtcctgagctcatcttaaaagaatattaaacataccaaaatagtagatattacttggggctactacatagcactattccagagagtgctattcacataaaaatgtttggtttatttaatttcaccatatttgcacctcctctttaaatttccctgatgttcctcttatactctaacactcttcaatatctttactaattaattatcatttaaaagagagaggagaaaactaggaaaattgaaaagtatgtgaaaattgatagtgaacgatgaattctgactgcatccactcgatgtattttcaaatggaaagctccaaggttttcctaactgcttttcatggcaatagagagtttcagatcttaacttcatagacatgtgttataaatcaatgctattacctcattcacaaggaaatagaagagaagcagacatggatcccaggacagtagctgtactttgttttgcatcaggctaactaacactggaaatgtgtctgtggcaactaaaccatctgttcacttgctattttgcagggttgtttgtctgctttaatgtacctgtacatcccatttcacaaaatgcattagcattgtttcagagaactgtctaggaaaaaaaataggaagccactcaatttcaatattagttgtaggaacagtgataatacagaaactgcacatattttcataagggaaaaaagcccaatagtcaagtatataaatcctaattttatttagagtacaaatgtctctaagtatctttttttaaaagattgcaagtaaa

SEQ ID NO: 55993 - DNA, 1696 bp, Bovine  19866880830309
  misc_feature (1)..(1): n is a, c, g, or t
naccttgggcatcttatgtgaagattgactgactggaaaaaaccctggagctgggaaagattgaaggcaggaggagaaggggacagcaaaagatgagatggttggatggcatcactgacttaatggacatgagtctgagcaagctctgggagttggtgatgaacagggaagcctggcacgctgcattccatggggttgcaaagagttggacactctgagtgactgaactgaactgaaaccataacaaataatcttgccactgaacataatatgaactcactgtcataaaacttgcttcagaaactaggccatgtcattctaatcaccatgttaccctcctcaaccatggtgttatcaagaggaaacactaaatattccttgaagtaaaccaattataacttggaatgcctgttatctctgaagaagaatggctgtgttaaatgtgtctgtgtttccatttattaattaaattagaagtcttcaacttttctagtgtaatattaaagaacacaaaaactggaatttcagacataaaatttttgatcctcacccagtttgtgcagatccaagtgtgaaatcctaggaaattcagttaagttctctaataggaaattcatttcctcatcagtaaattagaacaattattctaaagtacttatcacaggaactgtacaaattaagcactcagtaagtggtagctatcatttttatatgaaattagctctgtaggatattgacgagtaagtcagtatatattccaatatgtgtttgattcaagaagaaagctgttgatttaattacaaagttatttcatgctaagataaacacaaatgcttacaactgagatatttggtaattatgtatagattattctaggtttgtttctaaagaaagctgaaactaagtgataaaagaattaattctgtatttcttttagtagtttagcacatgataatgcaattttaaaaagagtaaaaacatttactctgacccttaagaattaaagaattcttaattatttaattcaatcattatattttaaatgttggatctgtatttaattttattgggaaaataatttgtcagtatattatgtgagttgaataacattaataactaccacttgccccaatctgccaaagtttatgaaatgctaacctacttcagattggctaagttgtctgagattgtggtttcagtctgtctgccctctgatgccctctctcagtgcctaccctcttacctgggtttctcttaccttggacttggggtatctcttcacgctgctccagcaaagcgcagccgctgctccttaccttggacgtggggtagctcctttcggccgctcttgggctgtgcagttgctgcttctttcaaatcctaaaagatgatgctgtgaaagtgctgcactcaatatgccagcaaatttggaaaactcagcagtggccacaggactgggaaagttcagttttcattccaatcccaaagaaaggcaatgcaaagaatgttcaaactaccacacaattccactcatctcacacgctagtaaagtaatgctcaaaattctccaaactaggctttagcaattcgtgaaccgtgaacttccagatgttcaagctggttttagaaaaggcagaggaaccagagatctaatttccactatcctttgaatcatcaaaaaagcaagagagttcca

SEQ ID NO: 55994 - DNA, 2236 bp, Bovine  19866880887103
  misc_feature (1)..(1): n is a, c, g, or t
nagaggtatgctgctatgcaattacactaggtcctctaatgaattttttaagtaggcacataggatatatttgggagttctgttactctaaaggaaggacttttaggatggttactaacacggacattggaatccagtctgttgcatatttctagaacccagccatatatattatatcatccattatgggaaaaaaagccactattttttaattcaagaaagacgtcctgaggtaccttataatattgtacttttacacatttaataaaggaaaattatctgtatttatttaaatgctgatgagagacggtgagaaagagggggaaagtgacatattgccatttatactgtggaaattttacttcaatacaacactgtacttacttttgagcattatcatttagaggtcctcatagattcctgagaattgctctacttttgttcaatgactttgtatagaatgagtttttaggggagaaaaataagtttttttcccctctgagggtccctagctaagaccccagtaataaaagacaaattaacaacaacaacaaaaaaaacaaaacagaggtatatccacatgtatacatcatatgtacataggagatacccagcaaaaaatgaataattgccccgtgaggcttagcattcaagattaaatacgatcttgatagggtaaggggagggtctgtaggcctcctttgttgttgttagttgctcagtcacatctgactctttatgatcccatggactgtagcccaccaggctcctctatctatgtatgggatttcccaggcaagaatactgggagtggtttgccatttccttttccaggggatcttcctgacctaaggatcaaacctgcgtctcttgcattgtagatggattctttaccactgagccaccaggaaagccctataggccttgtagggggagaggaaataatttttaggaaagatggggtgggccctatgggagaggaaatgggaattatgatggtttgtgacaaagtctgtgtgtggcgttgatatctagtctcatctcctgtgacaacagttactcttccccagttgatgcagctcctgaggaggggcctgataatgatgagtttatttggggagagttatctttaggtagataagaggagttcagagaaagtgttttgctgcatttgctattttccaagtgctttacagctcaaaatagcctaatgcctaagtggcatatttaggggtgtctcattctgctacccttcagttacctcaaaaacctttaaaccctagtatttcccctcacttttttcttctacttacagaattcactgagcttccatgaaaaatttaaaagcactggatagtgacaggtgtgtcttttttccccctgaaccatggaacattttagaaatagtgcattcagttttcttatattttgaaattttgttggagctcagatctgtcacatataagccagtaccaaagaaactattctggcaggctgtcctagattcaacaaaaatttactcctctgagtcttgaattccttgacaataacaaggatgttaaccacaaatttggaaaaggaaacttattcatatttcactccatcatcaaatatgttccttggcttaaaaaaaaaataccagaaaatgaaaacatggtacttccttgtagtaggaagacaccttgtacctcacacggaaaggcttctgaaccttagtgctcagaaagtgaaagctattgtgctaaacaacaatgccaactctgaggatacagattttaagtaaaaggttagcaatatctcttttaaaaatgtcagagctcttttgagtcaagaacatttctcacagaatgacaataaaaatgccctgtgacttcctgtactttcattgagacttcactaccttgcttccacccttttgccaattgctagacaaagtgcttctaaataggaccctactaacacaaagcaaaagggtctgacctttgattatctgaacttagctttagaaccaattaagaccccagttgacattccatcaatgtgacattcaccaaggtgcagatccccactggtaaatctggaagttgctgggggatttgctccctttgagaagcgctaatcattaacaataggctcctgccaagaggtaatcactctaagttacagaagaaaaattcaaaattgttctgtagttggttggctactctcagtggcaagtcttagaaaaatcaggaag

SEQ ID NO: 55995 - DNA, 959 bp, Bovine  19866881040695
  misc_feature (1)..(1): n is a, c, g, or t
ntccagcatttgatttactgaaaacaaaacaaaacaataatatagtgtttaactgaaaagaaaaggtctggtcactgaaatatatcagaatgagccttcatcatttttgtatgtcacaacaatatcaagaagtcccaagagaaattatttctgtggaaacattgacttttcttttctttgttaaacattgtgttaccatcgcaatcaacatataaaagaacagttgtgatcagaagcttctctcgtaaacaactggcatacaaaccatgtccatgtttgtcagccatattttattgactttatcattgtcaagtcaaaagccttaagggagtaggaatcacaaccatatgggagctcagtaattttagtgatgtaggaaatgctagctgcaaaggatacccaaagacaaactttcaagcatcaacaggcatttttttgtaacgaaactggaactaaaactgacaaagtttagctttgcaaaggccattattttcttcacatatattctagagagcaattaaattctaagcagcattagagctctttctcacatcagtgataaaaaggctggaaaaaaatcctatcatctgatttgcttctaagtgaggagataaaagtaaactgcaaaatgagaacctcacctgagactcctgatagaaataagacttttctgaatgaagatcaggaaatcatcttttactaagaaagcaacctgaattccactcagggaatttaatccaggaaacagctgtaaggaagatccattagcatgtaaagaagcccttttgagtcagaatgcagaatgtcaccaaagattgctatatgctcctgtgagctttggtgatgaaaagaatttaccaataaactagggtaacacagtgatctcctcaaatacaccctgaaacattagccaacctcacactcacaatgctacaaagactggctatttttccatctct

SEQ ID NO: 55996 - DNA, 835 bp, Bovine  19866881072299
  misc_feature (1)..(1): n is a, c, g, or t
nacagtaaaagaatctgcccacaattcaggcaacctgggttcgatccctgggttgggaagattcactgagaagagaatggctacccactccagtattcttgcctggagaattccatacacataggagcctggtcagctctgtgcatggggtcacaaagagtcagacaagaccaagcaattatgactttcactttctttaactattacagaatatcgcacttataaagaaatagtttctactttctccaactatctatccattagtttatattaataacatttttatgatgtctccttgacaaactgtagatcgagcttcacagtctaatacataggtcatttgatgttgtgatggcaaattaaaaatgccagttatctgggatgaaatggaattatattattattctatgtaaagtgttatatagtaatcaacaccctgagaaacaaaaatatgatttgagagtcagcttatataaatatagtgggtcatgtatttcttcaaaacaattgagcttctacctatttttgtttgtttgtttcatgtttcttttttgtttcatatgagactgattttgttcttactaacaggtaaattttatcttgaaattacgccattgctgctaagtcacttcagtcgtgtccgactctgtgcaaccccatagacggcagcccaccaggctcccccgtccctgggattctccaggcaggaacactggagtgggttgccatttccctctccaatgcatgacagtgaaaagtgaaagtgaagtcgctcagttgtgtccgaccctcagcgatcccatgaactgcagcctaccagactcctgagtccaag

SEQ ID NO: 55997 - DNA, 788 bp, Bovine  19866881093336
  misc_feature (1)..(1): n is a, c, g, or t
naaaacaagctcagtagcctaccccaatcatctacttctgaccttgaccccattaacatgaatgtctgagtaatcgagctaaacaaatatgcaaaattgtacagtgttaaaaacatatccattctgcttcaaatgagaaattttcacattttttgaactatttacaaaagtttgtaaacagatgatataatttggttactttagaaaatattttataatctattagaaattatattagtaatggttgagaaaagtcatggatatgatcttatttcagtttcagagaaactaaaaattgtgataaaacatccagatccttgcacaattttgataatgttcagcccacaaaaccctaatacttacttgtagaggctttttgagaaaagatctaaatcctaggtagagaccccaagactatgttcaaatataaaattctttcagaatctggccctctcaatcccaggactgcaattttatgagaagaaactattggcaaatagacaagataaatgcaacagaatgaatctcagctaaagcaggctcaggggttattcatgacagccttctagaacacaaattgtaaccatgcccaaggcagtagcttttcattcccacttaggacccaacaggaagaaacgggcttagatgcaagaagttcatggctagatataaaattaaataagtataaaatcagagagtaattcaagacattaaggtaatttaatgagttttgtggcagtctctttaagaatagattaagcagaagattaggacaatcttttactcat

SEQ ID NO: 55998 - DNA, 1079 bp, Bovine  19866881098160
  misc_feature (1)..(1): n is a, c, g, or t
ncaaacccatcccttttaaatcattaatttatagaatcatttgtgatcagtatcaatactgtatgatacctcacagagcagttttgagcttgctttatcataattttttatgtaaaccatcagttgaaaaaaatcccgccaaagcagatggtaaaaatatcttcccacttgattctgaaaaatgtgatatagaccctgatgataaggcaataaaaaattttccatgaagacagtaaaaagtgttattcatgatggaatcttctctgttatgggcgtgatgatgagacacaactacagaaaaatgtcatgctcctcagcctgtgtgtgcacgctcagttgctcagttgcaccagtcctcaagttctggaggagggcaagtgactttaacctgccgtgatgcatgtgtttggaaaggaaagagtgcagaatggcttaaagacttggctcaggcaggcatcagagttacctgattcagaatccaggtatctcagtctactgctgtgtcctttaggacttaagttgttccatcttcctcatctataaactgggagaataatgggccatacatgctagagtttcaataaatattatatactacaaagtatataaagcacccagtagatgcctgttgcataacatatgctttgtccacatgaatttaaccaataccagtgttattcaccataaagttccttcactctaaattcatacacttttcagattctgccaagtggtcttttaaaaaccgcttgcccaacttgttagcaacaactctgaaagaaagaattctcacaattatcttctatcctggattcataaagccccaggaaggcatatggtattatacaaacattaaataataatatgttctgctctgcttaccaaattaaatcaagttctaaaggcagcacatgcagagtgaaaatggctactgataagaagcaatctgatgtttatttattttttatcataatatttactgaaaacttactttagcatctcctaaaaaaaaaaaaaaaaacttttctaaatccttctgtggtttatagtagtaatattttcacataaagaaactgagt

SEQ ID NO: 55999 - DNA, 861 bp, Bovine  19866881220372
  misc_feature (1)..(1): n is a, c, g, or t
ntcaaggcctaggaattgaagtgcagtccaaacttagaattcagcaattagaacaggttgaaaggcacaacatcccaaaagaggttgatgtggcattgagcatctaagagagatgactttaaattctctctaaccaggaaaatgatccatccagaagtaaatccaggggtaaatctgactctatactcagacactcaatagaataagcaatgagtaaaagaattttaggtgtaaaaagtaagacagtagaaagcaagacaatgtggatggaatttcatctgtatcagaaaataagtaagagtttataatcactctaggaggatgaaacttgtcatctttgaatataaagcaccaggcaacacatggcatttccttttatgacataacagaatgctgtattgcattactaaattaataacgtgtatctagaaagtgaattttgttaaattcctttaatttcagcaatcattccgtccacaattccttggtgtggctgaacaattacacaatgaaggcttcaaggtatgtgatattatttttcttaattgctttctgtcggcaatctatccacaaaaaagaatattgaagaatattggggaataaaatcatgcaagatatgacctctccatatgaaaactatgactaactttataatttcaaagctttgatgaaataaactaattagaaagactagttttaagttttagcacaattaccacaaacttactaaatttgctggctaaaaacctagagagttttcctaacacataactgggataaactttcaatgcatttccatatattttcccttttcctgtttccatatgaagtcatagtttccaacagttacaggcgaaactt

SEQ ID NO: 56000 - DNA, 756 bp, Bovine  19866881258844
  misc_feature (1)..(1): n is a, c, g, or t
naaatgcttaaatctattttgtggacaaaaggatttttaagttaattcattttgtggagagaataatttaaccaagttagcatttagttgacagaattatgatgaaattcattttgtctacctaattgattggacagctagcagaatgcatttctccctagaatgaagaatatgcagagcctgtcaaatggcatttcctccttggtctcaaatcattctgtcaacaaaataaatacaacatcctttcgtctacagtatcgatgtgggtgttaattatggcggaagagaatgcaaagtcaaaatcttctctgttaagtattgataaaaaatatttataccatccattaaccagatatccatcttgtaaaaggatttttctgggaaaagcttatatgtaaactgtgtaacagggtaggtgtgtgggtttggtgttcttcacattcagtgttatagacatgaaataaacacattggctaaaaatgtaaattcagtgactagagtgataacatcaggaaaccaatgaacaaagccaatctactaataactggttgtggtgaaaaacgtgcattgttgattgcaagtttcccaatgggggcaaagcaaagaaaatgaacagatcatgctcaaaagactagaactacctgaaggctttaagagaacttttttagagagggatgagggaaagcgtcacagggtatgtgatctgctcatggacattcttttgattggctggtgataaggtacctatagtatatg

SEQ ID NO: 56001 - DNA, 1104 bp, Bovine  19866881346471
  misc_feature (1)..(1): n is a, c, g, or t
nctttgatgtatactggaaaccaaccacaattttataaatcaactataattttaaaaaagagggggaaagataatgtagctcttttactgtaaaaatctatttgagactgggcaaaattcatgatataataatataagatggtggacacaataagcccaagtgtctgaattaagtcttgagaagtaaacagtcatttgatgaaattggtttaactacttatcatcccagtcctttcatgagggctggatgagtcttctaatgttctgataactggattttccaaaagatcttgaagaatcaaataaagttatttgtattttcattttcctgtacaagagaattctgggatagtcaagtcatgttattgtacacagttggctgaaagaatccagatgatttctggtctcacttgcagagatccgaagaaatcagtttccagacgttagaatttgaaagtgtgtctgagagttactacgtttattccctctgaaacttttattccctctgaaacttttggataagctcaggaaagggcttaaatttaacctggtacaaagcaaaacaaaacaaacataatatcaagagggaaggaaaagaaaccactaagctatgaaaactcttcaaaggcttgcatcatttgttcacagagcactcaaggctatatggcattattcgttcctgactctgcagacaaggaaaatataacaagatgtgttctgaggaagcagcttgttccaaggtaagactgagtttaataaccaacattgttcatggcccaaatgtcaaaagctttgtgttcctcttcactgtagttgaaccagtactgagacacataaagagggataaaaaagagactttggaaacaaacacacatttttgcttgaataaaatttaacttaaaaaaaagaaaagaaaactcttgaaaatcacagttcatttctgggaagactcactataaatacaaccaatgataacacagaattcatttgaacacagcttctctttcctaaaagatttaattattgaggctattacaagtactttataataataaagttttaattgcaatagagtcatatgaaataattaatcttaagtataat

SEQ ID NO: 56002 - DNA, 1269 bp, Bovine  19866880406679
  misc_feature (1)..(1): n is a, c, g, or t
ntgatgacaaaaccccagctaggtatgtagttcatttcttatcagcaccaccctgcctatttccctttgtttttcgtctctcaattgtgtttgataagaccctgatgctggaaaaggttgacggcagggggagaagggggagacaggatgaggtgattggatggcatcaccgacacatggactggagttgaagcggactctgggagatgggtgaaggacagggaagcctggcgtgctgcagtccttggggtcacaaagagtcagacacaactgagcgactgaacaacaaatgtgaattttatttgataggattacccaaagtggcagaatccacctggtggtttaaatccttttttcaatctgtacctgtgctttcaaatgtgaaaggtgaagaccagtctgcttgtgggtaagttttagtttttttccgataagaatatttccttttcagatgaaagcagtgcgtgtcacaattatcacatcaaccggcagggataaaacacggtcctctctggaaggtgaagtcttttatgtaacctgtacttgagggcagaggtggggacacagtttcttttagttaatcattagtcagatctgagcattctatctccaaagagaaatggaaaacttatatgccgttattattatggtttagggggaatggaccaggaagcagaagcaaggtaccttcaggaacaaataaccactctctactccaacaagaggaatcacaggtccttggagaaatggctgattctggaacagtaaacagattccggaacagtcaaacagtaaaagacaagcccggaccatttcatggtgcccccaaagatacaaattccccccaatgatggggatatatcaaaatgacacaggaatgaattgggcacgtctgggactatttcagcaatatttttccagtttacctggactgtgaagacaacctagcttacaaatgagcatttctcagctgatgatctttgttttgcggtttggagggcagtgttgtaacagttactacactatgtaaagtattacccgttgtttgcaactctatgtaatagccacccgctgaggccctgcaggtgtgacccccggatcctttagcacctgagctactcctggtgatctcctctataggaagatgaaaatcttctggatatctcacaagacaagaccactgcagccacacagacggcaaaagtttaggcatttgcttcaatggttgagagtattcttgccacggtgtcagctacatggaaaacactg

SEQ ID NO: 56003 - DNA, 1589 bp, Bovine  19866880544546
  misc_feature (1)..(1): n is a, c, g, or t
nttcagcagcgttggttcatcagcacacatgtggggtcagacgcagcgagactgagcagtcttggcagtgaaagtgaaagtctctcagttgtgtctgactctgcgaccccatggactttacagtccatggaattctccaggccagaatactggagtgggttgcctttctcttctccaggggatcttcccaacccagggatcgaacccaggtctcctgtattacaggcagattcttaaccaactgagccacaaaagtgtgaagttggaggtctgacaatgctgggtgctgggatctgctgtgatctcttcccttcgagaggcacccctgccccccacccaccctgggaaccacaggctgaacttcctgggctgtgccctgcacaggggaagaaagcccaagagaggccaacctggctgccctaagcgctgtcccccgttggtggccagtggctctctgggcggggctggcacctggaaaccggaggacggccaggcgggtgcggccgggacttctgtctgggaggacacagcaacgggtgtgactgcaccattcgggctctggacagagcagagagaggagtgcgtggccggcaggcgctcaggaccaaacaggaaggaaggatgtgcttgtcagccccccttgcagtatggactgcatccgtgcgtctgagctgggagctgacaaacagcccattgtgccaggatggggttaagtcacccgggcagctgactcggcttcagcttggaaatggcatttctcacctcctccacactggtcttttcagttgcttgccaagttgaagggggaaaaaaatcccttaattctggttagaagtgtttcaaacgttacataaagaggcacttggctggttaactggctcagttctgcctgggtttcgtctcaggaagcatttaagctcgctccccaggactgtacccctagtaaacaccctgctttaagggccctccgcacacgtaggctcattgttcctcctgagaaccaccagtttataaaaatcacaaacacattgtgtttgctggaatatcctggtctatgtttgaaaaggtgtaatacattccagtttgaaaactcaagttctctaagatgcttcttttcctgtaggttctgcactttggcctcaagagaggctcagtcatgtgggcacgtggagagccagtttgcccacgtggtgtggcactctgcatctgatacattaggggttttcattcatcagtgaaattaggaaatgccgtgacactttctaatgttctcactagctcactttttttttttttgctgcatatttataatcaagtagacaggacaagttccagtctccactaaccacctagagaggatgttgagattttaagctgtagaagttgctcttggtttagccaggttcttgcagtcagaagaagtgctgtgtgccctgttctgatgggctcagggggtgccatggccatgggtctctgtgcttggtggtgggaacacagctccacacctggtctcagagcacaggtgaagacgttctccccgtcatgggggtaatccctggggacaaggtgctggggtgaagccggccgtg

SEQ ID NO: 56004 - DNA, 950 bp, Bovine  19866880718707
  misc_feature (1)..(1): n is a, c, g, or t
ngacccaggtgctggggctcagaggggcatgtgtggtcaagaggggacgtggaagactgctgcagggagttgggtggacagctggagggacaaggcaggctcacgggtccctgtggacccagtggtcaaccagatgccggggggcagcagggcccacacagagggagtgtcctgtgtgagagggaaagggggacagtatcagaagagcatctggagtcgtgagactgacgatgagcctggagggcacggaagggcccagtgcatggagctcggagcttggcctttgtcttgaaggtcatgaggatctgttgaaaggtgttaggcaggtggagtgatgtgatacatgaatattgccatactcccaccccagtgtctcatctgtatctccagctgggctcgtgtcttatttgaccttgtcccttccccacccccaggtctccctccagcatctctgctgccaccacagcctggctgtgccatgatgagccctctgggatccccagggtgcccgccctcctgcagccccgctgcggtgagctgagcccctggttctggcctgtgaagcaacccctggttctggcgctaagcctgtgggcaggggcccctgggagccaggtctcgccctcctggtggtccctgaaccagcactgggctggagcagagtcagcacctgagaatgagcacacagcccatctcaggcccccacctcatgctcctcatcgctgccaggctcttcggacgtcaggcagacacacagaacgctttttgttagtctgtactaatttgagcaccttcattttacagagccagagtgaatttgaagcccaagtattcaaagatccaaatgaattcaatgaggtgtgaattcctaaatgtcatctcaagtgagtaaaaagggaggctcacccatactgcgtgttcttcctgcttagcctggacggggcgggcga

SEQ ID NO: 56005 - DNA, 1223 bp, Bovine  19866880780806
  misc_feature (1)..(1): n is a, c, g, or t
ntgtacactgcggtgatctgatacacgtgtgcaccatgaaaagatttcccgcacatggttaaccaacatccgtctcctcacgtttatcttcatgtgtgaggacatttaagttcttctctcttagcaaatttcagtgatacaaacagtgatcaacagttgtcaccacacttttatattcaatcctcagaaattatcctgcctgtaagctggaaatttataccctctaccagcctctccctgttcccctggtccctggcaaccgccactctagctctgtttctacgataaactcaagtctaagatggaaaggaaataacccacaaaatgtaaacaacttaaatgctcgtcttaagacaaagtatctacaagaagcagttatattgagactttgttattaataaaatagaaaattctctctattaataatacactaatccaactttatgtgtttttttcataagcagcctttatttgatactccaacccctgtaaatttgggatgggctggtaaatgcaatccatcaactaaaactgaattttaataatgtcaacatctcattgtgtttagaagtggtagaagcagaatttgaacctggatctcatcccccagcctctcctgattccaacagaaccagttgtctttcttagttgacatgttgaaacaaattgatatactcaagttacagcatttaaactatgcatttccttggtgcactgccctgagatactggtgggttaccctggggaccctggtaggttacccggggaccctgttggtccctggtccctgcccagctcagccccaccaagcacctgcccaccaggcacagagagtccaggcagcaagtcctcaccctgctgctctcagagtgaaattttctccaggcacgttcttacctcccagcggtctgtgtaaagacctactggcacacaaccttctaaaggaaatcaagatcaactgaaaggcacgtttaatgcttattgtcagctttacattttgccaatactgtatatgaaatatattgtaaaaaattaaaaatagcactaccatatgatccagcaatcccactcctgggcatataattggagaaaaccattattcaagaatatacaggcactccattgctcagtgcagcactatttacaatagccaagacatggaaacaacctaaatctccacgacagaggataaagaagatgtggtgcatacatacaacagaata

SEQ ID NO: 56006 - DNA, 1495 bp, Bovine  19866881348309
  misc_feature (1)..(1): n is a, c, g, or t
naaaaaatgttggattttataagtgtttctacttcatctgtaaaggctctgctggtaggtgtatttaagttgcaattcctataacttctgaatgggttgacaacttctataataaaatttccttttatctctagtaacacctgagtctcttgtgtgatagtcatgtagccactctagtttttgatgggtgttgtttgcatcatgcatttttttttcatctccttcatttcaaactatggagattcccgccccccccgcaaaaagcactaactcaaatttcccctctctgattataacccttaatcacctcaacttgttaccctcgattccctagacttcttaaatctcaaaagacttcagtgtatggagtcctcttgttttctttccatcagccttgtcttttcattactcttctttttaataaattggtttattgtatcaataatatatttgctgttagtttatagtatagtagatttagcttgatgtattaaaagtaaaaacaaccccatagatgtctatttctaactagtaaaaaaaaaaaaaaaaaagacagctgtgagttacttaaaaaaagaaacctgtcaacatggaatttgttgaataagtacagaactaatatatatatagtcacatttcctaaagccccacacacctcctcacatagaatgtataaactccagctttgagaataagagcaaagcagaaattaaatctatctccctaatttattgcagtgtaacaaactctatcccagcaatactcagggctgtaacaccttcatacttacaactccagtcccaagaaataggaccaatacttgtatcacagactcaccgtcttcatcgagactttggcagccatccttgttatgtttggaagactctgcctgaccggcaatatacccagatctgtggatgagtcatgtcgtaacaaggatccactgtgctgctcaggtttggtaggggaatggcagaggtctcaatagcttactttggctcagctccactgccttcttgggcagcagtgaaaacaccaacctgaggacccagggcagtaagggtggagacaggaccttatttcaaagaagccccagagttgcttctaccccggactgtcagaagatgcttcaaaacaaaacaaaaagtaaccgagggtcacctggcaccaagaatcctggcaccgaaaggccaacaattgctttcctaaagcaaaactgctgctggatttgccaagggtcagcatgaaagtcacagtgtcagtcactcagtcgtgtctgactcagtgcgaccccatgcattgtaacccgccaggctcctctgtccctagaattctctgggcaagaatattgaagtgggttgccattcccttctccagggattcttcccaacccagggatcaaaccctggatctcccgcactgcaggcagatctttcacagtctgaaccaccccagagctcctattaaaaatgtttttataacaacaacaacaaca

SEQ ID NO: 56007 - DNA, 1288 bp, Bovine  19866880569249
  misc_feature (1)..(1): n is a, c, g, or t
natacagccttgacgaactctttttcctatttggaaccaatgtgttgttccatgtccaattctaactgttgcttcctgacctgcatacacatttctcaagaggcagatcaggtggtctggtattcccatctctttcagacttttccacagtttattgtgatccacacagtcaaaggctttggcatagtcagtaaagcagaaatagatgcctttctggaactgtcttgctttttccatgatcccgtggatgttggcaatttgatctctggttcctctgccttttctaaaaccagcttagctagaaaaggacctactaaataggatcctttctttctattgctttagtacaaaccacagagaaggcaatggcaccccactccagtactcttgcctggaaactcccatggatgggggagcctggtaggctgcagtccatggggtcgcaaagagtcggacaccactgagtgacttcactttcacttttcactttcatgcattggagaaggaaatggcaacccactcctgtgttcttgcctggagaatcccagggatgggggagcctagtgggctgccatctatggggtcccacagagttggacatgactgaagcaacttagcagcagcagcagcagtacaaaccaacattggtctccaacgtcaatttggatgttaatgttttcgaggtgaactttttggggagatggagtagacttatgtcaggcacatggtgtgtaattggcaactatccaggagagcctaagccaagagacaaccgcatgccagaaaccccaagaggcaaggcagccccacgtggcagacacgagcactgatctttgagccccttgtggggccagtgccattggcttcagcttctagggctgttggtatgaaaagtttggtcagtcagacaattatctttcccgccttagcttttttctcttttcctcaaattgccatgtgcagagaagaggctgggacagtgcccagcgatagactgaacatttgctacctcttctcttacaggcgggtgacaaacattaccacccgagttgtgcacgatgcagcagatgcaaccagatgttcacagaaggagaggaaatgtatctgcaaggtaaggtggtctggagtggggagagaaaactgggctatgtttgtttgttttgaagagaaggaggcatttcattagctgcaaggctacccagatcccaaatgaatgtagccaaatgtgacctcatcagttagtattaatcagccaagcaattgacatgctggcagtgagcccctgagg

SEQ ID NO: 56008 - DNA, 2036 bp, Bovine  19866880855882
  misc_feature (1)..(1): n is a, c, g, or t
natttttagtctgatagtgggctgtaggcaacccagagctgacccatctctaaaagaggtgataacgcagagccatggtttcagtggaaataacttgttaggatcaccgaagaccccaaagcaaggaaagggctatgtacaagaccctgtgtcttttctgactcttgtgaagtcctttatgagttatgttaaactagaaatatcaaggaaggaaaaagaatgagatgggatggaaaaatgtttgtaattgctggagaagggtaaaaaccacagaactggaattttctttagagatagcaacttgatgaagaaaagcagctgacaaactagaatcttatggagttggaagacatttcctctacactgtataacaagcttaaatatttttaattttaaaaagctctgctttctatatgtttcctataagttacaaagtcattactcaggtaataaataaatgggagctgcatgctgtttcccatcccctttctcctgagcatgcacttgtgctgtttggctgtcaggacatgtattgatcgttgctttccctggagcatcaggcagtgatgagacccttggattgctgttattgtgcatttctgactccaacatgctcttgggttggtaaggagaccaggaatgagatcatgagcaataagaaaccgtaagtgtttgcccttgcacaagagataattatccaattgggattaactttcaagaatgttgaacttgacggcaaatatttatctcctggtgttaagaaaggaaaaggtgtcaaacctttgaccttgactatacaatggtgtctgtattcgaaaaacaggttgcattaaagcagaaacatgaagagtttcttattgttccttccctggagttatgataatagtttttaccacctgcaaagcaacactgacctggcattctactcaatgttcacaggaatatctctttggattcccagagtctgtctgtctcgggtccacggcctagaatcagctggggttttgcaatctagttcgttgtctccctgtatcatattattcaaagtgaatttattgtaattaacatctcttttacctacatagcagtcctgtacactaggcagaatcagtgcttctccaccattttaacatactagaacatacaagccttttcagaaagtgcataggattgggggaatgaacagttaggtcccagtgcatccaatcattctgatagttcagtggagggttcaactgaacagatttctcaaagatccacctttcaccaggcctgacattgcacattcaggaactggggcaacccaatgtctaaaacaagccagtggaccctacccagctgacttctgatgaaaccccaggaacggaagatccttttcttgtctacagtttctacaattattgcccaaagtgagttattgttgtacaaaagatagtcttcagagattcccttggatctttcctgggtggttagctgctgcactccctcatgagaatttatggaagagggaaagacaatgcttattatttttaagctgtccaagtcaccaaagtaatttccactctttctgacccttgacgtgtagctggatgtgggggaaagggagaatggacttaattaaaactctagattgaaccctagttctataaccttgaagacttttcttagcccatagataggcagaagtgtgcccccacatcactggggggattaaacgggaaggtactaacattcaattacaaagcaaatgcaaaagataacagtaaaaacagttgctatgaaatgtttaagctcaatcacgagaggaaaagtgaaatcttttagtggccaccaaagttctcaactttccaatcccaattcttttttgaccttttccagtggaccttggtcctaactagaagtcacttttgaagcttcatgacaaagatttaggcagagagatccaggcagtgtcagccatcgcctgctgattctgagtcaattttcagaattaaacatgaggactatttgcatttcatccacgtctctccatcagt

SEQ ID NO: 56009 - DNA, 1889 bp, Bovine  19866880874329
  misc_feature (1)..(1): n is a, c, g, or t
ncaaaacgcaccaaattttttttgttgcttcaattatacagttacctacacagacacaggaaatcaatccaactagcagaaagtttgaaacttacattacaaatccacaagttttcctttaactttttaaccttttagttaactttaaaaggtctttacttttaaactagtgaagttactacttaagtgttgttttctggtcctgggtcaatgcctcactttacaggaatttaaggcgctttcttggatggtaccagtatcacagaactaagcaaaacacttatatccaatagaaagctcttttcttataagaattcaatgcctgcctatgcaatttttttttgcctaggtatacaatgtatgtaattcatggctaaggtctacatgtaagtcctacgttcacacaagaatacgttcaaacgtgggaatggtggaagaatttgaagagggacttaaaaagacttcaacaaatagttactaagttgaaaacagtttttttttgcctaaatttgtaaatttattctggctacatttaaattgttaagagagtcatgaggttgtctgtgcaggacaatgtcaatgatataaacttaatatgagtctctgtatgaatattttatgttttacatttcaatgttgaactctttctctcctgaaaagctatcaaattaaaataactcttgaattattttacaccactgagctaaaaatactattaaattgatgacagtgtaaatacattttatatcagaataatactttaatccctatttagcagtcatttctatcttgcttaacccagggccaaaaaatcaaaccaaagccagacagacacatagtccattcagcactggcttttactctgaggctggcttcaaagcacagaaatcctcttaatgtggagagccgggggggaggtagggtgggcagcagggctggaagcggagcagggtgcactgcagaggttctactgagtggacatcctggcccagaaccctgggggcgcacaaggcattgaactgtcctccagaggtcacacacacagggaatgcaagccagagagaacatgagatgctggggaagatgaagctgctcattgttcaaggatgtgctgagagcacaggcaaagaacaccagagcccaactccatcaaagattcacgatgctcaaatgcggaacatagcccaaattcccagcgttgtttatctatagtatgaatgtgctgtacttgtgtacagcctgaaatcaccctctttactcagcttgcagaactctatgaacatacagaggtgcacccagagccctgagtctcagttcttagcagacactcttggggtgatgtacactcttgggtctttgatggtgagtgcggtgactgacacattagatctaaaacagagcctggagaccaactgaagaataaatctgctccatgctgaacatgtaaagtgacacctgtctactgctcccaaggattcacagtttgtcctggggggaaacgtgtcatataaagcccatatgagaccacagatttggggcttgtcacttgccttcatcaggccctttaaaattcagcgagattttccactgtaattttttcagagaaatcattctaaagctaaaaaggatgtctgggttgtcaatttctcatacagctagcgttctttaaggggagagcagccaaagctttgatctagtactcaagaatcgtttctggagacttttcttagtttcataaaaacaaaaatcaagagcaaagcaaaccattcattaaaactacacatagtgttatgtgcagagatgaagaaatgacatgcaaaggccaatgagaaccagtaattagcaaactgaacaagcaatagctcttatattcttgctaattttactga

SEQ ID NO: 56010 - DNA, 1303 bp, Bovine  19866881004481
  misc_feature (1)..(1): n is a, c, g, or t
nggtggggcacagagatcagcttcttttgttttgtaagcactgacataagtccatgcagatccccatgaactggggaaacctgatggtagacgaggaagccaaaggcagtaacaaggacgttgcttccctggcaggtgtacgggtggggagagcggcagaaccacactagttcctggtactgctcctgaagaaaggcaaggtggggctaactcaggcttctttgcatttgctgctttttcccttgaagtgggagaggtttccaatgcaaccggactagcttgatctcgaagttaccactcacctgttccggaaggctgattcagcattctgattgggcaggataatgagggtgtgccttggcccagagtttggatcctgggcaagatgaataaatcagtctgcccaggcagcttgcacgaagcccagagggctctccataagtctgcaaagccagtctgcacagagactagcatgctgctgccccactccctcaccaactacaaccccaacagtggcccctgctccaaatatcagggagagggttccccagaaaagatgcacaaaatggtgtgaagagatatccacaagtgcactccaatgctctggttccctttgaccagctcaaaatataaaaggacaaaaaaggctgcaatattccagtggaaacgcatattggccttttgcaagtgattactgctgtctttatctccttctagatatctccttcaaggagataaaaccagtcaatcctaaaggaaatcagtcctgaatatttattggaaggactgatactgaagctgaatctctaatactttggccacctgatgccaagaactgactcactggaaaagaccttgatgctggataagattgaaggcaggaggagaagtggacgaccaaggatgacatggttggatggcatcactgatttgatggatatgagtttgagtaagctctgggagctggatggacagagaagtctggtatactgtggtctatgggattgcaaagagttggacacaaccgagtgactgaactgaactgaactgaactatctccttctaaggaactcagtacaaaaatttctaagtagtctttgcagtttaacagtacaagataaggagaaggcaatggcaccccactccagtactcttgcctggaaaatcccgtgggcggaggagcctggtaggctgaagtccatggggtcgctaggagtcagacacgactgagcgacttcactttcatgcattggagaaggaaatggcagcccactccagtattcttgcctggagaatcccaggg

SEQ ID NO: 56011 - DNA, 840 bp, Bovine  19866881074541
  misc_feature (1)..(1): n is a, c, g, or t
nacagaggaacctggtgggctacaatccatagggttgtaaacagttggacacaattgagccacacacacacacatgcgacttggaaagaggaggacacaatgctgagtcttccaaagccctgattcctactgatggtttgaagtagtgtttcaatttcattcttgaaaagggtggtgaagtcccattttaaattcattctgcttacatttctgattgatttctctttgtctagaggctctgggatttgccaagtctccgtggataaactagagaggatttaagaagaggcaattaaagggctggagctgggtggtggtgggggaatggggagagggagcaggcatgagagatatggagccccccgaagctttctgagaggatggtgccattaccggaagtgctaacagagccggccaccaggggactggctggggtgaagccctgttagagccctgggaaagccaggcaggggtgtgacagcacaggatttggaaccaggaaacatgaattttgaatctgagttctgaaagagattacctcacttggtgacttgggtgaggcccccaaatcctctccattcataggatggaaacacttgaattctaccttttgtacttaatgacctcagttagagtcagcctcacccctctgggagggtcagcagtgacaaaggcctgactgaggaggggggctggaccctgtaacctactggtcccagctgatggctggagttgaaatctggtcaggcatgaccagccaccagacttgaggctggtctcaaattgccaggctgcacaaccagattcccctggagaacttaaaggaaaccggggacccag

SEQ ID NO: 56012 - DNA, 743 bp, Bovine  19866881236120
  misc_feature (1)..(1): n is a, c, g, or t
ntttattttgattagattagcaagctttcctgtttcctcccacagccagattaatccaggcaacataggaaaacagtaattatcttacttttccaaccattcagacagattcctcctttctaccccagctccttctttccaggaagcttaaaatttgtacattatctgctatattatactgaaataagtaacttcatagctgcagtaaccctttttatggatccattcttataaaacttttttggaccattttctaagagacagaagacaaggaaacattagaaacccatcccttaaaagaaaaaataaagcatgctttttaataaatttattgaaagtagagggcagggtgatagtgtggtgacaaatctaaatattcagaaaaagggaaaactataagattttcaaactcctcacaagaaagtgactatcttacctatttgatgatagctagatgaatttgggttcctctgtgtttgaacactgaccccagggacatcaaaataataactatcgatgtccctcccacctattatggacactctggccagtggcccatgggatgacatagacccaatcataatcgcaatccaggttctaagtgagcagatcagatttgttccaggccaaaattcgcaccttactgaatcacacaatgcactggcttgtcaaatagggctccctgtctcaagcagccaggcagggatgctgaactggtggcaggctttttttttttttttttt

SEQ ID NO: 56013 - DNA, 1582 bp, Bovine  19866881359359
  misc_feature (1)..(1): n is a, c, g, or t
nccgcatctctccctggctatggaagaaatgggcttcaccgggtaagatttctcaatgactcgtttctgagtttcttccctcttcagtcctggttgaaatgttgacgtactgtctgaatatatctgacaatatgatctcagcgttggaatataatgaaaattgtaatctctctggtctcctggtaaatcactttgagttacaggcaaaataaaatatttcttttgagagaaagggaaattgactttagataaaacaattgcctatacaaattattctttttgatggtttattaagttattggccaattttaagtatgtttggaacaacttatgaatgtgaatctatgtttttaactttgtgttttatgagataagtatatcccatgacaatttaacatctgaattaagatatgctgtaaggacaaaacattagaagtacagaaaccttcttacaagtaaatctcaccaatagtttttatattgattgcatgttagaatgataatattttggaagccttggtttcaggaaaatatattaaaaatttaaaaaatagcctatagaagcttgtgggaaaactggattgtgtggcaaatttctacaatcaagtaaaaagtaattatatactggagcccctatctctgctgtaaaatgatacaggaaagtttgtctcaacctcgctccccacaaagcatagaacaagtgtaattgtgtagctctgatgcggagaaatgtgtttttatttatcagcaagagatacttgcttaccgagggtgtgagcagtagcattgaacatatacaacagagcccaaggatttcatagaagaaatatgtaggggaagtaatggcagtccagcaactcaacttggaaggaattctcaggatttttaaatccattcttcccttccacctgaccccaaaatgaggactgtgaagcgggttttctcatggcgtgtttcccctcctttcagcccgtttctacagacttcgctcagtacaacaagctaacggggacgtcagcgggggagcgcgaggtgaggccccagcgcggtgccgctgaccgcgccccggtggggtggggccgtgctgccgcaggcgcacgggctggactctgtgacatcctgcagtcagaccccgtctgtccgagagccaacatgtcagtatctctacagacatgagacgacacctttttctaagggaaaaaggaaagctacacacattccttccttgtaggaaggaattcactggccctactatgtgctgagcactggaagtaaagtgataagcaagccgtgggtctgtcttcagaatgcatgttgcagagacagagagagatagagaaactctgagatagatgctatgactggacatgcaaagaaaagggagccacatcttcagggtatcaacttccacgagaaagggtatttaaattgatagctaaaactgggacaggcatttcttggctttagggagcaaccgggcagtatgggcagagacccagagctgggggagagcatggctcacgggggcatgtttggagaattgcaatcggatgtaatctctggttatggtttccggattttt

SEQ ID NO: 56014 - DNA, 3808 bp, Bovine  19866880257263
  misc_feature (1)..(1): n is a, c, g, or t
ncccacatatacatgttggccattttcttagagaaagtgtagcatcctatttgttgtttagtctctaagttgtgtccgactctttgagactccatggactgtagtccaccagtctcctctatccatgggatttcccaggcaagaatactggagtgggttgccatttccttctctaggggctcttccccatctagagatcgaaactgcatctcctgcatcagcaggcagattctttaccactgagcaatacttctttttttatatcatattttaaatattaaaatttatttttacatagtgatacgtaatgtttttaaattactgcttactatgccattgtatggacataccacctaatagccaccagttgattgcccactattcactgggcactcttgcaacctctttgtatttattcaatatgtatttattgagaacctatgatgtaccacacactgttgtagatactacagatactagcaactattatctcaggcttcacttcaaccttaagaattagctactgttattatcccagttttacagaggagaaaactaaggtttaagtaacttgtccaaggtcacaggattagtaaatagtggcaccagaatccataagcaggcagagctggtctccagtgcttctgctcttagcccctccattagcatccctccccaagtcagctttgataggcagtcagactacatgtggagaaggcgatggcaccccactccagtactcttgcctggaaaatcccatggacggaggagcctggtaggctgcagtccatggggtttcgaagagtcggacacgactgagtgacttcactttgacttttcactttcatgcattagagaaggaaatggcaacccactccagtgttcttgcctggagaatcccagggacgggggagcctggtgggctgccgtctatggggttgcacagagtcggacacgactgaatcgacagcagcagcagcagactacatgcagctggcagctgttataaacaacgctgcagtgaacatcttttctcaggcatctttgggttctgtctcctcacttttaaaaagcactgggaaaaggatacaggtgagttcattatattgttaagaatacctgttaacagtcccaggccatcactcagatcattttaaaaggtgcctttcttcaaaattggggatttaaggaatcaaaagatactacattccattcttaatatgaaaatcttgggttaagcctttaaaatacttccatgcaggccctgcgtgttggatgcatatttgcagatagggtaatacctggattaccattcccagcgtctctggtgggaagtggaatgtttttattaaaatttctcttgtttgtgtttcaggggagaaaaaatgaaagcagatctacaagccaggtctggttttaatcagagcataatctttatgagacaacgccaggctgagaatttttcaatctgatattttgaaagaaaaatccttgtttcataatgatacaagccaatcagccttagaaggatggaaaaaagaaatctcttgcatgaaagagaggcaggaaattccagagaagtttcacagggaggagggagaaacccacagtctgtatcactatttgtgagcttatttcttcatataggataatacttggttttgttgaacaaccaaaattcagttcagaggaagtagtggacttctttctccctgaagtgggaacataacgatttactgaacatattacaaacccacaatgtgtcccatgatccactggccctttaaacaaatattttgtcctcttcagggactcttcccatcatggtcatagatccatctcatattagatgatttaatgcctgagtaatttggagtgtctctgtagatattgctgaaatttttatatttccgtgtgatggtacattccactgatggggaggggggagtaatttggcaaacttcagggtgagttgttgagatttataagcattttcatataatgctcagctagagtgggaatagtaaaatctcagtctttcaataagctgcaaaactattaatgggtttctaggtcatgttgttcagggttaacactcggtggaatatatttttcattaaatatgaaagtgctccaagtgtgttttatacaggtgtgctaacttcactgtttcctggagtgtctataatttcaaaactaatcgagtcttcttttatatgcttttgcatgaattctggctttcttttgaacagtcataatgactcaatgaaggagactaaaaactggcaagaaaaaaccaataaaagcataaagtccagagtttcagagaaaggagatttacgaaatgatttacagtatagttccttcgaccagagctttcaacgttacatttattcgaaaatacctcatttagtgtttatttgtgccagttccataacatgaatcaaatcctgaaggttcaatgagcaaatcaagcaccattttaaaattcatcctcagaggacaggagtgtctcttctctttatcccattgtcttatctctttccaaaacaagaaatttaaatttttatctgactaaaatcattacatgtccaaatatcataggactgaaaactccatctgcttacacatttcagtttcctaagtccactgcaaaaagaaaaagaacactggataaattaaaatatctcatgtgttcctattattattctccatttagtcctctttgccacatattatatgtgggtacttagataaatacgattgtcttttcttctgttgcttaaatctctctgtctatgtgaagtggaaagagctcatccattatttgttactttttctataactgttaatacatacatggacccgagcaaagaggttgatagagtgaaggtctgcacagatgttctgcctgatttcaaatcccatttgaactctgtatagatgtgtaatagtgaaaacacattgccagaaataccaggtcttaatgctatgatgatggtgtatcagccgtccccagccttatttgcaccagggattggtttcctggaagataatttttccatggaagggggatggttttgggatggttcaagagtatttcatttattgtgcactttatttcttttattattacatcagctccacctcagatcatcaggcattagatcacagagtttggggaccgctggtgtaaatggtactgtaagaggaagaaatactcaaatattttcagcaaaaggatattctcctggtttaaaagatgcctcttagtctctgaatcctccagggcccacagtagaaagtcagtttcatcccactttgctaagtgtgcatcaagctgatgtttatcgagtgccctggatttttcagtataaagattgggagtttgagctttccttcaggttacgagtccagcctcactcggacaatgcctgggttcttctaacttcagtttcctgagtctgactcttgagtttgtcatggccccagtggctgtctctgtgaagggaggaagtggaatggaagggaattttaggggagcacttcacaggaattcagggcaaaaacttgggaggaaaacagtgtcaggctcttgcccaacaggcctccactgctgaacctgcatctatgtatttgtttaatatctgaattgatgtactttcagagaagatttacttcattctgaaatgttgccttattatgttgttcagtctctaagtcatgtccgactcttcacaaccccatgaactgcaacaccccaggcttccctgtccttcacgatctcccggagttttctcaaacacat

SEQ ID NO: 56015 - DNA, 5786 bp, Bovine  19866880468674
  misc_feature (1)..(1): n is a, c, g, or t
nctcctggaaatcgggagcagacagtcaggttacagaattcatttgcatcccggggactccatgtgcaaccccgtggcccgtcggggacgcattctggaggagcgaatgcatttaaatggagcgggtgattctgaaagaaaatgtgccatttcaccgcgaatatctcatcatttctccctggaacttaatataataccctcctggaaaaatcatctaaagattgggcttttgcccgtgtcctatagcaaaccctctccctgctgctctgcatgctgagacaatttagttgaaaaggagccaccttagaatttgccatatttctgtttgacaaagaggcagtttactcactggttacatgctttcttgctgagacatgaacattaggttggcagatattgaaaatactattttgatacttaacgcactttcttgggaatttattttagaagcagagtaataagagaaatcttcctgacttagaaatataaatatgatgctaccacttggggttatttatttccaaggcaatcaatgaggaagcgttagaaaatatattcagagtgatttcaaacctgatttcagtcaagtgagtaatctttccattttctttccatatgttacatgatttaaaaaaaaaaaaagatgaaatggtaaagaattaaaaggcactctggaactaagaccataaatatgaatataagactgtctatttttttaaggaatgaaatggctttaattatgctgaaacaaatgttgatagtgaagctaaatactgttcagcaaaatgattttgtacatatatatgcattctttttatattcttttccattatggcttatcacaggatattgaatataatttcctgtgctatacggaaggaccttgttgtttatccatcctatatatattagcttacgtctgctaacccccacctcccactctatccctcctccacccccaccgccttggcacacagaatcacaacgtctgtgattctgtttctgagtcatagatgagttcatttgcgtcatattttaaatcctacatataagtgacatcacacggtatttgtctttctgattgacgtcccttagtatgatcatctctaggtccatccatgttgctgcacacggcattattttattcgttctattccatttatacatttatacaattccattgtatatataccacatcttctttacccattcatctactgatggacatttaggttgcttccgtgtaaataaattataaataaaatacttactaaaataggctattataaatagaacaggcacaatattttgaatacagctggtggctccaggactttaggaaactcttgcagttgttttccaagctgaagggtcaaccagctgggatccgtctcttcagcctggccgcaggtctagatcaagtccagccccagttattatagggctcaatacttgagtttccattgtacttacacaccatgggctttgcctgtatttgttggcaaaagggttcagaagtgattatgagaaggggttacatgtgggtccttcacactagggccatgaaggagagcagacttgtggaggtgctcgaccagttaagtcaggcacagagagtgagaaatcacagggcagagaaaccctctttctggtaagatcctcttcctggactatgttaaaggttatttcggctggggttggggggaacttggtggaatgggtcaggtgggtggatcaagagcagatgctacctagagacccaggttggccatgggcctgtggatacctgcccttgaaggtattcatcaggagcaaaggtttggaaaccaatggccatgtccttgtgtctataaccaggtacgtgggactgggtctcctgatcgagtcagctcctttgggctctgcggggggtgggatggcttgcaaagttcagggtgaactggacgcaaacttagttttgtgtgctattgaccttggtgtggagacaggcaccttcccatccatggagcgtccttgtctgcaggcctgctttgctgatgatagactcatccactgataagcccggcaaggcgtagcctaggtgacactgccctcatttccctgcgtggccctttggtgccctcctagatggcagtggtagtggtttagtcactaagttgtgtctgactcttgcaaccccatggacagtagcctgccaggttcctctgtccatgggatttcctcttcttttttctgggacccaaggaccctcctgctctcaacccctccttgcccctccccaccaccaattgcctacaaagcttaacctcaggcaagaatctgcatatcattataatcttcgtgggttgttttccatcttctcctcttggcagagtccttggttcagatggtagaattgaaaattttgtttcccatttgagggtttcaggcagcaaactggcagaggaggacatgtaaggaacatgtctgcatgcagatggcagctcagctttggccctactgtatccacaccctgggcatacacacttggcaatatttggaaacatgagaccacaagatagaaatgtacttattcttagaaaagacatttggatgtgaaaagccagttcatctgtgcatatctgggtgaattatatggcttgagccacagcacatgacgttcagtagctgaagacaaacggagataattctgaagtcactctgagcagagacgaggtatctgtcgcactgtgggtaacagacaccttcaaatgcactcagcctggttctcttccagttctgtttcaacctactttcccagccccagtcgacacggctctcgcggctgtagcctgagaaaggaagtgaccctctgagatgagagggtttccctagtgacatccatccagctggccacagtgggggctcgtctggggcccacacagtcaggccatcagaatgtgccaagatcagcaataataaggtctttgcacagaattccttcatcatgaggggaaagcaggctggactgagacagacctgaacccagccctcgcttctaacatcttcagccaacggaaccgaactacactcagagaatactctgactgaagagacagaaggagagacaaaaagaagagataaaccaaggtcatggctgaaaaacttcagatacttttgcaaatcagaccgaaacagctatatcagctaaaaggtcaaagcatcttataggtaaagtcccagtggctttggtgctggaaagtatgactcctgccagaaagctccattcagatctacagaatgatggcttttatctatttagtcctacacctcccaaactttatcatcattgtcttctaattggtcttgatgccaggctcaagggcctaatgaaatcagcaagcacaactctgaacggaaagaagaaaaccaacttgtgtttggcatttgataaaatgcctgtcctagagaagattcttgacagccccttggactgcaaggagatcaaaccagtcaatcctaaaggaaattaaacctgaatattcattggaaggacagatgctgaagctgaagctccaatactttagccacctgatgcaaagagccgattcattggaaaagaccctgatgctggggaagattgaaggcaggaggagatagggaagacagaggatgggatggttggatggcatcattgactcaatggacatgaatatgagcaatctccgggagatagtgaaagacagggaagcctggcatgctacagtctatggggtcacaaaaagttggacacaacttggcgattgaacaacagggattggatatggagctctagacctgctattgctggatttttcccacaatggatggctctgcagctgggagggagaaattaccatctgatacccatgggggctccctgggttcctccaaaacagacagagaaggtctgaatatactgaccttggagaagtgactctccacctccatttcaaactgtcctctacttgattagcttcaagaaacacatgcttaccaaagattaggccaggcatcagggctgtagctagacagaatccctacactgtctagagcagaggtccctgacttttttggcaccagggatcagttttgtggaagttactttttccacggaccagaagaggagtggtggcttcaaggtgcttcaagcacattacatttattgcgcactatatctctatggttattatattgtgatatataatgaagtaattatacaacccaccaaaacgcagagtcaggaggaagccctgagcttgttttcctggaaccagatggtcccatcgtggggtgatgggagacagtgacagtagggtttgcacccctgatagtctaatgccaccaccagtctgataggagtcggagctcaggaggtaatgcgagtgttgggaagcagctgtaaacgcacatgaggcttctgtcgcttgcccaccacttgcttcctgctgtgcaacctggttcctaacaggccatgggtcagtaccagtccatgacctgggagttggggacccccagtctagatagtaaatactgtattatgataaatgcttcattatagtgtgataaatggtcttgtggatggatgcacagaatagggatacccaagggcacacagcagagagaactaatgcttgtcaagggttgaagatagcaggggcttataaactaagagaaggcaagttccctcaaaaagtgggacagtcatcttgaaaactatgaacgaatccattttcgagaggcattgcaggatcagtattaggaatatgggttttgaaatctggatgagtctgactctgtcacttgttgactgatgaatttcaaagcccctaacgtccttctactcccctttacaacgtgactttgcaactcctccagtcgagaggtaagagtctgcttctttactccttgcatctgattttgccatgtcgttttctttgtgacacaagcagaagcttgagcactgggctgtcctctccttgggttcctgggaccaccacaggcatgtcccagcagcctgttgttggatcagagactattagatgcggcagagcgctcaggtttttttgtgagcccagcaagactcacggtagaatctcccagctcagtccacccagttgcttgcccacagacttctgagctgaataaatgattgctgctggttatagaataaaaaggaattggtacaacaacaaaagagacttatgcttgtcctacctttggaaggggaaatatttgatggggttggagaagtgggaaaagatgtctgctcatttagggagatgggctgtgctttttgttattattactgagggtagggtaatggctcctctggctgggggactaccctggctgcccagagatgcttgccgatactcctcgaccatttccgttgtcacatggaccctccaccaacttgtgctacaagctgattgtcctgactttatattctcagtctccctactggtgccctggaccacttgtgtataggacacactctgtgtgttcattaaacaaaacgacaacaacaaaaatacagcttgcctctcttaaaactctgctataccaaataggaaggagttgaagcttactttagctttcacagcagatgtttttgcattcattttccccccggggaggagaggaaatgcaaattgttcatttgagcaatttctatcccttttggatggccccatcctctctatgaaatgtgcgtcgctcctcaaccaaattgtatgggatcatctttccaaaaggagaaaacctag

SEQ ID NO: 56016 - DNA, 1171 bp, Bovine  19866881035357
  misc_feature (1)..(1): n is a, c, g, or t
nctttcatgagaaataaaatgccaagatagatgcatggatggaaacttacacagagaggaggcaaaaagtattttttgtggattgtgtcttcatatcttggcaacacacattgtgtgggtctgtcaacaaagccataagaaagagggcagagagtggaagaatcagcctgatgaatgcatcttttttctgtgcaccatccagcttaactttcgacaaactttttacaatgaagcccccccgataactaactgcaaacacagatggggttgtcagcatgccctataggtcaggaagcttgggctttgcaggactgacagcaggaattggtccaaaatcaactgttctccactgagaattccctgtcagctgttgaagaaggctggctctgctgaattcagccctcaaagagtgcagagaggagggaagacctctcagagacaaaaagcagactccgcaggattttagggcttaagaccaataccttcccctgcactcagaggcatgaaagaagccagcgcatctggagcccagatgttccaagagagtctccctctgagcagaggctgtcccagtccaccctggagctcagagcaagtcaccaaagaaggtggccttgccccacactggaaagtggaagagcacttctggttgcagtctttatccaggctggagccttgagttcaaagtttctgtgcctctatttcctctccttggaaggcaaggctattctggtctcctggtggagtgaggataaagcaggacaaaagatgggaagagcaatgattgtctggagatagatatagatatagatatagatatagatatagatatataaaactccccctgggggaaaccctgttaaggactcagacaaacatatttcccagactcctttgcagctaggtgggggtcatatgtctcagtcctggccagtgggttggaggcagaagagacatgcatcatttccatgctaagcccagaaaacccacctcaaccatctccaccatcctgctgccctgtctcctggtcacatgcagaggatccaatagatgatcccaaagccagagagaatgggggaaccccagtggatggacctcagattcctgatcaacttcatagaagcctgccttcctaagtgtctcagaattggatagaataaaaacgaaactc

SEQ ID NO: 56017 - DNA, 2465 bp, Bovine  19866881046990
  misc_feature (1)..(1): n is a, c, g, or t
nactctttattaagatgtacattatgtgactaaacagggctatcttggctcaaactgtgagagacatgtgttcccacttctacccccactgctcgcttctggggccttttcccttacaagcatcacacccagttcccccatcacaacctggctgcccagggcccactgggaattccctcccagagaagtttgcttccctgaattcccaagtcagtccattccttgcctccatccttcatcccttagcatagagatcacagcggggaggaatgaggattactaaatggactctcactcgggtttatatatatgtccagagttagctctcttagccttaatctttcaagagacacttattttaaatgagatgcttgtttactccaaagagtgactttctaatggaatttggtatcagctagctagatctttaggcatgggattgagagggtgtctctagaaagaaatctccacatttagtgcccaaatctccaaagtggtctcaaaaatatcatttacatggaattttgggcaggagaagtttctttctgtataattatgtttatatctgtttctatataactgctacaaactctgcacaggaaataatggaatcaaacatgcacatttttttctattggatacactgggtctttcattgttatgggatggatttttctagatgcagcaagcaaaggctactctttgttgaggtgggcgggcttctcgttgtcgtaacttctcttgttgcagagcacgggctctaggcatgcaagctcagtagttgtggctcacgggcttagttgcctctcgccatgtgggatcctcccagaccagggattgaacccatatcccctgcattgtcaggccgtttcttaacctttggactaccagggaagtccagacttcttttttaaacacacaaatcatcagattcagatgatttgtgttttctttttaaaaaatattgatttaatttatttatgcactgggtcttttttgctacagtcaggcattctctagttttggagagtggaggctggtctagttggggtgtacagacttctcattgctgtggcttctcttgtggtggagcacaggctctaggcgcgagggcttcagtagttgttgcatgtgggctcggtagttgtggcacatggactcagttgccctgaggcatgtgggatcttcctggaccagggattgaactggtgtcccttgcagtgtgaagtggattcttaacctctggaccaccaggaaagcctatccggactttttttagtatatgaaactgatacacggattgaaggctgctgccacacctggtacattgttcagatgctgctagtgcctgaagttcaagaaatctccacatttagtgcccaaatctccaaagtggtctcaaaaatgtcatttacatggaattttgggcaggagaagtttctttctatataattatgtttctatctgtttctatctgtttctatataactgttacaaacttttaggtagttccagtaatttagctcaatatacttgtcaatgacctagaggatgaagtgaacgatagtgtgaaagaatctcctgatgactcaaaagtgtttagcttggtaagagccaaggaagatcttaagatggttctaacaaactggatgactgaacaaatgcgactgatgacactttacagagaaagtcaaaaggtaatagatattgaaacaaataacttaagctccacataatttaagctgtacacactgatggacttagaatttatgttagtttcaaaggaaaaaagacttgctgtaggaatcaaattaataaagacaatttccataaagctatctaatctgcaatggtccagaaaaggccaaaagagtctagaagtatacccagaaaatgaaggggaaaatacaagaaaacatgcagtggacaggacaggatgctggcctaacaagttctctttggctaatttggtcctgatgttttcctccagttgtccctagccctagaaaatgaatcaagatctgtctaaaccaacaaaagtatgattccctggaccagcagcagtgggatgacctggaaacgtattaaaaatgcaaatttattaggctccattctgaatatagtaaatcagaaactttggcccaggaacacagcaatttatattttaataaggcccccaggagattccagttcatgctgaagtttgagcaccactggtctaaaccaattatgataatcccattccactttgccaatgattatgttaaggataagcgtgaactccctttaggccaatgagatacaagtaaaagtctgctgggggattctaagcaatatatttcctgaaaagaggaaagacctttcaccctttggccttagttctgtgagaatgtgatgactggagctgcagcatccatcttgtggctatgaggaggcacagttgaggactgcagagcaaaatatat

SEQ ID NO: 56018 - DNA, 1602 bp, Bovine  19866881089443
  misc_feature (1)..(1): n is a, c, g, or t
ntgttgtacaaataatactgttttgcattttcatctcaagttttaaaattcaattatcttttccaagtgtgatgaagaacatcaacaaatattctcttctacacactttgagagaaataaccataaacctcatacaagaataatgcaaaggttttattagaaaaattttgcacattgacatcagaatcataatttccaaatttgcctttaaggcttattttttaaaagtcagcatggatgctacttctagagtctgtttcataaatgaagtttgttaatcatgaaattttttttcctatatcaggcaaaatatgatctttccttcaaaaagtgcttgggcaaactaaatttcagtattagttatttagagtagcattttcacagttcactgtgcacttgtactaactttttatttgcagggtgtttgcaatcatttatttataccatagctatgagatagatacaagattaatcaggaaagatagaacagctgtgtttatttcctaccttgctctccttagagttcttcaaaataaaatgtgtttaagggcaaatctgaagtaaagacttcagtgtgtgtacctcttaccattagggtgatattaagtggaatggtaaacacttaacaaaggtaaatcaactagacctaagagctacataaagagcattccactcaccacgagcaaggtacacattcttcccaatgcatatggctccatctcctcgatagactacccattcggccataaaacaagcctcagtaaatgtaaaaacgatcagaatcataaaagtatgttctctgactaaagtagaatgcagttaggaataaatagcagaaggaaatttgggaaattcacaggtatgtggaaattgaacagcacactcctaagtagccagtgagtcaaagaagacatcacagggaaaattagaaataccttgatgtaaagtaacttaacacattattgactgggggatttttgcagaaactaaagcccttggctggcagtttgttaaccctaagtgacttttgaaacacttcagtcaaaggctgctgctgctgctgctaagttgcttcagtcgtgtccaactctgtgtgaccccatagacgacaagcccaccaggctcccccgtccctgatattctccaggcaggaacactggagtgggttgccatttccttctccaatgcatgaaaatgaaaagtgaaagtgaattcgctcagccgtgtctgactcttagcgacctcatggactgcaggcctaccaggctcctccgtccataggattttccaggcaagagtactggagtgggttgccattgccttctccgtcagtcaaaggcactcagtaacaaaagatgcattaatacctctctggccaataagttgttacagtgtaacccaccagaatttataggatgcaactaaagaaaacagtgtttagaggaaaatttatagccataagtgcctatattttttcaaagaccacatgtcacatgattttatttatatgaaatttccaaaataagcaaatctacagagacagaagatagatcagtgatttctagggacaggcagtggggcagaggatagaatatttggcat

SEQ ID NO: 56019 - DNA, 795 bp, Bovine  19866881253130
  misc_feature (1)..(1): n is a, c, g, or t
ncagtttcaaggtatttatggatttttcatatcaacatttcctgcaaaagtttgtgagtaattttcattaaatgaactcacccagaaaataaatgttgaactctgtagctctaacatggtcctaaattcttagcttaaagtgaaaagggcttaccccaatccttaactttttataagtattcagacattcctttggatgccaaataataaatttataatgctaggtgcccagcaagatgacagtccagttgcctatgtacagtacttaaataaaccgattgcaattccacaaccttattgcttcatttatcaaaagaagtgccagagttctgaaatcttttgtaaggagagcaactttgcttgtgtgaattctcacaggaattaccaagaatattatgccaattcaatcctaagtattgaagttagagttctaaatgacatttaatagtatgatttattttctatcttaaactttataggtcacaaaaacaagatcctatcctttcatattgctttttattgttaaagtggctgagtgatgataaaaatctaagcttaagaactgtcagatgatttatgatatttcatttatttttcaaaggattgaggtgtcaccagtaagcccattagaattgtaggtttaaagttcctcaattttaaaaaagaccagctgcataaacaagtgtgttagctttgtaatttaattctgtgtgattttttttaatacttcaaagttccaaaggaggcagcttttcttaggtcataaatacttatttatgtcattatgatctctaa

SEQ ID NO: 56020 - DNA, 1534 bp, Bovine  19866881273891
  misc_feature (1)..(1): n is a, c, g, or t
nccagctcaaatagtgagcgagcactctgttgggggcaccaggagataacagtgtgctttggttgtcactctgccattgttccttggtgataccacatacaagatcaaacctcatgggcgggggactgactgacagagacttgggacattgctggttctctcgagataataccatcccagccatcaaatcctccctgctctgacctctaagctctgacgattacctgtcccggacctgggtcagttactcccaccaggaggagactctgcacatggactgagagtccattagataccagttactgctcttactatgggctctgcccctgcagcaggcctctaagtggaatcctgtgaagtgggtaccactgtgcctgggtctccatcaccacatgcttggtctaggctgattcctgccctccacctccagcccctctgggaccctggcctgccacctggctctctgttgaccatctactccctggatccacaccccgcttcgccccagcccctgcttttccttctccagtttgcctgtgctgctcacattctgtcttgttttctctgggtggtgtttcacctagcatcttgccggcatggctaaaagaaaacttagtgagtgttcaagacaccctggacccaagcagaacacaagagctgctggccagcagggggttcaatgaaggtcaggtacgaggtgaactgtggacctggccaaccctggagcctcctgtccttagaggaaggctggggggcattgccagcatctcctgtgttcttgcagtgcctgtgccacttgctgggaatcagaggaaggcaagacagatgtgatccttagcctccaggacctcaatccaatggtggggacagacaaccatcacaaaccaagtgaatgaaacagcccagtgtggagagcgctgtccaggcatggccgggtgctggagatggaggccaggcagccagcctggaggcccacttagacctgatgctggggacgccctctctgaatgccttaattgcactttcaacatgaacttccatcacatctcatacagatttagaaagacttcatcagcttctcttacatttttgccagtttgctagtcacaaaattttaaaaaactaaaaacacaatcaccaggtggtgagcagagaaacctgtaaaagtgagcatccctggccccaggcacagccccctctttgttgccctttgacaccttttacttgattgcacagaagcctggattaatttttcctggcccgaggcccatgctaatttgcatggctattctatataagagtcaggtccaggaagacagcaggccagcctgaattcacaaacaaagtcacatccatcaagtagccacgagctcaatatacttactgagaagaatggcgggtaatgagaaatcctactgcggcctgaaagcgtgactcaccagggctgctctgtggtcaagctgatgggtaaagcactccatcatccttatgttcccttgtcaaacacttgtgggcttccattttgggctttaga

SEQ ID NO: 56021 - DNA, 1242 bp, Bovine  19866880450165
  misc_feature (1)..(1): n is a, c, g, or t
ntagcatattcaaaagcagagacattattttgccaaaaaggtccgtctagtcaaggctatggtttttccagtggtcatgtatggatgtgagagttggactgtgaggaaggctgagcgccgaagaattgatgcttttgaactgtggtgttggagaagactcttgggagtcccttggactgcaaggagatccaaccagtccattctgaaggagatcagccctgggatttctttggaaggaatgatgctaaagctgaaactccagtactttggccaccgcgtgagaagagttgactcattggaaaagactctgatgctgggagggattggggcaggaggagaaggggacgaaagaggatgagatggctggatggcatcactgactcgatggacgtgagtctgagtgaactccgggagttggtgatggacagggaggcctggtgtgctgcgattcacagggtcgcaaagagtcggacacgactgagcaactgatctgatctgatctaatgaaaaagaattaggtatgtgttaacaatcactctactgaacaggagaaattaacagaacattgtaaatcaactatatgtcaacaaaataacaattttaaaaactgtattccgttcaatgacctatgtgttttctcgtagtactaatctacagttttagtctacaatacataataccgtagcctatcagggaacagattcctacatcattcaaatccatagcctcctaaagggggtgatgcctgagctgaatctagatggatgcactgaaattagtcaaacagaaaacgaaagagatgtccccaacaggcagaggcagtgtggtgcagtcaggggatgaaaagccattagcagttgctggaatacaaaataaagagggtaggggggaaaaaaagagggcagggacacgtttaggagaatcttaaaggttctgctaaggcctgactcttatcctgtgggcctgcagaaccccaagtggcttcacacacagagtgtaaattgaggaacctcaccctgcagcaaaaaatagaacgaacttaggggatgcaagattggaggaagggtgcgttaccaggacagaggtctggtaaaagagacagactgaacgtacgtgtggcttgcagcccctggctttctcaccagttaaaattacagttctgatccctagtttagtgaatgccaatttaatctcaagggtttctgaacagaagaggaacactagatcaaagcagcgtgtaaa

SEQ ID NO: 56022 - DNA, 2452 bp, Bovine  19866880600010
  misc_feature (1)..(1): n is a, c, g, or t
nagccctgctggacatgcagcaacctccccggctcaaactcggaggaggccaaagggctaaggtgggggctaggggctctgtcccgggcctaggctgaataactgcaatcttctcctaggtgggactcaggatattcaaaatagagcagctactatcagcacacaccctaccccaagaccaagagacaccagaaggggccagggccccaagagtttccaaagacacggaacacgtcacagatttcaggggagctgcccacagcctctggccaagccctgggagcaaccagggatgagtatatgggggaggagcgggcacatccattactcgactcctttctctcagagagaagacagcagagagccagctggaacagctggtgggaagtcatctaggttcagacagggtgctgctgctaagtcacttcagtcgtgtctgactctgcgaaaccccacagaaggcggcccatcaggctccaccgtctctgggattctccaggcaagaacactggagtgggttgccatttccttctccaatgcatgaaagtgaaagtgaaagtgaagtcgcgtccaaccctcagcaaccccatggactgcagcctaccaggatcctccgtccatgggattttccaggcaagaatactggagtggggtgccactgccttctccgtcacacagggtggggaagcctcaagtgagtcctcagtcctcgcctctctacctggcaaagcttcatgaccttgaggccagcaggcaagaggtagaggttgggaagcaaagaatcccaacaaatggcctttcccgcttttgtcctcttcctccccctcctcagaggataggtgtgccaactcaggaagtgaggcccatgggatccccagagtgccgtgcccttcaactcacctgtgtccatgtgcagacaacaagccttggcttagggagacagggttcccccgctcaaccatgcaaagccagagccccagcagcctgccccagggcccagttgctccatcctccctgccccggggttcagtgcagacaccccagcatctttcccggggaccaaagctggtcttgccaaggacatacctgggtttctgggatggctccttggcttctctcaagccaaaccagctacttttggccttttcctccccactggacgagtggtggggggaggctcccagagtggggctccccttctcccccagagagcctcggcgccccatctcgctccgactcagcccctggtggtgatggtggaaaaggcccatccggggcttccgctcgtccttccgggctccctccttctccaccgcagtcctcagaggaggccaccatgggggtggtgacctgcaccggcctcccctccgagggccgggccccctcctcctctccagagcggcgggcccccacggccaacactctgggctgtgagctcagctcctcctgtccaggcactgcctcggagctgctggggcggcggctacctcgggcccaggagtcatccgcagaccgcggcccctcctcggagggccgggaagagccagcgtgcagggagctggagggtggaaacgggcccgagatggaactgcggtgccgtgggggcgccgggggctcctcgttgtatatgtggctcccgttgacacagagagaggagcgcgaggccccatcgaggtggccctgaaggtcaagaagggcccggggaggcgctgcccgcatctggctggcctcgtcactgtaggtccgtttgtgggtgagcaacttgggggactgtgcaaagtcccggcctggaagggaagcacacgttgggtgagatgcctgctcccctccggccttccctacagccgaggggacagcccgccctccactgccctcgctcacccccttctgaagacagccagctgctgcggctgggcgagcgggtgaggagctcggcgccggggccctggtaggccaggctcccactggccgaggacagagtgctgtccgagcccagcgaggtgttggactgggtcagcgaggacttccgcagcttgttgcggaggaagaagcctttggctttgcccatcttgcccaggctgcccagctcggggtcctccagggcactgctggggaggatggcagaggcagattccaggtcaaacttcttcttgcccttcatcttgtccttaatcttactgaagggggaccgcggcttgtccttcacagacaggtcgaacatgctggcgctgaggttgttgcgcgtgaactggatggtcacctggatctccccgcgctccttctccttcttgcccgccttcgagtgcagcttgtaccacctatgaggaagaagggggtgtcagggctccggtcacagggacctcccagagcccctccctgtccctgagggtcatgacagccactgctacagcctcccacaggcctggaggaacccttacaaccccaggcccca

SEQ ID NO: 56023 - DNA, 606 bp, Bovine  19866880779076
  misc_feature (1)..(1): n is a, c, g, or t
ntaattgcctgcttgacatctcactctgatatctaataggaagctaaaatttaacatggctgaaacataacctttaagacacgactatgtctccaatctttcttcccagtgctttctgtttcccaaaatgcaccaccattcccagggtattagctttctattgctacataacaatattaccacaaacttaatatcttaaaataatacacatttacaaaaaaaaacccaaaaaactctccaggaagcaggcatagaaggaacacacctcaacataataaaggctatatatgacaaaccatatatgccaaagaatgctcaaactactgcacaactgcactcatctcacacgctagcaaaataatgctcaaaattctccaagctacgtgaactgtgaatttccagatcttcaagctggttttagaaaaggcagagggaccagagatcaaattgccaacatccgctggatcatggaaaagcaagagagttccagaaaaatatctatttctgctttattgactatgccaaagcctttcactgtggtggatcacaataaactggggggaaattcttcaagagatgggaataccagccccacctgacctgcct

SEQ ID NO: 56024 - DNA, 1567 bp, Bovine  19866880785571
  misc_feature (1)..(1): n is a, c, g, or t
natgctttaactttagaccattaatactgactgcagatatctggcctctagaacactaaaaggaacacatgtgtgctattttaaatcaccagtgttatggtaatttgttgtaaatggcaataggaaattaatataatgtccaatctcaaacatatttgatttatattttataaattttgaattcattgaaaacacataaaaactttaaaatctcatactctgaacattgttaaattggaaaattaggcagtacaaattttccccatcaatatgcagaacttaactgcagtttacccgtttcccaaatccattccccacccaagaacaccctcggcgtactttccgcatctggatggaaagcctcacgaaacagccccacagctgtgctttggcactgccagtgggggcccttgggatatccattcttcccctggggtctccattctgaagaggagattggcctagaatactctggctgccttcctggctctcctcccaatttcctctgggtaactgttttgagcaggatatacccacacccttgccaaaacacattggctctggagactgcctggtctgaatcacacttgttgaaaagcaatattttcctaatccacagttttgcattgccgttagtggaaaatcccaaattcttaaagtggcccacaccagccttttgttaatgtcgtaaatgctcccagcaattccttatcttggacttttgcacaagcccttctttttcatttttctgctgcgccccatgacatgtggaattttagttccccaaccagagaccatcgattgaacccaagccctctgagttggaagttttagagtcttaacccacaggactgccagggaaattccaagtcctttcctttttatgcaaactgttctgggattcctttcactggtctcacctaacgtaatctcttctgggaaaccatccctgaccaactgaaatgaatctccctatattccctataacatagtcccctatatataagccccataatacaggctcccgtaatccttcacagtgcttactgaactttgtagttttatcttttttgcggttaaatatttagtatccattccctggtggctcagatggtaaacaatctgcctgcaacacagaagaaatggattccatctctgggttgtgaagataccctggagaagggaatggaacccactctagtagacttgcctggagaattccgaatccctggtggctcatgtggtaaagaatccgcctgcaatacaggagacccaggttcaattccttggtcaggaagatcccctggagaaggaaatggcaactcactccagtattcttgcctaagaaatcccatggacagaggaagctggcgggctacagtccatggggtcgcaaagagttggacacgactcagcgattcacacacagacatacacacatccattccttcacaagagttcctcccctcatgaagggagcttcttgagaggctgtgtctgttcctcatttgttgaatcaatacacaaatgaacgggaaccatttacaaagacacgttccccctccat

SEQ ID NO: 56025 - DNA, 1845 bp, Bovine  19866880888204
  misc_feature (1)..(1): n is a, c, g, or t
nacttcactctaggtccgcagcccaggagcagtgccccccaccccccactccatggcctcaccgggtactccgggcatactcctctttgctctccttcttgcctcgctgccggggcttcaggttctgcagtgtcagcgagtgggcctgggtgcaccactgagccagcattgccagaaactgcagggagagaggagttatctgggcataatgggatgtgagtctggttggcaggagatgaaccagctccaggataggaggcctcaggagaacatttcagggagccaggttgaaactggggtgtggtaagcgttgcaaggacaagaccttgcagggctagactctgccagggaaaagatggggtcacagcaagggtgactgggagagcaggacagcagagaggtacaggcaccttggaacagacgcgggcgttctcgagcagcacccgggtccagacggcggggtggcgggccacgaagcgccagtcccggcagacctcggcagcgtgtagcagagtgcgcgtgtccaggtaggtaaagatgcagaacagggcagctcgcatcttgaggatctccgggctgatgacctcattggagcgggaggggctgcccctctcagctcgccgaccccgcccactgcctccctcggggcgggctgcacaataccacagggtcagaggtcagtgtggggggtacacagatggggagctggggtagggccggaactgcaggaggaatgggcatgacagaaccatgctgggggaccagaaactggggaggagggacaaagggcctctgcttccccctccactgcattagtcccctccctaattttgcaaattagaaaaaggtggcccttcctcaagtgaactttctttttaaggtcgtatatcatgacactgtgcaaagtcatcccctagaggaggcaactgagcgattggaggagggaaaaggtttggatagaaaccgtgcatctgtgaacagaaggcaggtgaggttgcccagagcagtcaccaggcacagccgtgcaacctgacgtgagctttctgcccccggacccacccacgtacacatgtggccctgtatggatatgggagaggacttgccccactggcccctggcttcactttgaactcccaactcctctcctatgaatgtcacatgaatggatacctgtgtcccagcagctcctgccctaagcctgcagggccctgtacatgtgggaagtctggggcaaggggagaggcggtgcaggagcccaggagatttactgcctcagccctgcgtgccctgagagcagtcagcaccacggaaaacccagtctcttagtacccaccccctcaggactcaccagagagccggcagctgctcaccggcccagccatagcaggcccggggcgggggacctccgaggggccctcagcctcggactcggtggttcgggagcccacgtcggagacgtcaccttcctccccttctgtgctgtgtcgacggggtctgcgctgccagttctggatggcctggcgccgcagtccagagctgcgagggggctgggcccgctccgagccaccattggcagcctggacccgcgtgcctaagcccccggggccgctgtcctcgggggccccctcttctggccggggcaactccagactgtcactgtcataacaacctgagctctgagatgcagctgggatgcgactggaggccctggggtggggggtggaccagacagtgaggagcaaagggtcctaggcctgcccagactctccataccacctaccacggccaagggcaatccacccaccctactgtccaaaagtcccctctgagtgggaaaggcagaca

SEQ ID NO: 56026 - DNA, 1789 bp, Bovine  19866880938992
  misc_feature (1)..(1): n is a, c, g, or t
ntgcagcctggtattctcgagacggtggtccactgcctcagggacagatggttttccaaggaccgctgctcccgccttttctccctccctcaagagctctgaagagcagcgtggaccgtgccctccctcgccaccaggtggcagggcacacctccttccaccagctcatctcaacacccagaagtcatcctgtattctaagggagtaccctcaacagaggcccaccaggaaatgtgaagtgctagagaaattagctctggaaatgttggtggcagactccacaagcggaggctataacatacacttattggagagaaacggagtggttcccgggaaggaatggaagccatgagaactcgttgtgaaggggttggggtaataatacagcagagttcaaggcaaaatgccagttttggcaaaggcacagttaaatctctttactcgaaataaagatggctagggggtcaagttgagtagctagagggaaaaagatggtgttcaggatagcatgtctgctccaagggggcagctgggcctgagttccttctatgactggtaacagttcagacaaaactaaaaaacttcaggaaattctgtgagaggcagtgggctaaatggtctatccgtccttctttgctctcaattccaccatttccagtggggaagagtctgcaatgcccagatgctgattcaaggaggccgtatctcctctacagccaggtcaggcaaagattactctctggagaggctggggctgaggtattactcccacaggtgaaggagacctataagccttagtagttactgcacacttagtgttgagcctggcacactcttaagtgttttacagacatcatctcagccctgggaggtcaaagttatcaacatacccattctacaggtgggggaaaaaaccctcagaaattcagtaacttggccaaggacatagctgaaggccaaagtctgtacctgtgactatttgcattattacaactcccaggggtcaatacagaaaaagagggctcctgctttacagttcagattctcctgatgccatttgacctgacaagctcttcattaagaattggaacaaggagatctgatgggtgcttccaggaagaactagcccagcctggactgagcctttgttgcagtcctcagctgtccattcctgactccgcatcttctctctggatgctggtgtcagagctgctggagggctcgtctggagaggcagccatggcagatgcagctggcagtttcagcctttgctgcttttgatatttgacccttcggttttggaaccagaccctcacctataattgaggcagtgagaagagataagaatgtgactaacagttcccactgcatcccccattcccacagtgcccactcctctctgaaaatttactcttcattctaagggaagcacacccttccctctaattccagtaccactcattcacccaagtatttactgagctcctgatctgaactctggagaaggaaatggcaacccactccagtattcttgcctggaaaaatcccatggacagaggagcctggtgggctacagtccatgggattgcaaagagtcggacacaactgagcacttgtgtattggcttcactttagacatccacatctgaggcagtgctggcccttcccaggtgatggtgataatagtgaagtacgagctccaccctcacagagctcacagtctagtggagggagaccaaaaacaaatatataaatacaaatgagggtacaaataggagtttgagcctcc

SEQ ID NO: 56027 - DNA, 1949 bp, Bovine  19866880987955
  misc_feature (1)..(1): n is a, c, g, or t
ntgatactgtgcctgccctgacctcaggggcagcagcacagtgttgcctagtgggctgggctgtcttttctcattcccaggttgcccatacttgttgagtactgtgggaaataacagagggatttcaagactcgattcctactctcaagccacttagtctagtagggaaggatgagatacagatccaagatacaaatggttcttcatggccagctagactctccacagctaggaaaagtctgtttcttgtggtttaatatgattgaggaactgactgctacagataatgcagtgtccagaaggcatgagccaaccctgcacttcaccataagcctgaggagactcaaagttggccagtggggagggaagttcctaaggtcaaaaccaaacatttctactgccctcttgggcaaaacaggcagctctccctctgtccttcccatagtcctccccctagcctggctcactgaccagataattcagctgggaatctgctagtctattctgcatgagtgtgtttattatccctgctggcgccttgctctacagttggtggtactcttgcttaagggaaagtccttgtacctgatggttattaagcatctctgaaactccccttccccatcccagttctcttcctgccctggaattgcacccagaagagatcttctgttggccagaggaagagaaggctgccagggctcttaagcccctgctgttttaactcttacagcaataggatatttgagtctctgcttgagccctctcagcactgaggacttagcaatgaatcccaaagtcacaacttctgtcctgtggaccccacagaagacaaggcagatactcaaaaccatgctgctgctgcagtcatgtccaactctgtgcgaccccatagatggcaggctcccccatcaggctcccccgtccctggggttctccaggcaagaacactggagtgggttgccatttccttctccaacgcatgaaagtgaaaagtgaaagtgaagtcgcttagtcgtgtcttgactcttagcgaccccgtggactgaagcccaccaggctcctgcatccatggaattttccaggcaagagcactggagtggggtgccattgccttctccgactcaaaaccataaataattataaatgcaacggctgcgaaaggaaagtgctggctgataggaacatgtaagattttgcccaagcagggcgaggatcgggaaacgcaatattcaggctgaagccagagagagtctgcgttaggccaaggccaaaagttaatatcttctgggtcaatggcgacgagcgcccagaatgctccaggagctgaatcagggtgactggagagcaagagccaagggacagtgtggtgacagaaggacctgcatgaagattctgcagtgtgatatttcgtaaaaaagctttccaagatttccctactacgtctggagtccttgcccatctggtccaagggtcgggcccatatcagtagtgtccttctgggctgcagctccaggggcgacgcccactggttcaactcaaaattctaggggcagtaccagcgaggggtcgcccgactgacccctattgagatcttaagagacgtacacgcgccctcttctcggactgccgacgcctgcaaaattagcggcaggaacccagacccagtctgagtcattggaactctccgcagtctagggttgtcaagctccgagacaagaaaaactacactccccacaaccctttgcgccttcggcttgctgcggtagcttatggccaatcgggacaggcagctgtggcgggggccgaggagggacattttaaaagggccggagattgcaggcgtcagtggccatggcggatacagcgactacagcatcggcggcggcggctagtgccgctaatgcctcgaccgatgcaccgccctttcagctgggcaaaccccgctt

SEQ ID NO: 56028 - DNA, 778 bp, Bovine  19866881136043
  misc_feature (1)..(1): n is a, c, g, or t
ncccagaacacaggctgtgtccccgtctcctctcctactctctccccttcccagctctgcctccaggcccggcctcaaacaaaaggaagttggacctttgtcttaacacagacttagcccaacagcccttggcaaagagcagcaatggcctgggaacttgccaaaggagtaggggaattatccatgactaagaaggagaaggaatgctgtggcagagggaagaacagcagagggatggagaacctggggctggccaatctggcccgacggggcaacctggggagccttggacaccggcctagtcaaacttcccccctcctcctccctcccaggcagcaagatgccagcaaggactagagacatgtgtgccccgtgtgtctggtacgggctcacctggctttggcaatgcatttggattaggattcaaatcacggtctgaaatagagtataaaagaaatggtggcctgtgtgcctaatccttacagacaagtgctgagcttctgcatttcctacatggaaacacatgtgctgctaacatggaactatgtctatggcatttgttaggtcattctggacgcacgtgagttccaggcatgagaaaatgaatgcaagtgtgtcggcatgtgttttttgggtgattatatgatgccatattctgtgaacacactttagcactgttgtggaatggggatgaagatatatctcacagtctttgtagaacaaaaaccaaaatctaccttctaatccatactaggcacttaaggaataaatactggaa

SEQ ID NO: 56029 - DNA, 925 bp, Bovine  19866881194037
  misc_feature (1)..(1): n is a, c, g, or t
nagggctttgactggctggttgtgaagatctcaacagctcagttgaggtactttagacctcagttctagagtactctcagtgggtagaaaatacaccagttccctgaattagggctgtttgccctggtacttgcacttcctctctgctcactgcttcttcctctgcctttgcccattcctaaacctggggagcccccatgggtccatactagctagcccttctctcttctctcaaagcactttctttctgcataatctccccctcttcttgccttggctggctttcctctctttggaagtatccgcagaagaaagcctcctccgagaagacgtcccagttctttgaagctataactaatctctgtccttcatactcacatggaatctgctcttgtagtttgacggttgcatcacttagctgtgactctcccctaccgtgagactgggagttcccagtgggaacaaatggtagtcctcatttctttgtagccctcgtaaacccagcacataaaataggtctcaagcaaatagatgtttgttgactccagtctaattaaagagcatagaatttcagagaaagtcttaaaagcagcatgcataagaaaaagctgggaaacagtaggtaagtgcaaagtgcaacgcgtgttagcaatgtgtgcccctctgtgtcgctgcgcgttcctgggagaggaacaaacaacttgtttgctcttggcctgtcaggggcaagggggttcgggaggggcagaggagcggggaagcaggtgtgggagggagctgaggcagctggacaggaggtgtggggcttccctcgaggtagccctcaggctctctcttcctgtaggctgggctggacttgagccctgatatgtgagggccctgcatttcagctgcaatgaccttcatattccccagtagctccttt

SEQ ID NO: 56030 - DNA, 1431 bp, Bovine  19866881207275
  misc_feature (1)..(1): n is a, c, g, or t
ncggccgagggcagaagcagcgtgcgctgcacttgccgccccggcgccccttgcgtcgcgccttggctggggggaacggggccggcggcgggacaggaggttcgggcacagcgctgctcccggggatgtccgccaccagaggtttcgggaagtccgccgtggcgctgcgaaggcccagcggggaaagctcaggctgcgtaccatctagaaactctccgccttcgccgctactccctccctccccactaggaggggtcaggagccccgggaggctctcggctccttctcctaagtcacccggggccagcgggaaagcatcgtaggtccccatggtgtagagtctgctggcagggccacccggcagctctgcggggcagctgatggacagcaggtcttcaatcttggcccccgtcgtggggaaacgggcctccggggcggcctggtagcctccttgtgacccacagctccctggagccccggctgagagcagctcccatggagaatacggacctttgaaggccgaggcagtgtccagagcaggggaagccggaggagcccggaggcctggcttgacgtcgggtgcggagagatgaggctcatacaggcactgtgagggggcgcctgccgagggcgaggcctcccagaacgcctccgggaaagcagcagcgcccggatccggggagaaaaggtctggcggacctggcagcaaggcgtcggagcctgcgggaaaagaggcgtccagaggagaccgggatgctgccgcctcagcgccggggaaaggtgtcaggcctaggatgcccgacatgaggttgaagagtgcttctggatcgtgcgggtgttcgggtactgcctggatgaagaagctaccactgtagccgaggccagggggaggcgtgggcgcaggcccctccaggaggcaggagtcggttaagtactccccggcgccacagctgctcaaggcccagctcaagaaatcacctgctgaggagggagcaggaatcagctccgcgcacatcaaagccggagcctcggagcccgaagcccctacccaagaagccctcggtgctcgctgacacacgcaaagtgccttttgcacattccgatccagcaggagccggcatacgccccaagacatacatacaaacatgcacacacaaaacacacgtgcaaaagcaaaaggacgcctcgatacacgcacaggttcctgcggaggcgctccaggcccggtgtgggtgggactggggatgcgcaccacaagaccccgaatctccttccgcccctatccctaccgctcgagcgtccccatccctccctgttctcagccaccttgcgtccccgcggtgcgccgccgtctgagcacccctggcctcgctccttacctgccggatagccggggctgcgggtgggtcccggcgggcagccgggttaggt

SEQ ID NO: 56031 - DNA, 998 bp, Bovine  19866881243687
  misc_feature (1)..(1): n is a, c, g, or t
nagggaagaggaggggtacaaagaaggaccctgatggtgggtcacttgcctcggggacagatactggactccttctggcctagtggtcagtgaggcataggggcactgcagggtcccggggaggggcgctacgtactgcagaaactgcagttggacacaaacttcatctctcctgcagcctcagtggccttgctctgtgttagtcgggcgtctggatcttgcctctgcccctgcttttaaataaaccctctcgggagaataatgagaggcagcggaaggggagatgggagagaagaaaggaaagggagagtgggtagagaagagaggaagagaggagagagaaacgctgtgtgcctgcatctccacggccccaggaagtgggacgtggagctgctcctcggcattctgtgccaggagtcgccatggagactgagcgctggcctcttcatgattaatactctgaggcagctgtcttcttggagtcttttaaaatatacactattatttgaatacaatgatatttagagcagaaaaatcaaggtggggagtggggtaggagacagtagcattaccagaatgatggcagggtctgggcccttcccagaagagagaaaagggaggcttacttctctgatccctctccctccaccctccctggatccagagcttccaatctcactgcctgagacatcagcatccgcatctgaagggcctgtgcagcgcctggcacagggctgtattcaatgaacatttgatgaatgaatttgttcattcattaattcattcagtaattgtctattcaatgcttgtctagaaagcaaactctccttccatcaccttttcccacggaagccagaaatttcctctcgctttccccacaatcacagctagatcatcaccaccacctttcacactggctcccaagagccttgcacgccgtcctcctcagcatgtgtcgaaagacccaccatgttcctaaggcagtcactccagagaat

SEQ ID NO: 56032 - DNA, 882 bp, Bovine  19866880230029
  misc_feature (1)..(1): n is a, c, g, or t
ntttcagtttctacagatcctgccgatccctactgcctcacactaatccagaccatctatttgtgttaatgctcaagcccttggttacctagatcctctgacaactttcataaggcgggctttgccccaaattccccagagtttagatgactttcacttttcctcttctagtctaaccctccgcttctgactcacttgtgttacgggttggaatctgtgctgtgctcccatcttgccttcagcttacactgcttctccccctgtcagtccactgacatttaactaccctccagggtgtgattcaaatatcacctaaggcttgaactcctttatccctgtcaccagtgaaatgtgtctttaccttccgctgaaactcagtggcacaggcgttttatttcttgggtccctttccatattctcataattaacatgctgtttgcatacgctcctcccctacaatatatgtgcctttgaggaggtcacagccttgtttataactctcatgctttctaatcagtgttcaatagacattttatgaccagaaagagtaaaaatccagctattggcataagttattcttccttcctgttgcccatgcctccctcttttgtgtgtgtgtttaaggagagacgtggcacacatacattacataattttctctaacaagggcatgctgaactgggcaaatgttaattaattagtaaactctccagtaatctgggtctactttatagtgcttttgtgattgatttaaatctagtgcctttctgttagtagttttattgaaagaaagacaaaacgaaagagagagaaaaagaacggaagaaagagaaagagagaaagagagggaggaaggaagggaaaaaaagaaaaattcagtct

SEQ ID NO: 56033 - DNA, 2453 bp, Bovine  19866880517773
  misc_feature (1)..(1): n is a, c, g, or t
naaaccattttgtgtttccactttcaaagtcattccactatttttgcttgtttgattgtttatatgttacttggaatatgttttctttagaccacacactgatcttttgatgatgatataacctgatgattttgtacatctaatgctgactccttgacaagttgataattgatgtcatcattaaactcattggtaatgaaattatttcatttaacatttttatttcattctagacccatcaattataagacacaaaatttatatgaaaagatagatgggcatataaaatgtttctaatatagaagaacaagtcatagtgatttatatttcagtgtggagattctcttattcatccatctatccattcatttgtcaaatatctattgagtgctaactctatgctggatgtggctaatgtactagggatataaaatcaaaaagacatggtcctaaccctccaagatctctcagtcagccgggcctaatcaaattcctatttctgctgctgtctataatgtgagacagcaatgagaataaggaagccttcacagcaaaacttctatttagtgaagtcaagaaataaaattaagtcaaaagtcagagatgattagaatttttaatcttttttttcttaacattttttatggatgtggaccatattaagaatctttggaatttattaaaatattgtttgtattttctgttttggtttttggccacaaggtatgtggaatcttagctcccagaccagggatggaacctgcaccctctgcattgaaatgtgaagtcttaaccactggatccagggaagtgataataatctttttttctttttaaagaaaaatcgtggcaagagtatctcaactcatacacacacacacacacacacacacacacaaaactgctctgagaatctactgccaagctaaagagccccttttaaaaatctagttggatagacaagaagaaaagcaaaaaatgatgacccagacattatgatttggggtaaattagtaaaaaggtctacattaaaatttaactagaaaatttatgttgcattaaaaagtaattgtatttaagaattaatgaaaaagtatccagttgtgtctaagccttacttctctgaacaattgtttgaagtatttttttaaacataattagcaataggtgaagttccaattgctaaatatatatttttaagagtgctttactgtgcagagatgagctctgaaaaatcaaagaaaatagatagctgcagtttaacctctggtcatcaagtgcagcagcaaggcaagcattctggcgatgcagagaggaggcacatagactattcagcctttgtcttatgtgattatatattattctaaaacaagtaaagctaaactaggggaagatagcttctacccgctctttgcttctttgtattcctcttattgtggctcagatggtaaagaatctgcttgcaatgtggaagacccaggttccatccctgggtcaggaagatcccctggagaagggaatggtgacccactccaatattcttgcctggagaattccatggatagtggggcctggtgagctacagttcatgggtttgctaagagtcagacaagtctgagcaactaacacacacacacacacacacacacacacacacacacattccttttaaattatagaacatcaagaagagttgtatattactccaggccatggcattcacatttggtagcagagggatttagtatgtttcagtcatatgcagaatagttgtatcatatgaggcacaagtatgatcttcttaaaaaaaaaaaaaatatatatatatatatataatttctttttggctgcattggatgttatttgccacacatgggctctttgtggtggcatgcaggcttctcttcagtggtggtgcacgggcttcagaacatggactcagtagttgcaatgcattggcttagttgcttcctagcatgcggaatcttatttctcccaccagggattggacccacatccctgtattgtaagatgggttcttaaccacaggaccaacacggaagtcccatgtatgacctttattgtccttatttgaagattaagtagtgtttaagtagatgtgtggggcttcccaggtggcttggtgctaaagaatccgcctgccaaacaggagacttgggttcaatccctgggttgggaagattccctggagaaggaaatgccaacctgctccgatacccttgcctgggaaatctcacagacagaggaggctggtgggctgcagtcagtggagtagcagagtcagacatgacttagtgacttaacaacaccgataaaggagatgtgtaatggataggatatgcaacagcactactactgttaagttatagtgaggatagcagtcctgcttagcttgcccaactgaagggaaggcttcaggagaatatagatgt

SEQ ID NO: 56034 - DNA, 2880 bp, Bovine  19866880535664
  misc_feature (1)..(1): n is a, c, g, or t
natgaattaagtcaaagagttaaggtgctttatagttagcttttgcttcatttgacaagaaaatattagtattgtgctgtttttaaatagcacacataattatcccctcattaatgatgtcaaatattagtatttaacacattgctccaattaattatgttttttaaattaaacagctaatctctaacaagatatgtttaaataattatatctaatgctaatgggatagggaatgcattccagcatcttctttataaacacaaaatgaaattaaggctggtttagtttccttggctgagcagctcctaacttcatgtcccaccattagctacacacagtttatgcttccatgcacgtgggcatgctaagttgcttcagttcagttcagttcagtcactcagtcatgtccgactctttgcaaccccatgaatcacagcatgctaggcctccctgtccatcaccaactcccagagtccacccaaacccatgtccgttgagtcggtgatgccatccaaccatctcatcctctgttgtccccttctcttcctgccctcaatctttgccagcatcaggggcttttcaaatgagtcatttcttcacatcaggtggccaaagtattggagtttcagtttcaatatcagtccttccaatggacacccagggctgatctcctttaggatggactggttagatctccttgcaatccaagggactctcagaagtcttctccaacaccacagttcaaaagcatcaattcttccgtgctcagctttctttatagtccaactctcacatccatacgtgaccactggaaaaaccacagccttcactagacggacctttgttggcaaattaatgtctctgcttttgaatatgctatctaggttggtcataactttccttctgaatggatagatagatagaaaaataaggtatttattcctctgcctactactcataaagaaaagtttccatcttcactcacctccatttagacagatgttattccactcacagttcagactgtgcaagtgaaaagtaaaaacaaataacatgtacaaatatataacttacactgttaaaaaatattcataatggtaagttctgaggatctaacatatggcataatgctgctgctgctgctaagtcgcttcagtcgtgtccgactctgtgtgaccccatagacagtagcccaccaggctcccccgtccctgggattctccaggcaagaacactggagtgggttgccatttccttctccaatgcatgaaagtgaaaagtgaaagtgaagtcactcagttgcgtccgacccttagtgaccccatggactgcagtccacgaggctcctccgtccatgggattttccaggcaagagtactggagtgggttgccatttccttctccagttgctaaaagagtagatcttaaatgttcttaccacaaaaactggttactgtatgacatgatggtggtgttagctatggtgataatcattttgcagtaaataagtcagtcaaaccaacacattgtgcatccttaacacaatgtgatgtgtcagtcctatctcaataaagctggaaaaaaaatatatttactaggagatctgaaccaagaagctacctcctaaaagaatctaagagcaagagtcattgtaataatgccttctacttatttattacttattatagccaattccttgacattcattaacatatttaatttccagagtagtcaaatgaggcaattactaatgtcaactccattttacaaaagtggaaactcagattgacagagggtaaaccttccccgatatttcaaatctcataattgggatccagggttggtacccagctgccctgttccatctgtttctctctccacccatgtactacagcatagaagttgttgggaactgtggtaaaacttggacaatcaacataaaaggtatgtgaaatatattcattgtttatgctacttcaccctttttgaccctctcaaccttcctatgtggtaataatattatcaccctcactttgcagacaagggagaaaacaagcagcaagagataggtacatgttttgagactgaggaccctacccattgtcagggtaattgtcatcatcacatcatgtaatcctgttgcttgcttgctgtatttaagtaaaaaacaaattaccctggttctctgtgaaagaaatgattaaacattaattacataatacacaacctctctactccctatgttcctctttgtacaggaaagaatgttggagtatgtggctttccagctaccctcaagtgaatcactttaaaaataataaaaaaagattacccctcccttacaatagccaaaaagtccatgaaaatcagtgtaagaaaatctatctctaagtgtgttttgtggcagggtgggtggcaaagaaaacagatattccccatctttaagcaaatcctctgatttgacatgactacttctgttttctctaaaggtgtattttctgacctcctttgtcatcttttgagaccctactagctaagatacactctgaaagatctaagaggtatcgttctccccaacctgcacccttccccttgtttagggaaaaatatcagagaagtgatagtgattcaactccccaaatgactctgctccctgctgattgacctcctttggggagagagcagcgttctctctcacctcagatgctttctttaatgtagcattggctctgcccttggcctttggcagtttgagtacagagcctcagaggctgaggcttgaggtggtaaaaacatattccacaaagggctggccctttctgaattatcactcatccttccccagcatggtccccgttttttttttttttttttttctaa

SEQ ID NO: 56035 - DNA, 1331 bp, Bovine  19866880635371
  misc_feature (1)..(1): n is a, c, g, or t
ntagatgcacagagccactcctggcatctggaaaatcccacacacatgaatgtcactgctattgtcctttgggtctgtgtcatacaatcctgtattaagaaggtcctttatagacgtctctggttaattgaatagaagcgtctgtaatgaggtgccagagggcatggtatccccagtaactgagtctgcttgccttttttgaatctccctatagatcactctggggtttctctggtgcctcaacagtaaagaatccacctgcagtgcaggagatgcaggttcaatccctgggtcgggaaaatcccctggagaaggggatgtcaacccactccaatatttgtgcctgggaaattccatggacagaggagccatgaggtcgcaaagagtcagacaccgctaagcgactaagcaacaacaaaacaacactgtaagaactccgaagatctttacaaactgaaaatttattttatttcttagatacatgcatctatactagttcttatagatgttaaagttttatttctttctactgcaaaaaaaaaaatgctctcatgacaaggcatgtttctgaaattaccctccttctcacccccaccaacacagtaattgttatattcacatattggatgaagagcctaagataagggtctaatttggattaataggataattactgtgtgacaaacgaatgccaactaacacgaggaactgctttgtgagagagttcttagtttgacaaaggtttgttttcaggtatgcagcctgaattgccagcttcagacttatttctcaggcttctgatgaaatttatatttaaacaatacaaccctaccattttctcagatatttttaagagtcaagtttgaagtctctcgtggcgtctttctatccttcctcaggcattgctgaggcagctgaaggctgaattgtcacttcaacctttttgatacccccaaggagagctccctgaaaatgaggcagtatcttgaacctgcaggtgggagaaacgcagcctgcctccagagctcacgcctgtgtcccccagggcatcctgcatgctcccaggtgactgtcggcttatgcgtttctcatccttacaaagctgtgcactccatcagtgtcatgggctgtgcaggaatactctgaaaatcaggacagaacatcttcaacaactacccacttttgagccgctaggatgccacaggtgctatactagcaactattagtcacatttcaggacgagagaatgtgaagggaaaaggtaaagatacttgccaaagagggacttcctggtggttcagggttaagaatccaccttctaatgcgcggga

SEQ ID NO: 56036 - DNA, 2860 bp, Bovine  19866880719475
  misc_feature (1)..(1): n is a, c, g, or t
ncttgtcaaaatgcagatttgagtttagcagatctgcaatgaagcctgagattcattatctgtaaagcactccaaggaccaggaagtatatacttcctattacttatgttgtcaaagggtccccaaggatggagaattagattctaccacgagttttcagcacagagtcagagcagacgtttcaaactggagcctctcctcaaacttatggtgaatagaaccaaggtcatctaaagaagctccaaagtcttctagaacaagagggccatgcctttgaacatggacatagctcccaggatgttgaatacaatactcacctttagctcactcagaagcaatctgccagaatgttcatattcagagaggtatccctaaagttacttgctactatccctaaagttactctgagaggtgacagtggaggcagcaacagcatacccaagaatttgatctaaaaatgacttctcagaatttatatagagcttcccaggtgacaccagtgataaagaacctgccagttcaggagacctaagagatgtgggttcaatccctgggtcaggaagatcccctggaggagggcatggcagcaaactccatagagtggaagtgcaatagaatcctatgaacagagaagcctggcaggctacagtccatagggtttcaaagaggcagacacaactgaagtgacttagtacacatgcatatatatgggcttcccttgtggtcagacggtaaagaaactgcttgtgatgtgggagacccaggtttgatccctggcttgggaagatcccctggggaaggaaacagcaaccactcccagtattcttgcctggaaaattccatggacagaggagcctggtgggctacagtccatggggttgcagagtcagatgtgactgtgagactaacagagacagatatatatatgtacatacacacacacatatagatatgtatacacattggaatattgctcagcaataaaaaagtgaaataattttttcaataattcatgttgtcatttgcagcaacatggacggacctagagatgatcacactatgtgaagtaagccaaacaaagacaaatgtcatataatatcgcttacatgagaactctgaaaaaatggtattaatgaacttatttacaagagagaaatagacacacagacatagaaaacaaatttatggttactaaaggtgagatggggggaaagagggataaattagaaatttagagttaatatatacacactactatacataaaatagataaacaaggacctactgtatagtataggcaactatattcaatgtcttttaataactataatgaaaaataatatgaaaaaatgtgtgtatatgtatgtatatacatataaatgtgtctatacatgtgtatatatatatatatatatatatatatatatatatatatataggcttctctgatggctcagagagtaaagagtctgcctgcagggagggagacctgggttcaatccctgggtcagaaagatcccctggagaagggaatggcaacccacagcagtattcttgcctgaaaaattccatgcccagacaagcctggtgggctagtcatttatatatataaactgaatatataaactttgctgtacacttgaaactaacacaacattgtaaattagctatacttcaatttaaaaattaaaattaaacaaatagttcaaaacatagagtaccaggggtcactgcctatacttagagcacaaatattacagcagctttatttcaattgcaatttctccatatgcagcttaccctgctagcatgtaaaacatatgtaatttttatttttctgttttgttcatgctgtttgccctctgtctgcaagaaccacccagactctctgtttgcttagttgtttgtattttttaatcttcaagtccagcccctcatcccttgagttgtgtctcttgccaagggagtgttgatacaggggccgtgttgtaatttttgtttgtttgtttccttttacatcatattaggagctctttacataaatcatttttctcctttctcgccacctattacagtgcatcatctaaggaagataacagtaaccacttgaatgaatgagtgactttcaatttcaaatcctgccaagaatagatcaaggatctgttcctccactaggttcctccaccggggtctgaagaagagtcagagatcatcgtgaaattgggttttgtcactgatgagagtaattaagcgctaggactatctacacagaatgatgcactttgtacctcaagtgctcagagtctggcaactacagagaggtaaaggcaaacgtgtttctgctgcccaaggcttccaggggaaactcactgcatcctacagatcgcaaggggaggcccagagtgattattaccttttgaggatggtggattcatctctgcaaaagccagtttcaggtttgttcctattaatcccctgcttgataagaacggcggggcgcactgctaatggtttctggttgcttgtgggctgatgtgaaatgcatgtgataattagctaactaaattacttctgttctcattattttttatataaagcagttttataaggatggctttttacagtgatttctggtctaatttctcattatcaccattggcaaaaagagataatattttctccccattctctgcaatctctcccactcaccacacttgacaccttccatattcacccatgtataatctactgcatgttaagcatgaaaccctggggttgcctcagtcttctcttttggatcactgcactatcatgactgttggatttcctcctggatattcagatgagtgcagggtttttt

SEQ ID NO: 56037 - DNA, 1371 bp, Bovine  19866880801280
  misc_feature (1)..(1): n is a, c, g, or t
nctgcaactaagactagatgtagccaaatagataaataagagggggtggagtagaagggcaatttttgatataagggtcaatgcaacaaaggcaggaggtaagagaaaaagatatatgtgaagaccagcaaagggtgagccttggctggagaacaggggagatgaagctggaaacacattacaggaaacatcacaaatgaaccaaggtcttggacttcaagtagcatatattctcctagtagaaaccacaagaccaaaaaatgaacatatcttatacaagatagaactgtagtttgtgtttctgttgctagaacccataatcaaattcacgaggataagtggagaataagaggtaacttcatctttacactggcctgtaagcacatttgaataaacaacatcataatactccttgatgaattgcatacactggaaataagcaaggctctttttgatcatgagggaaaaggcagtgttataagtatgatgataaatatcaagaatctgaatgtgatagaggaagagaaaatatctttagaagagaagaggaaaacagtcttcccagaggaggtgaaatccagttgggtcttcaaggatgaagagatgctcaagaagtcaaggcaggttaagggctttctagcaacagaccagcccacgtggagtcatagacatgagaagcggcaatggagaactgaaggatgaaatgtaagctgggaacctttgatcctgagacttgaaaatgtgtgtgtttgcagaaagggtgaaggataaagatgagagatctaactttgtcagtgctggagatcccctgaaggatttggaaccaggaaaagataagatatagagactttctagaagaactaaatcagttctttaagctaagaaaagttaattaggaaatgtgagaaaattgcctctataatgtccttaatcctgtatgtagttgctgtcagaaattttgttgaaatgcagttttgcatacaaaagatataatccaaatttttttgtatgaaaagagatgcatggtggacataactttgatctttctagcctggttgatgtgccctaagttgtttcttcaggacagggtttagcaaaaagtggatcttgggtatgatctgttaacataaggccagtcattcatgctacatgctctttgtggacttttcaaatcagaagatcaaagacagtgtcagattcttacctctggccctaaagaggcttccaggagggcagaaaacctggatgggaccatattcatttctgtgctttggatgacaggatctatggctggaaagtattacaaagcagttgtttagggggcctctactgatttcaccacatttatattggttagtcctaattccagtt

SEQ ID NO: 56038 - DNA, 855 bp, Bovine  19866880891576
  misc_feature (1)..(1): n is a, c, g, or t
ncatttaaaaaattggtaaattgaacacttgcctcagagcaagcaattagggctattttcttccatatttattttcctgattgagacaatatttgttaagtcttaagcacactgaatacatttttgaatcatttttttctttcaatggcagtctagatgctaaaacttcatgttgctcccacccattctctgttcaattacagagggtactaacaagtagaaaagatttactaattccacagttactagtattgaaatctctggggaagtttataaaatcagcttaatatttaacaaatctaggtgaagattggttaaatctctttaacctctattaaatgcaatgagaaatgtgttaaagggaccctgtcgtatagaagcaaaccttaaaagaatagcgtaatttttttttccccaaatctcattaaactgacgtatatgggttttggatttcctttatttccttttaaattattgctagctattacttacatatttatatgtaaaaagtagctttcttcctcttaagtctcatctccctccgggctgattgggtttctgaaggccttatacaaaccctaggaaattgcagtacattctcccagttgggcttcagacaaatctgaatgttcccaatctgagtttctgccctttgtttccaaatcctgatgaaaatgaacaattcatcccattctgatgtataaatctcttattctggtacatcaagataaaggtcatagactacattaataatggttccttacttgtgttactaataacatcttacattgttaaccctgaaactattttaaaaatctaatttactttctcctaggatgccaggccagatacgca

SEQ ID NO: 56039 - DNA, 1501 bp, Bovine  19866880927843
  misc_feature (1)..(1): n is a, c, g, or t
ntggacagacattatcaggaatagatatggaaatgtgcttggcccccaaatggaggtgatgaacacgagagaaatacatttgtaaattgcccatcaaacatgtaaaaagatacaagatattctacaaatacctattttaaaaaaataaatggtttcttattttattaacaatttaggaaatgttaagtaaaaattaaaaacaaaccatcaaacatgttctacaacaaatttcagcatactggagtatgctgatgcaaataaatatcttgccagtacaattcattttgtgcaggcattagattaagctttttttgggtacctgtatatatatttgattcttttgcacaggagctgtggatttatctttttttccttttaaatgtaggcattcgtgttcaatcatgggaactagtgcaagcaaattcaatcacacatcccaccagtgctagtattatgttgtaaatagttctaatgtttttcttggtagctttgggtgatatatattataagggattcaactgtggaacaaaatgtcctggtacacttaatactcaggaaaaaaatgcagtataaaaatacaaaaactgttattgtttgtaacgattgatctgtgagaatcaggattttctagatttagtgaatctaataaaaaagagtatagaaataaattacgctatatctgatgtaacagctccttccccagtccagtctaaaactaaacattttgttttcctgaaatttgtcttattgttccattggtttatttttaagcagtgattttgataatgtagagtttaaaatatatctatgctgaacatataagctttttcaaatatacaatgagattctacagtagaaatgttcttttttttttttttttttgataaagaagtttgtgattaaaagatatttgaaaggtattgatttagagacagagaagctgaggtcttagctctgaaccttggtatccccaggccatgaaaaaatagagagagaggtaagggtgcaaacacacaaagaacagagttagcaaaggatagaatttattggccttaagtttcagcagctttgattttccatggttatccttttgataaagcattaagagagctagagtatcccaaaattggataattaatccctttataattgctagatgactcatgctttagtgtaaaacaaaagtctttctcaaaattagcatgtgttttctgggagtagccccaatttggctgtggtcaaaggcagtgcattacatctaaatttggatgcccttgttgctcagggatgctcagtagccgctgctggctgagaagagtcagtgatgcagagatgtgggaggacctgagccatgagccctggggagagggagtagaagtaacccagtagaggtttctgggtgatgctgaaggctgagagagcccttggagctagctgtcatggaacaacattttgaagaaaacagtttctcatctccagttactcaggggagggaaatcag

SEQ ID NO: 56040 - DNA, 1662 bp, Bovine  19866880953463
  misc_feature (1)..(1): n is a, c, g, or t
ntgtgcttgtagagaaatgacagacacatgtgaagcatcaaacctccataaaagagataaatggccaatcagtggagcatgaaatgatatggataattatgtaataaatggtttaaggggtcatagatggaggaacagagcgaacaggagttataggagaagatattcagatgaggggcaatttaaactggcccttgaagggagggaggaagagcaagacaaggtgataacatgcaggataaacttaggagatggtgaatagcccattttggctaaaaagctggctctggggccacgtgtatttgaagataagcctagaaaggcaggctggagtggactaagaaacctctgaatgtcaagctaatgcatcatatggacaactgaaggagacccgtcgtttcaattcattttaatctgtcctaaacccacataattcaatagatctagttatcccttctccctatttatcatgttttcaaagttaccttgtataagagggaaacaggggcaggagataagatatgggcatatcaccggatgactgatgttgagctctgatgatgctatggctttgttcctcacccctcaggcctgcagcctgtggcttcttcctgctgcaatgttctggggaggaatccttttgcattttttgtgtttttacttttcatatgctttggtcacatttccccagtgagatcagaacggcttttttcctcccaggtcttttatcatagctctaataataaactcgttcgtatttcttgggcttctctggtgggtcagatggtaaagaatctgcctgcaacacaggagacccaggttcaatccctggggggaatggcagcccactccagtattcttgcctagagaattccgtggacagaggaacctggcaggcttcttcttaccattcctaaatcagtcctctatctcaactctttattccgaacttcagcttttgcatttgtaattcttctcattggtaatgactcccgagaaatttttactcattacctcttttccacgctagattgtttcattatgaatattttatttagttttatataatgaataaaaatagctagattccctttttgatcctggtagatattctgtgtcacttagtggcataatttatagcatttacatttataactacaattattaaatgttgtcagtcttgtttctgtttagttctttttactgtttaatttcttggctttgttttcttgttatgctttttgttatatgaactgaacacttttactgtagttttattggtggatttccaatgttaatactattacttatgatattaagacattctaaaataaaatacttttattaaaatcagcattattttatatttattaaactttgtctttactgaatttctgattataagctaactttgcctttaaggatttatcttatttcctaactaaccaaaaaatgtaatccaaaaagtggaaggttgaaaactataaaattagcttaatacctccttgtgactgagtataggtgctttcaaataagcctatatggagacttcactgaagagcctcttgatgaaagtgaaagaggagagtgaaaaagttggtttaaagctcaacactcagaagactaagatcatggcatcggtcccaccacttcaggcaaata

SEQ ID NO: 56041 - DNA, 1542 bp, Bovine  19866881047893
  misc_feature (1)..(1): n is a, c, g, or t
ngatggacttccctagtgatccggtggctaagactatgtgcttccaatgcaaggggcttaatccctggtcaagtaaggcccacatgacatgtgtccaaaaacaaaaaaataatgaaatagagcaaaaaataaatccaaaagaaaaggcttgttttctcagagattctctgtgctaccagttggctgatcctcagcaataatgatgacctggacttgaaactcaggatagaattttctgcatttctcactttatggtgtatgtgaatgttttcattctgttttgcacagggacaggaagaaccagcttctaaatttcctagagaggcagcccaaagccttaggttatccatcttcacttttattcgcctgtctttatctttctccctccttttatttttcacttttgtcttttccttatagaagacaccagtatgaaaatccatccacacataaatattctcccagtcctctgtctcttcctcaagtccatggatgatacaatttcccatggcatcattttgcagtgaaaggcttctgataaatctcaaacttagtgtcctagtcttcttcttctctttgtgctaggaaggctccaaatgagccattgggaagaaaataaaatcaaaaggctgaaagagggacaaaaaggatctaagagagaggggagagaagaaggggaaggagggagggtcatcacagccaggcaaaaacaaggacggattgggttttttgatggaacttacaaagtgggcaaattgaaaggtcagcactgctgggaggataaaaggatgagaacaaagaaaccactttatgcagcgatattagtgctaccaggagcaataaaactgcacggccacaatcgaacattggagtggaggatgatgctggggagaggcccagccgatgccttcaggatgcatggggcagtcactgggagggatgtggacttcaaagccctgcaggaagctcaaggaggagccctttggacccaagaacggacacaagagagttgaaatgcatgccttctttctgccactgcccacagagatccctccatccttgagccactacagagtaaagaggaaacccagacctcagcacacacctggtgacaatgccattaaccaataggtattgtctgagcatcacttacattccttggagccctggggtttcaaaaaacatgtgattcgtgggattttttccctcaaggatcttgcaatctaactgtggaagctagcatttgctgctgtccagtcactaagtcatgtccgactctgcgactccatggactacagcaggccaggttttcctgtccttcactatctcccagagcttgctcaaactcatgtccgtagtgtcaatgatgccacacatatgtgaaaaaaatagatgggattattaattaaggtggcttctctaagttgaaataaacacaaattcccctcaaagacaaatgtcctcttgaagctgttgaattcatttaaaaaataatagtgtttcaatctgcagacagaaacattatattatatttaaagacag

SEQ ID NO: 56042 - DNA, 1907 bp, Bovine  19866881277215
  misc_feature (1)..(1): n is a, c, g, or t
ntgcacagagtcggacatgactgaagcgacttagcagcagcagcagtagcagagtgactaacactttttagcaattgaacagcaatgaaacatctttctaaatatacgaatccttaaggagggtttgttattagacccatcatacaaatattatagaggctctgtacatttcaatgacctgaactaggtaacacaaatggaagatattaagtgaagcatattttatttagggctatatgacccaaagtctattcttttaagcatcattctctacacaggaagagacatcaataaatggactatagaaggagctttggagaatcagaaactacccctctgaggaagctcagtcatttctggacctttagtagacaactatttggatggacaacttgttccaagtgagagggcacagaaagcttagtattttcatgtaaatactatggtcctggtcagatttcagaaattgtccttgattccctttcccttctacccattttttcttagcaaaaattgtatgtatacacatatcccctcttttttggacttccttcccatttaggtcaccacagagcattgagtagagttccctgcgctatacaggaggtccttgttgagttgtctattttatacatgcctgtatgcaagctcagtcactttagtcatgtccaactctgcaaccccatgggttgtagctcaccatacccctctgtccatgggatttcccaggcaagaatactggagtgggttgccacttccttccccaggggatcttcctggcccaaagatcaaacccacatctcttacatctccttcactaccaggtggattcttaccaccaccaccaccaaggaggtccatttttatatatggtagtgtatatatggcaatcctaaccacccagtgcatcccatcccctccagacttgtatttaaatatcatttttataagtgagattacacatcttttctcgctaatatggtagacatatatcttggaatgctgccttaaaatcagttagaaacaataccttaagaaaaaagcaaatcataaatacaggcttccacagatttcttcaaataaagctgttgtttttaattacaggtcctataattttgcacatgcttatttcacattaaagaactgataattcgatttatggaccactcttacatatttatctataataatctttcctaagcaacacattattacccttggttcaatgtgtgatatatgaaataaattaactttcatctcttgctattctgtgaatcacacttccttcccagtggccttagtgaggagctgatgtaccataggtggacattctggaaacttctccaatctctgtgtatggcattgccatgatggaaaccaaaaagctaaatgaagcctcaagagtttgtagcacttaatgcattaactcagacctctggtcccatcaccttatctattccagttttcctgggtttctgcttatccatctttccagtctcattggaaccagtatgtgtagcctgtggatttgtgctatgctcgctgctgaagcaaaacagacgcgtttctgaaatacatcttcatctgtctaggtttataggacaaggtcattcatcttgtgtctggtaagagggctctccaggcgtttccccgggtaatgggtctgattcacatgatgtgatgaaaggagaggtagatggattcttcacttatcactaccttgcaggatcccatgctctagggagaaggaagagtttagcaccccaagtcctcctcccagtttcaggactcagagaccaggcataaagggtccctgtgccctctttactgttataacttcccatgtggcacctggggtaaagagcctgtctgctaatgcaggagacataagaaactttgggttcaat

SEQ ID NO: 56043 - DNA, 1327 bp, Bovine  19866881350517
  misc_feature (1)..(1): n is a, c, g, or t
ntgcgtgtgtgttctctctgtaaagttaattcatgctttcctttttaatctttttaatctttatctgtttcttaccaaagtaatcaaacctcccccaccacaaataaataaataaaaataaaaaacacctttttccaagtacttatatactaaacactcatcacagtccaccaggtcttcctaattttggaccatcctcagcccctctgatctcgccataacagctaatgaagactgacatgctgaatgggttccttaaatcctgttatttccatggatattcatgaaagatggcctcttcataatccattttcgacagagacatctaaatcagtttagtttccccctgcctccctatctccacttcccagtggagaaatagagttaaaaattctgcaagggtcttaaatcctaaagcctgtcatttttgcataaccttggcttatcaaaatctcttgttgaaacacaactttcttaaataggaaagagactaataacacaggtctcatagtgtagtgattataataaccttcaacatatgtaacatatataaagctcccagcagagaatcttacaacagcattgaggttaattccctctggtcaactcttatctcttctcatcttcctctctcttaggaatatttccactaaatgagacccaaatagcccattctgttctccagtcacaaatttagctgagtgtaaattcataatccattcataggaagcattatttaaaattaaaaaaaaaaaaaaaaactaagatggccattatgagaaagacagactcagaactggcttgggtatgagccctgacctggattttaatcaacacagccagtgttttcaagtcagggccaaattcttgtgacacataatacaaaatttatgaacttactgaaactgatttataaactgataaaggataatataaccatatagagctggttgcaaaataactagagggcaaaattgaagttttattaaaatgacctcagtcgtttttatctcatacctgtgctggataaatagtcatttttgtaggatccataaacaccaaggaactcccaccccatttctaatgcacgaagtaccagagttagaagaaagtcatcccaggaaataaagctcatataaacatgaattcaataaacttttagtaagtgcctagtctatgccaggctctggcaaaggcaaacatcaaaaacacatttactatcagggggccctcagtctattggagaaggcaaacctgtcaaccaaaagaggggggtaggtacagggtattgataggtcagaagaagctttactgggaaaagtaaatt

SEQ ID NO: 56044 - DNA, 1492 bp, Bovine  19866880349802
  misc_feature (1)..(1): n is a, c, g, or t
nactggtaatgcgcctttttaatatttgcttatatgaatgtgactcttttctataagagaaagaaatccttcctactttctccattatctgtagtgtaaaatccaaactccttagctgaacatgatgcctctggcctctggaacacttccgtatcatcttttgctttgctacctcatgcatatttcagagctatttgcaacctcttcacttgcacatcagcctggaaatccccatcagcctggaaatcccctccagttacgcacatcagcctggaaatccacagatttgtgctaattcaaatcatcctccaggtcaagcgttagttcctccagaatgtctcccctgtccttcccaccccaggcaggttatggtccctcctcattctctcagagtgccatgtgtgtgcaccgcccatatcacttaccacacactgccatggctgttggcttgctctctgatttttctacttaactgtgcatcttggggctaggaactgacatagacttcttaactgtcaagtttccagaactcagcacggtgcctggcataaggcagatactcaacataaatgctggactccatatacagtccatgggtcgaaataaggctcagacatgacttagcaactaaataatgacaacaatatgaatgatgaattggatctatttctttgacaattaaccaggaatagtaactctatataacattttgctggaataccccaaattatagcaatgaaacagtgtttagattttgatttagaagtcagattagccaggaaattataccccatacatctgagttgtgattgcatgatatcagaagttatctgagaaacttttgtagtaacctgctgtaatttgatgtatctaatttgttatcatgacctttcagatccaaagagacttaaggtggtttgtaaagataacacaaaattccagaagatgattatgttggtctctactgattgtgagttttctactctttctaaatcaaacacgaattttgtccatgtggcaaccggcccaggaaagcgaattcatttcccagtgttccttccatctagggttggtcatatgataaagttttggctgatgaaaataagcagaaatggtatgtgccgtttatatttgtgtttcttcttcatttttggagtgaggattcagtgctggagaagaatagccaccttgagtgtacacaactgtggaaaggaaaaactccatatctcctaaaggaaagattcatggttatatgagcaaaataaaactctccttgtttggtcatctatttaaggagtttctcaagttcacagccaaatctaattcttaattgataggatgttgttgttgtttaggcactaagtcatgtctgactcttttgtgatgcaatgaactgtagcctgccaggctcctctgtctatgggatttcccaggcaagaatactggagtgggttgtcatttcctcctccagggcatcttccgacccagggat

SEQ ID NO: 56045 - DNA, 5696 bp, Bovine  19866880369579
  misc_feature (1)..(1): n is a, c, g, or t
nggctagggccttgccttgcaaagagctcagctaaaacattcttgtagataggaacccattatctggtgatgcataagcctgtgtcatcttaaaaaatgaaaataacttcttcccagccccacattcatttttagtctcttccacctatttctgctttgtttacaattgaacatcttgaaagatgctctagtgctttgcctctaagtgctggtaaatcatgcagaactggagttaggcagagaaggcaagtagagaccaggaaaataaagtatgatagagccctgaacactcccctaaacacagagtgttccagattcacaactttcataaaatactctaccatttgtttttcaacccacagcattctgaccttgcattcctgtcctttcactgaatattcttgggcatatgtacttgctgaacttctcacaatgaaatttaccaacggactttcaagtattaagttgatccttctacaggctttaacactacggaccttctattcctctgctggcttatccaacaccacctcctcctggatccctcctcttccctactctagtatctttgttgctttgaccatctaataaatgtcaacttctatcttagttcctttagattctcactgtacactggtgcaatctcacacatcctcaagatttgggctgtcatccatacagtttcccgtgggaagttcccatgaagtgtgggtccatacaggggtgaggtagggatgagataaaaaaggtcaagcttagatagcttcttggtaaagaagatggcagttcttttcttgggactgaggggcagatgtgcagtaacagagcaaggggtaaaaatacaccaatgagatgaaggagaattgaagcatctgccctgggatggcttcccaggtggagcagaggtaaagaactcacctgccaatgcaggaaacgcaagaaaagcaggtgcaatccctgggttgggaagatcccctagagtgggaaatggcaacccattctagtatttctgcctggaaaatcccaaggacagaggagcctggcaggtcacaggccaaggagtcacaaagattcagacactactgagtgactaagcacatgcccaggggtctgtaccattaagtactactcaagcatgaggagtgagacgtccacttggctgggagagttttctttgtcagttcctgggagctggtggggctttgtttgaagagaagcaagagctggattcgtcaagactggaggtttatatgccaggttttgagagaaaacaagggaaaaggaaaatggcagtgcagaggagaggataagtgaggatacagaatatacagcattagctgcagaggtggaaagaggagccaggaaggctctagaagacaggagaaaattaatgaccaaggaatgtccaactcctatcaacctgaaggctgcccttgaaggatttatctccataaataaagaaaaaggaagaggtacaaattcacttccctttctgaatttagcttgttctctcttcttgcatgtcctccttaccctgtaagcactgactattgaatcatatatacaagctctcctaattaccatgggactgggcaagttctttaacttctttaagtctaaatctcagctggaaacaatgttaataagagtctttcatgcataaggtagatgtgaggatatagtgggttgatacataataaagtgcagcaaggtatctggtaaatggtcaattaaagttatctcctagtgtataactaacatgtggagaaattaatatttgctaaggattaccttcagaacataaaaagttttagacaatatttttgttacaagttgtagattttaaggaggattttctaccttgagagtgtgtcctttgcttaatttgcagaatatttgaattggccatgaatcattgccccagaataggtctgaaatctgtaatgcccaactggacttttacctcaatgttggagtatagaaagcttgagatttacaagctaatatggagacaggcagcagtattctgaaagcatacttccttccccaggggtgacaatgtacactcctcatttgtcaaattaatgtccctggcctcctggcatcacttcagtgtgccttaaattggagttttagatggataagaattgtcttgagctaactgtttttgtcaatcactggaaccaagcaatttctgaatttgccacatcagcatgacattgtattcggttgtcattcttcataaccccatgagcatgaagacagttaccaggttgggtttgggagtcaggcagagctagtgtctaattctggctatgccacttactggattgtgatttcaagcaatttacctcatctctgtaagcttcagggtactcatctgtaaaatgggatgataataatgagtgatacttattagaattctggtgactattaatatagaatgagataaagtacacacacaatgcctggcacttagtactcaatatatgttcactattactgctgctgctactgctaagtcgcttcagtcgtgtccgactctgtgtgaccccatagacagcagcccaccaggctcccccgtccctgggattctccaggcaagaacactggagtgggttgcaatttcccccctccaatgcatgaaagtgaaaagtcaaagtgaagtcgctcagtcgtgtctgactcttagcgaccccacagactgcagcccaccaggctcctccgtccatgggattttccaggcaagagtactggagtggggtgccatgcttattaattttcatcaatctcattcatgttgttttatccatctaagtgaaacagtgactgaaaaaaaacacaatcagttgagttacatgattagtcttacaaaaaaagaagcatgggcatcaatattagctcttatgcaaaagacttcggtagtttctagtgaatcatcaaaatagaacattattttagaaccgagtatgaataaaatgtaaaggctgcattttacatggctttacacgaatgaggcggtgccatttccatgagtgggttccacagtctttgttgtggttgtggttgttgctgctgtggtatcagaattgctgttgatgttccatgtctgcaccaccatcttcaggaagatagaacaagagtcctgagactgagtggggagccagaaaacaagtcaattctgtctccgtgctgggggacaacaatctttttctggtcattttggtttggcaaagattcctgggtctctggggaccaagactgagtaggccaacactgactgatgagtgctccagcactgaagctgttcttttgggagcagagtgacaggcttgctgtccatcttcccagcctgggcctgggaacttatccaactttaaaatatgaaagggatattcccaaacagccgtgctggctgcttaatagctctcaaggacaggctcttctgccttgtaattaatgataatctctcttcttggggattaaactgctttcctttgttctttcttccagtagagatgaaggacagaaatctgggagggcataaaggagactgtggaagggtagcatatcttaatgacagtccattacttgtattttatactcctagaaattctcagatcataaagcctttttccaaaatataaatccctgggtttttaagaattattttttaaaaacaattacattttatgtaacaaccctaaagttactcttttgaaaaattatacacaaaatatattcagtataattgggaaaatggttacttataaaaagagctatggatctcacctagctatgagattctatgtattattctaaaagattaatcaaaattagtcttagatgagcctaaataattgtttaacttcactggtattaaatttatagtcaaaatttaatggaccaaatcacatttgattgcaacagttaaaaaaaaaaaaaggcattctaagaatctgttattatctcagctaaataaaatatttatgtaggctggtttctgcagagcacaacatttccattgatggctgctccctgtttcttcaagctcagtaatactctaagtgagactactcaacacaagccaaagttccattcatcatgcacatttatttagttctatggatttaatttcacatttacattggcttactataacgaagtagcagaagttcaccaaaaattactaagacttggaaaaatgcttcaactcataaactaatatttgggcaaaatctaggcaatgcttttctaaatagaagcaatgggaatctttttaacgacaccacaaaactcaatcatccttattacaagacttgggaaaattctagactggaagcacagagagaagcaatctaccttggagttcaaacacatcctttccacatccctcttccggaagagtaaatttagtcccaacagcactcactgagagagctgggcctcccaaggtcaaggtagaacatctgcttgactactaatgggctatcattcatcctgttcattctgtgtttatcacatttttgcaaactttcaagtgagactgacacttaaaagaaaggggatttcatgattttcctccggaaaactcactgaagttttgaacaaactttattgtaccagagattcttctttggttcaaaatcatttcagcaacagtttaaaccatttctaataagtcacagtgatatccctgaagacaaataagccatatccctcctgttagataacacctctcctttgcctttttttcttaagttcaatttagtttaggaaataagtgctacagtttcctcttctatcgggaagacgtgataagtagaccggaaactggagccaacattgctgtgcagattacacattgccaaggggcatgatcaccacctaaaaatgtttttgcaaaaacaaacataaaaaaaaaaatttaagaggtatatgcacacacattccaatttctccagagaaacatttatcagtctctcgttctcttatccaaacatgagtcataggtgtggcagattgttgtatttgaaagtagtcgcaatgacatcttccattcccctgcttttctgcttgtgtccttgtcactaccccattgcactttcttgaatcagggctggcctggggggctcactgatagtcagtagaatgaggcagaagtgatgctacataatttctactgctagacttcaacaggtcattcaaacacacctggttctctgggaattctcatccttcagatgctccctcagaagttgcccctcttaaccaccatgcaagaacaagcccaagctccgtgttaagaccacacgtagaacctgtgtctaattgtactggctgagcccacccttttagtccttccatcccatgtaccaggaatctgcgtggagactccaagtaactccagaatcatttgatccagtcactcccaaccattcaagttttccaaagtaagaaccctaatattgtggagcaaagacaagttgtcccagctcagactgcttaattcctggccagaagaatctgtggccatattaaaatgattgctattttatatttttaggatatttgctactgagcagtcgataactggagtaaaatacatttgtcctatttcttagctataattataaaagatgtgtgattttaatgttgataatgtaggggactatacatgtaggaggcaaggggta

SEQ ID NO: 56046 - DNA, 3231 bp, Bovine  19866880443345
  misc_feature (1)..(1): n is a, c, g, or t
naaatgatgtcttcagtttttgaacttccttttccagagaatgaaaagatatattgtgagttttctttttccagttacctttgctttttaaaatttctgtttgctttctcttgtctgtccactggcctaagaagtcaaatcaacttgaagaggaaaaggtcttaaatagaaagctaagggtttagaaagcttttcttgaataggcagaatctactccaagctctaataagaaagatgttaatacttttagactttcttgcttcttattagtgattttgttgatggatgaaaatatataggaaataaattagaatgcactctaaatttaataaattaaaaatattatcaaaaatgcctttttgtaaatgtggcaaagagtactgcacaagcaagctagtaaaaaggtcaaaggacttaataatgataataacaatacaaagaaatatgatcatccacaaaaagagcatcaaaatataagataaatcagaaacagttgtgttctgaagtaaccgaaaataaggaatgtctcatgttgttttatattaccaaaaacagatggagcattctactgaccaaaagtacatcaataacaaggattaaggcgttctcctttacagtacgtgtgtaccttctgtaaaatccatcatctcattctgccacaaaatcacacaggtaataaatattacatgttatgccaatatgttttaatggcttctctttcactcagctgtagaacaaaaccaacaaagtaaaacagagtttgtgagtcaccattgcttaaactgagaaaaaagaaaatattgggatttttacactatctgctgctgcggctactgctaagtcgcctcagtcgtgtccgactctgtgcgaccccatagagggcagcccactaggctcctccgtccctgggattctccaggcaagaacactggagtgggttgccacttccttctccaatgcatgaaagtgaaaagtgaaagtgaagtcgctcagtcgtgcccgactcttagcgaccccatggactgcagcctaccaggctccaatccttccttatttttcattatttttcctcttagcagagcatttaagtttgtattatcgctgagtacagggtcgcaatattttctacttagtagaattctatttggtttcagagaatacattgttccacattatatcaatgtctatgagcaaagaaactctggggacatgatggcattgttggttgtaagctacaatctcatgcattcttctgactcttagatttaaggtaatgtttattcttatacttcattatgtattgccatgtgctatttctctatgtttgtattatggccaaaagtagatgggaagtttcttgaggataagaaccattttcctaattagttttatagtatgatgtcagactctgacacatcacccaggcatagttttggctttaactctgtgttcacacagagttttgagttcggttttgtactatcggtatcaataatctcttcctttgctatcaatcataatgtccacagaattgtagaactaaaacatgcattccagataatcaagctctttatttcacagacaagaaaacccagactcagagccattaaatatttggcccaaagtcaaaaggagattcatagctttcaaacataggaaaagagttcatcttatatttgagtaaactctggcccagacacctgctgtttcttggcagcctgccgtaacaaggatcataactgatgaatggacatttacagtttattcaaattaagataaatttctctcatcagttggaataaggtaaattaatccctaagcataatttttagaaaccaaatgctttggtgcaaataaggaagcaagctcagtagcctaggtgaagatgccaagttttcctacaaagtctccctataaggatttagcaaactacctaagaatcacttaattgctttattcactcatgcatggacatatgtgaatacagcaatacatctgacagcctcctttctaaagagtttaaaaagagtcatcaaattctctaaaacatgctgtcgggattttctaggttagaaggatttgattgaaatgacactgaatatttttcagaaataattgcttttccttggtgttgaataaaaactacttgcagaattgattgatgtatgaattagtaaaaggactttggctaaaagcttcctgaactttaaataaacaaatattagaacaagattaagggcagaggaggagattcataatggataccaggtatctttctttttctaggttgctctggttgccctgtggcaaatcaccaagtttcttaacattcctctgggtaagggtagaagcaaaacttgagcctggaattcttttctaaatgactttccaagagaagccaaaggggttaaaaagttaggagcataaattaagctgacaattaatagtgctcttatgaaatagtcctttctagttttacttctatagtacatataaagaatacatatgctccatgttttttttgaaaatccaaagttttatcttgatatggattgagaccaattctctaatcaatttctttgtactttctattttcaaaaatcataatttgatatcaacatcaacaagcaggattctcaacactgcacccatcagataattagttctaattatctctatatagaaaaagagaatacttgaaaatggatttgactttctgtcaaactgtcaagataacagagggctgcatttttcttttttaataaaccaagaatatttttcctcttaatcttactccattttattgagatatgatttacatataaggaaaagcacgtatttatttaattgcataattaaatgatgttggaaaaaatcacatctgtgcaacccataatttggaaaggcccttattttttagtgcaatcacacatttgttttatttagaactttaagtaaatgagattgcacagtaagcactcatttgctgtctgacttttgcccagcgtaatgcttttgtgatttttccatgccattccagacatcagaaaatcattctttttcaatgctgagtggcattccattagataaatatgccacaatttgcttatccatcccaattttgatggtcaatgagtcgtttccaatttcgggaaattatttttaaaaatctattatcaacattcttgtacataactttttataaaatagtttgtgtcttagggtcatgat

SEQ ID NO: 56047 - DNA, 2650 bp, Bovine  19866880584182
  misc_feature (1)..(1): n is a, c, g, or t
nagacagtgttgaatatataagtattaatttttttttctttaatatattgagaattttgagcatttcacaaaatattctttaaaaacaagatctattaatatgattataacatgttttaatggatacactataaattatttcagaatattcaggttgtgtctaaatttttattattacaaatggcaccatgataaatatcctttcactaagactgtcttcagggccataaattaccttccctctgctcagcactgaattctgagtcccagtgctctgatgccaaagctggaaaccttgtaccactgtcaggaccagaaagtttctctcttgacaccacagagggaaaggagaaccccatatttactatgaagtagggagtgttaagggtggaaaaataaaccagaaaagaacaacctacaaaccataagtctatttacagtaccatgagaagagatatataagatagtgaaaagtgtgaaagtgttagttgctcagtcatgtctgactctttgcaaccctatagactgcatcctgccaggctcctctgtccatggaattctccaggcaagaatactggagagggtagccattctctgctccaggggatcttcccaacccagggatcgaacttgggtttcccacattgcaggcagattctttaccacccgagccacagacagtacccaggaacattttccctgttctcagggatacctagaaaaaagtatctctaagtggagaggggataggaaagttgagttacactaccatctgttttctgttttaaattaaaccagtaaggtatactaaaatgtccaaataattttacctcccatttcaatttcccttccattacaaatctcatggtaagtatttcagaggacagatgaatctgagcaagatctaaagttgaacttttaccttcaatatagttacatgttttcaaacatttacaactaaattaaaatacttaacaaagtctacgaatactattgagaaaatgcaaaaagaaaaacccaaaaaaacaaaaaaccttcctctccaaaagcaaagctcagtaaacctggttaaattgctcttaaaccatttgttttatctagcaataataaataagttccactttacagtcttaatgtttgatcttgaacctggtaaaactgtctctgaaatcaagtgacagaaacaaactgttctaaggcctaattaagataccctgcgttcttgggacttccctggcaatccagtggttaggatgtcatgtttcccctgcagggggcatgggtttgatccctggtcgggctggggaactaagattccacatgccacatgccaaaaaaaggatgccctgagttctgagcggctattttactactgtcatttatagaaatttgtcttaaatatctgaccatttctccttgaagaaaacgacttctattaatgcttggcatagtatcatggaatgttgggagtcaaaatcttcttctgaaagtggttaaaaggtacaaacttccagttatgagataaataagtcctggggatgtaatatgcagatagcatggtgattacagttaacaacattgaaagttactaagagagtagatcattcaaagttctcagtcacaggaaaaaaaaaaaaaaaactaactatgcgtggtgatgaatgtttttattgtgataatcattttgcaatatatatacatatatatatcaaattcttatattgtatacttcaatgtaataaataagacatttgtatctcaattttcaaaagtcatctggaaactatgttcctatacatgttttcaacatataaatagacatcccttatagttactgaaagatacaaaatgtataaggtaaaaaaatccaaccaaagagattattttttaaacccatcacattcatagtcaacagtgccagctgcctatttacttcaatgctcacacaatgcttcctcttaagattgtgaaatcagtattagagcagaaatggagcatattcttaggtgtcagacacttcccccacctggaagcatctgcaccatttgttcacactggagtccttagtgggcacacaccaagttatcactgcagagggaacctttaaggaaaaattttatgttcttacgaccctattacaatccaaactggagatttttcagttgatatattaaaatatgattatctcctaagaacttgagtaagggatctaggaagccatcctggcaccaaacacatctcatggaaacttactgaccgaaccaaactaagatccctggagattttgtcattacacaccacacagtctattattgtctagattaaaaatgctcacttcagtcaaatgctatattcgaggagcgacaaaacacagctcttatttatgctgcttgctgctactgttgagtcgtgtcccactcttttgcaaccccatggactatagcccgccaggctcctctgtatatgggatttcccaggcaagaatactggagtgggatttctagaggcaagaatttctttctcccggggatctcccctacccaaggattgaacccgtgtctcctgcattggcaggcggattctttacccctaacccttttcctactagggttaggaatttctctttttgggaattttaggcaagacagat

SEQ ID NO: 56048 - DNA, 1694 bp, Bovine  19866880645914
  misc_feature (1)..(1): n is a, c, g, or t
ncagcaaaaagattatgactcactgaaggcttagataatggttagcatttttttagcaatgaagtgtttttaaaataaggtatgtaacattggtttttttagacatatcacacatttcatagactactgtatagtataaatataacctttatatatattcattatataaatgaataaataaatgaataaaatgaatattcattttattgtggtggtctggagccaaatctgcagtgtctccaagtttgtttcttctccaagtgtctccaagcatgtataatagtttatttcttcagttgtcagggatccactaaataataggcctgtgctatcaaatatgggtagccgctaactgcctgtgattgtttcaatttaaatttaagttagttaaaataaaaacttcagttcctcagtcaaccctcagctatatttcaagagctcaccaggtgccattttggacagtaaacatgtggaacattttcatcattacagaagattctaatggatggcactattacagactattttctaacccatttgctgctgttttttttcctgctatctatctccctcaaaggcttcctcttccatgcttgtttgtttcgggtacacagtgggaaaaaagagatcaaactcatgtccagtgtttctgtgttttagtagtgctgatgaaagagttggtaactggatgggctgtaactattgactagaataagatttcggaaatatctttgaatttaatttatatgtatcacccaaaatagtggtgtagaggtggctgtgtttagtttttaaatggactagactcacgtcttctttgttaaacacatctcttgagctagtgattacacttctcctattgagtattgtttcattatctctaaaaattttgtttattacaaactcctttagtaagtgaaaattaggccaccatgctctaggctttttctcagtttaaacaaatttctgatccaagatgtgtttggatcttgatatatgccaattaaaatattgactttaaacaaagaggtcataaaaaatatgtgattaaaatgattaggagttgagtccttatcacataacccaaagtaaacgcagattgcacaattccgtacttaagtggtgcagctctgttgtacaggcatgtttctggatattctagattgcttctaaattatagtgctgtgtgttgagagattgatattaaaatatacttgggaattaaaattcacttttgatgaatagttgtttaaaaagctgtaagatagcactgtggagacatggtgtaaaaaaagaagtcttcaaaaccaactcacatttctttggatcagaaccagaaaaatttgtgtaagcagtatatttaccaaatgaatttccagtaatggaagcccatttttcaccttaacattgatgctatttatgcaaagccaggcaacaaaattatatcttcatgtcacttaatgtttgctacatggaccaaatttcagtcattttttaattgtgaagctaaaaataatgtttgctgccgaaaacttgaattctgtaaccagacttgttttactttcttaactttatatccaagccagtgagaataggttctttcccaggagattcagccagttcactaggagcatgaacctcagaagagacgatagttcatagctcctctcgttggacttacatggtatgaactg

SEQ ID NO: 56049 - DNA, 1434 bp, Bovine  19866880652468
  misc_feature (1)..(1): n is a, c, g, or t
naaaacacagtgaaagcgctaccactgtttctgtagctctgtttagaatagactgaagtctggatttccaagggaggcattccaatgctcaagaaaacacaaaaggatgaggtcaggagaaaaggagaagctaatgagctaagggttggaaataaattttaacaagtgaggattaggccaatctgtttgcctgaaaagcttggctgttggcaccaatcacccagactgagcgtctgttttatccatgctctaatcggacaaacgcgagtgcctaaatatattaacaaaataattctagctgtcacatgatttttaaatttccagtttgaaaatgcttaagcttgtaatatttatttgatgctataaactttttgtggagggtgggaggcagagccattttttctgttatatcttccaggaagacctagtgttaacaatcatttaggtttagcatttcagcacatggtgcttccctagacacaatcccaaccatgtggggacaattggattcagaagcactttctaaaattctattttgtagggtgatgaggaagagagaatattaaggatgaccagtctgcaactttcatgtgggctcccaatttcagagggctatggtctgtattccagtcattcgaaagaagcaccttaagcagaaatttagctgcaatgccgatccttatttgggatggaattaacaaaattatagatgtaatatgcaaaatctgcttccaagtcatattaaatgcttggattcctggcagtgtgggtataatttgcaaatgtataatgccatacattttcctacaacgtaaaaaagtaatttccaaaaatgcttccatggcaaaagcatctttactgtggagtatgctggctttcttttggcataacggtaaataacatgttcattatgtatcaagaggaaaattgtgaaatcttaaaggtttttaaaaagtgaatatatagtactactaatactatatattatacactcaaggaaaatagtacctaaagtcaagaacttttcaaattatttctctatagttaaataattattaaacaaagtttttgttcagacccaactcaactggacaaattctatgagagaacatataatttgcaataaagtaataacgcatcttttaaattttaaacaaaagcacaaaagagatttataattttaaaagtatatcataaatatataaatctttgaaatgataccacggtgactaaagaatggttccagcaatatgacagaataagtcagagctttattgttcaatcacaaacacatatattaataaatgatgcatatgtgagatagcataacgtttacttttacaaacctgggttagaaagcaagaaaatgacagatataagggggatattgaaaatcagattggtcaattcaggaactgctactccagcaaccaa

SEQ ID NO: 56050 - DNA, 768 bp, Bovine  19866880794245
  misc_feature (1)..(1): n is a, c, g, or t
nctctaaatatctgtcagagagcttaacctggcccattgtgtgcagttttattgcattttcccttgagttctcttcaggagcaagtacgatataaattataaataaaacaaacttaaaaaacaaacccttctgctccagggttgacaacactattagatatccctgaatcaaaaagaaaatatgccttgtattttcttcactctgtttaacaaggcaagaacctattgtctattttagaaagatttttatccacaatcttaccttaaaatgtaaaggtgttggcataagaaagagttgtcttcagttatctggaaaatgtgtttacgtggaacacttcattcccctgcaatgtcaaccaaacaatgtttgttacaagaagcatggatgaataacatcaaagacagttgggcccaccacttttcatcacctttctgctagcattccagaagaccttctcattctgccttcttaccattgctgcaagagtcaagtgaaatatccagagttatccctgacaattatataaagaatattttgatttttgaatctccattaaactccaggagatagcaaaggacagggaagcctgtgctgcagatcatggggctgcaaacagttggacacaacttaacgactgaacaacattagaaattaatgcctagctatgtgacaagggaaaaggaagcaataatgtgaaaagcttaggcacatcgaactttatcattttctacaagggttcttacattttaaaatagagagcaagagtc

SEQ ID NO: 56051 - DNA, 1445 bp, Bovine  19866880824312
  misc_feature (1)..(1): n is a, c, g, or t
ncagcttctttctattacttggaactgtgatggaataaggcttgattttgacagtgagtagagaaatacccaggttggaaggaaaagaggaggctgacccaggtaaaaacagagaatgctcctcaacagccaggttagaaattaggttaaatatacttcaaatttttttagaaatctgttattaacgctaatatgcaacctattatgaagatgcatgtgggcacacacattctcactctctcacgctcatacatattttattaccaagcagaacttaagcaggtcataaacggacacccaactacattgaaatgatgtaatatctgatggatgtttaagagtccttctttaattttattgttatcaataaattacagtaagatgaagatcccaagtttgatgttaatgtagctgaagtttctactcaagtactgtgttagtattattttatctgttatttccttattaggaaaaatccataatggctgcatcttagctaactgtttacattcttttctggccttgcccaatgccactacacagctgtttcataaatatttgcttaaaacaaatataacatgcttatgcatgcaacccgtgtgctctttcactttccctgttataatactttcaagtaaatataagagtatataaatgggtctcacagattctctaggggtttcattatttaaacatgtgtacagatatttttgaaggtgggagtcactaaataacacagcatcctctcactggaaccccaggaggattctcccaggtcttgggaccaggcatagttacggcatttctgcttcttgggttttcttctacactgagattactgaatcatgggagtaggtacgttatttttggtttggcaaccaggaaacgcagggccatttctgtagtaataggaagcttcctgttcttgcccctgtttttcctttggtctgatttgtcctcacccattttgtgtgcgtttgtgttttctggtcttatatgcaactctgtaaacactgagcacaatcaatcctttgtaagtttttcctggtcctgaactggcatgtacactagagctgaaaagcatttaaacaccttttgttggctaaaaactggcaaaagttgaaatgtaggagagcaactgaataataaatttttaaatttaataactacagcaacatgttattcagagcaatgtttccttcagcttaattttgtcttctggagaaaggcccccaaatatgttttgtgaccaaaaaatgtactatgacctctaaggtctctaattttcaggtatgaaattctttgatcgtttcaatctctaaaaattagtatacaatacaagcacttttcatttatactaatctttttttttccatttatactaatattcttaagcattacctatattcatccacccaccccaccttcccaagttatttataaca

SEQ ID NO: 56052 - DNA, 1079 bp, Bovine  19866880882786
  misc_feature (1)..(1): n is a, c, g, or t
natttcttttttttaatctaatgcagctgagcattcacaattttctcagagcttaaaattataaatggtcttgagtgggttttcttttcatcttaggttatatttttaaattgattcttctagtgtagccattcaggtcatttaagtgtgtattagcaacataaaaacatgtcttaggcccagataagcgtatatttgcagcctatagtaaaacaagtttattcatgtcattctgtgtttctgttaagaagctaacaatgactttcaggggacttacacaaacagaaacaagatttaaattgcccaagagatcaaggaagctcagattttgtaccttatatacactaagaactatttttatgatcaaagaaaggaggagaaaattaatatcccactctgttaccagagtatatgtcaacacacacacacacaaaccccacagtcacactcatcaaaaaaagagtcagaactctaattaggggaaaaaatatgctaaccatgaaaactcaactggtatttaaaacttagaaaagcttattatttttcagtatgggatttgggatttctcttgcagtctaacacttcctgttgtggctaaaacaagagtacttggaaaaccaaaataataaaacaagtaaactagcttttcatctcctagggaagaataaatttccctagaggtaggcggatgggagatgaacagacaatctatgtgaagatgtgagttatgtgcccatcttccatccaccctacagtgaatgatttcaatcaactccatggcttctctgaggcagtgtacatccgccacaactcagggacatctctctatctacagtcacatagttccagctaacagtcagcaagataaattgcttcagagtcctcatctcacttggaaggcctctgtctcaaatctttctttctatagcaccgattttccatttatctggaattctctttctcacctgcctcacactgacattatcctcttgtacctgggcatgcacaggacctgtgggtaaaggaagaaaagcattcctatctgtcttcctttgctctcttcgttggaaaaaaattct

SEQ ID NO: 56053 - DNA, 1282 bp, Bovine  19866880912662
  misc_feature (1)..(1): n is a, c, g, or t
nctgtaaatgtctacagtgcatacactgaaattaatatgcacaatctttcatttgcctgagaatatgcttacttgtccctattagaggttgcaaagttcaaatagttaagaaagaagactatcctttaaaatcagatacaggaattgttaattagggaaaatgcactgcagcagatctcagtgaatttcagataggcaagaaaagaaacaaatcttaagttcaaaatcattagagagggattaaatgagtgagtgctacaccgagcagatgagcagatcaaagtagcagcggaagaaacttaacaacccagagataaaagacaatgagtgacggctcagagaaagaagtgaaaagaacctagaagctgagggaggctgtgaatgctactttacaacttcagttttagggcatttaaacacttctctttgttattcagagctacttttatgcttttagacagaaccacctttgctatattgcttatgttgaccaatccattattttaaaaaagcagaatggatatactcttaccagccagttaatcctggatgtaaagtgtaaaggacaataatgataatcatagctaacatttattgagtgctaatcataggccaggtactgggttgagctctttacacagataatctcctttagttgttatcataagcctatgagatagaaactattattatccccattttaaagatgaggaaactgaggcttatagatgtgaaattacacatgtattagatattacccctaccaccaaatccagggttacaatatgtaattcaattgttttaaagacaagaatacacaaaagtttagtcacacaggatctcaacagttaacaaaagtgtattcctatgtctgtaactgactccgttggtgttcttgtctgggccaaggtggtgaccttgtgagaggcactccaaaatgggagaagaaatacatgtacaaccaggattcatggagaacaggagctacccctccaataaaaccacatcagtataaccacaaggtgctgaaggagatcttggttctaagttggaagtgtaaggtaaagcctcttcaaaaaataacctaaatgggaagccgcctctccttttttggcctcaagtctcattgcattgctcatttcatgttacctgatagagacacatcttcatttattagcatatttgcttgctcttttggttagttttctgctgacaaattaacaaaggaacagtgcagatctattctgtattttacctaacggcaattctcttccagtttcaa

SEQ ID NO: 56054 - DNA, 3138 bp, Bovine  19866880916771
  misc_feature (1)..(1): n is a, c, g, or t
ncttccatagagcagaggtagatttacagagaaggtaataaagctgagacttcaaagtcccacacaagtgtgggccccttgtaagagagagcacctggaagggaccctacgatgtgttcacatagccatgtagattttttcaactttgcaaaagtaaaacatattaactacaattattgaagactgctatctcttcccaagtcaagttcctctccatcatactctctttcatttgagacaactttggagtgactatggcatttggaggatttatctaagggaaagttgaattggacatccatttaacacggatttacaggatatgtttatgtggttttaggcacttctgtgtatagttagagtgtgttagttattccaatgtagaaggggcagtccattgtatcaactaccacccagtgtataaattaaatggacaaaagtcaaacagtagtatggttttgagtaccaggaataataaataatggagaaaagacaagttaatctatgaaaaattgttccaatcagcaggattataaatagaaagcaaaagatttggttcccatcaatgtctgatcaaaatggaaattctgtctcgtcagaaacatccatgataatgtaatctgtgcaattttaaatacactgtacatgtacatatttttatgtgaattgcacaaaatagaataaaagtcagaatttctgtgtgtgtggatacaaacacatacacatagcaagtgtgtttgtgtgaagtcacatgatttaggtatcccaatggatcagactgtcttcaaggcgaaatgttctaaaacaaatggctttagtgttaaaatccatatatgtagaaaataagacaaaatatgtggtataggtctttatttagagactgaaagaaaatttagacagacatttaaagaaacatgaaatgaaagtgataacaatgacaactgacattggtagaaattattctgagataaagaagcaacttgaaacaagcaattttcaggttatattaaggcaataattcactgcgagagaaaaaaaaattttaatagaaataatgactttttgaagagaatcctgtgaacacaatggaaaaaaatttaatttctgactgctttacataaaatattgatattgtaaagataatatgaaattcataattgccaccacaatgcagacaatgatgacaagtgagttaatgaatatcatcaatttaaaaattttaaagactagtcattacacaagacaccttgaaatgctctgaaatttctcaccttatgatgaaagaaatataacagaagcctacccacatttgccagcaatcttaatttacatgacatcagccatgaatcgtgaagctgaaagaagcacctaagctatcactattttttcaaatattcaatcaagctgttgtttagtcgctcagttcagttcagttcagtccagtcactcagtcgtgtccgactctttgcgaccccaagaatcgcaccatgccaggcctccctgtccatcactaactcccggagttcacccaaactcatgtgcattgaggtggtgatgccatccagccatctcatcctctgtcatccccttctcctcctgccctcaatctttcccagcatcagggtcttttccaatgagtcaactcttagcatgaggtggccaaagtattggagtttcagcctcagcatcagtccttccaatgaacagccaggactggtctcctttatgatggactggttggagctccttgaagtccaagggacttgtagtcactcagtcgtgtccaactcctttgtgagccaagggactgtagcctgccaggctcctctgttcatggaatttcccaggcaagaatactggaatgagttaccatttctttctctagaagatcttcctgactcaggggtcaaactgtgtcccctgcattgcaggtggattctttaccactgagccacctgggaagtcctcagtcaagctagaggaattattttcctagtctctgtacagaaatgatattatatgaagaggcaaagtctattgcaaaagaatataggagaaaaggtcttatacagtgaattaataaaaactgttattttcccagattttgtgacatttgtggaatttgtcagttttttcaaatgtactgtttatcataaatatttctcattatagtcactttcatactaaatttggattcctgatttggtattcttttcattcaagagagttccatattgcaaaatcttcaggctctacaaaatttgtgtccatccctactcaagacatcctgaaacggacaggcttgggactcacaaggaaacgaggactgagcagaggagtagctgaaagtctgcacacctgactgtaccagcctctgccagccgcccctcagggaagctgcaagtcttatccacagatgtggtgttccagctagctctttaaggccatgattaacaagggggcaaaagaaaaaatatataatagagaattgaagagaatacaatgaacattcaaaccaggcttctcaaatatattaacatttcccttattctcttgtatacatgtttttaaagacacataatatcacacttatgttgaaggcccctttgaagcctctttctctcttatcccacatgttaattttaagagatcatgttggattcgctcctcaactatatccccaatacagtcactgcttacagctccactgctatcaccacagtcgcctttcacagaatccagagcaacaaacagcttcccaactagtatttttgcttcttctcttacagttttcatactttcatgatcttttaaaaacttaaattggactacttcatgaccttattttaaaaccttccagtgattctctgttgccatgaagaactctaatctctgagtcttcatgatgtaaggccaggagcaggcctctcaccacttcttccccaggtgccagcattcgaggttgcttccatgtgaccctggttccagctccagacccattagccactgtcccgggtttcagcctagatgccacctccctggtaccacttcctcccaacttccatcagaaagcagcatgtgcactcccactccttcataccatcttgttttcttcatagattttttataatttgtaat

SEQ ID NO: 56055 - DNA, 898 bp, Bovine  19866880916985
  misc_feature (1)..(1): n is a, c, g, or t
naatttatttatggttagtatggggaaatggagggccaacatttttattaagaaattgagctctttttctttttctaaagaacattattgaaaagaattaggtgaaaaatacctgaatgacaaatatactatttattttaataatatttaaaataatttctaaataaaactgtaattctaagaaatcataacatttaagaccacttgtgtggtgggctgctgtccatggggtcacatagagtcggacacgactgatgcgacttagcatgcatgcacgcattggagaaggaaatggcaacccactccagcgttcttgcctggagaatcccagggacaggggagcctggtgggctgccgtctatggggtcgcacagagtcggacacgactgaagcaacttagctgtagatgtgcatttcttacagcaatttaaaatgctttatttttttttttttaaataaatgctgctaactggtaaacacggctgtttccaccacctattgtctgtcgggagaaccatcactcccttagctgtgtattcactgtgagaagtcctcacgtgacactatctggataatgaagttttaaccctagtccctattttagaacttgataaccgtgtcaagatgctgcacatgtaactactctcgtattttgcgtgatgacacagccccacagaagtttcaagaaaggacttacaagtctcacctctccttctctgtgccagggccgtccatttgggatgtatttgtttgggttctgtctcttcttctgtccgccatccgcaaatttacacaataacggttctgtaggagctgaataaacagggaaaaataacaggaaaccagaattgtatgtgtctacaagtggcaaaatgtaacgaattctttttttttttaa

SEQ ID NO: 56056 - DNA, 774 bp, Bovine  19866880926611
  misc_feature (1)..(1): n is a, c, g, or t
nttaaggaatacctaaactgcaaccagtctttgtaattatgaaaaattgtaaatagcataattactggttaaacaagttgtggtgtattcctataatagaatgcaatgaaggcattagaaagaatatctgaatatattgaaggaaatacaatatacatatacatcttatgttatacaactgagaaattcagaaagcaatatacccaaaaaggaggaaatgacttaaaaacaaattcgatgatagacaatatgcacgtaggtgggttccagggcttcaagtgataaatccagaatttctcctggtcagtgttctcgtctgagggtgtcttggtcccccaggagatatttgacagtgactgaagacattgctgattttcacaacttgaagagggaggaggtgcttccggcatctagagtctaccctctagagtctacagtacccaggacagcttccgcacacaaaaacaattatcccactgccaatagtgctgggaaaccctgggtgaggggatgctgtgtcgctgtctgttactagtcaatgtctgcttggggacttgagctacatggaatggtgggtcagtttcaggtctttactttttaaaaactgcccacatccagcagccatccagactgatagaaactgatatatttatcactagctattagaatggccaggattttcctatgtcattcagcctgagcaatttcctaatttttagtagttttctgcatggttcagactagagacatatttctcaaatattttaggaggca

SEQ ID NO: 56057 - DNA, 1193 bp, Bovine  19866881126398
  misc_feature (1)..(1): n is a, c, g, or t
ntatttcttttgtcctagagttgcccaaattttctgttttttaacagagtaaatgaagcttaagccaaacatgcaggaaacgaaatgggcagtaaaagcccttgaaagatgtccagcctttttactagatttgtaatttttcctctaaacattaccttttctgccttctggcactgaacaaggcccaaataattttacctatatatggaacattccagaacatggataaaagcagttttcaagccctgccgggcatatacccaaactgaaaagtcaaggtaacacagaaagcagatggaaaacaagctggggtctttggatggagtcagccagcagtcacacatgcacttcactggagctccatcgcctgcacaggagaagcttcaggcaatgcagaatgaagaagcttcaggcaatgcggcagaatgaagccagcgtgaggctgggaatctaacaagcaagtgcatatccagtgactaggcactttttttcttaaaaaaaaaaaaaaacaaaaaaaaactctctgccccgaccacactaggtcgtcttcacattccattaacgtcacgggagaggtccagaaggagagacatgatcatactgccttctgcagcactggatatgcgtgtggcctttgtccatggggtgcgtgttgtgcgaagacagagggtgcagggcaagcagccctaggagaattccagctaacatgccgtatgcatttgcactctcttccaggaaggtactggaagaacattttccagacaaatctctgaatcatgaccatgagtgacagtgtctttgccttgggcacatctcctaatttggacctcagttctgcccatctcttgttgctaacattctgtgtgggaaagcaccactgtactatttctccataatggaatttttatcaacccaataggacatactgcttttaaatgtctatggaattcacctagattgtctcacaaagaagtcactgtctcacaaagaagttcttttatcctcgtggtcctttcaagtaaatgtgactaagtgcaaaccagctagcactcaaaaccaaggtaaatccaaacaaaagaaaatgcttcagcattttcagagaaaagtgagagcctgagtgcggagaaggaaagaaggcaaggcattctgagaaatttctttttcaacataaattataatgaatgctcaaagaa

SEQ ID NO: 56058 - DNA, 1084 bp, Bovine  19866881233377
  misc_feature (1)..(1): n is a, c, g, or t
nctctggataattatcaatttctctaaactactgaggtgacttagcacacaccacacatgcacacatatttatttaattttaaaaaatactggtaaaggaaagtccaaaggctatggaatgattaaaattaactccttctttttcattctttagagagtaaggaaactctcccttcaaccattcacggaagtgtggtggtgtttagtcgctaagacgtgtccaaaacttttgtgacgcccatagattttccaagcaaaattattgagtgggtttccatttccttcttcaggagattttcccaagccagggatagaactcatgtcttctgcattgacaggtggattccttaccactgagccaccaaggaagcactgaagatgtggtagagatgtaaataattttcatctagtgacaaaagataattccaaaggttacagtttattaacttgtatgacattaccagttttgtatataaccaatcttattctaagactcccttattgattaagttacttataagcacttacttctccagttcttaattgaaccaggtttaacaccacctatgaatggatgaactggttccttcattaattaatgagttaaatacaatctttgacatgtatttattatgtagttggagtgttctctaaacttttaaaaattgtgctttaacatgagaaataaatcactgtagaagttatggaggagtgaagagaaactttgtgacgtcttccctaacttcattggagtgcacggtgtttccttttctctgttcccatgacacttcacacgtgcagaacacacctctcatgtgtgtttatcgcatagctgcaaaggcttcctcaaggcaggggctgttagtgggctctgcttattttttgtgtttgtttaatggtgggtgctttttgtttcactgaagattattaagttgactggttctcttagtgaatgatgatccattacaggacttaacactgaatgaaagtcaagatccagtcacatttttgcacttctcactgtacactgttccaaacagatttactgaaacagggccaaggtggggaaaattgtaaaaagttg

SEQ ID NO: 56059 - DNA, 1437 bp, Bovine  19866881268942
  misc_feature (1)..(1): n is a, c, g, or t
nagttggacatgggtgagtgactaacacattcccttgcttcactggccagtggaccttggaaactggaaagaagaaatatgacagaggtatttcgtgggctcccttagctatgtcgcctgaaggcagccttctgtaacccataggactttcctttttcctgattcttatcctaccgtgactcacacttcttatccttttgggcccggatgtggtaacagctcctctgaccttactcaccgtggagaactattctgctcccttcaccctgtttgccctttcagaatagccatttgtaaataaactcttctccaatctaatgtaagtacaccatttgctttctctaggaatcttgactgaaacagatatatctagtattattttatagggtttccttggtggttcagatggtaaagaatccacctgcaatgcaggagacctgggttcgattcctgggttgggaagatgccctggaggagggcatggcaacccactccagtattcttgtctggagaatcccatggacagaggagcctggtggacccacagtcttttgcaaattgattttattttttgatctttacaacaaaatatgatgtaagtaaaactgactttccttttaaattgcccttttatgagtgagaaaactgtggctaagagaagttaagtatttgttaaaaatgcatcctgctaatcagtgggagaaccagagagtaagtctggttaactgactgaatttagagctctttgcatgacatcagctgctagacccctactttcactaccacacgtcgtatcgtctgataccattacctgatacaaatgcaatggaaatgacatcttttgggtaacaatgaaagaaagaattcagtataacccatgtataattttaattaaggctgagatgcaggcatccaaatagaggcagaggaattttccaagaggagataggcttctccatatttgtacatgtggtcatgtgcagccaggtttgagacaacctaggctctgaggcttttctatgcaacagtgacttaaccaccccttcctggggcaccctctatattctgagccagacctctcccagtgtctccaacattttttctctgtatgtagctctttcttcagattggcagctcccttgtggcaggagtctatttatttcattggttactgtatctccttcttgcccagttctgggaatacagtcagtgctcagtaatacttgttacctgaataaaagagcagatatctgttcagtgcatcgatattctggcattattatgaaatcttggagtcactttctcccctagtctttttatcctctaattcagcccattgccaattttggctgattctacttttagaaacttttttagatctatttcttccttttcattccaatgtcactatctggttcagcttctcaagcttttttt

SEQ ID NO: 56060 - DNA, 1353 bp, Bovine  19866881273893
  misc_feature (1)..(1): n is a, c, g, or t
nccgcgtaggacggaccgaaaccttaggagcccggatcgctttgtgttgggggtggagtgtgggggtagactggagggacccagcttaagaactgcggagtggacaccttgtttgctttcatgagttttatctcctttaggagaggggaggggaggaaaggggagaaagaggaagaaatctgattaatctctcacttacccccacccagtgattttttttccccacaagagaagaaaaatgatttagtgcccaaccacaaagctgcagtgaggacacctgggttcggttcccccatccctcctcccaggcctaattttctagttgaccttgggagggttagtgtccttcggtttggttttcccagatgtgagaagtgaaaccctgccctctgcacaggaggaggcaaaacgcgcggggggttggggggcggggggttcgcgcgcgcgagtacacacacacacacacacacacacatacacacacacaccgtcacaccaatatacggatccttctgagggggagatgtcgcaaagaggcagaatgttattattagaggacacaatatagacatcagcttttctctgcctgtttctaatgctgccagacagtctgtcaactcccactcaggagcaaggaaactcccctgagtttggaatattttaaggccattttgaaagtcacgctggcatattgttgcagtgtgcttcggtgacatattaaaatcaatctctccttttctgcctctccatctcctgattgtcacagctccaaacagccccagacagctgtggttcagtgcactacgtaactggatacaatttaatggagttaattggtccctgaagctccctgtagaagactttttacattctagctcaacaagagataataccaaaatgtacaaataggataagtaagaaatcacgttcaagttgaagttgttgctcatctaataaagggtaatgaaaaattaatttgctattaaatagaccttgattactctgttttgtcattctggatttccaagagtctgttttcataatagcccaaaggtaaatcaagctgaaatgaaatgcttgattttgtcaaagttacatttttgtctgattacatttcaaacagtttagtaagatactttaaaaacaatgcaatagtgaagtgaagcctttattatctttataatatctttattatctttatattgtgatttagacaaatgtctacgttaaacattttgaaaaaaacaatataagttcatatgagaatattttggatatgccaggaggcaaatcacactctcataaaaaaataataataataacagttaacccatgtgaaaccctatagggaaa

SEQ ID NO: 56061 - DNA, 1436 bp, Bovine  19866881329501
  misc_feature (1)..(1): n is a, c, g, or t
nacagaggctaccacacaaaaatgagtaatgggtatccttactgctaccatcttgctgctttctggcgattattggggagggggtgaaaatgaggtccttgagggctaaaaaatttcaggtctctatgcggaagagtgtcattttacctacagggacacatgcagaacgatgatgtaggtacataacatggaccacacacactgtaagaaagaaaggcttatcgaagttgagtcagagattctctgcaccaggcctgaattgccctctgccagcaagcagggcatgataacaaccttccagagaaagttcagaggctgtacccacacttgattcttttgtaatctggaagggcaccaggagtccagataggagatgctaacagctgacgacattttttgcatccaactttcgccctcccaaactggaaaaaagcttccaaagcagcgaaaccctcacttttcatggacccaataattttttaaaatgagttcagaaggcatcaaattcttatagtaaaaataagatagttccactaacaacgtacccagggtccctagaaagccaggcgcaatttgtatgactacatgtcatctgctgtgttacttaagtatgtaccaaagccacttctgagaaagcaccactgaaaatcgatctgtaggtaaacatatcaggtagcatttttcaaaactaaatacgaagtcacttctttctctgcatcgaaatctgcccattgtccctcctttgcagaagctacagggaagattaaagggaaaagggacatcaatgaacgctgagtgaactttggccactttcctacccaaaacaccagcgtaaaagtagaaatcagtaaccaggtgaagtgccacagcgcacaaagatcaaggcgaggggcgggcgcgcagggccggaggcggggagggaaaagtcccgtcccccgctggagccccagtcatcgcgcgcgcgggagactgaggggcgtccccggggggcgggaggttcggcgccactccgagggaagccgagagttaccgctcgccgggcgaggcccaggagaaggggtcgaagatctgcgccgccagcgggacccgcggccgagcagcctacgctcggcgaggggcgccgctcggcccgcgaccctccccgcctcccgggccaggaaggggccggcggctctttcctgtctagtctttccccccgaggctttctgtaacccgatccccgcactcagttccgcgggcagcagccgcccagcgcgccgcccggctgcgcccaggccagcgctatagttagcaaccttccatcaactccaccgggggcggcgggagctcgccgctcgcccctcccggacccgagcagcgtgcgccccgggcgccccccatccccggcgcccctttaccttcgcttgaagatactgggggtagtagtaggtggcgta

SEQ ID NO: 56062 - DNA, 1452 bp, Bovine  19866881351785
  misc_feature (1)..(1): n is a, c, g, or t
ngatgttctttttgatttctcttgaatgcatcccaaagtactactgtttctcctttatagtctttttttttttcctttatagtctttagtttcctttctaggcttcgtttatttgatgacatgtcatccagtcaccttgtcttatataagcatgagtatcatttgaaaattagttgtgtttggagaattttttgacatcccctgtgattttatttttttagtattacctggatattgtgaaaacaaaggctggaaatagctctgcttagatactaacttctgagcaataggatatgctgctctatgggcctctgctccttcgaactctttcttagatgttctgaaaatctcatatgtatttttttcatgctttatatttaaggtttttaagctttgattactgccatcttcagccagccaaaaacaactacatagaactttcagagcttattagttctggctaggttagcttgggttgagtaggaggttgaatagacgacttctgaagtccctttcaactctaaattttatgattctgggaatttataacatccaagaatcacacagtcttagaactggaaggaactttaagatagtctggtccaagccactcactttaccaatgaggaatctacccaaagtgaagagacaggagtagagttccagagctgggggaagtggggtagagggatgggggggtggagtggcaggagggccagacctcacatgactggtccgtgctgtgacctaacggagggaaggaaagaagaaggcaggccacacacagccttagcaattaattattccaggaaacctatcagaggttggactgggctgtactggggccggagtcaccagctggttttgggttggaaactagtagcggtcaccctgtcagaggtcaccccagcaggtggggctggccaggcttgtgcactgccttccccgggcacggccgcttctgctggtttgccagaacggtgtccaaatcagattctgctttgtcgtcctgtttctaaccataaagatgctctgggtaccgctcccataactgggccctgcttatcctccatggcttctggcctcttcacagccttgttctccttctggattcttcctttaccacattcctaagagtctttgtttttacagtcatgggtctggggccaaaaccctctcccttttttagcacgcctgaagctttcccacactagcaggatacactccagactacttgattcttactaaactttctctgtcctgccatcactacctgctgtacctgctgtaacctgtttggtcaccaaacagcaacacaacccagggaggctctgattaagcaccccctgtatttgttaaagccaaaccccctcattcaccactctaatgggaaccactttcttctcaatgctgagcactccactttgggctttagtatttcttttatttatt

SEQ ID NO: 56063 - DNA, 1571 bp, Bovine  19866881423731
  misc_feature (1)..(1): n is a, c, g, or t
naaaaaaatatatataaagtatcaggttgtctgatgccctgtgttagaaaggggaatgagccctcttgcagcagcagccctcggacccccttctcctggtatctcgccagcctgtgacctgtggccaaaccccagtgaccttaacccagactcaggctctgtgaactgcagtatctttatcaatgagttgtcctttatggagccttggctgttgatcaccttatatcctggtgatatgctgagtgatgaagggccccatctctggtcaccaatttctcctcctagccctctcattttctgcctcttggagtcattaagtggcttcaacttctttctgcacagaaaagctaatgcgtcctcaaagtgatgattggaagcaggacattcgctttggttgccttgcctcagttcaaggatggaacagttggggcaggtcagggtcatcaactgcttcagggagattctgccttctttgggtccagatatttgttttaacttatctacaaggttaatggatttaattgtgtgttagattgtaattaaggattcgtcccaattaatgatgctggtgtaggagaagccataaattctcccatggctcagcaaacttaggcttgaaataaaatagtgttttggggcaagttcccttctcctaatatatgcttttgtgcacattgagttcaatcagtattgacgaactagtctcttagaaagaagataagtgctttagactttatcatctctatccggtgagtcagtgactccaagttagtatcaggcactcttctgaaactttacttttaaagtaatggaaaagtggaatacattatttattgagaactttggtcatgaaatgccctgatttcttgggcttcccaggtggcgttagtagtaaagaacctgcctgccaacgcaggagatgtaagagatgtgggttcagttcctgggttgggaagatcccctggaggaagaaatggcaacccacttcagtattcttccctggagactcccatgagcagaggagcctggtgggctacagtccatagggttgaaaggagtcagacacaactgaagcgacctagcacgcacactcatgaagcaataaggttaactatataacagtataacatgtgaaataatatacaagttggttcacagttaataatgattaatgagtagaagaaagaggagaatgttgtaaaataggtcagaaatgtaatgcttatgttgggtcgtatttttgtttgaaaattttaaaatctgcaaatatatcattttcaattatttgaaatatgccattaagaattatggatttaaggtttcccataaatgcatttaatcttttaagcatttgtgctattacaaaaaccgtggaggatcaagtgaaagcatgttaaatggaaatcttataagaaggaaggatggcagcactttgagtattgtactatatatttttctaagatgaaattaaatgtcatgtatttggggagcccactaccatttttttcttagggagacaacaacttcataaccctataggaggctggatacttatggtaagttgaaataaa

SEQ ID NO: 56064 - DNA, 832 bp, Bovine  19866881618462
  misc_feature (1)..(1): n is a, c, g, or t
nacccttgatccccttctactctggtcttgaacatcatccaaacataggttaactagatcatattctttacatttaacttcctaacaccaatcttacccacatgctcaatatattccagctacatacatcatcttattatttactgaaaatactatattttttcatacaactcagtctgtgtttccggtatgttcttctggtctttggaactcttctgcttaaagatcacccccctcagtggtgccttccctgacactcccaggcagaattaattgctatctgttgtgggtttcatatcatttttatatatgacttttggaacagtcaccacatggaactgtaattatttccatgtctaccctcttagccagaataagaacttgaggacaaggatagtctttaatcatcagtatcccaaattcctaagactagattggctggaagatagcgggcaataatttaatgtgagatgaatgaataaaaattactcattaaagtcacggtccttgtctccccaatacactgattttcacaggaaacaaatttgtctcctgttatttctgtgggacctagttttttttttttttttaattaaaagtcctttattttagcttaccttaacaggtggttggtatgtgtcatccccaattctgacatgattggctcactggtttcttctgctcacatatcttaaatttcagctaggtattttaatcactagcttagctcagactgacagtaatcagatggccttctgccaccacagaaaccatgaaacagcttagtgtctaatttgatgtgctatctcccaggcatagccctacttctaga

SEQ ID NO: 56065 - DNA, 2089 bp, Bovine  19866881646010
  misc_feature (1)..(1): n is a, c, g, or t
nattcccagggagttacattatgtctgtcaatcatacctttaaaaacaaaagttcctagaaaaaaaaaagtataaaaataaaagtttctaatcattttcttttataaactaaattcactcaaattatatagtagtacgttctagggagtctgagaatataacttaatgtaaacaaaaaatactacttatttgcaatcaatgctttgccaaatctgcattaaggaggaaaagttctaaacaagttatctatgtgaaaaatgagatactgaagcagatatcagactaattttaagatttttaaatttgctaattggattagtgaggcctcggcttttgtttttatctgatttctcaaatgttaacacagtagccaaaagtgcaaatttcaaatgtcagggcctacacctatgataaaatcagatgcagcatctgctttagtcaaattctatgtatgtgctgaatctctaatgtgaatgaatcacttacatgagcctaagaaaactttaaaaaaacctatatgaagctctgccctcaagtgaaatgatgaacataccctggctttgaagtctgacataggtttcaaattctggctcacctccttacctacagtatggccttgggcagatgcttcacctctgtgaacctcagtcttctcttatgtaaaatgggataatactaattatctgctacaagctgttgtcaggattaaataaaataatttcatagcatacctgataacaataggcaatcaataaatattaactctcctcctcctgtctcttttcccaaagaggaagagaatcacccaagagaaaagcattaagaaagagctggcaacactcatgaaggataaaatgaatagtatgctaacaagtggagattacaatttgggaggatgttctagtacgcatacatgatagcaaagaggcaagaatcaattgttagagaaatacaaaacagatgcaacagaccagtaagtttgtaaagcagaaacttagccataaatctaaagaaagagtaggtagtgagaactaatgagaaacatgaagacttttgattaaaatacttcttgaattctagactggaacacgtaagtgccatctcacagtgaaccttaagcacagcaaggagccatgaggcagtcactacagtgagacttggtttcccaaaccccaaacaggcttagcagaattaacaccattacttgtcatccaccattagctcataccgtgagatctacgaaagtttcataaccatcctctacacaaaatcaggtttctggtcccactggcagccaatcaggagagcctctgtctgggctttcaagtgccctggatcagctggtaactgcaacctgaacaatattgtatttcatcacatctaagataccatccacaacaggatacaccactattctatgtaccgcttggaaatacaaaatgagggatctgatagaagaactctagagaaaatagggagagcaaggggttccactatttggaaaagagcaaacaagaagcaaactgactgcaataaaacacacagcaaggaaatgtgtgtgtttgtgactgggtgaagaaaagaaaaaaatctccgccgagctggcactagatctgtataaccagtgtggcacgacaaaacttcaagcagatttcatttcaagtgggttcagactggtagtgtccccaggtgactattacaagtaaacaaaaatccacaaatcccctccagaagaactggactttgaagcaggctgacagtcccttaaatatgccaccaaccaggcgatgcactctgatttcagggaaggtaaagtatgggggcgggggataggaatttgtgcacttagaataggaaatgcagtggttgttttcttaaaaagaatgggatgacattatgtatggatctaggtcactcgacaagtatttattcgtatgtatccactatgcgcataatagaggtttcaaagcaatttgaaggcacgacccttgcttacaaatgtctttctaatagtctctctgggaacacagattcatgttcctatctgatttacttttggactattttgccaacatggttatagtgctgt

SEQ ID NO: 56066 - DNA, 1002 bp, Bovine  19866882038383
  misc_feature (1)..(1): n is a, c, g, or t
ntattattattagaaaattacttgacaaagctaggaattattcctactggaaaggtagtcttaacttcggggaatgttgaatatcaattcttttctatttttttctttttgtgcaatacccaaatactaaggcagaaggcaaaagtcaactgcaacttattaagtcaaaaccttgtcgttctgtgttgtcatcaggaaggtggctctgatatgagggaacttccctttcattgaaacaagtgaaaagcagtgggaacaattttgagttctaatcagttattttttaggagagcatttttaggaaacaatttactgatttttttttttttactgtgacttttctctcttttccccaaacatcatctctgcttctagatattaaaaaaaaaaagtagtccattttttgtgtgtgtgtgtgtggcttgtgaaattacaattgcaaattccttatagaaatactgataaaatattttctcttttgaaattaataatccaaagtagttgcaacatattttcaatttgttcagcagtgtaaaatgataaactatttgctgcacaggataaggaaagcatgtttcacattttgaaaatgtaattttctgccataaaaattaatggacaacatctaatggatgaacataactgtatgagtcagataatttgtatatgttacaaacttgaaatataaaatatgaataaattataattgactacaaaaagtgaactttgatagaaataaacactgactacagccttgtccatttgtcttgaaaaagatgttacatgccacaatatactggctatgagatgctttactattgttaatgaaccagtgaaattagtgttagattccccatttgcttgaccaactgtttcttggcttaagtattattaaatttcatgataatattaccagatttgatgaataactttacttatgcaaatttaggaggaaattctggtgattttactgggtaagtaaacatttactgtatctatatg

SEQ ID NO: 56067 - DNA, 1097 bp, Bovine  19866880359633
  misc_feature (1)..(1): n is a, c, g, or t
ntggagataaaatgtttaaatattaattaatttagtattatcagaactgcatagttattaggcatttccaaatttggaagaattttcattacacagtaactgggtaatgaaaaaagaaaaccaaaagtcctcctcaagtccttatagagaggacagatcaaatgaaattttctaatgatctggggatgtttcataattgaacacttagtagtcatttccaaaatagcaaatataaagcttcattattgactaggaattttcagagtacacccacatctgtctctataccaaataggttttcattactcaagcagcatatggcagtaaatgaaccaaaaagaacatgttgcattatttttctgcattaagtgccgacattatctttgccacactgtatgtgtggttttgtgtaataagaatccttttagagacagttcggaggtacacattctattctaactgttaactttttgaagaagcccattttcaaagtaacatacagtgtgtgaattatgcccaatctaattatcaggcagtactttgggaatttactcctaaatggctgctattaacataaacaagtcaatttacatgtcacagtaaggttcaggttaaaagaaaatgtataatggatttcagtatatttgtgatctactgtaactatgcttttatttaaaaaaaaaaaaacagaataatagatgtactgatttttctccatataaactttgcttttataatagtcatatgaatactcaatcatagttttcaccatcagccacatatgtttattgttgttgttatttagtcgataagtcatttccatctcttttgtgaccccatggactggagccctccaggcttctctgtccatgggctatcccaggcaagaatactggagttagttggcattccctcctccaggggatcttcccaacccagggatggaagctgtggctcctgctgtgtcacgtgcattgcaggcaaaggccgtcaaagcagatagatctctactctgacaactattctgaattaattttgcctcaaatcttcacagtaacaagcgtagagatctagaggaaaaagcagtaccatcaaag

SEQ ID NO: 56068 - DNA, 1470 bp, Bovine  19866880696798
  misc_feature (1)..(1): n is a, c, g, or t
ntatatacatgtccgccttagtacatggtaagtactttacaagaggtgtctattttaattacctacattccaaacattgagagaaggctttgcatactgtatttctctactctttactatcaacttacaaaagttactgatgttgaaaacaaaaatcctgaagtttcatttttaaaatcgtgagtagaagactgggatttgaactcaatccattgcaaatgtctctctgcctttaatatacttcttattgtaccatttctactgagctggtgatggacagggaggcctggcatgctgctgtccacagggtcgcaaagagctggacacgactgagcagctgaactgaacagaaccattcattgatgtaactgtttcaccttacccacagagaaatgactcagagaaagtatgaaatacatcctatatcttgcattgggtaggtgagaaccacagcactcagtaccaaatccccaggctctcggttcagtgcttttgttgatataattactctgactttattaatctacaaataaaattacctacatttcaaggcccctgaaggtaagaatggcatgacacaacatggcaaaataaaatgttttaaaaatgacatttttatttgacagcaatagaatttggagacttattttaaaaattaaagcataattttagacagtacagagttgaaaaagtatttctagtttagttggtttttaggaaaagataagattcaataacatcagctggaacacaaggaatattttattaaaattattttttgatgtgatagtttattaattagttaattcaaattaatttcatcattaatataaagtgaaaaatttgaacagtaattaaatgtattctgcatgttattttatataatctcacataaaagaaaagtatctaatttggctatttaggcctgcccaacaaaagaaatatttccttttattcaacatagcctaatgatcaggataatctacaaaaactggtttatccaaacaccactttttaagcacaatatttcatatttatagtttgcaactaataaaaagaagatatacttgaagtccagacttgaatgtccattgtatccaatagccttgaccacaaacaactgcaggattgggcatagtctgtactttcaatcagcatcatcagcaggcagtaatcctggggaaaaaaaggtaaattccacaaataaacagaccaatcttcctttaagaggaaagctaattcttttcaatctactttttttattacactattttcccctctatctacttagctagaataaggataaatttccaaagctacccagttggaaaataaataggttcactgtttgtctagcattccaatctttgcaaatgtaaatcagcccaactgctcctcatttaaaccttcaacttcacaaaacattaaagtgggctttcacgacacaatttaatctatccactaagattt

SEQ ID NO: 56069 - DNA, 1547 bp, Bovine  19866881161261
  misc_feature (1)..(1): n is a, c, g, or t
ngagtatttgtcttacttgactgagttccctgaggaagacaaacttaattgtgaatgcaactttttatttcaatggtgaaataaaattgatatacgatttgtaaatagcattaacaacctacaattactttgcatcataatagaatttaggctgggcttagcatttgaatgatgttttaattttctgtgtagaacatggataaaataggtaagtctgccttaatagaaaaatggatgaaaggaataaacaggcagtttcttaatagaaaaaatatcaaagggccactagtaatcaaataaatgctaattaaaaatgataataagatgtcatctttcaccctcaaggtgacaaggatatctttaaaaataataattcccagtgttagaacttctataaaggaatgcattattttttcatttctggagtaaggataattggtataatttttctggagagcattttggcactatataacataaaccttaaactgttatatgctttgtctgattaaccatgtgcttgcgaatttagcttgacacagatttgagtatttgtttataaagtccatattaaattgatgatactgataatacaaaaaccagaagataaaacctacacatctgatgataaaagactgatttaacaatatatgaggctctatccataaagctgaacacaagaaagttaaactatcataaaataatttttaaaggcaggtaaaaaggctcactatattaatgaaaaagtacaagtatcaaatattaggattcttccttgctactttcctttaagatgtttaagtgtgggtataatataaagcatatgttatgtatcacttgtcatatgtacatagaaaaatgtatgacaggctacacaccaaacattgaaataatttctttcagagtagtgagacacgggacaatgttattttacatctttattttctaaattttccattattaatctataacattctataagtagaaaagcagtaaatattagagctatagaaagatacctctattgttagtaaatgtttagtggatcaatttgataagtaaacaaaaaaattctaaatttagtattaatacacctttaagatatacatatgcaaggtaatgaatctgtaaggatgtgcgggtatttgtatttttgtattcctatctttataataaaaatatgtacatatgccaatttatttttggctaaatgtcactatagactgaatcaacctactatgattccaaacatctactgggaagaatcaagatgctgcagggtaacttcttgaattatttcctgggtcaattatacatggtgaagtatatcaggcaacattctgaacatctacatttagcaagagatatcttgtgtaaaaaccaagttagtgaaatattattatggttaaaaataaatcatagatatcaaggtaaaaactaatttttgagaacctattatattactcgtatttgtaagtttttttctttaatttttaaaatctgcaggataggcgttatttgtctgcattttaaggatgcacaaacca

SEQ ID NO: 56070 - DNA, 1557 bp, Bovine  19866881185444
  misc_feature (1)..(1): n is a, c, g, or t
ncagaataaggcaaaatattaataaaacgcaagaacttcaagattcattgttcagcaataaaagtgttttttgtgttctcttttggaaggagaagttaactaggaagttaaataaacttggcaaaaagtatttcactcttctctagatgtgaacaattatctggcccaagataatatctataacctataatttactggtgcaggtaagctactttttctttatcatttcccacgttcttacttagatgcctggaaagttagaccaagaaatacaaatctgtaaagtatgtatggcttgtttgtgcctcaaagatatcacataatatccaaaaatcaatctaaactactttttaataggatttaaagtggttaagcagtggctgtgcaaaataacaagaaagcaatgtgctgaacacagaaggaaatgagaaaagttattttcaaagcttgggaaaatagccacagaatattacttgttcactgatcatattgcagattttatgtaattaataaatagtaacaacttgaggtgcacctccctttttcccttagttaatttttgtctaacttaaaatcatgtctctcacagagcaggcataagcattttgaatgcctgtttatacacattcgaagaaattaatttgtacataaaatctgcttgaatgtattagacataaggaatcagattattttaatttgccaatcagagacatatgcttttaaacacagaatttcattgtgctatgcactttccacataaaactaataccacatctgcagcataatctataacacataacacgatgttttacacccataccatttacccatttcacttctgcagtttttaagtgttgatgaactacttcttgccaaagaagccacgttatatacaacaaaaccttcagtttaaataagggataagcttgctgttaacaacttagtttgaaatgttaacaacccttaggctgttaacataacaactggccattaatgtggtaatgaccaatttgagaggaaattgcactctgagaaatgaatatattggcaatctggactagggtttaaatttgaaagagttaggattaaaaaaaaaaaagtaactagattaaaagtttgagcttatcagaaatcaactaaaagttgtatcacacaaagcagcaaatagactcttttagagataaagatttctgagatgaaaactattttgataaaatcccttcaacaacacacttacttgagactatcaaatacgagttgaacaacttatttttactaccataaggaagacagacgacagcaatacaaggttactttctctgctctcaactttgttgacaaccgcaaaagagactatcaaatacgagttgaacaacttatttttactaccataaggaagacagacgacagcaatacaaggttactttctctgctctcaactttgttgacaaccgcaaaagagtttcactcaggacacaggtatttcattggcaaatttgtatttttgagttaaaaatagccagagatttcaaaagactggaaatttgacataatttt

SEQ ID NO: 56071 - DNA, 1027 bp, Bovine  19866881309058
  misc_feature (1)..(1): n is a, c, g, or t
ntactggagtagattgccattcccttctccagaggaacttcccaacccagggattgaaccctggtctcctgcatcacaggcatgggataaaagtgcttattatgaaaggaataatctgtaagtctcctttaaccagaagatatatctagttactttaaaatacgatcaacttttgagacttctgtggccatccagtggttaagactcagcgcttccactgcaggcggcatggcttctggttgagaagctaagatccctcatgccacactgcgcagccaaaaacaaaacaaaaaatatggtcaacttttatagcttttttttagcttaactttagaaaaattcaaagtcatctccatgtagcaatgtattctaaaaatatatgttaagcagcctaactgtgtaacaattagaagcatagttcaaactaatgttaaacatttcttgtttcctttgatgtattttcagatgttcagtgtttccttttttgcttcttttctctcccacattatctttatctctgtgtcagtggtatgccttctttgacccaataggagagagaacaatagattgaactctcttcagcctgtcatgggtgcgaatttttttttccattttaaataaaagaattgaatgtttaaagtgttttcattttctatcactacattccttagtttaaaagagtgaaatagaaaagaagatgaggagtatacttgtaatagacaaaaaagcaattgcccttctcaatttgtgaaaatgttctattctttcccacagaacatactcaataaaacttccccattcggcagtcataagttaaagatcttttcaactgatcacaatttcatatccttagaaaacgaaacttcctctgttcactctagttattctgaagaggggtggggtttaacaggataactacactgtcttatcctcaatattttaaaaaatatttatcattcattaaattcatgtgtattcaagctgcttgaatattagaagacttacttgatcttgttcagaattaaag

SEQ ID NO: 56072 - DNA, 1014 bp, Bovine  19866881436824
  misc_feature (1)..(1): n is a, c, g, or t
naatgattcatcaggtgtgactatctctgccctagatgaggggagcctggaggattacaaagcagaggatgacatgatcagatgtacatttcaggaagttcagtctagtgatcctgtgaaaggtgaagtggaggctgccgagactacaggctgggagcccagctgatgcagttgaagagaatgatttaaaagcaatagagcagaactggggagaaggtacacttcaaagacacttaggagacagtcaatacaggagtgggtggtagtttgttggggaagaagatgagttttagacacattgcttttgaatggccttggaatagaacttggaaatacaggtatttacactttaaaagttcacaatgaggaacctgaagaaattggattttgtgccactgggtggtaaatgtactactctgtactctttaaattgtgttacttcaccaacccactgaaatcgtaagacatatcttactcttttgagtataaaatctcaattaaatgttaaatgttatctgaatctgttgagatatgcaagggttaatggagtaaagaaattagagagacagattacttgttaccctcatccacctcattcatttgcataaggcatcatttcagggttgttttttagcaccaaaacagaatgaccagtttctgttagtagtcctccatgatcccaaggactattttctaatggctttacttctctcagaaccatttcttctacttgtccttcaagaagacttttatagttagaactagatggaatttatgattctgaaattgtgggttttatttatccacctgtttaaaaaaaaaaaaaaaaagttaaaaagaattgtttgaccagttatgctccagagctctggagcatagagatggtgaaagaagcagaaagccatcaaaaaatagttgtcatataaatactatttattcctcaaatgtgtatagaattctctagtttccagatattttcatgtctcattgatcttcacaaaaaccaaacagaaa

SEQ ID NO: 56073 - DNA, 972 bp, Bovine  19866881568271
  misc_feature (1)..(1): n is a, c, g, or t
natgatagtgaattagtaagttaacttttctgctgacagaggaacccaaagtacttggaatctggacagagcaaagctaaggattagtgtggatgctagttaagaaatggggaggttttatttaagggacataagattgaaatgagatttttggatttacaataaaaaacaccccaaattaatggatttcacaaatttatatatccacatttaaatacatctatatatttttaatagggaaaacagaatgaagtggataactgtttatttcaccaagtaaggtaataaagaacaaaacctattatctaccatcaccatatttccataaaggaaaggctatctgtacaacccctcaaagtgggaaaggtaaacatcagattgaaaaagtatttttgagtaaatatagtcatgtaaaacatatgtaaatatgtctttttttcccttttttaaatttcatcggtcaagactgatcttcagacagaattttaggagaggtagaaaaactttcaaaacttcctttgtatccaaagcagggatctgacattatctcctcaaggtgaaataaccctgaatggcctgacatttgcacaatggctttcttttgatctgtctgtagttctaattatttaaaaataccttccctctttccctgcatccttctacccataatattttgtggcagtctaataagaactcaggcttatccactgaccatatgtaaaattagataaattgtaatattccaccagaaatgctaactttatgtcaaaaattcagggtagagttttgggaatatgaactgtggtcacctgatgtgaagagccaacttgctggaaaagactctgatgctgggaaagattgaaggcaaaggaaggaggagggggcagaaaatgagaatgtgaggtagcatcacgtactcaatgaacatgaatttgagcagacttcagcagataggaaggacagggaagccgg

SEQ ID NO: 56074 - DNA, 1672 bp, Bovine  19866881576202
  misc_feature (1)..(1): n is a, c, g, or t
ncgttaagaattctccttctttgagagacaaatgataatgggattaacggatacaaagtactatatccataaaacattatagaagggcaacaaggatttaccatatagcacaggaaactaggggcttccctgatggctcgttaggtaaatgaatttatctgcagtgcagcaggagtgggttcgatccctgagttggaaagatcccctggaggaggaaatggcacccactcctgtgttcttgcctaagaaatcccatgaacagaagatcctggcaggctacagtccaaggagtcccaaagagtcggacatgactgagagactaagcacacacacagggaactagattcagtatctgtaataacctccaaaagagtacaatctgaacaacaacaacaacaacaaaaacagaatcacttcactgtacacctgaagttaacacaatattgtaaatcaactctaattttaaaaagatactgtaagattttacaagttgaagaaaagaattctccttgtctatttgtaatttctaaaaaaatacatctaaataagaatctaaataagcctgtatagcttggcttcagtgctgtttgttttcaaaattaggtcctctagttagaaggaatcacagactctatcacacccagctcctatctaccatcatttggaggaggacattgagaggatggagccaatctctttgcatatatttagtgataaaaacatggatggcaacttcctcccagaattgctgctgaaagccctaccattctctgcctctctttcccgagccccatcagacattactttttcatatgagttatattgaatgtgcccttttatgacatgcctaagagatgcttaaagacatttctttattcacttcccaagtcttcactgttgcaagcacaggaaatttatcacctcctgggcaaagaccatgctcttacttttagtgaagctctaatcttgctatgagacatttgatatatgcccagtgctggaaaagttccttcattcaaaaatgagggggcagggaggtaccttcaaaactatacctgtctgttctattgcacatgcacggaaaaatatcctgctcaggtccacggtggtgagtcgcttccttcagcttcatgatagaaaatgagccagctgactgggtctgtcttgtgtcgacacaaccatctggaacaccatatcagggggtaagaagacatgtttcctgggccttcactgcctccatcaactggcctcactgggggacttctctctcatttgccaggagatatatctgcagacaatctcgtttttcagtctgagtgtttgcacacttagtaagagggcaggttctataaaactcttctttctgtatatatttgttttgctgtcaagttccctgtagtttttgtttgttcaggggctgagtttgtagcaggtgtttggaacaattaacagaagcagggataccagtcgtgggcaaagggtggaagaatataaaacaaaagcttgacattttaaacaacaaaggcccttaaaaaatgcacttaagaactgcagaggagagcacaccagtagtgtcgtttaatctattataattaaactatgcatgtgtgccttggccataacatattagactcagtataaaatatcacatatatgaatatattttatatga

SEQ ID NO: 56075 - DNA, 2100 bp, Bovine  19866880367459
  misc_feature (1)..(1): n is a, c, g, or t
nttcagggagcaggcagaccggagtgccatgagttcaggtttagaccagcttagactggggcctggaactaatcacaatttgtatgttacatatttttatgattatttgactggtttggctttcttcacaattaaaagtctcatgaggacaggaactgtcttgttttcttcattctgaacttccagagcccagcatagtatacttgacacataacaggtattcagtgaatatctgtgtgaatgattcaggtgaacacgttcagcaggcagctgagtgtacagtttggatctcagtcgaggacaggaaatatagatttgggagttatcagtgtagggctatgtagtggacatagtggctaaggaactgttatgaaagttcagatactgtgtagacctgaaattttcatgtccaggtaatgaaattatgccttttttctttgccatgccaaatattatcagtaattatctactgacaatcctgctaattagttttttaaatttcgtgactaaaattagatttgtgataggtagggaaataaaggtgataaagacagattctgtttccgtttaagaataactgactcataggatgaaaccttggatatgatttcagatcactcctgtaagctctcacaaaagatgtttataaaaacacttggaacaatacagattgtactaagaaaatgtgctttgatcaactctggagatacaaagcagggaacttaataaatcaagtcctatttgtgaatggaaaggactggaagttcaccttaaaagtaagaactgagttcacagcaagacctaaattttgtattctgaatagcagatgttaacttattttcatcttttatatattaaaaaaaagaattgcaggtttcagattttggcatcttgaaatctgactcctgattcctatctcttaatagcttttggaacactagtctagaaatggaatttgactttggttttttaccctttaattttgaggtgaatgtgctgccagctctgtctttcctctatattcaagaaaaccaaatcacaggtagcttggatatggtataatttttattatttaaatattagaaaaatagggtcttgtttatgtaaagtagtaatgttacgttgacacttgggaaagatggttttttggtttttgtgctttttttcattttagtgcataaatagaattgtattacttttagggctaaacgctctcatcctaccaccttgccatatgacaagatattatagtaaattgcatgtattttaagtgtctttgtttattgcctagattcctttcttaccctcctagtagaaatgtgagccatatttgtttgtttaattttttgccaaagaactttaactaaatttgcctgactccccagtgcaggcaagtgtcttttagcaagttaatttaaaggagcatttctaaaaattcaaattgcatagattatagcattccagctttttaaattactgttaagatatatgtttaaaatatgacacagatgattttcttttggtttatagattaatgcttattctttcaaataggttcaacacatatctgatagactaagactttgtgccttctgaattttaccaaggctccttcaagactgggaaagagaatacatttcagttcttaatgataaagtcaaaattatgagtttgactcctgcgtaagctagttaagttataaatgggaaaatctccatgctgagaccccagaccccagcaaactgtatcctttttgaaatcagttagagctgaaatgaaagaaggttgatttctggaggctcctggagaaaaaaaaaactttaaatacctctaatatagtttagcttattctgtattctgaaatgattttcatcaagagcttcttaccttcattcttttctagttaatttttcagaggtagaatcattcaaaatagaaaagttcacagcctagatgtcagaggggttcgtcagcagcccttacggatggtggtgcacagtggcccttgggaagaggcctgactcgctcgtgccgctgggcccggggctcatcagggccactcctctgttgcatcgctttcacatatgccgatctccactc

SEQ ID NO: 56076 - DNA, 1553 bp, Bovine  19866880417893
  misc_feature (1)..(1): n is a, c, g, or t
nccggggaatatgagtaaggaccgataacatcatatgcttgtctactagtatggcgctagtggtaaagaacccatctgccaatgcaagagacccaagagataagggttcgatccctgagttgggaagactgaggaaacagcacccccactctaatattcttgcctggagaatcccatggacagaggagcctggcaggctgtagtccatagggtcacaaagagtcaggcacaactgaagtgacccacacacgtatgcgctgctggtcaaagtagaaactccttgaggagaaagtaccccaggcagaaagagctttatcaagacctcatcgagggacttccctgctggtctggtggctaagactccatgcttccaatgcaaggggcccaggttcaatcctgggtcagggaactagatcccacatgccatgaccaagtaagcatagtcaagtaaataaacaaacaaaaagaccccatctaaacggcttagcatcaggagagatgcagtaacctggggaccctctcactctcactcctttcccagcatggcctccttttcctctccaataataacagctcatgttactaagggcctctttctgccaggcgctatgctaaacccttggcattcatcattgtgtgtcactgtgccaacaacctgggagttagggaccattactattccatcttacaaatgaggaaatgaggcttggagaaggttctaggacttgccccagctggtaactggcagaaccaccaaacccagaccccaagctctcaacccaagctatacatttccctcttttcatctcctttctttcgcctctgtttatgcccaaagcttttaagaccctctccctcaccccaaatcagatcccgtatcttctaaagggtttcaggctacacaggaggctgacctctgaagaataaggcccctcaggtggagggttactgtttctgagatttctcaagaacaggaaacttcccgtactgcctgcaataaatccaagccttccttcctttgtgatttcaccccgggagcaacactccaggatgactcatctcaagaccggcaggagatctcctcaggagactggcggtgaccttggctgggcactcacatcctgtgcctgtttgtctaatgggcagccccagcctccctgccaggcttgttgtggagtatcagggcaaacacaaagcatgtggaaaatcattttaaaaagagaatgcaaaataccaacaataatccaacccccacctacatcccacataccaaacccttatctaaatcccctccaatctgaattctagcttcaaaagttcatccgcatccctgccttctccttgtgtacaggcaagctgtgattcctagaaaaacaaaacgtgacagggataataatcctttttttccccaaacagaataagtcactccttcagcttcccattactctattacaagcacacataatacttggaacagttaacagtcacagagccctaattaagtgtgtattgtatatatttttttccctcacttaatcagtttaaatcaggaa

SEQ ID NO: 56077 - DNA, 2632 bp, Bovine  19866880446305
  misc_feature (1)..(1): n is a, c, g, or t
naataatagtaatatgggctaataaatatttggggctttgtgacaagttttctgtcacagctaactccactttgccattgtatcatgaacacagtcatagacaatactggacaaattggtgtggctacattccaataaagctttgttgacggacatcgaaatttgaatttcttattattttcacatgaaatacaagatattcttcttttgcttttttttcaactatttaaaaatgtaaaacctattcttaatgcaagtcatataaaagcaggtggtggactggatttaacaatcaggcagttgtccaatccctagcttacagtagaacaaaaaaaagtttctgtgctaagaacttgagtaggaagtttaaaatcacagagtaatgcagaagacctaatggggaagaaagggaaagagtgaagaggatgggaattcataaaaagcttttaaaaagtaaatgtcttatgcaaaaaagtaagtcagaagaaaagggttagtcaagtaggaatctaacatgagatatactcctgattccttagtttaccttccggccactagaatgcaactggttgattcattcaacaaatattaatttagcactaatatgggcaactactgaggctttctgcctagaacttgaaactataaaagaatagtttttaatttattctctaaaatgatattaagaaatgctgctgctgctgcttctaagtcgtttcaatcgtgtcctactctgcgcgaccccacagacagcagcccactagactcctctgtccctgggattctccagacaagaatacctaagtgggttgccatttccttctccaatacctgaaagtgaaaagtgaaagtgaaggtgctcagtcgtgtccaactcttagcaacccccatgggacccgtagcctaccaggcttctccatccctgggattctccaggcaagaatactggcatgggttgccatttccttttccataagaaatgctaagagtggttatttacttattttagttaacagctaataagttttggtatgttctggctttattttcgttcatctctaaggattttctaatttctcttgtgatttcttggactcattggttacttagaaatgtgtggtttaattccttataattgtgcatttcccaaatttctttctgttattgattgctgatttcactccactgtagttgaagaatatactttaccttatttctgtccttttaaatgtattgagatttgcttaatgctgtggcacatggtctatcctggagaatgttccatgtttatttgaatgtatattctgctggtggtggggggagtgttctacaggtgtcaggtctagttggcttacagttaattcagaccctctatttccatgttaatcttctgcctagttgttctagctattattagaagtggattactgaagttttcaaatattattgctgaattgtctctcttttcagttgtgtcagttttgcttcgtatatttcagtgccttattgttaggtacataaatatttacagtattcacttattttttacagtcttgatctaaaaaggatttaagtggttatggtatagcaagaactcatagattagagtagatgagaaagaaaaagcaagacaagagtagcaacatgaaatagaatttgccttcttgttctctgatgtctctgtgtgaacagagcctgatgcatagtaggcccttgtaggattgaaataacatcaagaacgaggatgtcccaaaaatgaagtaatacacattttataggtgaaccattaatttggcatccaattatagtgaagatttcattgcttatacaattgatagtaaacctgagataaacaaacaaaagatattgaaaccaatggaaaaattctcccaagagccttcactaatatttaattacaaagatgctaaactggtctacccctctgtcctgaacagaatatatgctttaagtttggggaatcctccctgctatgaatgatgctacagctggtcccatgtatttactgtcatactcgactgtgcaaattgtgcactgccccacttcaggaatggccatcccattgtattctatgcaattgacaccctcaccctgcatttgggcaatatacagtctgtgcaaccataggaggtgaccccacaaaatctttgagtgatccctcccctggcaaatggctcacaatttatttaggggcattgtgggtggcaaaggaatgaggaacagcaaagcgtccacaaggaaatcaagtgactgatcctcatcttacagtgtaccaatgaattgcatgaactagttccttgaagaagagaataaggtgattagggaaatgcttaaatctctaaccctcaggctgattgggagggtaagaaaagggcttctcacatttcccaggctagttgtttccttactgtgtttagggagtatcataagaaacaccattacacaaggggaatactaaagctcatatttatgcctgtggtgtgtcaggggagaaacagtgtgtgctaattatgacaaaaaagagaagcgacctgcggcggcgggggagggggggtggccctctggaagacactgatgttggtttaaactcagcagcagcttgtgggcgtgcatg

SEQ ID NO: 56078 - DNA, 896 bp, Bovine  19866880452744
  misc_feature (1)..(1): n is a, c, g, or t
nctttaagaaagaagaagctgaagttggaaatatttgactttttgtatgttgatacatggtttaaataacgttgttgttgttcagtcactaagttgtgtctgactctttgtgaccccatggactatatatatagcccaccaggctcctctgtcctctacaatctcccaaagtttgacacccctgaaaatgtgtcattacttttactttcttttctctttcctccctctctcccttttctcccttcctttctccttgtgttgagagttcagttcagttactcagttgtgtccaactctttgtgaccccatggactgcagcacaccaggcttccctgtgcatcaccaactcctggttctattaattctgattctgaatttacaggtttgaatatagccagcttgtctttcatatatttgtctgtctaaatatgtcagtggacaattaacaaaaatttagaaaccacttatcttcatttggagagggaattagagaaatgtacttacctttgagagcataagatcatttggtttcagggccagctcatcttgaccctaggaaaggaggggatggaattcaggctctccatgactcaaaccctcgctatctgtctccattcttagtaacagatggggaaggggagcggtaatgggtgcctgtttctgagagctgttggttttctccctgattatacagggctgtgaaatgtgaaagacatcagggactctgagcaccattcccctaaatgccccaatgcctgcagggaaccagccaaaggctggggttggcttcagatggctggacaggtggccttgtaattaaaacctttcccttctaactgtaggccttgttttgccaggaatctgaggtgaagagaatgttctagttagatgcctgt

SEQ ID NO: 56079 - DNA, 1176 bp, Bovine  19866880529402
  misc_feature (1)..(1): n is a, c, g, or t
ncaataaataaaaggcagtaaaagtatccatgacttgctaataaaacttgatatgtttttaatgacaatttttagtatactgtttttggatggatctggcactatttgaaaataagcacccaacaaggacacaattgagattggcaccaaaagtaaaaacacaataatttgtcctaggtacagtgtgtatactcagagaatttaaatgtctccccctaaaagatcaaattgcactttaaaatggtcaacatacttcaaccagtgagcaacttgtataaaaatgccaccataaaacacattagtctttttttttttccttaaactacagcctaatgaatttagttcatcacacgcttacataaatcctacagtggagggggggaaagagtctttgaaatttcaaacattttcttctccctttctttctcttttaaagaaaatctctcaagaaggtatccaaccacttcttggagacataatcatatgtaaaaaaaaaaaaaaaaactcaaataagagagaaatttttaaaaaaaattttagtcactctttaactttattcttcaatttagaccaatcctcttttatagggggctcccagcaattagttggcaatcttatcctgtgagtttgaaggattaaagcagaagcaaagaacaaaaggaatggatttgctacactcttctgcaggtctcctctcttaacaaatcagacttcatttcctccagggccctccctacccacctaatcttttctttctttcttcctcccatggtcctttaggaaaaggagtcttaaaggtaacatcatggaatgccatcttaactaaaatccttcagaatatgcaaaggttgaaaatgaatttggaaactagagtgtgcttttttgagtcctcattttgggattctgacaaagtacaattttttgattactggatcttaaactgtagcagcaggtaaaaagccacccaacttaggtttcccagaagtttgaacacactcccttccttcttgcaggctatttaggacagtgttcacagaaggtcacgacattaaagacagcatagcctgggaacagcagacgtgacatctgtcgaacttactcttccatctgtcacggacatgggccacaaaaaaactactagagttctcagggacttcaggggcctgctaatccatt

SEQ ID NO: 56080 - DNA, 1339 bp, Bovine  19866880544082
  misc_feature (1)..(1): n is a, c, g, or t
natttttatgcagtcaaagatgcagcagagagccaactttgtaagtcccaagttcaataggatttcttttccttgtatgggatgtttttgatactgtattttagggtaccacattaaattgattagcctttcaaaataatggaacagaagatccaattgttttattatttaaaagcacaaattacaaaaacaaaaccaataatttataaagctgtttttgtaggctaagtacttcatttctagttaatcctcacaacatccctcttgagttgatactcaccgtattttacaggggagtggtggggcttacagagattaagtcacttgcccatgtcattcggcctaggcagcctgactctagatccatcacactaagcctcattttgtgaaagagaaaacacacaactgttattgaacacttttcagtttcagttcactatctcagaaaatcatatcgtctgtcacatttatgtctgtgtttcagattttattggcattgcagttctttttaaaatttctttataaataagtcacatatggtttcccagggtgtcacagtagtaaagaatccacctgccaattgaggagactcaagagacgtggattcgatccctgggtcggggagatcccctagagtaggaaatggcagctcaactccaatgtttttgcctggaaaattccacggacagaggaacctggcgggctacaggctatgggttgcaaagaatgggacacaactgagcatgcacgcatgctaaacacatatacttatttataaatttggtttagtagtcatgtaagaactataagcataagagtttatacctagttttatatatttgtgcatatttaagtaattttataataaaaatggcttaagtcaacactggcagtccacagtattaagtcattaacaccctcaacacattaacactgtttactttaaataaaatcccttaatagcctaagagactggacatattttgatggactgggagtgaatgctcataacacaaggtgctgtgtagaaatgactctgccactggttatgaggtaccagtagggagcaggttggtatttttttctttcagcactttgaagaccagattctactcttctctgccacttctgtgctgaaaagtctgctgccagtctaaaagccactttatgggtaatggctctttcctccctctgtttttgagatattctctatggcattctccatattcacagctagatgtggatatagttttctttatatgtatcctaaatctttggatgcacatctttcatcaaaactggaaaattctcagtgaaaatctctccggataccctcagt

SEQ ID NO: 56081 - DNA, 4474 bp, Bovine  19866880632048
  misc_feature (1)..(1): n is a, c, g, or t
ncaaagcatcagcagaactgggggtgggggaatggtatgaaaaaaaccatctgtaatgcaccagagtgaagatgacttgcaaagatcacaagcaggaaacggtgacaatcctagaagactcagccacctgacggggccaggtggggtcactctgggtgacatcaatgcagcactgcttcacacagacttctgactaacatgtctcagaagtctctggcactgaaaatgctttattttattcataatgagttattcatgacaactgctgagtctaccgagccagctgtgctttcctatcaccaaggtgccttgatagtatggcaatctatctattatctatctatctacagtttttaaattctccaggcaaagagacttttgctttgtccaattctaattctgccagggaggtatttgggattctgccagtgatttggggtggttggttcaggtaaaactgaaactaaccttattttaccacttgctaactgtgtgtcctggggcatgtcacctaactatcctaagcctatgaaatggagataataatacccaacccatcagttcagttcagttcagttactcagtcgtgtccgactctttgcaaccccgtggactgcagcacaccaggcttccctgtccatcaccaactcccggagctttctcaaacttatatccatcgaatcagtgatgccatccaaccatcccatcctctgttgtcctcttctcctcctgccttcagtctttcccagcatcagggtcttttccaatgagctagttcttcacatcaggtggccaaagtattggagcttcagcttcagtccttccaatgaatattcaggactgatttcctttaggatggactggtttgatctccttgcagtccaagggactctcaagagtcttctccaacaccacagttcaaaagaatcaattcttcggcactcagcattctttatggtccaactctcacatcctcacatgactactagaaaaaccatagctttgactagaggttgttggaatgatcaactgggatgatttatatctataggaaaacacatggtctgctcccactcatgtatttaaacacacatctaatatgtgaatctgcaaagagagatgtctgggaagatgtttaccaaaatgctaatcttggtttcttctggggttgagatttctttttctttctttttaacatttatttatttggttgcaccagattttagctgcggcatgtgggatctttagtagcagcatgtgggatctagttccctgaccagagatcaaaccccagcaccctacattgggagtgtggagtcttagccacttgaccaacagggaagtcctgggatgggatttcttaagatttttttccccttatttttctccatactgcttgggccgctttgttttggggatttaaggggcttttttggtgtgtgttactttgttttttacaacgattaagaatatttattaaaaaacatatctcataaaatgagataatgcatttaaaaatcacatacagtaagtgcttctgctgctcctgctaagtcactttagtcgtgtctgactctgtgtgaccccatagacggcaacgcaccaggctcccctgtctctgggattctccaggcaagaacactggagtgggttgccatttccttctccaatgcgtgaaagtgaagtcactcagtcatgtccgactcttcgagaccccatggactgcagcctaccaggctcctccgtccatgggattctccaggcgagagtactggagtggggtgccgtcgccttctccgacagtaagtgcttaatcaatgataaatgttttactgtgaaaatctatcttgaaaagatagctttttcaattccagaaaaatcacaatttaactatatttaaatctcagaaagcctaatttttaggaaattaggaattagtcagtgctgggtttaaatcttagttctatgtctgtttttcctcctttcaatctttttagatgatatatcttaagcaaaacactttgccacttataaccttggtttctccatctgtgaaataaaatgcttttcccctaatccaatcacccaaaattctacacaaacttcagaacattttgtgtttccatttaccttgaacacacagaatacctagagtaagtgtgactgtcactcttcagagcctataataatagaaccttgccatgccaacacagctaattcactacataatatctacttccctttctgtttaccaacagaacttggattttatccagggcagcaatgcgcccagttaaaaatgctcacctcagacttcactggtggtctagtggttgagagtccatctgccaatgcaagggacatgggttcaatccctggtccaggaatattccacatgctgtgggaactacggcaaagcaccactactactgaaacccgtgtgccctagagcccgtgctctgcaacaagagaagcgacctcaatgagaagcccatgcatggcaactagagagtagcccccactcattgaaaccagagaaagcctgtgcacagcaatgaagacccagcacagccaaaaaaactcacttctcagatttccttgcagttaggggtagccatgtgacccagtttgaccgaagagatataagcagtactcttatgtttcttgtatattacaaggaacttctaagaaaatttgcatatacctgatcaaaagggagatactcatctgatatacattctctgcccttgaatattccctctgttcccacctaaagcatggaaatgacatttagaggagcagtagccatctttccagctacaagagccacacattaagaatgacagagccagaaagcagaaaaaaccagatccttgctgacttcatagagatgctgtcctaaccctggacctcatactctaaatttcatgttgcattagaaaaacaaatctttagtgggttaggccaccattgttgggatttaggtatatgcaaccaaatgtagtctcaagtaaatatactatcttatggggttactatgagaagtcagacaagatactgtttgtcaagtactcagcccagtgcctgaaacatgggcataacttaatattatttgacaagttccaatcttcttcctaaagagagggaactggaaatctttcagagagcatgaattcataacagaaagctaagaactttatttgttcatctgtaaagttcttagtgggcttccctggtggctcagtggtaaagaatccacctgccaagcaggagatgaaagttcagtctctgggttgggaatatcccctggagaaggaaatggcaaccgactcccatcttcttgtctgagaaatcccatggagagaggagcctggcgtcgcaaaagagacagacatgttagcgactaaaacaaagctcttagaatgatgcctggcacgtaagaagcactttataaatatttgatcaaaaaatacaatcctaaaaaatgaatactgaacgcctgcaatgtaccaggcactgttctagacacttggaaatacagacatgaagacaacgttcctgctgttaaggtatcttcattttagaaggagcagcaggagaggaacaatatagaagaaatggtcatgaaaataaagaggatgatgcgctagagctaccagatctcctcaggtggcgtatacagggaaggcctcttgcaggtggtgaccttggaagtaaaatctgatgtgtaaggagccaactctttggagatctgggaggggtgggatgggaaacattgctgatagagggaggtttatcaaaagaaagctctgaggtagttagttatgagtctggcactatggagaaaaagtcaaatgaacttatctatgaaacagattcaggctcacatagagaacagacaagtggctgcgaaggagagagggagggatggagctgaagactggttattagcagatacaaacgattatacatagaatgggtagactacaagatcttactgtatggtacagggaattatattcaatatcctgggataaaccataacagaaaaataacattaagaaaaaaatgtacatatgtataactgacccactctgctgtagagcagtaattaacataacactgtaaatcaactacattgcaataaaaaacaataaaattaaattttaagaaaaagtagattgaagtataacttattcagattcttttggtagtcagaagcctactgagttagaaggagtgaaaaaagttgacatttatgctaagaatccaggatgacaggacccaaggatgaacatccagctggaccaaatctgtactgcatccagagacttaaacactagtaggactccccatgcttcatctacctctctaacatggacatgtgtttcattcttatcttcctcctggaagatcagctccatctgatcttatgaaccatagggcagaaaaccatgaccaatcatgttagatg

SEQ ID NO: 56082 - DNA, 1815 bp, Bovine  19866880756345
  misc_feature (1)..(1): n is a, c, g, or t
ntaagcagagtaggtgatagtgtcaggaagaaaaagcaagcaagtggcaatctggatatctgcctgcaaataaaagagatgactgccgtcttctccactggctcccgtcttgccctataaatctcagttcactaatccaagtgttttcatatcactgtataatacagcgtgctgtgtcgggccccgtcatagggaaattaaaaccaaggaaggggctggagggattcaggctaccccattcttccatttctcttgtttacactaatctgacggtgtttttccatcttctgccataaacacaacacgggatgttttcagcatcaaacagattaccttcttccacccataaaatggaacttcagaccctgagctcaacccccagaaccatgcaactcagaggccaggagctaccctggctattgttgacacttactccctacaaaatctaagaaccaggtcatggagagttccctggtggtccagtggttaggactcttggcactttcactgccatggcccaggttcaatccctggtataagaaccaagattttgcatgcacagagaagggggaaaaaaaaaattttttttttaaaaagcaggtcataaaggaagtaccagatccataagaagagtccctgagtgggaggcaacatgatggttaagaggagcattttaatttcatctccactacctactagctgcatggtattggacaaatcacttaacctctctgaaccttggcttcctctctgaacctcagcttcttcaaataaaattcagcgataacagaattaaatgtagaacataaggcacttagcacagtacctaacacactctaagtgctatgaaacctactcccaactcccagccttcactgcgctgttcctactgctaaagcaaacttccaaaaagctgcatagctcagcccttcccctcatctcaaaccttaaacatcaccttatcaacgagccttccctcactaccttaaataaaataaaatactactcccccatctcatacacacaccctgcatcccctcttcatcttggtccacagcacaaaacactacttgacattttacatacacacacacacacagtttgaacaatgtgggtttgaattgtgcagatccatttatacacaaatttttcattatagtatctgtatttttcttttagagacctttaactaagtgtggggcaagtttgtgttcaattagagatcataacatatggaattcaaagaactagggtttgagtcctgattctatccaaactgtttcaggttcttgtgcttggatgagtcatttatcaaactgtttttgaggcaaagatagtagtatgtgggttttctactgagtgggggtaagggctcctaacccctgggtaaagggtcaaatgtacatgtatttcttttaaatatatataaataagtgtatataattttttgtatcctaaaagataaactccaagaagccagagctttggttctgttaactgctgtatctgcagcacctataaaagaggttcttggcatacagtgggcatttaataaatattaactgaatgaataaacagaagttgtttttctgatgacgatgacgagaagggccacaagagaccatacaggccagagttcttcacagggtaggaaactgaagctgagagacaccagatgacctgccctctggttctagcctccctagaactgtgtggtggtggaggctgggagccctgactcctggtgccttgctctgcctcgagccagcctgctcagaccaacgactcagcttcttggtacccagtgctcctcat

SEQ ID NO: 56083 - DNA, 1589 bp, Bovine  19866880777316
  misc_feature (1)..(1): n is a, c, g, or t
nggtacagcccgcgcagctgaaccgctgcagcagtcgccgccgccctccattcataaaggaaaaaaaaaaaaagcaacaacaacctccacccctctttgtaaaagagcgacggcccctggaggagcgagagccaaccccagcaatcacgggttaagtccttttccggccccccattcataaaaaaaggaacgcggcgcatgcgcgcgcggggtctcttgtgcccacccattcatagaatcgcgagcggcgcgcgtgcgcactggagctcccttccctcccattcataaaaaagccattttcccaggcagtggttgcaacatcgccgcggaggcagtgagagaagctgacagcgcggagctggcgctgcggagcgcagggagccgagccggttcctccggccggcgtctgcgaggatagcggcgtccgatccgctcgggttcgggggtttacacagacgtggagcaatgcttgtgactctgcggctcctcaaagtaagtcctcgaccggtttcgggatgtgaagctacccttctctgagtcgcaacgcgactccccctcgggctggggcagatgctgcgctatttctatacgcgcctcaatgttctttccctctccctgcgcctcctggagcagctgcggtgcgccgcagctccctgacgccctcggctgggccagttaggcgccgggggtgctcacagcctggcaccggcgtttccgacccccgggcattgccaagccgggctttcccactctaccactcagaagcaccgtgcgtgtcccgggagtttgcttctggcctggcccctttccgcctaccactacccacctcgggtgctggaacaggcgattttgggctccgtgaggagccacctcttgggtccggcgggcgccttcaccctgggcggctcgcccaccctgggctctctgcccacggtgccagtctgccgtagatctccccagcccgccgcagaggcctatgctcgacgtaggttttagtttacccttcggagccgtgatggactaggtttctttccttctgcctacccctcgatggtcagcgcagggctggcccgggactgggcatttctgctctctctttggtgaggcggttcctcgccgtctgacctttgctctgctgccgcattttatgctgtgcaactgccttgcagttgccttcctttccccggcctctgcaggggccaaggctcctcggcctcctcgtgtccccctatactctggcaccgaattgtgccaggccccgaggctcccggccgctctggggctgtggtgggggctgaaggtgcgtttacataacgccaggcgtgtgggagctggaggaagaggttgcgtgcgtaggagagataagtctcccgccttccctccttccttcttggtggtaccaggcttgacatcaccgagaagaaagaaggacagagacggtacgttatgaaaattctgaatcgccaaggcttgggaggcaatgaaggggggtaagggcaggtttggccagccaggacagctggagcttggctccatcactggggccaaggctagggccagggctgtgcccagtttcccctccctgcaga

SEQ ID NO: 56084 - DNA, 878 bp, Bovine  19866880819777
  misc_feature (1)..(1): n is a, c, g, or t
ncaaagcgaagagaaagcagaccccctttggagagatacatttattatctttgggtaggctgagctgaagtatagctgagcaaccagtattttgacatttatctgttttcctaatgctttatgggttctatctaaaacccatctaatgaccttcctaccaaggctgaacaatttgctgatggagctgcaggttgctgtgggccttttgtgtgtgtgtgtttgagtggctttaatttcatttctggaataaaggaagtgcaaagacattaactctgaatccatcagagaaagaactctgtaattgcaacttggcagcaaaatgtgcttgtgctgtgtgcactctaaaagccagtgatgattaatcctgcacatttatctgagttcaagagcagacacgcaatcatgacaaccgcagaaggcaagagaagattgtgcttgatcattatagccttgggcctgccggatggacatgggtagcagcatccaccagatctcagccaagaaatctggacctgcatgtccacctgtgctagccaccagccaggtgtggctgtttagcacttgtggctgatgtgaattgagacgtgcctcaattgtaaaataggccctggattcaaagacttagtatgttaaaaagaatgtaaatatctttgtattatgtatgttaaagtaatcatatttgggggtgtgttggattaagtcattatattatttaaattaatctcatccgcttctttgtacttctttaatgtgtctgctagaaaatgttacatagcctgtgtggtttacctttgtgtctgatactgtatttgtcttgggcactgctgctctacaggttaggcagacgcctcttgggtttgtccctggctcacagtgat

SEQ ID NO: 56085 - DNA, 1684 bp, Bovine  19866880872713
  misc_feature (1)..(1): n is a, c, g, or t
ncatgttttcatggatctaacaaggaaaattcgatggggcacattaccctgcagtaactggcttcttaaagacctatcatcaaatagcaaccccacagaaagaaaatagaaaccaaagagaaagagaagagagacagaatagattattttcggtctccagattctgtaagaacatgactgattacaataaccattcagaattgatctccctcctttctctagaaggcatggagacctgccttgctgacaaccaagatagttctcactgctatggagaggggactgtagcagatactggagaaaggaaagaggagggggttcaggaagctactgcctggctggggaacgtggtatagaaacaaatcatgagaaggtcacacgggacagcactgacagaaacatgtgcaggggccacagaggcccgggtgggaggaaaggctcttcccaacggagatggagaaagcttacccgaggaggtgctgtgcaagagatgggcaggtgtctaccaggtggcaaagtgggaaaggaaagcaagaccatggagtctcacctcgtccttggatcaggcagtggagagtcagcctgtaacaagtcacacagtcaaaggcaaccctgaaaagcctgcagggagatggatataccatctctcggaaatctttgggaggggttcaggcagctatgtcataggaatgttgtgagtaagcaagcactctcgtcacactggcaaggcgcccccaggacaatgtgggtaacagcagagccgtgccaccctttctcccctgggatcacacacgcgtggagaagacaggcaggcagatcgcccatgctattcatctttctctttctgtctctctccccacccccaaatctctctctcctgggcgagtaaagttgatttcctttaagtaaactaggcctgtgtcatgccgctttcctgccaaatacaggatatcagcttggtattaccaaactctgctattaagaatgggacttccctaagcctgggtttctacatccctaatacaaggagaacataaaaaccttcttcataaagttaaggattaaagaactcacctgtgcagactacatagggctctgcttggtacagagtaggtggttaacagctgtgcactgcaattattattaactgcaatcagagaaaagacagcatgtgttcagacacagacgtgcaaaggagaatggtatgtttaaaggatggtgtacagcaagactaacaagaggtaaggctggtaaggtaggctctaaggaatttgttaaagttctttattgcaggactaagttcagtctccacctgtcggcaagaaggaagcatcagagtctttacacaggtaagtcataactctacatttaaactgagatagctctggttataatacggaagagaagatgggaaaacaagccaggaagctactataagagcttggccttgagataatgagaaccagaattgatggtggtggtggtagtgctgatgatcggctgtcttagtgtgggttccaccaaggttgggagcagatcccaagaaccacaagtaagggaaggaaagtaaaagaggaaggggaggaaggtcaacaacggcgcatcactgatcacatctgctgtggaacagagggtgggggtgggggactcggtttcccctgggagcctctcaaggattacggag

SEQ ID NO: 56086 - DNA, 4671 bp, Bovine  19866880897864
  misc_feature (1)..(1): n is a, c, g, or t
naaactgaggaatgctactctgcatcctaagaccacaacaaatcttcaaaattgaaaactccactcttagcatatgattacttacaaaaactatgaaataacccaacagcaaatacaggctcacatggaatcagccttgtgttgagccaatatgtgactgggtttaaagggctgctctgtgagttccactgcaaatgagcttagtgctcaagatatttgagaatgctctcagcttgacttttcagccttaatcctcaacactcctttatgttacaaactgcttcttttgagccagctgcatacttccctacctctcttcctcttcaacactgcctcaggtgactctaaaaggcttccccacccaacgttttccgtattatactttctaggtttatctcaaggtttatctcaactgttacaaccttcacaaatccttgcctatgtctcaactagcctggctctacctgtcctcaacagtcttaaggaacaaagaatcagttccaaggaggcccatcagaccttgttactagagacctctctctggtgtactctttctcaagattccctgtctcctcctttttgcagctggtgatgcaagatggagccagcctctggggaaacccatgggggaaccaaacagccttggcaaggcttagtcctcctgttctaggcagggaaaaggcccttttctccccttcctttctttccttgggtttgaccctcccatcagaatggtaacatcaggatgtgaacctgaagaaaatgcccaggaaagtccctcattgattttaggagatggaagccttggtaggcttgtcagtagccaaaaggagttcctcaagtactgtggactctcccagctctggatttaggggccccaccaaacagagcttagtgattaggcctgaaaggttccttctcactacttacctctggaactagtacaacccaaacagtggcttcaggattcatgattcaaagattaaggaccctgagtcctagtcaaatctcttctgcattgtccaaacatgagataatgtctcctctggtagtttttataacttgccttttaagatagttttttcatagaaacactccttactaaactagaaactaaaaggcaaagactatgccttccttactgtctctatatcccctaccacaggttgttaatattctactctaaatgtgaacagtaatctacccatgcatcacatgattacactgggactggaataaagtttttttctttaatacctttaataaataaagagaactctggtcctggggagatttgagaaattttctggcatcttccgaacttttgcataattgataaatcctctgagaaacaggagaaagcctaatttaaaaaagaaaagtcaagaatgagtttataattcgcatattaagcccagtccccagaaatatccctcctgataccaaatacttcatttttctgttatcagaaaagctatcaaaacataatttcctctaaaaatttcaaaggatttgattttacaccaagttttctatttctcaatgagaacatacaatctcaagagccaaaaaaaagtctcttttgcgcattcagaatctaatttgtgtaaaagaaaacaaaaaataagatggggccaaacatttacatcatttacttttggaagtctcactgagaagcatcatcaaaacctactctccctacccaccccaggatcttagttcctcaaccagggaccaagcctaagcagtgaaagtgcagagtcctaaccaatggacagccaggagtgccaaaaccttctgagctcccaaaaagtattccaagataattaacacgaaaaacagagaggttataaacagtgtttttctcaaataaaaaaatgtcatcctttcttgttatggcttctttttttttctgtcaacagtacacaatgctgtccactagatgtcaggctgtccttacctttacaagaattctgtctcaactctaaattctatttctctattcttaatttaggagtcagcagggaagatgatgagctccctccagtggtagctcacacactgctggccctcctcctccagagatggcccctggtcttaagacacatttttttcaaatggctttacagagctataatttacatatcacaaagcttacccatttaatgtgtacaattcactggctttttagtagttaaaactataatccaattttcagaattctttatcgtccctaaaattatctgtacccattaggtagccactccccatttcctaccctcctcccatctcaccggctctgagcaataactttcttttggatatattttaaaatatactcaagcagtggaagatgctttgcactcagtcagaaatgatttctggcagcaaccaagagtcatcagcactgagcacagtgaaaactaccctgtttggcatcaaaatcatcgacaatacaacctaactccagtcaaaggatgggtgccatgtgggaatataggtcagttttgctagatatttcaattttaaaaaggtaaaaaaattcagatattttatgtgaaagttcttggtttttatatgatgtgtgtgttaagtgtgtgtgttaaatcactccagtcttgcctaactctgcaaccctatgcactgcagcccatcaggctcctctgtgcatgggattttctaggcaagaatactagagtgggttgccatgccctcctccaggagattttcctgaccagggatcgaacccacatctcatgtcttctgcattgacaggcaggttttttttaccacttgtgccaccagggaagcccttttataatgataactaaaaaaataacttctgaaagtaactacggaacatacaagtcacaactacaggctagatgtagcttatgagctaccagctcatagacctggtctttgcaggaaaccatccccccttaaaaaaaaaaccaaaaacagtaacaacaacaacaacaaaagattctctctgcaaggagttccaaaaatgactcaaacattggatccaaatgtatgaagtacatctgaagtctcaccattttctgcttaccactaagcagtaagacagcaagaatgatcaattacaaagtactataaactcatctcccatgaaactttaatataggaaggaaataagcctattagatttttttaaattatctatgttgtcaacaatcaacctaaaattatgcttaatggctcttctttggcttattcaggatttgcttagactttaggcttgggagaagatgaggagtcagactttctcttaaagatacagtctggagaataagcaagtcaaggaactacttctctaaagtgactcccctgtaggttgtttttttaaattattaagtttctcagtaatcaagacaagaagtaaaaatcactatgtctctttccttggaatgctgtgactaagagtagaataaaatgatgctactggggaggtaggggatggcatcatgaatgacttgtattctctaagtaaaatttagagtcatcagtgcatgactctgttacccaaggcaaagcaggtaggccctgaatatatgaagcagcttttggtcatgggctctacactgtgctagccagacccattagcaaccctgggaaccaaagatccaaactgaggagataacaaaaagacctgagacagaagaaatgttaggataggagaaaatgacgccacagaagcagagtgagacaattataccacccttaacagccacaagatgccccttctattttcttgtagaatgatagcaatgatgatggtctgctattgtatcatacaaattttctctacaaagaatgaggaagccaacagtattcaccacactgctcatttctttaagatgtcttggaaaaaagttacactaataagtacaatcttaagaccaactacctgaaatggccggtatgtttaaaaaaaaaaaaaaaatcttattctcatcaagagcaaactaaagaattctggacagccaatggtggttcttccagaagttatgcaagacaatatattttctgttttctactgatatattcaactgaagataggccacatacactcatgagtagttcagtaggtaacagtatacctataagcagtttggggttgagcttgtgaaccctttgaggcaataactcacaaggcgggaaaaaatctaaggactataaaaagtcatcttattggtacacccctctggctacatggaaaatgtgacaagtgtgtatggatgggttaggaaaaatttatcaccactaagagacattctataaatatgtatgttactctgatggtgataacagcctaacctttgacatatttttaaaattatacttattatcactaatatattactgtatagtagtaagtgagatgaaggtttactaaaagtaattttacttctaaaatttaacataatcttttctctcctttgtcttttttaaaagcacttacctagaaccaggaacacccaccagagccagtactgaccatcaaaatatccagggaagtaagtggaaaactgaaaaataaagcaaaatactttagagaacctctgcagatattatttcacattttagcttaagagtttacaaaacacaagattttaccttgtacacaaatgctgttgctcatttagt

SEQ ID NO: 56087 - DNA, 854 bp, Bovine  19866880931054
  misc_feature (1)..(1): n is a, c, g, or t
nacaggtgaaatgaagcttaaagaacttaagttcttgaataaatcaaagtgaattgagctgataaagaaggtcatggtagatgttgaatttgagatgtttccaattttagattttttgttcttctgtggatctaccacatgttcatttgatgttgatgttgcttggcttgtcaagttcaacttccaccattagatagataggcttatgttgattaaaactttttttaatcatttaattttttaaatatttccacgttcatctattttgagatgcagaggccgccttcatagaagagggtgtattttcagaaccaaaatgttcctggttcatagatggaaccaagtaggtcagtattttatgatgccttttgacttccaaattcaatcccagctggacaagtcagcagggagtgccacttcctgaaatgtgtccttatgctgattgttaataaagaaggagcagtggcaggaggtgtgtgttccaggtcagagaggttggggaaatggctcagcagagggaaccaggcttcttaacccctggacctctcagctcttgcactgcacgcactattgtattaattccaggagggaccatcataaatagtagtattagtcaaacggatttttttaaattgaagtatagtcgctgtgtagtattctatgttacagatgcatgatacagtcattcacagtttttaaaggttatcctccatttagagttattataaaatattgactttattccttgtattgtcctctatatccttatagttattttatacatagtagtttgtaaatcttttcccctagtccctgtaacgccccttccccctcccctctcctcacggaaacca

SEQ ID NO: 56088 - DNA, 898 bp, Bovine  19866881158404
  misc_feature (1)..(1): n is a, c, g, or t
ncgagaggaggtaaaggctaccttcacgccactgcggacctgggttggaaccgtccgtgttgctgggggcggggtggtggtggggaaacactgcgacctcaggatcctgggctaagagctgggtgggggaggacacacctagatccagggatttctacccgccgcagtcagagggcggggaacgggaggacccctgctaggggccttctctttctctagagtaggggcgtcgggggggaagggtcttgaagctgtgtttaccaaaaattttaagaaaatgtcaaaggtccatatcaaagaagggcggagttgggggttactgagtgaatctggttcccttcctgaggctgagtctcccttgaataagtgcagagcacccctcccccacctcttgggtgtggacaggactgggccgagccttttccggccctagtaccccccggagtggactggctactcagctagagatctggctctcgcctggcagcgccccacttcctcccaccccagtgtaatgtccgcagtgctccggcgtccgcccgtcctctgctgccccggctagtgctcccctccactcccgcgtgtttcgcaaccctcacgggacgcaggcctaaaggccacagcctttgctgctgtaggcgcctctctccaaccgccctgactagtgcccctcgggagaagcaggagcggtgcagaactggccaggtggatgggtggagccgtctgcgccaaagatgctgctggggtggccgcgggattaaataacaacagggctcttgagccgcagaggaaatggaaatggccgggatcttttctttgcagttaatgatggggcgggtggggcgagggggggaggtgggaagagcctcagcctcggcgggtaaaagaaaagcccccg

SEQ ID NO: 56089 - DNA, 1563 bp, Bovine  19866881325670
  misc_feature (1)..(1): n is a, c, g, or t
nttaattgtgtgaaaagttaaggtaatagaattgtgagcaaaagcctttgttgacaaataaagcctttggaaatagctgcccattccatttgagttaagtgataaagcagtagaaaccagattgatgagtattaagcagaaaagttggtagaaaggacttttcctttatctgttggtggtaaattttattcactggcttttttcttatatatgcagaattgaaccattggtctttgcccttaaatcaaaggtgcttttgtttagtttggcaggtcttgttattaaatggtgaatgatgctgacttagtagaaaatcagtgtctgtttcaacctctgtgtcatttgataagtcagcctttaaactgtactactagttgtactagttgcacaaaaatatcaacattaataagttaaaatcaaaggaaaaaggtaagctattattctgtcacatttaagaagtccagcttttctacttggagaattcctgtctgttctttgtctttcatgcatgtgtaatttttacctagttacaacctaaatatattttttgctggcttctgtaatgagtattttaattgagttgtagccatcctaattataagttttaataactaaatattatgtcattaagtggttccacacataattattcccttggacatttaatttgtttgccattgttatatgcttctctttgcatataattttactttggattaattccttatgataaaatccaaggaataacattattgaatggtcaaaggttacgatcatttttaatggtttttaatgagcttaacaagttgtataaaagttaattttccatttcaccttctagagaaattaatggacttacgaaatgagtacctgcaagcagatgaggccaataaaagatttttggaacagaggtatggtaagagggtgattcagaaggcactggaagagatggaaagtaaggagtggctagaaaagaactcaaagagctgcccatgttgtggaactcccattgaggtaaagtttggggacagacttggaggtctccctacttgcaagcatgttatgatttcctcaagaagccttttaattttgaactaattaagaaaacatatattggtatttattaaaccttcttggaagattcaaatttactactaattattgttattggtattaaatatatgtagatgtcccttttcatacagtgcttccatacagtgatggtttttctcagcttgtatctacctcaaaattgaatgagttatgaggaggccatgttagaactatagtcaactcaactcatctatattatttttttttttaaaaaaggctgacttctcaaaactatttatcctggaatttaacacatctttttaacaagttcctgcttatgaaatacagatataagtcaaaatagataaatctattgcttcttgacaaaaccttaatatgttttaaaatcaaaatacatgtctttgcatttgattctgttgttccaatccattatatctgagctaacctggatgatgatgccccaattactccattaaggaaactggcctt

SEQ ID NO: 56090 - DNA, 2476 bp, Bovine  19866881353052
  misc_feature (1)..(1): n is a, c, g, or t
ngtctgtctggggaaacggagcactcaggagaggccaagtagcactttagagaggccagggtttaggccgagaatagaacacctacgttggaaatatggacttggatctcagaaggagggagaaataccaatatgtggtgttagctgtcagagctggaaggaactttatagatccccttgttcaatggctaatttgtatctgactgcaaccccacggactgcagcacgtcaggcttccctgcccttcactatctcccagtttgctcaaattcatgttcattgagtcaatgatgccatccaaccatctcctcctctgccaccccctttctcctcctggcctcaatctttcccagcaccccagggtctcttccagtgagttggctctttgtatcaggtggccaaagtactggcgcttcagatcccctagaccactgtttcttaaaccttagaagtatgtgaatttcacctcagttaaaaaaaagaataaatgacccccaaagtatatcagtaattgaggatcctcttaaaatgtaaattctgagtcagaaggtctggggtcaggcctgcgattctgcatttctaacaagctgtcagggaacactgatgctgctggtccagggaccacactttgaacagcgaaggatcaaaccagtatttacccaagtatgatatgtacatgtctgacggcacatacagagattttaggtgagtcataaacattctattttaagatctacacagattttcacttaccttcgtgatgtgaagcttcccttaaatgcatttcaggattaaaaagttaacttgaagaaaacagtaataaataacaagagaggaggcatgcataagcggtaaaaattaggcagggggcctgcaattactgaagtcttgaggaatgcttgtaggaagcatctgagggtgcttgaacttgtaggaagagaaagaaattccagtttagaatcaacagtggcaatgcaagagggagaagcattgcttgatggagcaaggtgactaacagcgaaggtgactgagcccatgagcccagcactgacctggagcatgccatatactctgcacaacagcccagtgaggtcactgtcagggttatccctggtgtccagatgaggacaccgtgactcagggaggctgtccaatgtcaaacagctagtaagttctagagccaggacttgaatccagggccggaggactcctttctctccatcacaccacagcccaatccagcaggctggctgcttctacaacatgctcctccttccaatgctgctgctgctcattttcttctttaaaaaatgctacatggcatgcagggtcttagtttccagagcaggaaccaaacctgcgttctctgcagtggaagtactagacatgcaagagtcttcaccactgaaccgccaagaagtcccactgctcattttctactgatgcagctcagtgtaaccttgttgcattaatgccagcaagaatgatgtgatttccaattcactgaattctttttagaaatcacggactgtcattcccattttcaagaagacagaccgaggctaacaagggtcacactgacagaactcagaacttaggtctccctgactctagattcaaagctcttccaacaaacctaccccaaaactccacttcttctgggtgtaactgtcgttaaaaagaagacttccttcccctgactggagtggctccctagcatttgccaaacacatgtcctccacattactctctgtcgtggtggacacatgacaccatttaaaccaattcaaactttaacctataatcttggtgtcagttggtggctaatagctgccttgtaactttaatcggtgcaccagatctccggcaggtgcagacaagccacaaagaaacccactttggatctttgcatgctggaaccatccctagattataaaccaaaccacatgcagtatcaggcccttagttctattgagaatgctactaagatttgtttttttaaaccaacctttgttttagctgttacagaaaggaaagatactttaaatagctcttatagagtggctagtaaataattattctaacccaagatctattcatacagcatctcaacccaaacctggaacactgttagttttcgaggagaaggcattctaaaagcaaggatataagtgtgagacaaataacatctactctagattctggccttaattccctctaatttatgttaaatatggtattttaaacaatcactagttttctcttcaaaggacttccatctagaagccagactttctgactttgctttcttgtcaattcctacaactgccccttcccaccccgctttcttttccctgttgtctggttcaatgctactttatccaaatgctttcatctcttgcattctgttcagggcaccatgatgcaagcacaaactcttcctgtctccttcaatccagaccccattcacccagat

SEQ ID NO: 56091 - DNA, 932 bp, Bovine  19866881520633
  misc_feature (1)..(1): n is a, c, g, or t
nttcaagtttgacatgtcagtggcctaatgagtaacagcaggaatttgcttcatcctattttctctttttcaatagcactttcttctctaaaagcaggtggttattcctctgtgttctgcatctcgattcacttcctgcagatgttctcttgtttcttgagagaggaatcataaacgcaggaaggcctctgccagaaaatgtcttcgctaaataaagagaactctgtcctgcagaaatttgagtttttatatcttccaaacttttgcataattaacaaatcctctgagaaacaggagaaaacctaaaaccagaaacacccaccagagacaattctgaccatcaaaatatccagggaaataggtggaaaacctgacaacaaggatctgcttgattagagagaggccaaatcctgaaatggcctcatactttcctgcagttgaagtggccaggaaagcagacaggaaatacccaatctagttttaaagaagaatgccataaaaaagttcacatgaaaatcctgttgttgcctaaactaagttggtcagcattatcgaagtcatcctgacccacaaaatactcatctcttccagaaactgaagggatagtagtttcatgcttgattctcttgccttcatcataactgggtagtgttgttcagttcagtcactcagtcgtgtccaactcattgcgaccccatgaaccgcggcacgccaggcctccccatccatcaccaactcccagagtccactgaaacccatgttcattgagtcgatgatgccatctaaccatctcatcctctgtcgtccccttctccccctgtccccaatctttccgaacatcagggtcttttccaatgagtcagctctttgcatcaggtggccaaagtattggagtttcagcttcagcaacagtccttccaggaatattcagg

SEQ ID NO: 56092 - DNA, 887 bp, Bovine  19866882004152
  misc_feature (1)..(1): n is a, c, g, or t
nggatgtgctcttctgattggctgaaaggctttctgagataattattctttttttcattacccttagacgtttcacctcctcctggaagccttggcccagacagtggaagagaaatggtgattctattggcatactgcccttctccactccatcttcactcccccaccccagtgcatttaatgagttcacttagtgcattattgcatcttatgtaaacactccaggtacttggactttgtttaatcactgtcccttcagagttatcttgtaaagatggactcgtgatgcattacatttttaggtgctttacagcttgcaaatcttaccctcatccgtgatgtcagtgaactggtgccttgtcacttcaaagccctatgtacaacagctttttcagagttaaccaagcagaggcctagaagaggggctgatgaggaaaacgagggctatcaaaaatttaatccccatttaaaaatccccagtatttaaatattgatttgtgaactgtgacccaacagagagaatatagaaaaatagctctacttactgggtgaggtcaacaagcatcctgtgtttccatgtgctttcttattttaattctcaaagccaatttagggaataattttttatctcccattatttccataaggaagctgaagcccagggagtttacatgaagtcctcatagttaatacacagtggacatgtgggcaatggatttctcacccaggcctgtctgtctgcaaagtgagttgctgagcctctcaacagaggaataacagagaaaaaaagtatcactcagataccacctccctaacacactgttggcaatttaggtttatttcctttgtttatctacctaaacaaaactaaattagaaaaacaccaa

SEQ ID NO: 56093 - DNA, 2395 bp, Bovine  19866880463630
  misc_feature (1)..(1): n is a, c, g, or t
natttttcttatagaagttaaatatatttgctatatttatctggcaattgataaatatattttacctcagaactctgtaataaacagaggcttcaccatcatcattataaaaaagctttttggaatatttttttttaattgatgtttatttcctaccagacaaggctgtcagatttgcatttttgatgaaaacttcagttactccaagagccttcaaaacatcttttaaatcaatttcctgttccactgtgaacctggagaacatagagcggaagaagtatttagttacagcatattgttacctgggacaagaataaaatgttagatatgttgattttttaagagtctattttatagaggataaattatgctaaaactggcttttgactgcatgtagcatttggttattattgtaaaaagagggagtattaaaaagaataacataacagaatagtattacattaataaatagggagccatgttggtcttaatatggaatctcttccaaatcaatgcattgtatcaccaatatttccagtgaaaaatatggaccaaatatgactgtattaataaacaaccacagtttttaaaagcaaaggctttttattaattttttttataaaatgtgaaaacagctggttagtactatttccttttaaaaatattgttgccttctaatcaaaacagatcataaatatacaagtttttaggtaatgggctgtgtccttaaaaagctaagtttgtaatagtcactaaacgttatactagcatcatttctgattttctggttttaagaagaatgacaagagaatggttgctataaacaggagtaataatcaggagaaaaccaacagacgagtaaatgtatagcaaacatattaaactaagtactaaatgttgtctatatccaacagtttaacttgcacttaaacattgtttactttgataccacaaaaagcagatagtgactgtgaaaataaaaagtgggatgagtaggaaaatatactgcagaatatattcaatggcttgagtgaaattttaaagtgttttctgtgtatgctttgtcatttatttatttgttcatttacttattggtcacagatggagcttactatacaatagaaacttttccaacagtataaaatagatcaataaaaacagattaatttaaatatcactacagccctttgaggtagctcttattatctgcagttaatattagaggaaactgaagggcagagaaatgaaataacttgattaagttgtgatggtggtggtttagttaataagtcgtatctgactcttttagtcctatggaatgtagactactcagctcctctgtccatggaacttcccaagcaagaatactggtgtgggttgccatttccttctccaggggatcttcctgatccagggatcaaaccaaggtctcctgcattgcagattctttactgctgagccaccaagggagctccaccttggatcatagctaataagtggcagagctgagatatgatccaggtagtatgtatatcctgatctgcctaaaatagggacgtgaaggaaggtgtcagtaaggaatcctttttacttcttaaaaccagcttcatttgtttcacacttctgaggctattcagatgaagatggtatttgatagagattgatttggggcaagttccctaatttctgagcctcgattttgggatgcggaaaatggcaataataatgcctacttcacagtatcattgaggagattaaataaggtttccaaatgtcttaggacagtgctatcatgcaggaggcatgaaataaagggcagatactgttaaagtacatactatattgcagctatgtgtaacattcacactgagtgtttaccaagtcccagtgcagtgcagtgctaagtcgctttagtcatttctgattttttgtgaccctatggactgtagctcaccaggctcttctctctgtggggttttccaggcaagaatactggagtgggttttcatttccttctccagaatatcttccctacttagggatcagatccacatctcttacatctcctccattggcaggagagttttttaccattagcgctagtgccaccatgtcctgggcactgtgcaaattcttttttacttagaatctcatttaatcatccctgtgataatctcacacagtcctatgagataggtattattatctctgttccacagaagaactaactgaagttcaacaacactaagctgctgctaagtcacttcagtcgtgtccaactctgtgcgaccccatagacggtagcccaccaggctcccctgtccctggggattctccaggcaaaaacactggagtgggttgccatttccttctccaacgcatgaaagtgaaaagt

SEQ ID NO: 56094 - DNA, 4067 bp, Bovine  19866880484297
  misc_feature (1)..(1): n is a, c, g, or t
ntgggcttctgtgtgggctctggggtgcagggcttcgtagcttcgtgtgtggactcagtagttgctgctctcaggctttagaatgcgggctcagctgttgtggtgcatgggctcaactgctcagtggcatgtgggatcttcctagaccagggatcaaatcagtgttccctgcattgcaaggcagactcaaccactgaccaccaaagaagccctaaaaacataatcttatagctgatcatataaataataatgttctatattagaaaacagaaacagaagaacctgtaattcaattatccagaaatagtcactgtgacttttctttccatttagtcttttttttgaaaagcatgtatatatttccttacaaaataatgtggacatctgtattttttgagttttttcacctgatattgtgagcctttctttcctccatgttataaacattactctaaacaaattgtttagaagttgcatatctttccatcataaggatattattaaatttatttaaccaatgatctttgttggagttttatgatcatgaataacactgttacttcagtggatgactttaagctggttaatcctacattgattaaaaaagcattaaaagagaatctaaataaaccagtagtctcattatgcattttcactaaacattttaaacttggtaaaataaccaaggctttattattcctctttcatactgtcagattttataagtgtgccggtataacagtatgaaggatttttaatctgaagccctcgatatacataatgttttatttctagaaatagctgcaatagattataagttctataggaacagagactgttatctttttgcatccttcttaagtggatgaaataatattagacataattcctgctgcagtgagcatttggtctttacaaaatatcaagtatcttggctaatttacatctgtatttgtagacttgcagatacattgtctatcatacaattgtaatattgatataagcaaagttgctataggtatattcatctgcccatttccacctctcaattgcattactttacccactaatgcttttcttcgttcactcaaactcaaatgacaaaggtgattaaaataacatctttttataaaactgtgagttaaatatgctcttatggtttaactctaccatatctatttgcagctaagcattcactgcttatataataaaacattattgtatgcaataatttaattatatattatattaatatattttataataataaaatgttattagatagtactattaaaggtaaattatactttcctttggagaccttagaatatttttctaggagcaacaaattatgggaaattagtgacatgtacacacttctatatttaaagtaaataaccaataaagacctactttaaagaaattttaatgaaaaaaaaaaaacaataaaaaataaattatggggaattaggaaggaaggaaggagatcagaggccatgaggccatgtatgtcacaggtacagagttcatcaacaaaagaaagagaaagggttacataaggagctaaagaaggcagagtttagtaagctcttaaacttcagtgtgtgcacaagttacctggaagtgtgtggaaaacacggattcccaggccctatgcctgaagcatctgatgtagttagtatgcagtggggccctggaatctgaatttattaaaattattataggcgattctgttgcaggtgatctgagatccctactatgggaaaaactggttgagggggcttggagagaggcaggaaaggaatacatttgaataggaagtgaaacactgggaacagaatgtaagcgtattggcatttatgcaggtgtatgtggaaggaggttgttgataattgtggcagccaccatgaggcaaaataaattgcatttggagtgacaggtggagagttgagatttagagagaactgcaaaactgaagaaactggaggagatgacaggagaataaaaatctaggagtaaactgaaaaggagcatgtgtaaagagtccagctgtctccctccttctctgatctaagcaggcaagtcatgtgctgaggtcatcactcagcaaaatcagccctcatgaagatcccagtggtcattcatgcagaggatagcatcgctctccagagataaggcacattttgcttccattaggccattaacaacacccaatctctcacaagtgactggtcgtaaaaggaatggaacatgatctaggggataggaaccagtgaaaaatcccatcaactcaagccatgaagaaaacagatgtcccttgttcattgccctaaattttgcttaagtgtttttttgtgtgagatggagaacaagtacatttcaaaagcattctaagaatgccccctctttctagattagatcctgaaacacccatcaaaattactgcagttgatcttagttgccccagttgtacattcaggaagagttcccaagaaaagaaaggttagctggtgtgtgataaacagcaatttcccagggctttggttgccagatagagactgacttacctcctcccaattaaatgaagccaaagagcatattgttggcagaattacctgtggcggattcatttcgatatttggcaaaactaacacaatactgtaaagtttaaaaataaaataacattaaaaaaaaaaaaaaagaatagattcttcctgtttgaaaatcctccagcaagttaattcagtcactgctgttaggagttagaaatccgatgaagggacaaagaacaagctcagagatggcaggtgaaagccaacatctctgggctgtcagatattccagatttcagttctcagctgctgagatatatcttcaattaccaagcaggtctgagggtttttttttaataaaaagaatccaatttaatacatctcctcacagtggaagtgacctttggcttctaacttcaaagaaatctttgcaagctgctttaaaaagaaataattgaaagagcagaagatcaatagatatcaaacaaaaaatacagggcagagtttaataactctggtatagctattgcacaaagaaagctaccaaatttggtgtgggggagagggtgtaaataaagacaataaaacctgaggtctcctcagtcaatgagttgactggtccagtttttccagttctataagctttaattccaatcatcctaatcaatgaagaaggtgatttcctagtacaaggatatttaatttgtaaagtagctgggatactaccaccttccggctatgtaatttcctgagtggcaacattacagcttgttatgagagaaatgcctgaaagcgcaggttagattcttggcttccacctgtgtctgatgaaagaactgatgtttttgtcaaaataatgaagcattggcctcttgctcttattgccttccataaatccatctcaaatggactcattatcacccatcagagtccagacagacttgccacaaaaagcaaagtttgttcttgaaccttcaatatcgtttctgtgttcttttcacctttgaaaccgtgcattccagaaaaaatggagtgaggagaagtgggtacaaatggtgccaggtctgactcttagaatacaagatgttagagttgggagcaaattaaaatcaaacccggtggctcggcagtaaagactctgcctgccaatgcagatgtgggattgatccctgggtggagaagatcccctggagaaggaaatgacaacccacttcagtattcttgcctgggaaatcccatggacagaggagcctagtgggctacagtccatggggtctcaaaagagtcagacatgactcagggactaaacaacaaagtttagggtagatttcaggggcctgattggcatcaggagagagtgaagtgtgcctgtggcagcatgataggagtgtcagggtctatgacaataagaaaacctatgttggtctaaaagtattagaaataattttataaattagaaatttataaaatctttataaaatattgtgaacttcaaacataatttctcaccaaatt

SEQ ID NO: 56095 - DNA, 1689 bp, Bovine  19866880506791
  misc_feature (1)..(1): n is a, c, g, or t
ntttttttgtttgggtcattttaggtatatttgggggattttcaaacatttgaggaacttcgaatcatcttgttattatgaaatgatagattaattctcctgtgtatagagaatatgttcttcatgacttcagttcttcaagatttgttaagtcttgatttatattccagcatatggtcaattttggtttaaaaaaatctatatttacttgaaatataattatatttatatttttaaatatttatatcaagtatataatttacttgatatacttacagttgccaggtgctatgttttctgtacgtatatatgaatatatgattatgtgtgtatgttagctgctcagtcgtgtctgactctttgtgaccccatagactatacctcactgggctcctctgtttatggaattttccaggcaagaatactagagtgggttgccattcccttctccagagggtcttcccaaaccagggatcgaacccaggtctcccacattgcaggcagattcagatatttcaaatatgtatgacacttacacatttaggaaaaatgtataatgaggtcaagtttattcatcacgcttctcatatctttgtatccttatgaacttttaatgtttgtcaatatatcagttagtgagaggcatagtaaattctctctgatttcacatttgtgttttataatagcaatttttggtttacttattttgaagccctattatgagtggcaaacaagtttagaatttccacatcttccaacagattaaacctttgctattgtaaaatgttcctctttagctccagctacatttttttaattaaaatataggtattagaaaatatggtcctgtctaagacatgcctaagacactttgtccatgccaaaaaattcttgatatttggtcttgtacaaaaactccattagacatcttgtccataagaaaactggttcacaccaaaaggtcccagatacttggccttgtcgaaaaacattttattttctaaattttacttttaaatttttgtgtatttgctaaattgagaaattatattcatgtatctttgtatgtgttattttaatataactaatatctttaaactatagtactatatcattgacttttaatgtaattactcacatatttggattaaatttaccatttattttcttatttttctaaatttccatatattttacattacttttactctctatatccttttaaacttattatttttagtgttttatatgcgctctttattaggttgtcagttaaatattactttattatccttttagtggttactgtagatattacaatatctattattaaagtctaatataaattagtattttaatcacttccctgacaatcctaggaactttaacatctttatgcttttcctgctttttatattatttttattatgtttttgaatttcagatatttagaaggcataaggatttattgtttctattttacatagtcaatagtaatttagctttatacacgtatttgccttttctgatatttatcattgcttcttttacctatatgcttctttttggaataattttcccactgtctgaaaactgcttttagtgtttctcttcctacggatttgctggcaatgctatttttccagattttgttaggaaatgacattttttcacttaatttttaaataa

SEQ ID NO: 56096 - DNA, 917 bp, Bovine  19866880549383
  misc_feature (1)..(1): n is a, c, g, or t
natcctcacattttcttctctatcttctaacttccaagatctctgctcccatccttacttccacaaagcaaacagaaagaaatttcctcagggtcccatcatccattcatccacttactctcatcttcctgcctatttctcatgctttctcctcatttacaggtatgacatcagcacttctattttcatttgtggactagagcctatcccttcatctctactcaagaccattgatccagaaattcttctgcatcatcaatttctcctcttcactgcatcattcccacaaatgtataaacatgctgtgattttccccatttaaagcagaaaccaaacaaaaatgccctggatccatttctcaatccagcttcatcccattgcttcacatccattacagtgtggggaaagctttgcaagtgttgtctatgcttgctgcatccagttctcttcccatccctcttgaactcattcaggtgttgttttcactctactacttcactagaactacatttggcaaggccactaatgaccttcaagtcactaaattcagtggttggttcctagttctcatttccttgatctagccactgtatttgaaacatcgagttactctcttccctgaagtactttcttcatttggcttctaggaccccacactccactggttttctttctactttataatctcttttgctgttccctactcatccaactaatgtcttaatactaatgtgtccaaaatctcagtctttagacttctttctctcttaactcactccattaatgatcctatccagtctcatggttttaaaaacaatttctatgctaatgactccaatatttataactccatcctaaaccccccttctctctcttgaattccaggcctatatatttacctgcctacttgacattcc

SEQ ID NO: 56097 - DNA, 4311 bp, Bovine  19866880568344
  misc_feature (1)..(1): n is a, c, g, or t
nctgtgcctctcgtgtggtgaacagaagacaacagtgaataagtgaattactttctggaaggtgaacatccatataaagaccgcttcatcttttaatttggggcatagagtgaaatggttagaatggtgtccttaaattagactgtatgaatttttagtgtgttctgcagattttcttttagtgacttgggaagagttatttatactcttgaccttaatttcttcatctataaaatggaaaaagagttcatacctgataagattattgaataattgaataaaagcatctatataaattgcttgatatagttcctgactacagcaagcacccagtaaatgctactatcatcatcgttatcatcatcgtctcattgccatcatcactgatttggcagaaaggtagctggcctgcagcatctggcagccagccacattctttgtttgcctttatgtgaaagggaccagtctgtcttcgagtccgtataaataaagcaactgttgttgcacttatgctttaaacatattccttagttcagaaaaattttacttcctcactaataatgtcaaatactaattaaaaggattctattaagtgcatttggggtactcttatggtgccatcacaatttaaaaatcggatggatttgaaatatctgaactgtggcagattattaagtcagttgaagcctatttcttttgcatggttcgttcagatgatgtgaagcactttgatatcattttagtgggtacatttcagtgtttgacaagctaactttttgtgttgtgaactatgtcttgtttatatattccagagttgatttttcatgagtggtaaatggttggttaacatgagagcttgaaagtgaaatatgaaactacacctatggattgaatgtaatgtgtgttagatcaaatggttagacacgagtaagtaatgcattagcaccagttctgtatcttcatgatccatctgcattcctttgcatgagtagtattcatagtagttttaattcatagtattctttagctctcagttttgtttaatctgagaaggctagtgaagttaattatgttgtctagaaatggaaaaagaaacccaccaacaaccactaagattgctgctaatgttgatatgattgaattcatagtagaggcagctggatttaattatcagcttgcagtgttgtggtttcagcagcaattgctgaggaatggataatgcaagtagccttcaaagccacttacattagagataaaaaccttgtcattcaggcagacagctgactgaacaagtattaaaatgaacaaagatttcccaagggaggttgcagactaaggtttggttttgtctccttggcttcgattcaaatatgtcagcgacacaggatcttattctttctaacttaaaatgttagccattctttagcatgagaggtgaattgggggagagttagagggtgggggcattgtggcagctacagaaatttttagttagctaatgactccatcccttattcggctcatttatgggagaaatgtagaaaagaatccttgggttctaattatcttagtagcattgtctaagtaccaacttaaattctgtcacagatgtgacagagctggctaagagcaacagtggcttggtggtagcagaaatccaatattttccctctaaatcagggtttttcaacagcagcactattgacattttggggccagataattctttgttgttggggactgtcctatgccttgtagatgtttagcagcatccctggttcctatgcacggaatgccggcagccacctcccccagttgtcagaccaaaaatgtctccaaatattgccaaaagtgccctggaaagcaaaatcacccccattatgaatcactgccatacgtctatgagagggatattggtaaattacttttggatggtattacaagtttttacacacacaaacatacccacatctcagacctctatacattagctctgtttgcttttataagtaacatccttacaatactctagacagagctttcagaagcataatgtctatcaacataaattctatagctggtgttgcttctctgcacagcagtccttcatattctcagaagcagccctttagctacataagatatgaaacagcaggatgcaataaggaatgaatgaatctttaatgaatagtttttaatagaagtcacattgttttaataatagggatgataacatgttattagtgctggcaattaattaaggagtccttgccaagataattggtaatcattttcttaatttctttctgtgattcaataaatacatttttttaaagtgtgataacattagctgactgaatcacagttccctttgcatgtagcttagttaccagattgaggttcaaaaatattgagggagtttgtcctgcattgtgtggatgaataaatcaaaagaatgattgcaataaaatgattgcctgttttttaaaagtatgattcaaaagaaaggccctcttaagccccacatggatgttttttgtttgcttttggtcatatgtgtaatccctacttatttcaaagcccttacctaaagaacataggttcgggacagtttgaatgcaggagaaagaacccagaaatctgagcactgatcttgagcacctgtcttatctttagcattctgtggtttactgtttctattttcttaggtctaaaggaagataactccttcttgcctcagccaactggtgcataaatcttgttagaattaattagaaaattcaccatgaagtgttttgaaagcctggaagaaaagtactctaacaccagaagaaaaacttggggtttttcttcctcttcctctctctgccaggtggctctgcttcccgtctattctcatccatcctttctgctgctgggggttgatgaaactgttactcacactctttcccaacatgcattcaaggaacggtattagattcattttgttgagagatttaaaccctaccttgtctgacagactctgaattcacctcttaaatgcattcctacaggccccagtgacagtatcaacaaagttgaaaataccaactttattttttagtcaccttgaataaaaatgatgccatttattttttaacaagtttggaatattctcttacaaacactatcagttctgatgtacttcagtgatgggaatagtatctgtgctattttttgtgtggaaaacttatttctaacagtttccctttttttttttttggtaaatctaattgcttttggttcaccaggaattcatgggcaattgcttttctcactattacaaatatattgcaagtggagcttttatattcagggttgctgacctgaatctgttttcttctcagtaatcttgtgctgtttccaagtttaggaaaactgacagagtttgaaaagacaatatgcgtcagtcagactaggggtgctactgttgcatcctttatacataattgtcaaaaaatcctataatacccaagtgcaggccaatgcatgaaaatctaattgaaacattgcagagatgattcagagacaaacaggaaccttcatttccgaccccaatttactgctgtcccacacagatttcatgttctccatttctgaagaaattatctatatcagacatgtagacttatgatccagaggttataggaaacgtcactttatattaaaaaagggcccacctcatgcctggctttgtgctttactccttgcattaataatgatgtctttccagctttaattctacttctcagtcctgggggacacatattttaattttttattggttgtggtacattttcagcagattcataggaaggccttcccatatgcttcctgacctattcaacctgcagaaagatgtaaatgcttccaagtgtgtgtgtttccgtgtgcttgtgtatgtgtttgatgagaaagaaggaagtggtaaaagttgctttcacctgaaggagcacctttgtgtccctatttaaaatggatataaatcagaattttttatgcacttagtcattttttcccctcctagtaggcctcagcctttaaatttgatagcaaatagattaggaagataaaaataataaagaagtcagcttatccatgatttaatcaatatggtaatccactgaaattctaaaatttataaggtcaaactttagtagaaatttatgattccttatgtagtcagctggtttcccccctttatctgatggcctggactgatagcatttggaaggtagggcactgtgtatgcataggcataatttttactcc

SEQ ID NO: 56098 - DNA, 1256 bp, Bovine  19866880638156
  misc_feature (1)..(1): n is a, c, g, or t
naaatgatgagttgatatttatacaaagcatacccttaattaaaatattatgagcaattaaacccagtgttcacggaattattgtacatttatgtgtaatagagtaaaaacattgcaagggactgttaagctttttgtgtgaatctaattaactttgacaggctccgggcttttctcccccttatttttagaagtgttggtgaataaatggtcttgcatctggaaaacttcaaacagttttgatcagcaattcagatctgatttaaaatgtacgtatcgagacgctgttttaaatacagacttgataggcgtgcagggctcggcttcttgtggcaggaaggcagatgtggaaggcagaacagctgcggactggtgccgtcagcgggtattgttttcgtcacaatttagtcaggccactaaggctgtgaggaggcctttgtatattaggctctggttaatgaaaaggtgaactcactggcttgattccctggagggcgattaggagggagatggttctccttgcctttacgtagtcctgagggaacagaggaaccaggagcaaatccaagttcccatggagccaagggacttcctgttttgtaagtaagggaaagatgccctcctgcaaacagtgaattagaacattgaggataatgcagtttttgttctcctgttgattctctaaaatcccactaagaaactaggaatttccttgtggttccaggtaataacagtaacaacggttatattttattcagcaccagttgtgtagcaactgattggcaaacattatttttattttttaagattttatcgaagtatggttgatttacactttgtacagcaaagtgattcaatatatgtatatatatgtatattattttatatttgtttccattatggtttatcatgggatattaaatagagttccctgtgtgtatagtaggaccttattatttatccatcctatgtataatagtttaactcatcccttttaactcatcccaaacttccaattcttccttccccaaccgccctcccccttgacagccacaagtcttgcaaacataatgtgatttaatctttacccatctctttgaagaagatactagttccaatttactgattcagaaactgagacccagggtgtgtgtcatccttgtaaaggcacataactgcaaagtgtaagtgctattaaaatgcaagattaaagtatacataaacatagcactgaatattgaaatagatacaagtta

SEQ ID NO: 56099 - DNA, 2239 bp, Bovine  19866880661202
  misc_feature (1)..(1): n is a, c, g, or t
ntactttttgaaattttgagttttgaggtatataaaataggctgtagtactcattttacagttatttgttgtgaggcttatgcacagtcatgtaaatattattaattattatgaggtacctttaaagagatatagttttggcacgtatctgtacaaagaaaaaaattaatgcatatatatatatatatatgtgtattctgagagaaggtctgtcttgtctgccttaagaaaccaataaaatctttttccaagagtcacagccaagtcaaaaattgttcttttatgcaccacaagcattttcacagttttatttacaacattaatttcttaaagattttgttgtaaatacctttttcttaacacttcaacctagtctagatcaaaccatcacctgcagagatattcatatatatgttttcttgtttttcaaaatgcagtaatagatcaatggtgcttgctttaaagctgggcggcatgtggtttattcactattcaagaaactttgataaatctatggcaaatctagggagcagacactgaactactctgccacaatccgtattttacaggcactgtgaaatctctgtttctatattaaagccttctgtatacgtaaatccttctatggcagatgccatctggtcagcgtgtggttgtggggcagctgtagaagtcatgctttgttgacctaaatggaagctctgtcttcagaagaagtagaaaaattggctgtttctgtgggttataaagttccaaaccgttgcttgccacctgaagagcattaatttccttttattgcttgtttccatagttaaggagtggcttgtcaaagggctaactgtcccctgtctcttctccaagccattaggtaataaattggatatcatatgtaatttttcaggttgtcttttttttttttttttgtaaagtgaaagttactatgttaaactctgtgccctcaaatgctctttaacctcatataatcttaccttttccaacctgtgaaaactgcaaaaactcttcagttttcaggagaaactcactaggtttgtcactaaatttgttttctccttttaagaatgtttaactttgggggaatcccatgtagggttgttgacttgattagatgtatattttattaaatctgcccttgagacctttaactcctaaatagctgttcaaattttaatgaattctaagaaatcaggaattttgcttaaactttatattgccaagctaataacttttttgatggacatccattataatcttgaagtttaacattgtaaaccataaacacattaactgaaacatcaaatatgaacgtaaaatatttaagatatatgttaaaacattttatattttccagcatgttataacctgtaaacacattcagttatattatttcacttatttattattattatttgtctaagtatggaaattgaactacttgtttcatctgtgaattgagcagattgaagtgagaaggttgatttgatcaatgaaaggtcatatgactagtcattggcaaaagaaaaacaactagaccatgctgctgctgctgctgctaagtcacttcagtcgtgtccgactctgtgcgaccccatagatggcagcccaccaggctcccccgtccctgggattctccaggcaagaacactggagtgggttgccatttccttctccaatgcatgaaaataaaaagtgaaagtgaagtcgctcagtcgtgtccgaccctcagcgaccccatggactgcagcctaccaggctcttccatccatgggattttccaggcaagagtactggagtggggtgctattgccttctccggtagtcatgtatagatgtgagagttcaactataaagaaagctgagagctgaagaactgatgcttttgaactgtggtgttggagaagactcttgagagtcccttggactgcaaggagatccaaccaatccatcttaaaggaaatcagtcctgaatattcattggaaggattgatgctgaatctgaaactccaataatttggccatctgatgtgaagaactgactcatttgaaaagaccccgatcctgggaaagattgaaggcaggaggtgaaggggacaacagaggaagagatggttggatggcatcaccgactcagtggacatgagtttgagtatactcttggagttggtgatggacagggaggcctggtgtgctgcagaccatggggtcacaaagagtcagacag

SEQ ID NO: 56100 - DNA, 1242 bp, Bovine  19866880677155
  misc_feature (1)..(1): n is a, c, g, or t
nattttgcttgcctacactactttatgttaattaatgaaaaccataaattcagagcctttgcaaattgtgctgcttcattgcatttagtgctcttgtaattcctactcttaattaaataatgagcctccagagcacattcctagctgtgagctatatctactgtgttgtagatatagctgggattcccactagccagtcaggccagtatgtcttttctaacaggtagaagagtttatttttcagtttcagtgcctgatgtggggagagacatgttacggcaaaatccacctttgttttgaacaggttgccaggattgggttttcatttgctctttcctgttgagggcacccatactggaagtggtgaattcttttctttctttgtgattggggcaagccacattattctggagacagagcaattagcgtacgtgtgctcttttctttctttgaagacatctcttttgtaattcattcaggagtcaacaaatatgaattgtgcaaccaagtagtaccctggggggtgggtagatacagcagtgaataagactgttcctttgagaaaacagttacatctcccatttacatcaattccaaattctgaaccttttcaatgggaaaacctgtacagtattttgagagtctctgcatacaaaggaattttaaaaacacaatattcataagaagttgccatagtaaaaatgcataatagaggaagaataatttaaactgtaagatcttacaactaatgacaggcttgggttttgcctatgtttatggcattaatccactttcccctcatttcctaaatatatctcctgactggtttgtcatattttacttttttacttgcagtgtctttcattttttatggggttgtttagcacagagtgagataaggcatattttgttctttttatggcataagttattcagctttactgttaggaactaaacatcagttacagtttatttttaatgagcgaccgaatcatttttcatatataagttttactgcagaacagaagcaagtgatccatccaccagtgataagataactcaaggaccaaaataaccaaaaatatcaggagttactaaatgactgcacttgcaagtcagaaatatttaatttaactgacacagctaattgttgattattcataaaccatgtttcaaattggtggattatccaatattctttctttcttcttgatcccccctcagccatttaattcatttgtg

SEQ ID NO: 56101 - DNA, 1204 bp, Bovine  19866880705844
  misc_feature (1)..(1): n is a, c, g, or t
natgagttaaaactcatagatggtaagaaaaataaaatatacaaaagcctgatgttatttacacacaccacacgaaaagaaaatgaggggaagtaaaaacaaaaaccgtcatgtacctccaagaaatgcagcgtatcttcttttctagtaatgagcacactaaactgtctcttgatgctgtattatttgaaaaagtgtaaaataagtttcgtggaagaatcccaatcccattgttctcagttgagaataataataataatacagtcctaaagtagaaagggaaaggagtatctttcaagagtagagatgagccatattgttacctttctcctgtcccattaactaccctttaaaacggtagcaccattcattactgaatatacctctaatatgaggaaaaaacagctaagttgaaattgattcttatttttccaacaacagattagagtgagtgcttcttttattgaggaattcacagatggcttcttagaaatacctaaaatgcattactttgcaacttcctcttcaaaaaacacaaccaacctccccactttttctttctggtacggcagctcagatttagaagctggattacaaatggattagagtcagaagatctgtccctacgtgtgtgaccttgtgcacatcatttaccccctcagtttccttattagcatcccactaggaatactccttgaaacagcaaaggtgtaaatacatattaagaattacatctttataaagttaaacttgcctattcggagcaaaattacctccttagagggaccacatcatgaaactggaactgaatccgtagatctctgtcaacgttttgactcttccttctacagttctcttctctcaaagggcataacccgagtcaccttaagagtcgacttcaagtgccccttccttcctccactccttccctatcctacttctaaagctaggggaaaacagcagtcttcatctccccgccccaagccacaccttcagaggaccccaccccaggcacatccgccctctccctactccgggggcagcagaggccaaactcgcccttcccctcccgcccccacctacaggagacttcctgggaggcgttcaggcccgagcagggcaggcgggcatttacaaacccgctttacgccactcgcgtagggtaacctcgcttacgcccatagggccccgttcccagccctgt

SEQ ID NO: 56102 - DNA, 1379 bp, Bovine  19866880728314
  misc_feature (1)..(1): n is a, c, g, or t
ntcctgttcaaagtgtcccttcagtctgccgtgcactatccacacttctcatcaggacattcaggcctcagctccctccagcctcagctccatctgattccttacagacagcctgtgctccagccaaactgaacactcgctcggcaccccacatccccccagcaccccatcattatgaaatctctcccacctgaaatatcttttgaactgagcctcaggtcagatatccctaactttaataagtcaccatgattataccaaccaaaagctaccactccttaactactacaatattctcttatttttcttatgtcacatatcatgtctaatctcctaaaattatttatgtattaggtatcccctgccagaatttaagctcccccaaattgatccttatgtgtgtttaagaggcacccagcactattgctttctgctttgtactgtctgaatgaaagaacaaataagatgagatgctctgtatctgtggtgtttattttttcacctcagtttgatgtccattacttttgacgctaaattccattaacataaaacatagtaaagactcatataataaacatggaacctagagagtgctgagaatcattttcttctcaggctgtatttaaatgctcatctagttgcagtgaggatccggttatagagtagggctatttttgtaatggaaatgaatgtcagcatttggattaatagataatcctcttggaaggtgtaaggggaaagagaaagagagtactaaatccttcagcacaaagtatgagctttaataaaggacccaataaaataaaggaattaagaagacacagcaaaagccgtattcaggtcagactcaagtatgtggatttgtgctgtactgactcttaacaacctgcccttgtttgttctctttcttcttctgcctgtaagtcagagggctgcctttctcttccagctatggttccaactgaaaccataattccacttctccccctacttttttgcctggactgttgcaacagctgacaaagttgatcttcttgcccccagctgattgctcatccaattcacgctttccagctgctgccgcaggtatctgctaaaatcagagcagtcgtgtcctgttccttctgaacgaaccccaggctctctagcatcatgatccaagctcttaagatcgagcacattccctgccacttccctcctcctatagccccggcttcagttggactttcaggtcatcaccactgctcctctcaccttgcaaatataattcctgacttgggaatggccttgtccccttctccagctttcactcttctacttattcttcaagaaccagttcatatgtcaccatccctgagcagcttcctggacatcattcc

SEQ ID NO: 56103 - DNA, 1669 bp, Bovine  19866880746129
  misc_feature (1)..(1): n is a, c, g, or t
ntatgactgttaccaatagagttgctacataacaaaaaatgtcaaaatctggtaggttaaaaacaacagttattttattgtctcagtttcagtgggtcacggatatgggacaggcttggtgaggtcgttctggctccacccatgcagtcatagtcagatagcagctggaggtagaggacagaggggaatggagcagctgggactaggcaggcacacctcactctctctctgtaatctcaacattgcccagaaggcctctcattcaggctactttggacttcctcaaagcatactggtctcgggcaggcagactggcagcatttcaactcagggctccattgcaagtgttccagtgatcaaggtgggtactgtatctactttccggacctagccttggaagtcacttactgtcacttctgccacattctgttaatttcatcagagtcccaaacctgtccagattcaagcagaggaattagacctcctcttttcatacggagatggcaaagttcagtaagaacatgtggaaaaggaggcattgctggaaaataaaatctttggaaaatatagcatctgtggaaaataaagtctccctcagtgagtttggtaaagttagctaccttttctgtgcctcagtttccttatctatcaaataagtataatatatggcccttcacagtattcttgaagtttaaaggagttaatttagtttaggtgctcagaacagtgcaagatgtcattttcatgtattttatttttaatttaatttaaaatttagattttattatcattagtatcttcaggtctcaattcaagtatcacttctttctgtggagctttcctactattcacagtgccttttcattctctctgcaagcttattatgacttcagattgcttcttttctaatctactttttcagattgtattgtaatttgatgttcataggccaagatcctgcagtgtacgctgaacttccaggagcaggaaacaaaatggttgctccgaaacacaggtttgtttatcagggattgatgtagaccaaattacgggctcaaacagcagcaatgaaaatgtagattttaaaagatggtgaaaacaaggtaggataacacaatataaagaaggtaggatgtacgcaggtaatgagtgtctgacttccacttgggtttacccttccatcaaagctttaaaggttacaattgccttaataaggggttgtaggagatggtgggatttgcaaatgagaaaacagaggagtgagttgaaagctttgggctccaacatctagaaatgagatgaaattggttgtaatagactagctaaaattcagctagctttcttattgctgtaatttcacatttaaagtgtccatatttaaaaacatttgctgaaagacaacttcatttgagaatgaacataagctttgagcctataaatgatataaatctgcagcattctattcattttagaagagaaatcaacattaatgtcaaacgaatacagcaaaaatgtctgtcctccggtaccatatagaaatctacaagatcttgagtaatgaggaagactgccagtgcctttaccaacaagaatgtatttgtaagtcatagaagagtcatgcaaaatcatgcaggacttggtctcctaaccaaggagtaatcatttaaat

SEQ ID NO: 56104 - DNA, 1879 bp, Bovine  19866880750035
  misc_feature (1)..(1): n is a, c, g, or t
ngaaaatgaaaccctggaaacaaatgctactatcttatctttctttggctgtactattaccaaagttcagtaataaattttcaggaagcactcagcatcctttcaaacacaccccaaaacatcatgccattaatttctaaactcagcagaagagaatggagaggttcctcccaataaataaaactccagggtaaattgaaagatccatgcaaaattcttttgttgctacttttgccttcttacatacattgtggccactgtctgaggagttaaatgaatgactggtggtgacaagaccaaaccatgtaacataattggtttgtcatcctttgaaaattctatcctcagaaaaacttattctgagaatgattttgctattttggcccttaactggtttgctgaccagtagggacactgatagtattctattatgccagacaaaattctgtgtaatgctagcaaagcaaaatattttaaaagagtagattaacagtgcaaaaaaagactaattagactttggagttttttatagcactaaattttcctaggtagagatccttgtgagcgtgaggagaagaatgcatattttatttgggccatgtaagaaatcttcctgctcagaagactgcttttacctactggctaatacaaggcatgactaagaagtaatcagggaaatcccacaagccatatgggaaaatcagtttcatcacgttatagccacatcttgtatttcctttattccatgctgtgccagtctcagaaagggctgctggtattggaaacagtaattggagctttgcattcagtaacaaatagtgagattaatattccctttggttaacattatagatacaagtgtatggaagaacagtatgcaaggaagggtggttgcagcgaagagggaatgggaaaaccagtacaattcaagtgttggatttatgtaaaggtagaagtaaaagttatttagtaacctgtatgacacaggaaatttacaaattcagagcagatgccagagccaccagggttctcaaggatccctgctttaataattttttatctgaactgagagatgtctgagacatcccagggactggggaggccatccagtgggtggggtcactcagtgatttcaggacagagactgttttccaactagtgtggaaatacatccatattttaacaatcagtgtgcatatcagtgactgaattctttcatggtgttttatttggggagtttgtccaggatttcagattccgaagtattattctcagcttgaaagtgtaacatttttgattctaagagatttcttctaagcattttctgctatctcttccctttgagtcacagaatcctggtttgtttcttctttttttttttaatggctgaccttggttggtcatgcttcccagctcaagtcctaagagggtcaattattactggtctggtaaaaccatcagcaagatcatttcctgtgtggcttttgatgaaaacaactgtcaaggcactgaccttgtcctaggattggagatctcttcccctgaacccctcctctgagaatggtcccttgaacctgggtcacctatcagtgcttctctttcattcactcagcagcactgatagccgcactgagccgcagcatctagcctgacttggaagaaacgtgactcatcacaggcatctttctaaattatcgtttggaggtgtcaaaacacacatttgtccagtagacagaaaaaacccactggcccagggaagacacatttgtcattcctgaaacccattaatggtttgactttacatttgtgttttaacgtatctcctgttattcagaatttggattgccatctcaattctttgtcacttttgggagaagag

SEQ ID NO: 56105 - DNA, 1424 bp, Bovine  19866880813106
  misc_feature (1)..(1): n is a, c, g, or t
ntcctacataatgttcctcataccgtgttgttcacatactgttgtgcagacatgcttaaatgtttctgtgcttacttgctaagttgtattcaactcttgcgaccccataaactgttgcccgccagatttctctgttcatggggttttccaggaaataatgctgtagtggtttaaatttccttctccaggggatcttcccaacccagggatcaaacctgcatctcccatctccctccctgcattgcaggtggattctttagctgctgagccatcttcttcctcagttagactgaaaaaccgtaagtcaaaaggcatgatactttgcatagagtcagacatgagatagacaagtggttgtaaatagacagcctgtagacttaaatggtcctactgagatcccatatatggtatagttttaaaaagctataattagtttcaaacatttaaatatccagatattttacctgaaacatcactttgaggcttattttaaaatggaaatacattccatgttggacagaataattgtcaccttaccaatttgctattgtttagtcactcagtaatgtctgactcttttgtgaccccatggactatagctgccaggcttctctgtgggatttttccaggcaagaatactggaatgggttgccattatctcctccaggggattttccaagcccagtcttctgcagtgacagattcttcaccagtagccaccagggaagccccaaccccacaaatatccatgccctgatctccagtacctgtgaatatattatatagaaagcagggatcaagggttccatatggaattaatgttggtaataaatggatgttaagtagattatcttggattatccaggtggacccaacataagcaataggtgtcctttaaacatgggaaaggaaagaaaaagaatcagggtcagagtggtacagggtgggaaaggcttcactggccactggtgactttgaggatggaagacagccaggagccaagaaatgcaggcagcagacataagatagaaaagacaaggagaaaactttcccctagagcctccatatcactgccaacaccttgactttagctcagagacccatttcagacttctcatctttagaactgtaagaaaataaatttgtgttcaagtcaccacgtttgtggcaatttgttacagcagcaatagggaactgatacatatgcacacacgagacccctgctgctacactggaacagttccaattctccataattatttcttctccctactattgatataagcatttgatttcatgacacctaaaatagccattcaatgactagatgaccaaaagagatattaatattattagatctaatattaaaggcaaagattgtaatttttaaaaataaaaggtaatgggaaaatgtgttcacaatt

SEQ ID NO: 56106 - DNA, 2961 bp, Bovine  19866880854585
  misc_feature (1)..(1): n is a, c, g, or t
nagtatgagatggttagagcatcaccaactcaacggacatgaatttgagcaaactccaggagatagtgtaggacagggaagactagcgtgctgcagttcacggggttgcaaaaagttgaacatgacttagtgactgaaaaataaaatcctgagcacgtaaaggactctcaaacatcaacaataagaaaacctaattttaaaatttggcaaaagatttacatagagccatcatgaaagatgatatacagatggcaaataagcacatgaaaagatgtccaacattataagtcattcaagaaattcaaattaaaaccacaaggaaataacactacacacctactagaatgtctacaattaaaaaagctgacaatgttggcacgaatgtggaggaactggaactttcatatgctgtgaatggaaatgtaaaatcgtataaccattttgcagagtttggcagtttcttaaaaatttaagcacacatctgttctgtcacccagccattctcctggacaattacccgagagaaatgaaagcatatcttcatacaaagttttatacattaatgttaatggcagctttatttatattaggcacaactggagaaaacttaaagtttgtcaatagatgagtggacaaactggaatatattcatacaatgcaataggactcagcagtataaaggaatgaactatttatacacaacatggataaatcacaaaataattatgctgaatgaaagaagccaggagaaaagagaacatactgcatgatttcattatgtagaatgcaaattgatatttaattacaggaagtagatcacttttttgcctggtggggctaatagggtggggagcagaactaaaaggataaattgcaaagcagcagtatgaaactattgagggtaatgactgtgttcattttgctgattttgatggtgatttcagaggcatatacatatgtcaaacttatcaaattgcatactttacatgtggtttgttgcatatcagttataagtcagtaacactgttaaaatgctaattgtaagggctttccgctaccttttgccagctctcttagggaatatcttcccaagcagacagttttagctttgaataaaatgaataaagatgcataattggtgttgcttagtaccaagcagccctactctctgttgaattatttttcatctttagatgtgactctgtaatacagtttttgtagtaaaaaaaactctgcaaattcagtttctaatccccatgcatgagaccttaatgtcctcaccaaccactttgccaggtgctttgtcattccagctatgcttgaacagggaactcactccttaacaggagtatataatagcttggacagttcttgctcttagaaacttcttgcgtattttgacaagtttctacttatgttttgattgattgggaggaaaatacagattgtcaaagaaaatctttgatatttgaaagcccaaatctgagaatgagataaatctttttaaaaccagcagagcaatatgctgcaatgattggctaatggtgtccctctttaactgccaccaaagagagaggtttgatgtggggagtgtcaggggaatggcccagctagtggggtgatgggttcctgactctctcacatgcttaattcaaagcagacttattttgatctgttttaataccctgctgttgtgcaagttttcttttttttttttctttgtaaatcattggagtggtgaaaagaccttgttctttgagcccagaaaaatgaatttatgtctttctgacacattacgtggatattttacacattagtcatgtcagtaagccaggttaggtgaaatagtcagctattagaattgagagttactacatcaacattgtttctatattagtttactttggctgccatagtaaacaccgcacttggatggcttcaacaacagaaaattgttgactcctatttttggatgtgagaaaatcaagatcaggtgtggacaatttggtttcttctgaaatttctctccttggcttgcagatggccatcctttcatgtatctgcctgtggttattccacagtttgcatattgtctgtgtcctaatttcgtcctcttgtaaggagactggtcatactggcttaaggaccgccatgtatcctcgttttaccttaattatccctttaaagtttctattttcaaatacagtcagtcacattttaaggtattggggattaggacttcaatatatgaatttggggaggcaatgcaatttattccatagcaatttaatttcttataaaatgaagacttgctttttaacattcttttcaacagtgataaggtaatccatataaagcaatagtaaagcatctggcacattttagctacatagtagatgatgatgatggtaattgtgaaataaatgtataaatctgtgcttatacagagaaaatattatttagaccattgatatcctgattgtaaaatgtactgagaggtaaaaggaatctataaagacatcatggaaaattattcaggttacagtgcatgtttattgttatttttagcaggctgaattcaatggcaatggcatgactcaacttttaacacagctctttgctcaactgaagaggaacaatagcccacagtgctctagagcactccaattaagatgcccagtgaggagcaccggctatgcagaatgcatagggtggcagtggtggcaactggcacaatcttcaatttcattcatgtttacctccattctagaggagaaatgagaatttgctccactgcattttaagctggggtcataggaacagttatttttgtttctttccctagtgaggaatttaagaagtcggaaattcaaatacatttgccaaatgcaaatagttttatttattaatggctactaatggtctgtaatcatcacagctgactatgtaaataaatcattt

SEQ ID NO: 56107 - DNA, 1907 bp, Bovine  19866880864515
  misc_feature (1)..(1): n is a, c, g, or t
nttttcttttagataagatttatgaatatgcatttggatatacacacatcaaacaatttgcttcatgaaaagaggtccatggtcaaataattttgaggaacactgataccaatactcctttaaggaaaatcaggcaaaagagaaatcatttaactttgtttaacccaggtttcccaaacatgttgggaaaacatgttttcccattttgagaaattgtttaattccatgatatacattgcacttccctgggggctcagatggtaaagaatctgcctgcaatgcagaagacctaggtttgatacctaggttgggaagattccctaaagaaaggaacagcaagccactccagtgttcttgtctggagaattccatggactgaggagtctggtaggctacagttcatgggtggcaaagagtgggtcacgactgagtgactaacacttgcacttacatgacgtagattaattgttcttccaaatatagaactgttggatggggcagagagtatattcagggaactcaggaatgacttctttggctaaagagcaaatggcttcaattcaagaactacattctatagttacatgggaagaagtatgtttttcaataggagatatttgaatagaacaataatggtatgaaactgtgatttctgaaagttattctggccaaagtatatatgatgaaatggaaagacaagtgtacatggaaatggtagggtgatcactgaaatggagtaccatactctttgtaaataaggtggtaagtaatacggaataaattattgatagcagaaatgccacttgcaatgtaatagaaaaaatactgaacagagatatcacatgtaaaccacatttattagcatatctgtataaaaatgtatactatagcaagcaaatttcagtccttttccccccctcatttcttatttgaaaatcagtgcttgatttctgtgtttgacctgccatgggttttgatattgccatctggcagagcctgcttatcatcttcattatggacctagtatttctctatgctgattcctaattttcttcattaaatcctaagttaagccaatttgaaattaatgagaaataagattaaagatgaaaactacctctgaatgttatcatttattatgctgttggggcacactatttatcactgctcaaatctggttgtaaataagttctctctttgaagagttgacctgcctttacttttgttccttttagtttagtcactgttttcgtttgtcatgaaattggaattgccagatggtttgcaaagactgagcaacaacatttttttaaagactctttatatacaaacaagttagcaaacaaacaaaacagaacgttagctcaaattaaaaaaaaaagttcttaaaaaacaaaacacaggcataatatgagtgtaaattatatcatctcatttataacaggaaatgtataacaaatatgggccacatttcttaaattagcagaaaaatggatctctaggatggatacaccttgtcagggtaacatactcagcattgcagacagccctcggccagcatttttttcttcagctatagctatgtaagtttctattcattttcacaagtggtgctctccagtatcagtagagattttcccttgttgcccacatgagtaattgaagatcgctgatgtggacattaggaaaccactttagtgaccacttcacatccccctactgggaactcagaatatataccttcccttctatgggctcccatttcctcatctgtaaaacactttcatgtcacttcgatcccatttgttaatttctgtgatagattataatatggttcctatatcagccctgggtccaattataagagacagaaaacagaaatttgaacatgaggagtttaatacaaa

SEQ ID NO: 56108 - DNA, 1428 bp, Bovine  19866880878458
  misc_feature (1)..(1): n is a, c, g, or t
ngcctgctatagctcgtgttaaatatttatcacctgaggacagccatctgttctttccattctcatttggccttcgccgcctctcttcctgccaaaagcattagatgcttgatggtttgattccccaaatcagaatgctttgggattgcctattgtatgcatttatttatagcaatatttattctgtctgacttgcttcctgcatttctcaaaacaaaacatccacatctcataaatgtgctatgaaatttctaatcatgttgcaagctacaagcactctaaaataattacttctctttttgcttaaattggaaagctggagaataaatattcagactttattagtcattcatattagaaacaaggcagagaaactccaagttatacttgcatattaaagatcccaggaatctgaaaatattcacgctttttccaaaatgcattctctgggagaactcctctgatgtaattattacctcagggtaatatctacatggatggctttcaaatgtccatcccctcctttatcctctcttcggagtcgcagccacacattccaagttgcctagatatgccacagccccacaaccatcctgggccctaaatgtactcaccacctttcctcttttactctgcttccttcctcctacctttacatccaactcaggctcaaaatcttggttacccttttcctccttatttctccttcccaataaccaaaggatttcaaatcatagcaatctatctcttcaattttgctccccactaacaactaatattatttggaattattgggatatcttcccaaacatattttggacatatcaacaatatactacatgtgataaatttataaacttacttgtttctccttttgtaacacaaatagtaacatttcttacatgctgttctgcccattgatttttcactcaacaaaacacattggaatcatactggggagtgtgtacggtgtttccactctttatgccaccaaatcatcttctctacgggtttaccatgatttttatctaacccaagacattgcaactataggcatgtatattttagattttgatggagaagccaaatcatcttccataaatgttccaatctgcgctcccttcagtagtgtctgaagtaaacatttataattaaaatagagagtcatcctatcatataatcatataaaggtgctcttctgtgttggagagaaatactgttttctattatttcttgataattacaggatagatacaagatgctactgtttcattaagtaaaaagctttctctgactaaaaatctcttttgcaacttctttattctcactggtagggctttgtgcaaaatggcttcactcaaacccttaggtaaagcatttataagattcgacataagagaaatcttttttgtattcacttctccatat

SEQ ID NO: 56109 - DNA, 909 bp, Bovine  19866880890782
  misc_feature (1)..(1): n is a, c, g, or t
ncgtttcagcattctttgtatggcttctcatgttcccctgcctcctgttttagtagcacttcaggaatgtctcccagtctgttttagagacagtttattggctgtgatactgagaaacatgtaacttatgtttcttaacttttttcctactgtattttcctttccaaaataataccacaaatggcaaccatttaaaaagtgggaacttgtcaagagaatttgaaaaaaaaaaatcatccaatccccaacttctgtgatacaatgttaatgaaatattttgatatgctgaaaccttaatttaacactgccctggtaagtgaaactgtcttgtaatgagtatcttcaagtcacagaaagtcttgaaacatttccaaagatgatcagagttctataatacaaaattttatcctgtaataagtcatataaagactttcaaatatttaagacattctctcatcaaagatcaacctcactttagttgttatatcaaaatttcttattgatctttgatcatggtaaatgcttatcttggggatgtttgcgtaactgggtcatttatgataagatgggtattcttaaaaccagaaattagatgccaaattccaactctaataacagctttttaaatcacaagattcttttttttaatgacttgtgggttattttagaccttctaaaaccattattccagcctgttcacttattctttgcctggagattatttctttttattaagcctgcaaaaagttaaaggtcaaaatcccacctgaaataagttggggagtttccaaatagaaattatttctctttcatctttctcccacctgccttgtaatttctcatcccttgtctgccatccaattaatgcacatcagctttgtttgtcacctctgttgagaaatgtggttg

SEQ ID NO: 56110 - DNA, 1154 bp, Bovine  19866880937519
  misc_feature (1)..(1): n is a, c, g, or t
ntttaatccctgggttgggaagatcccctgcagaagggagtggctacccattccagtattcttgcctggagaattccatggacagaaggagcctggtgggctacactccgtggggtcccaaagagtcgggcactactgagcgactaacactttcaagaacaaatatatatgtgcattccattattttatataacatactccatatcacattgtcctgatatctgtatattctcaacatctctctcaaatccccaatgacatgaccaccacacccttttctttcttcctcaaaaaaggaaaatatatcacctggggagaatcaaaacctttttggaaattattgtagtggaaagatcctgaagaatagaaattattctagtcacaaatactaggaatatactctgtgttaaaatgtggaattgattttgatcctgttatggccatactatttatatgttaccatttagatgttatattaaactaaattaaataggtaaaataaattaaaaatttgacttctttatggccattattaattctttcaaaccaaatgagattatttgtgttagatatatgtgtcagtcaagtgttaataggtaattttttcaaaggagtcattaagtacaaataaaaaattaatcccatacaaatcaaatattatcagacattttgaagatgtaaaatatttttagtgagaaatattttagtaagatgtggggaatgttgagtcatcatcttatttttattttctaatagtaaagcaattatcttacctttttaatggtaatcttactacttaatggtaattaaactagtgccattaacatatatagcactggtattcattgactacttaataatatcaagaaaacaataaaagtcatgccacaaaagcagaaaagccattatggtgtattaggaaaatgtttttaaatatatatttaaaatttttttaatctaaattagctttgtaaggatgaataaaataggttgatgctactggggatattttattaagcataagatattggagaacatgtcagctctctattattctatgtgttgatgatagcatttctggcagtttcatttctggcttatttattcacccagcaaatacttacgatgactttcgaaatggttaagaatcacag

SEQ ID NO: 56111 - DNA, 1061 bp, Bovine  19866880953734
  misc_feature (1)..(1): n is a, c, g, or t
ntaagggatttgttttaggtcatacctgaatggtctattggttttctccactttcttcaatttaagtctgaatttggcaataaggagttcatgatctgagccaaagtcagctctgaaaatggcaaatgggactagatttctagttcagggattttcattggcagtagtttttctttcttttactttttaaaaatttattgtatttttggccacacctcatatcttgtaagggcttccctggtggctcacctggtaaggaatccgcctgccaatgtgagagacctgggtttgatccctgggttgggaagatcccctggagaagggaatggctatccactccagtattctggcctggagaattccacagtctgtgtatagtccatggggtctcaaagagtcgaaaggactgagcaacttgcacactcacagcaggtggaacttcccaaaccaggggttgaactcatgccccctgcagaggaaacacagaccaccagggaaccactggaccaccagggaagccccctatttatttatttttaaccaagagctcctgaactttgttagttggaaacacatatccaacagttacagttagatatgtaagaatattattacgagtacatttttagtagaggaagtctccaaaaagtgttactgctaatcttctgagccattagtggcattcatatgataaaatgttaatgtttccttctaatttaagtgcatttctgaacatacctcaaagccaagccatgctgggttgaaatgaggaatgtgattgcatttgattttaatagaacataacattgatggaattgagattgacctcattatgatgctcaattccatactagatctttgctttaggcattaaagagcatatggtaataactttttttaagctttgctgttaaagatttagtagaaagattatctggaatactttttatcaaatatcttatttaaataagaggaattctttaaagcattagcattaaaaattcacagaatgcatgaaattaaatatagaaaaatctattaggttattgtctctctcccag

SEQ ID NO: 56112 - DNA, 1219 bp, Bovine  19866880986015
  misc_feature (1)..(1): n is a, c, g, or t
naggagcctggtaggctacagtccattggatcatgaagagttggacatgactgagcgacttcactctcatgcattggagaacaaaatggcaacccactccagtgttcttgcctggagtatcccagggacaggggagcctggtggcctgctgtctatggagccgcagagagtcggacacaactgaagtgacttagcagcagcagctcaaaacatcattactataatcttgagtctaaagaaggctcgtctcaacaaaaacaatttcagcgttaacccaattccatatactaagaaacatatcactgagaacaaggaaatatgatagtccttaacttacaatagaaatgttttccttaataccttatgtactttgaatgaattcaatttcttgaatacctaaattataaccagcactattctagatatgtcagatatagagctatgacctaatgcagattataagatatacctgaagaccagacgtgcaaagaattaaagacctttaaactgtaaattttcttaaaggtcatgaagaaggagccattttacatctgtaggaactaaagccaggagaattgaagtgcctttgtacaaaccacaaagctaattaacattctgctgggactagagtcaagaagcctgactctcagtgttgctcatcttgaatataaacaaaaagaaaatctgcaggcagggttggcggggatggggtgggtggttgggcggcatgctgtgacacaaagtatgcaaatatcaacactgtgaaaactccaagtttgggcaagactcagggaagggtcaacatttttcaccaaatttaaattactgctgatatcacctgttcctggagccttaatccctaatagtttaaaacaggtcaggtgtgcattattccaaaccattttgaaataggggctccatatatgcacatgaaggaaacaaaaatatgtcaccccaaaacatgcctctttgacataaaaattattttgagctgaaggcaattaagaggcagcaaaagtaggaacagctctctctaccctcccccagctctgcctaaaggcaggatataaattctccttttattcggcagactcctatccaatctagagatggcagcaggggaatcggtaaacaacccaaattcggttaagttcccgcctatatatttatgttcccacagttcaccacccttgggagcctaaagtcactttcctttgtc

SEQ ID NO: 56113 - DNA, 1125 bp, Bovine  19866880989210
  misc_feature (1)..(1): n is a, c, g, or t
ntcttggctgggatgctggagcattcaaaggaatgtactgatattttacaaccttgcatacaattgccaaggggcttccctggtggctcagtggtaaagaaactgcctgccaatacaggagacttgggttcaatccctgcgtcaggaaaatcccctggaagaggaaatggccacccactccaggattcttgcctgggaaatcctatggacagagagaggatcctggcaggctacagtccatggggaggcaaaagagtcagacacaacctagcgattaaacaacaaaaatacgattcagagagcagcaatattcactttaaacagggcacgtcctagaggtgaccaaacaactcatgctgtgagaatctgggtccctctagaaatttcatcccttctgccttactagagaaattgagacagcttactagattcggcatttcataatcatccattgaccacaccgatgtattcaaagtccatttgtttattttgtattggatatatttaacctgatgccttcattagaaaggagtttactttcaagaaaaaggctcaactgctaaacaatataggaataataaccactttgtgaatgatagtggtaataatactagtgattataataatagcaactaagacttattgaatatagcatgacaagtactttggatatgatatacaacttcctaacaacctgcaagttatatatcacattattaagcaaattgatcaagatcactgatccagtagtaacaaagttggaatttgaatcaaagctcacaacgttcctcaacaccaaatttactctcaggtctgaaatttttgagacttcagaagtaaagcactcacaaacaacaatcttgaaaaatagaagctttccaaaatatggccttaaatcccattttaattatttttgctatgcaccattttcccaacatcctagccaggactagaattatgaaaatcactgtatgcttcactgaaaaacagtttcattagcatagaatgcaatccagctattcctcaatgggggacaaaaattagtcttaattgtaaaagcttattaactagagatcgcttttccagttaactatctctattcaacattagaaaaatgctcatcaa

SEQ ID NO: 56114 - DNA, 1523 bp, Bovine  19866881041807
  misc_feature (1)..(1): n is a, c, g, or t
nttcggtagttttggtgaaattcacaagggttcctcttgagtataagggattccagtggcgtgcaccgtaagctggacagcccagtcagagtctcaatatggttgtcagccaaggataaatgctgtatctgagggatctttggcaattgcttgaaagatgtgagatggtttttgttcatatttaaaactctgcaactgtatataaaatataaacatcctgtcatttgtctcctaaagaggatggtaaactaccaaatattgcaaagcactagcatgcctcacctagactatgacacctcaaaggtgtgacagggacattttctacaaatatggtggggaagaaaaatgaaatatgtatattaaaatattaagagaaaataaacagggcagataagactgaaagcttgtctaaggcaagactatgttttcttttcactgtgtttggtccttggtgacttctcaataagtcctggatgaaagagtaaagggctgcttgaaatctcagcaatataaaagttcactcaaagcttctgaagagtattgcccctaagtagtgagattataattgttttcctttctttctacttttctgtacttaaattcaatattgagaaaatagtatttaaaattttttttaaagtcctttttttttaatgcaaaagaaagctaaaattacccttgggaacagaaatatgtgttaggcattgaggttgaatacattttcctgacagaatataatgcttcttaatattttgccttaaaaccataattgtataaaaccatgccattaaagaaaataattccaaatccatcactgacgccttgccttacagaaaaattcctttatgcataagctgggatttaatactctgagggaaacacagggtatttatttataaacctcatggcccacaaagacacttggtaaataattatcgctgaaggcctggcgtgctgcgattcatggggtcgcaaagagtcggacacgactgagcgactgaactgaacagtaaacatggtgctaaacagagagatgacagtcacacagcagcatgacaaattaaattcactttgaaccgccccacacatttcattgtaatttttcacatccattattttcatttcccttgtttccttccattttccatagggatattttgcagtcttaaccatatctttgataacttcaggtttccactctttcctaggtgtgtgccatgtaaacagttgtatctgactgttcttgcttggataatctcaggaacgggggagcctggcgggctgctgtctgtgggttgcacagagtcggacacgactgaagtgacttagcagcagcagtagatgtttttctggaactctcttgctttttcgatgacccaatggatgttggcaatttgctctctgctcctctgacttttctgaatccagcttgcacatctggaagttcatggttcacgtactgctgaagcctggcttggagaattttgagcattactttgctagcgtgtgagataagtgcaatt

SEQ ID NO: 56115 - DNA, 1889 bp, Bovine  19866881068641
  misc_feature (1)..(1): n is a, c, g, or t
naaataaaaaagtgaatcgctaagctcagtcatggtttccccttcatggacagagataaaggtggctactgacacatgaaggaggtttcttctgatgaataagtttgaggaaattcatagcaatgatgatgacaaggaaggtatgagaaggatggtgatgatgataaggatgataaaggtaatagtggtgatggtaacgatgattgtatagtgaagatggaacttggtcctgggactccagtcctgaaataagagaagtgactcctgaggacaacacattgtgatgggaagggtgcagactttggtatcagacaacctggtccatgtcctggcttcacaatcttggagaagtcatgccttctagatgaagttcagtttcctaactgcaaaaatgtaaagaactgtattcacagctcttccccctgacaaagttttcatgaggtcaagtgagagtacatgaaagtgctctataaactgtaagctactatgcaaaaaggaagaatatgaagataagaaataagagattgttgctgaaaggaatcttccctatacttaagcagttctaagaaaacataaagcagatgattaaaggcccttctgcaggaaatttttaagtttgcttgtggaagttactgagcttgctgccccacaggacagccagccagggaaagatgatgtagctttgaaaataaatacgggttccacatttcccgagttctagagaatgtagcattttctatttcccaacattacatataaaccagtcagtacttcctagatgttcaacactgtgctagaaattgggaataagagctgaggaagaaaactagcttctccttttctggcctgcttgtggtaggtagaatggcggccccttaaaatgttctaatccctgctgctgctgctaagtcgcttcagtcgtgtccgactctgtgcgaccccatagacggcaagcccaacaggccccgacgtccctgggattctccaggcaagaacactagagtgggttgccatttcctcctccaatagacctagcaagaccaatatgaatagctctacctaaaggcagagttatgtaaattcaatttataggccttgaatagcttccccaatactggcctttgaaaagctctacactgatattttcaagaaactagcagcacacttcaccttggaaaagtaatactataaagacactgccattagtgattttatgtacttctacatacccttcttgaatttgaaataatggataagttcaggtaataatttttgttctctttcaaattttatgactaaaatattgagttgtgttttatgacctacatttattatattctgtagagtcagccagcagctttaggcaaagaatacctttgcagtcagaaataagacttggggaagaaatcagaggtttaaaatgggtaatcatatattctggaagcagaggaattttccaaagattttgaaaaacaaccaaatattgcatactgtgtaatatatgagcaataattttccaactctctatacagtttctttttcttttgtggccaggataattatctattcatgtatgggccaggattgttgctataaaacttaatttgttccagagcagtttaggtagtttttttggaggaaaagtttgtttaacaaattgcacactgacaatggtacggaatttttagttatgaggaattctgacaaggtcgcaggaattatccagtctcagttttcagtctcaagagtcacattgaaagaacgaaatttaaacactgtagatttaaacatggtagattcaaaaacaagtaagcctacctaatatttgcatgacaggacgaaacactgaactttggatctttttctctttaaattaggttcttactcta

SEQ ID NO: 56116 - DNA, 746 bp, Bovine  19866881070052
  misc_feature (1)..(1): n is a, c, g, or t
ntcagatttataatatataaatggacaactttgctatttggctctattataattattcagatagccttaatgtcttttttttttttgtctctatgaacacgtcttctatcaaaagagaatcatctttcaaaacactctgaaagaatttatagtatctcagagattaaaaagagattcatttaattccactttgcatttatagaatgttacttctgcttgtattaacagtgagcttattaatagaatttttctatgcccctatgccaggtatcctgtcagatgtatgagctatatgaggacaagaacaaaggaagggttagtatctaacttcatggatcccacagatctagtgatcctggatggctagataatgttctggaagcttccgagtcaggggcacaaatgtaaaggcatccatccctctctccctgcgccttgctcttcactggtgtttggtgtattatttcaccagccccatgcataggctaccacctgcaaactattgccatccaccacacacaaagtcttacataaaagggaaaattgagctctcattcaacaaaataattattgaataatttttaaggtaaaatgcagagccccagaagcataaggcagttttacatcagtcttttaatgtcttcctgtcaagctacaggatgagaaggggggtggctggggggatcaggaaataagtgcttgtcaagaagaacacaattgaagtcagaaaccagaatcaactatta

SEQ ID NO: 56117 - DNA, 1405 bp, Bovine  19866881110213
  misc_feature (1)..(1): n is a, c, g, or t
ntgacaacaaaagacatatggtgcacaaatctctgtacatataggtaccctccactttttgaaagtttgttttatgccatttcgcttttatgaaagatctatattagtacctgttttggctaactgaaagaaatcggaagaggatgttcaattttatgaaaataggtgaaagcaaaaatagccatttagtgtttcatttgtagagagagaaagcaggtatggaggcagcacacacctgagcagagaagcaagaatggcaccacccacctcctttccaggacctacattcagcatctcaacctcacacccccagagctctgaatgtgctggtgagcatctgtgctttatctcaatttattttgtgtatccgttagcaagatgtgtcctatggtaattgtttcttcgatctacaccatttcagcttacaaacagtttcaaaggaacactctcagagagcaggagaaacctgtacacaggtatgcatatgtctctgagttgacattatatattacccagcagttttattaaaacattcatcatctaagaggctcaccacctccttcctcttcctggatgccctggtcctccgctccctgaacgatatcattatccacagcatcgtaacgagcttgctgcctgcaaggaaacaaacagtcatcaactccgggacactagtagcacagtttgacataagtcgtttatctttaaagagagttaccaatgaatttttcaaaattcttttaaaagccataaatatatttcctaaatgtatccaattaggtttaataaggattccaggtacactttcaaaggataccttataaaagataaaatgcttttcaaaaactaaaatgaagctagcacaacacctgacaggttaattggagatgtaaactgttactttcaggcagaaaaaaaaaatgttgattattttggaagttaaatatttagaatttgattttcagttcagcctcagctcccatgagcaagaggagcccctccagttcacagggaaggactacgaggagctgtctttaatctgcctgtggacactggaggccaagctatccaggtcggtcagaaggctaccgtggctgctcggggcgctgcagccggccctcctggagcccatcctgctgctgtcgggctgtctccctggcgaggagctgctgctgctggtgctgccgtagcaagtgtccctgcagccgctgctggtgcagggcctcctgctcctccctcagccgctgggcctcctccgcccgctgcaccgccagcctctgctgttccagctgctcctcatacggcgactggagtctggtgactggcttggctgaaggatgcacctggggaacagtgagcaagagcagtcgggtgccctgggtctgcccttcacccatttctcata

SEQ ID NO: 56118 - DNA, 708 bp, Bovine  19866881140766
  misc_feature (1)..(1): n is a, c, g, or t
nataattctatgataacatttcatagacctgaatcaacttatttataataactgatttatttgacctaacaacaaacttctgtgtttattagctgctagtggtaatagaatgatgcttgctttatttaaaatactggtacagagatattgtagttgtgggtgctttaatccaggaaattactgagagtacaattctcagtgattgggtagaaatgcttttaatttccatcttgtcttggcagttatactttttaaaataaaattctttgctgtacatttcagttttactaatgtgattatgtggtctcacatcaaaagggttcactgcttaatgaccaggaaccaagcatgtcaggatgcaggagttggaaatggttttaaataaatcaatttcaagtgaattaatctttgaaaacagcgcttgagcattttccatttgaaagttatttccattatgacttcatagagccattcaaagtgtctttttgatctttattgtctttatggtaccgagagtagctacattgcgttataataacatagtttattttctgtctctaaactatcttcggatgagagtggatttatattagctgtgtatatttgctcagtgtctcttcaatatcgttccagaatcactcatatatcgcctttgggtggatatgtatctttgggaaaacgacagcaagcactggatcagagtgatgt

SEQ ID NO: 56119 - DNA, 1097 bp, Bovine  19866881206392
  misc_feature (1)..(1): n is a, c, g, or t
ncttattagaggcagatttttcaaatgagttaagtagatcagccaattttagaatcattatcaacttcaaagcatttctctcagttattagcatgtcccttctctctctggactagattcttttctccatttttaaaaggcccatctggctcattttaattgacttatttttcccatacatatcaaataaagtcaactttatcctatactgagagcaatccatgtttacaataactctgatcctagatattttatcagacatctcactttagatgaagatgcaagtgattctccattatgttaccatgtcaaaaaataagtaaataactagcgctcatctaggttttaatccatctcaatcaaataagcttataaagtcattgccatggcccacaaaacatttcacaaataatttaaatgaatatttcgatccttaagtacattataataaaaaaaaaacacatattcattgaacccaacaattccactactgggaatctgtttcacagaattaaaagcatcatactattgcagcactgatgtcgtgtcaaaaagcgggaaacaaaatgaatgctcatcaatacatgggtggttgaaattttaaggcatatcaataccatggaatgttatgcagctgtttgtatatatttccatatatgcaggaaatatagaaaagagtattaagaagattattactagggaggagagagaatactggatgagaagagcaaagaagaaaaagtaattaagaaaaaaagggggggtatttatgataaaaccattatatgagagatgatctcatctatgtaaaattccatatgttatacgaatatgattaaatatacataaaaggataaccacatgattttctgagggcaataggactatagatttttgctttcttatactgtataaactgctaatttttaataattaaaacattttaaatttaaattatttttatcatttgaatcactgtttatataatttgaaaaacatcaaattaattttaattttgatatatatataatatatctagagagagagagagtaatgcctatcagaccaagggttatatactcataattcataactca

SEQ ID NO: 56120 - DNA, 1255 bp, Bovine  19866881314748
  misc_feature (1)..(1): n is a, c, g, or t
naatcctgttgtatttatataaaatttgaggtgtttttttttttaattgcctaaataatccaaccaaaagataagcttcattactagtatctgttcactggtcagttacatattgacaatagtaaataaaaaaaatataaatatgcatttccaactgtattattttttcacctttctttaaaaagtaaaagaaagcaggtgtacatttggtgacctcaaatactcagaaaaaatatatatgaaaatataaaatttttacccactgaaaaatcagtgttcataagtaaaaacttgaaagtcattggattttaagatgtttctgaaaaccaagtcaatacttaaggacttaaaattgcagttttataaaatactcactgcatgatagatttcaggctgtttcatgtgtccaatgtcattcaaggttgcaaataaatttggcctttcaaaagcaagatgaatgacaaaaattctctgacatatagcatgtcttccaggttaggcatgacaaaagttcaatgatatcatcaaggctatcaatccatctgcaatgacatactgcagtctcttcaagaattaaatatgatgtttgtaagagcagtattgcatttctggttgtaggaaaaaaatagaattgcaaacacacaaaaagatctgttaaattacatacacaaataagctattaatttctatatttaaacaaatttgtgaatctgggttttttatatttgaccattctcctaaaacatgcttctgttttgaaaatcacatgatctacttagtctatagttgttgggttttagtgattgcttatactgctttcaagaactagcaagtgctgaacagagttggccacagaacaaagtaaagaggcagaatcagaagtgtttcaatttttactcacatctttctctaaaccaaatgtatttggtccaacttatcatgcatatttttgttcttacaggactgttttatgaaaattacccaaaaagtcaggcatatcttacatatcatagtcattttcaaatcaatagacttgctggagtgaagacctaagctccttactgcaattagcttttccagcaaattagtcaacttctgtttaggtcccagacttaatgtaattctgtataggttaagatacgacagtaatcaacatttctggaaaattcatatatgcccagatataattggggaatgcatttaaacaatgtactgggtctttatgatctcattttgagattacagaattatgaat

SEQ ID NO: 56121 - DNA, 1068 bp, Bovine  19866881352525
  misc_feature (1)..(1): n is a, c, g, or t
nttttttctgcttgttgtccactgcaaggcctagaatatatagggtaacattaaatcaatatttgttaaatgagtgagtgaataagtgaatgaatatttcacatattttcaagctatcatttccattactactgataatggaggcttttattataatttcctttgtaacatgcatgcatgctcagtctcttggtcatgtctgattcttttgtgactccacagactgtagctcaccaggctcctctgtccatgggatttcccaggtaagaatattggaatgggttgctatttcctcttccaggagattttcccaaaccaggggtcaaacttgcgtgtcttacggctcctaaacgggcaggtggattccttaccactgagccaccttttcttgtaacatctaatatcaaaagaaaacagtagaagtatattttccaactctaaatatgtgttatttaagtgtgctttgcatcatataaagtatatgtccctaaatagttgtaactaattacagtctttgtcaaacgaattatgcctttgagggaaatgctcatctttctaagatttgaaccttacagaatattctttctataagtgttgactcttaagatggtaatagtcacccctaatttaccaattttgtaactaggtttattgctactgctactgatatgggagaggattggaagggcacctctgattttatgccagaagaaataggaaaattagagaacatctttacatttcaagtttttttggatttttttcccccgtgatatgacaaagaacacaacttggattagtttcagcttggctagagaatacacactacacatatgctctttgactttggcagtgatatcttgtgatttcaggattttccttttggttggcaggtttttctttagatgaatgtatctttgatgaaaatgagatcttaatgaaaccttaattcagatactgtaaaatcacacactctctgtatagaaaaaaagaaatcctgaatagaaattttcactttacaccacatactaagagatacttttccccagattgcccagttctgatcac

SEQ ID NO: 56122 - DNA, 831 bp, Bovine  19866881353451
  misc_feature (1)..(1): n is a, c, g, or t
ntcgagagatgttcaaggcatgaaatcaacaggacttttgaactgtctgcatatgagtggtgagaaacagggatggcatcaagcaaactgtgtttctgacttggaaaatggatagtttgccattattgaaaaaggaagactaggaataattttgtttgttttgctttgttaaggattgggttgaaagtggcagagaagagcagaaattttaagttaaagcacctttaggattgtgaagatttttggtaatggagttttagctttgacttacaacttatcctgccagcaccctgtttctaaatactgggtcagttcctttcctgtgggaaaaagaggtcatcacagactgacagtcaagggctgctgcccagccctgcactggacatgccctaaaactgaaagtgttagtcctttggttgtgtgcgactctttgtgagcccacaaactgtaacccgccagcctctgtccatggaattcttcaagcaagaatactgaaataggttgccataccctcccccaggggatcttcccaacccagggatcgaacccgggtctcctacattacaggcagattcttcactctctgaaccactggggatatgccctacagcccctctgattccacctctccctcctcagatcccagagccagcccagctgccaagaggagacctcagatggctcaggtgctccaggcttgagacctcaactcagaccacaatgtgtgacccttcacaatgctgattagggttgtccaactgctctaacctcacttcagctcttggtgggtttggggttcatcatcactggctcccctcgcttccatctaga

SEQ ID NO: 56123 - DNA, 829 bp, Bovine  19866881504674
  misc_feature (1)..(1): n is a, c, g, or t
ntggaatttggccgtatagcagacagattatctgaattcctaaggaaaggagcgtaagaacttgaaattatcctatgctcgaaccatgaatatatttctgactcaattacaatgtacacattactttctgaatctccaccagtcctatcttcttgacaaccctactcaaaagttcagagccctaggagcctggatgtgagccatgaggacctttcctcagggaacattcacttctctcgtgaggacaggaacatctatatagtagacatgtagaaaagttctattagtgttttgggatgtaagttgtctaaatgacgggtagaagttgtggtatcgaatacatcagtatcatctcattgccagaagctgaatgctggttagaaaacaagcttcccaagctaaaacctgggaggataaaaccttttttcattgtagactccttgagaaattcttgaaagctatgtacctgctatctctgccctgtctctctttcttgtacacacacacacacatatatacgcatgcacccctatatgcaatttcgggggggacgcatccacttctctaaattcagtccatgttgagaagctattattcacactccaggttgagaagctattattcagtcagcttgatttttctataggttgctgcttcaggagagaaaaatctaaattctttcctataaacacatgaaaggctaaggattttttttttttatcacctctactctctctatagttggagactttgattcaataaattgcatataaagaagccctacctattcagcatcttttttcttgatatatatctgtctttatctcat

SEQ ID NO: 56124 - DNA, 1047 bp, Bovine  19866881089494
  misc_feature (1)..(1): n is a, c, g, or t
ntacatttttatgggttaattgaggaccaattaagcccttgagcctgcaagtgattttaataggtcatttcatcagacatctcatctaattctcgagaactttctagaaatgccttacaaggaatgtaaggcattctacattaatctaatgtaatctgtgaatttacattaacacatgtgccaaaaccatacagtattgattttctaattttatagatgagggatttgaaacagattgatgcaagttgcacatctcagtagtttttgtgcaagtatttgaaactagatctaactggttctttcttgtacaacacattatctaacaaaacataagcaaatcaaattgttgattgcttctgttacacagattccgaatgagagaaggcttttgttttctaagttgatggttttgttttattctctatatatcagtgagttggaatgaatcattgactgagtaactcctgagtgtctccagagaactctgaatgtttgactgataaaatcaacatataatggatgagtttagaaatatatttagccttctaaagaagaatgaatcgttcccaaggtggaataagacttgactcattggtattagctaagtaaagaaaaaaaaatatgtcaagagaaaataagttgtcagcaatggaagctcagaaaattgcagagggaagaaaaccagtaatagcagtatatatccggacactgtccaaggaaagaagcattgaatctggatgatgtgagtcttgtctcaggaaaactcagtgcttgtcttcagtccaagcccctcatgtgagctatgccctttcctaggaagaggattattactgcgagtggtcaagtttgaaagcagtgatttgaccacgtttccttggagatatagctttagtttaagaaaaagtcttcaccagaataaaagcctcttctatactttcttgaaatcattttctttgcacaaagcgagcaagacagtcctgggtctactgatttacctgaatggggatcaatgtcaagctatctctaggctttaggacaaactatctc

SEQ ID NO: 56125 - DNA, 908 bp, Bovine  19866881353744
  misc_feature (1)..(1): n is a, c, g, or t
nggctttctccttccctctgctgcctttcacaagagggtttacatagtcctaacccatcattcgaccccacctgccatggtccacaggggtttcgttgcttttactcaccacatgttcacatctcaaggtgagctggtcaaggcagtcttgttctcacaaggccacgcacccagcaaaagcaaagccaaggttggtcaggatggaaacaaaaatgcagcccgccaagctggcccctttggcccattgcccacttcctggcacaggcgcccccattccaaactctttcccttaatttctagactctccttggtgtgaacccctcagaggaccccctgtgccactgttaaccctgaggacagagccccaggcccctcctgctgggctggccaagtgtcctgtgcagtcccggctctgttctgcccctgggccagtgctgaggcttagggcagacgtcctggctgcttttgctccatatctgtgcccaacaattggggaacaaagatcagggtggatacaaacatagaaaatgagaatttctcaggctttgccttggtcacatgggaggaaaacccaaggtgcccctcacccaatgtcctacaagatcacccccctgcagtccccatctgcagagaactaggacatcagaggccccaggagtcaggaaagtggctgaaaatgtccaagagtcagactggaaacttggactgaacttggcgttgctttccctgagcgctggagagctgatgaactgaactgatacccggtgagattccatttaacgagttgtttggcaagggctacttctgaaattaattatcaatcgtttctcattattcttagatggcatttcttaaatcacaaggcttgagggaacatgtgtgttgggggatgggttctccctcggctg

SEQ ID NO: 56126 - DNA, 1093 bp, Bovine  19866880616312
  misc_feature (1)..(1): n is a, c, g, or t
ntcctgctaagaaattcccctttatttatttattgttaacgaagagataagagaatgtttttattgtgtgttttccagaccgacttgaaagcaattctcaactgcacgctgtcttttgttttaaaaagtaaaaatcactgagacgagtgatctgccctctttataggacccccatgtgggtgtgtaagctatgaacacatgtttttaagctttgcaggcatgtcctgtaatccaaattggaatccaacaacttggcatctcctgcttcttctccctctccacaagggacagctctcagatttccccattcacaagtgtattttttcctttgcttagcttatctggataaagggttggggaagaacttgtaccattgattccactacctggggtttgggtttcagatactgaagaccagccttacagagctggaatctcagaaatgttttcttgccccactaccaccccaaaactctcctctgaccagtcttgtcactgtctgaaggtttcccattagaggattccttccttttggattaaccatcttatctcccattatctcatctgaaaacaggatcctggagggcaggcctggatggtgtgccaaaggctagaggtagccaggggcaccttgcatacgaggtggtacccaagggtgaagggaaagagagtccagagagggcagacaaggcaccccaggggatctaaactaaagctacttgctcttttccttatttatttcttcattcaaaatgtgtttattaagctccaatatccccaccttaattctacatcaggacttagtattgagcatagctatataaaacagaaatttaatcaagttaattagcaagccaaaactgcactcaaacgtacatcaacagcaagagagctgatctgtgaatcagcagttggtcccacaactactcaggaggcaggtgctcgtatcacacctttagcagcagtttggaattaagtgagacaggatatcgacaaatggaagttttagcgaagtataaaaatatgaatagaaagcaggtgggggataatactaaaatagttcatctaaaaatagtctaattccatccagtag

SEQ ID NO: 56127 - DNA, 1217 bp, Bovine  19866880769352
  misc_feature (1)..(1): n is a, c, g, or t
nccctctccctccccactcccctttggcaacctcaaagtctgctctcacttggcaactcacaagtctgtgagcctcttgttttgtagataggttcatttatatcgtatttaaattccacatataagtgatatcatatggtattttttttctctttctgactgacttcacttagtatgataatctctagttgcatccattttgctgcaaatggcattatttcattctttttatttgtcttctgttttgttttatttcattttgggccatgctttgtgactttcggggaccttaattcccggaacagggattaaacctgcaccttcagcagtgacagaggggagtcctaaccattggaccaacagggatcccctattttgttctttttttatggtagagtagtgtttcattgtgtatatgcaccacttcttctttggtcattcatctgttgatggacattcaggttgtttccatgtcctggctattgtacacagtgctgctatgaacacaggggtacgtacattgttttgaattacagttttgtccacatatatgcccaggagtgtgatcacctccttcagcatgatttttatttctcaatctcattcccagtccttccctggcttgagtcactcattcatcaattcttctgtccttctgcctctgctatacctggttttatttctctggagattttaacatatggtccttgcatgaagaacaagcttctactttttctttctggttctgcctcagagcaaaattacaaatggaatctcctaatgttggatgaatttagacaaggcaacttacagcttcgatgggacagctttagttcagctcccagaccacttattcacagaggaatggtcaccacagtgtttggtttccaagaagtctggaggaaaacaggtgttttccctggaatgcagtttctgtgtcactgtggtaaacaggaattttcagacttgcagttaatgaaagcctttaaaattctctttggacgagactaatcaccaaggctgcctaacgtccctataacttagaatcttacaaggtttgttgcccaaatgtttgattttcctgcctgaaaacaatgatttgcatgtgaatcactgaccacatggtaatgcttaacatcatccctttaaacccattggagaccagtgagtggtgattaaactgacagtgcggaacaagcctttctaggcctgctgct

SEQ ID NO: 56128 - DNA, 1100 bp, Bovine  19866880778152
  misc_feature (1)..(1): n is a, c, g, or t
natcatctagccaaaattatttccccagacccctacactcgactatgaaaatgccaagtaaacatgaatataaagtgagtatctggttggctcttaaagcaaatttgttataggtcttataatataaaaatgtttaagtttgagatttccctgtggtccactgattaagacttcacccttccaatgcaggggatgtgggtttgatccctggttgggaagctaagatcccacatgcctcgtagccaaaaaaccaaaacatagaacagaaacaatattgtaacaaattcaataaagactttaaaaattgttcatatcaaagaataaaaaactttaaaaaatatgtttatgtgatttttcttaaatcttttaaaacagctccagaagtatttaagataaactttatatttccaaatggagacaagtatggtaagcatacatttcaattactttttcctatatagattaaaattaaatagcttaagagtgcaaaactgagactgtcacacttgataaaagtacttttgagatattaactccattaaataaaatcacacagaaatactgatggagagaaaaaaagatactaatggaggaacagattttaaatctttaactctaaagtatagacagtgtgccttggaaacctatgggaaggccatagccatatgtcagtcttccaggcccttgagtcaatgatttaaaggtccatggagcacctcatctctggtctcattagttttagttataggaaagcagagagacccactgtgatgcagttttgattaagcctgaacatactttattatttagccaaacagggttctcgtttataatcttcagtatttctctcttacttagatggggactgtataagaacatcttctggagtcattgagagaaatggaataggtattcataccactcctaatgggattgtctacacaggaagctggaaagatgacaaggtattattattgttttgaatattgacagtggataagtaactctgttggttaaatgattcctggcatttcaccatttcaaaaaacacgtatgagtaagccatgcaataaaaataacaaattattatatttaatata

SEQ ID NO: 56129 - DNA, 1538 bp, Bovine  19866881067471
  misc_feature (1)..(1): n is a, c, g, or t
nctacctaatgcaattgttgtgaggctgaaaatgctcatttcagtagaactcatgtttcttggttccctggagaattggcacataccttacacccccttaaacttgagaagtgattcagcaatttcctaaaggaccttgcaaggaagcatacagctttatatggcatctgctcggtagcaatgtatgtgattcagtctaatgatctcagccatcctacaaagaagatactttcttcttccctaaacagagggaaaaatcagagcttaggggagttgactgcaccatacctgggatccctcggagactagaactcaggtctgtctgactcagcatttatccatttctcactgtgccccactggctcacactttggatacagatggatatagaaataaaacctaggcttctcacgaagtcatcaggagcctgtacactcaagtagcccatggagaaatgggagaagagacagtgggacctctagaagacacccacctcaggactgttttgtggagacagctgagacaggtgagaggcctgtgtccacccagtgggtgtcacttctttctctctctctttccttctccagtatctatttggacaagatcgggcatgttcagggtagtatggccatggactccagtatctatttaggatgaccccaaagccaagggtccacagaatacatttcctgtcccacactgggctctcaaagctgcctaactgccctccagcagttgggccgggtggaatggaacctgattggggaacagcttggaagctgagtgggggtgaagggtcggcagtggcaggctttgctctaactccctttcatggtacaggctgccgcctcctcctggcctgctttctgatatccctaaggcctctccaagtagggagagtggaaggacagagcagatgtggccaatcaagagatgccatcctctaatcaggtcaccccagcagccccctgtctaacccagttggcgctgagctttttgcttggggatcattttgttctgtaacagtaacgctgacctcaagctaggccactctgtccagaaccttgcttgatctaaagcaactctccctgggagttctgtcttgctggcaaggtctccagaaggaggcggtgccgtttagccaggggagtcagcaaatggcctttcccccagcttggcctgcttagataatctgctgatgggttttctttgagtacagaaggatcctgatttcctagagatgtgtgaaaaagagcctcagtttatcagagaagacatcaaagttgctatatagaagctcgtgatataaaaatcaatttggatttttatccaaaatttttatcaaaatcgaaattgatttttataaccagtcagttaggaaacaaaaacttttaaagtgaacatttataagaaacaaagctatgaggggccaggaataaatccaatgagatatatgtatgatctctatgaagaaaattacaaaacttcacttacttaggtattctttgctagagagatgaggcatgttcatgatatga

SEQ ID NO: 56130 - DNA, 805 bp, Bovine  19866881075529
  misc_feature (1)..(1): n is a, c, g, or t
nccaattgaggtgagtgtatcaaaatgttaccacatgtccatcatgccttagctgcaagggaggctaggagaacctggcgctttcagccttcccataaggggaggcctctgatcaagctgcataaggttggggaattcccccatcactgaaaaggattaaaattctagatgggataaaaagagtgccagtgtccacaatactatttttacttgttagattgcattctgaaccagcagcttcatgtcaaaacatcacaccagccaggccacatttgagtagcatctcctggtataaagaagtctacagatggtgcaagtggggacaaggccatcacagaacttactgtttaatgaaatagaaacagatatatcagccttcatgcttactcaagttaatttccccaaactataccctgctaataaaattaatgggtttaagttaatggtttgatccccaacagaattcagtatattaaaaactaccataattttaagtaatgaaattcatacttgctgacaaaatatttacctttgagttttaagctaaatatgtgctcaacttaatattttccctcttctgaagctgcacataacacctgttgcttctgtgtttgtttcaattttttaaagttagcacataaagtaagtccagtcacttcacctgttcccttactcttgatttcaactgacaggtctggggacgaggggatggcctgatccagggacgatgaagatgcaatgttgaataagctggaggagagaagcaacaggcaccaggaaaagaccaaaaccaagcaaggttaga

SEQ ID NO: 56131 - DNA, 848 bp, Bovine  19866881198782
  misc_feature (1)..(1): n is a, c, g, or t
ncttggaaaatggggccctctcgtagggaaggaaaaaggaattttggctaaaattaaattttagcttttttgcgtattataggaaaagcagagttcatttcaactcagaaaacatttatttagcccatactatgtaaaaggcattgtgccagatcttgggagggaatataaaaatgatatttttatatcatttttcctccttcagggagtttacagactagtgggaaagatgagacatacatatagctatagcatatgatggattgggaaaatgcagtaagaaaagtataaagtacctaaaacttgcagagaaaaaaaaaaatgagttctggtcatggggattaaagaaagtgtcataaagaagataggttatgagcttgactgtgaacagtatgtagatatggcacaaaggggatcagtgaagtggacagtgatcagaggtggacagttgcaatgcatcagaggatttaggggttccaggaagtatcattggtagagtagagggtaagcctggataggtggattagagacagataaagggcagtcaatatcttcctgggagtctcatctgatgtggacagaataaggagttactgaaagcctctgagcaggggaataaccagatcacatgttctcagtaagaagatgacaattttgactgcagaggaaagaccagctgcagagtggctaagatgggcacctttaataatccaagtaaaaggcaatgatggcctgaattaggggaagtgactattagaatggaaaggagggcacagacagagcaatatttcaaaggttactgcatgagctaaatgtatgctttgcccagaaaaaaaaaaaaagagttg

SEQ ID NO: 56132 - DNA, 1234 bp, Bovine  19866881353970
  misc_feature (1)..(1): n is a, c, g, or t
naatcagatctgagccctaggctctaccactgagtctctgcagttgttattcagtctctcagttgtgtccgattcattgtgaccccatgcagccactgaatcactgcaggatcttgagcaaatcagttgttcttctggcttcattttctcatctgtaaactgggaattctgagtcagatttcaaatgcccgttccacatccctgaccctgatccagtgttggggtgggggtgtagggagtgttcccagccattgctgggttctgctctttacctgatggatgagtgggggaatgaggagccactctcgatcagccctgggctctttctcctctgctttccctctgccactgggctagagtttgctgttagccaacctctataggaagctgggagcggttctggtagcagccaggctccatacgagatcacgctgtggagctgaagagggatcgcagagagccacggactagggctgccttcacatcactgcagatggtttctttcaagatgaatgggctgtccctgccgcgttttcttttcaaaatgtcatgctgtatttttgagagcacatgaagaaataaataaagtgttaacagtaaaaaataaatagaagtgggacttcccttgtattttgctgattgatctggaggagtgggactcagggtggggaacttcactgctgtgacatgtgggctgctaggtccagcgtatggagattctccaatacgtagtgacattgaggacaagaacagcctcttgtagcccctgctaacagtttctgttatcggccatccagtgtgtcctgatcacagaggagacttgtcttacagtaatgagcaaagacagagcccatgatgcctccattttcatttgaaataaatcatgtcagcctggcccgcagtcaatatgaatttgatgtacagcaaataaaagcagctctaacttgagcagacacaatccattaccctgccatctgttgtgtcctggtttccatatagggataataaaaagataggagtttcctgaaagcttggcattttgggtgcaggggaaaacacactacctttgtgttgtgtgctccgtcgttcagtcacgttcaactctttgcgaccctgtggactgtaacccactaggctcctctgtctacaggattttccaggcaagaatactggagtgggttgccatttcttcctgcagggaattttcctgacccagagatcgaacccgcgtctc

SEQ ID NO: 56133 - DNA, 1189 bp, Bovine  19866881417542
  misc_feature (1)..(1): n is a, c, g, or t
nttgttatttaagtttctttagattctttttctattctgaatctactggaacaaaaattcttgtaaataaatatttggttttatgcttgactatcaggattctgtgaaattttgggggcccttcttgccaggtgtcctcatgagaatgaagtcatctttaaacactacatgacaatctttggctgcaccaccaagtcatccagggaagaccgcatgacctaggaattcaactgcttccttttgatcgtctcattattggatgattatccaaaatacttcattgtgggagcagaaaatgtgggctctaagcagatggagccaaaccacatactcctccatgggaaggccgtggtgctgatgggcaagaacacgtgacatgcgaggccacggaggacatctggcagacagcccaactcccccccatctcctgtcttcactaaatcacatggtaaaccacatttggtaaatttcctcagagatatccaacacattttcgcaatgcctcagaagctccagatgtggagaagacagtgccccagatggaatttagaagacattcctctggtgtgtttctcatattataggcacttttctccctacttactttgcagtaggaagggtaaaggaggtgggagagccacagggctgtaggcctgctgtggtcaattgggtctggttctgtgtagagtctggtgctcatctctgcaggagtttgcttcttgatcctaaaagctacttttatgattgtccttcttcagggctagaatgatgagccttgtcatttattcagggctactcttttgggagggatttatcttttatctgtatcctattttaaaaaataattcctgggggatttgtctgcaatggcatatatgaactgtatcacatgtatcaactcctcttgactggtaatggataactggagaactaggtggagaaacagattcatggtttagaagaaaagatgctagaatagtttaccaatacgaattaggaatgtgtgtgttgggaaaagtatatttctgattctgagtctatattctcagtgcttaggatgctagattagggaaggcattaggaatgaccattaggaaacaggtggaggtaaaatcagttgaaaaaattaccagagagttcctggttggcaccttggatggggtgggcttaaataatgttcccttgagcc

SEQ ID NO: 56134 - DNA, 747 bp, Bovine  19866881936122
  misc_feature (1)..(1): n is a, c, g, or t
ntggtacatattgtctttaatcccttttctgttctgcctaaagtcaactctctgatcccaaaactgtgagacaggcgttcattccctgtctttcctaagtcaaaggttgtcatcctttcactcaggggctcccctgcctactatagtcagatggtctagagaaaggtgggtcctggaacacagccagcaatctccttcatgagagcagcctctttcctggatcaccttaccatgcattgactctagggcctagggctgtgccttgcaaaggcatgcttgaagggacttagtgaggtgtgccaggtgaggacactgtgcaatgacttcaactcaccttgtcaaaccctttgactcctccatgcaggctgttgggcccgttgttaatggctagtttatactccttcccatccaacgtgaacgttcctttggcaattcggttggccaccctgccaaccacagctccaaagtagggctgcttttggaggtaccctgcaaggatatgggatgacagcgattttaaaaccttcaagccaaaaatgaggctcacactgctgcccaccacttccttctaagggcagctgtaagtattaacaacatgggcataccacatgtgcatggaagcagggaaaattggtgttctttacacaccacccttcccctttccaaaagtaattcatattctttacaaacattttaaaaaactaaagcacaaagaagaaacttaaatcatcctgatcttatcactag

SEQ ID NO: 56135 - DNA, 658 bp, Bovine  19866882076203
  misc_feature (1)..(1): n is a, c, g, or t
nctctgagcctctttttgaacctcttggttctatgtgtgtgttagtcgctcgtgtctgactctttgcgaccccatgacctgtagcttgccaggctcttctgtttatgggatttctcaggcaagaatactggagtgggttgccattctcttctccaggggatcttccccacccaaggattgaacgcgggtctcctgcattcaaggcagattctcaaccatctgagccaccagggaagccctcgcctggttgtgatggtgactaaataaccaggcaaaactcatgggcaggtgctacaaaaaaattttctttgctatgttcagaagcccccagccttctgtgttttaaattccctaatctaatccatcctgttttctgaactttaatcagccccctgccctttgagtgcattgctgtccctgaggcactggctcacccagcagcctcctttgagcctgcaaacaatagaaatatttgtttcctggcaaggtttctataccaagaatggtttctaggcctgaggaggctgcccctgggagagagcatgctggacatggttcccagaacaggagtggacacaagcgcctgtgtacaatcttgtcctcagttacctgacaccagtctccaggggaattagccaaagacatctcaaatgtcagg

SEQ ID NO: 56136 - DNA, 969 bp, Bovine  19866880533228
  misc_feature (1)..(1): n is a, c, g, or t
nttttactttatatacagacctattaatatatacagactttatatagagacaaatttaagtggttggaaactcttaattatgtgaattgtcaatattcaagacattcattataagattcacaatgttacttaatcctacccctactagtagtaatgtaaccttggtaaaattattatattttagtattaacttcccatttctataaaacggagaaagttgcttcccttgctgatggtttgttcaacaaatatttcgtgcctagtctggggctgcaatgtgctagagtggacaactacctgtcacaaaaacatgggacacaggacagtcagtcagtcagtcctaataaacacgggactcaggagtcagtcagtcagtcagtcctaataaacacgggactcaggacagtcagtcagtcagtcctaataaacacgggactcaggacactcagtcagtcagtcctaataaacgtgggactcaggtcagtcagtcagtcagtcctaataaacatgggactcaggtcagtcagtcagtcagtcctaataaacatgggactcaggtcagtcagtcagtcagtcctaataaacacgggactcaggacagtcagtcagtcagtcctaataaacacgggactcaggtcagtcagtcagtcagtcctaataaacatgggactcaggtcagtcagtcagtcctaataaacatgggactcaggtcagtcagtcagtcagtcctaataaacatgggactcaggacagtcagtcagtcagtcctaataaacacgggactcaggacagtcagtcagtcagtcctaataaacatgggactcaggtcagtcagtcagtcagtcctaataaacatgggactcaggtcagtcagtcagtcagtcctaataaacatgggacacaggacagtcagtcagtcctaataaacatgggactcaggacagtcagtcagtcagtcctaataaacat

SEQ ID NO: 56137 - DNA, 2081 bp, Bovine  19866880535123
  misc_feature (1)..(1): n is a, c, g, or t
ntgtatgttcctcggctctttgtctcgtcacaacaaagatttggagtgacggacattaaagccccctcggcgtgtcacagctctcaggtcttggacagaccgtgttatagctctcaggtctcgaatggaccatgttatagctcttagacaaatcagtgttacagctcagtgttacagctctattttatttagaagatagcaggaaaatccatctttgaggagtgagggcacgttgatccaaagacgccaggagaagagcaccccagctcgagggggaaagagagagagctagctttggctcctctttttatatgtttatctctccctgcgcctgccctatgtacattgggccagccaggagtgttgttcgttttacctgaggtcctcactctggtcctcggaccttcttttgttctattttcgtgggcttttcccttccttgtcttttagccaccgccattttggactccctttccctattctacctacctaacaatcagatgggaggagtgtgtgtctacggaaatcatctaactggggtttttatacaaatgagccgtaggttttgcaccctatctgttcatttagcataggtatggacggagaaagctggtggtagctctgaggagagccaaagatccccacaagccactcaatccttgacacagcgccttcttttgtttgggaggatggcctcaatgcggagtagaaacaaaggtgggagtccagagaatactcactgacagtgcgctatttttgtgcctggtaattttaccctgacattcaagagggtgagaattacacaacatctgtatcttagtgagaaaaaggacttggtcaacttcacgcatccctgagattcaaaccacgcttgcaagagactcagtcctctgctaatgcctgaagcactcctcagtagtggacaaatctagatgtttctcctctccgatctccttcacaattctttacactgttaaaaatgtcttttccactaaacagcaaggaacttaggctacatgtgaaattttgaggaagccagagacaggaagtaggtaagaaggtctttatttcaaaagattaacatttgcatttggcatgtccttttcctctcaattttggatttgggatttgggggttcaggggtagaaaaataagatggttatttcctctctaatcaatcattctaatctctataataagttgaacatctctgatctatcagaaaaagaaatatttcagaaggcagaaggatggaggcaaaaaagttctaaaatattcacctcttctctcgaaccatccagctgtcagcgcctccaacacagttagtacttcataggcacaacaaagatagggggtatttcaatcatcagtgagcaacgacagctgctatttccaaacaagggagaaaaaagtaagactacttctgaagaaaacattttgttttcatctctaaatgtatacatgtatacactgtatacatatgtatacatctctaaatgtatgtatgtgtgctgtgtatcagtaaaagaaaaatactgttcatattgttaagctcagttaaacctcttagatatggaaatggaaaggccctcctttattaatgagctcaactctagaattaattcaaattactactggctaacgtttcttgcctggagaatcccatggacagaggagcctagcaggctatagtccatagggttgtgaagagcctgacacgactgaagctacttagcacagcacaatgtttcctgaatcactcatttcctctaagtttcattcattctcacaaaaaggtaaatgggcttttaagcttgctaaatgtaaaaaaaacaaaagtattcatgtatcagatccaaaaccactaagctgcagtgatagcaagtttccgtaacatgtttcttggtatgctgtaatcaagtttaaacaatggtatttctggtcctaaagtgggttgtggatataagaactagtttttcttgcccagacaagcaatatggaatgaacgattacaaagaagtagctgcaagaactgcaagagccaatctacacaaacacacacaatgtagtatttaatagca

SEQ ID NO: 56138 - DNA, 2072 bp, Bovine  19866880677656
  misc_feature (1)..(1): n is a, c, g, or t
ntttgtcccattccttcatcggactggatgtgactgaggttgagtggtcacctcggggaggcaatctattttattcagtttgctgtttcaaatgttaatctcacccagaaaccttcacgaacacacccagaataatttttaatcaaacatttgggcatctcatggtgtagtcaagatgacatataaatttaaccatcacaccctccaaatctgagaagtttgaagcagtgaggggcaaaaccagatttcttagaagaaacacttgtagggagaaaccttataaagagactgttgttgccgtttaggaaacagttgtacaatttcagttatcaaatatgtcgggactgagcaaagccatagtgacagaaagctgccagaacttggaggcagggttggaactggggaacggctgctgatggcatggggctcctttctgggctgagaagcatgttctggagttagacgttggtgatggtggcacgacttgtgaatctgatacagaccactggactgctgcctttgaaatggtgaatttctagcacgtggagtaaatgtcagaatgcatacatgtctattgagggaggcatgaagaggtggaggtggataatgtgacgtctctgagacgtgaagatgtaaacaaacatgggctgacagaagggaatgtggggttgagggcggatttaaaaagcacaggacgtcgtgcagcgtgtctatggattcaaacggcccactggaaaaggaaacgttaacaatgcaaggtaaggccgggggagtttgcagtggtgaaatcctgcagtgctgtcctaactctctctcttccctgctctccccaggtgacggaccagtccgtgaaagcgttcgctgagcactgtcctgagctgcagtacgttggcttcatgggttgttcggttacttctaaaggagtcattcacctaaccaaggtaggttccacggctacatctcctcggtgtttcccagcatcattcataccaatgccctcgcagtgttccacatacttgaatgaggactggtcagaccataatagaagtgtaagtagtgtttggtataataaaaatcagcttaagtcaacaatataaaatctatcctttctgaaatgggacattcatttaaacaagaagcttgctttttggcattttttcctttgctaataactgtgaatgtatgcagtaaagaaactgatatatatgacaagaattatttagattttaatgttatgtattgttttagatactttaatgaaagttttcactggtcatgtatcattagatcttctgagtatttggcttttaagaagtgcatatggtcagttcatatgattaagctgaacatacatggtgaaaagagaagtgaatgtatgccaaaatttaacttcatagttcagagaatttccttatatacaaatataggaagtctcatattttagcgataatgaaaacatcagttcctttgtaatctctcacttgtcatgcatcatctgtgctgtttttcagagttctataataattatgaactaattcttacatacatgttttagaaaactggctactataaaatttacttgtgtcttattcaaaatttgtcatgtctcttcaagcttacagtttagggaaaagaatttacagtttctttcctcctagtgaaagtgaaagtcgctcagtcatatccaactctttgagaccctatggactatacagtccatggaattctccaggccagaagactggagtgggtagcctttccctcctccaggggatcttcccaacccagggatcaaacccaggtctcctgcattgcaggttgattctttaccagttgagccaccagaggagcccaagaatactggagtgggtagcctatcccttctccagtggatcttcctggcccaggaatcgaaccggggtctcctgcattgcaggcggattctttaccaactgagctaccagggaagccctctttcctcctaggaaaagagcaaatgtttataaattacctaggactgtggcaataaggcccagagggtaggaacccaggctctgttgtcagcttgggtt

SEQ ID NO: 56139 - DNA, 1523 bp, Bovine  19866880823919
  misc_feature (1)..(1): n is a, c, g, or t
ntaatctgtacagtattatgtgatttttcaaatagctgatgatatttttctatagaacagaaagtttctctgatgaaatgatgtgtgcatttatcctcagatgaaattcaaattaaaggtactttttcattgttttgtatgtagtgatactggatatcagttctgatattggttttttgagtaattctaattattgaatatcacttacaggaaatattaattaatatatagcactaaagcatttaacctagtacagttacttgaaaggaaaatctatatgagatcatctgtatcttatctgtgtcagccaggtttgatacttaactccagttctgaagatgagatggaagctggatttgacgtagatgagtttgtcttattgattctccatgtttgcattattttgtcctgtggaataatgtcaatttttatgacagttccaacatacagtggtaatttttaatttctactttgtctttggttcctagtgagtgataataatgtaaaagtaaacatttttgtaagtaataataatagagcttttatagtatcatattattggtattcctggatgtgctatttaaatattgttactgattctatgtttttaaggcaatataaagataagtgagtgtatatattaagcagttagtttgtgggattaaaaatcatgttttatatgttatgaaatcagaattcatgatcaaattatgggaaaggatggacacaatttatatgatgaagaatgcactgctgtgcattgggaggcttcctaacctcaaacccattttaaaattgccaacattgaacaaaatcttcatctcttgatgaaaatgataatagtttattgactgttcaaatatatgacttcctgccctgcctccccttccctgagtagttgtcttattcttaatccccaaccagaaatggtaattaaaataactcactgttgtcaaaattttaaaatgtatgataaatgaagcccagtaaatagtgaaaatatgagaaaggtgattaaatctgacaatttccttgtaaaaggcttgagatgataaatatctcctgtgattagttattaattttgtgcaagagattttgcttcagcctaaaatattttatgaacagtggcgtaaagaaatatcttagaagataggtacacacatgtttaaccagaggaaaaattgctggaacttgactggtaataattaaaaatggcagacttgacatgtatgtgcctgggccattttctgtatgatggcccttttagaaattaaaaaagaagacacgacgacatgaagaatgacacagtactttcagcttgaacctttttgcctcatgaagacggaaaggttttatgtatctcattcctcaactgataaaatatttaatttaaggttgtataaaataactccttgctgactgaagttcaaaagttattgagacttgtttcattaacagttcagttgcactgcgaataattgccttaaaaagaatggaattccttatgttaaggaaaagaggaa

SEQ ID NO: 56140 - DNA, 1425 bp, Bovine  19866881078091
  misc_feature (1)..(1): n is a, c, g, or t
natctggtttttaagacattccaaaaatcctgattacgttatgagaagccatgcaagaagccaaatacacatctgtctagagaaaatgtcatcagccaatgccatctttggtggttagggacattcctcctatgtgaacaagcctccttagtgggcattactgaaactagataatttgactcgataattacagattacagataaccctgtgctaccattcgggaaagataatctactcaatttatttttaaaggaaatcttgtgtgtctaacatattccaattttgctttaattatctcaaagtcctacctgagtgacagatctacaatataggctcatatggaatagtcaccatttttgaaaaatagtggcaattctaacattctgtcgttatattgcttactaatcttaactgccatgatttcaaaagacagttccaaagtgcatcttgaacaaacagaaaagcaattagcctaaattaattgctttgctgatgtgatttgcagtagggatgcctggtggttttgcaactcctgccagtgctttcacaagttgatgttctgatgattttttagcctatttttgcaccagagcaattaaccagataattgttctaatgtgaacctgcccttaatcagtatgcttaggttcatactaacaattaaccaaatattaaacatacacttaaatagcagcactcaaaagtgctacgggaagaattaagaaaaaacttgcaacaattttctcatacagccatactcttctcaccaagaaacagaaaaaaatgctgtacctgtctcctctgcctcttttcaattaatacaagatatcattacatatgaagagcaaagttactgggtcttcatttaaaagtattccaaagattctattcaaaagacagaagccaatgattcaacattaaaacctatgaggagggcacggcaacccactccagtattcttgcctggagaatccccgtggacagaggagcctgcaaagagtcggtcatgactgagagactaagcacagagcacaccgtccaagaatcggagctaccgcttccagacaggaagtatgcactacagaaagcaagctctacctgagtccagacgaggacaggagcccttactttagaaagtaccaatttaattcagaaataaataaagcctggggaaaataggacatgagagccaactgcctggattttaaccagagctcaagccaaatttaaaaacaaacttacacatcctacaaaagcagcatttataattccctcaacacacaggcattaaattactcctctgagctgggttctatgcgaggtaccgggggctgaggttggggcagagggccatagccaaagaggcaggttccccttacaaggagagagtcatgagcaaaacatcacacagccacataatgtcg

SEQ ID NO: 56141 - DNA, 2843 bp, Bovine  19866881110553
  misc_feature (1)..(1): n is a, c, g, or t
nctttctttttctttcccttgaacactagcttatgctcactgggtttatttgtattgccatgtaatcaatcaacacacatttactaaacttctggtcagaagcccaggactacggaaaagacaaaattctcagatacagttttaattcctatgtggttatcaatgtcacattctaagaaatttataatccatctgaatataaattaaaactaaaagaaaaaaattcaacctactctctctctctccaaatgtgagattctccaggtacatattcacacaaaatattaatctctctctgtgtgtgtaacacaacaaaacatcaaaatactaaaacatattggtaacttgctattgaaaaaaaaaagattaatcaaaaccaaaaataagaaccgagtttaaattcaagttaaaaggaaaacaaatggaaattgtatttcccaaatgaaacaacttctcaaaataccataataaatcacggagggaaatgtttccaggctttatttaacaggcaataaaaccccgaggcaggtttgattagtgtgctgctgtagtaaatggtaagatgagctatggtatacatatcaaaaccacctactagcctcaactagtttactgatgcatggtctttaaggtgagacttaaaattaaacgtaaaagtgtttaaaacatgaaaagacgttcacttctgtttgtggaattttttgtggtatttttgtcataggtgttagtaccattattgactacatgccatagaagttatgtccttacaagacttattattaaaaaacacagatgttaaagacaaatgtaacagtgattaagtttcagccataattcttctaagaggtggactccttctttccacttctccctaacttgacaatagggtagaaaaggttctattctgaataatatgaaacacggaaaactgttttaaatatatctaaaatcaaggccctttacttatgtacttttaagtttgtatccacactatacctttcagaagacctgactttttccccttgcattttttaggtgaatactcaaaattaaacagtaacactagaaacttcaaagggagtgttattttattctaattttatttaatcaaggatatttattttattacaatgcaatttagctagcacttacattcaacagactctactggtaggtttaactgcttattgcaactgaatgtattttaaaacttggaataagctttcgtgagaagtttggtagacgggactgaggtcagggaaatctgcattcagtcctgactgtacttactagctgtgattgtccacaagatcctttacctttctgagtctttttttttttaacttcatctataaaatagagtataatgatacctatagggcttcccccggtggctcagatcctttgaagaaggaaatggcaacccactccagtattcttgcctggagaatcccatggacagagaagcctggtggcctacagtccataggggtcgcaaagagtcagacataactgaactgacttagcacacacgcatgcagtgatccctatgtcacagagttgatgtgataattaaatagggtaatgaataaaacactctgggcaacttactataaaatttcaacatagatcagctacaaaatcactgtctgagtaagaaaccacaccaacacttcgtagcttaacaaccacccttatctgctcacaggtccctggaccaacaacttggaccgggctcagcggtgcaggcctgctggttttattcacagggctgcagggatccaaagttctgcaaagtgaggctggatggtctgacccggcctcacggacatgtctgacagatgaccccggctagacctccatctccaggtgatctcccattcccagagagacaactctgggcttcctcaggcggggcagcttccagaaaggcaagaacaaaagttgcaaggcctcctgaagccaaacctttgaaggcctcccacaaaatttccactgcatcctcttagttagagcaagtcacaaagccagggcaggtgcgaggggctagggaaagacgccctcttgatgtaggatagctacaccctagtgcacacaggcctgcacacagccgtgggccaagtgtgtggctacagtttgcgatcttctaaagcctgcgaaatactgacaacttttataacacctatgccacctttcaactataaataactgcagaattcatgtcttaaaaccaaaaagaagaactagcttgagttccccccaatctagagaatactgttctgtcgcttcaatgacagacttaaaagaagaccagcatccagacctggtgactgatatcatcatttagatttctttgtttttctgtgttctaagagtcctccacatttttctatttaatctaatcagtatatttattttcatctgatttgatattttaaccttcagcatgtagctttctagtcaaacaattcacaatgaatagaatcacccagaaatctggatcagtatgctgtacttctagaaactatgactttttattttaaaaagtaaagaaaaacatatcattgtaaaaactaaatatccttttgtttttctccatgaaaatgatcactagagaaaaataattttgtctatagttcatcagcgaggctttagagatctagtcatacagatttaaacagaaataaagaacaagatttttagagccactaacaagcaaaacgtagaatgccaaagcaaaacttgaagtttaatttattgtatcaaatctcattttaatgactatctttctaaattttttgtcacagctacagaaagtcactaaatgataaatgctaccaaaa

SEQ ID NO: 56142 - DNA, 1672 bp, Bovine  19866881125713
  misc_feature (1)..(1): n is a, c, g, or t
ncgtaaaagtggggtgtatgtgtgtgtgtgtgtgcgcgtgcattcagttgagtccagctctttgcgaccccatggactattagcccttcaggctcctctgtccatggtgtgttccagacaagaatattggagtgggttaccatttcctcctccaggggatcttcccaacccagggactgaacccatgtctcctgtgtttcctgcattgcaggcggattctttgcctgctgagcctttggggaagctcaaaagtgggttgggattatctaattcagaggtgatgaagaagctgggttaatggtggtgaattataaaaccacataagtagaaactgataatccaagaaagcactttcacctaaaaaggattaaaattaaagactaagaaaatatggatgggaaaagcttttacttaaatttcaggactctaaacaaagagatgcagcttcttcttattttaagacaaagtttccttagaacatgggtggagagatctatctttatcagaataagactgagtcaatgaaaagggatttgtaatctgtgctgaaagattaaatttggggaatgatgctagcgtatcaatagaagaaagaaatttatatcattaattctaaaaaggtcaagaaatctttgtacatttttacacttgggacattaaagaattgttccatataatcctacatgaatgtattaaataatataaagtatttcacaacttcactcagaaaaaagttttcactagagttcaccccaaacctacaaattcagacttggaaatacatacttctaataagttctcttaaagagttcaccccaaacctacaaattcagacttggaaatacatacttctaataagttctcttaaagattcttatggagtcaagtcataaacaactcacaactaaatctaacaactaaccagcctttccaagtgttagcactgaagatggtcctgggcacacgtggcgtcacggggttatctctttgctgacctatactgacaccacagaccaccaaggtccaggacatgccatccttctgggcattttcagcagcctgcacactgaacgtccttctgccacttttgattccacaaatctatcctccacccatcgagccatagcgatctttcaacgtgtacaaatcacattgtgtcagtctgccattcacaatcctccagtgataccaattactcgaagtataaaatccaaactcctataatctacaaggccctgcacaatctgcctcctccctagttcttccacctcgttcatcatcccaccatcccctatccaggtctgaaacgaagtctgaagaagtaaccaccgctatggagggttggatgtctggcagaagggttgtgatttggtttggaaggaatctattttattgataacgtgagacatacatgggttaaagaaactatgaggtccccttgagttccagcctcctgcacgcacctaccgcatggtgccgttcattaaaggctctaagggaagggtgataaagggaagctgtccttcaaggcccatcaggtaaactgaggaccaactaaagggatattctggcctcagggaggctgccagtgggtcacgcctacagcagggtcctgccctgtgagaagagcagtatactacagcaaggggcgccttcagcactaggccgagcc

SEQ ID NO: 56143 - DNA, 1704 bp, Bovine  19866881143858
  misc_feature (1)..(1): n is a, c, g, or t
nctcctctgtcctggaattctcctggcgagaatgttggagtgggttgccgtttcctactccagggatcttcccgacccagggatcaaacccacatctcttgagttgctgactggcaggcaggctctctgccaccacaccacccgggaagcccagagaagctgatcacctcccacacagactcctaagtgacactgtactatttttaaataccgaatctgtctcaaattgggaaaataatttattgaaagctttaatctccatttggtagctctatcttagcaaatttttagaactgagggaacaaaatcaagagcgtggtgattaaagagatggagctcagagctgaggtctaatcctggtttcaccactaacggggatcctagacaaattatttagtcattcttagttacaagtccctcatctgtaaatggaaacaatgcctacattgtagctttgtatttggtgtgtgtgtggtgaagagatgcctttccatttcagcttggtccacactgttgacctgtcttactgccggacttccctacggttctgctctcctttacgttcacaactgtacacacgacaccaacaatagaaagcacaagacaaaaagcctccatgagaagatactgctgcagacacaacacagtgttgtaatcttccgcatgtgtctcatgcttgactgtctaaagaattcctggcagaagaaatatttaaattacatcatttataagatgggatatcttatgacaaagcaattttctcatggcattttttttctaccaataatatatactattctaaacaatgtaaagtcagagttgagagactgctgctgctgctaagtcacttcagtcgtgtccgactccgtgtgaccccatagatggcagcccaccaggctcccccgtccctgggattctccaggcaagaacactggagtgggttgccattatattaactagtaggaaaagtcagacatatgataaaccccacagtaaagccaatcagaggggggaagaaagggtatttgccatcggaattagtggatactctgcaaatacgtataccatcttgtgaaactatggaactatctaatttttctgtctaaaggttttattctatgtgagccagttaatctgtccttactctgcttaaaaccatcagctgtgacttcactttgatagaatttggaaaacaatcagagcaaagaagacccatttcatcagctttatataattatgcagaaggtaacgtgtattcagtaattcaatttctaaaattctgaaaacttcctgcagcttatgcttttaagctgcagtcattttgttttccagtggcacgaagaactttcaaacagcattccttagaaaaacgtacaaagctgggcattgtctctgcttcaaaaatagtaatttgttgtttttgttgcttaaatgatcatttggtcaggggagcctatcatctgatattttccatgtaaatctgccctaggaatttaagaagcaataaaacacagcactggtcagcagaggtttgtgaacactaaaactaaagaaatcatgtgagagattaattttgagctctcacgtcatgtcacacattttatcaggaagtctcatactcctgcagtaaaactttgtcaactgtttcacaggaaagatactttctctttcatttaccacaatgcgtatattgctttcattctg

SEQ ID NO: 56144 - DNA, 637 bp, Bovine  19866881169138
  misc_feature (1)..(1): n is a, c, g, or t
naaaaatcttaacatgtcacatgcgtacattcagaagggcatgaagacatgtatttttcttccctattaagtattttacatgtgctcataatctactttggaagatctctaagcaacttttataaataccatcagatggcaaacctgtttacctataatatgaaaatgaagcaagaactgggaacagaaatcagtgggaacctcagatgctttctcacttaatatgtggtatttatttaacctttaccatactgttatgaaggaggagaaaggatgatatttatgcccattatgtgggaaaactcaagctacataaaatttaaataaattattttagtaagctattaacaaagaaactggagaacagaagtctcctccagctttccccctacatagtacagagaataaatcaactcggtagctattcaaattaatgagatgaaatctaacatcgaactgatttgataatttcctgacaactgaggtcatttttctctccaacaaatcttagtatttgttgtgttaggaacctttatgtacaatttatcattgttaatattaggccagaggtaataaatggcaaatgtagttacatttcattcacaataagggctgatgtaatgataaacggcatcat

SEQ ID NO: 56145 - DNA, 2527 bp, Bovine  19866881268540
  misc_feature (1)..(1): n is a, c, g, or t
nctgcgtccttcgtcgtgtccgactctgtgcgaccccatagacagcagcccaccaggctcccctgtccctgggattctccaggcaagaacactggagtgggttgccatttccttctccaattcaaaggctatatatatataaatgacgttctctctttaagaattatttcaaaaggactttgttttctaattgatttgatctgcaagtttaaaaagcttacatttcagtagcctttcatccaagtaaacaatgatctacaaaatacctttaacttcattactccttccttttgacaatatgtttaacaatgatgttcttacagtacaaaaggtaaactgacttcccaggccagcctgtgtaaacaccaccaaaaagcatttacgtttacactgctgggcctcacacacacgtagtctgtgatctcagatgtgaacagaacatctccctccaggtgtgctggattagtttacctcacagtcagcacacacacgtggaaccaagagaaaggaatattatatgcataaaaacggctgcctacagtattgtcagcagggagaaaaaccagaaataaataaatgttcccttcaaagagggaaatgtaaatgattaagtaaattgtggtaaatatgcactcagaggcacatttggcagcaagctagtgacgaatatgatccttctgaagagtccagagaaatatgcaggcaaatctggtgaaattataagcactacagtaattaaaaagcatccattactaacagtaaagagttagggtgcaaacacttaaaattctgaaattcttaaagtaaattttaaactcacataaactatctcctctctgaactacccactgtctgtccatgtgtaaaaaattctacattcaatccggttctttctttgagaggtcagcaaccagcactatacctaggggacgtggacacctgccctagatttgactgcgctatattttaacatttcctaatagttcattttaaattctatctgctgagttagtctgatttactaacagcaaaaaataagctatttgaaataagagaaatcttaaagtttctattttctctattcattcactctttcccacattcattcagaggacaaatgaacagcccattctggagaaggaaagttgagttccctgacagcaacactgaattcccagtgtcaagcacagtgtcagagattcagacagcatgtagagatttactggaagagaggaagaaagagagaaatggaggggttatgggaaaggaagggaaaggaggtggtctacacacagcaaatgaaaataagtgaaacaaaaggaagaggatgtcgatacgaaaagagtaaagaaatgcttaagttttcagagtcaaatatgtcagcttgaattctttctgactgaaaatcctgaatatatttacatttttatgctcccttttcctcatcagttaaaatgtgactcaaatgagttggcatctgtagaaggtttagtggaaatccaacacgtggtaggtattcaggacatatttgctgtcttatgaatgcctcaatatacagtgaagaatacgtatttttaaatcaccgttaatgttctaataccgtaaagtagtgttactgccaagaaagtcaggctgaacactggccgcccttattagctgttccgaagatatacaaccatcatttagagaagcccaaagatgctaacttcattttttccaaaaacggcaaaaaacaataaatagcaattcttaagtccaatgccaagcaactctagtatttgttacatgaccataatagtccactgagggaaattatatggaagaaagaaaaaaactcttgtatttcatctgagaatcagagtcggaagcaaatacatgaacaaatatgtgataataaatatagaaaatatatcagcagagtcaaagagtaaatctcttttgactgttttgagaaatcattttatgatgaaaataactccctcttaaatttgtctaattttttattttatatttaatatatcaggttttcttaaaccggggcctacttctatgtccacctataaatttaaaaataacagatagatgtaatttcagaaaatgaccaataaaaaaaaaaaaaacaactaattttcccctcaaaccacatagctgaaccagagccactctttctaagataatagcagagctctctttccaaggagggcctggcacagtgcagtgaagaacagcaaagcacaactgtgtccacagaggccccgcaggaggtgaacactgtggcaagattgaacactggccgtccccaccaaggcgcagactctaacagcgtccacacgcgtaaaacgtgcactgcactgacaggcccactgactcccaaaccccaaccccagcagcgtctggcttctgaggtcacccacaggctggcagcttcttctgcagaagtcctcgggctccttaccttccacttctgccctaccttaagcctccgctgcacttccttttctttctttcttattgacaggaaaagctg

SEQ ID NO: 56146 - DNA, 1490 bp, Bovine  19866881354006
  misc_feature (1)..(1): n is a, c, g, or t
ntttgtcgtcttgggtgtctcgcaggcttcccccccgccccgtcccccggctgacctctggcacccacgtgggccagagccggaaagggcctcttggggaggctgcacagagcttgcgcgctcctgagccgaccccctggcaccgcgggaagctgcgtgggggcagaggtggagaaggcgctgactgaggagccgaggatctggggccgggccgggagctccggatggaatctatttctagaacccgtggattcccaggagaagtcgagggctattgaaaaaggagggcaagccactaacaagtgatgacacgtggggttttgatgaatgtgctgtatgttgcctgatagaagtaatcggttttcctaacctcggtgtgcttaactgcagaccaagttatataccagaaacttcgttcctgaaaacccagtttcccttgttctttgaactgttacctgggagataaattaaacttgtaaacagtaaaactgccctagagttggaacattccagtgcagggaaggaagatggaaggactgtgcagataaggtaatcagtgttcggaatggatatgttgagttcgtcctgtcttttttgctctggttgacctctgggtggagatgataatgggagatttgggggtgaaagaatcaaagacttagaaaattaaaaaatgtaaacccagttaaatcactgaatgctgacttgtgggtcaagctgaaactctgaagagaaagaaaaatgaataaaactggcatataggaattgtcagtgttaaaatatttatccatttaacaattgcctagttccatctgggacacctattgtatagataggaaacagaggctataaaaatttcattttcgtggagattttgttggagtttttttagaacatcagcatttgatttctctgcctttactaagtggttgagattgcagactgacacttattaattataccagatttctagttttaattagagagtctcttctgagactaaacctttttaccattagactgtttgaaacctatgagataaaaagggagagttctttcagaaaattatttacatgattttaattaatgattataatctccatggtcatttttgcaaaagagcatttaatccctcaaccagttttcatgatttgcattttgcaaaaacatgtcagccctgcaggcttattatctcagagttgtgtttttttccagatgaaacttatttgggggtgagttttagtgtgctactgctctgagccccatttcataccataacacctgtttctcatgcagagcaaaccgattggtagaaaagtaaagtttgcttctttttgccaagacatagcccttggcaaggttacctttgaaaacagtttttcatgcagagaccgtatacaagtagcatcgctgttgccaagattctctgactaatgaagggtcggggagatggtgtattctttttcattgctcgcggcacgtatatgtag

SEQ ID NO: 56147 - DNA, 870 bp, Bovine  19866881639459
  misc_feature (1)..(1): n is a, c, g, or t
nagtcatcagttttttggaactaggggaattttacccttatatatgtaaaagcaattgcatattgaccttctttataaaaatttgaggtaatgaaaatgtagccagaactacagatctttatttttcctttctctttgttgcctgtttttgtgtaacagaggctaggtgattcattttatactaatgaatcatttttaggtctaggagctgccctctaggttttctcaaattggtaccatagcaaaataaaactaagcaaaacttgatagaattaatacctctcttctgtatatagagcactgttaaacatactttacagggaaaaaaagaactccatatggagataattaagtagtataaaagaaacagctcttttatagttattaattttttaacaactgccctataatacagtagatcatttggtccacacacttaattaaaaccattatctttctttttggaagcatttattatacagttccaaaattgttcatgaaaacaaaatcatgaatctacttgtctctaaattggggcactgaacaagcagtgtaaagaatctttcattttagattggactatgttttaattttcaaatgaattgaaatttaatttgctgtaatttttttcatcaaatagaattgtatcaattgagtgaaacttttgaaacttatttaagtccctaaaagttttttgaataagagatctaaacactgaatcatttaatttaaatagtagcacaaccaatgagtcatttaaaatgtgttttaaaaattaaaatgagacactgataatatctctttgtggctttaaaaattctactttaaaaattttaaattctactttaaaaattacactaactcaaaaca

SEQ ID NO: 56148 - DNA, 635 bp, Bovine  19866881844303
  misc_feature (1)..(1): n is a, c, g, or t
nttcttttcttgttgtttttgtattaaaatgtcctctacctcatgaaataatgatagtttaggtagaaagtgggaggtaccagctttttactttgtttttaaccagtcttacttaccaaataacaagacagcaatcaaacctctatgccaaatatttgttgatatttcatttgtccaagttgtccactaagttaagattcaagaacattccctctgccctaaaatgcacagcctgaacatacagaggcagcaattactccttcaaaaatacaccactgaaaggtgaacaacttcagttcagggtgtctgactctgtgaccccatgaaccgcagcaggccaggcctccctgtccatcaccaactcccgcagtttacccaaactcacgtcccttgagtcagtgatgccatccaaccatctcatcctcttggacatgtggaaaaattaagctttcccagttctttgctatattatttacaaaaatattaatatcacagtaaaacaaatccaaacacacaggattataaacatgcaaaaagtcgaaagtatattgttgagaataaaaattataattgatgacagctacttcagtaacaataaaattagccaaattcttatctaggtttttctagttagt

SEQ ID NO: 56149 - DNA, 1158 bp, Bovine  19866880387518
  misc_feature (1)..(1): n is a, c, g, or t
nggcagggcctcctttaggcttggcctctggccctgccctcctcctcggccttcaccctcccgggcactagagggcactctcgccccgggaacggaggctgggccctggtttttcagagagaagagcaaagccaggagccctaaaaaaagggagagaggaggagggccaggctctgagcggctccctctaaccgagaagaatcaagaccagacaggtgctgacatcagggacccgccctgtgaataatcccagatacctcctccctgggaaagggtgcggctgcccaaggctcccaggaagcctggcgaacccaggggtgcctgtgggaccttgggggtcacatcctgacctctgggaactttctgcctgtggggacagatctgctccaggagtctgaaggttctggatggagggtttgctccccaacccccacctcccacccctttccatcagccccaccagcagcggcagataaagtcgaaaagtgtatcccagaaggtgacgtgcatatgtgcttatcgctagaactgattcccactctgtggccaaggggcccattcacccaccacccacacctcagcatcagactgtcacccacccaaaaagcctcccacaagccaagacactccagcccctcagccgctgtcagcccaaagccacagttatcacctcacatgttccacgtttacttgcagtctgaggctctggtgttgggagcccttgagtcttcgtggaggaaacttcacgtgacaccttgtgtgcatgccataggacatgtgtctccatggggacctgcaggagctccctccgctccatgggtggagcagcctcctaagaccactgaatggacccttttgaggaaacacctcaaatctggacaggttgtcctgagtgaagctatggagtcaccctgaggcctggggtccccagaaaacctccctcagaggggccccttgaataccttagttccatctactgttctcccttgtggacccacaaaggcccagggctgggaagaagggctctggggtggtgggcagcagagtggggcgtttctggtctcatcttgggccaccggagcaagtggcagcagccccagagatactcaagggggagggagacctgcagcctggggactgacaccgcagggcctgggg

SEQ ID NO: 56150 - DNA, 909 bp, Bovine  19866880397346
  misc_feature (1)..(1): n is a, c, g, or t
ncggtaaagaaactgccttcagtgcaggggacccaggtttgaacccactccagtattcttcttgcctggaaactcccatggacaaagaagcctggcaggctacagtctatagggttgcaaaaagtgagacacaagtgtgtgactatgcactcaggcaccatctgcgtgcaaagaaagtatccactgtagattaaaggatccagccactcaccagacagctcaaacccaacataaaatgtttgtttctctctattcaatctttttaggtgaatttacttaaacaagccctcatggatgtatgcaaaacacgcacataccaaatacaccaaccttggaaaggctcaggaccgtcttggaaacttgcctaggcagattcctgatgtcagtcacttcaactgggacagtctgctagtttcagaaatattttctccccagcccttctgagaggcaaggcacagttacctaaaatggggtaacccagaaagtgcaagtttcctaaatcacaagactgacattcaggcacacataaagctctaaatagcagagtgttacaaacacgatgggtggggtgctgatgctccccaacagcacacgtagccagagagaaactgaggccccatccccactcctctgtcctcctcaaatctgcctgttcacgggcatcagcccagtgaccagcacagcacggagactgttttgacagttagtccatccatcaaaacacatctccataagctcctgagatactgaaatacttctaatgaagagcaaagccttccattgtctattaatacagcctgtctaagtatacatgtccttgaggaaggtaaccctcttacacacatgtctgttcacaagatgtaaattaataattcatcttttccagagaaagaggtcctgatgcaagaa

SEQ ID NO: 56151 - DNA, 1524 bp, Bovine  19866880530223
  misc_feature (1)..(1): n is a, c, g, or t
ncctggatggaatttggataaactgcaaccacagtgttcagggcaaaaccaaagatctggtaacagaagaatgggatgatcctggtcacatgttgcttgtatgctccgtgcacagccattgcccagttaaggaccgtgagaacagaaattgtgatggcaatgcacatgttggcatcatccatgaactcaaagccacctctgagttcagaatttgaagactgatactgatctggatcagccagggcactcaacagaaccagcagtaccacagcattgaagatcaggtcccaggtgcccagcaggatggtgccagctgggacatggcagcacaggcagcagctggtggagtagaacggcatccagggggccaccatcttcatcactcaggctgccctcacagtggcatgctgggctactgctgcctcctcggccactctggctccactctggctccctctccccgccctgctcaccacccacaagggctcctagctgctgtctctgacagaccacaacagctgatttttgaagtgttcccatatatacccactcttataggggaacagccctggaaatgcaaataatgacaattatttgggacaccagaatgtctgttttattatttgtacctgaaattaaaagaaataccaaattaaagtcaactctttcaaaacggagtcccaaatccatggccatgactgctggtgtctagtagggcatttagctgaggtaatcagaggtaaccaagggtaccgtctgagaagtgagcttccctttgcaaggaaactcaaggcgggcacacttttaagatgatcttctagattgctattccatggaagatatcattcccatggttaggttattttatatggcatacaaaaaggattctgtagctgtgattaaaatctctaatcagttgactttgttacttaaaagggagatgctcttgaatgggcctaaactactcaaatgaaaccatttgggaaaaaagtctagagtcagagacagaagtcagagagatccaatacagtagcagacacactctgttggccatgaagaagcaaattgccatgttgttttgaagaactcagagccctttataaatgtagataatcccgataccatttacaaaaaaaaaaaaaaaaaagtggctttccaatttaactcttttatatagtggacggatcaactagcaattttatgctgcatagcgtgaccccatattatatttgtataattgggaatgtgtccttactagcatactgctcatactgggacttctctaatggttttgacatcagcccagctacatagcaaagaaaattccacaattaggcttttgtagtttgccagcataaatatgtaaatgccagcattccttctacaaagtattctccagcatgcagaaaccattaacattgagccttttgaaataccaaagccataatgatcttttaaattcacaaatgtgatcatgacaaatgacatgcttaaaataagcatgactgtttaaaataaaattac

SEQ ID NO: 56152 - DNA, 732 bp, Bovine  19866880814224
  misc_feature (1)..(1): n is a, c, g, or t
nacatgaatgggaaattaagaaatgcagagaagggggaacaggagacccctcaaagggagaactctaacgtgggctccagggacccccccagcctcttacttgtaggccacatcacaccagcctttggtgtagacggaacgggactgcaggcccctcagcttttgactgcacgcgttttgctcctcacattccatccctgtgatctggtccgtgatgacataggccacgggccgggtcagctgggccctgcaggtcagggatctcgctccccactccttgcgggagacaatggtgggtgcacctggcgggaggggagaggggaaataggctggcatgctgaggccctgccatgccctccataggctgtccaggccatcctgaatcctctgtgatgggagaggccccagaaggaggcctgcaccacctcagcctccccttcccttctccatctcttgtttgaaagtgaaagtaaaagtgttagttactcagtcctgtccagctctttgcgacccatggactgtagaccaccaggctcctgaggaaagttctgccactctcctcaaaccagcagctccccagccagagcctgcaggaagccccatgaacactggggtggggggcttccctcttccagatgaacatgcactgtgggcaaggctgtgagagccccacccaggaccccaggacccccgagggcgccctcagtatccttacttgggagctcccgggaa

SEQ ID NO: 56153 - DNA, 1164 bp, Bovine  19866880880247
  misc_feature (1)..(1): n is a, c, g, or t
ncctcctgtaaatctgttatcatacttccgtaattaaaaaaaatttaaaaataggattactaatatcttacgggaattttataagaattaaatataaaatagcagcactaagatgtaaaaatgtccacacagagtttattcaaatagctactcaagagttttagaaattgttattatctgtgctggaaatctgtagatgaggcaccgggctcctaggagggaccatgatttctcagggtaatagtaggctggtggctagacagaggtgttagctcacctttgctgagcaactgctaagggtcagccttgtcctgaggaccttaagaagcctcaccaggtgctggtccttaggaggttctcagtttggcaaggaggcagacgggggccatgcaactggtaggtgctttgtttgaagggtgaggatgattagtctgactatcggtgtctctcccagggctgtgatccatactctccctgttggtgacctaggaccttatgaggatgctgctatggtttcttgtcttgtctgctttggatctcgcagcctggggtgagttttcttttactaggtcacaagtgcttttggcatcagctccagcctggttttgtttgtaaactatcctctccaggataagtcctccccatcagctgtgttccctatcggagcccagctcaggtgcccccaccccagctgagacgggctccagtcctcagcagcctctccagcctgcccggtacagcttggtatcagcgtcatggtcaggcatttgctcctgatgatttcacagaaggacagaatctcagaaccatgatggagacccttaacaacttagtcttgtagacagggcaacaggccccattgtggcagtgacttgctcttggtcatctgacaatttgggggtggatgcagagtccagtggttatgaacatgggtctggggtcagacagcctggcttggaatccaagtccacagcttaaaacccatagcattttagacaaataacctctctgagcctcagtttctcatttgtatagagggagtagttaatttgctttgtttatttcacaaagattttttaagccacaaatgtgatagagcccttgaacatgctttgttaactacagacggtctgtgggcgacactgtgtcccaggacagtgcccc

SEQ ID NO: 56154 - DNA, 1056 bp, Bovine  19866880935397
  misc_feature (1)..(1): n is a, c, g, or t
ngccctcggccccttcttaaccccaggctcatgttcctctggaccctgtccagataccagcgagctttctctcccctcctctgagaaggctgctgcactcctcagcccaccccaggggaagccctcagtgacggacagaccacagttccacttaccaggtctccccaaaacagagttgccaaaagacatgcagggctcagtgtcggctcccttttatagcagccaggattggccagctgcccagggcctcgggccactcagaggcagctactcccttccagtgttgctacagcctcaagtttcccaacaaggagaatggggcaatcaccgtgcagaatgaaaagtcctgagggggagcacaggaaaggtagaaggaggaaggcaagtgccaggcagtgatgcccaggaggagaagccaggaagagggcatggtaaagattctgcctgtgggctgctagcgtcccctggcatggccaaccatggaagctcgctcctaagtccctcccactgttgctgtggttatttgcaaggcttctctgtgcatctcggaaatagaactgaagttgaatgcctcattttaagtgcatgcacataagctcattcctccacagcattcatcacattgtcaaaagggtccaaaggcctccaacaggttaagaacacttgtcctagttgctgggtttttagtaacggaaggtggagtatttccactattgttgttatgtgtgtggctggactcagtggggatgtgggctgctaagcgttaagtccatttctctgctgctgtccccacaccttcacaacacctctgttctgtgaggctggggtggggtggcactgtgtcccaggagatggactctggcttggggtccccctacgagcatgaggcactgagccaccgcataaacagcagggacccttccatcctctctggagtgattatgtgcctgtgaccccaggagtctgggctatagaggaaaacaactctgtgggggtggggaaggagggcacttttggagaaggcagaaatgcttcaaccctaggaggtgggcaatt

SEQ ID NO: 56155 - DNA, 1595 bp, Bovine  19866880982840
  misc_feature (1)..(1): n is a, c, g, or t
naagaattgatgcttttgaactgtggtgttggaaaagactcttgagagtcccttggactacaaggaaatccaactagtccatcctaaaggaaataaatattcattggaaggactgatgttgaagctgaaactccaatactttggctacctgatgtgaagagctgactcatttgaaaagaccctgatgctgggaaagattgaaggcggaaggagaagggggcaacagaggatgagatggttggatggcatcaccaactcaacggacatgagtttgagtaaactccaggagttgatgacagacagggaggcctggagtgctgcagtccatggggtcacaaagagtcagacacgagtgagcgactgaactgaactgaactgaaccctttgtcagttgcttcgtttgcaattattttctcccattctgctgtttatcttttcatgttgtctagtttcctttgttgtgcaaaagcttttaagttttattagtttccacttgtttgtttttgtttttatttccattaatttaggaggtgggtcagagagaatcttgctgcaatttatgtcaaagagtgtactgtctatgttttcctctaagaccattatagcttctggccttgcatttacgcctttaatccattttgagtttatttttgtgtatgatgttaggaagtgttctaatttcattcttttacacgtagctgtctagttttcccagcaccacttattgaagaagctgtctttttcactggagtcctctgataggcaactggtcacccaactctctgaaacattagggctggcaaaccttgagagggaccctccaggtcacctacttgcccctcagattcctagagtgatagaggcatggcactctgcatagtccgccgtgtgttcactcatttctacatcagttacttactgagcacctgcacgtcactgaggatgtatcaagagagcaaacgtgcaacagcagtgccctcgtgaagtttccatcaagatggtagaggaacacaataagaacacaaacaagtgagatagttggtgtgctccatggtgaagtggtgaaagtgctatgagggggaaaaagcctggcgagggatagggtatacaaacacaaggcacaaatgcacacctttctgaatacaaaaattatcaatagagctgcattaatagaccaaagagcttaaggtattacttgtattgacttaaaggaagagtttaacataattcaaggaagattaaaagcagatttggagtttaacaagcagcaacatcaaaaccaggacaattagaagggcgtttcctggtggtccagtggttagggctctgtgctttcactcctgggggtcccggtttgatccctggttagggaacttagatcccacaagccacatggtgtggcctaaacaaacagtatagttaataggcactattcaccttttcttggacttaaatagaattttaaagaaaattggaattttgtattagaccttggagtgagtttggtctctgcctttggatggtgtcatctgtcagtgttaataattgcttacactgacagagttttgtggactacaaggattctttttttttat

SEQ ID NO: 56156 - DNA, 1656 bp, Bovine  19866881099468
  misc_feature (1)..(1): n is a, c, g, or t
nccatgttacaacataaaataagacggaggctcaaaaccagagtgggcgttaatcagggggtgagagggaaaccgaacacacgcataggcacagagatgtgaaagggcttaatcttttccgggagcagagtggccacactgttctataagagccggaagtaggacaccagctggatgaaaaggaaaggagggcccagagcatctggagagttacatactgggttgtgtactttagcctatagagtaatggtttccaaaactatatccctcaaaaccctattgcctgggatgttcaaatatcatctccttggagagccacgcctgcagacagtatgagttgctctgccttgggtcacttccagtcctttcgccctgccgccaccgttgctattgtgttaaattcctgtctctgcaggcacaaaagctggaagaagatggttctcagagtcagggcactagcctttgaatcatgagtatgctatttagtgtttttgagcctcatctctttttcttaatctataaaatggggttaatctgtaaaataagaaccccatagaactatttactgtgataatgagagtaacgtttaacaggtagtagattgtaaatacatttttgcttcctttccctcaccatcttactgataagaagattccttaaaaattttgagtcaggttttaaaagattgtttatctttgctgctgctgctgctaagtcacttcagtcgtgtccgactctgtgcgaccccagagacggcagcccaccaggctcccccgtccctgggattctccaggcaagaacactggagtgggttgccatttccttctccaatgcaggaagtgaaaagtgaaagtgaagtcctcagtcgtgtctgactcctagtgaccccatggactgcaggcccaccagggcccctcccgtccatgggattttccaggcaagagtactggagtggggtgccattgccttctccgtgtttatctttaattcttaaccatttgggctatgtgggggtgggggttctgaggagacatcagtctggaccttccacttatcttttgctgcagtcagagtcattacacctttacctgctgtatatattggaggtaaacaatcaatttcatctgaaaactctattatgctgcctaaaatagtttgacctttttaagagacagttggggcatcattgaccatttaagcaaagaagggacgtgatgagatttacattttagaaagattcctcagtttaggtggccttaggtgccttgacttgattacatgagctgatgtctgtggtgacaaccaggctacaagtctgatgtgaggatcagagtgggactagggggagctcttttgttaatgagtttgtaattgttgaaacgtgattgaaggtcttcccttgacagaggcttttctggactggagaattccttgtgcatttctggactctgctctcatctgcccaaacacctcctcaccatcctgcctgcctgaggattcaggcatgctcaggattccttctgtcttgggtgtgcccttaatagaagggtgaggaaccaaccaggccagcactggcatgtatgagattcttatcaagttaattcctaagagataaataaaggaaaacaaggatcttcattagacggagcagtagat

SEQ ID NO: 56157 - DNA, 809 bp, Bovine  19866881192178
  misc_feature (1)..(1): n is a, c, g, or t
ntataatagccctgggatcatcttcttggttgatcaaatatttatcaaatattcacactgaggcccagccttgtggagatttggagatttaggaggatctgatcttgcctggacggtgttcatagcgcagaaggaaagaccctgggaacctacacagatgtgaacaatggtcctatagtctctcaccttgggattctctgagcacatggatgaaacaaaagaaaaagtcactagagactctgcaaccaaactgatcattttctactctgtaggcagtgagaagatttgccccaagtcatccacctaatttcaacaggttcagcttttgaaattaagagtatcattggaaggatgaacaaaaattaagaatagccagaaagtctgaggaacaagctttcctggccaagacagggactggatctagattctgatcttcagtagtaaatcctatgaacagtctgtgagtaagagagaagttacacccaaagcccagggcagacgaggcaatttctgaaagcagcacataagtaccaaagaggattcaaaaccaaagtggagggagcactcaccttgccctgcttttcaatgacccccagaaaagaagtgccttggcatggtcacctaaagcagcacatgcctgaaaaactgggattaaatgagcaaagaagatgtggtccgaatatacaaaggaatatttctcagccacaaaaaggaacaaaactgggtcatttgtagagacatggatggacctagagaccattatacagagtgaagtaagtcagaaagagaaaaacatatatcatatatta

SEQ ID NO: 56158 - DNA, 1761 bp, Bovine  19866881305317
  misc_feature (1)..(1): n is a, c, g, or t
nctgagccacagtgggctcctggtctagttttttctgactgtatagatttctctatctttgactgcatagagtataatcaatctgatttcggtattgaccatctggtgatgtccatgtgtagagtcatctcttgtattgtttgaagagggtatttagtatgaccaatgtgctctcttggcgaagctctgttagcctttgccctgctccattttgtattcaaggccaagcttgtctcttactccaggtatctcttgacttcctacttttgcattccaatcccctatgatgaaaaggacatttgtgtgtgtgtgtgtgttagttctaggaggtcttgtaggtcttcatagaatcttcattctatcttcatataatcaacttcgtcttcttctgcattagtagttggggcatagacttggattactgtgatgttgaatgatttgctagaagagagacaagagaaaacatgtgaatattttcactagcaggcaagaagaaaatgtcatatgttcctaaatctccaaataggaaatgataaaggtcaatcaagagtacaacaaagagagaaataaagtgttatatagcataacaaaaaggtggtatgctgtataattccctttgtatgaagaaatatctcaaaatattatagctaaattactcatttttaagcttcatataaaaggaattatacgcataccatcttcttgtctctcttctctaagttgacactatgcagttttagtttactcactggtgtattttgtataccattgcatcctatgtaatacttaacttctctctttgttgtactcttggttgagctttatgtcgtttcctattggagatataggaacactacggcattcttcatgcctgctggtgaacatagtcatacattttctagggtatgttcccagaagcacatgcatcttcacatgccaccccagggtttcattctcttaattaccatcaattatttcaaaagcttttgcctttagatctttctcatcttgagtcactacttttgttggagcaaaacctcaagaagctgcatcagaaaacataagcctagactttcgtatttgtggaaaatatattattttattcatatttgatgaatagtttggctagatgtaaaattgtaggttcaaaaagtattccccccttgaaattttaaaggctttgctctttaatctttgagcattcatatttgctgatgatttcttctttctctcatggcttacttagtctctcttctgctcatccccaagacagtcaacttctctcctggataaacactattactggtttctaagtaacatccagctaatgatcatgcagatatacaagattttcagagattcaatttgctacaaatgcttcaattattcatcattgaaaacagtaaggatcaccagtcctttagtcatttttcctgtgtatcaagaagtaattattcttctttctaagtcagtaacctcattaagtactcttttcttaagaaaacccaattctccttcaatttatcaaacataagtgacaacccatataatttattggtaaaaaagtaactttggaatccattagtaattcatcaggcaagaaaagcaagtttaaaattatgttggtagaactgttctaagtcacatgttccttagataattcttttgctccagcaggccccacctagttcttggacttcaacatgaaaagaatgtcacgagagcacttgacccatcccaagacatgcctcttccttctgg

SEQ ID NO: 56159 - DNA, 873 bp, Bovine  19866881354079
  misc_feature (1)..(1): n is a, c, g, or t
nactgaattttgatggactttgcaccaatcaccaccaccaccaccagaagtgaggagaagaagttggtggtgttgcaaaactaaaaaacgggataattttgtatctgtatcccaaaacaatgacagaaagtgattagatgttgaaatgttggctttgttttaaaaaatgaaactaaatgaaatgtaaatggttgattccaaatagcgaataaggaaagatgtgattagatgtttggggtcctggtgattgatctttgtgcctcattgttgacctgctttaggcccttaatttctgccatgtacactctttagagatggatttgtgactgtgtggtgcaggctgctgtcctccagattctttgccttcttctccctggtgaaggtaaaatgcagaataaagctgactgtaaaacattcctgacttgatgtgtgctcattcctgctgttcttgtgatgatcattttctccttttttgacaagtctcaaataggaataaaaaacagccctccaagatgtacagaacagccatgctgaaagaggcctccttaaggggtacccagaccatcccactcccatccacaacatatcataggtccacccatgcccatatttcatgcctgagaaaatccagctgagactgggacttcaacacttcaggtccaggattctttccacaacagaatctttcctctctgacccttgctttccagaggaaaggactaatatgggaggaggggccttcaatggaagagccatgatacccacaagcatagcatccctctctgaaggaaaacccaggtgtgcttctaagatgaacacaaacttgagggccagaactgtgtgccctatcatctggccaggtttcagaaaagc

SEQ ID NO: 56160 - DNA, 1305 bp, Bovine  19866881355686
  misc_feature (1)..(1): n is a, c, g, or t
ngctccttggaagacagaagactagagtggagccttgacaaacgcttaggatttcaaaaggcccaggagaggaaggcacacaagatggaagtgacaactcaaacagagatttaaagtagagcaaactgggtgtgcttgctttgcaacttttcctttcatccctctaacttttattaacctgagttctaataaaagtttttccagaaggcaaagtgacagatccttggtccatcctgttttcttggtcactatgaaaactctgagaagctaactccactcttagaagtgtcataaatcaaggttgagaagatgaagattatctgcgttctcccttctttttcttcccctccaccctactttacaacccgagtgacaaatgactccaatttccctccagatctcctttcaaaaaatcactctctgcaggaggccgtaggttgtctgtcaatttgggccctatcttcctcgtgtccaaaggagtgtgactttgaagaaggatctagtagaaaggactgaaagggtccatatgtcccttgacccagacagacttcagactttaggcatacatttttacatggctgaagatgagatgagcaaggcggatcttatctcaccacatcctgaaccagtttgggcagacaagggacccagtcctagttctgaggctgagataacgttttatgaacattcttttgcggctgcctctaatgagagagatctgatgggagcccctccctgctgaggtatggtgaggacccagaggccaaaagagaggctgattaacaggcatcccaagcaatgactcaaaccatgggcaatttcagacgaagctcgttatggtgactccacaattaagacctcagcccacgtggccagtcagtcttgcaggaggctggaccaagcactgtataaaagtcctaccagcctgggctcctccatccacatcctttgtagaagcttctagaagatcaggtaagtggggacatctgtgccctctctctcactttcagttctgtctctgggagactactattctcttcctccactggactgtactttctattgattttttgaagtgatttgccacttcttagggcttcccaggtggctaattgaagagtctgcctgccaatgtaggagatgcaggaatcatgggttcagtccctgggtggggaagatccactggaggatgcaatggcaacccactccagtattttttgcctggagaatcctatggacagaggatcctggtgggctacagtcccatgggggtcacaaagagtcagacacaactgaggatgcaca

SEQ ID NO: 56161 - DNA, 729 bp, Bovine  19866881779620
  misc_feature (1)..(1): n is a, c, g, or t
naaaagaaaggtaactcaggaaggtgagtagtgatttttaaaaccataggatattgctcatgaggaagtggtttaaagagagatgttctaagagatcaacgtataatactaggaaatggttgtagcaaagaagttaagacgttggagtttgagattgaatcttaactccactgtattctagcttcattgatcaagatctttcagccataagagatggcagttcaaggcaagctcgctgaagaaaaaaggggatatactatgttacataactggtaaggtcactgtgataatttacaggtcaatgaaccacagccccgggacccagaacttaagaccatccatctatttgtccattcttctctcatcactgtctctctgcacgttggcttcactcttactgtaacaaggtctctctatatatcaaggaatgtagccacagactgttccagctttgtaaacccagggttcacatagcccaggaagagccttgattggccccaccgggttcacgtactcagctgttgaccaatccctgtttccagggacgcagggtattataaacggccagcgtgggtaaggttcccagcctaccatcaaggatctctttccaagtggaggaagcaagttactgcagtcactacactcacccgtgaccttacaaacatgacttaacccccgctgggaatcagggaggttcctatcactcctgtaacatgaggacactatcat

SEQ ID NO: 56162 - DNA, 3937 bp, Bovine  19866880480818
  misc_feature (1)..(1): n is a, c, g, or t
ncagacttgtcttgatcgtagcttaggggaaaaccttccgtttttcactgttaagctattaagtttttcatagatggctcttctcagattgaggaagttcctttccattcttaatttgttgagtgcttttatcataaaagggtgttggatttagtcagatgatttttctgtatctcaagataatcacatggattttctcccttcattctactaatacagagtattacattaactgattcttcagtgtgaaccacccttgcatgcctaggttatcccactttgtcatggtgtgctgctgctgctgctgctaagtcgcttcagtcgtgtccgactctgtgcaaccccatagatggcagcccaccaggcttccgccgtccctgggattctccaacccactggagtgggttgccatttccttctccagtgcatgaaagtgaaaagtgaaagtgaagtcgctcagtcgtgtcggactcttagtgaccccatggactgcagcctaccaggctcctccgtccatgggattttccaggcaagagtactggagtggggtgccattgccttctcctgtcatggtgtagagtccttttaatgagctgctaggtttggtttggtagtactttgttgggcatttatgcagttatattcgtaagggatactggtctgtaattttcttgttgtgtgtatgactttcaacttgtgtgtttttgtgattgtgtcttttgtaaatagcatatggtaataagatttttcctttacttttagcttgacaatcttcatctcttcctggaggggttaagttattcatatatttggaaccatatttttgtacaaaagttgtcttactcttttgatttctctattttctttctttggttcctcctcaccctcactttttatggttttattgagttccctccattttttcttttttttttttccccctttttgacagcatgaaagttgtatacttacttttcttgtttatagtttattatgatgtgtctgggtatgggttttcttttatttaagttgcttgatattccattggattcagtgaatttgagaaattgtgtctttcatccatcctggaaagtccttagttttcacttctttgaatattgcttttccccaattctcattattatgtctttctccatctctgatgttgaatcttctcagtttatttttctgggttttctgttgctctgtgcttccttctgcctgattcttctggtcggtcattcagttcactagttctcttcagttatatcccagcagttttttaactatccattagcttcctaattttataatttctttaatttccagaaattttatttggctctttttcaattcttctcattttctttctcctgtcatatttttactctaaaacatattaaatatgtttagtttatattctttatcttatctcagggtcagtagtctttgtgggtttggttctgtgatttgttgttttttcctgatttttttctcataccagtttgtttgctcttatttcagtgtttttgtttgtgtgtttcctgtattttaaaacttttttggagggttttgtttgtgtgtgtgtggttaatcttttattttgaaattcattttaagagtttgtgtcatgcaggtagtcatttccagtcctaaattcaggcttttggttaggaatcttaaggtgatattcttttcttttctgtatagagccatggttcagatggtcaaattcccttcagttggtcattttcctttaaatactcatccactgagtgtcatctatttggaagtccccatttgagggaagatggtgcctttgatctgatctcctactcatattagccccacctgtgtttcttgtctcctgttaaatgaacattctgagccactagagaatgtgtagttggtgcactatggacggtaggccagctccaccttgtggcctgttttatatggttcactagtgaaggatgatttttaccacttgtaggaaattgttttttttttttttttttaaagaatatgtgagactgtagtccccaatcctaaaatatttactctaacattggacaccaagttcgccgacctctgctctaaagtgtcaggcgttcacaggtgctgttggctctagcacttgagtctgttggtggattagcactttctgcctctaatgtcttgctttctcagctctgcattcgaaaggctttttttttttaatgttaattttcagtttgttgtattgggttgacatctaaatcttctatttgtatgacttaatcagttttctctttgttttgtttatggcttcaaagttctaaaggctttctgtttattaatcttaaaaaaaaatctttgtttaaaagtagttttggtatatggatgtacataatttcttcagttcagttgctcagtcgctcaggctctttgtgaccccatgaatcacagcacgccaggcttccctgtctatcaccaactccataatctcttagtcatcttaattttactgagtacggtaatggctaacttagccttaaattttacaagatgttttgttaagtatattatgatttggatttctgcagtggaaattattgtactaattttatattctaatcagtactgtaggaatagtcctagctcactaagtctcacctatattgagtatgatcattttaaaaacgttttaaagttttttacaccagaaatgatagttcactgttgctttgcctcctttttaaaagtcattaaggttgttggatgaagaagaagcgactgacaatgatttaagggcaaaattcaaggaacgttggcaaaggacgccatccaatgaactttataagcctttaagagcaggtaaaaatgtccctaaatgactttcacttgagtaagttctcattttgcttgattgaattaggcttcatatgaaaagccaggtgtttttcttcagttccatgtaaaataaaaaataacaagaatgttcatcataataaattcagattcttaagaaagtgaaaattaaaatgatcctgtgactctgacttcctgtcccaagctttctgcgtattgtaaaaaaaagataaatgagatatatataaatatatggtgttgtgatttcatttcatttagtagtaatactaccaggtagtaaaggatgagttttaaaattaacctgaagccaattatttttaagactttgatgataaagattttgtgcttgtttagataaatgatatctgctgctgctgctgctaaggtgcttcagtcgtgtccgactctgtgcgaccccataggcggcagcccactaggctcccccgtccctgggattctccaggcaagaacactggagtgggttgccatttcctccttcagtacatgaaagtgaaaagtgaagtgaagtcgctcagtcgcatctgactcatagggaccccatggactgcagcccaccaggctcctcggtccatgggattttccaggcaagagtactgcaatggggtgccatcgccttctccgaaacaatatctagacttgctttatttctctgtaaaaagcatttaatactattgtgatttttctaaaaatgtatctgcttttcttataagtcagatttaaagagtgatcttttgagacaggaacttttttgaaataagttgtaacagtttttggagtgaatgttatctttctatattcatgagttgtagaaaaagattaatgtcagttggcttttatttagtggactgtaaccacaaggatgttttaaggttataaaacactaaagatgcaaggactgacaggagctcagtttctgtcatctagtgctttggggctgacagggagacaagtaaaattggagaacaaaattgaaagtacaaccagcttatgtacttcactgttaaaatcgttactgtgctctggtaacatttttttcttcttccac

SEQ ID NO: 56163 - DNA, 1300 bp, Bovine  19866880487873
  misc_feature (1)..(1): n is a, c, g, or t
natgctggatttgtggatctatgatttgacttggatttgaggaaaggagggtcgttgcagggtcgttattatactgattggaaatgcaggcccatttcctgtaggtgacaagtgcagagaacagatgaaattgtaagggtcttctgtttggggattcagttttttaaatccagtggtctttgcttagccttgttaaatggcatttttttttttttttttgtaggttacagcagaagaagcactacagaggagtcaagaaaagcttcctatatggaatgttgcttttattaaaacttgctgtgtgcctttgggcaagtcactgaacctctctgattctggaaactgagtcaccaaatctgagtttggtggaaggggtaggcattcaggctaaactgggcttgttcacatggcaggcatagggttccgtgacagtgagtggaggcagccaggtctcaatgcctcctctctcactttctgtcggtaaaagcccgatgccaggcaaggccagcctgatgtgaggagctgcaaaataacgttgtgaaaaggtgagggaagtgagaggagaacgatcacaagctgtctacactgggttagtgctcattctgggatcttcaaggaagatgagtggttaataatgtggtgtgcgatctgcctgagttgtgactttagccaggagcagagacaggttcaaacaacagaagagaacagaacacaaggaatcacagcttgatcaccgtgtgaccttggacaaaatacttcacctgtcagaacctcagttttttttttttttatcctaagtttccctaaaacctgtattaaatctttctattctgggtactggagtcagagacgagaaaaacgaggtgacccttgtgagtttctgcagctgtgtgtgtcagtgactggggagtgggggaccctggtactggccacttctggtttgctcgtgtgctgcccagggcagtttggagcctggacccttgcctccctgaaggtatcaaggactggcaggcaagcaatgttccctgtacctccagcaggcatttccccatgggaaacctgctcttgttagcccagcttttgaattgcttgacccctttgaggcccatgggttgggaagggcttccagggcatctatattgggctcacttgtcctggctgattttcaacttagttttccagctgtgaaaaacatctatatggatggcagtaattgggaatttaataattttttgatgtttcttgtggtgcttggaaaatccactgggaatggtctatatattttcagtgtttccccatt

SEQ ID NO: 56164 - DNA, 1379 bp, Bovine  19866880542463
  misc_feature (1)..(1): n is a, c, g, or t
ntgggatctttagttgtggatgcggcgctttgttgtagtatgtggggtccgattccccaactaggaattgaacctgggcccccttcactgggagcatggagtcttagtcaccggaccaccagggaggtccctcgcttggggtcttattcatgccttataatgaacctcccagagggaaactgaagaagactgaacgcccaactagccccttctccaagaggaaacgatgtagtaatcaattcatcatgtttccctgctgacaatggaccacgatggatcccagtgtttaatgtcatcagactaatacttgagcagccaccaggttggtgagctgttagggccagggtcgcccggtcctgggatctgggctgtcagctgtcacctctctgaacctctcttttctggagcccaagtggagtgcctgcagcacccaccttcagatacttctttctgttgatgtgattgtttgtgttctgaattaagaccatggatacaaatgaagctaatttgtttctctctttgcagctggcacaggaaacattctgtctcagaggtgccatttgcaactgacctcatacattatttattggttttataatttagcccagcctttcagatgcatgcaggatgtcatctgctcatgggtattattatctgcagtttataaataagggaacgaggcctaagaagtggggacaggggttttccagggtcatgcagtcagtcaaggggagacttggaggcaggttttctgactctagattccaggttctttgggctcccacgcctgccccatgcatagctgcccacagagtcacactcggggctctcactgtccttctgttatcatgcagtgatacctgggcggtgctctgctgtttggtgaggttgggctgtgtgcaaagggcaagcttaggagccaagtgaagaggtaaacttaaaaaatgatcatttatttggttgcactggctcttagttgctgcatatgggatctagttccctgaccagggatcaaacccaggccccttgcgttgggaacacagagtcctagccacaggaccaccagggaagtccgaagaagaggtaaccttaaaaaaagaaggaagccaacaaaacagcagggtagaggggttgtgtacccatctcccatcttgaggaaatgaactatttagtgacacagcggacttgccacccaggtgcaaaaacaggggaggcagtgcctggtcccacttcctggctccatccccagggtaggttggggccacatctttgtccatcatcttttcttcgctggagcatctcttggctgagtgacagaggctgctgttaccccatcaacaccacttaaaggcagggggcttggcaagaggcagttactg

SEQ ID NO: 56165 - DNA, 2299 bp, Bovine  19866880566211
  misc_feature (1)..(1): n is a, c, g, or t
nctatgctgctgctgctgctgctgctcagtcacttcagtcgtgtctgactctgtgcgaccccatagacggcagcccaccaggctccgccgtccctgggattctccaggcaagaacactggagtgggttgcccatttccttttccaatgcatgaaagtgaaaagtgaaaatgaagtcgctcagtcgtgtctgactctttgcgaccccatggactgcaggcccaccaggctcctctgttcatgggattttccaggcaagagtgctggggtggggtgccatcacccttctccgcctgtgccatgcagtaggaccttattgtttttggtctgattcctttaaaatgactctgagttgtgtttagcgtgttgctcctagccccctggggagaagaggctctggctttcctgtgcttcctcaggccacagcctctggagcagctttgccacttctcggccaccgtcttgttttcattgatgatacccaacacggtgttgcttaaccagccagagttctccccaaagttagatcatctttagcagtggcattaaacctcatatctttttgtcctttttatgcagtccatgcagatctcatggcaaggatactggggtggtttgccattccctcctccagtggaccacattttgtcagaaccctctcctaagacccatgtgtcttgggtggccctgcatggcatggctcatagcttcattgagctatgcaagccccttcaccacgataaggcagtgatccgtgaagggggacatggacatgaatttgggcaaactttgggagatggtgagggacagacaggcctggcatgctgcagtccatggagttgcagagtcgaacgtgactgggtaatggaaaaacaacaacataaaacctcagtagactcggttatccaccagatccttcatacacagttagtcccgaagacttattgctttttcattttctgtatacccatggagaatttaatagcaggacatctagagaaggagctattttcctctcaatgcaggatgtacattttgtgtttggtctagtattgtctgtgtgaattgcctgcctggggatgggggactctaaaggcctttatctggcctcttcttacagcgacttttgtaaactcaccttattcctgcctttatgttgtctttattttgtctcaaattgttgatttatttagtttgatttgctgaataataagcactcttgtaagccgcctccagtaatttgggaaactagatgggatccaagcatgtcccataaaaagtgtgatttattgggtcaaaagatgtgaatgcttttgaggctgttcttacatgctgccaattagctttccttttcctgatgacttcccagggctgtcatctgtttttttttttttttttcttggactttaggctggggctaatgtaagcagcctttagtgaactgatactaatgggtcttaaaaaactcttagccatggaataagtgaattagtgtagactgacttgattggaagaggccatgaatgtcaggtcagttttttttttaatccatctctgtctctcctctttgcaggggaaagagggctccctgggaagcttgccctgctgctgactgatgcagggggctttctaggaagtgctcttgggatccatacctgtggaagggcaggagcagggctgggcagagggggaagctgagctgtgatgaagtatcagtgatcctcaggatggtgcctcaggtagctctgaagctgggatcacccctcagagttgtcccaagattgaaagagaaggttcagaaggatcggccagtggagtcagctgctctcaaaagtaggcgtgaccatgggcaaggcagtcgccacaggggcctgagtgctgagcgtggcctgccgggagctctcctccacgcagttgggggaatgtgtacattagtcctacagggagacagtgtctcccaaaggaagccttcagagatcgactgatttgggggcattgctaggcccatgggggatttttttgcaagagcatttcacctgcatttgtgaaggttttcccttccatcggcacttgctgccaccgccacctgcgatttaggaaatctgcctcatgcttagccttctgattttataattacctttccagaataataaccccgtccaggtgttttgtaacacaaaacagcaagggaaattaatttcaattagaaggggaaaaatacaaattgaagtgggagttgtggaaagaagcaaacaaaaaaagcccaacatgcctttctttgagtgtacttcatttacgtaa

SEQ ID NO: 56166 - DNA, 1183 bp, Bovine  19866880598645
  misc_feature (1)..(1): n is a, c, g, or t
ncaggaaagaacattagagtgggttgccatttccttcttgagtgcgtgaaagtgaaaagtgaaagtgaagtcgctcagtcgtgtccgactcttagcgacccccatggactgcagcctaccaggctcctccgtccctgggattctccaggcaagagtactggagtggggtgccattgccttctccgacccagaacggtgccccctcaaaaaagcgctcaacagacaggataattatttgaagacaatgtaactcaccttagcgttctctggttttttagtaagttctgcagacccaggaggccttccttcctttctgaccagttggagctggcacatctgttgaggacttctgccacgtcttctgtctgcctcatgtatgtgggaatactaccgttccgagagctgtaggagcgttccgaacaagcactggatgcatcgctgttcgcatcatcatctgagtgcatcccgtaagattcgtatcttcttcgagcaggttttttctgttatacgtaaagactctcattagtggtagctaaaataacatgccggtatttcacgatttctactgaccagaaaaggactggcctttgtttaaaaatcagtgtaaagcatgctgctaatcattgtaataacaaaatgttgaaattttagtttttttcagaaaacatgttttaggagttagtaggagatgaaatattctttaactatggggagtggtagaagcagaataaaactactatatggaagtcagatacataaagtggggagtgctaaaaacatgaggtttttccttttcttttttctttttgtggaaaaccaagaactactaccagagtgtaaatgaacaggctctgtgctaaaactctgagttgttacaaagaaattataacctttttaaaggatgagaatggacgagaaaaacctgtttcctgtgtaaagttctattttttctgtctctctacctcccttttcctctattcttctttcacttccattatcatttctctgccgctcttccttcacttgtacccatccctgatgtttctttgagaagaaaaccacaaagaatgatgacagcccgtttagcttactcttacttttaggaagcaagctcctgaagggttctccatgctttccctaatgtgtctaaactatctatttcaatatatataaaaaagcatta

SEQ ID NO: 56167 - DNA, 897 bp, Bovine  19866880650960
  misc_feature (1)..(1): n is a, c, g, or t
nctttggcttactgcaacctaaaataaatcactgtgtttactactttcacgttaatactgaaagctttagaaccctttaattttgctcacctcttagcactattttatatcagtcttaggcaacaactcaaatgtctatcaacagtagaatggatattaataactcgtggcacatttcatgcactaaaaaacttgaagcaatgaaaatttgtcttccaaacattttattgagtgaaaagaaactaggtactagagtacctattattcaattccttttgtataaaagttcaaaaatgggcaaaactgactagactagttagctttgatagacaataacgactttagggcaattcagtgagggtgcttagagaatattgataatgatctactagtctggagactggttacactagcatattcattttgtgaaaattaattgagctgcgtgctttaatttatatacttttctctgccttgctttgataaaaagggaaaaattaatttcctaatagttttagaatgttaagagttaattatttttaagtggtagaagtatttactcatttcaattcttgtgtgtgtgtaggaacagagagcactgtttccatgggaacttctggctgctcagtgttttagtacctctcactctgtagatttggtgtgtataccctgtccttcttagctgcagtttttaaaaataggggggggtggtcccccccctcaaaaaaaagaagatttatttgagattatattaatgttttttaacagagcagtctccatagatttaatggatccagaccggctgccagtagcatattgctaaaatatgtatatattttttaactaaaagatacatttttcctacaagttgtactggttaagaaaaacacttgctga

SEQ ID NO: 56168 - DNA, 1793 bp, Bovine  19866880681148
  misc_feature (1)..(1): n is a, c, g, or t
ncacaagaaccaaacggtgcaaaaagagaattaaaaacccacgtcaagcacacgcgggctgggagctctctcctcaccagcaacctcaaatctgcttactccccgggttgcgaagctgttcggtctttaccctggacccccacagggtgcaaggcacaaagcgggagtggggcagggggcccaggattcttctctgtgcagtcgcctcatcactcggcatgcaagcttttttctcccagaagttatgtggaaatgagggtttcttttttttttttaagtttggcaaaagatggtactatcttgaactcagctctgatgactgagaacagcccagagcgtacgcctcgccctgacacccgtgctgggccaaggaggctccagaccagagcgtgccagcacctccggttacacctgtctgtccgtggctgcagggcgccctgcagggctgtcaggggtgcactcaccagtatgcattcttcaagatccattttctccaggtcgtggcaattctgtaagagttcacgagaacccatgagacatcccctgctcccacagtgacccagtgagccggagcatctgagcaggcgcccttggaatcacagtcacgtggaagtgggcactgggggcggccacgtgtccttctctcgtctacaccttcccggggtcttgcaggtcccagcgtgtagattttagccactgaggggtttctgggaggatacggggtggggcgctcaccacagggtggctggtgggggatgcgataggaggcagagtcacagcaaccccaggaggacagcggctctgggcagcaggggggtgtggagaggggggcagaggcagaccccggcacagctgagggatgctgctgagacgagagtcggggtctgtgaggaagggctctcctgcagggaggaggctgcttccactgtggccccgcctgacaaagtgagactgagggccaggcccccactcctggtatagaaccccccagctcccgggcccaagggagaaaatatagaacgcaccccccagccccacgaggactctattctacttggggcctgtcattgctgaaggccattttttgcacactccgagttgctctggagggaggtggctgagaggctggttggtttggaaacacctgtcttacccgagctagaagcgtaaagcccgcatcagtcagatgggaacatcgggcggcctccaagatcctggggtgcggagtgcgggggagacacaggagcagcgggttaaccacgcaaaaggagagcctgctttacagtgctgagtttactccactctttgacacagaactgaggctcagggagtcccactccaaacagggcagtaaatacagggatcttcccacaataccagcacacgactgctcttgtttttcgctattattccagtatgtattgacttgtaaacaattaaaatgtattttcactgcccctctgctcacacagatcactcacatgtcaaagtaatggcaggacgaggccaaacgggtgggcaccttgagtgatgcccatcaggaaatgcagactcaggtgccctggggatggacagagtgacgccctccagacagccccaaagggagccagtgcacgctccgtcccgtcccagctcatctgacagaagccaccgactcaaccgctgcctccaggcctcctattccaccggctgcgagaagccccccgcccgccccctgctaggccccaggccctcagagtgcactcactggagtcctggggcagttcaaggccagggctgtcagggaggcgtca

SEQ ID NO: 56169 - DNA, 1769 bp, Bovine  19866880711318
  misc_feature (1)..(1): n is a, c, g, or t
ncgaagggcggccgaggcgctcgccatggcggcgttcatctcggtacagctgaaaaagacctcggaggtggacctggccaagccgctggtgaagttcatccagcagacgtacccgagcggcggggaggagcaggcccagtactgccgcgcggcggaggagctcagcaagctgcggcgcgccgcgctcggccgcccgctggacaagcacgagggcgcgctcgagacgctgctgaggtgggcctggggccgggtagggggaggctgtcggcggcctgccgcttgccctgcttcctccgcccttcctgattcttcacatccacggccggaccggccgccccaccccagcttggcccggcgcgtaggtgtggtctgcatttcttcctcctgcaggcccgggtgaccctacccgcttcccctggctgcccgccgcggtccgccgtcctcggtcctccggggcccggccgaccggccacctgggaggaacggtccaccacgtattcagtctctcttgtcacatttacccagaactagttttcttcacttttttttttttttttttttgcgggggagggggggtgtctgtgagactcctcccttcctccatttttgcatcaccgcaaaactttgttggccaggttggaatttcataatagtaatttgcttgagggaagtggcagaattggggctctggaactcatgtttgttacttactccatactgtccactttgaaatgaaccctcttcctaagttcatcgaaaccgaacgaccgatggagaattccattggttgctaagtcagttcagtcgtgtccgactctgtgcgaccccatagacggcagcccgtgtccgactctgtgcgaccccatagacggcagcccacgaggctcccccgtccctgggattctccaggcaagaacactggagcgggttgccatttccttctccaatgcttgaaaggaaaagtaaaagggaagtctcacagtcatgtccgactcttagcgaccccatggactgcagccttccaggcacctccgtctgtgtgatttcccaggcgagagtactggagtgcattggactatgttaaaaattatttgatctaactgaggttcatttgatagtctctaaagtatctttcaggtccaaggttccatgatcacagtgacatcataccttttaaaaggtagaattactgtacagtaattcctgggacggcaaatgtaatgcaagtgcctagatttctgagaatctggtgtgatgagtgccttcagacaattagccatattctatacagtgagcaaaaacaagacctggagctgactgtggctcagatcatgaactccttattgccaaattcagacttaaattgaagaaagtagggaaaaccactagactattcaggtatgacctaaatcatatcccttatgattatacagtggaagtgagaaatagatttaagggactagatctgattgacagagtgcctgatgaactatggatggaggttcgtgacattgtacagaagacagggatcaagaccatccccatggaaaagaaatacaaaaaagcaaaatggctgtctgaggaggccttacaaatagctgtgaaaagaagagaagcgaaaagcaaaggagaaaaggaaagatataagcatctgaatgcagagttccaaagaatagcaaggagaaataaaggtcttcctcagtgatcaatgcaaacaaatagaggaaaacaacagaatgggaaagactagagatctcaataaaattaga

SEQ ID NO: 56170 - DNA, 1224 bp, Bovine  19866880790313
  misc_feature (1)..(1): n is a, c, g, or t
nacacatacacatatgtaattgtcttcgtgtgtgctgtaatataaatgttgtggagtcactaagtcctgtgtgactctttgcaaccccatggactgcagcccgcccaggctcctctgtccatgggatttcccaggcaaaaatactggagtggattgccattttctactccaggagatcttcccaacccagggattgaatctgcttctcttagtctcctgcattggccgaagtgttctttactgctagtgctccctaggaaaccctttatatctgtatctgcatttatttgtaaaaaccaaaccggtagcagtgttatcatcagggtgaaggttgggggaagggagaggcaacttctatagtctgtaacagtttagtatttgtcaaagagcatctaccatttatgtaaataaggcaaaaaggaactggctcctgggcattgcttctggtcctgttgcctggcagtttaaaaatacaaagctatattggagcgcacacaattcagtcaacgagtattgagtgcttcatctgtgccaggcactcgaccagggtgggggatgccagggtgaaggcgatctccgtttagggtacaggcagcacccatgagggaagagggggtcgctttttcagttttttatttctctcaggctgaaaaagttctgcagagtttggggaaacttactgtgcttccttgtccgcagagaagccgtgtggagacccgccctcgttcccacacaccatcctgcagggccgcaccggcttggagatgggggacgagttgctgtacgtgtgcgccccgggccacgtgaccggccagcgcgaaacggccttcaccctgctgtgcgacagctgcggggagtggtacgggctggtccaggcctgcgggaaaggtaagcaggaaggcaacgccatgaccgctgtgtggacggctgccctgcagccttgctctgccccctgcgctgccccttgtgtctgactgaaattatatggtggtggtggtttagtagcgaagtcgtgtccaactcttgtgaccccatggactgtaacccgccgggctccagtgtccattctccaggcaggaacactggagggggttgccatttcctcctccagtgcatgaaagtgaaaagtgaaagtgaagttgctcagtcgtgtccgactcttctcgaccccatggactgcagcctaccaggctctcggtccatgggattttccaggcaagagtg

SEQ ID NO: 56171 - DNA, 1277 bp, Bovine  19866880817391
  misc_feature (1)..(1): n is a, c, g, or t
natgtttctgtacatgtcacagacagatacatacattagtgatagatttatcaaaataacaagtcaaactcactcatagccagttctaattatgaccttcgtaaagttcaccagggactgtaatattccagaatatatactatctctggtgaggataatactgttattcaagagaaactcatgttttagacctagattctcattctgaccctaggaggtgggtgccgttttccagttctactgataagaaaacccagcctccacagtaattaagagtgtgctcctgtcccacaaaggctgagagagagaggcttgctgagactcatgagcctctgttcttttcacagaaccacaatgcctttctgtgttagaagaggaaatacagttgactatactttctcaataaataatttgtcctttctttggcagaaattattttcctgtcagtcatctgtccagaccattatatgtgacaaatcatttctaattatcttctagagtaattacaaagcctatattcatgaagaagagaactgagttcctttgaaacaaagcgttttcttgagatttccctttattcagctgaaataaaatacactcttaatcagaatgattttctgacatctttgaaagtctgataatgtaagttctcaggagtgattcttgaggagtttgtagagatgtatttatcctgctgcagtagttcttgttaaaccagcaacattgttctaatgttggtctataacagatgaatttattataagtttatttttattctccaaattaagatctttgaactgaaatttcatatttttcatgattttgctttgcattcctaaaaaattcttcttaattttccaaaatcctaatttggttctcctcagtgctcattctttccagattacctctagttataatttcagtagtcacattttgtgctgtcatatatgagtgtttggggatcagaggttcttagtgctcttactatagttccacgaaagttgtcctaacacatttccttttttatagttggtaagtgttgtcgttttatttgattcagtttcccttgcctatcattgttagttttattccaatagaagtcatctgggaacttgtgtggaggttcagtgattaagactcggcgcttccaatgctgagtggggccaagggttcaacgcctggtttgaggagctaagatctccatgctatggggtgcaaccaaaagggggaaaaaaatcatctgttcggagttcagctggttttctttcttcagattt

SEQ ID NO: 56172 - DNA, 1219 bp, Bovine  19866880914144
  misc_feature (1)..(1): n is a, c, g, or t
ntttaaacatggaataagagcactagaaaacaagaggtggcaaaaaaactgactgtaaatttagtgcttgaatataaataaaattttacctgactgttggaatctccaaacaggatacacaaatgtggtaccaacttgctgaggactagtggctgagccccaaaactaaatataatttgaaaaaaaaaaaaaaaagtaaagagaatttggttttaattaaatagtaaacaaaacactgttatacttttttcttgtctgtctcaataagacaaatatggtggagagcatgagcatacatcattcaaacatgaaaagtatgagacacaagcaaaaactaatcctaaacaatgtgagatatggaaactttaataatcatgaccgacaatgaaaactgtcaacacatgatccaacggagcaaaatgttcaactaatggcactcttaaacctagcaacctatcactcactcagaaaatttgaacttttgtattaaaatactgattttttttttaagactctgggtcttacacaaattggcattccactaaaataagtaaattaaaagatatttatttatgcttactaatattttgatgaggtcatgggttgaaagcaaacgacaagggagccaaaaaccacaaaagctgtgcggactgaatgcacttacaagctctagatggcagaaaggaccatagaggagtaaaagaaataaaacaaaggtatagttagagaagaggaagtaacactacaggaaaaattgaaagctcctacacactacctatcttgctgcacagaacttgaaaaaactaatccagaaagagaacaaacgctttcgtttacaatttcctcagactggagctctgcggcatctctgctgtcggatctctgcatactgtggccagctgcactgtctgattacctggggggttttactcagtccatgattttggtaaccacctgcactgctctagaacgcctagggcaagtggcaaaagggggctggggaaattggctacaacagctaaaataccacagagttaaagaaaactccaaatttggtccagaacagaagtagattctaagttctaccagcatatttgttatatgaccatccatttcgggtggcaaccactaacatatgaaagagaaaaagagaaacttatcagtgactagtaatttttaattaacaacatgagagagcacttacacacaaaaaaattag

SEQ ID NO: 56173 - DNA, 922 bp, Bovine  19866880973360
  misc_feature (1)..(1): n is a, c, g, or t
ntagaatcttaaaaatgaaaaaaaaagaaagttcataggtacagagaacattggttgccagaggcggtaaggaataagaaatgggtggactgatcttttttttccctttttagcttaaataagctgaataaaaataaataaaatataaattaataaaggaaaactataaaagactagccagacacctgaatcactatgctgggcagattcactgttatgaactgtgttctatgtggatttgtccttctctgtgacctcaatacatcttgaacatgaaagcacaaaaacagacaacatttcaaaatgagaggcagtgccatctactatttaaaagcaaaaggcacacgtgtattcacacacacacacgaaagctgctgccagctcgccgctactaataaagatgaaaatctctaaatgatctactgccagacttgatcacactgatctgtttctgatcggagcagaaggaaagcagagactgcaggaagatggaaagtaccgctcggtttgacggaaggaaatatgattagaatgcacccaggcagaaataatgactcgcctccccccaggacaagcccaccctcccgcctgtacccacgacaagccctgcattgctaacgacagggtgctgggaggctggtggcatctcaaatcccacctgactcatcatgcaatcaaataatacacaacttgagaagcccagacacttcccgaaggatggtgcgcaaaggcaggttgcacactcacctccgtgcatcagaacctaaaaggaactctctcattagatgggtgccccagaggagcctgggagggagatgtggggtggtgtgggtttattgagagggtactcttggaaggaactctcggggagcgaggagaacagagaggtcacgggaaggcaggaaggatgtctgggtctcag

SEQ ID NO: 56174 - DNA, 948 bp, Bovine  19866881011593
  misc_feature (1)..(1): n is a, c, g, or t
ntgcagtgcctcacaaggcccacccacctcagtgagaggacccacactcaagtgagagctgacctgctgaccaagggaaggatcttccttcccaaggaaacaatcccaggattggattctagcttaactggtaccagagtctccatttatttcctaagctattgtctgaattgaaccactgctgcatttcaatctcacgaaagcctctgtcttcagaggagggggaaaagaaatgcagtcactatagaagaaaaaataataaatgaaaagggcaagtcccactttccctgtgtgaaatctcatagcaatttctggaatggaagtggcagtgtctctaagtccccctggcaagcctgaaatagggatgaagtcctcatccctacaaaacatgaactgcctcccagctatgaagatatattttcaaaaccaaacttcagaacctatgcatttgacggtcaggatggactatgtgcagctggagctatttcaggacttatgaacaaccaggacttctgattcacacagcaaatagcccttccttggtggtgatccaagcgctgcccatggtgctatatacgaaaaatccaatagctgtatttctccaaactctatagaacataaacggacaaaacagttttccattacttctaggtatgagacaatgagtggtaggacttagatgccaaaatggcagtgcttctaaaatattttcaggatttgtgtggatgatgcaacagaaagtttgagagttgttaaaggaaatctgagctgaggagttgtgtcagtcacagctatcattacagtgctgtaacgggaatggggaactcaggagatgctttgaagtgcttccttagggctgaatttctgaggcaatgagttcactgtgaacaaaacttatcccccaagtctccaccttttacatcccagagttctctgggtgcgtgcttg

SEQ ID NO: 56175 - DNA, 3074 bp, Bovine  19866881029597
  misc_feature (1)..(1): n is a, c, g, or t
ntgtttttctttgctattattttagttaattataatatttattgtatggacagactatgctatcctttttcaatatttaactggcttcaattaattgccattattaacaatgttccatctttatacataaatctttacatgcatactcgattcatttactaataaaaaaatcctagaaatgatagtgtcaaagaatagttttcatttgttaagtattctaggtcatattgcccaactgtccttccaaaaaatgactctcagagtcatttgccattgatctgccatcaacagtactcaaatgctcaccttctcacctcttaaacaactcttaacattatgttcaaattttttttcaatctgatagccaaaataaggtctttcgctatttgaatgtgcatgtgtttaccacgaagattgagttttttcaaacttttcttcttattaaaatcatccaatttgttgtgaggttgtccatctttttcttgttagattatagatctctttctcattgaaatacattaccattctatcttgtatagcatactcctttgtcatttgcctgctacatttttatggcttcttttttagtatttctgtaataaaaaataaatttcaggactttgggttctggaaactgggtaaactaaggccttctcccagctccactctatacaatccacatagaaattatagaccaaaagaataaaattaaatatacagcttaagttaaaagacaagagaaattccttgatgccaaaaacgaaggagtaggataaaaccatgtgcagagtcgtgacacttgagaggcatgtcaaactgaacacgggccttaagggtcttgtgttttaatagttacataagagtgggtgataagctttaaatctacagaaagcagagagcaaaagcagaacttattccctaacaccagaccatggaaaaactgttaacttcataaaagagaagactggctcttaaatgaaaatatactctgtagcaactctttcacaatcaataacccatgaaactgacacaagaggaaagaaagaaaaagtaagaaaaagttttgctgaaaatgtgctcaaaatccaaaatgacaagccacactcactatttactgttacagtatacagaaaaaatgggcacagctgaacttgtgataaagaacagtcttaaaagactcctgggtgattatcttttaaatgattaaaaagaagaaatacaaatctacaaaaatcgaaaaatatgaaaaaacttattggcaaatgaacttttagaacctaaaattttactgtacaagatcaacataagactgaacgtaactgaaaagttaatgaactggaggaggagaaatgaagaaattaatgagacaaagaggcagaaaatgtctgatagaactttttaaaaggagagtggaaaataaaagtaggaacttccctggcagtccagtggttaagacactcaacttccactgcagggcctatgggtttgattcccggttggagaactaagatcccacacgccaggtggcactgccaaaaaaggaaaaaaagtaatattttaagagataatagatgagactcttccagaattaatgaaagacatgaatcttcagttaaagtataatgagctttaaaaatgatacatttttaaaaccctacccataggctcatataatgaaaccagaacatcaaagtcaaaatgaaatgccataaaagagacttgaggggaaaaacagatgatctgtaagaacaaagaacaataattaaactgacagcagacttctcaccagtgacaacagaagcgagaacacaattaacaaaaacctttaaatgactaagtgaaattatatatcaccccagaattccatatgcagcttatacatgcctcaaggaggagggagaaatagtcactttcagattaaagactgagatttacgtatcataacagaaaagtaaaaaaaagtaaagtgaaagtgttagtcgctcagttgtgtctgactctttgtgacccctgaactagatcaccaggctcttctgtccatggaattctccaggcaagatatactggcgtgattcctgcttccacggacatcaccgttcagtttctgttggctgagtttaccctgtggtcccaccatctagtcctacccagttccatctgttagggaggggtcctcatcaccttcactgacccatttcagaatctctgcagttgtccttgaaacagtcactcagccgtgcccaactctttgtgactccgtggactatagccctccaggctcttctgtccatggaattctccaggcaagaatactggagtgggtagccatatctactaaagggaataatacaggggcggggaaatgaaccctaagacaacagtgggaggaaagaagcaaggataagtaaggaaacaggtaaataaatgagtaaaattatgcaagcattgaatgaaaaaataaaaggagtaacaatagtaaggacttatttggaggactgaaaacgagtagaactaaaattctataaaaaagaaacacgggcatggggaaaggaaagatcagaattaaaatgttctaaagtccttgaattattcaggataaggctattgttgtagctgttgttttaattaactatgcacgttaaaaattaaagtgtaaccaataaaagaatagaaatagaatgaataaatttcaaaacagttgaagctaaaaagggcaataaagaatattttattaacctaaaagaaagcagggaagaaaaacagcagagaaaaggcatggtaaatagaaaacagaaaataagatggttggtataacttcaaatagattcacaatcttataaattaatcagattaaatgtatgaaacagaaattcgctgattgaatgcttatccatttgaccatatgctatttaccacagactcatctgaaacacaatgacatataaatgttagaagtctatgaatgggaaagatatgctgggcatattcaactcaaagaatgctggtgtaacaacatgagtatcataaaaggaagactaaacaaaaaaatacagatttagagatatacttattta

SEQ ID NO: 56176 - DNA, 1318 bp, Bovine  19866881183895
  misc_feature (1)..(1): n is a, c, g, or t
nctcctgtctggtttgtctcccgacattcctcttccttcctgggaatcctataaacttaagcagttaaaggtttttacaatttctatctgcaaatgaatgcaatttattctcagagactatttgaaatgagaattgtaaagacatctgaaaattatgaaacatttgctttttaaaatgcccatgtaaattcaccctaccacaaaggtttgtggaggaaaggtagaaacttggatgaagtgatccaggcgtcattgccctgggtttgttaagatttgctttagtggtttcaggggaaccaggagggctctgagtggaacatggggatttcagtaaaatatggatctaggctgcatatttaagctttcttcatttggagatgactgcttgcctgacagctcaagagaattctgagagcttcctggacttaagggcttccctgatggctcagttggtaaagaatctggctgcaatgcaggagaccccagtactattcctgggttgggaagatctgctgaagaagggataggctacccactccagtatccttgggcttcccttatggctcagctggtaaagaatctgtctgcaatgtgggagacctgggttcgatccctgggttgggaagatcccctggagaagggaaaggctatccactctagtattatggcctggagaattccatggactgtatagtccttggggttgcaaggagttgaatatgactgagtggctttcactttgacttttcactttcctgcacttaagtggtttgtgaggctggcaagcagaagactgggtagcccatgtgtggagggctggggggaggctctcattcaccaatgtagttattttattagctctagtcgctctctacccagagggctgtttgtttcactgaatattaggggctgtgcagaggcatatagctggttcctagagctgtgggtagggcccacctgggtcagcactccaaaccacgagacatctgttaaaaaattgagttttccaacttgtaggcattcctgatggctgatagagagctgccagacttcctttaatcattccatgggactcatttgacatgagtactttgacttttggaattcagatggatgttcttgatctgcttgatttgtagatgcgtgtattcttaaccatttgcctggcagttttgtgttttagaacagtcttcatcaatcatgaatcacagaagggaaactgtttctctactgtagttgaattagcagcagttgtagatggatgcttggagaaggcaatggcaccccactccagtatgcttgcctagaaaatcccatg

SEQ ID NO: 56177 - DNA, 1295 bp, Bovine  19866881222829
  misc_feature (1)..(1): n is a, c, g, or t
ngtaaagacccctgcttccatgtaggagggcacaggtcaatccctggtttggggaactaagatcccacataccatgcaacaaagtcaaaaaaaaaattctcttttaatttttttttaataaaaaatataggaacctatacagagcataaagtgggctttctgccctttgcaaaaacatgaggaagcccaaatcaacccacaaaacttcagctaaggggactcgtcttctgcatgacttacacatgtgtgtccttccaggtcagaccactccccagctgtcagtattaaccacagggagagaagcccagttccttgtacccttaatgctttccctatgtcagcactcccctcgttacgtgtgagctaatgttagaatggaacatttggggcagatcaagaagaataaatttcacagttttcagtttcctgtctaagaccagaactggaaagtcagaaaaagtctccagggaagaaggctgtgtaattgtttgagagatggtgtggcagcctcctggagacttaaccgtttaaaagaacaactcctatcgcttctatgaggattctaaaataaaacacaagtgcatatatctaaaaacagactcaatggacatagagaacagatttgtggctgccaaaggggattaggggggagggatggagtcgaagtttaggattcgcagaggtaaactaatatatatatatattaatagaatggataaacaacaaggtcatactgtatagcacagggagctatattcaatatcctgtaataaaccataatgagaaagaatgcatacatatgtgtataactagtcactttgctatgtgccagaaattaacttgtaaattaactgtactgcaataaaattttaaaaaataaataaaacaggctttggtcatgccaagctttcctgagcactcgatctacaaatgggtcagctcatctggaacgttaagcacggcccaaagctttgggcatgctacccaccgccccttccagaagcccgaggaccagctgcttcttagtgacatgggtcttggttgagaaatgggtccatcttttcctttatgagcttatctctctcttgcttcctgccagctttgccagctcctcaagaggagggctccgtctgcccagtgatacatgatctctgaaattcagccaggccagccagagaaaacacgatccaggatttcctcatttaagagagagagaagacaagaacttgaaatttttctcgttcaataaagcccataagtcaacattttccctcagttctctcaatatcccttca

SEQ ID NO: 56178 - DNA, 1019 bp, Bovine  19866881296814
  misc_feature (1)..(1): n is a, c, g, or t
ngtcacagggcttgtcattaaatcactgacatccagtgatgtacatccagtgccaaaaataaaagcgcgcttctgaaacatttatggctgagatttaaaacccctggaactgagacattcaaaggtgagtgtcccaggacagctttcagcctggcttcgaggcctcagctcagaacccaggaaggcagctctcatctctctcctggtgatacccaggaaagaaatgtgtctggaggggtgacagagcaatccgtgtggctccaagatgaggctggagaatgcagacacgttttgcttcctcttttacgctttgagcattaattctcatctgcagagaagaggaagggtctagttatctataaacaaagttgggctcaccctcttctgtgtctacaccaggtttagaatgtggtgtcagtaacatgtgggcttcccagtggtttagcagtaaagaattcatctgccaaggcaggagacgcaggttcgatccctgggttgggaagattcccctggagaagggagtggctacccactccagtattcttgcctggaaaatcccaaggacgggagcctggagggctacagtccatggggtcccaaagagtcagacacgacttagcagctgagcacatgtgcacacacatcagtgacatggtcttgctgctgatagtggagcccactggaattgagggaaaatattctgtgctctttttagacgagttggccccaagattaagcaccatgagagccacttcctagttgccatttcttcatctggtggtggtccaccatctccttttccttggcactgtctgcctttctctttacaccggttgacatatgcaaattgtgtaagtccaaaattcacttgctctgagatgcaggacaagagaagatgaattcaagtaacaccactgatgacaagatatctaacaaagcctttcaaggctagcactgccaaaaagagatagactcaggaaggggaaccagagggacctagacctcgactgcaagtcaaa

SEQ ID NO: 56179 - DNA, 1779 bp, Bovine  19866881354487
  misc_feature (1)..(1): n is a, c, g, or t
natggggtggaaaactggagctgtatttgtgataattgagaggaagattgaagattttattgagtaaattcaagagacttcagacagaattgagacgtgattattggatttggatgagggaggtgatatcaactgcttcaaatgtcagggtttaagtcccactctgtcactacgggcaaattagtttaacctccgtgttatttcctgatctgtaccatacgcactccacgagtagatcgagcgggcaaggattaatttgttgttttgtatgtagtgtttgagttgacatcatagctttcttggtcaccattgtgtatcttcaatttctagtgcatagtaggtgtttgataagtatcttttaaattaaattaaattttatatttgaaaaacattttcaagttaaaattaaggtctttttgaactattaagcataggaatagttggagtcttaaaaaaatttaagtatttgatagtaaaaatatctaaaaatatgtcttatactttaattcagaagacaaaacgctgtattatagaagaaagtattaattaacatttagttgtaaaattatataactgagtattaatgttgcaacatttagttaatagtttatttttatttttcaggcgttcatttgaatttttagatttattattacaggagtggcagactcactcattggaaaggtatgcatcgactcttcctcttccaccactctcccctcccctttgtcatcagttctttagaaattgatggtattggatttgcattatttcccattttcctttaaaagttatttgtactgattttcctttaaagctgaggtgctcctcttactcatcgtagctgtgattttcttctttgtggggtgaatgagggtctcttaggtgaatgggcaagaaattccaggttaaattgggcaagaaattccaggttttataagaaattccaggttaaattgggcaggtagtttaaaatgtatttctagtcatgtaagataggtttcccaaggtgcaattaatcaagtaatgaatgatttaggatagaagaagggcacttcttttcagaggaaagagatcaaaaacgtgagagagatctgttggcagatttctccacaccagctgtcaggtgtcattggccgtgtatatcctgggcagtgtttaatgaagctctgcagcgaaaaagaggaaaataagggcagcgagtcagtcactggctatctgtatggctgtatttctcatttgtttcacatgtgaagcttgggatacacatgtatttatgttgaatacattgctgattttccattcttatggaaagcattaaatttattcacatcccatttttaaaaaatagaatagttgtttactgcaggcatgatataattccaagttttctttaagttcttttgtggcagctgctattcagtctggttagtaactgattgtactgctagcacatttctacactggtaggttagtgaggaaccacacacaagattttctttaattcatgaaaaatttaaaatgttagtactatttgtctggattccatataaaaataattatgttcaggtttataatgtttgacttgtcagaaggaaaccatacatgaataaaattagtggggcagattattaggaaatcttgcaatcttagattcattattatatgctagttgccttttttctcccccttgcccatttgtgattgctgtgtgatatacagtatataggcagtatcgtttgtggtgaaatagatagttttatacatgatcccaaaggt

SEQ ID NO: 56180 - DNA, 1024 bp, Bovine  19866881370033
  misc_feature (1)..(1): n is a, c, g, or t
ncagaccgatattctgtgagctgctcttccctagaagaaatctgcagatatttgtggccactgctagggatcttagccatcttacagggctagagaaacagaaaatagggtataactgccaaggcagcaagggtttgaggtggccagcataatgatgagagtggagtcacagagaagtgagtcagacactagataattttgtcccctggagggagttgctgaaaatctcaaactatgccagaggcaagcaaagaaagcaatggcgtgtttaccagtcacacagtgctgtgtaaaagttttaaagatgatttatgaatctccattataatccctccacaacagtgccctagaaatgggctacttactatatggactattttgggtgtattaaaaaaaagtatatgaattagtggtttccagtctttctcaaagatatgaacatattctaacaaaacgtgtctgaaaatgttcgcacaaactttgaatccctaaaactcaacccaatgagaagaagctatacaggcatgtaatccaacccctgaggcaacagaccaaaggaaataagcacattcagtcatcattcttccaaggctttaagaagaaagcaatcagatactcagccatccaacttaaggaactctgtggagctgaaaagaggaagtaatcagtaatgatcctttatatgaccttacttgaggctttcttgggagctagatgaggacctgtctgattgtggaagagatgctacactgccagaactctttaagtaagtctgaagactcttctgataagacggctcgagggaattatacagtgtttcagcttcaccagggaagtggtttctaagacccatatatgtcctgtaaaacaaacaacaaaatttaagggttttttctaaaaaaacaaaaacaccttaaagaaataactttgcatgattacacattaaccgtaaaatgtgtacattcaagaaaagcaaaagtttttaaccccaaaggttttaatacagccacaatgtgccaagtga

SEQ ID NO: 56181 - DNA, 1092 bp, Bovine  19866881406046
  misc_feature (1)..(1): n is a, c, g, or t
naaatatgggagcagattatgggtgagaaaacaggtctggaaacttgtttttgtgagagctagtgggatagaggtcatagtatttctctttgaaacattcattttctttagaaaaaaatataatctgatgaatttttccttctcaatcttttacagctcttgcaagcttaggatatgaaaagagctgtgtgttgttcaattgtgcagccttagctagccagattgcagcagaacagaacctggataatgatgaaggattgaaaatcgctgctaaacattatcaggtacgcagaacagtagttactacctaactgtcaacactgagttggattgaattgaaaatcatttgcgtttagggtttgtaaatgtttctttacatacagatgcttccttgaaaaataatgtattttttaatgaattgatacatttttttgaagtccttagataaaagaacggatttgtaaacccagctctgttttcctcaccattgtacacccggcacctagcacagtgcttggcacataataaaggctgagtaaatgttgggagaaaaaatgattaattgtttgagataaaatctttggcgagtcccttttaaatgcatgacctcatttaaaatatttgtacattatttttgcataatttttcttagcgagatatagttaaaatttcaccagtgtcacaaaagttaagacatcttggcaagaaaattttacctctaagacttgtgaagaggtcatagttaaatgtggtcagatacgtaatgttattaactaaatgtaggttttacatacagtcagttactaatatggcatcttatttggcgagagtgtattgttgactcagcttttttttgcttcaatttaaggaaaaataagtgattattgtgaagtggtaatctataattatgttttcatgttttctgttgctttatcatttacagagtacgttcatgttctcttgcacacttggtgatgcacgctgcataatgtcattcttgttttccagatgaggggactagagggcagaagtgttaatgcagtggtcccctggggtttcaggggttctaaattttagggaatcccaaaggtc

SEQ ID NO: 56182 - DNA, 1139 bp, Bovine  19866881950190
  misc_feature (1)..(1): n is a, c, g, or t
ntttgggaaccactgggactgtacaacctctgaaactcttctgcacgacctctgaaactcttctggaattcaatcccatctctattttcccctggttcttccgagatctgaaagccttttctcaacctcattcccaggaaactcttcctcttatttcccctaaaagttatactccctagtttggctttcatacttttcccaacccacagtctaccagagaagataaatttattatcttttaaggaaactgttcctaaatctacgtctccacctcttttgagttttaaatatattacatctaaatgccaaagagaaatttctacccagatataacacagaaaagtcaaatttgacctatctattgaaaagaataattatccacaggtcaaaccaagttacaaatcttaaagtcaatcatcaattccttctaaccagcagaaccattggttttcacctctgaaccctctttcaaaaccatcctttccccaacccacagacacgatacttggtctaatctcttcatctctcaccagtttaatgggtctgtttctctctagtctctggatttaggctttttgagtcatatacagtttcattaaatcttagaaagtcactcatctttctaaaccagttttagtaagaatagtgccttttctcactgtgctaagagggagtttagttagataacatgtataaagccctttcacagtgcccaggtggaataagctatgagggaagaacacaaattgatagcacacttgcaactcttcacaatctactctccaatggcttcaccctccaaaattcccgcatcacccagagtttcaactcttatcaataattatattaatatgtgttaatatggtaacttatactatatgatactgttatataatgttatatagtatatatcctataatgcatacacattatactatagttatatgtaatattaatattattcattgtagctagtatttattaagtcttgttttaaggactttacatgtattccactcatttaataatcccacttcagaaatgagaaaattaacacacagaaaggttaacatgatgagctggtagataaaaaaaagccttcactcttctgacttttggtttttctacctgtaacatta

SEQ ID NO: 56183 - DNA, 634 bp, Bovine  19866882014114
  misc_feature (1)..(1): n is a, c, g, or t
nttaagtaggataaaaatactaattcaaaaggataacttgacatctcttttgaacttaaaatctgaatcttcctgtcctacgtcttgccctgggtagtgttacacaggtacgtacgaatgtataataaagggtctgctacacttttacgcatgtaaatgatcactaattttttaaaataggtgttgaaacataatgccctagtgccaaggaactccacacggtgtcacggaatcactgaatttgccactgctcacaatcgtggaaaaagttggtcttggtgggaaggtgggctcccgctagctttcggagaggcaggctcgccgctgggggcaagtccagaggtgcccggggccacccgggggcccactcggccgtcggagcacgtccgggattaaagggccggcgggagagggcgtgccccgccaggccgcgcagccgccgcttacccggtagttgctcgagcccacccagccggtgagagcgtcgaccgtcttgctcagacgggccaggtcctcctccagatccgggatggcgcccggtgcgccgaggtagagcagcagctcctgtccgacctgcaggcggccgccgacgtccttctgctgcacctgggcgctaagtactccatgctgcggg

SEQ ID NO: 56184 - DNA, 2599 bp, Bovine  19866880017775
  misc_feature (1)..(1): n is a, c, g, or t
ntggtgattgcagccatgaaattaaagatgcttactccttggaaggaaagttatgaccaacctagatagcatattcaaaagcagagacatcactttgccaacaaaggttcgtctagtcaaggctatggcttttcctgtggtcatgtatggatgtgagagttggactgtaaagaaggctgagtgccgaagaattgatgcttttgaactgtggtgttggagaagactcttaagagtcccttggactgcaaggagatccaacctgtccattctgaaggagatcagccctgggatttctttggaaggaatgatgctaaagctgaaactccagtactttggccacctcatgcgaagagttgactcattggaaaagactctgatgctgggagggattgggggcaggaggagaatgggacgacagaggatgagatggctggatggcatcactgactcgatggacgttgagtctcagtgaactccaggagttggtgatggacagggaggcctggcctgctgtgattcatggggttgcagagtcggacatgactgagctactgaactgaactgaactgagactcaaatccaatcacagtaataactgcattaaatgtaaatgaactcaattgtccaaataaattttcatactggatacaaattcaaaactcaattacgcactactttaggcggcactaatgataaagaaccctgctgccaatgcaggagacgaagagatgcaggtttgatccctgggaagatcccctggaggagggcacagcaacccactctagcattcttgcctggagaaccccacggacagaggatatgactgaaaggtctatagggaggcaaagagtccacgactgaagtgacttagccctagccaagagaaaccagctttaaataaagacacagataggttggaagtaaaagaacggagaaatgataaatcatgaaaatactaagcataagaagtgctggtgtgatatatgaatttatctcaactaaaaatacaaacaaaaaaaatttttttaataaaaatacaaacaagtggcacagtctgataagtcaaacaaacaagttgtagtaaacatttcagtaacaacttatatttactgttttcaaaactgtctacaattcttagtaaaaactgcataaatagaaattcaagaacatattctaactaggtactgctgcaatacttaaggcagatacactgttttccataaaaacctgggttttaactgacaacattaattgaaaatctgaatattttatttaggaatatttcacagagaaatttagggttattttaactaagtaaatacttgtattactgttttctcttttctttattcttgtgtttttatgtttttttctctcctttactatcttttaaaggggatttgggaaggatgaaagataaacccataatgtgcaattcaacttatttcacaggcagtccctgaagatagctgataaagagtcagcctttgaatctctggaaaattttaaagatccaactaaaattcagatttatgtttaagtcatttatgaaaaagaggcagatttgttaatgaaagtgtgaacaaaattaaatgtgaaaaaatatacctcaaaacataaaaagcttctttatctaaaatgatacatgctctcaattctaatgtagctacatgatatttatagaaacaaacctgttaaaatatctaattctgtttgtcccctagtagattttaaactgctgtgttccccgaatcatttcatgcttaatatttcaattctaatctacctacaccctcaaatcatgaaaactagtaaatatggtaaacaaaataacatctatgtaagactgattgttcaaataccctgaagaattcaactcggttgtctgtttcaaaatacacccatttctagggtatgaaaaaaactgtccataaattatttttaatgcttaaataaaatttcaaaaatccaagtattctccttataggctatcttagaggttgttcacactcctgcaccatgttccatacataaacagaacctcaacctttgaagagggcagagagaagtggcatagatacaataaatgaaaagttgcagaaactggaacattttgaaatgtctaatcacatctgttactaacaaatggatgggaaaataggcattcacgcagtggtggaaactggcataaacttcttggaaattaacatggaaatatttattaaaatttaagatgtgaatatcctttgacccagaagtcccacttctagaaatcaagtcggcaaaataaatgggtacatgatgacagagaatgctaactatttataataaacaaatgaaaatattttaaatgtctatcagtggataacagaattggcacaaaagtatataaccaacacaggaaaatgtccatatacactgtttcacaagttgtaaaatagtacttttaggatgatcccattatagtggttaagagtacagacaaacatcaaattttttgatatgtatctggggttctctacttactaactgtggaactctggaaaagtcatcttccttataccgaattttttcatttagagaaaataatagtagagga

SEQ ID NO: 56185 - DNA, 1023 bp, Bovine  19866880186908
  misc_feature (1)..(1): n is a, c, g, or t
ncagttcagttcagttcagtcgctcagtcgtgtctgactctttgcgaccccatgaatcgcagcacgccaggcctccctgtccatcaccaactcccggagttcactcagactcacatccatcagatcggtgatgccatccagccatctcatcctctgtcgtccccttctcctcctgcccccaatccctcccagcatcagagtcttttccaatgagtcaactcttcacatgaggtggccaaagtattggagtttcagctttagcatcattccttccaaagaaatcccagggctgatctccttcagaatggactggttggatctccttgcagtccaagggactctcaagagtagggtagcctatacatagatctcagcacccctaggacttcacagagggctaggcagagataactgcttgtgtagtaagcatgtacagattagtgacagcccacagaaacaaaacagaattcatcatagtgtcaatggatgctaagggaggtttcaggcttgtaacagattcacaggtgtcagcaacatactaaatttttttgtcaaaaggccttatactataggtctttttcctctttggttaatgacttaccttcaaaggttggtttcttcttattatagcaagttcaatgttttttccaccagactggacaacctaatgtaaaacaagtgcaagtttagaattactccaggaaagtctgtgttttaataagcaactgaatggggggaggggggggaatcccatgattttctgtatatgctttattagatcacttacttccagcaaagctcttattgctaatttgatagcttcattgtcatttgctatggcatcttctgtgtaattcttttccagaaattctcggacagttttggcacttcgacctattgcatttgccttgaaagatagaagataattattaataccactgcaatatgaatgaatttatggttactaagtaaagtttaggggttcagagtttattccactattacttagcataattactaagt

SEQ ID NO: 56186 - DNA, 1852 bp, Bovine  19866880392818
  misc_feature (1)..(1): n is a, c, g, or t
ncaaaaagaaaaaaaggaagaaaagaaaaagaactctgcttattgtcacaaagaagaaacattttaaatgcaacttctgatttttcaatagtaccaacaaagcacaagaagatactagggatatttgctgggctttcagggttcagcttccattctattgagctcagtctcaaaagtctatcagtagcagccaattagttacaaattaacagggagcaaacccagcattgaccttggttaagctctcaatgaatcctgttaattaccttattttttacttgtattattctatggtgtaatggttttagatgcaatcatacaaatgaactgcctttataccctacctacctctttttttcttcttttttatgttgaagaaaaagaatatttaaaattgcatgagctagtccctttatattgttaacttctcccactctttcccccttgataattccacttatattacttttgctgttttgggggtttcatttaacatcaccttatggaatctgttaatcatgcattattaagtagagaggaaattgatagggaatgaattttcaagtggccagagaagaaaacaatctacaatgtcctaatttaaagtcctacagatgtttaagaaagtaaggccttggttatcttgatactaatttcataaacaatatttttctgaaagatatcatttcactgatggttttcttctcatggggtcacaccacatacacacacacacaaccaaagacatctatttctttacatagaaaatcatcatcttcagtgtgtatccaattctaatttgctatggattttaaaaaattgcaatcaacagacaatgttatatttgttttaggtgtacaacacagtgattcggtattttcatctcatacaaaatgatcaccatgagaagtcgagttaccatctgtcaccatgaaaagctattacaacattattgaccatatattccttacactatacaattacatcccagtgacatttattttataactggaggtttgtacctcttaatccccttcccctatgttgcccaacatggcgggaattgtaaaagaagtactaggtctgtgtctctataacaacagcatttccctctcattacccctaagatgagtctttctttggagttatgaaaattcctctgcccccttactctcaagaaagcacgttggaattgcaaatagattccagggtggtagttatataatttgtatgtaaataattttccaatttcaacactttagaattagtaacacatttcgtgaaacaatgagaaatgcctggacgtttcttatccttacacaaagattagcagaaaccctccaactccagagacactgatgtttagatgttgtttagtcgctcagtctaaacaacagtttcgattctttgtgatcccacggacagtagcttgccaggttcctctgtccataggatttcccagacaagaatactggagtgggttgccatttcttcctccaggagatcttccgagagcagggatcgaacctgtatctcctgtattggcaggaggattctttaccactgagcttccagggaagctgatgtttggatacatctttaaaaaaaaaaatggtggacaactaggcaactactgtcaagggaaaccttaggagcatttcaactctactgggagagggtttgcaggagaccttcagagtcatttcccttcgaccctggatcccagagggtctcctgctgcaggggaaaatgttcccttgttgtattgtctcaggaagcggcaccttgtggcatcagcttcagagttgattcctaattagcctgaggacacaggggcacagattcctgggca

SEQ ID NO: 56187 - DNA, 1831 bp, Bovine  19866880478513
  misc_feature (1)..(1): n is a, c, g, or t
ntatttgtctttttgtgaccttgaggttccaaatcttagtatattttaaaaatatggtaaaactagtccagtagaaatttttatgttcctacttctctaccacaggacaacccactgtcctttattattggtctatttgtatataaaggtgtgcaaatattttattaaaagtggggcatgctctttcatcattaagcacattcctataaatatggcctcgttagcatacttttttctttttggcaagaacagttatttgtaaatttcttcatccacgtagttattctttataatatcataactcctttgagaaagatacaggaatgtctgagttcctgccctactttttgattaattttttcaaagcttcatttttatgtgtcatttgagtttgtcacaaatctcagaaacattaaaggttccctggtttctaataatcagagattgtaaagtacttttcatttattgtatgtttgaatctgagaaagtctataggttacagggggcagaaatgaaatgtactattgatattcaaaacggtgattaaaaaaaaatcagtttatatcagtattaaaatggaaatttatttaatttttatttatttaatagaaatttaaatttaaatttttaatttttaaatttcaaaacagatatatgttctaacttggctataaatatattgaagtgtttgtttccttggtgcttcttcagttttgagaatttaggcacatatattttcccctttattcctgtatttttaacttagatcgttgtcagactttttctgaactataaacagccagtactttaagtaatccaacttgaattgaaaatgtccatttctttaatgagttggtgacattttagtacaatccttattttgaaattagctgaaaactacttttttgtgttgatttgtattcatggtgttttaactttaaaggcaattttctttgaaaaatgggaaactggagagaaccttcctatatgctctttcagtgtttacatagactgctgattgatttgcccctccagtcgcttaaattgcatggatcaggattgttaaaaaccctttaacaatttgatttttttattctcacaaataacacaaaattgatatttgaaaccatttatatttttattactctgtacctaaaaattgagggtctacttagtgtctgcctctttctttatagatggaaacctgaaatgttacctgtttggtctgaatttgctggaataagcataaaatcccagaggggagtggggtggagtcttgctctttgaggagtaaatccttggctcaaatgcaggtttttctagtaccgaaggggagagctttcagtttggaacgctgcataaagtagtggcaatttttaaaaatataaatttcagagaattaaacttagaacattcagcattcatagcttatcatttttgttgataatgaatcaacaaaagtaaatttggagaaatttgttttagaccttcttcctttagactttttttttgttatgcaaaactccctcttatccttcaaaaatctttctagttgtacaatttatatattaaactatcctctatgtagatttacatttaatattctcagaagtcttgctagagttgaatagcatcagccaccgtctccgggtgttactctggcaaaaagcaacaagtaccaattatcatttagaaccaactatttattccataagcctgttaggtctaagggagggggactgttaaaattggctactttggagtatttaatttctccttaatttacttctgtgcattgaagtgtagaaatcagttcttagattaatataga

SEQ ID NO: 56188 - DNA, 2548 bp, Bovine  19866880490144
  misc_feature (1)..(1): n is a, c, g, or t
ngaatctttgtatccttgtttgatgtaagaaaacaatctacacttagagcctaggaaaaatcataaacttgatgagaaggggcttgcagggtgaagagatagtcatcacgtagagggaagcatttctgtcagaggggaaaacatggtggcatgaaaagtctggagcatttggagggtctttactactccacattatgactgtgtccaagcacaaaattctgatcaaattatcaaaagaaaattctaaaatgagtcctcaaagtggcttttgtcttcaaacacgttgctgaaaagaaatctttaaataaagttcaatatgcaaaacaacaaaagtggaacttcctggttgaagaggcaggtgagagacacgaggactacctgtttcccatccctccatctaccacatcctcatgctgcccttggtgaagaaagcacagtttgaaaacgactcaggactgtctcctcgattagcccacacataaacccataggctacggaaatattcattcctttactcatttcccagcagccaaaagcccattagccccagacaagaagcttaaaacttgagagccctggagtcaaaatccctcccctctccctgctgtgattttacctgcctgctgttcctcaaaatgaagcaagagactaaattatttttttaacatttggctgaatgtattcacttcatttgatagcatacctgagttttaaaaaagtaatttgttaaatggattatgcaaagttttagcattactgactaacatcttccctcacatatgcttatgttaacttcccaaaacagcctttggccatcagaaagacaaggagagagtccaattagctgccttggtccattctccttgatcaaacaacctatttggtgattcacattctttcagtttctcaggtataaatgtgatttagtgccttcctatctggacaccagatgttttatttgaaaatagttactagaatataaatggaatgaaaactaatcacgtttttataaattcaaataaggtagtttgtttctttgagaaaatctttggtgactgagcaaagaaaggagtattttcatcagatgaaacttgggcattgcacaagaaagccctgtgtaatctttccacatagctttgggcactccataaatattaaacagcaacagtaaaaccaccatggccatgacctgcaatacctctggattctcttggcttctcatgaacgctgtctacctatctaacggtataatgtttgttagagaaaatctaaagtgtaatagtctgtctctacttagtaggagagggaagtaaggttcctgtcaagcaagtttaaaactttgagtatttctttatagatacagataataaatttagttacttctcctgtgctcagttgtttagtagggataacttagaatcggaatgttgttgttaaagcaaatttcaattataagaacaaatacggtgtatttttcaagtttatttattgtaagggggaaatcagtgaaagtggccaaaggatataaacttccagttataataacattctggggattgaatgtatagctggtgactgcagttaacaatattttactgtgtattcaaaagtcgctaagagaataaatcttaaaagttctcaaaaaatctttataactatgcgaaatgacatatgtgttaactaatcttactgtggtaatcatttaacaatatatacatatactgaatcattatgatatacaccttaaacttaaacaggattatatgtcaaattatgttaatatattaataaagcaggggaaatttttgcttattatatttgtttgcaagggctgccatagcaaagtacaactgattgggtggcttgaacaacaaggttttctcacagttctaaaagctagatatctgagttgcaggttggtttcatctgaggccagtctccttagcttatagatgatgatcttctctctgtgtgttcacatggtcttccctttgtgtttatctgtgttctaatcttttcttgttataaggacacctgtcattttggattcgggtcaacccatatgacctcatttaaatttaattacatttttaaggccttatctccaaatatagtcacattcctgaagtatctagagttataatttcaacatatgaattttaagaggatgtaatttgtcccataacacttactttaatttgaaggagcctcatgctcacttactataaatccctcattttgtatttgaggaaatctgatctagggaagtaaagggacgtgcacaagaagagatttgccataaggacagaatgagaaagggacaggagagtccattgttctttttctgaaaatttagagagggaaaaaactgttccgtgaaaacctggctgtgtgcagtggagctgtggtgtaaaagtcattccacttgatctatggattggacatggtgaagtttacacgagaactggacacttcctcttagtcccagatgtaattgcactgacttatatttagagcaaaactacgcgacttcacttacctatcaaag

SEQ ID NO: 56189 - DNA, 1971 bp, Bovine  19866880544475
  misc_feature (1)..(1): n is a, c, g, or t
naaatgtttcagcaatgatgtctgtcatataaatattaaagcacagcttgagtcccctttgtacataggcttatacttcatgattgcttttagatgttaagggctagagttttgatcttggtcatttctccccttggttttcttgtctctaatacagttttagaatctatgcattccttctcgacaaactgtgttcaattgagcaggtttttataaaggtgtctaatttcttttcatccttcctgttgacttcttccaattttgtcattctcattcagcacattaaaaaagagtaaactgggtacttccctggtggtccagtagctaagaccctgcgctcccattgccgggggcctgggatcgatccctggttggggaaactagatctcatatgccccaactaagatccagtgcagccaaataaaaataaagtaggctgcctttgggtttgccttcagcttaatctcaatccagtgaagtagctcctgctacattctattcttattgacctgacaggttatctgtctatttgaaaaccttgttgtctggctaaaatggctgtggatatcaaactttctttaaatttatttttattggaggataattgctttacagtgttgtgtgggtgtctgccatacaacaatgcaaatcagccataaaaatacatatatccctatatcccttccctcttgaattctaattgcaacttcggggccatctttttcctgttttctattttttcctagaaaaacatcattatacgtgtcctctctttttattgcaagtttatattttaaatatggtcacttttaaattgtgatggcttttttattcccttagatacttttacaaaaatgtaagtactgacattcttccatttcactgtccgtttgtgaaaggttttaaatagattactaattgccagattgtgacttcaaacaagcaggggcatttttgttcagtgcatctgcagacttgtctgaaatgtgtgctgtgtgtcctagattaccatctagccttcagtgttttcctttcttaccacatcatccagaattctatggagcaagccatctgaccttggagttcaaacagcctgactccttaaacatttgttatatatattgtgacccttatttccttttaaatatcttctttctcctgtgggaatgtgagttcagtacatctgtgcagagtgagacaaagaattcattttctgtataacaattcctagcattcccattttcatttgttatcagacaatagaagaaagaaaaaggaatgcaagacatgtagctactggcacattagtctcacagtgctacctctggaaactacaaaaataagtattaaatgattaaaatgcataacagtaccctgaagtacttggggtttttgattgtataagatagaagaactataagaaatacaattttccataaaacattattgtgcaataaatagaatactgactcataagactcattactgattagaaaatatattatttaggtacaagaagggtaagggacttttttataatgaaattttaaaagatatggagtcaatgaaatgtgatggtgaaggctaactgttaaattatagcaaattgtgtttaaactttatgctagttctacaggagtcaaaattcatggaacactgaacagggcaaaatgaaatttgtcattaaaagtacattctagcaatcaaattaatgtagtatggagaaggtgttcttaaaatgacaagttataaagaacttgtatacatagcagagaaacagaattgccgtgtttcaaagcattggtagtctaagtggttctcaaactcaggtatacataagaattatctggaggacttgttaaaacacagattgctgggtcccaggcacctatgatacagcaggcctgggtgaggcctgagaattcacatttccgaccaatttccactgattttgcaattgctgctgctgct

SEQ ID NO: 56190 - DNA, 1034 bp, Bovine  19866880562958
  misc_feature (1)..(1): n is a, c, g, or t
ntttgctggtgactggtcagctcagtgggttcacctgaaggctgaggccgttttgtgggttgaacctaccttatccttttcccctttacctctccagtaatcagcttttacttcccaagcccacactgaagatgaactgggatgaaggatgcaggtgaataagggcaaatccatcaccattagtaggaaaaggactcaaaacttcctcactaataatgtggatttgttgtcatctgcaaagccagaaagacaaggacagcacttcccgatcatcttcctgatctcatctcatctgagacctacttaaacttcctgagactgtgaaatctaccttatttattcgtttgctgcaagtcccctggtcccccagcaaatacacatgcctcgcagaaccttggaaagtcatcggaaactctccagcagttatgaaccatagttttaaaaaacctctgaactaacaaaattatcattctgtcccagatttaaactgaattgtggtgattatagcgtatactctgcagttctggttgagagggcaatttaattagaagcctctatcttgaggctcttataacttcaccctttccctcccccctccaaaaaaaaaaataattctttaggatgaaatttctcatgctgtctctcagcctaaaggtatgttttcttgtagaaagttgagtaagattccatttaggctatttttaaaactcaagaaaaagggcaaaaagggagattttaccacttaagaaatcactccgatacttttttatgattttttttccccaaatgcaaactgcttcccttagaacttttaagttgcccttcttagtgcctttggcatgtttgaagaaatttggttgatctgtaatgaagttgttcacagaacgtgtgttgctcatatgaagatttatttccactctttgaaagaaatttgcaaggagatgctacatggggaattaggattcaaaccaggtctgtgaatatgtgtgtgtgtgtgtgtgtgtgtgtatgtatgtaaaacgggtgcattcaca

SEQ ID NO: 56191 - DNA, 1139 bp, Bovine  19866880567393
  misc_feature (1)..(1): n is a, c, g, or t
ncatggactgtagccgccaggctcctctatccatggactttcccaggcaagaatattggaatggatagccatttccttctccaagggatcttcccaactcagggatggaacccaggtctcctgcattacaggcagattaaattctttactgtctaatccatgttaaaatgaactagaacaaggttataacagcctagtgaacttaaggagccgtgagcagtgcaattgaagttctggtctccactctggcaaacaatctatgatgattacaaaaacccaacagtcatgatacagtttgtatttccaagtatatatcctgccaggctcttaaagaacacgtttgtaatacttcatgtagatttttaaactttgagaaagtcattatttgtaaaaagcagctttggttttagtgcactttccctcaagactcgaaagtaaaagttatgggagcaacagatatgggaaacagtggtatcaggtgacatctgcagtttgtcccatttatatgatcacagtaaggaagaggaaacatgagaaaatcttgtcattagcagggagactttttttttctttaaatgtgttgtaggtcagtgcttggttctggtttttgttggaagggatgaggagaaacatcagtagatacatctaccgcccagcgagtctatggactggcttggcgcctttgggtaaattcttaaactgtgataaaccaagcctgagtcccagaagggcgtcgacagttgcacaagacgcgcacacctatgacaacgcattgttgatcctggtgcagccaaaggcaggtgctgtcagtaagcaccctcctgatttctcaaccccccacacccgagaatgttgtctttgaatcatgagctgataaaaacttcatatttttcacatgtcacttttgatttagtgactgtgtaaataatcttgcaacataaattcaaaaccttaagcctctcaaagtacaaagctaaccaggcacatcatccttcatgatttgaagagataattgaatggtgttttcaacaaaagggtggtatggatattttatatattctttaaaacgtgtagatgcttttgaagctgtgtaaatatgactcttgggccggttagcagctttctttccttcttagctt

SEQ ID NO: 56192 - DNA, 1515 bp, Bovine  19866880591932
  misc_feature (1)..(1): n is a, c, g, or t
ntgctgacattactttttgtgtacagaacccaaaatggaatccattgttaaaaatttctaatcactgattaggattttttttaattcaacaagatgcttaaaacttaggctaaaagagtttataaaactatccttcttgagatttgaagcaatacacaaaacaaagaataactttcttttgaaatactgtaatttgaaaatgtttgacacattttcctttttggttgggctgtgatttttgttttttccctgttaacaaaacatgtatgggctgctttggagttccaatttgatctgcctcctcttaggtgtataaagcatcagtttggaggcagtaccccatcattccttcgtaaactatcttttccaattttcaatgaggtataccagcagcttcaatgtatagcatccttccctgacaaggatgtccccttggtatcagagcagcacgtagcacgtagtgacatgaaccagggaacctcgggcacaaactatcaccatttatcaatgttttgacatcaatgggtctcagctgaccaaagtcaccactgggcctttccctgtggcttgtcaccttcaaccacagaaggtgactgtcatagttagcttagcaacttctgattccagcccagaaaacctaacgctttgagtcaggttccgtgtaggatgaaatacatacagttttctggtaagtaaagactcctcttgtccccctgcatctcagtgcaggatgtaacagggagagacaccttacctgttaacaagtgaagcaggcagtaacaaacaaagccttgctgtaattaaacacgtacgaaggcagaggcctactactggtgtaaaccgtatgtcacaaccacttttcaggagacaaagctgaatcctagtcattaagaacctcatgggatatataagcacgacttagtaaaagtttataactgtaaacaatggtctcccctactggtgattattttctagaaactgaaatgtgcaacaacgctctcgacatcttctttggcagtaagtagcaagggtctggatgacggggctgtggtcacttcaggagggccaggtatagagctcgggaatacttcatatccctctcctgctccatacagaagatcaggtccctgaggcagattctcgtgattcttggacgaaccagctgcttgctggctgtcagactggacgtcccagaagcaaacaggttgtcttttaaaccctaaacaaaataaagggagaagcaagtataaagtaagccatctttcaaagagaaatctgtcagctcagcaagaggctgctctcctctggctcctgagttcggtgctggaggtcacatcacgatggagctcaaccaggtcctccagcactgcaggctgtcaggggagccgcagccggcacacctgcttcatgccctcactctctctcttacctggaccacagccagagcctcttaactgacttctccactgcactccattctttgcccacacagcagggcgaccgttcattcaaggt

SEQ ID NO: 56193 - DNA, 2123 bp, Bovine  19866880665680
  misc_feature (1)..(1): n is a, c, g, or t
naatgaatgtttagggaacagtttgcgaaacagggtacattaatttgggggcatttttgttgagatcctaaagtgtgagcctgtgagatgacacctggggacccactgtgtgtgtctagggaccacagtgtgaactggaactgttgacgtcacagtcagagcgcagaacccccagccctgacacaggattacagaaaactcccgagcccggcacgcagaagttacctggaaatccacaccgtgagaatgcaattgtcctgaaactgcggaccaacctcttaatgttgcacacgcccagctttcccttcagtgctgccgttgttgttttagtctctcagtcgtgtccgactctttgccaccccatggacagtagcccaccaggctcctctgtccatgggattctccaggcaagaatactggagtgggtcgccacttccttctccaggggatcttcccaaccaaggggttgaatccaagttaccgggaagccctcccttcagtgcagctccaggtaaagtgccgtggaatggccagcacgttgggggtgaagcctgccagagccggctctctgctggcaaggcacacatgcctagcactgccatcctaaagcaccagatacacacaccccttgggtggccatgggtgttgactgcaaggctgaaagctgagtctcttgggttttgcaattagctacatatgccagtgtgcttagtaactctgctgctattcagaagagaccaattcagcataatcttatgtgggagttaactcatatacttggtttaaaagatataaaagctctgtgaagcacacagataggatggctcaggggactgtaacatgagatcttgtctttcacttccaggttagcagctcttttagctaggcattgcctcactgccgcccgataggtttgcttcatcagttgtatcaacccacttcctggttttaagaagtccacatcagaatagccatcaatataacaactgctgttaatattatttttgatcaaggtgaccattaaggctgaaatagacctaactctgaactcagatttacgttttcttttaaagcagggatctctagcctctaggatctaatgcctgatgatctgagatagagctgatgtaacatagaaataaagtgcacaataaatgtaatgtgtttgaatcatcttgaaaccatcatcccccatccctggcacagttcatggaaaaattgtcttccatagaattggtccttggtgataaaaagattgaggactactgttttaaagcatgggcttcccgggtggctcagatggtaaagaatctgcctgcaatgcaggagacctgggtttgatccctgggccaggaagatcccctgggaaaggaaatggcaacccactccaaaaattcttgcctaggacatttatttagtggctaggtagatatttcagtgtcaacattcagttcagttcagttcagtcgctcagtcgtgtccaactctttgcgaccccatgaatcacagcacgccaggcctccctgtccatcaccaactcccggagttcactcaaactcacgtgcattgagtcggatgccatctagccacctcatgctctgtcgtcccattctcctcctgcccccaatccctcccagcatcagagccttttccaatgagtcaacccttcacatgaggtggacaaaatattggagttcagcttcagcatcaggccttccaatgaacacccagggctgatttcctttaggatggactggttggatctccttgtagtccaagggactctcaagagtcttctccaacaccacagttgaaaagcatcaattcttcacagtccaactctcacatccatacatgatcactggaaaaaccatagccttgactagacggacctttgttgacaacgtaatgtctctgcttttcaatatgctatctagattggtcataactttccttccaaggagtaagcatcttttaatttcatggctgcagtaaccatctgcagtgattttggagcccagaaaaaaaaagtctgacactgtttccactgtttccctatctatttcccatgaagtgatgggacccaatgccatgatcttagttttctgaatgttgagctttaa

SEQ ID NO: 56194 - DNA, 1274 bp, Bovine  19866880777818
  misc_feature (1)..(1): n is a, c, g, or t
ngtcatggtgagagaagcaaatttccttcctttaatatttatgggaagaaaagaattcaaatctgggaaatgacttataaccttaagcaataggtcagggacagaatgttgcatgtgaccacaaggaccaaacaggtgactagtctttgggaaggactctgaggtgatgctgtgaggtattctgctgtgtgtgcatgcctatgcgtgtatgtgtgagtgtactgtgtgtgtgtgttagtcactcagtcatgcccaacttttgtgaccccctggactgtaacccatcaggttcccctgtccatggaattctctaggcaagaatactggagtgggttgccagttccttctctagactgtattgtgtacctgtgctaaaatagtgatattaaataattataactaaaagaactcattatatgctgaaagttcatagaagaatagtggattcaacactagaaaaagaaagggcaaaaaaataaaaaacagccagaaggtatttctgtggtcatttaagggtaaattgacaaggaaaatcctcagagaattgcaaaagtcactatgcaaaagcatggatgccgtgccacatggatgctaaaaacagtctccagtgttccacctcctggtatccatgtccttgtggcttcttcccaccaagtacatggggactatggcttgcttctaactaatagaatctgtccaaggtgatgggatgtccatgaatccatgtgagattatgttacgtaagactgtaatgctcatctcatgaggagagtcactcccgtgttggctttggggaaaccgtgctgggaaagcccatgtggcaaggaactgagagtgttcttcagacgacgggctctcagtccagcagcctgcaggggaccgaatgctgggagtggatccagccccagtcaagtctggggcctggctgacaccttaagagcacctttgtgagaccctgaacccaaggacacagttaaattatacccagactcctatctagtggaactgtgcaatagtaaatctgctgctgctactgctgctaagtcacttcagtcatgtccgactctgtgcaaccccatagacggcagcccaccaggctcccccgtccctgggattctccaggcaagaacactggagtgggttgccatttccttctccaatgcatgaaagtaaaaagtaaaagtgaggtcgctcagttgtgtctgagtcttcgcgaccccctggactgtaacccgccaggctcctctgtccatagggattctccaggcaagaat

SEQ ID NO: 56195 - DNA, 1040 bp, Bovine  19866880791996
  misc_feature (1)..(1): n is a, c, g, or t
ntgcagctggcactaaattaggtggggttgttattgctctgcaagacagaaataaaattcaaaatggccttgactcattgagaaaatggctctacaaaagtgggataaatttcagcagggacagtataaagtggcacaggtgcccccacagccctagaacagtgtcttgggcatacttggggctcagcaaatatcttgactaccttccttgtgggggttgttgtgaggatcaaagtgtgataatgatgcaggaagtgctctgtaaatctcaaagtgcctcacaaatgagaaaggtctgcaccaatgcgagcaaagttattattaaaggcaaggaaatatgtcctgtgaggcagtgtgaagggaactgaagctgtttaagcaagagaagaatcagcgatgatttcatgagtgtaaccattttatgacggtattgacaagagagatggtcatttcgtctctattctatttgtgtcaaggagaaagggggtcggatggtaccagaaggatttcagttaaatgcgaggaagaactccttttctaggttgggtccaccccggggagaggcctacattctcctgcctcacagatgttccatttgtccaatattgacttttctaattcactgcgaactaagagtaggctctctgcagatccctgttgtaaccctgatgtctgggaccggacttgaaatatagcaaatgcacaataaatacttgttgaatgagtgaatgtcaagggcataaaatactggctcagatctcagggagtcttcattctcggagaacctacaaaatgagggtgatttattcagagaccaaaggatctatccaatgctgatttcatgactctatgtcaatcaaaaagaagtgaaaatgtttatgatacattctcatcccagtcttagctttggttctgtaactgctggtggaagggattattggcaagagtggaaggaagaaaaacaatgtggatttcgtcccatccttacctcttccctatgaagaacctttatgaatagaacccctagaagataagaggaa

SEQ ID NO: 56196 - DNA, 2279 bp, Bovine  19866880794371
  misc_feature (1)..(1): n is a, c, g, or t
ncctttgatgggtccccttagacccaaccccacccatatccatatgaagggaaaggttatgaatgaaagaattcaattgtttgcaggaaaaaagtgagtctgccagagatggaggtgatctggagcagatctgatacctaattacaaagtaatccaatacttagcagtctcacctggcagtctttgtcttcaaaggatcagacctttgaatattaatgaattcttcacctcctttcctctctactccccaaatagctactctttcatgaaaagttggtctaatttcttagcagacctctcattatcctcttattctaggatacagttacaagtatccctttttccttttgatgttctgtgatattgcctttaggcttgttttgaattgatattgtatattgtatgacccttaaaaaatacacacacagacaggcacattggagcttctacatggagatactattaatataataaaataatatggaagtattagcataggacaaacatcagagatggcttcataaaagcctctaagacatgagttgggtcaggtaagtacagataagtgggaacgtgtcaaatatggaggtggattcccaggtggctcagtagtaaagaatccacctgcaatgcaggacactcgggctggatcctgggtcaggaagatcccctggaggaggaaatggcaacccactccagttattcttgcctgggaaatctcatgaacagaggaacctggtgggctacagtgcatgaggtcgcagagagtcactcacgatttggtgattcagcaacaacaatggtggaaggtagggtgggtgtttgggaaagtggtgggtggctcacatttgttggttttcaaggaggaaaagcttacacagatggccaaactaaaggctataaaggtgtcccgtggacatctaaggacaagacgctaatcccagcctggactcgggaggaggctgccccctcctctgtgcttggtacagcctcagtcttggctccttccttgttccctgagtcacagaacagtggaggatgcctggtttagggagatggcattagaactgcagagcatgagctgaatgaaatagatctgatgtgaatgcgggggaacggtaatggtgtctgccaggttcctagcttgggtgccctgcagagacaggaggtatgaggaagagcaggtttggaaggtgttatagacagagtttgtgccccctaatccatatgcttaagacctaactcccagtgtggctgtatttggagataagggccataaggaggtaattaagttgaatgaggtcataaggtgggggggccctaacccagtaggactgatgtccctataagaagagatatcagagatctccacctccatctctgtctccacacatgcagggagacgcaggcagatgaggatgcagggagaagacggccatcttcaagcgaggaggagaggtctcaccagaaaccagccctgatggcaccttgatcttagacttccagcctccaggactgtgagggactgcatctctgtctaatccacacccggtctgtggtattttgttacagcagccggaactgactgatacagagggaaacacaattaatccacacttggatgaagatggatttaaagcaaatggtgacttagaattggcaggtcttggttcgatggaagcggagggtgagaaagagcaagaaggaagcaggaggaagggatgtggtccaggttgcagtcttggatagaggatgaactgtggtgacttgccttgagtctgaggttccggagccggacagggcagagagtgaatgtgtagataagctcttggttgtaagcaagagaaattaagatggggcaattaactgtacggaggtagtgggcttgtaacagaaatgaaacctcgcggaaacccaaggtcaggattccagtagagtcattcccctggagtccagacacagagcagccccagggctctcagcagatgctcactccaggagcaggaccaggctgcctcgatggcctgtcttctccctattggctgacttactttcattgtaatccctagagagagagattgtttggttcaggagtttcaatacaggcttctaggtagcttaggggttggttgtgtaaggacctatccttgatccagtccattaaggtgttggtcatgtgatagaatgactacttggcttgacaaatctatcccttcagcagtggctgtgagcaaggcagcatcctctagaaagattctggggtgtgccaaccagtgtca

SEQ ID NO: 56197 - DNA, 1301 bp, Bovine  19866880811983
  misc_feature (1)..(1): n is a, c, g, or t
ngacagagcatctcaggagagaaagctgcctgccacatgcatccatccactcggtcattcattaagtcaatcagctggtcatacaaccaactcggaccatcttttgtgctagattctgaggacagaaggtcagagataacagtgataatagtaatggcagtggtaacaacagtggcagctaacatttattggaggcttattttgtaccaggcatgtgctaagagatttcatgtgcattaatataatccccacttaatgcattgaatggcttgtaatttgtccagagtcacacagcttcataaatggtagaaatgaataagaaccttatttattcttgaggaattcataatgagtagactgacatgtaaaaaattgcaacgaataatatatttttggaaaacagagaatggaaagttttttttttaaataaaaacataaagtcctttagtttaatatccattgggttttccaagagtcaacaccctcggacttcttttttggactttgcagtgtaaacattgattcctcccacctcctgcccttaattcacccgggaatttttattgttatagattatctgctggcctgaattgcccttggaattccaagctcacacctgggtatcctggactagggaatggacccagaccagctcgccttggtaatctggagcaggtagacgggctgcatggggggaagaaatggagtgactctttactgtctcctctgtgctgggaccatccattactgtgtctgccggcacaggccagagacactgcagctactaagaggactgcagatgactccccatgtaacttctcttaaccagcacataagtgtgttggtagctctttcctggtttgcctggcctgacagggccaaggcacagttggcatccttcttgctgaatctcttttaattagctgtttaatgaccatcgttcttttccttgttgggcttccttagtggctgagttggtaaagaattcacctgcaatgcgggagaccgcctgcaatacgggagacctgggttcaatccctgggtcaggaagtcgccctggagaaggaaagggccacccactccagtatccttgcctggaaaatcccatggacagaggagcctggagagatgactaaactgctggaggcctccaggagccttgattcctgtaaggcagcacatattgagtccagccttggcaggcaaaccctgataggcttctgcacccccagactgggtggctgtacgtgcacatggattgccaagcacccgtttgccccctggggtctctaaatcccaga

SEQ ID NO: 56198 - DNA, 962 bp, Bovine  19866880834687
  misc_feature (1)..(1): n is a, c, g, or t
ncttgctgacccaggcatcaaacccaagtcccttagtcaaacccacgtcccttagtcgaacccacgtcccttacgtttcttgcattagcaggtgggttctttatcactagcaccaccgcggatgcccggatctaaggatagatttgtgctaccagagatcatcttttggtttctgcgctccttctgtagcaatagggggcgatgcttacatgactgaggtgtctggacgaaggacctgtgatctcttgtgagacatgcattgaccctgcctgtggctgtagaacacaaggttctccaggtggggaccttctgaatggggagcattcctgggtcctccgtgactgtcacgtgacttcagttctaaatgagatgcagagggtcagagaatcccacactttgtaagttgggagaatcttaaagactattttcatatgaagataaagagaatggaaagcaatgagataaacacatgtcccttgcagataccaggaatgaaatgtggagaggtggctggatggtcctccatcacactcagagggctgctttagccaatgggagccagacagatgtagtaagacctcttcattgccttttgatctaacgccacgtaccttgactttgccctccaggccagcccttctcactagttgataatgactgcatttgggcaacaagagaaaggcagaccgacaaacgcggacttactttttcacctaacacagccaagtggtgaacgatttggcttgtacccagttttgctgaagctatgaaggtccagtgggattcagcctttgatcttgagagaggctgtgaggggtttgtttttcacaggggctttagcctacagttaagtgcaaacacctgccggaagtagtggtaattagtaggtaattagtagttaatgttcttagaatttaaaaagaaagcttacataagtaattacttactatttcttataatgt

SEQ ID NO: 56199 - DNA, 824 bp, Bovine  19866880849988
  misc_feature (1)..(1): n is a, c, g, or t
nttttttttttttttttaagaaaaatcagcgatggaaccaaagggtcccctttcctcctttctgttgggatgggagaggagggaagtagaacagatggaagggaagagaaatgctgggttgattccagaaaccttttgaaatgccggggtcttcatttcatatctatttttgcatatttttaaaattagtttttattatagtatagtagcttttcatatattttaaaatgtccacaatagggaatttcctggcaatccagtggactctgctgtctcactaccaaggaccttgattcaatccttagttggggaattaaagtcctacaagtcatatggccaaaagaaagaataatatccataataaaaagtttttcttaaaaaggggagaggtgatgctatgctgggtattattataatgtaaaaaatccccaaaaccaaaaaacaccagtcaactcactgttagagaatccttacttatcgaacagcatttaatttgcatataattgtttacaaaatttgagaaatagttgtgtagagtttccacacttgggaagtttcatcgatatttcaggaacacagataaaaatgaattcagagcttgttacagaaatggacagaagtaatttaagagaagagagaaaataccttctaaggaaaagcaaacaaaacaaattatatctacttatgaggaagtaatgtttccagtacctgttccctgtggcagcatcattttcttaaatgattcacagagctgaagaaagcaggggagaaaaagaaaggcaagtttaaaatataaaaaaatatatgagcgcgccaggattctg

SEQ ID NO: 56200 - DNA, 957 bp, Bovine  19866880862619
  misc_feature (1)..(1): n is a, c, g, or t
nctgttaggacttgagttggtatttgcttctttggactctcatttcccacccaatatatttcattttattacaggaaaaataattgagggcttcagcaaacacaattaaatagttcataaactagtgattttttttcaaatttgtagctgaatcaaatattcataagatgtagatccgtaggtacatttcttagatgggaagtgcatgggaccaccagggctttatcacactgtggttgacagagctcaaaggcaggccgccctgagcttgatgtttatgttaaaaaaaaaaaaataagtgttctgtaccattgccttaaatccattctgccatgtctagacccctggtgcttgtcacttgacgtggcatcattgacaatgactggagcttcaaatacaccttttgtcctctatggtgtttctagtatccttttcagtaaatttttaatgacctttcagtttggggccaaacagcatttgacagaatgcaccattgtctaatattagcacttagactggagtggagtttttagatagcaattagtatccacaatgctatcatgatatttgtgaacatactttagtgttgatcttaatgatcccattacaatatgctctggttttttcacaaatgtgatggtcttgcttttatgatactgtggagaagctctggatttggcttttgattgtaaaggactaagctagtatctttttcctttctggacctgtgacttgctggcgtatgatctgttgaaggtctttggtggattcccagtgtagccctgcagggcagtgtgggagagagctgcaaccattctacatggaatcactagggcgtgaagatgctaaagcaatgttttgtgaaccattaggtgtgatgaaaggtctcatgagtgtccaaaaactgtagggcaagacacagtgcttcagacaatattgtcttttccataaaacaat

SEQ ID NO: 56201 - DNA, 1686 bp, Bovine  19866880905495
  misc_feature (1)..(1): n is a, c, g, or t
natttggtatagtttaagatcctaggatgcaaccacagaaaaatagacttctcggaatgtgtcttgggggggaagggtacatgcatgtgcaaacatgataatcaaaattaccactcctttggagcaaagatattacacggctaagtcgcttcagtcgtgtctgactctgtgcaaccccatagacagcagcccaccaggttccccggtccctgggattctccaggcaagaacactggagtgggttgccattgccttctccaatgcatgaaagtgaaaagtgaaagtgaagtcgctcagtcgtgtccgactcttagcgaccccatggactgcagcccaccaggctcctccgtccatggggttttccagtcaagagtactggagtggggtgccaccgccttctccagattttacactgaaaggcagtaaaacacaaacaatggctacagctacaagctatggggttcatatttatctgctcatcacatatatttctttttcaggcaccctgcctatgaatggcaggaattctttgagtaagttgtttacaatagtctaggagactcttctatctgaatatgcgtcatcacctcaagagtgacaaatccaaaactgaacacgtcattgtctgctcacaagtattttctcctcccagcccttcctgactcagataggaatacccttcttttcctcatcactcaggcttggggagttagggtcattcttaactcatccctcaccttcaacttgtcatccccttcaaatccttctcagcagtaggtgaagtatggattgtacataaataaagataacatttaatcattgaacattaaatacatcatcaacagtcagatcagtcttttcctctctgttcccactgtcattcccttggttcaggattttatccccgaaacgtttatctgaagcattttcccagtagcctcctccacccactgcctatcatctcagtccaaccttcctatatttcttcagctggtgagcccaaacacagccattatcattcagtgaccaaattatgtttctgagcccttttcatgttttactgggtgtttaaaaggaggaagtaggactttcacaatgtatcccgtcctaagtctttctgatgcacaggactgcatggacatatccacacgttggtcctccattcctggatgtacagagcctcttccactcaaatgcagaggtggaggtaatgccttcctccacgggtccttgggaggggccctgaacaattcagtgtcagcagcttctgagcaccgcaaatgcagggctagttccctagtactgcctttcctcccaggaaaggtggcccagcaggactgagaactgaccgcctgacctctctgcagctcagagacagagtgaagtgcaaaacgagacaaaaccacagtcaccacagtagggagagaacaacttgcgtttgtgcagtgagcacagatactttcttctagccttaaagtgacaggagagagagaggaaggaaagaaggaaagaaagcaggaagggagcggggagggagggaagggggagaagtacagctatgcccacacgcaaaagtctaccttcccaaattaaaccttactcttctatttatgtcttcttgcaacagataattttcaagtatctactttgtgccaagcactaaacagaacagacaggagcacccgc

SEQ ID NO: 56202 - DNA, 1955 bp, Bovine  19866880925285
  misc_feature (1)..(1): n is a, c, g, or t
nttacatgcacccccatgttctagcagccctatttgcaaaagccaaagcatggaagcaacctaactgtccactgacagaggaatgggtaaagaagatatggtgcatatttacagtggaatactacacagccataaaaaagaactgaacaatgccatttgtagcaacatggatgcaactaaagatgatcatattaagtgaaataagtcagaaagagagaaacaaataccatatctagaatttaaaataagacacaaatgcacctaggtgcaaaacagaaacggactcatagacaacagatttgtagctgccaaggggagacaggggaagaggggtgggctgggagtttggggttgttagatgcaaactattacacttataatggataaacaacaaagtcctaatatatagcacagggaaggatattcagtatcctgtgattaaagtataacgggaaagaatacaacaaaagaatgtgtatgtgtgtttaactgagtcattttgctgtacagcagaaagtggcacaatattgtaaattaactatacttcatttttttaaaaaattgagaaataaatcaacgaaaataagcaaggtcaggtcagtcagtggcaaatttatgaaaaaactgaattctccctgtggggtgcttgtatctaaatttcctcattttataaggattataaagtcctattggattagccctacacacacacatcctgagtaaaacctcaccttaactaattatatctgcaatgactctagttaaggaggtacattcagctacagtgggggacaagatttacccctaaaggtctgactaaatctttacagagcagggctgttttcctctgtctcccccacatcacataataaatgaatgaatacttgttgatggctgattaatggtacattttacaatgtgcgtgttactgtgtttgtgttaaggtagtttgagatttatttgtgtgctagcaacagatctcacgcttagcagataggaacgtcttcaattgtttcagggtctgatatgattagtaactgttcccggagaccatgtggaaaaaaatagctggcatctaacgaggagccagccccctttgtctgccggcctgcctcccagaggcagcagagccgaggagctcagacacagctggcggaggttacgtttgttgaagatccgagaagagagcacagtgaaagtacagtagcaagaatgcatccagccaggcctcaaggcagttcatcctcctcgcccagcctggggacacacagctgccccgtccagcctcagaggggcagattcccccacttcagaaaagcagccctgggctgcaaaatggaaacctggccagcaaggaagcagctggtcttggcaaacagaaaacaatgccccaggcaaaaacaaagcaggagggagcctggaagagcttcattctgaggaaccactccctccctaaaccaattctttaatccaacataaaattcaatgcctatttgagaaaatacgatggcaaattccttcgatctaaattctttgtgatttgaaattcctagaaagtttacttcttccttttctaataatttgctccaatagaataattctcatggtggctggctattttgctatccactcttctttttcagtgtaatacaatcacaagatcttgtgtaatttcatgaagatttgtgtgacccagaattgcatttttaagtgtcatttactgttgtcctatctttttatctcatgaaataagctattcatgacaagttacttttcattgttgaaaattatatttatgtatacacatatacatacaacaatcttttatgaaatatgtgcttaattcatttattagtttcccactgtgtaagaagaactcgtgagcctaaaaccagctgtgaataatgtgtctttcaataagaaaagtaattccacagatacagacaaaacaaggt

SEQ ID NO: 56203 - DNA, 739 bp, Bovine  19866880926954
  misc_feature (1)..(1): n is a, c, g, or t
nagtgctgtattctgttaattttagtaattaaaaaaatagaaaattacattttgccctgtttgacactgttagcaatttacaacatttatttccatgaattcagattgtgagtctctgttaataacttgtctacatgacacacctatactttttgtacaataccaatcatgcttactttgcactaactcatgttctataaattgacttgataattaatttacaagttgaaatgagttcaaagcctcatcattttactcatcaattttaaaaacttctctttcactatatctctttctataaataaaccaaacttctattcttccttctgctaactaggaagaaagtttcaggaaaacaatttagaccacataccccaaaacgaagcttacttataaaacaacctcatcagtatttaaacagcagttctccagctcagtgaaaccacctgtatcatcagagatgataaccctaaagatatacgcaattacataatctcatctaaatgagttttctaagtgctattgtgtttgtttttaacatatgcatttacacaaacttaaaaatataatacttaacttgcactctatctgaaatacattcttatatattcaaagtgtgaataaggattacaaaaaaaaataagctttaatttaaaaagccaacaaatcttaaatacattgtttggatcataaatgctgccataagaaaatgttgacttttagttcaaaacatgggcta

SEQ ID NO: 56204 - DNA, 871 bp, Bovine  19866880965982
  misc_feature (1)..(1): n is a, c, g, or t
ncccatttgtaatctccatcaaaggcatttctcaaaatccctttattatgccttatcactgactctgccgcacgttatttgcaaacaatctctggctaaactgtaaatctacaagcaccctcgtggcgatcgcctggcagaattcagacataagtgctgtttgagctttttcctaattgtagattctaaatgtttgaccctcttctttgagtgccagagacctgacttgacttgtctgtggtttgggctctaatttgaaagcgattgaccatgtttggatggtgtttgaaatatttgtattgtatccacggaaaggatggcaggttttattttctcaagagtacagtttcttcagcacgttcttgtgccatcgtgtgatgtcctccttctgctttgtttgcttccaggatgtctttgtggggcagcacattgcgcccggccatgtgcctcagccccatcttggaaaatgatctctactacaagctcagcacgcacaagagcggctggctcatggctcccaagcacatacctgaccactggaggggacacgcttttcaaagtgtgcccagttccatagtcttctagtgagagaagcaggaacccagtgggtagatgggggttatttttttgtttgtttcatctgttgactgatgaatttctggtacctgtttacaagcttgctttgagtgtgtggactgatggttagaccagtcatgccccctttttcctgatttggaagaaaccattctgcagaacccaagtgctgaaggtctgtatttatccccagcccacagcagtaaggtagttttccaagagaaggataaagcatatgtattttatctggatggagaccgtttcaagtattgattat

SEQ ID NO: 56205 - DNA, 1734 bp, Bovine  19866881137400
  misc_feature (1)..(1): n is a, c, g, or t
ntgtgttcagcagacttctagcgaggtggtcactactacgtgtcccacgacatcaacgccttctcccgtggtaacaacagcagcttcttccatccaggctgagaagcctgctgttgttggttcagaagcaggggtgcctggagttgtgtccgtacaaactctgaaaccacttgctggtccagagggagcaaaaactggagtcgtgactcttcactctgtgggtccggctgctgtgcctggagggacaacagctggaactgtcgtgctgcagactccaaaacctctggtgacatccctgcagaacacggtgacagcagtctctctgcagcctgaaaagccggttgtctccgggacagcagtgacgctggcgctcccctcggtaccttttggaaaaacctcagcagcagctgtttgcattccgtccgtgaaacccattcttacttcctctgggaccacgtccaacaagcccgtccttggccctccactccaaattaaactcgcgcagccgggccccgtgcttgcgcagccagccggtatcccacaggcagttaaagtcaaacaactagtgagtgtcttttcatttcttcctcagtttcttctttagaaaaagtccgacattcagaaaactggcaagactagtaaaatcaacccctgtgtacccttgaccattgttgatcagttggtaacgttggaacatgttggctttgtctctttcccctctattcacaggtgaaaacacacacatagtttttttcctgaaccatttaagagttgtttgcagaaattgtgactttgcaccattaaataccatgtatctcttaaggaaaagggtttctttttctttgcagtaactgcaacgtactaccacgcatgggaagttattacaggcacaatatttcctttgttgtcccaacaagttcctggctagtttgcttcctgatgttgtttctagtaaagaattgcgtattacccttatttgtcattttttttttttcagactcccttaatttagaactgttcttagccttttgtggttgttcattgtgttgtaataattttaagtgctagttgtttttcagaatatccttttgtgtaatcttttcctcaagattagattcagattagatatttttggtaggcttgttattaatacataggtgatgttatggtaacatttcttctaaaaattgctaaggagagaaggtgacaatgaggggagtagatgagtaagaagtgatgttttctccggaactgtgtaagttgggaagttcttgggtaaaagaacttgggtgaaatctgagctgtttatctatttgtgtttagataaaccttactcaagaccagttttatcagaagactgaaagtactgttaagctgtaggagacagtacatggtgaattaattgaaaattatgttttttaaaataagttctcacctaccttgtcctgtaacagaactgtttttttttttttttttgattgcacctgttctttataaacctccatgttaacggctatgttttgagtctctttgttttagtgttctctgcttttttggagtagtaaaatctaagtaaacttctcagccttgtttatgtgatcaggacaaaacattagtatctgtgggtgatggtctttgaggcagagggcaaactttgggtgtagaatgaaggtgtagaatgaaagaggaaagatcagtttggacagtagtcagactcttttttttttttcatcc

SEQ ID NO: 56206 - DNA, 934 bp, Bovine  19866881208016
  misc_feature (1)..(1): n is a, c, g, or t
naaaactgcgctagatctggggaagggaactcagcgatcacttttggatgcctcatcagtagtctaggatacaaacctagagagcaatgaaagctcactgtgactggagctgaatgagcgaagaagggaaaatcacgaggcaaggtcagagagggaggtgggtgccacttaaaatttggtaagaagtttggattttaatttaagtgcaaggggaagccactgaaggaattttatgcaacagagacacacacatgatttgttatgaaaacattatcctgacaacagtatgaaaaatggattgtagaaagaaaaggatgttagttagaagatatagatgttcaagggcaagatgacttagagtggtgacaacagtgatgaagacagggtgatggatacattttgggaactgaataggaagtgactggatgcaggacaagaagagaggaaaggagttaacaatgacgtcctaggtttcttggcttgaacatctgggtgagtaacaatgtcatttactgggtaagaaaacctgcaagactacaaggtgaaaagaagggacagtgagagcaaatataatatactacatccaacaagaactaaacaagtatttaatagtttataaccttgtttacagcatagtaattggaaataaaatcccaataaaccacctcgttacagaggctgcatgcttgcttataacactcacaggctcaggaaagagcatctgcctgtcccagctgcctttcccagtgcaagaggggtcaaaaatggggactgagactgtgggcagtgagaagctgctcagtcacacagctctggtgcaccctgacacatgaaggtgtagaccagaggccaagaaagaagggagatgaagggctgtggaggctcgccaaggcatgggccagcaagcaggcagccaatgcatgtgccataaata

SEQ ID NO: 56207 - DNA, 728 bp, Bovine  19866881219124
  misc_feature (1)..(1): n is a, c, g, or t
ntgaaactgacccacatttccgtcaagggtttatcctaagaggggaactctgggcgctgcaggcaagttggccgactgcccctgaagtacaggacatagccttcgtttcccgattttgggtcgcgcttactttctaattgttcggcagggctctgtgtgcgcacgagaccgtggactcggaggtgcgcacttcgggggcgtagccgagccattcaaaccagcgaatcggcgctcccctagtccggccacccctgccccgtctcagtagatgctccacgggtgcgcacgaaactctcgggttctgaccttcctcctcccctctccgggtacccgcacagctcggggcggccacttctacccaggagggggtgaggatgaagttggcaaaactgctcgagctatagcgcggagcgccgaaacgccgccgagggacacccgggcgcgcggagagagaggcaagtggccccgcgcgaagagggcgggccggctcgggcgctcgcatttcctgtgacaggggctgccctagccgctccctctcccgcgggcggcgggaccatttcctgaatcgctgaagcggagggagggctggggcgcggccctaccacgagcgcagagggccgggggtggctgggaaggacaggcggaggaaccggaaggcgaccgagaacagggacgttctgccggggccgcggctcccaggtaccctgcagaaaccggactagctcgcg

SEQ ID NO: 56208 - DNA, 1312 bp, Bovine  19866881252397
  misc_feature (1)..(1): n is a, c, g, or t
nacaacatgtaatacttgggagagatagaaatagaacacctttttctgctcttaaagatcaacccaacacttgatgtacagattcttggtgcacataaaaaaggcataaacacacaaaaacctaaacaaacggaaaatcagtgtagctgcgtcaaagtgattagctcaatcaaaaagtatttgtttgcttgtattcagagggagtgaaagaacgcaggacatttggacctgagtagacttacaggtgtgagcctccgtaaagagggagccttgagcaagattctctgtaaggtggaaacatgagctgtgaggctggatgcctgcacaggccatgtccggggtggctgccccaggtgggtttcagaatgtataaaggaattttagttctagtagctattataatttttcaagtgttagttgctcagttgtgtctggctctttgtgaccccactgactgtagcccatgaagcttctctgtccaggtaattctcaagacaagaatactggagtgggttgccattccctcctccaggggatctgcccaacccaggatcttgcattgcaggcggattctttaccgtctgagccatcaaggaagcccataatttttcaaacagaggttttgattaatttaagttatttacataggcaatcaacaaaatatgtaaatacaagtcttgagcaaatatatctaatttgttctcatgatctttaaaactcatcatttaattccttacaaattgcagggttgtttttttttcccccccactttccaggtattcttgccttatatttttaggtgaacatttcaagcttcctattgttcccaaatggttgagaaaacttttgtggggtgcatatgttgcagctatggcttttctcctctcacggcctgtgtacattcccttctctcctgagctttcacaaggtgaatgaaatgagcatctcctccatagaggagtgctttcagggtaaatcttttcttatcggctccttgtctctctctggccagcacagtgcctgacatagcaagtactcctggggcacagatggccgattgtagttgcctttcctgatgttacagggcagggaaaaatgaggactttatgctcttaggtcgagcagatcttgtagatgaattcatctaagcagatgaatcgtaggttcatcctgtttatggaaacagttggtgctgagttttttttgagggtttgaagatgaatatacacactgcaaattcaagtagaaagtttgatcaactctatctcaacactggcagtcacaaaagttgttattatcagtcctgcaattt

SEQ ID NO: 56209 - DNA, 991 bp, Bovine  19866881253078
  misc_feature (1)..(1): n is a, c, g, or t
ntgccagacctggagcagcatcattccctaggcatgagaggagagtcaacccattcttcctctccctttggaacttcttaactttcccccagatttcttatgtccagttcccctctgagtctcttcgacagtgctcataggttggagacaggtgaccagctaagggttacaaaccatttctcagacatcttcactgcttccttagtagtctggacctctgttcacacccattgttttgggacctgagccagaactgatcacattttttaacatcttgttcttaacacttttgcaacacctgccaagatgattaaaacaccctggaatgtaacaaagccaggactggaaaatgtggtagtaagcattcaatttatactgttttaaatcatagtatccggttgaggaaagataaattcagaacttcatgctattttcagaccagggaatcgagtgctcccagataacaaacccaactgggaccatagagacaatggagaagaggtagacgacagaggctgaccgattataaaaaaaaaaattgatcctgaaagggagtctaggcaacaggaaagaactgttaaagataaaggaaatcaatcagaagccggtggaagacccattggcactcctggagcacctcagggaatggctgccactgaccctgagtcattggaagggaaggcaatcctgttgcatttcatttcccaaagtgcccctagcactaggcataagcttcctacctctcatctggtcaaggttgcctagcaggtgtttaagaacaagacatagaggaggataaaaagcccagaggcaaggccatctactggctgtttccctccaaggtcagtctgtcagcaggaaaatctggactaaaccacgcacagagactcttgattccagtgagcaagccctggctcccatcaagggacacccagccaaggaaactaggacccagtcagtgcgccccacgtggacaagagggacactggga

SEQ ID NO: 56210 - DNA, 1255 bp, Bovine  19866881256692
  misc_feature (1)..(1): n is a, c, g, or t
nttggatttgtgccactacagtttagcaaaagttggagacagagcggggtacatctgccgcgctcctgccagtgaaaatacggctcctcagtgtgtttggtcacggctgtgttctgaccacggaggggctgagagaactgcctttgccactttgctacactgaatccctctggctcaaatgcacatgctaaatctcttgtcgcgtgacagacacactaaaaatctgaaattcagctgcctgtctttctttttagaacttttgtctaatatacaattctagagtagtccatatcaaaaactacagaccaaaaaaaaaatacgacttgcttaaaaataaaataaataacaggttagaaagaatttcaaactaacactatggtctcattatttaccctccttctcctgaaaatatcctggaagaagaattcactacggatgctgagaaaattcaaaaagtaatttttttttttaaatcaaatgtaaacaggttcaaagaattggaaacatgttaagaacagatacatttaggaaagaaaaattccaaagcaatatttataagtttccaaaacttaattccaaaggaaataactgatttaaaaaaaaagagagcaacaaaagaaactgagaaacaaaattaaagtgaaggaagagcacagataaactaggaaatcttctaaggataaaaacatcagaacgtctttacatttttgctaatttaataagcaaaactatctcccatcattttaatttgcatttgtttgatcaccagagaaatcaaatgttttcccatgaattgtctaaccaatctatttcctcctttgcaaattgtttattaacaactaatcttcatttatccattgcttttcgtaccaatttgtctgagctttctatacaataaagatgattgtatttactgtatttaggatagttccactaaatgacacagctataagccagagatatatttatttatttacaaatgtgtatgtcatgacttttgattcatactcatcaatatgagaataaatagattggaaactaatattccagataggtcaaccatgttatagtaaatatttagtaaacatgtaaggggcagcaaattgggtgacagtcagcatctgagaaattggtggttcctcagtacactgaaaaatgggggacacaacaaagtggatttggtggggcaggtgcagtatcagaaaaagccatgggcaacttggaggacctttgagtaattcacaacattcactta

SEQ ID NO: 56211 - DNA, 1189 bp, Bovine  19866881263589
  misc_feature (1)..(1): n is a, c, g, or t
nttgttaggatggcttgcttttctccccagtacttgacatatgcctcccctgatctaacaatctgctgcaacttggcagcctgaatttatcaagttttctattctttcagtttttcttctacagatagtactctgattttcttcttcatttgtctgggattgatcagttttgaggcttccctcatggctcagcagtaaagaatctgcccacaatacaggacacacaatgtaagagagacagtttgatccctgggtcaggaagatcccctggagaatggaatggcaaccgactccagtgttcttgcctggagaatcccatggacagaggagcctggtgggctacagtccatagtgttgcaaagagtctgacatgactgagcacactgaccagtacagtaaccggttttgatctgatagacttgatgcaaaaggaagctatttgtagaagtaacatttgtcctttatagatatggccagtcaggaatgtgtcctccctagggtgattccaaacacttcctttcatggccttctcaggctcccactttttcactctaccctatcaacagaggtggaacggtgttcacattccttgtgattttgttggaagactgcaaaagacgtcaatacctgaggacatgtatcctctaatgaactttaaggaaaagaaaaaacaaaaagacaaacctagctgcatgaggtccattgcaccatgttaatacaggtacaaaaccatgttatggcaaagtcccatcaatcgctatggtaactagtatatcaaccaaaaggccaagagctgctttgtcctccaggcagcctctaaagatccttctcctcctccagttgcctccacaatcatgttcaatccaagattttgctacatagggtttgcttttatttcttcttggcaatttcatttctgctatgacttccacaaactcaacatcatgaatcacttgaacaaataatgagccagtaagcacagatccaagggaaatttctacaaagccgtcttttgactcttttcacacagagtgaagtgtttcttgtcatgggataataatctgagaaacaacatctggccagatccacaacttcgtttcaaattgcaaactattttaatatgttagaataaacattcctttatgcaatcaatatcttattcagtgcctacttagatgcaagaacaaaa

SEQ ID NO: 56212 - DNA, 1327 bp, Bovine  19866881282026
  misc_feature (1)..(1): n is a, c, g, or t
nccagggaaatcccagtgctgatttttctctgcttttctttccttccctgctgttccaagtctaggttccactgcagggacagcttcctaaacatctctcattcatgtacgcacacctacaaacacagacactcactcccacacatacacttacacatctgcacaagcacacaccttcccccagccctctatctcatttgctgtcttccttaggtatcaaatattaggacagaagcttggttgaacccaggtctcctgcactgcaggcagattctttaccagatgagccacaagggaagcccaggaatactggagtgggtagcctatcccttctccagcggatcttcccgacccaggtatcaaaacacggtctcctgcgttgcaggtggattccaagtgtgagctatcagggaacttgggttagtaggctcgaaaaagtatgaagccacagtgcttctgaaaacaaaatcattcaatagaaaaaggctgtaaatcagattttttaaaaaagtaatatcctactgattggtggactcatcacagattgtgtttctattttgctgcttcttcatcctctgtgcttttctagtttttaacaatgagtagttattgcttttataatttaaaaatatccaccaaaagcagtgctcaagaggtcacttggatattgcctgtgaaacggttcaccagcaaaataaatctggaccgaaaactaaaggaaacattttcctaaagttcagaccatatattccatggcttggaagcccagaggtggagaaggaaaggcttttcttggcaaaggagagctgagtgggtgaaaggttccacaacccgtgtcctgccttttctcaccatctttatccctccgtgtgtctttggcacttagctctcaaccccacccctgggtaggttcttctccaccctccctgagcaagttaatcctagcatgggcactgcccacaggcccttgtcctacgcctccctcccttgtaattaccatgtgtgcaccagctcctcaagagttgaaaggattaacctgcttgcctctggtaaagtagggccgggtgctgcattgcctgccatggtgcttcacgtggtgtggggtcagaccgcacaaggacctctgggcggatggagctcagaagagttggaagcatctccaagctaaatttctttagctgtaaagtgaccattcccacagggggattggcagaattaaataggggcaccgcacataatgggacgcaagaactcaaggtaaacggagttgaaatacgccatttcaggtatacgcctcaaccggaagaagttttcgtgtcctaagtat

SEQ ID NO: 56213 - DNA, 1059 bp, Bovine  19866881356333
  misc_feature (1)..(1): n is a, c, g, or t
ncatggactgtggcccaccaggctcctctgtcctgggattctccaggcaagaatactggagtgggttgccgtgccctcctccaggggatcttcccaacccagggactgaacccaggtctctttcatctcctgaattcacaggcacgttctttaccactgcctgggaagctcacttaaaaataaggcattgacaaaattttggcacttgaccaacacaaggatgtttttacctaaaaatgcaactcaatattatattcagtttattttggaatagttatctctacctgacagtcaatgctggaatagcaccaaattattttttaattaaaacatttttaattgaatttgcatatatgaaaaaagtaacatactgagaaagttataaaatatagtctcaggcttatgtaaagtcatgactgctttcaacaattactgaactcttttaaaaaaaatcttcataatcatgtttgtttgtcatagatgaatgccacaagtatgacattctcaacacatgtaactactaaatgtaatgttgcatattaacttatttcctttaaaatttcactaagcaattctgagtacaaggacatattaaaatatcccagtgtttctcctaagaattaggtggtcttctttgattttttcttctctgcttcttctttttccttttctatttcatttacttgtaattcaatttctttggcactaaacatctgaaaagaaaaaattttaaaaagcaaatttcaattacagcaacaatttcttaactataatgccgatgaacccaattatattttataattttattttttatagctttatatcttataacttcaagtacatgatgaaatatttcagaagtagcttaattataacaattatggacaaaatcagaactctacaacatttccactatcattgtgctaaaataaaaagccaggaaatacaatattgggttccatatcttatatatggatataattctgaacacatttgaatgcaaagcttattctattcatgaaaaaataactgattactgaattcccaccccatcccaat

SEQ ID NO: 56214 - DNA, 1786 bp, Bovine  19866881587335
  misc_feature (1)..(1): n is a, c, g, or t
natttttgttgttgttgttgttccctctgcttttgtatatctttgaaattttccatggtaagttaaaaggatgaaaataagatctatttggagatttaaattgagctgtgtataagtttgaattccactctgaaaattacagtgtgagatggtcatggttttcagttttgagctaaataaatttaccgcatacaaatttaaacttcaggctttcttctgatgctaaggtaaaggtatgtatggttaagtgaggacagtcatttgttctcttgttacagttgaaagtttgttcttttctaaagcaggtctagttggaggactgtattcatagttctcattgtttcaggtagtccagcagccttcaggaggccttgcaaaacaagtgaccactcttacccattccccagcactgaccatccagaaacctggacagaagaaggtgacagtgagcactgcaatacctaccagtcagttttctcaaggtagataataactaatttctgcctcgtcatgttgggtttggaacatgacaggtttctgtgctttttttttttcaccattatattcagagaagagagatttcttttaagttgagacctatggaaaatagctttattatattctttgtacatagccactttttagggatgtatgttgttttagattaaatcaacaccattcatggtattttgtaactagataaaacaatctactagtaaatacagtactttttttaacttataaattttgctattgccttatttcttttattaaaaatgtgcgtttttctctacatttggaagtcagtcttacaaattataagtctttatgtatttttaaaatctaccaatacaaaagatatagtattaacatgtttcttttcttcatagtaacaccttttcttcatagtaacaccttttcttcatagtatttttgtaatgctggtaattctctacacaatttggggaacatataaaaagaaatggagaggtcttgattttgtgatttcttttgcagggaataaattaattgtaatgtttgaatttaaatctagaaagctttgaaattttctttgattattctatatgcactgaaaatagctattgtcctgaatttttccctaatgtggtatgattgcttttttttcattttactttttctttcttcttttgtttttatagcttccattctaaagcaagttacccttccaggaaataaaattctgtcacttcaatcatctgttcagaaaaacaaaataaaagagaatggaacaatatccttcaggtaaagaaattaaatgatcaaaattttgcctgatttaagaaattaatattctttttaaaaacataaaagagatgacaaaataatacttatgtaaaataaatttaatgatgccttttgaaaaagctaacagtgcttttgaatataatttataagtagtaaagtgcgtagatcttaagtgtagagctcaatgaattttgacaaacgtatacctgtgtaatcttaattcagaccaagatgctaaacatatccatcatctttatgctcctttcaaatcagttacttccaactcttgtctctggcagccactattcttatgtccatcaccaaagatcatttttgtccattcttgaaccttacataaatggaaaattacattatctactcttttgcatttgattttttcactcaacatgtgtttaagattcatctacatcattttgattattagaagattgctcttttgttctggtgaacagtactcattacctgaatgtaaatttgg

SEQ ID NO: 56215 - DNA, 948 bp, Bovine  19866881845398
  misc_feature (1)..(1): n is a, c, g, or t
ncatttccagtaacaggctcttcatttgctgagaaacttcagatatgatgaaagactcaaacagggtgtcactgtgtcatcaagcagtctttagtggaattcagtgtgactccacttgataaggtctagcctgcactaagggttagacagcctatgttttataattaagtaataatgactgaaccctcgaggaacacagggtatttcctgcaaattaatgaccagccaaaggagctgccgacctaaagtgatgccttaggccagcaaccccagccagtcattaaaccccaggaaatgccctgaacctcaatactgattttagtaaatacaggaggaaaaagtttaatatcagctttgtacttacactgaacatgcatttcatacttagaatgctcagacttttgaagggaattctacagaagttactaaatagttcccttaaacttcttaatgctgatgaaaaaaatttttactctaacattagcgaaagcaaagaaactttttgtagtgttttaactgcaaaggatttagctaagatactgtttgaaaggcatagtgataacataaccaacatatggacatatggacactccaatctatatttaacttgggagttacctaacaagaactcaagaacaaaagcatcagtgtccaggtttatagaaatgactgatctcactcagttaaaataaaagactgtggcggagtgctgtaattcttagaaaaaaaccaaaccaacgaaaacaaaggtccttcatattttgcggatcttaagtcaggattccatgtgacactagagtcaaaaaatcagtagacagatgccaggggaccaactgcttcactgttatttcaagcagataggtactttaataaactctcttaggcttttaactcttaatcaggtgctaccgaaatcaggacattttaagggttttcttatcagaagaa

SEQ ID NO: 56216 - DNA, 989 bp, Bovine  19866881852828
  misc_feature (1)..(1): n is a, c, g, or t
nttttttttttgtcttaaaggtggactcaaacttctgtaaatgtgaaaggtacgttcatgcttagtcatgtccaactctttgcaaccccacggactgtagcctgccaggttcctctgtccacgggattatcccggtaagaattctggagtgggttgccatttcttcttccaggagaggatcttcctgacctagggatcgaacccacgtctcctgcattgcaaagcgggttcttgaccactgagccatctgggaagcctctcagttgagacagaagggtgtttaacagttatgtcaatggtaggttatctggagcggttaggattaaccaccttgtgtaaaatggatgttttcctgatttttaataatattttgtggctgtattcttttttctcatgcaggaatgtttgctctcctttatagaaagttcaaattggtaaaggaactaagtggcattagcctaagtaatggaagtttcttcgttcttttaggaaacaattgctgaacacctactattttggctttggtaccagaaatctttataaattaatcattttccacttggcaagtagtctcactggcaagattttggcctcattaaatattaaaggagattaaaataaagacagttaaaaggtaaaacactcaatgttttgaaagtctgtttttgcaagtgatttgggaaagaaatatgtaattttactcttttgtattaatattgccatgagtactcaggtgtgttgttttaaattgatacaaacccacatatatatcatgggcagctcactccagtattcctgcctggaaaatcacatggacagaggagcctggcaggctatagtccatggggccacacagggtcagacacgacgagcgactgagtgtgcgtgcatgcacacacgtcagctcactatcgaatctaatccagaaaagggagaaaaactatttgctgccaaagggaaaagtggatgccagtcatctaaatgtaaat

SEQ ID NO: 56217 - DNA, 711 bp, Bovine  19866881946180
  misc_feature (1)..(1): n is a, c, g, or t
naaaccatctctcttcccccacccaatccgtggaaaaatcatctagcacgaaactggtccctggtgccaaaaaggttggggaccactactctaagtggacagtcaagacagaggtttgtggggaaggtctgaagggttctctaggtcctacaatttgcaagggtctcctttataacgaatctgaaagatccctctaggtactgcttccttctgaagattatcaggaggaacaagcctaactttcagagaaccaggtagatagatctgtgaccctcatgcaaagctggccccataaatgagctcacagatcaatgacaccagccagcaggatggaagatcacaggcatccagcgaaagcttacagccttcatcggagtgaaaccagggtgtggcgagcactgccgggttatttttcctaccagttccccacagtacttaatgaaatacatttttatttttgcacacagtggaaaatgaatacacagtactgatgatgataaagcaagtctataaggctccataattgagggctctgatcgccttccagtaaacaacttcagcgatttcttccttcgggcaatggccctcaaacgctttttgattgttatctacccattccatccatcaagtgaaaaagacaagacaaaacccaccaactcggggtgttaataggcacgaatgtcaattaaggaaaaatcaaacactaacgag

SEQ ID NO: 56218 - DNA, 1631 bp, Bovine  19866880469003
  misc_feature (1)..(1): n is a, c, g, or t
ntccgactctgtgcgaccccatagacacagcagcccaccaggctcccctgtccctgggattctccaggcaagaacactggagtgggttgccatttcctccaatgcatgaaagtgaaaagtgaaagtgaagctgctcagtcgtgtccgactcttagcgaccccatggactgcagcctaccaggctcctccgcccatgggattttccaggcaagagtactggagtgggtgccattggatgagcgccaaagaactgatgcttttgaactgtggtgttggagaagactcttgagagtcccttggactgcaaggagatccaaccagtccatcctaaagggaatcagtcctgaatattcactggaaggactgatgctgaaactgaaactccgatactttggccacctgatgcaaagaactactcattgggaaagattgaaggtgggaggagaaggggacaacagaggatgagatggttggatggaatcaccaactcgatggacatgagtttgagcaagctccaggggttggtgatggacagggaggcctggcgtgctgcagtccatgaggttgcaaagagtcagacacaactgagtgaccgaactgaactgaacaccaagccaaatctgaccttaccgtaacttctacctaatgtttcttcacctgcctctggaatcacacagaccaagtccaatctcttctagtaaatctgcatatgctctcctaaggacagaagactgctaccacccacctaaggcatctctgtccccagatgaaacatcttgggtcttcaggcccttctttctctcccagctggccccctgctaggtaagctacagatgggtcccaggtgggagatgcttctcctctgaatagtttcttgagttagtccatccctggagctggatctaaggctggaagggacgcgatcattgagtagatctgcatgtctcagcctcagactaggggccagctgattctttgttcttccgggtcatcctgtccattgtgggaggctcattggcatccttggcctctatccaccagaggctgggagcattctcttcccagcggtgacaaccagaaacatccccagacattgctgatgtcccttgagaggcaaagccaccgtgggtgaggaccactaggatagaatgttggacgagggtgcctccaacaacaaggttcaagccttaaaaactccgtaaagtccctaacttttcccaaatcttctgcttaagtcagattgtgaaaccactaaaggcatgactaatttaacacacactcacaccaaaaaaacttggtattttgaaagttctcactgggtaatgaaaatcatactgaaaagttatgatggtgaaggtgaaattgcaagaatgcccagtctccttggaatgaaggggtgggggtgtgaaagaactgagcagagaggaagattcctgaaaccctattccttaaggactgctctttctggctaagagcattcatagcagacagcttagcaaatgaacttcaggaaatgttctttccacctgcaaatggtggtttcctataatttcagctggcaggaagagagagaaaataaaagagccacagtttaaattaaaggaatagaatagtcggtgttcagacatcct

SEQ ID NO: 56219 - DNA, 1120 bp, Bovine  19866880556580
  misc_feature (1)..(1): n is a, c, g, or t
ntggggttcccatcttagacttaaaactacgagcagacgtgacagaggtttcctggaccgtaagagaactgggaggtgttagccatgtggctggccctgccccctttatctgtcccctgcctgtgggcaccacccaagggggtctcagccccctccacctcggaacaaaaaagcagagtcagcttccaaatctgcttagggctccgcaaaattttcactatgaaaacacgcaactctcttcatcacttgaagaaccaagcaacgacattttttccagttctaagctgagtcgattcttgtgtaaccaaaggatcaaagattccagcagcaaaccattaagtattcaaaatcagaggactgcccccttttttctcattctttcccttttttctgcttgctttcactttaataaaacatatgtctcccagagccataatttcctggactttaaaaacacttgacatgacacacaaatttccacctacacacatgcaatttgtctggaagcccttctaaaactatttctgtccctgaataaaaaccaagttccgtggttgcctggatgaaaaatacaaatactttctagcccggaattccactcgtgttctgcagaaccactgagaaccatctcaagtcctaaaacctttaaggttttttccttctcctggttacccttagggttcacagaatgactctctttcagtctcaggtttgagtaaccaatgtccctggtgtctcctggaaaacacgagcctctctctttgcctggagtgatcagacaaaaagccactgttcctgattaagtaggttttttttgttttggttttttttttttccatccagaaagactatactttgcctgttctggacctgattagaaaccataataccttctccaatctctcaagactggatgctaatatgggataacctcggaagtcctgactcagttaagcatctgcatgctccctgcactgtaccttccagaacttttaaaaaatgacaactgcaatgcacatccctttaaaaaatcagatgagcagcaaaacacagcagcaagtctcaattttcttttgcttttccacccaaatcccgagcaaccctcctcccccacccccat

SEQ ID NO: 56220 - DNA, 2286 bp, Bovine  19866880568142
  misc_feature (1)..(1): n is a, c, g, or t
nctgcaggagtctaaggcctcgagctcaggaaaggtctggaaatgctaactgcatgggggccggatctatgcgcatttcagcgtgagttcaggggagaggcatcccaccccagccatctggaatcccagcggctccgggatcaacaggccagcaggtgcagaaagagcaggaagtgggagcccaggatgccaaggtcgtccaggtgcaaactgctctcccgttcctcaccaggccctttgtgtgccaagggaataatgctgtcctggctcctgcgtcccgcatcctgcatcccaaatcctgccaactctccccccagctggcggctcttctcccatcgtttccttcccatccccagggttctgtttccctccgctctgagaccttttcccaccctgaccgtgagaagcaggtgcagtctttgtctttagctgcctccctaagcctcccccagaacacgcacgtgggggatcggagccccctgcccactcagtcccctgaccctggagtcttccttctaccagggcaagtggaactcacagaagggactccagaagaagcatctcatgactgcctcatctttcccccacgacctctgtccttcaaggtcacagaaagtgccctttaacttgtcttcaccctggggctcatggaccaaaagtcacagcagaacaacaacaacatggggtgccggacaggaaccagaaaagtgccgactcctgggccttttattctggaagtaatcacttgctgatgccaagtagaagctggatcccaggacggaagcgggtgggaagggaagaaggggagaagctgccatcaagtgctggactagacccagtgccatgaagcaggacagcggtgaggaccatgatggcgctgggggccgggttccctcacccccatcatccactcgctaccccccactgctcagccaacattcactcagccaggtgcgtgcggggctttgagtgcagctgaagcagggagcagccgacttgctgctcctccgggaaccctgggcacaaaaaggtgggtgccagcagagagaggggacccctgagaccacttcccacccggagatgccccaggtggagccaggtggctgaggtttgaaccccaccctaagactcgctgctggagaaactggaccaagttccttacacgctcaagactccagcctccgcatgcggaaacgggttctcaactcacgtcatctaaagcatggttcgtttccctctctgtgtcctatctccccaagcttcagctactctgcctacttttaacccagcgtttccacgttgatagtttccttttgcttttatttagacgctcgttcaggactagttcatgggctcccctggtggctcagatggtacatgtctgccctcaatgtgggagagctgggttctatccctgggttgggaagatcccctggagaaggaaatggcactccactattccagtattcttgcctggaaaatcccatggaaagagaaccctggcaggctacagtccatgcggttgcaaagagtcagacacgactgagcgacttcactttttttctttctttcaggtctgagaaaacacatcccttctgctgaacccagggcatatgcccggcagtagtcaggtccatccggggagaacaccggagtccagcaaccttgctcctgtcctgccttcgcctccacagacaccccattctagggacccacaaagcagcggggacagttaacagatctcccgaagccaagccatcctgggggaagccttctcctcatggcaggctggaattcaggggctaaaggcctgagccattagacatagctctccttccccaggacggagctgcagcatccttaggggtccttggaaccctccacccaagtagaaaaaaagctcctttcccagcagactggtaccgaacccagagatgccttgctcacaagctgtcggtttcctcctgaacaacatgtttactgaaaccagcgtttattttcctgatgggatcctgaaagacggagggagccgaggagacgaaacacgtctggtggggaaggggcggggtcgcccgaagcgctgactgtacagtcagcctccgcctcggtcgctccatagacggagtctggaacaaattgcaatatttaatgcacaattatggttttcaataaattgttcccagatggcttggggaagcagcattaagcagaaaacaagggagtgatcagattttaatgaattttgttttcttttgccttggttccttcgtaaatcctagttgaagc

SEQ ID NO: 56221 - DNA, 964 bp, Bovine  19866880666207
  misc_feature (1)..(1): n is a, c, g, or t
ntttattaaatgtctgtcttggtttaaaaatcacacctgctgccttaatgatgtttaaagatatataaaaataggagtacataacactgcattcactgtgactggagacggcttttatctggtacaattttgcacaaagcacaaattgttgcaaaaatacccgaactccgctatcatgggggcgctttgaagagattgttaggtgtgtggcaattattcatgggcccacggtaagtcctagcgcagtcatgaagacccgctcgccccgggaggggctcagagccaccttccagatgaaaccacggccacaaaggcagcaggcccacggagacgaacaaacggcatcacgggggccctgtgctgaaacgggcttttctcaaaatgagcaaacttgaatcagcgtgggagtggggcataggctgtaattaaaactcgtggcccagttcccttcgtttgtagcagaaaactattggctcatttcaagccaaagccggtggacagtcagggtccttggagcaggatgtagggacccccagggcatcctgaccaccagcgcccacatcctgaagcaaaggaagatgcagcgcgcatgcgcagtgcagcctcgcgaggcgctgctgtcccggcggaccgtcccagtccgtcctgctgttcccagggcgggtcaagagtgcaccccagagtaaacacgtttacaaccaactgtttctcctcgcaggtggcccgcaagctccagccctccgtggtatggatcggagacaccgagaaaaccttctacaaaaaagtgccccacgcggaaagaaaggtgaggccttctcagtggggccttttctctcctcccaaggcggccccgtcccagggaccacctcgatctctcaagaaggtcttgcttgttcaagggaggaaggaaacaaggggccggcgctctctgccctgagcgcttgtctgtatctgaaaggatcca

SEQ ID NO: 56222 - DNA, 962 bp, Bovine  19866880868490
  misc_feature (1)..(1): n is a, c, g, or t
nagacagtgtaacccactcctggactttggagggcccaggagagcttggagatcctttctcttccgtgtgctgaaacagctgaggatgtcgggaactcacgggggtaactgacttggacacattgaattgcctgtgaacttactgagtgacgatcattgggttttaaagagtgtctgcaaagacagtgagtgaccttagggtctggagtaattcaacttgagaagttcttcctggttgcgattggatcttttgaggtcattcttagttcatggtcataaaactgtgtcatcagcagaaaggaggacatttatcctcatcccagctctgttgggggacacacacccagttcttcaaaagctctattcaactataaagacccaagttcatgggtaaagacaggggaaaaccgagcttcgacctgggtccccagtttgcgactctgtccctgcctgttgggtcaccattcctgtcccttctcatttctgtcatggttttaaaatgcagattttttttttttggccaaagtcctgagagctgaggattctctcattgtttcttgccctctgccgctctggtttttaatttgtttcagattactaaattatggtaccttgaccgcctcagctacgtgaaaagaatgccaggctaccagattcactccccacattgtcccagaaagcacctaatacttgcaatgttttcacatttcaaaaatgctttgaaaaaaccacgggtccttcccattcacaaatgcttctgtgtgtcagctgcacttcattagcaacagacgtttcttaaacgcttcctttcgaccacaaatatgaggttgctgaccatctccgggacagaatgaccatggcagaggcttgaatcagcacccgagccctcagaccagcccccttggccgggagacaaaggagaagggccttgtgcatttatcagtgagttaatgagaccctgg

SEQ ID NO: 56223 - DNA, 1740 bp, Bovine  19866880878738
  misc_feature (1)..(1): n is a, c, g, or t
naacggaggcataacgagagaaagagagaggctgagacaaatctgaaaatcaaaattccaaaacatttcagaaaatctagtgctgagtacaatcttcaaacagaaattattaaaagacaatagtttaaacaaaaatctaattacgttagattttaatccattatgttagattatattaatataattagattagtataatgaaaccataacttccattagagaaacatacaaaggtttgaaacaaagatggccagaaatggagtaaaaacagataattatatcaaaaaaaagcccacagaaagcttagaaatgaaaaatatagtcactaacataaaaagtcaaaaaacaaaagagatgtgaacgccaggctagagatggtcaaagaacagattagtggaatggatgatggtcctagggagctccctcagaaagcagcacaaaaaaataaacagataaaacctataaatggcaagtaacagcctttgaaaacattggcacccagataatagttttggaagaagagaggaaataccagaggaatgattatttgaagaaatacttgctaagaactttcttaacttgaatacatgaattcttagattaaaaacaaattccacatgcccagccgaatgagtaaaacagatctatatctacatacattattgtcaaactgagaacaagatgacaagccagtcttatgataccagattacctgcagagaagcagtggggaaattagacgtctccttggcaacaattagtaccagaagaaagtgaaagcctatcttcaaagtgctgaggaaaaataactggctgcctaaaatctatatccagcaaaactagcctcgaggggattctcaggaatcagagtagtaaagaattctcctggcagtgctggagacgaaagagacacaggttcaatccccgggtcaggaagatctgctagagagggaaatggcaacctactccagtattcttgtctggagaatcccgtgggcagagaagcctgatgggctacagtcccgtgaggtcacaaagagacatgactgagcacacagcacacatacttacacacaaaccagcatccaagagatggaagaaaatacaggcattttaagacaaagactgagacagtgtcctactcacaccccttcagagataaaattgaagaggctcatgacctacctacaaccccaggaattcttttttgggtatatgccccagagaagctttctaatataagctttctcatatatattaaacttgtgaatttcaacagcattcataatgacaaaatattgaaaatcacctctaagtccgtcaataggagaattgataaataatgtttattatagtcatttaagggcttcccaatagctcactgggtaaagaatccacctgcagtgcaagagacacaggttcaatccctgggttgcaaagatcccctggaggaggaaatggctttctgcttggaagaaaagctatagaaaagcctagacagcatattaaaaagcagagacattaccttgccaacaaaggtccatctagtcaaagctatggtttttcaatagtcatgtatgaatgtgagagttgtgtaccataaagaaagctgagcactgaagaattgatgcttttgaactgtggtgttggagaagactcttgagagtcccttggactgcaaggagatccatccagtccatcctaaaggaagtcagcctgaatattcattggaaggactgat

SEQ ID NO: 56224 - DNA, 2959 bp, Bovine  19866881013342
  misc_feature (1)..(1): n is a, c, g, or t
nctatgggaccttccccatgacagacccccatgccctccgcctgcttcatgtctgtaagaaaagagccaaagaataaatttaatcagagtaatttagtcaatgaataaatttaatcagagaaattagaaaatgcagaaacaaaggaaaacagtcaagacaaaataatgatagtttaaccattaagcaaagtcaaggacatttagttcctcctcaagggctgtagataatagtctgagccacatcctttaaatactgaaacccccatcaggtgggagatgttaattacatgatgactagactggagccatgacataaactgctcccatcttgcacagttccatgaactggcctcaaggaaatgggaacaaactgaccccagggttgaagattgtacttaaaacagttaagatgttgctgatcaaaccactgcatggccagtttccagagctgctctgcacatcgccccctcccccatacacccctgaaactcccctttaaaagctcttgccccttcattggcagtgaggaattgattctttggaatgtgagtccaccttctccccaggattgccagcttccttactaaagctttctttccttttacagagcacttgcctctcagtattggattcttgagtgatgggcagccaaatgttaagttcaataacaaagatcatttgtactttgtatgaattcaaaaataaccttaaaagtcagcgtcctctgtaagcatctgttcatttatatacgcaatctgtcttcaccaagtgaccgctttatgatatagccttcacttgatcctgtgtggtagcaaaggagataaatacagtttccactctctaaactcaccgtctactgccagggctgacgaactacagtgtgagggccaaacacagcccaccacttatttatgtaaataaattttatgggaacacagccaatggccatccaccagtgcatcgtctgtagcagagttgggtagttgtcacagagacctgtgtccacaaatcctgaaatattgactacccagctcttcttagaaagtgtttactgacccctaatgtagcaggtcccaaactttatgttgcctaaatatctttctgaagcctgttaaactcaagttctacctggagaatttctaattgagtaggtctggagtaagtccagagatgtaagtccacagatgtctagatgattctcaagcaagtcgttctggaccacacttgggaaaaactgcttaagaaacacagacgttaagcaatgaactgcaatagaagggatcttctttgcaggattatagtacagttcatgcattaaactcgagttcgacagcctggtccttttagaagttgcttcaactatttgaaagtggcaccctctgggtaaaacaatattttgaaaacagatgtttcagaaaaaattatgggcaaggggttattttactcaccttatcttccactatgaatacatataaaactgctgaagaatttggtaataaaaccacacattattttaggtttcagccctagtccagttcagccagggttcatcagggaggcaagatggccccttggtgggagggccatctctgtctccgcatggaatcctgaggggtagcagtacaggcggctgggtggaggagacgaaggggtactgtgggaatggggaagacatgctagaagaactggagatgctcctggggggacttggcaataatattcaccgcacaacccctccttcctctaaacttttccccaccagcacaatcattcaaacgtccctgctttctgagcatgaaggccaatccccagctgggccctggtatccccgacacttgtaggatgtaacgtagaattaaaggtcaaggcagaagagagaccatcttcaaggagcagaggaagctgttgtgaaataattattacccatgatcactgcacttagctctgagttttctcaaagctacagtggaaaaaaaataaaatgaataaacaaatcacaaactcctcatattagcaaaattccctaaccatgggtaggggtgagtcagaaaataagggaagggtcaggaggaaaggaaatgtttgttttcgaggttgcccccagcagcctgtctccaacagacactcaatgggatctgtcgttagctgacctcttttgcctccatggacagctctggtggttgatttcaggactcttgagtcagcccagaggcatctggtgaattccgtaaacttctgcgttctaatcataagtattttagaacattacaagatgagactctgattgctttaattagtaattaagtgacatcatgactggggagattttattttgaaagtgaagctagccatgatgcaaagtgaatttattttgggtctctcatgctgtctccttggtggcttataactctgaagtctcacagaacgtgcgaactatgtccagtgtgtaaacataaactttttaaaaataccctgcttagtttccaaatatacttaactggaactctgcatctgaggccaagatggccctgctgtatagttagtaatgaattgttgtctgcctcctttcaatcattttctttctggttatgttttgacaaaagcagtatgtccaacaggtggcccatctgaccctcctggccagagtccgtgactggcgcattccaccgtgacggagggaaggggatgaaagcctgcatgcaacgtatgcagaaaatcagaagatacacttcgggctggaatgaaaggcatgctcgttgctgcagggacagcaggggcatcacggggccaacgctgatttatcctgccgccaacaagacttcatacatggttccaaagcagcagtgaaggagagaaccccaggatgctcttctccattaacggtcgtgggaggggctgatgtgaaggcggaaaagaggtggccacttgttacctgcgtcctcatgaggtcacgaggtca

SEQ ID NO: 56225 - DNA, 1848 bp, Bovine  19866881105059
  misc_feature (1)..(1): n is a, c, g, or t
nccttagttctcttgtacttttggtcaattaagcactgtgtgcctcagttttctggtctgtaaaatgggcacattaattcttgcctcaccaggagttggggcaatcaaaagggaaagtgaatagaaaactcctgggcacatgctgaactcctggccagacaactcgagtcttccttgagccttcatcctctgatcaaccatcacaaaacagcagaggaggctggcactttgccttgatagcttttgtccaaaacatatctattaaatatgaatcacttatccccttgggctgcagctactgaagcctgtgctctagagccgatgcttcacaaaaagagaagccgctttaatgagaaaccagggtaccgcacctagagaaaagcccccactcagcaatgaagaccccatgcagccaaaaataataaacaaaaaatcatttatcccacagttcttaaccattagatgcatttctaatacgtcctaactaaacagatgtatcggaaaaggaaatgggcaacccactccagtattcttgcctggagaatcccatggacagaggagcctagcaggctatatagtccagggggttacaagagtcagacacgacttagcgactaaacccaccaccaccaaacagatgtatattccttcccccatctagccttactggaagacagaattttaagtgacaattgtttacttgtactgtacacacatttgtggaaggaacacactggattcattgtgtgtagactaaaggaaccgttccataataatgagaacagaatagaatgttttgtcaaattattttcaatttttttgtagaaaatttgaatttgtgcttggaaaacaaatcagagactcgtttcaccagcgtgtttccacaagcacagggttttgtgggagaggcaaacgcctccaggcagaagcgatgttttctaagagttgcgttctcagtgctgcagagaggaactcagccacaggaattctttaagagaagacgtgatgaataaccaggcccttctgttatttcacctactcgagcaaatgcctcagatccgaattttgctgccctcaggcccacgtaacatgcccaagtgtggggctctctgcacttctccgattaattaaaagcaggtacctctttgcaatgcagatagctgctctgcagtcctgccagggcactgtggctcagtgcccgtgatttttaattgaatgactcccactcccgagacctctgggccttccattaatcacttacatatgcagtaaaggtgaagcgtaatgaggtgtgtgtcaggcccttcgacgcggagtacacaggctgtatccacatcttgatgatctgacatccagcattttgtgccccacggaatgcccatttgcaatgattcaaattaatgccaagacagcttgtctgatatcaagacaaacttctcagcagcaggagcaaataaaacaaccatgcccttggctttgccctagagtctgaacgacagagccctttggtgggtggagaagagaggcttaattcagaagctgaataatgcggtgttaggcctggagcctctgcacccagactgatcaggctcatgccacggcactgcagccctggaaaactacttagatgctgtgtacctcagtttcttaaatcagcaaaatgggtgttatgatactgcccacctcctcaggttactgtgaggagtgactgagttaacacagagagggataaggtctgtgatgcccagatgctcacgaaatgccaatgtttttacacttttgtgcttctgttggttacttgacaatgtcaacaaaatccggcatttagaatgagttccctggggcgtt

SEQ ID NO: 56226 - DNA, 1518 bp, Bovine  19866881129475
  misc_feature (1)..(1): n is a, c, g, or t
ngttatcgttaccatctttctaaattccatatatatgtgttagtatactgtattggtgtttttccttctggctcacttcactctgtataatgataatttcttaagtcatgattcaatacatgaaacaagctccttggacccatgtttcagtgatactacttcaatgtaagaataatttcctgaggaagacgcttctcttggctttaggtagaaggtacttacatgtcattatggagtagatacaaagctagaagctgaccatacactgggggtgtagcaattcctcctggagcctataaggccaaaaaaaacaaagagaaataaacctcatttattcttttatattttaaaaagtgttttcttaagtcacctaaagagtaagcatactttgtagcagttgttattatggatggagaaacggtgcaggaagcatcagacactaaacccagaggattacacttagctctttcttcagctgcgactcctctgtctgggcctctatgtattcatatacacaagaatatttaaacgcaatccctttcccaattttcaaattcttactttgttgtactactgtaagaaatgtctccaacagattcctaaagcaatatgattaattctgcccacgataccaaatacattgaatatctaagtaaacacataataaagagaaaaacatcagctgagttacaaaagagctgagttacaaaaacattcttctcctcactcaatttcagttcattcagaagacatctataaagtgtctactggagagctgctgcttctggcagctgtctcctttggttaattaactttttatatcaacactataaatgccattaagtgcctttcctcgaaaaaaaccttactactttagtagttgcgtgatacaatgttcacctgtccttctgaagacaaggggcttccctggtggctcagactagtaaagaatctgcctgcaatgcggacaacgaccagggttccatccctgggtggggaagatcccctggaggagggcatgacaacccacgccagtattcctccccagagaattccaaggacagagaagcctgtggactcctggggtcaaaagagtcggacacaactgagcgacacacacaccacacacacaggtgcaaaagagtcagacacgactgagggacacacacacgaacagaagactcggacacgactgaatgacacacaccacacacacgagtcggacacactaagccacacacacacacacacaagactcggatatgactgagtgaaacacacaacacacacacacgcaaaagagtcggacacactgagccacacacacaagagtaggacacacacacacacacacaagagtaggacacacacgacacacacacgagtaggacacgattgagcaacacacacagataccacacacatacgcggacacacgagtcggacacgactgaacgacacacacacaccccccccacacacacgagtcggactcgactgagagacacacacacacca

SEQ ID NO: 56227 - DNA, 1913 bp, Bovine  19866881177642
  misc_feature (1)..(1): n is a, c, g, or t
ncaaatacagggattgctttagcgtctaaaaaattttacaacttgtattaagctctcacacagtagaaagatagaacaattattccaagactaataaccacttctcttgtaaaacattcaccagatttgaatcataaatttagatgtggaattaaaaagcacagtttgaaccacaatgttgtacttactctaagagtaaatttggtatttattatttttagttaaaagagcagcaaaattctgttgctatatttggttttgaggtgtgaaatatatggttttatggaaggaggatttggatcagtcacagattttccttttaacggtgtttgtggaaatgggatttttaaattagaaaggaagaatcgactgaagacaacctaaggaaaggagtcattcttgaccatcctgccctcacaggtaagcatcaatgagaactgcaggctttaagaacatgttaatattggacgggcttcccaggtggctcagcggtaaagaatccactgtcaatgcaggagatgagggttggatccctggattgggaaaatccactggaggaggaaatagtaacccgctccagtactcttgcctggagaaccttagggacaaaggagcctggtgggctactgtctatggggtcacaaaagttgaacacaacttagctactaaacaacaacaacaaatatttggatacattctgataacaaatgtatctagctcttacatgacaggtacatcaagcactgttcttgcttaagttcatgcataagttcatgctgtgtacatgaacttatgaagccctcacctggactctatgcattaggaggcatcaccatcacaaccccggtgatggcagggaaggccatccagccctgtctgtagacatcatggtgtctacaatggatgggggagcattgacttcctgagaaagacagcaccatttatcctacagagaaacatccgagctctagaagtgtgattttgccctgaagcggtggataggtatttgaggtagtctgcaagaaatgttttataccaaacgagatgctgcctcactggtctgtttgtttccatttctgtttccaaattatagggctttatacaaccaccagatcattctctactgaatggttcagttttaatttaagcctgctgaaaatagagaccaaaattggatcggccacaaatgtttcaaaggggctttttccttgttttgtttttagctgattttaggatgagaatatagaaaagtgagtgacaggccaaggcaccatttttctctgaatatcacttcttgtacacctgaaactaacacaatattgtacactggccatacttcaataaaaaatttaaaaaaaaaatcactttcttttctctctgtcttttcatgtgtgtgtaggacttctttactgacctcatatatttttgtttagccaaactttatgtgaatccttttatctttatttctgttttcaagagaatgttttctaatgcttgtatcattccaatgcttaagtcatttcttacttcctttatccttaaagacagaatattttcaggccactattcttttgtcacagtttaaaatgtgggttctatggtttctcgtcagattaaccttactaaggatagttcaaagaatagtaagattattaaaggaatttaccaaaagattttctaatattttaaagctcttgacttattttcacagatgtatttcaaatttatgtctctttccacaagattgctaattatgattgctgctaaaattcatatccctgaaataataaaaacacaaaagacttactagatgtgaagtactgttttaagtgtattcaaactctgagctcattcaatttcacaataactctaagaataattattattttcagaagagcagaatgactgaacaa

SEQ ID NO: 56228 - DNA, 629 bp, Bovine  19866881306998
  misc_feature (1)..(1): n is a, c, g, or t
ntctggctgaccctggcacactgggcctcacgccctcttctgatgctcctgggtgatgaaggccaccctcccggccccacacgacagcacggccatcacagatggcccagcctcgctggctgcacacgggaaggggtgagggggtacttgccatatctggaagcgtagtctggtctgggaaccaaaataattttttggtaagctttgcagaaaggttgaagttccgcatcaaaaggtcgctttgtggtccccacaattagaatcctgtcgtctggcttcaggagtttcagcattttgggaagctgctttttcaggcgcttaggttccatctgggagaaacagagaggaaaaaaaaaaatgagcccacatatagaaaacagaattaagagctaaagaaagttcagcctcggacgcaccgtgggatgcccttactaatgtgctttcagggctgctggccatactttcctagagtgtgtcctgggccaggtctcaggacgtgattcctggttggtgtggtctgaattgctggcccttcctttcctcaaatctggtgttcagatttggacagggggaaggagggaagcacctgaccgaacgttctagcatcttagccctaagcatgggaaatg

SEQ ID NO: 56229 - DNA, 975 bp, Bovine  19866881351083
  misc_feature (1)..(1): n is a, c, g, or t
ntcccccaggagggggatctggagcatccgaaggacacaagctggagtcgcagagtggatgagatgtctgggggaccgtgagaccccaggatggggcgtttggggaaatgcctcttccagggaaagcaggaacaaaagggattggactgagctctccggaaggaagggagcccctccctcgcactcccagcttctgccccaccgccccccgctgcaccccacccccctaccctccaccagtgagctgtgatgcatgggggaggagagaggaagggaggtgagcgtggtcgcctcttgactgaggaacagtcctcatttaccaggcggctgtgcgtcccagcacccgctttctgagggaaggacactcaggaagccatgagaagcaaaagggacccacagtcatcagccagggcagctgagtctacctggtggctggtgggtgacatggaggaaatcaccaccggctcctgagatgtgaaaacaggctcaagcaaagctgccgtcagcggccgggactaatgatgcagcactcagcttggatacacctgacctttcctcagtcctttcagcaccctccacccgctccatcctcagcgtgaccttgggagcctctgctcttcacacatggggacactgaggctggaaggagcaagttatttgaaaatggctcttggccacaggagcagtggcctacttcaccacacacagctcctcttttctatggaaacagttcaaggatcacgtccagaccatcaacagtaccagtggccccactgctttcccgtttactgtcatttgagaaggtgtcgttgattacgtcttttatggatctctagctcaacactctggtactttggccacctgatgccaagagccgactcactgggaaagaccctgagactgggaaaagattgaaggcaggaggagaaggaggcgacagaggatgagatggttgggatggcatcactgacttga

SEQ ID NO: 56230 - DNA, 2965 bp, Bovine  19866881359787
  misc_feature (1)..(1): n is a, c, g, or t
ncctctgctcgggccaccacggactgggcttgaacaacggaagtttggttctgcaccgtctggaggcagaaagcccaaggtcaaggtgtcctcagggctgatttctgcctctacttgcacctggccccttctcaccgtgtctgcacaaagtcttctctctgtgtgtgcgcatccctggtgcccaccagtcagatcggaggagggcccactctaaccaccccagcttgtggatgtctctaaatgccctctctccaaacatggttacattcgaaggagctgggggttagggctctgacacatgaatttggatgagggtgcagttcacctatagcaagcgatcttacccacgccaaatatgggtccttgggctcctcgttccatgcctctggccctgacttccagggacccttcctctaaggccttctactcacaccccgtggatttgggtgagagtggctctcttggcctgtttgggccactgcaaccaagttcacctgccagggggttaaacagcactcgtccactttctcacggttctggaagccaggagtccaaggtcaaggtgctcggtttccggcgagggcctgcttcctggcttgcagacgccttctcgccgtgtcctcacgtggcctttcttttgtgtgtctggggagaagggagagagaaaggggacattcctggggtctctcgctcttctgatcaggccacagtcccagttagggccccaccctcttgaccccatttaagcataattacctccctgaagaccttatctccaaatacagtcacatgggagttggtggggagggggctaggactccaacatataaatctgggggcccacagttccatctagaagcagccgggccttgggaatgtggaggggatctggggtggggcacagggccaggagccccagggtggctttctggactcagctttgctacctcttgcctgggtgacttcagccaagttcatagtttgtctgaccttccaaaaagtgtcctgtgtcccccacagggctggggtaaagacgaaggagacagggcttctggggaagtcaatgccctgcatattccaaccacgtggaaacgggtggtgtcgccaggaaaacaagctggttgctgcaataacatttcttttaagagaaccttgtccctggaggtagggcctggctgctgacactcacataccttccatttccaatgaatacagttttttttttttcctttctatgtgactggaagcttaataatattaccacctaatgaattccagatgagagatctgagatagcagggctgtcagcctgtcccggacactccttgggcttgctggtctcacttgttatatgtcctgacatttcttcaagctgaatgagaggtaaaaactcaggttttaaccattaaaaaaaaatatccatagtctttagtaatagatgtcactgacatttttggttcttgacattatttagcaaacctagcagggatgaaaggcctctggagatcttacatgccccgagggctacgctctatcctcagggagtttggtttgtgttttgctttctggaataacctcaaaccatgtcatatctccgtttttcactgagtcctgtgagaataatgccaggcctgcctgtgtcgtgtggttctgccctgttatgcctcattttatatttggttgtaataaaaccactcctaggccaagcctaggaggctctgactgattcgattacagaaatgcaggtgaattcagacttgtggcagctgcctgatgttttagcgaggatcccagggaagggtgtgagcctgggtcctgggtggggcaaggtgctcaggtagctaggggactccaggcaggtgccagggagaccagcctcaattttcttatctgtaaacatggagattgcattagctcgaggctgctgtaatgtttttcagatatgtaatacaacacaaagggcttcccagctgccacagtgataaaggatttgcctgccagtgcatgagatgcaggagatgtgggttcaacccctcaatcagaaagatcccctggaggagaaaacagcagcctactccagtattcttgcttagagaatcccatggacagaggagtctttcaggctatagtccatgggcttgcaaagagtcggacacaactgagcatgcaataaaacacaaacaaaaatccaagctgctctggttaaggtggaaatcacgaaatataagcttccctcttccccacctctacaagagaatttgggcactgctggggaacacggtgtaaaatccatggatcccactcgagtcagacccagagctgtcagcatctgcactgcgtttttaatgttcactgatcaagagcgctaccttctgcttacgtttcatcatgaacaattacccagtgactctttatggattttattttgatgaaagataaatgataacatcttcatgtcagttagttgaactagttcatttattgaaacaataacgcacccccgacaataatggtgaagtagtcaaaggtgccgtggtattttgtatttttcaaagataattgcagcaaggtattctgacccctgctctctcacagcttgacttggtcactcctaagacaggccacgtctgtgttctaccagtcacatacctgtaaaaagtcttgcttatttatgacccatggggacagcaacatcgtgttccagcttagccacagaatttctctctgattgtgaaggtgaagtcagtgggaaggttcaagggtggggcagggatgaagtccttgagctcaaactgccatctttaaatgcaaaccagtctcaaaaccaagtttaagctcattccagccactttctctgctcacctgacttactgcataatattgcttggtattttgaaagaaatcgagttattatgtatattataatcaactttggattggttacagaagatggggaaataagcga

SEQ ID NO: 56231 - DNA, 1054 bp, Bovine  19866881396767
  misc_feature (1)..(1): n is a, c, g, or t
ngtgtgctgcagtcctggggtcgctgagtcggacacaactgagtgactgaactgaactgatgtgtataaatggggcttcccaggcgattctatcggtaaagaacccttctgccaatgcaggagacatgagagacttgggttcgatccctgggtcaggaagatcccctggaggaggaaatggtaacccactccaatattcttgcctggagaatcccatggacagagaaaactggcaggctacagtccatagggttgcaaagactcagacgcaactgaagcaatttagtgcatgtatataaataactgaattactgtgccataaacctgaaactaacacaatactctagatcagctatacttcaataaaaaaaaaaataataataaatacaagagaaggaaaaaaaaggagaagcccacttgctgggcttctgctttgggtgtggcacatgcaggccacttccagcagcatccacccagtgagatttgacattttcctcaccagccaggctgccgagttcatggggctcagtggtggggaggtctcctcgggtggtaccccagcagggctgggcctgagcagaagctggtgccaaccagaaacctctgtctccccacggcacacacgggggtgcagggctcagtgcccagacccacactgggtcttgggggctcccgtggctccctgaacacagcaggtcaccccgccaggtgacctgcaacagccagagtggggatgacagccccactaaagcacagaatttactccaagtggaaactaattgattctgcctcagcaactttcccaattagcgagaattctacaactgaaggatgagctgatggggaaccttagctttatataaaacagttagccacagacttcaaagggttctcgaaggtaaatttaattacatccgccccaaccagacatccaaaataccctcgcatagcttttgtgtgtgtatttatactaagtacaatgcccacgtcctgtgaccttagtatgtctctctacatcattgaaaacaggagtcctttggaactggttagagca

SEQ ID NO: 56232 - DNA, 2074 bp, Bovine  19866881424285
  misc_feature (1)..(1): n is a, c, g, or t
ntttgactaacacttgtgctcacaggtgaataataaaagagaacatttttgcaaaacttctgaaagatcctggagctaagggcagatgaatgttagggaaagtttgcaggaataaagaagagtggtacaaaatggtggcggtggaagcaaaggcattaaaaataaagcacggaagaacagcagagggacgagggtaagccagagccgtgatagatggggaactgggtggtctcataggaaaacgtcatcactgaaagccccttgtcacattcactgttcatttcctgggtgaagacgtgtctcttggctgcaacatgagacggaatgtagagcggctcactttgctttgttttgattctgttgactccgtggggcggtgccacactctgtgttgtgggcgtatctgaagcagaaggttctctgtaaatttctgttgaatgagtgctgatgtgtgctcacgttcctttcgtttattcgctgagaccagaaccttgcctggcttgcccttcctctctgtccgtcaattctctctttatttccttccacatctccatctcctcgcagcaagggctttcagctctgggagcaatttggtgaagaggacctttctcaagaccaagagtgtaaggatgttgctctcgcctccccacctgtggggatctgctccctgttgcacccagacatcaggacaggggcacagccagaactgcccttgtcttcagagagcccaggacagaacacccatggagacacctcccaagtgccctctgaagtagggaccagcgctcctgcctggacaccagccttctgtcctgtgacacttcctgcttgtttgtgctgatgacttctatcatcttcacactccctgggctgcggtgttaccgtgactccaagctctctctgtttgtagcaggccaataaatctgagagacgaggtgttgaggcaatgaatgcaactttatttggaaagccagctgacggagaagatggcagactgacgtctcaaaataaccatcttacggggtctggatgtcaggttattttgcagatcagagacgggagaggtgagaagccaagtacaaaggcctttcatcttgcaaacatctcctagaatggcaagcctcaggcaggggacgtgttaatttattcctgcctgccatctacaggtggacagggtcctgaaaaagcttcttcagcttcatggtcaggcagaggggcagggttctctgaggcaggccgtcatgtgtgaacataataacaaaaacaatggaaaccgagtcagagaagcatgtcttcctacgtggagactggattggttattccctgcaacagtaggaccacctgggaccccatccattcccaccttgctgggactccactgtccatctcagacagctctgggtcctgccactgctgcagcctttgctaatcaagcatagtcttctttccagtggagcctggatgtgtcttagcgtctcccctcaacaaagactacagccagtccccaccagtggtcagagttggtgagcagctctgcataaccaggctgaatagctgggcagtggccttcattccagcaaagaggtgccaagctccataggctggatcaggttccatcttgagcacctccagaggctggatcaagacggcacttcccttgggcacttctgcctctgttccttctcctctccggcttcctgcttgctcgtgtgtagctgtgtactctgtcacttcagtcacacccgaccctttgtgacctcatggactgtggcccgccaagttcttctgtccatgggattctccaggcatggatactggactgcgttgccatttcctcctccaccggcttgctcagggctccccaagtcccagcacacccccaagcctaacccaggactcacagccacaacacatacgtggtaataaaccgagttctgcttgatctcccagctgagaggctcagtgtggccttgattgggagtcaccagagtgacccgggtgaccctgtgctctggcgtctgtgctaaccaccggcccagagtgtgaggctcctgctgctgactcccccagcacc

SEQ ID NO: 56233 - DNA, 1297 bp, Bovine  19866881505580
  misc_feature (1)..(1): n is a, c, g, or t
nacttccccggcagtccgtggctgagactctgcactcctaacacaaggggcacaggttcaattccctgtcagggaactagatcctgcaagccacgcagtgcagccaaaaaaaaaaaaaaaaaaaagccacacatagtgtctgagcaccaaccacatggaggaggagaggaagttcctagcagcaagtgggatgaccattctgagtccccagaaggaagcttcaaggggagcatgaccttgaaggagctatttggtgagagggtttgcttacgagtcgtgcagaattatcaggaaatatgcaagggatggttccccaaaggaaaacagggagaggatgcaagcaatgggcaatagtccaccgccaacatgataaaaggcgactagattttctagaatattccgccccctctgatgagtgtcacccttgagcccagagacctcgctcacaagaggaaaggggggcacctctgttgtgtaaagcacaggccaaaagggagagtgaatccgtgtcatcctgttccctggtcctggggtccttcggagggaatgcagggggagggggaggggtgcacacaaagcactcagtttgcaggagaaggtcttgtagacgtggacagctcaacatgcgaatccatcctcccatggagagaagaggggccccagcacgggtggtgggggacagaaaagcactctgcgagctgcttgtcagagtgtcccggctcactcccatcctcactcttactgcaagccctcaaagctctgtctaaagtctgacttactttggagaagaagataaaaggcatcaaaagccagggacttgaaacatatctgaagagtcacctttaccatgtggccttgggggtgttttgaaaccctcagtcggctcactgatttcagagaaaaggcccaggaacagacactaagttttccttgccaagtggagccactacctgaaaacaagagccaggcgctttcttaccaagaatttggaaagaaaggaaatgctatgaggctccaggaaagagacggtctatcagtgaggagcgggccctcgtcgggaggctccgtcccatgtggctggtggtgggctcagcggtgcagcaacgggatgcgtccacagttatgaggactgcggtgaactctccaagaaactttttgatgacagagccagcaggaagtctcggcagtggagagacagacagaccctgatcatgtttatccagcaatttccaagaacaagggccattaaatagagtggacacaaatattctggccactaaagtgatgctttctgcta

SEQ ID NO: 56234 - DNA, 893 bp, Bovine  19866881537286
  misc_feature (1)..(1): n is a, c, g, or t
ngtcgtgttcctccgcccccagtgacaggccagaccccagggcaggagaaaccaacacagacttcctgcataatacagggacctctgctcagtactctgtcctcacctaaaggagaagagaagttgaaaaagaatagatgcgcatgtatgtgtaactgaacctgaagccaacccagcgttgtttatcgactgtaccgcaatgtaaaataaaaagtttttaaagcccaggctaccaccagctggacccccgtttcccccctttcctcctatatcttcctgtctgcttcacgttcatcttcccaagccttcaaagggtgcagtgctgttgctgacaaacagagattcccctgccccctccccacagaatgccggagctgagttatcgcaggaatgttctttacaattacaagtttagggagaatgctggggtgagggtgagaggggaagtgatgtattggacacccaaggagacccgacagttccaccttgacgtacaaatcaaaggtgtcaccgagctggctgagacaggaggcgcgcccctggtgagaatgctttcaacacatccatcattattgtcgagactggggtcacgccgcggagtcacggccttgtgggagcctgacctaagaaccacttgtttttttggcaggatcttagagcctctgcttctgcctttttttaggctctgcagccgtgcacgagaaagcccctttgggtgaagtccctgctgttggccggaccgtctgggggggggaagaagatgctggtccatgccatctgtaccgaaacaggagccaacctcttcaacctgtctgccgccaacattactgggaaatacccaggcaagagtggcctccagatgatgctgcatgtggtcttcaaggtatttgtca

SEQ ID NO: 56235 - DNA, 1146 bp, Bovine  19866881878556
  misc_feature (1)..(1): n is a, c, g, or t
ntcttctgtcgtccccttctcctcctgccttcagtctttcccaataagggtcttttcaaatgagtcaattctttgcatcaggtgcccaaaggattggagcttcagcttcagcatcagtccctgcaatgaatattcaggactgatctcctttaggattgactggtttgatctccttgcagtccaagggactctcaagagtcttctccaacaccacagttcaaaagcttcaattctagggatggtatggggagggaggagggaggagggttcaggatggggaacacatgtatacctgtggtggattcattttgatatttggcaaaactaatacaattatgtaaagtttaaaaataaaattaattaaaaaaaaaaaaggtcttttcttgaaaaaaaaaaaaaattcttgtatacagtggctcatgggccacaatgttggtagtgtcattgcctgtattagaaaaacttggaaaaaatccaaatgtccaatgaacaaagaatggctatatatttttacaatgactaaatagcaggaacaatgaaccagagctatgagtattggatgaagttcccaacataatattgaatgataaagggaagtcatcaaagagtacctacattatgatagcatttaaataaaatccaaactcatgagaaactaaagtttgtggatactgtagtgcaaaagacaagattagaaagtaggaatttcaggttcatagataccttgggggaaagaaaggaagggcagataatcagggagggatacttcagggtcttcaactaaattagcagttttttagacctctggagtgggaatctatgtgctcattatgtaattctttatacctttttagttgcataaggtttgtcataattaaactttggaaaaaaacactctagccaagtggaaacttttagtctaagctgagatgtggttgacaattgttatggaaagcataccttgtgtgcccacatttaagacaaagctttccctctctgagcctggagaaggagaaagactttcaataatgcctcttaacttgctacaagttcataccaggccaacgtgccgctcagccccttcatccaacaaattttacgtggctccaccacaggtatttattttacactatgagcaacagcctt

SEQ ID NO: 56236 - DNA, 738 bp, Bovine  19866880442031
  misc_feature (1)..(1): n is a, c, g, or t
nagtcagacaccactgagcaactgaacagccaccactgcactcagccttcgtttcggcgagcaggggttactctctagttgtggtgcacgggcttctcacttcagtggcttctcttgttgcagagcatgggctctaggtgctcgggcttcagtacttgcggtacatgggctcaggagttgcagctcgcaggccccagagcataggttcagtcactgtgacacactggtttctttactccacagcatgtggaatcttcctggaccagagattgaacctatgtctcctgcattggcaggtggattcttaaccactggaccatgaaggaggtccccttgtcattatcttttaatcctctgtgagccggcgtgagtagcccaggtgatagatgagaacgctgaggctcagagaggtggtgatagccacagccacacccatgcacagacatggcggagcccacaccggcccaaggctggtctgtctgcagcagagggctcttcctccccgagtatggctgacaccctcaggtcacctgctgctgtcactgctggtggttttgctgaagttgctgaagacaggacttgggagtgaaggtcgtgcattttccccttcccctccactctgggcagggtgcccagagctgggttctgctgaaggacagcagaaaaaatggaaggataagattcccacacaacccctgccccactgggacacaccaaaggcgtattcaggatgccagg

SEQ ID NO: 56237 - DNA, 4279 bp, Bovine  19866880459168
  misc_feature (1)..(1): n is a, c, g, or t
ntacataatactaatattaccactaataatccatagaagactaaaggtaaaagagaggcataaagatgtacatttaagataacatgcttatatcctcaaggttccaatttatttagtagaaatccaccaatacttaatatttgaaatatttttatacatttacaaattgatgagcagtatttggaaatgataatattaagcatttaaagatatgtcaatagaaatcctcaacagaattctgcatttcatcacaatggataaggatgatcattttattatacaagagttttgtaacatatatcacctatttatacaagagcaagtctaataatatattttttaaacattgacaaaaaaattattttacttgagataagactcacagaatttatcaagtttgattaagagaacagagtcaactaacagtacaatatgaactgtaatacataaaacaaacttgttagccacaaaactgttaactcatgtttggtttcttagggattaatacatttcaaagcatgctttgccttagaagatatgatcaaatatatcttcaataacaagtttataccacagataatgtgaatgcatgtaaaagacaataatttaaggcaaaccccatggtaattctatgctattttattttataaattaaatcaacaaatggctttatctaaaaatgtgaaggttctgtgtattcctatattcccttttattttcagctggaattttaatgaatttgagtaagtatggggagacatagaagtttaaaatcccctggaaattttatagtaaaaggctgtttgtatctcttgttaattattttctgtggctactgccagttgttcagaagggtgattgggcagacaggagtcttgaggactcttgtttgccacagaggtatacagtgccagccagactgttaagggaagagcaagagagtctgaaaaaaactgtcactgatccaaactcttcatcaatacaggtcttggtgggattgcactaagcaatttcttaaaaacggcaagaactattacttatcaaatatgataaaaagagctaagcatttccagtgagaaaggagtatatttctcacctgagacatcagttctttttttcttagaatatttctgagaaaataatctgtatactggatggatggttctccagagactatcaattaccacagaaagaaatatatgaaagaggtcagtactggggaaataagaaaacttccattcagtttaaactcatattttagtagtaacaaacttcatcataaacaggaagaaaattctcttctcataatttattaaatttgcactcctggaacaataggagctattgttcctgaaatagctcagttcttgtgtttttatattatgtaaccattttgtgatgcttttgtacattctttgtcttctcttctgaattttgacatgtcataaataaactttttcactatgcaaaaaaaataaaaaataaaaataaatttgcactcctgttaatgtatccccagtttatcagtggagtataggataaatgatactatctgatgtttctaagatatgaaactttgagaattgctttactgctgtgaggtacagagtcttacatgcacagcatagataaataacttttctcagaaggctattggatacaaatttacaagcatatgtatttctcatagaatataaatatgtaactgttagatttccttatgcctgaacggactttgcaagtccctcttggaaatgatttttagtctggaagccccaccattagtctaacagagatgctaattcactgttgtctgtagtttcaattaaaaccaccagatgataggagcaccttggtatacatgcagcagatgaatcaacttaattactaagagcttttaatgtagactgtcatataaataatgggaaatacaccaaatttcaagccatgaaacagtgattattaatgccttgggagtttatatttcaatctatcattaataggattcaaagaaaccagagacacaaaattgatgggcagggaagaagcacttaaatgctgttaaagcactcatcacctagtgctaagactctcttgctaggataagctggtcacagaacaggttagtttcacactaggtcacctgccaacctcaagaaaatgtctgtgcaaggaggtacactgcaaaatgccacaaaagtcccagtttagcagtacatcactcttgggcattcaatgactccaaaagacccaaagcttagctaagctaaaggcttagcacaagtttcaaaggactagtgtactactttctggaacacctgcttatgactaagacctatggtgtagaagcttcagatagctataaaaatagtaaagtcttactagaataacctagaatcataatagccactatgggaatgttccagttagacaagactgttcatttaagaagtgcatttaaaagcaagggcttccaaatcaaacaaacggaatgggaaatctatttaactggtatgcagaagctgccaacaagcttcaggattccacaagagcttcattgcatgattcattgcaaaaggttaataaaaaattaaagacacaagaggtacttaaagcaaaagactctaaaactgacgtgattattcctactcttctctgttctctaaggtacctgcatgtttagccaggaatgattaagggagttttataggtattaatactaaaatattttatatttattaaatccttacaaataaggatttcttatttgtaagaaagtaaggaagacttacaaagacttcctttgtaaggaagtctaatagcctcaaacattgagcagggctgacatctatactagatttgatgtgttaactcttgtctcattaacaagtttttacattaagttttaaaactcgcattgctaatactttttctttgaaagttaaattgacaagttttacactggttatacaagttatacaacaaaaatacttcactaacttaaaagagagataaagttacactgtttttcgacttttgctttttattgaatgtgttattttaacgttctcatgttggtacatacagattttacaaataatttctagttttctgatctttgtgtgtatatgtgtgctcaatcgtgtcctactcttttgcgaccccataaactgtagtgcaccaggcccctctgttcatggaattttgcaggcaagaatactggagcgggttgccatttcagaggattttcctgacccagagatcgaactgatatctcctgtgtatcctgcattggcaggaagattctttaccactgagccccctgggaaggcctttctgatttttatcccaaacctaatcctctaagggaacaatttatagtgatttcaaattgtctattccttacaccatatccaatgtcatcaagaaggtgcattcagtgaatccaggacttatttcctaggtatttctttctctaaaacagcacttccatgtttttctcagacaagccatttcagcatggtgttgtttgttctttaatctgctgctttgattttaaagctgtaacaaatgtgtgtggcatgaaaggatattttgaaacattaacaatttatccttctccagtagtttttttttttctaatcttcattaggccattctgagcttttcaggtatagcttggattttactcttcagaggtttagaatctctcagaagaagaaaaaaaaatttttttttacaaaagatgtggaaggtaaatgatcaataagaccaaagcctccctgtatgctctcttcccacttaccagcctctccataccataggggaaaaggattgatttagcgaagtagtggattgcagaagggggaaagatacgacaaatggacatgtggcgttagaaagatggtagtttcctgaaccacatcctgctctgagtgatcacagtaaatcccatgtcctccagaggggtaggggctactgaaaagttaacagattaaaacaaaaaccaaaacaaaacaaaaaaacagtgcaatggagaccaaagctacactggccctgaaaagagccctaagaaaaatgggaatagtgattttaggcaaattaagatttcaatactccagtaaaataaggacttgaaagagtaatacattttttaagacaaagaaaattatgcttcttactctgtaagccttaggactaactctcttcctattatacaagtaaattaatctgcttcttctaagtgaacttgaattcaactatgttatttgtatcattt

SEQ ID NO: 56238 - DNA, 3010 bp, Bovine  19866880567756
  misc_feature (1)..(1): n is a, c, g, or t
nttcttttagcagtagagcttccaaggttaaaacctggatacacagctaccctgttagagactacatatccccagcctcccttgcaggctggtgcagcaatgggactaacttatagccaatggaatgtgagtggaagtgatctgtttcatctctgggccacattcttaaaaggaagttgcctgctctccactgctctttccccttgtgcagactggaccatggacatgggaatggaaatgggggcatctttgatgctgctgccaaggacagcatcctaaggttggccgatcaacaagaccttaagaacctgtttcatgatgacctagaggagaagagtcctggaccattgacaccttggtctctgtgacaatagctggaccaagagccttactgataaacctgattgttcaagcccacagtagatggggagcagcatattggaaggagaaagttttcattaaactgaaagcacagtgaaattagcaaaagcctagagtgagaggagaggaaacacctgtaaaacaaactcagagtttgggatcattcagttcaggatcatgccaagaagccttggtggcactgttatattacaggataatgttggaaatggtcacaacaatcttgaatcattgctaagtcacttcagtcgtgtccgactctgtgcgaccccatagacggcagcccaccaggctcccctgtccctgggattctcaaggcaagaacactggagtggattgccatttccttctccaatgcatgaaagtgaaaagtgaaagtgaagtcgctcagtcgtgtctgactcttaacaaccccatggactgtagcccaccaggctcctccattcatgggattttccaggcaagagtactggagtggggtgccgttgccttctccgcttgaatcattaaaagaaagttaattgtgacagaatattttatattgaaagaaaagcaactatgtgatatatttagaaagtaaatatgatagaaaatagttgacataaaacttgcatgcttaagggtagacaccttcagcatctattcaaaataatacctttcctgatgggccagaaagtagaggctttgattcactgatatgtaccttctcccccactagattataaatccttttaagatcagcttgtagggacttgcctggtggtccagtggctaagactcccaaggcagggggccagggttccatccctggtcagggaactcgatcccacatgccacaactaggagtttgcatcccgccaataaagaccctgtgtgctgcaagtaagatccagtgcagccaaataaataaatattttttttaaatcagattgtatctcctttttctttctattcctagtatctggcacaatgatgactcaaataaatattccttaattgctaagggggtgaaatccgtgttaccttagattccagagcttagtggtttcacgagctgatgtggacgattgagcagtgaagttgcctgaggtcccaaaataccctgatggagagcttcaggagcatagccctcttagccaagagtgttaagagcccaggttgaccttactcctgttgtctagaaatcatttcatcagaaacactctcttgaactcagaaggccaacatgctcaggattttcattgcagaactggttgtaattccaaaaccaaatacaactgaacacagcctacacaacagggcgtggcctttctgcactgtccagatgagatgttcaggaaaactcaaaatgggagggaaaaagcgggaggcccgggaaagttagctcggcgtgctcactgttggtttcacatcacttcgactcctaggattttaggtttcaaggcagcagagctacactgttgtccccatcaccccaaggctggtgctgggtcagattgctaagcagcctgtaagaaggtgggggatgggcctggaagtaacgatcttgaaagtccgcagattttgctataggatccagaagtaaacgtagccactgatagggacagtgtttccaaggcagaactacatcactattaacactttgagtgataatgcagatactgtagggtatcccctgcccccaagagcccagtcaagactctgcaagaaagtgggtcaattttgggagcttggacttctatcacaacaccctcttatctgtctttcccgccaactcgttggaaaagaccctgatgctggggaagattgagggcagcagaagagggagacagagaatgagatggttggatggcatcaccaactcaatggacatgagtttgggcaaactctgggagacagagaagaacgaggaagcctggcgtgctgcagtccatggggttgcaaagagctggatatgactgagtgactgaacaacagcaacgacaataggaatttgatttcctgttcagaaggtaggggagcagcatattgggattttcatgtcctctgtctagtcagacatggggctgtggatttcaagagacacacagcacagatccctcactggaagcaggacttccaaggatggtggggccagagtggagaagacagagccctctaaccatgtggtcctcaaggcagagaatccaggcctcccctctgctgggacagccctggcctccctgccctcccttacccctggcctcaggctgggtccccactcaccaaggccccaccaggtagatgctcttagcttgcagcagcctctttgactagtacttctgtcctggaagaggtgaaagtcaggactagttggggggtgggtgtggtctctgtcattcagcacgcacagccactaccaatgatcaatattggaaacttccggtgggcgaggtcagaggcggatgctggtgacatcacaaaggaagcaccactgtcatgatggaactctgggcacgtgtcagagagggagcacttccctaaccagaaatgagctaaactgaacatttccagggcagatctggaggtctgaagcctgcacaacctcacctccatcctatcttaagcctag

SEQ ID NO: 56239 - DNA, 1712 bp, Bovine  19866880848447
  misc_feature (1)..(1): n is a, c, g, or t
ncccgagtgaatgcctggggcctagaaacgcttgcctacttcctgcgcttccttttagttccccagagcttgttgcaggagacgcaagagacatgagttccatccctgggtcgggaagatcccctggagtaagaaatggcaacccactccagtattcttgcctggagagtccccatggacagaggaacctggcgggctgcagtccacggggttgcaaagagtcagacacgactgagcgactaagctcgagcaccagtggccgaggagaaacaggtggaaacctgagcgatcagtgcacgcctggcgccgtctggacatttacacaccacctagttgtacggccctcgttcagctctgtgtctgcgctcactagtgaaattttggctgctattcactgagcacccactacaggcagcgtgcgaagcacgtgacatgcatcgtctttatccctatgaccattgaggaaaccgcggcctggggacattgtataagatgaaataatcttctgggaagcagatgtgggtaaacggtggggaaccataagttttcagtctctgaaggccaaccctcctcacccaccacactactgtgtcaaaatctaccctgttaggagaaatgttgatggactccagatgagaaattctgcccctacgacgctgcgtccaccggagtgggtacagccagagatccggtccagggatcttggcagtgggtcacacgccataacaaggcctccacgaacacctggccaggtacagtgtgggtcatggatcatggataaacattcggtcttagactgaattacactatctgccttctctgcgccagaccctgggccaaattggtacccagagaggtatcacctgtggtttccacgtgagggaaccagaagcacaggttgcctaaggtcctataactaatcctgagaagtgcaactagaagttagagtttgagatgcccaagccccaagctctgtcccaccagctgggttgcctcttaggtctagcaggctgggctcagggtccacagagctccacatacccagaacatctccagtgtagttgataggcaagatgatgcccaaggaggggatgcagaggatgaggataaagatgatgaggtggtactggaacatgatgtagatccgggcatcgtctccacacctgctaatcagatcttcattcctggaggagacacagagatggggacactgctcaggggccagtgtggccacaactcaagtcaggggcggagggagcaaagggcgaggaaatgaccgcccccatgcccgtgtcttcatcttcagaaacatccctcttctcaaaacttgttaggcctgaaatgggtttcactgaatttcataggcatatcaaagaaagaggctgcagataacgcacttgggaatccagaagcactcttaaatcaggcattgatttcctcttttattgcttcttcaaacattcctcgcgcctgccatggtacaggtactgaacaaaccgttagtgataacaagattcatcctatttttcaaaaagctgctccttaaaaaccacaatgagctaaaaacttcaaacgacaatgagctatcactccatactgccagactggtcagcattggaaacttggtgaggcaggttctgagaggaggtgctggtgagggtgtggggtgctgggagctctctcatactcatgggtacgactcggcaaggcca

SEQ ID NO: 56240 - DNA, 3230 bp, Bovine  19866880932905
  misc_feature (1)..(1): n is a, c, g, or t
ntataacttgtctgtttcttaagaatatcatctaaggcacaggcgttgacttttgattcagtgcattgtgccagtcaattatccctttttgcagtcgtctttccagagttgtcagtggggctggatgatagctgctgccctgtggctaccatctgcttttagtttagccaaaccatcagtaaaccaggcacaaacattaagaggaaactctgggaatcaagacctcactgagtcaggggctttgctgcaggtggtggagtggaaaatagtttcttcgaaagggacagctaacacctctgtttgagaaatcaagatgcttctagggccaggccagctatgctcttgaatataccacttccgtttcaccaacgaggcttactcagcagtttccttgctagccacagtttcaaagcagcacgatcaggccaaagactatggttcaggctcttcttaatttcaacaagagcttaggagtaggttgatagttgcttcttttaaaagatatgtacttgaagcctatgtccagcagatggcattgctttcatagagaacctgcccaccggcccacccccgcccccgcaaccccattccatctttaaagctgtaatgtcccatttttgtgattatattgtttctctaggaccccttgggaggggacaggatcacctctgactatgcagcagtccctgaatgggataatctttgacatgtgtaggataaatacaacaatgcatccagcagtgggagccacaacagtagtttcaagggccccacccacaagggcactttaccttcccttcccagatgggaacttggctcagaccctgtcagtcgaatctgggtgctttccctgctctttgaactaacaagtctaatcggcctgcatcaggagctacagacagccacctagagattatgctgctcccaggtggggagtctgggcagtgccggatacagggggcaggaggaagcctttcttccttgtaggccctggacaggtttgccccacttcttcccagtgtactttcctgtgtcttgtgagcccctgggcttagggaccttcttctttcagtccctgtgctcattgctctggtcctccctgcagtcctcggcactttggtaacccctgcacctggcagatcgtctccgaaactctaagggattgagtagggctcctgtatccaacaggaccttgagcttgagtcccctctcctcaccatgctaagatgagtatgtgtggcctttatagtcccctttagggacagggagaccttaacctcacctttcatcatttttctctttgaagcagctcagattgtggcaaagggggcgggatcatgggacccagagggacagagtggctctgaatctctgagccaggcacactttgagcttgagcacacagctcacccaaggacctttcaatgttttcactctgcccagagttctgtatggaatagcaaggtccttactgtgggcaccattcaggtaagctttgggagctccgtgattcttcagctgcatccatattgcgggtcctcagctaattgccccatactgataattacatcttttcctgcttttacccagaagaatgtgagcagtaaccaaggcagcattcagacagtttgtttcatttctgcctctctccactcagcctcattcatacataggccaggggaagattcttactacctcccttccccaccacttgggcaagagcatttactaccagatccagggagtcttctgtcatcccctacccctgtccctgaggggccttgtcctttctcttaaggaaagctataactcggaatcctttgctcatcagggtttagggttttatttttaccctgtgtgcatgcttagtcacttgtcatgcccgactctttgcagccccatgggactgtaccccaccaggctcctctgtccatgggattctccagtcaagaacactggagtgggttgccattcccttctccaggggatcttccagacccagggatcgaaccgacgtcttctgcattggcaggcaggttctttagcactagtgccacatgggaagcccttgtttttaccctactcaccaactaatcagttagtctgtcactgttctatggatgctgccaggagacaaagtcctgggtcagagacagccgatttcatttctcatagtacagcaagcaggatgggcatcagtatgttggcatcagctccgcttgcccctagtgtcccatgtgatgccctgggcctggatgaatgcctgcacatgcagtgggttgcatcacagccaaggtgtatggagcttggggaatccgctgttttataataagcagtaaaccagactgctttctgtcccagagggagattctgtgtctttaggttgctggaagcataacccagagaaatggcctgagtaaagagctatcaggaccttgcattcttggcatatcctgcaaggtctgtgggaacccgagagagcctgggaggactatctcccaccacaaacatgcagtggaagccaagaggaagtgtgaatattactactagttttacttgaaagtaaaaatcttatactcctttatcagtatgtttccatacagactttgaaactaaccacaaatgttgggacagtttaaatagtgccccgcatgtgtgggactacagtctgcagagttctctcacatgtgttactcgataactccctgggagatggactggcagatactattcttgtctgcttcatggagatgagaaaagaggtccagagagggtgagtgactttgcagggtcacgctcaccctgggtggcggtgctgggaccgggtctcgctctttgtctacaagtctgtttgtcacgctgcttggaagttattttctccgtttgacatcaccaggtcaccatcctcatttcatgtcaagccctgcgctcagcagatgcaggagtagatttgcccttctgcctagctgttagagccagggagtaagacaaacaaaagagccctgtatttttgctaagagcgtgttttgccctcatgttgtaggtcagcgataactgcttattgcatctgacctggggatggatagtcactggaaagcaactgctcctctgagctgcagggagagactgacacacaccaagggccaggtctgctggataactggcctgccactgtaaagcctgcatgtagtggggtgaaaggcttactgggttttgtagaataggatttt

SEQ ID NO: 56241 - DNA, 2258 bp, Bovine  19866881013749
  misc_feature (1)..(1): n is a, c, g, or t
nctgactttctcctttccctgatctctatgttcatctctctacctcatttgccatcacatccaattgtcagtttccattagttgatggtagatactctatgtttttaataatgtccatcaattattccatagtccaattcaagtaacttatgcaggggtaatttttggatttttttttttgaccctaggaggttttttcttagctatgtctttggttcttcctggcaaactagctgtcctacaatttagcttggtgctcatggagttatcaacttctttgcctaccaacaaaatctccattctcttagataattcttaggtatgaatttgcctctattctgtttcaaatgaagacttcctcagcagagagtttgggagctctgtgttctcatggatggcctgtccctcagggaaaaatctcgtggacactcttctaggtcactgggtgggagtggtagcctctgatcttctcactttgtttttcctggtgtggaacaactgcttgtaagtgagtgagagtaatcagggacccagtattcttggcctgctgtgcctgagtcaggaaatgtaagaatggattcctcaacttttcagcagcacttgactgtaatttcgcttctgccactcagagttcactagagggtccaacagcaggtttgagcaagcagatgattgaatcagtgagcttaaagataggttaattgtgattctccatttgaggatcattaagaaaaatgaacagatcctaagagacctacgggataccatcaaatgtaccaacatatggattatgaaagtgccagaaggagaagtaagataaggtagaaaaaatattttttttaaattaatgacccaaacctcctatgtttgaagaaagaagtgaatacatgctttaaaaaaattgtcaagtaggataaactcaaagagatccacactgagacatgttataaatgaactattaaaagataaagatgaggagagaatcccaaaagcgagcagagagaagctacttgtaatacacaagagattttcaaagacattgggcagaaaccatggaggccagaaggctgtgggatggaatatccaaagtgttgaaagaataagatggttaaccccaaattccatatctagcaaaactatcctccaaaaaaccaaagagaaattcccagatttagagaacaaaactgagagggttcatcactagtacaaaatatactaaaaaggaaatgtccttcaggaaaggacactagtgagtgagtgaagttgctcagtcatgtccgactctttgggaccccatggactgtagcccaccaggctcctctgtccatggaattttccaggcaagaatactggagtgggttgccatttccttctccaggggatcttcccgacccagggattgaatccaggtctcccacattgcaggcagatgctttaccatctgagccacctgggaagccctcgaaggttgtgggatgaaatatccaaagtgttgaaagaataaaatggttaaccctagattccatatctagcaaaactatcctccaaaaaatcaaagagaaattccaagatttagaaaacaaaactgagagagttcatcactagtacaaaatatactaaaagggagtccttcaggctgaaatgaaaggacattagaccataactcaaatccacatgaagaaacaaagtgcactggagagggtaactgcatagataaatatagaagtcaatattaacatagcttatttagcatttcccccttttattccatatgattttaaagacaactacataaaacaataattataaacccatgacaattaatatccaatttaaaaaagcttaatttgtaataatgacacagaggaggtgctgctatataaaagaagagcgtttacatactaatgaaactaagttggtatgaactcaaactggatttttgtaagtcaaggtgataattatcacctgcaaggcaatcattaagaaaataactaaaaatatataggtaaaataaataagaaggggatcaaaatggtataccacaaaatatctacttatcaccaaagaaggcattaaagatgaacatgggaaaggggaagaatatgatcatagaaaacaacaagtaaaaaggcagatgtaactccaactatataataacattacatgtgaatgaactactcttcagcaagtggtgctgggaaggttggacagttgcatgtaaatcaataaagttagaacacactctcactccatgcaca

SEQ ID NO: 56242 - DNA, 1914 bp, Bovine  19866881053238
  misc_feature (1)..(1): n is a, c, g, or t
nactagaagatttttaagctgggaagataaataataagatttttcctttgggtagtaaaaataaagtctgccaaatattaatcccatgcaaatgatcatttgcgcagctctcttcaaaatcaaacgttaaacctgcatattttgctagtgattatcttgtctctggcaatagacttgatcaatgtgaaccaaagaaaatgatggaagaaaaggactacttctacatcatcaggaagtcaagaccaatgaagatctaatgaagtgacgacagtggaaaaggaaagtggcagtaatcagagcaacacagaaggatccttgcaaatttctgtcccaggagtggacaccaacactcaaggtcaggaaagagatctaccaggacaaatcactggctcgcaagagaattcgagacctcagctggagagacgcccattcctacgctgcctcctaaggtctcttaaaaagaataatcagcaagatgacagatcagatacatcaacggggagggaagttttacttcacatgggcctgtgggggaggggcactcacggccatcaagaacacagaacccttcatctagacagttcccacttcccaagtgcttggggcgacctgccttcacacgactccttcgttactgggtgaaacgcagccaccttaacctggaagctacaacagggtaacagaacagggatgcttaaagagctggtctgtgcccacttgactttagaaagacagctggtcttccctcataaatcctcattgcaatagaccacttatatttggcctgttaagtcaaagcacaatctataccagtcttataagggtacagaacagacccggcagaggagcctggcaggctaccgtccacagggtcgcaaagagttggacatgactaatgcgactgagcatgcaggcacacaatggtgtcatagttcatattactgaggagtaggtgcaaagacactggtcatgtcggtcacgtttctagtcagaaaaccatggcaataagaggagctggggaaaggaacagagaagatgaattcagatgagaagttgccacttctccatgaagaccaggagcagctgactcgagacaggctgagccaggaggtgtttgccgaggagtcacagtgaacacctgcggcagaagacaatcggcaggtgagcgggagacgccctctgttctcttctcttctcaactgcagcagaaggcacagcctgcaggtagccagctgtctgtccaaaaaacagaagatacagacacagcccttgccacaaagccccaggaggccaggtgtgcttcagagctgcttcgcccaggccgttcagaggcagctgtgcaggcctagacaaggccagccagagggctggcaggcccacgggtctcccactgactggcccagctctgggatgagcagtgggcagcagccctctatcacatccggacagccacgccgtaccacacgctggggtctgcaaggcttgctgtgctccaaatcagacgagagcagcgactgtgtgtccccggtacgtacccagggaacctcatccagaccaagtctgagcctcggcctgttctctggcttcaaaatgacagctctcagggcctgatcttatcactctagctcactgcttatccctagaccaaccacagtccttggaatatagtgggggctcaataaatcacttttgaaaggataactgagatcagtcaagatggcaaagaatgctcaggaaagcccatcctagaaccattcttttggaagcatgagaaatgttaaggaaggctcagagtaagtaacaatagaagcatcagttctctgccgcattacctgagttcgaattatgcttcttaataatccacaggttgttgtagtccttgtgcaaataggtggtgacctgggggggtggggg

SEQ ID NO: 56243 - DNA, 1059 bp, Bovine  19866881190766
  misc_feature (1)..(1): n is a, c, g, or t
natattactttatattaaattaattgacattaaatataacttctggacttttggattcttctttttttttaaaataaggatttatattaatttactgctgagttttggtttctatgtcttgacatggaactatggagagtgactctgtttagaactacttagagaaaaaagtgagttagtggtccatatctgagcccccagaagcagcgttgctgggcaaggctttccctccacacagcccagctcgagcgcagggcttgggcccaagcagcctggggctgttaccaacgcttggtatctgctgacagttcttaggttttagctgcttctaattatatgtgtgaaaaagcaagttttacactattgatggtcaaggaaagagaaatgaagaggctgatcctctcaagcgttttgagggattcacaactcacaggcttagtttgcagttgatgtgttcagtttgggggtgttccagggtggcctccctttggaagactggcagtaggagaaaccagtccctggccttctggcttagtttccaccaggacttttcccttccgctccgaggaggtgcatccatctgcgttctcctccccattttctccccttctctctatgcctggtgtgtagccacttggcctctttccttgctcctcatcctgacttggagcctcattttcctttcagtggtgcagtctcccaggaatcagcccctacccacagcctccgtccatgagctgtcgtgttttacttcacagcaagtgaaaaaaggctgaatgaggaagcccctcactagccctacccttcacactatgattattttctttttaagtactcagtcttcactgtacccaaggacttggccttaacacaggagaggatttgtttcaagccgtgagctctgtaaacaaaagagtctttgctctgcagcagctgccggagagcagctcccccactgctgggggctcctcctgtggacggttgtcggggaagccaaggtctgggtgcagctgggaggggagtgggaagagacggagtcttctctccgaggcctctcat

SEQ ID NO: 56244 - DNA, 2091 bp, Bovine  19866881343092
  misc_feature (1)..(1): n is a, c, g, or t
nccccccaaattcagcccagaacttgcctaaggctcccccaccctttagccctagtccctaagtcgggcagtggcccacatgcatcctctttagagcaaaggagaccctgggccaccacgtacacccactgccagggccacaactgcgtgtgctctggagtcacgtctcagtgggccccccatcccatccttgccggagcccttcctttgtctcccggggggcccccatgcctggcctgagtggaggaggcacctgcaaattctcgatggggcgggtgacgttgtacaagtcgatggtgttgatgatgatggcaggcgtggtgaggaagaagaagaggaagaagaggaaagtgttgattgcgataaagcgggcccaccaatggaagcggcggacggacaggtgtttcctgggcgggatggaggagggaggcgcgcttagggccgtgggtctcggccctcagacccagccacgctgctttctgcatgccagctgtggaccaggctgccctggtctagttcaacgctgtgggcccacgcctgcatgcgacagccctaggccttctcctatcacgccacttgtcaggctctgaatacatcccacaggtgagccagaagaatgatctgaattctttccacaggaaaaaccttttccccaaaagggggtggacttgggggcaggcagaggctgcgatgcccaggagagacacagcccagcaggggccgtatgtggaggaggaggacaggccctgattcttttccccatcctacaggcgtcttccatcccaaaggagctcaagggagaggagacagacagagggggcttaccaaataatgtccttggggtgcggggcacgtactaccctccagcggtaggacttgacgatggtggtcactgaggactctttgggggacatcccacagtggatgaacttgtagtcctgcagaatgctgcggagacgaggaagagacagaggtctgggggtgaggaattcttggagacttggatatgtctctcctgaccttataggtgggcaattcctcaggcctggtcactggaggaaagggtgttagagggatggactgcccaggaaaagaggggaccacgtagttctcagttcatgtcttgtccccctattggtagtgacggcacaaagacatgctctttctgtgaggttgacaggggaggtactcatttagcctcctcttaatatcaatagctaccgactgctccagccagtgcctgacactgtgctaactggtgagtcacatcatcttagctgcatagattactgaagacacaaccaaagaggggcgggtgctggcactggggccccaccttgggtttcctaactcacatctgctgtaattaaacctgagatccctctctactgagcgatggttctcagaaagatatgtagatgtctcacacacactaaataggacacatattccttcttacccttccaggaggtggacaaggaagatataagtaaccaaatttgatgaataagaaacttgagggtgtaactaacttgcaaaattgcacgtgatctgttgccctgaattctagcctgtgccactgttcctttgcagtgtcagggcgggtgaaaacaaagccttgtgaacgatcaggctccctcggggagaggatggctccatcgtcctcaaaagactgattctgaggctcctatgtatttgacccaggcctaagattccttccagaacactccagagcagacctcatccattccttatcaagatggggctgccagtggctggggcagaagagggaggagcctgcaaagctatgaaacagagaaggcttgcagaggagaggagaggagcaggaatggcagttgggtcttctctatgctgactctgtcactcgcggggaggggaagggtgacgtaggggtgatgggtaatgaggggcggaaaatgggtatcattcttgtcaaggcctggaagaggaaccaagaggtcaagggctacgctgaccacttctgggctgaaacaaggatgtatgggggtggggagcccaggacctgggtgtctctggagacaagctagcccagcagcggaggaagacgca

SEQ ID NO: 56245 - DNA, 951 bp, Bovine  19866881582380
  misc_feature (1)..(1): n is a, c, g, or t
natgggagtgaagaatctctagggtgtgatgtagtagtctggagccaaacaagtgatgtgtccaagcagctgccggttccctccagttttcactcacacgttcccctcttacctaggcctgaagaatgcggatgaccctgaccgtgaaccctgcatctgagtctcaggcttactgcattggctcacgaccctgaaggggtgttgatctctctggtcaagttcaaggtgaaatagcgagtccctgtggtgtgccaggcactccacattcttacattacttagtcttagaagtgatttgccttccctggaaactggaccagagagtcgtaagatgataaagacgatcgttaatggccctgtctgcacgggtgtcccgtgatgtggtggttccatcctccaaactgaatattttctccctgagacctttgtgaggtttgttcaagaaaaacatcacagaggtggaagtaggaaggcccaccggatgtgcgtttaccaatgtatctgggctattctgccatctcggccctgggtttgaggaagttggtctcttacgggacaggcctgcgtgccgtctgagggctgagcttgccttgaccagttataagctcagcgtacccctccaagctccccgacaggcttctgtatcctgcacagtttgggggaggggggcctcgagtctgacctggggacccctctccagcagggagcctcccaggatgactgtcttgccgagcagcctgaacatggtgggaaagtcccggaacttcacggtggacgactgcttcagctctcggaacaccgtcctaaaggggcagccctttgggggcatccctactgttttgttcctcaacatcatcttgtgggtggtgagtgctgggcactgcggagggcaaaccagaggggtctcaccggggcacatggtccagctttcccaagggatacaagggcccca

SEQ ID NO: 56246 - DNA, 3096 bp, Bovine  19866880140661
  misc_feature (1)..(1): n is a, c, g, or t
ncttagaaccgacatggaataacaaactggttcaaaattgggaaaggagtacgtcaccctgcttatttaatttatatgcagaatacatcatgcaaaatgccaggctagatgaagaacaatctggaatcaagattgactgccgggagaaatatcgataatctcagatatgcagatgacaccacccttatggcagaaagtgaagaggaactaaagagcctcttgatgaagatgaaagaggagagtgaaaaagcgggcttaaaactcaacattcaaaaaatgaagatcgtgacatctgttcccatcacttcatgagagatagatggggaaacaatgacagacttgattttttgggctccaaaatcactgcagatggtgactgcagccatgaaattaaaagacgcttgctccttggaagaaaagctatgacaaacctagacagcatattaaaaagcagagacattacttggctaacaaaggtccataaaatgaaagctatggctttccccagtagtagtgtatggatgtaagagttggacgataaagaaagctgagcgccgaagaattgatgcttttgaactgtggtgttggagaagactcttgagagtcccttggactgcaaggagatcaagtgaagtgaggagaagtcactcagtcgtgtctgactctttgagaccctgtggactgtagcctaccaggctcctctgtccatgggattttccaggcaagaatactggaatggattgccatttccttctccaggagaacttcccaacccagggattgaacccgggtcattgtaggcagatgctttaccgtctgagccaccaggaagttccaaggagatcaaaccagtcatacagcatcaggtctgacggattaaacaccatgaacttatcagtgataaggagccataaaaaggacacaggcatgctaggattttacaaagatcctactcatgggcgactagacggcagctattatgggtggggaaaagactggaggcagggtgtacaggccaaaaaggaccttgagtttggtgagaatcatagataagaaatatttaggtattaaaaaaaaaaaaacagattttggtgattgactggatagttatgagacagtgaagcagaatttaatgttttatagcgcttgagtgatccatggacaacagtaccaaataaaagggacttaaggtcaactggggctttcagaggttttgtttcattttgataatgataatatacatatctgatgatgagcatgctgtctaaggacaaagtgaaaagaaactggtaaagtaagtaaagctgatgatctcggtccaaaactggctgagtctgaaatggacagtgtatgggagatccaggctcttccttcagggagacgtttcatgactgcattaaaccagaggactatgcaagaaaagtaaaggacccctggcaacaatctgttaaataagcaacaatccagaaattagccacctgggcttctcaggtgcaccagtggtaaaaaaataaaaataaaaaaaatctgcgtgccaatgcaggacacacaagagagttgggttcatccctgagttgggaacacggttggaggaggccatgataacccactccagtattcttgcctggagaatcctatggacagagaagcttttgtgagccctggggtcacaaagagttggacacgacttaagtgacttagcattcactagcactcagaaattagagacaaatagggtactcacttgaagaaaaattaggaggctcaacagcaccaagtccagattggggatgtgtaagcctaatacctggagtagaatgggcaccagcaggcatcatgttcccgccccccaaaacagggtgaggctagagaggaaaatcactcaggctcaaaggagacagctttgaggtcctttcaatctctcatctcatttgataataatctttccctttgctggtcaagacactcccagtaaacacgcacttactgagtctccccactccttccccctggcaccgaaaatgggaaatgttcttgtctggtttactctcaaatattttctcagttttccaacacttttcaaggagttagtgaggccgtgtgaattacaacttggaaatacgtcccaatacattcagaagctattcttacaacagcctcacagccaaaggtcacagccaggcatgggaaagatcctgcctcctcctgctagctgaagctctcacttaccaggtcagttgcactcgctcacgttcactcttgctcactggccctcactctctctgtctctgcatctgtttgtccgtctctctcctggtacccagtttcataccggttactgtttggtcgagcctggatcacttgtcaccctaaacacaaatcagattgaactcacacaagcacagaggaaagagctaggctccagagaggactggacatctgtggtacttgacgttcaagtccttggcgagatgtcaacatttcatagagcactttaaatgttttgtttgagcgctaatgcagcattccccactggtcaacagcaggagcccaggcagaaagcaaagcagatttccttcaacatcagatgttacacccagtggctgagccagtcttgccttccgaaaccacaagagactggataaactggtaagtaaaaaagtccatccaaggcagagtgtatttaaaggatatttgttgtgccactgtaaaatggcactttggtgcttatcatgtcctagattcctttttataatagacagggtgacagatttacaggtgagattttacttttccaggttcaaagactaaactaagtccaattaatttttctctgtaaatgttctttttaattgcatgaagcaggattttctttcaagaccttatgcacaggctttcgtaaattcctgttttagaaactttatcttattgcttggaaaatataagacaatgttgtgtgtatctggatagtgagttaaaatcagttttggaaatggtaaagagcacaaatacagctgggttatgatataatcctcagagctgagggaatccagtaaagaactaaaatactgcaggagaaaaaaaacaggtttggtg

SEQ ID NO: 56247 - DNA, 2783 bp, Bovine  19866880296444
  misc_feature (1)..(1): n is a, c, g, or t
ntttgaccccagctctgcccttgctaactcaatggcctcacaccagttaacttcacctccggagcctcaagtgctaatttgtaaaataaggataaggggaccattgtttctggagggccagcaccttgcttctgctcctagccattctctactctcattttctgaaatctgcttggcaaatatgatcatgtctctctctcccaagaaatgttattcctcccctcaagcctcatgaaaagagttttgaggggatcactggcctgggcatttagcctctgtctgctgcagtttgcaagaacccaaagaagtagtctctgacctagagttgagatctttcaaggtgaagaactgtgacttgcagaatgtgtccatgtgggcaaggagataaggctggtgagaaaatgcctgccccagagtgtgtacaggcaaaggacatctgtgcatttcctacagactaaatgcagggagaaaaagccagcctgtgagctgtcttaaaggaacctcatccaagaacacaaaagaggactcaactatgaactacaagggactccttgtagaattttgaaaaaccaagactagcagaaagaacagaagcagctaggaagatccctgtggctcagggatctttgaggagtccttggatgtgacccaacaaaaaaggtcacgcccctttttacaaatttctaaacatgcctcaacccacaaaagcagccctagagatttaacttcatgcttggaggataaagtcccatatgctttaaatggcttataattcctccttctctgcctgcatttcaatcccctttcctcaccagttgtgttaaacttcctcaggcacctgaactcatctcttcttgctgctgctgctaagttgcttcagtcgtgtccgactctgtgcgaccccatagacggcagcccaccaggctcccccgtccctgggattctccaggcaagaacactggagtgggttgccatttccttctccaatgcatgaaagtgaaaagtgaaagtgaagtcactcagtcgtgtccaactcttagtgaccccatggactgcagcccaccaggctcctccgtccatgggattttccaggcaagagtactagagtgggctgccattgccttctcccatctcttcttgctaggctgaggcctaagctggggcctctctggggagcccctggtgttctctgagtaattcatgttctgtacaaactgttcccaggcctagggaagggagggtcattaaccaaaaagataagatgccccttataggaacagtgggcttccctgtagctcagatagtagagaatccacctgcaatgcaggagacctgggtttgatccctgggttgggatcaaagagcctctagaggaaggaatgactacccactccagtattcttgcctggagaattccatggacagaggagcctggagggctatagtccatggggttgcactaagtgactaaagctttcacttccacaggaacagtagcaaatgagactcacgttatttgataaagaatctgtgcctacctgctgtactaaccagcactgtcatggaaattcagtcacagcagagaccctgtggctaactggccttagtgagcttaaagatcagctctggaatggaaggagagtgagagggtaaggtggggatggtgaacaagactattctgtatggcaagtctgaaagtatgccaataaatgatgcgatattaaaagaagagaatgaccacttctgggaatatatctgaaggaaatgaaaacactaactcggaaagatacctgtacccccagttcatagcagttatatccccagttcatagcagctatacttacagtagttaatacatggaaatgacctaagtgttcattaatggacatatggataaagatgttgtagaatattattcagccattaaataaacaaggaaatcctaccatttgtgacaatctggatggaactctaaggcatcatgctaagtgatataaatcagacgcatgtgcatgctcagtcatgtccaactctgcgaccccatggattgtaacccgatggactcctctgtccatgggattctccaggcaagaatactggagtgggttgccatttcctcttccaggggatcttcccaacccaaggattgtacccatgtctcttgcatctcctgcactggcaggtggattcttcaccactgagccacctgggaagcccagttagataaatcacacagaagacaaaggctgtatgatctcacttatatgtggagtctaaaaacaaaatcaaaacaaaaccaaactcatagaaaaagaaatcagacttgtggttaccagaggcagaggattgggggatggggaaaccgaggaaggtggtcgaaagatacaaacttttagttataagataaataagaactagggatgtaatgtacagcatgatgactatggttaacactgccatatagtgtataggaaagttgttaagaaagtatatcctgagttttcattacaaaaagaaaaatttcccccttctttctttccttttttactgtatctatatgaaaggatggatgttagctgaacctattgcagtaatgatttcacaatatatgtaaattgaaccatcatgctgtatgccttaaacttgtatagtgatggatgtcagttattttttcaataaaactgggggaaaaacatgagaatgaaaactgtgttaagggtactgaaagaatcaaaagatgattttgtgcctcaagagtttgaggtgggggcttccctggtagt

SEQ ID NO: 56248 - DNA, 2237 bp, Bovine  19866880418894
  misc_feature (1)..(1): n is a, c, g, or t
naggctcttcagttcttctttgctttctgccataaggaagggtggtgtcatctgcatatctgaggttattgatatttctcccaataatcctgattccagtttgtgcttcatccagcctggcattttgcattatgtacattgcatataagttaaataagcagggtgacaacgtacaggctttacgtactcctttcccaatttggaaacagtacactgttccaatctggttctaactgttgcttcttgacctgcatagagatttctcaggaggcaggtaaggtggtctggtatttccatcttttgaagaattttccacagtttgttgtgatccacacaatcaaaggctatgatatagtcaataaagctgggtatcatagcctaacaagttgctgctgctgctgctaagttgcttcagtcatgtctgactctgtgcgaccccatagacggcaggccaccaggctcccccatccctgggattctccaggcaagaacactggagtgggttgccatttccttctccaatgcatgaaagtgaaaagtcaaagtgaagtcactcagtcatgaccgactcttagtgaccccatggactgcagcctaccaggctcctccgtccatgggattttccaggcaagagtactggagtggggtgccattgccttctctgagcctaacaagttataaaattaaccatcacaaccatcaacattcttcattatgccagttattaaagctacaattcattcagctaataggaagagacatacttttaaatttatcccagaaagaaatcaaaccagtccttcttcaaattgtgtaaggtttctgtgtgctaaaatccatatcaagttggccttgatatggccagtttcctcctcagcctacactttacccaacagtagttgatactgtttttcaatatcatcatgatggcttttagtctctttgactacacatttccaaggaggcaacacagcataaggtgctatcacattccactaacatgatatctctcatcaattaaattatcccagttgctttgatacagataagtcattgcagtccttttgtttataaatctgtgtcttggattaaacattcatggtatccatacagtgaagaaaaacagagaagtgttccacccctaatggaagtttaatcgtgatctgatagcaaggtcttacaaaaagcccagagctgcaactgtgtggcgtgatctcctcattggtcaaaaggtagggactgcacacccgtcacctgggcatctttgccagccaactcatttcactgccagccctctctctctcccatttgaacaacttccttcttccaattctttacattatctaataattatggagccctcagaagaggcacaaaactcccaagagctggatttagaggagataactagaaagcttttatttcttgacaaatggagggaaatctttagttatcaccggtaagatgttctcattttctcaatcctctagaaccagagggatttctttttttaaattttatatatttatttttggtcttttgggggtcttccttgctacactggctactctctcactgtggtgtgcaggcttctgattgcagtgacttcagttgttgcaaagcatgggctgtatggctcctgggcttcagagcagaggctcaacagttttggcgcacagctccaaggcatgtgggatcttcctggatcagggatggaacccctgtctcctgcattggcaggtggattctttaccaatgagccaccagggaagcccccctagaaccagggggattttatgtggctaaacaaccagcttttacgcttgctatgtgagaagtctccattgcagatttacatttaaaatgcttcaggtataactgtttgcagaaaaagcatcccaagcaaagtggaggttgaggaggtttgagggaataagggttgaacagagtgagtaattttcttgatgttttctctttcatttataggttgggaaccaataatacaacttctcaggtaattacttttctcaaagccagagtgttttcctctagttgcttcttcaaacaatcacattaacagcataatctccatttattctgtgcatgtaatgtcactcgggcacttggcatttaatgtgtgaaaacacaaaactggaaaccctgttgggagatcttttcttgggctttcttttttcataaaaatctcttcttacttttacgagctactttgcatcatt

SEQ ID NO: 56249 - DNA, 861 bp, Bovine  19866880430043
  misc_feature (1)..(1): n is a, c, g, or t
natttccctctattgttgatgcaaggagtagctttcagcatctgagagcttgaaaataatttgtttttataaataagaaagcacaactgataaaactgtcccaccagtgcactaaacataccagtgtccaattattttttattaaaatttgcttaaaatgttttattattttttaaaaaccatatgtgctgtttgaaaatccatgaagaataactttgtcagagtcagcatggacttaagagtctctttcacttcccctttctttaggctggcctagcgatgaatataatatgggatgattataaatatgttatttctttctaggttcccatccttagtaaaaaagaagatgtttttgcatatttagcgaagtattcagtgccaatggttcgagcaacatggctgatcaagatgacgtgtgcctattactctgctatttctgaagcgaaaattaagaaacgtccggccactgatcccaatttgggtaagtgagacagtgtgatacattttaaattatcctgtaagtcattgttgcctgcacctcctgtacccagcccagcgagctgagtactgagaaggtccgttagggaagctaagtcattagcggtgtggataggggctgattctgtttcctcaggcacagattcccaattctctcagcacgtcctgttgctcttagctgcaaaatgtgtcctaaacacttcaccaccactttgactgacttgtgcttccaccaccccatctcttggctggagaatggtcacagtcttttaactggtctccctgcctttatttttgctccttacattctagtctctccacagccaccacgctgtttgctcagcctaaatcataccattt

SEQ ID NO: 56250 - DNA, 1925 bp, Bovine  19866880509069
  misc_feature (1)..(1): n is a, c, g, or t
ncctagaaacaggcccatgttcacacagaaggccagcgttcactgtgcaggtttgtatttgacactgataaaaaaaaatcagaccttcagtactttgggtgaagtactaaggcacccataaatcttgggcatttatcttgaacttcagagaatgatggtattttttggatcactttcagagcaatcttttaatttcagtaagtgtttcatcaggaaaatgagtatattttgagtctagtttggaaattggctaagttctttctcagtcaaagggggggaaagtcagtttagcacacttttcaatgaccatcataaaagcagataataaatgtacacacacaggtgtgacagatgtgcacacacggttaaactcctccagacttctcatccacagcacagaacatgtgcagagacgtgcgactgcctccatcacctactcgcatctaacaaactaactcaatgactgtcaacgaaatgccgccacagatgacaatgccgcagaagcagaaaaatgtgcctctgtgcactagtcagacaggctatgcttagccagggtcttacttcaaacaaacaaaattttttaaaacggctttacgggacttctctggagtggtccagtggctgaggctctacgctcccagtgtgggggcctgggtttgatccctgcccgggaactagagcccatatgctacaactaaagatccactaaagatctgcaactacagatgccaaataaatttttttttaaatacctttttgattattttccctagctttgtccgcctctctcccagaagagcattctctgtctgcaggtcccatttgaaaagtaaggctatgaaaatatccatcacagcccaggttaacagtcttcaggcaacactttctgttgttagcagatacagatgacccaagagatgagggaaaagtctttctctcctcacacctcaacattagccagttcgaagcacacttctaccaaaacacatctcacatctagtccttcctttacaagaacacagccatctctctaactgcggccactggcacagcaggccaggccgctgctctcatgccgcatacctcccatccgcacccaggtccagaccttgcctgagctcagcctgcccaatggccccggatgaatccttctgaaacaggctgccttttctgcactcccctttttcaatagcctcagaggctttccttttcctccccccctcagaagacgctaacgaatggaagcatctggcaccaccttctatggatcctcaataacatctgtgggccttctctgcacctaactccagccaggactcacacacacaacccgctagcatgggcattagacacctggaacaatcgagctccgctccccagcctcgctcccattctgagtgttgaatcacagaggtctgagtttgaatgcagagcccttacctatcacagagaacaagataaactgacctctctgcacctcggtcacctcaatcaaagtaagataagaataactcacagggctgagattacataagataaaatgcagagtttagcacagtgcctggccacatattgagtgctctgtaaaatggtggttactggtattaaaaaaaaaataattcatagcgctttttcttcatattttaactttcctggaatctacttgactattatattccttgccacacacattgtctttccacctctaagccttgcctaatgccattcctatcccctggagtatattatgcaatcttttgccttcttcgaaccacaacccatggctgccctgcatttaatcactaaagtatacagtagtgtgctcagtactggggattccatagtgagcaaactgcaactgtgataaaggccccaaggagaagcaccacctgctcagagcacacttgataggggcttaccctaat

SEQ ID NO: 56251 - DNA, 2945 bp, Bovine  19866880584052
  misc_feature (1)..(1): n is a, c, g, or t
nctgcgagattttttttcccctcaagttggcatacaggttcaggagaaccaaaactggacagagtcatttttgccaaatctggcaaacagttggatcgattccactgtggttcattccggcctttagaatttacatgctgtaccttcacaaagactctggtcaatgatcttgccatggaaaaatttagtacagctactcctaacgggtttccgtgtacctcagggtggctctcacagaagccctgggttaagttcttggtctaagaagtttaagttctaagcaacaatctgtttcagcaccttttgaccacaacaaaagcaaagaaaaatcctacataaataagaacgcagttcataaagtgcttatgaaattacaaatattttaaattagagcaatgcaaattcatgtccacttcaccaccaaaggtgactgcagagtaaatggatcaccttcctgccaagatctgacaagcctttccaatcagtagtttggtccagcacaggttgccaaaaaaaaaaaaaaaaaaccatcaatgatacataaatattttaaatccaccataattccttctttctataactacgagattcaataagagcaccaattttaaaacgtctgctaccaaactcctcctgcagtaggcccacacgtctacatttttaaacctactttttcagttgaatgaaatgaaaccaaaccacaccctttcctttactttttgtttcaacacctttgtatgaaatgtggcgtaaaatacaggaaaacttttaaagaaatgaaaaaacagacatttccaaagatgactaatgcagtaaatgtgattttctatttttcagtgcaaacaaaaaagtttgtatctttgtcctcttccagactcagaagtgtgaaggatgcccgtagggagtcactccttgctgtggctggttacctagtgagagaaaaaaattcaaacaaaattgcagatgcaaaatgatgctacatagagatggtatgcacgtgtcactgctttcagtaccagcctcaggaacaggagaacagactggcccgggagtctaacactagacagacacttgagtggccaggtcttaacagcacccttggattcattctgcagagaggccagctctacatcacggtcccatacctgccagcaaaaggccttgggatgtgggtaactggcccaccaaaagtctctatccctgaaccacctaaatactaatattaaaaaggactgttaagtatcataaaacattaaaggttctcaaaacttcataaaagtacgtcagagattctactttaacactgacattgtaatagttgaaagagaagtagcttgaagtgggcagtttcctggaaatggccatagatacatcagagagaactaggcaagagtgtatgcgcgtgagagaggctgcgtgtatgagatgcgagcgtatgcctatgcacatatgtctatgcacacagacaaagaaccatgcacaggttcaaaaaagtgacacaggcttagaaacagctactgctcgcacaactctggtgggactgttcaaatccagaggccccatgcaaacagactatggcataaacggagccctctagagatgtgcagtgggcagctcagctcagtcgcccttattcaacaaaggagacgagcgccactgctagtgtcaggcagcagaatctataccgtggttaaaaggtggctctggaacgagtcactctgagttttagtcccagctgttggcagaataaccttgggcagacacgtcagtgtccctgttctctagttgttttctcatgtgtaatatgggaatagcaataataccttatcgcaggtaaagaatctgcctgcaatgtgggagaccaaggttcagtccctgggttggttagatcccctggaggaaggcatggcaacccactctagtattcttgcctggagaatctcatggacagaggagcctgacggtctacagtccgtggggtcacaaagtgtcggatacaactgagtgactaacatgaggtggtgtagaaattaagtgaattaacacatgtaaagtcatagtaactgggggccccaaacctgccccctaacacacttgagggcatcagccaagatgctctcgggggcatctagctttgcaagaaaagaacctattgtttcttggggtcccccagatggaaagaaacattccaagactcagatggaagcaacaggaaaacatctttgctgaactcaaggaaaagactaagggcttttgcaggaaaagaagccttcaaaccaagactgaacacagtagggacagccaggactaaagcaaacaggaaagcagcgaggaagactgtggtttttgaggagcggccaagcgtgtgtagctccacctcctggaagccatgtgtttctgagggagcatacttactggaaagctgcttctggagctgccgcaccagggcagccgtctgctgttgctgctgggtctgctgcaagccttgcctggggaactgtcatcgggagaaaggagagagtcagcaccgatcaaagataagaacagaaagcctgcagccacgcctggtccacacctggccttcacctgaaagtgcctgatgcattccaaacccatctccaggtgcggacgtagcctttaccggaggagccctgaggaaggagtccagcggtgcccagtggttcacaaatccttgttccctcacccatcaccagctgactagttggtgtcactacattccaaaccatttgcagcagcaaactgaaagctgcctggtgggaggattgggtcaagttccacaggcctggccttgggtgaatggagacaagagtgtgggtgcagaggcctggaccccactgggactgcaccttcctgctggtggaggaggggagttgggtagggtgagaccagagaggcaccgaggaggaccacacttcgaggaggcg

SEQ ID NO: 56252 - DNA, 3715 bp, Bovine  19866880639558
  misc_feature (1)..(1): n is a, c, g, or t
nacagttataaaaataaaatgtgaggagagtaatctggctttgatttttttttccccccttacctgaaattttgtgtgttaacgtgattacttaaatggccattcatttgccagggaccactacctttaattttgggacagtgcccggaacactggatactgttttgcagttacagtgggaacagaactggtgtactggttctgcactgaaagctagacccgtgtagtgaattttccaatgaatcctttattaaaaaaaaaaaatagaatagaaaaaatagagaaaattttaagcctcagtccttgtcttaattctttttcccccctcctcagtcaaggaaactgaattcttgatggcctttgtcccctcacagcggatccaaatagcgaatgtgagaaggtggagtttgtcaacctggtgctgctcttctgtgagttcatccggcatgacgtcttctcccacgatgcctacatgtgcaccctcatctctcggggagacctgtctgtcaccgcctccacgcgaccgcgggtcgccagcaggagagaatacggatgagcattatccaaaggaccacgaacatgaaaatggaggtacggtcctgggagagggccagcccttggacctgaactgtgctgggagtcactttcagaagggctacacgctggtggaagggtgatggcttttcagttgtagtctctagtttcaaagctcatttatcgctgcttctcactgacatgaaaaagtttggactataatttacatcttctagaattgtcttttgggtatgctaatactgaaaagattcgacaggccatcacatttttcactgaattggaattgtgtgcttccaattttatgtatttctaatctccagttttactttaatgtttagcctcaaatttggacttgttttgttcctgacgtcatgactgtttttattctaagtagcatctttcccccaatgtctcattacctatattgctctttgatacttatattgctcttttatacgtatgttttagtcataacacatcatattttcatttcaattaattacaaatttaatctgtctttcaagtgtagaattgctcttttcagcaaattactttatgctgtgagtatgactttatcattttctgccaattttctgatattttgggcattgttccagatacttttgggacttttcaaggccaaaaacatgaagttggtgatgggaaataatagaaaattgttagaaattatgatagtttctgaaaaataaagcctcatatcggtcctgtgagtttcagcatatgctgttatgatattttacaataatggctatctttgtaatttaaaaacgtgcctttagaattgcacatgtgaatttatagtttatactcttaaagatttttgaaaattacttgtttattatgaatacttttgtttctaaatttgtccacagtaaaaaagttagagtaaaacataaaattagtttacctgtttatgctttttctatgtttctctgtctctctctcttttgtttcctgcttttgaacatcaaggtatcttgtatgttaaatatccttagatttttcttactaaggcaagttggtgagcatgtgactgggaatagccccgagaaggaaattatggtcagtttgtttttaatcaggaagtttgtgcaattttttcttgaaatagcgcggaagtttaatcttttttatcatgaggatgaagaacgtgctttgtaaagcagtgtcgtgctttgtaaagcagtgtgtatcttaacttccttttcttttattgaggaaaaacacactgaggggaaaagagacataagatgactgatgtcactgtcatgtttcagcttcagcttaatgaactacaaaatttacaatgtgactttctttctctggcaattatcaggaacagactattatggcgcatatgggcattgactcaggaactactaatatttttgatgaagtagacaagaatgactttaaaactgactttggttcggaatttccagtaggttcaaccttccaattcttattgaccatgaacccctcctcccccacctctatcccctgctgtctcctcctcctgccccttgccttgtgtactggcatgacccctgtacttgtgatgcaaatgtctttctctggaatgaattccaccccaggccacagttcatcatctcatgcagctgcctcatttcagttcatccacagttttggctgcattgcctcctcctggttgaccgtgactcctttgtttagacatcattatctctcaggaatccatgaatatcattttatcaggacaggccatgttgatttgctggatgtgtgttcaacttctaaataacagctttcctggctcaggacttgtacattcttctactttatcttggtataattacgtgttcttcctcagggatctcagtgtgtaactaactctatgaaaacacatgttggttggggtacagactaaaacctttgtgtctgttgtccatgagctttataagtgaattattcctttatatatgtttttgtaggaaatgtagccctatgaggaagacacttagttatcagtctaatttcgtctctggtcctctgggaaatggagctgtgcacgcgtcttacctgtgtgtgtggttgccagtttctcatctttggaacgggagatgatgctctttatctgaacataaaatttgtggaaattaacacagttccttattttgctaatggttaaataaggaaaagatatggtatgagtgtcttgtgttgtttgaagttgtgtgctttggttttgctctttcatttacagtctccaacatttgttttacatgacttagattttttctcccatgcctggagagtcctgtgagaatgccaacccttctctgggcagaagaatgtcagttaatggtgagaagctgttgaagagagaaaaaccaagggagttgatttttccatctaattatgacctcctacgacacctgcagtatgcaacccattttcccatacctctggtaagtcgcttgtcagttggcaagctgatcatttcattgtagggtcatttattattcaactgcttgcctgagtactacacatgaaagaggtgagtgttttgtattcactacctgcttttgtttgttatggttcttatcatgtagcttatgtgctcgtgtagtctacatttgtggtgtcgtactactgacatttagcaaaattttccatattagtatacttgtactaagagcatctgagtcactgcaaattatatctgtatgtattttcctacttctatttgaaactcatttactacgtagcttttatctgcactgtattgtggtaggtacttttggcattatacagatgagtaagaacttttgagcacagaaaagatgaaaaagatagggagacaaatgtctataaaatgacaagcaccataataagtgaaataacttgagtaaaaacccaagtgaccactgaaaagtgaaccgtttgacattcccagagctcttctgctactctgaaagaataaagatgggaggaggggaaaacctctggttgaaaaattggctcatgcttcatagaagaggtcatatatgtgatagacttggatttccacttgttgactgtaagaactggatatcgatagcacatgggaaatagttgctgggaaatttagtgtttgagtcataacaagtgatgtgcttta

SEQ ID NO: 56253 - DNA, 4225 bp, Bovine  19866880717807
  misc_feature (1)..(1): n is a, c, g, or t
ncccaggtcccctggtgattctcttatctctgcacattgcacccaagtggttcagcctacacagttagagtgcctcattcactccaagtctatggcttctgatggggttcacttcatcatgtgtctgaggtgtgaaaaccaaagaataaaaaatgaaacctgcatgcaaaggaatgtatttctaagggcttgataggtatattcactgccatgttatttttaacagcaagttataatcaattcctaatttattgatgaagagcttagtgtctttagatctggattgaaatttaatcttttcactttgaatggaagaaacctgtagtgtaagtaaaatgtgaactagattatctttttgaaaatgattatttaaaaatcttgtcattatttttaatattactgctgttattcattactaataaattctacttatccattgtagcagatccaatcaagtatctacctaggaatactaccttggtggtttgatttattcttctagatggtaatataactgaattaaaataagacatctaatcccaacacctagtttagccttcaatatgtaaagctttagctcaccaaagtttaataaatccactagattatcttccctttaggaaaaaaactgaatgtgtgtgtgtatcctccaagcactaaacacagtgcctgatacctgatagtcagttaatatctggggaatgaactagtatattttgctcttattattttgacttgcaaagaaatttttgttgccaaattttacatgggggatgttatcttcattttgttagagggcagtccactccagaaataagaaagctcagatacagctgattaacttttagataaatatagcattcaacaccagagtggggaataataactgccagctattgcatgtgccatatgtctagctctttaaatccattttcttagataattctcccattgttcacaatatctacaaattgatattattaatccatttaacagatgaagtaatcaaaactcagaaaagcaaaagtgataataagtgacactaaagctttgtgatttcaacaaataattctctctcactgacagtccttgtccataacacatttgcaggtatacttgccatcatctatatcctattactcagccttatggggcaggtccaatcaggtttgtggccagactcatggcagtgattaaaaacatcacagtagatcttgagtggcctcttaaacattgtctctgacactttcactcatatatcactgatcaagacaagtcatgtagccaagctggtttcaaggaagcacagatatatgatcttcccatggagcccatgaccatacatgcatgatcagttgtgtctgactttttgagatgggcacttcaaaaaggggaatggatattttgtaaaagaatacaaagagttggacacaactgagcgactgaactgaactgaacaatttcccatcataacagcaagagctgatctgatcacaagcctgtggctaatagaaaaataaaaaggtcactgtccagaagtgcaagggctgctaacagctatggagatgatccatgaggcaatttaaggttttctagtcttcctgttttcttcttagctttgcctgatgcttctctgtcttctgcacttctgttacgtaggttgggttttgtattccagctcactcatgagctgaaataagctattagcctctctgagccatttttaagatccatctgtagaagaggggtccttgtaatacctactttccaggattagagatattgaaagtaatgcactttgtataatgcttatttttaaataatggtacaaggaaataccacaaatcatcagcaaatagaatagtctccaatttgaaatctaggaatgtcatgacaatacctctgctgatccctttaagaaatgccgagttagtggtttgacggaaatgtgtaggatgtaggtagatggatgaaattttagaaaaacaaacacaaaatgataatcaatagatctgtgtctcaacagcggtcaatcaagccctcatcagaacactgagtgtgtaggtaaaacaatctggaaaatgcagattcccaaacttctgcttattcaaattttccccataaatttaaaaatatcattttaacattgtttttggaaaagcaaacagtcaaagaactcttttgctcttgccagtaaagttacacaataactgataaaaaagtcttagcatttatttctcaacatatttctctttagttcttctctactttaaatcaaagagtcccagattatatctataaagagtgatgaattcaaacactgctaagataatgggaaattacttaatagatcctcctctgtacctcctggatccagccacaggactgcacgtgtggttgtctgccttatctaagtgttcacatgacacttaggactctccacagccatgtctcatggagccaaaagttcagaaaattttttttatctgtaaagtttcaaacaacaagttttatcagatttgttttgtcttgttttgcttttttattgtgtgagtatgtagacttggccagaaggtttttcataccaacaacaaaaacaaactcaggagaaaaaatagcattctataagtaaacttttatctaaaaatataaattatctaggagtttagacacagttatgaattcaagtataagcgaaggtgagtagggaaatgaatcgatggagtaacatgtatttcagtcaatctttgcctggtattttggcgtggtattcacaggaccttaactccactaaaaaccaaataaacaaaagcagtctctatagattttgccacacccactgctgtttttgttttgttttgtttttgttttttgtccttgggaacagcatgcaggatctcagttccccaatgagggactgaccttttgtcacccccagtggaagtgtgcagtcctaaccgatggacggccagggaagtgcccctaactcctcctttcagctaaaccttagtaaagaaaaatccagagcatagggtatttatttcaatttagttttatgtaatgccccaattctccattttaattattataaagttatatattagcattaccaaactgctttaaaatatttgaaatttgaaatgggaagacttcagcttccagtactggtaggcttggtaatctggacctaccctcttgctgaaaagagctaaaaagctcaaataaattgttaaaaacaaaccttcttaaaaaatataaagagctgacaatacaagaaggaagtactgatcgaaaactgaaaatgaaaacaggaccctagagagagagaaggaagcttgggaattgcttttgtcctgaaggcttttgtgacttagcaaatctgaactttcattttgaaacctctttagtaagaggaacagaagttatatgctcatgtctggttgaattgggaatccaactgcagactgtctccaaaataaactgggactccagcatcactcagagtaaatcataagtagaagagccctcagaagcccttgaaacctgagatcgtattacaagggaataaatttctaaccctgaacataaaataaagggtcaggactgatagttccaatgcaaagtcaagttgtctctggagaaataaatctttataataagcctccaagtaatccttaaataaattttcatgtacagtgaacaatatgcagtcaaagataatcaggctcagtaggaagaaacacagcagaagtagcaaaaccaaacaaatagcttgtgtaaacaactgccctagctatctaaatagctaatcagttcagttcagtggctcagttgtgtctgactctttgcaaccccatggactgcagcatgccaggcgtccctgtccatcatcaactcctggagtttacttgaactcatgttcatcgagtcagtgatgccatccaatcatctcatcctctgtcatccccttctcctcccgccttcaatctttcctagcatcagggtcttttcaaatgagtcagttctttgcatagggtggctacagtattggagtttcagcttcaacatcagtccttccaatgaatattcaggactgattttctttaggatggactggttggatctccttgcagtccaagggactctcaagagtcttttccaacaccacagttcgtggtgtcaattctttggtgctcagctttctttagagtccaactctcacacc

SEQ ID NO: 56254 - DNA, 949 bp, Bovine  19866880766735
  misc_feature (1)..(1): n is a, c, g, or t
naatcacaggtgtgtgagcatatacttaattaatttgcttacagctgatttcctgctcactctggcattaccagtgaaaatcactgttgacttgggtgtcgcaccctggaagctgaggatattccactgccaagtgacagcctgcctcatctacattaatatgtacttatcgataatcttcttagcattcgttagcattgatcgctgtcttcagttgacatacagctgcaagatttatcgaatacaagaacctgggtttgctaaaatgatatcagctgttgtgtggctaatggtccttcttataatggtgccaaacatgatcattcccatcaaagacatcaaagaaaagcccaacgtgggctgcatggaattcaaaagtgagtttggaagaaactggcatttgctgacaaatttcataagtatagcaatattcttcaatttctcagccatcatcttaatatctaactgccttgtaattcgacaactctacagaaacaaagataatgaaaattatccaaacgtgaagagagctctcatcagtatacttttggtgactacaggctacatcatatgttttgttccttatcacattgtccgaatcccatacaccctcagccagacagaggtcatatctgactgttccaccaggatttcacttttcaaagcaaaagaggccacactgctcctggctgtgtccaacctgtgtttcgatccaatcctgtactatcatctctcaaaagctttccgattaaagatcactgagacatttgcttcccataaggagtccaaggctcaaaaagaaaaaccaaggtctgaaaacaatgcataaaatacaggattttttttgcatgctataatttcttgcctcactagacaattaagtgtacaaactcctgggaaggaggggaaaaagagcctccgtaagtaaaaatacaggcagagggcaaag

SEQ ID NO: 56255 - DNA, 1749 bp, Bovine  19866880805557
  misc_feature (1)..(1): n is a, c, g, or t
ngtcttaaaaccagcaagcaaactttgagtaaaatttccaaaacagcagaaattatttaaaaaataataaagataattattttctcctgattaaacttctaaacattcagagccaataaaagtttatacttaccaaatgtgtcatagttttcaaacacgttgttacccacattaatttccacagctcctcaatattatccgggagaggtgtgtaaacataatatgccccaaggacccccacgatcagaagcaaaatcgtctttcttcccatcatgttttccaactgcacattctacttggcagcaaagcaaatacacttctgaaatatttgaatgttgaaatttcataacagtttttggatttatcaaaaagtgttatcttacttcttagacacaaattccattggtccaattgtcattctgcaagctgctgggaaataattaactcagaaaaagtacaaagaactctgtgaaatccatactcatattatctgcaggttctgccaagtacaacagccttataatattgctaggcagtcagtaaacaagcatttgttgctcaattacttgttggggagtactttaaccattagagaaaaggccacaggaaatataagaaactcagtgtatgcttcaaataacaaatctcagagtgggggagaaaaaatatgtttaaactattgagagcttttacaaagtatgatagatatggtcacttgtatcttatattacttttactgtcttgatacaaataaaattattagtgaaaaatgctaaataggttaaagttatacaattttttccaatgcaacataaaaccttatattcaaacaacttcagcatagggcacaattcagatttttttaaaaagcaaaggaaaaaggaaaaatattttcagcactttaaatcttcatacaagttttgcagttttctgtttacatttattcattcagcatggaatcccctggatttgagatcttttagcaaaattaggggctttgctggtggttcagacagtaaagaatcagtctgcaatatgagagacctgggttcaatccctgcttgggaagatcccatggagaagggaacagctacccactccaatattgtggcttggaaaattccatggatagaagagcctggcaggctatagtccatggggttgcaaagagtcggacatgactgaacaagcaaaattagaacacagagaaggttcttcttataaaggtctgtgttctggctttgttttttttttttttttttttccttgattataaaatcaaggagatagctaacagtttttgagaatttactctgtatcccaggcaatgtactaaaacaaatcttaacatcattgttgttgttcagtcactcagtcgtgtccatctctttgtgaccccattgactgcagcaggccaggcttccctgtccttcaccatctcccagagcttgctcaaacttaagtccattgagttggtgctgccatccaaccatatcatcctctgttatcgctttctcctcctgccccatgaggtggccaaagtattggagtttcagcctcagcatcagtccttccaatgaatacccaggactggtttccttttggatggactggttggatctccttgcagtccaaggggctctcaagagttttctccaacaccacagttcaaaagcatcagttcttcggccctcagctttctttatagcccaactttcacatccatacatgactacggaaaaaccatag

SEQ ID NO: 56256 - DNA, 1377 bp, Bovine  19866880808235
  misc_feature (1)..(1): n is a, c, g, or t
nctcctccgtcctgggattttccggcaagagtactatgacaaatcttgaaaacaatatgctaagtgaaagaagccagacataaaaggttatcttatgattccatttatctaggtatcattgtatcattatatcatacaagtcaacttatatgaaatatccataaaggcaaaattcatcaagatagattagtagttgccagggccagtgtctggggggaatggggagtgactgcaaacagggtggtgatgaagatattctggaattagattatagtgatggttgtacaattttgtgaatgttcagaaagaactcaattgtatattttaaaggaatgcattttatattatgtcaattacatctcaaaaaaaagaagcctggtgtactgcagttcatggggtcacaaagagttggacacaaccgagggactgaactgaactgactgaaagctaccattaaaaaaaaaaaaacactgaaaaaaaagaatactcagtggtcatcaagatcaaatgaaatcaaccaccattccatgtaaaatacttacatttagcaaatactacacgcacatacatatattaggaaataatactaatccttgaagatcttaaggaaacacttgagactatgaacagttcagcagaaattagtagaacatctaacaggatggaggcctgaaattatgattaagttgattcataaacattttaaaaatgattgtttttacttctgagtttaaggactaagatgtgtatccgtcatccaagtttaactctgaaaactgaatcaaaggaattttacagcttagttcacctcctttagtatctgcattacctgacaaaaagaacattggctttgagacaaaaataattcgcttcaatcccacttctgctatttattaactaagacatcttgtaaaatttattaaaaaaaatactccctgagcctcagtttcttcagctgtaaaatgggcatcattgtgggaattcattagtcagtgcctttaaaattctgggcttgctgctatacaataggcacttaaagattggttcctcttttaaaagaaaataaaatctaaacacattttctggaggaaagtgttgcagaagcacaaattacacagtcctgttccaacaccacctagttgttttatgaagaaactcaactgtaattttaaaaaaattttgactcacacacattttcccctgctttctaaaactggaaactaaggaggtaacgtgtatccatctgtgcacccacacccttctgaatatgaaatttacataaaagccttctcagtctgtttatccaggcctccttggctctgaggcagatatatctgcttcaattagaacctaatcctgctcacctcatactaaaaa

SEQ ID NO: 56257 - DNA, 3128 bp, Bovine  19866880910754
  misc_feature (1)..(1): n is a, c, g, or t
natctctatttgcttattgttgttcagtcgctgagtcgtgtctgacttttgcgacaccgtgaactgcagcatgccaagcttccttgtctttcacggtcttgtggagtttgctcagactcatgtccattgtatcaatgatgccatccaaccatctcatcctctgttgcctctttctcctcctgccctcagtctttcccagcatcagggtcttttccaatgagtcagctcttcacatcagctggccaaagtattggagcttaagcttcagcatcagtcagccagtgaatattcaaggttgatttcctttgggattgactggtttgatctcttttctgtccaagggaatctcaagagtctcctccagcaccacaattcaaaagcatcaactctttggcgttcaaccttcattgtccaactctcacatccatacataactactagaaaaaccacagcttgggctagatagacctttgtcggcaaagtgatgtctctgctttataatacactgtcgaggtctgtcacaacttttcttccaaggagcaagcatcttttaattttgttactgcagtctccgcctgcagtgactctggagcccaagaaaaaaatctgtcactacttccacagaaaaataccccaagctccctagtctaggagagcacatgtcagggcagtgtggccatccagagcatacaaggatcaccctgacctatccaagtagcgctcaatcctccaaacactaagccagggagtcattaaatcaaccagatctttacatgacagttctcgaatctgctcgctcacagcatcatccaaagtccctgaaacatactgctgtgcttcttagtggggacaacatatgtaaattatcacttttacacaagaaaagaacaaaaaattatttatgtgagttagaaccttgagattcctaagtggtctaaaatgcccatgcccttttttggcttagaggtaaacaagataagatctacagatcttttctagctcttcactcttcctttgcttcctaaagaatcttataaaagaaactgacttacatgtggggggacagaaggaccaaaaaccactaacagggtaagtatctgagttactgggcaacattcttttattgacaaatagttgagactgtggacatttaagaaatatgtattgtaaactatttccatttttaaaatcataaaattaacattcaagaaaaagcattgtaactttgaaaacaaagcaagaaggggtaaaaaatttctataattcatgcattcttcagtgaaccacttttagtccaaaggtaaactgcttatttataaatagactgtgtttcttcccaatgctattttttgcccaactcactccttaagtgcaggaggtacgggttctaacattcaatagtctccctgagcaaatcacaaatacgtcacatcagccagcactccctaagggctttatagtcctatttgccctgatcgaaaaatatccctctttttccaaactgaaatgacctcctgctgttatctggtttctcccagaataatgccaggaacaaattacttcaatttgtagagatattcaatctgttgagtaaagaatagacaaccaagaagttgtctagtaacttttgttgtttttgttgttgttcagccgctcagttgcgtctgactctttgagacccccagactgcagcacgccaggcttccctgtccttcactatctcttggagtttaacttaaaaagatgctgaatgaggaccaatcctccaatgtgggaataagagaactagaaactggaagttagtaaaagtcttaaaatattaataggatggtttggctgcattcaggaaggggatgcattcatatgcattcatatgcatatgcattcataacgtatcgtccaaaccggtgggacaggccacgggagcagagcagagaccactcctggcaaatcaggacttaggctcacctttgtcacatgcaatccatttatctgctattttcggaaaactatctaggctttatttcattaaaacaagatcagttcctagcactgtatctggcatatagtaagtgctcaataaatatctattgaggaaatctaagatttaatttagtttatctgctaaagaagagatccagaggtaaattgagatttatatctcagcataaattagtttaccaagtgctttcaagtgccccatgtttttgagtatcatcttttgttttaaaaactcacttttcaattcaattcttagcatctgtcattctaatgatttcttctttcgttttattagtacctagagagtagtagctcaactgccctctccttccgcttaactgaaacaatcagaggcaacattaacttcacgcttttgtgagtgtaaagggcagttcaggaggctggtttctgatggagcatttgtgtctagtcaggtgccacactgtggtctggcttcagctcccctggctcaggtacccaagttacaagtgccaagggagtaagaaacagttaactgggcaattctgacagctacatgaacccatctctaccctgagacccaaggttaattcccacaagataaatttaccttgtaaattcctacaaggtaaattcctaccatgtttgtttttaaacactttgctttaggtttggctctggataagaaatagcaatctattttattttctaaaatttccacttcgtaaaaactttttaaacagctgtgctgttcaataatgactcttcttcctggcctgtataagattaagtctctctcttactgctttatttttaattagacaagagagtatctgagctcagacagacgtaggctgaaaacctcctgcgtgactggaaacgaatgaatgcagtaggtttaacatttgtgataaatcatcctcaaagactattttcaatcttctgggtcttcttcttttcattacttcactctgagtcaactgagaaaatgtgaggctttctttctacaagagaattggttatgacttcaattagcaggcagtaagcattacaatcagcagcacttcaggatcaggaaacttctctccactcaattcactagtaatgatattttcaaattcctatttagtaacttgccaatactattt

SEQ ID NO: 56258 - DNA, 1609 bp, Bovine  19866881016126
  misc_feature (1)..(1): n is a, c, g, or t
ntcccttcctttctccttcctttcctttccttccttttatctatctatccatccatccctccacctattatctatctaactgaagtagtaatgtacacacatgatttacaaaatttaaaaaatgatcaaattgtaaacagtgaaaactaagtcttctccttcccggaacttctgtctccccagctctctcccctgagataatttcttgtaaaacttgcctgttttattcgctgaccatcttagcatagctgtaaatatatcttctctccaccacctgctttctaaacaaatgataatataccatgcagattcttctacatctggctttatcaattaataaaatgagcattctaatgggaacatatatatgattgttttgattttttgatctgtctaattgttttgacaacaacaaattcaacctttgataactctggataggatctcgatgatgtatgtgccctgtccaggcatgtacctacagctatctactgcaacttcccaagatgtccacaccctctttctagtttgagatctagcagcagttctctgcatccatgttggacaccctggcaacctctagtccaagatgcaaaaggggaatatttctgagtttgaactctgtatgccagaagtgggacctagcacttaagttctattttactgctataaccaacctgggaaacttactctcagccatgaagcagctccatatacctgatttggacagggcttccttgtgcaaatatttttgaaacaattgaatattttgtcagccccaaacaataccttgattaagcaacccttgagtctgtaatatccaatgctagaaatcaggaatggtcctatgtcttaaatgggggataatcatggatggcaaagatgaatacagtaatgatataaacaccttaaaatagtgcttggcacataataaatgttcaatgcatgttaactattctttattatagtaataattatccatattataattcttgaactgcggagaactgttcaagaatggtttcttgaacgctttcctcactggaagcaattaaaatcataagcacatttgaagaaaaccaatgaactaagaattaacacttgctaatgttagtttctattcttccatcgagttaataatattaaacatatgacttaaattcttgacaaatttagacttaaatttttgttgcctgacgtcctagtaagctttgttcagttgctcagtcatgtcccaactctttgtgaccccatggactgcagcacgccaggcttccctgtctttcactctctcccggagtttgctcaaacttacgtccactgagtcgatgatgccatccaaccagcttatcctctgttgccccctcctcctgccctcaatctttcccagcatcagggtcttttcctaatatatttagttaccattctaatatattttttgttacaatcctctctgaaacataactttagaaagatttagagttctgaaatggggctattttatttcattttagttcttgacaacagctccctatgtgaattccctataggaacatgcacaatttaatgcgtgcaataggatttattttagttccataaaaaaggcaga

SEQ ID NO: 56259 - DNA, 1490 bp, Bovine  19866881061541
  misc_feature (1)..(1): n is a, c, g, or t
naactcgaatgggacagaattagcagaggaggcccatagaggtggtgggacaggctccagagagataggatagaacagtttaaagggaggctaaggcctttgcaatcagggctgaggagcaagaacacaggtacaaggtgcagacagacagacaaagacagtgattcaatcccaagggaaggccaggctaaaagtgggtattggggttacttcactcccaccccacacagcaaaccaaactggcagatctggatggtgtgctattttagtggaactccttgcatcagccaagggccaactagaccacaggatacatactaacttatcagagggaacataatgttctgcagtggttcttcaagtggaggccccagaccagcaccatctgcatcacctgggaacttgatagaaaagcaaattctctgacttcaccctagacctcctgaatcagacactctggagtagagcccagcaatctgtgttttagcaagccctccaggtgactcacagcttcccaggtggcacagtggtaaagaatctgcccgccactgcaggagactcaaaagactgggtttgatccctgagtcgggaagatcccctggatgtagagatggcaacctgcgccagtattcttgccatggacagaggagcctggtgggccacagtccatggagtcccaaagagttggacgcgactaagcatgcacaccaggtgactctgctgaaagctcaggtttgagaaccagggctatagggagttgattatgcagacattggaggactgaaaaaaaggagacccagaggtaagtcagagatggcaatgtcagatagcagtggccatccctacggcttagagaacccagggaagagtttagggttaccagaaccttgaggctggaggagaggcacaagggcactgggtctcagccctctgaggaggtggcactgtcccttgaggagatgtcactctcacgcgacaccagggggcagctctgggagtgtggcaggagcttgggaactccccagttgctgcctggcacagcgctagcccacagcaagaccagccagacctctctttcctgcttgttcctctccctgtgggcagaacaggaggcagccaacaaggcagaacccgagtgtggggagtctggacccagcatcacagggtagaggaaagaagagttggtctgatgccgagacacagcagcttattaagtggcacagctatctcacactccggcttctgaatgaaaactgagaacagcccatttggaagacaaattatttgacagttctaatggacgaccgaactaacggtatttgaaaagcaggatgactcagaaggatgcagaatttaatccaagtcccagttcttatctcggcttttggccaagtccaatccaaagaaagcctgagcacagaaatatatgcgggaacacaggccctgtgcttatactgtatcggatttatccttgaacttattgcaaaagc

SEQ ID NO: 56260 - DNA, 964 bp, Bovine  19866881251756
  misc_feature (1)..(1): n is a, c, g, or t
nactttccttaattctgttcagcaccaagtagcatgatcttgtcaaattgccctgctgaggccaagttctggtatatctgagatgaaagaccaggtcgtgggtcatagctttaccccaagtcaccatgtgaatatccacagcgatgtctcctgattgtgaagggccccctcgggtcctacgcccacctgccctcctctctgtgcagctccctttcagacttcaataccaaccacccacaggctgcatagtagtgtgtgtgatccaccctctgagcatgatataatagaacctggcagtcattatgcctgacagccttcttttgaaatttcatcttaagtgtcttgaatgacagtgatgacaccattttccttgcagtctctccgagaatttgagtcattaatgtcagcaagttttcaccaagtatcctactgaaatctttacttctctcaatcttaatagcaatatacttggtgacataaggaaaggaaactaagccttgtcaccttccccaccatgacccctttctgggtctagatataattcctcagtgtgattggaatcagtaatcagaaaggagtacgattgcaggcgattttgttacttccaatgtagtatttatgcatcttcttgtactaatctgggttcattggtttgtacccttatagtcattttcttaaaaaaagaaaaggctccaatccaaagccataggggttctcacctgatttgttccctgagagtaagagggaacaagatttgggggggttgtggaaagagagctggggagaaagatggagtctagggtttggctccaggtccatcactaaattaaaaattctttaatttttctggcatttgttttagtcagttagtcatagtgttctcagctatacacataggcaattctcaaattatttttaaccagagaaatcatttcctcaactaaactcttgggtataataagag

SEQ ID NO: 56261 - DNA, 766 bp, Bovine  19866881340445
  misc_feature (1)..(1): n is a, c, g, or t
ntacataaagtaatctctaatgtaatacttacattattacattttgtgtcctgcattgctgattgataagggagaagtctgttgatgactgaaacaaagtactttgcaattgggaagaaaccaaatccataggtagtcaaagggatatctggaaattaattaagcatttatagttctacctttaggagacttaggtcaaaatcgtaatgacaacttgtcttatttcttcagattatatttgttttaaggatattatttgatttgtactgattttcttttctgtaaaaatatgtttcaacttctaagtggaatcatgtataaattcacatttcttacctcccaaaattaaaataatacataaaagttacttggaatattggtcttctaattactttcacttttttcacatagatttctaacaatgtgctagaacaaatcacaagctttgcatcaggaacatcataccatctcccattggctcaccacattcagctcatctttgatctcatggagccagcacttaatattaatggactcattgacttcgcaatacaggtatcaaaggcatcctgccttttagcaaagcaaacctactaggcattgtccagtttacaatgagccaccccgtgcagttctgtacagttgagacattctgagtcaacagtatctaactagcagctatgtccataattttcaattaaatataattggtgttaaaatataatagtaaaaaagtgagagtttgactgtatttcttatttgtctt

SEQ ID NO: 56262 - DNA, 1542 bp, Bovine  19866881362375
  misc_feature (1)..(1): n is a, c, g, or t
nataaattgtttcttggaaatacagattttgagttttattaatgttatggaacataattaaaacatatatccttttgtttgcttcagtagagaataaaaacaaacttacaaaaatttaaatagagggattagacctatgtaattaagtataaatttcctgatggctgcattatttagatgtaggtttgggatagtttcagtttaaacaagggaaatgctgtataagttaatttcataatatgaaaactggaaatcactttttggtcaaatttcaaaatgccaaagagtaggaaacctcaaaagaggaactgatttatggtggcatttctagagttacagaagtatcttctcttaaatgtaggtttcaaaatgtttgaccataggaaatatccaacagactcctttatgtctctgtgcttcatacatgttagccagtggtctcttagtttacagcagcgctggtgcccactggggtagggtcctctgccttgatgatgcacctgagaggctgtgatgggacaggagcagtgctcgcgagccagagtgtctgggttcatttccttatattccagcttacttttcttgtgaccttggtcaagttacttatgctctctatgaaaccattgccccctcataacaatgaaaataaataatagcatttgcttcattgggttgttaagggtataaaaatgtttgaatgtttgccaggtgctttgaataatgcttgtcaagtggttcatgttagtccatgtcttgttaagtgaaattaaaaatggagtactctctatacctgtggggatagctgactaaaggagtgaatcaaagaagatataccatgaaaggtcctagaaattattctgatttgtcaggttcaaaacatttaaaatctcatcaggctcaaagggaatttagtcaaaaccaatgaaatcacactagctatatactgttctaagtgattatgtggtcttaaagaaatcagtcctgagttggaaggactgatgctgaagtgaagctccaatactttggccacttgatgtgaagaactgactcattggaaaagaccctgttgctgagaaagattgagggcagaaggagaaggggacaacagaggatgacatggttggatggcatcaccgactcgaatatgagtttgagcaagctccgggaggtggtgaatgtcagggaagcctagcctgctgcagtctatggggtcgcaaagagttggacatgactgagcaactgaactgaactcttaaaacaagctcagagatccgtcccattttacagatgagaaaatggaatctcaggtgttaagcaggttgcccaaagtcctgcaactgaagccctctgcaaacccacaccgtttggttccagagcccccacttggaaccagcccctctctcttctgattgccagagacaggatgagtgtgggagtggttatcaaattctggagtttttgagctgggtgtttcttattgctaagtgaggaggtataatccactttcatggatttgtgaaactgtttgtctcagagtgaggt

SEQ ID NO: 56263 - DNA, 2595 bp, Bovine  19866881386788
  misc_feature (1)..(1): n is a, c, g, or t
natagaagggactttcatataacaaaagccgctatgaaaactcttcagtttttttttagtgaagcattgaacaatgttctcctaagatccagagcaagataattgtaatcaatattcctggaagccctagccagtacactaataagagggaaaagcaaagcataaagactggaaaagaggaattaaaactctctccagagagtttctgtctctggttacagaagttatgattgtttttgtaaaaaatcctgctgctgctgctgctaagtcgcttccgtcgtgtccgactctgtgtgaccccatagacggcagcccaccatgctccccggtccctgggattctccctccaggcaagaatactggagtgtgttgccatttcctctttcaatgcatgaaactgaaaagtgaaaatgaagtcactcagttgtgtctgactcttagcgaccccatggacttcagcccaccaggctcctccatccatgggattttccaggcaagagtactggagtggggtgccattgccttctctgagaaaatcctaggaaatgtaaaaaaaaaaagaagaagaatatatgagtgaaactttcaaggatatgattgggaaggtcaaagtaaaaatgaaatgtattcttgtacactctcaatgaacatttgaaaaattttattttagaattaagttccaaaataagtcagggatgaattcaagaaaagatttgcaagacttcagcattgaaaaaataatatattatttaggaagttgaagaggaccttatgcattacttgaaagtctcaataatggtaagatatcattcctcccctaaatttttaggtttaatgcaataccaatcaaaatcctattagtggttctttcttagaagttgacaaaatatcctattattttgatggaaaagacatggaacacaagaaacaattgtgaagataagaacaaagctgaagtcagcatggtattagcataagggtaaaatatatagatcaatggaacagaagagaaaaatcagaaatagtcatgttatggtctttattttagactcaagcatcactgtaatctaatgagaaaggatagtcttttcagtgaatactgctggaggaacagggtgtctgcatgggggaaaaaaatgagctttgaactccacttcccaataaaagacaagggtgtacctgttgagtcactgccactgctaaggtgcccccagaactgtctcctaaaataccaatttggataggatccactccatattttgtaagaattttatcctgaagaaaaaacttgactgcagtaatgctgtcttgaaatggagcaggaaagtggtgttgaggggctggctaatctatagctttaaaacaaaacaattttatttaaacaattttttaaactatggtttatggctctatctgtgaatgtagctttcaaacaccaaatggatgcaatttaacaccatgttctcttgtttaatcttccaaataccaaaactgagttctctactaacttcttatatgaatgactcaaaattgatgttaaagttttcaaccttgtatctgaggtccatggatggcattgcccaggagaagtatggagagtattaaaactctcgagaacataaacatgaatttagtgcaagtatattttggattggaaatgccctatagctcatgtcatattctcaatgtaactagcaatctaagcattaaaaataaaaaagcatatgaatttttgaaggcagtagatctaagagcatactctaggcaaatgttcaattttttcaaagcaattagataaaaattatacagactggcaatgcacatacctcattatgaataatgcacaggaattgattctaaataatttttttgaaatataaatagtatttagatatgctagagagcttgcttgtttctggtattgatcaattcatttgcaaggtaaactatcttaccatccctttaatggatacaaatggattttcccccaacatgtgtggaccagtaaaaacaggagagtacttctgttaacctgttctcagggctaactttttcttttcattcttcagaatgctaaaattagtaagtatttgtacttaacattaaatattggtgagataattcttatatgtttattataatttatatttagaaaatcctaaacaaagtataatttaaacataggtatgtaccaaaagatgttggtttctagtttaaatacagtacatttaagcttttagagctaaaaacaacaaaaatcataaggatctgatagacaatataagcaaagcacaaaaatatcactgtattaaaacagatttaaaatcaatgatttagattactccaaaagctatggaggtagaaagaatatcctaatattataagttagaagtatccctgaaaatagaagttcttccttgttctatatgtaaccataacaacaaggacagaaatcactgcttagatgacccatttttaatctgttttctctctaaactttcatagcttccaactgaaaaaccactgccaccaactacaaatgtcacaatgataccactatgtcatctcagaactgtggatggaagtctctaagga

SEQ ID NO: 56264 - DNA, 736 bp, Bovine  19866881479085
  misc_feature (1)..(1): n is a, c, g, or t
nagtggaggctttatattctggcccagattcttcccgtcatatactcttaggttaccattaacagttctatgccttaaataaaaatgctcagttaacagtatcttggttttgctttaaggtgcaaatcttttctttctcctcctagtgaattattcacaacagttcttgacatgctgggtgttttaatcaatggaacattggcctctgacctgtcgaatgcatccccagggggatctgaagagaacaaacgcgcatacatgaacttagtcaagaaactgaaagtaagtttgtggcctgctcaggagttcacgtggtttttggatttgttatttagcgcacgttattttattactccttaaattagatgttattttttgtgtttatatcaggtgattattttgctgtttgttttacctcagcttctcagtaccccaaagttagaagtatatatagcttgaagatttttcttaaaataattatattcataaagcatatttaattttttaagggactgtagaagtccattatcaaatatgtaaccaaaatgccaacattagatttagggtaaatttcatcttccactggcaacatgcagttgaatattaaacatttgcattgctatttctaaattcaattcatttgcctagccactcatacagtttttgaagtaaattataaacaaacaatgcaggaaaaaaattaatatatctaatgaccttactaataaaacaacca

SEQ ID NO: 56265 - DNA, 890 bp, Bovine  19866881787751
  misc_feature (1)..(1): n is a, c, g, or t
ngatttttaagaaattccacactgatgcaatgtgatagctgaggaaacctgtgatactttataacggacatctcttcaaaaactctcggacacagtcactaagaaagactggacacccctacaaatctgagcctggacatcctaatcccacacacagaaccaatactctaaagagagtttttcaccttaagaaaacaaactggctgccttcagaacgcaaactgctttagttacgttatgccctgcaccgtgaaggacccaaggcacttagtcaactacgaccagactaccctgaggagaccagacatgacgtctcagctaccaaaggaggagactcctagcatctccactctaaattaagctattttagttattttggtttttttttcatttacttttccctggcaatcacactctggtttatcacttctacagagagagaagaaaacaatttatattatttcagttaagagttgagtcaactaaaaaaagttactaattgaatatttagttgcacagctgagtttttaaatgaaacagaaaacttacatcgacagtgcaaagaacatcattaaagccccacacatgatttgaagaacaacaaagagccttcaggacccccagccattctgaactgagaacagtgcagcaggctgtcagctcggaggagaaattggctatgtcattaatcctacaaagaagaaaaagaacataggagaaagtaacaaaagacaaaatactcatacaggataaactcaacgaacacataatttcagtatcatcgaacaggggactaatttcttaagattcaaggatataataaaaatccacttgacaaactacctactagaatacgggacagaagagaaaggagatgtcttcacacgttt

SEQ ID NO: 56266 - DNA, 1037 bp, Bovine  19866882094137
  misc_feature (1)..(1): n is a, c, g, or t
nattaccaccaacagaatagactgtctctctctctctatatatatatacatacacatatgtggggggcggggctatatatatggagagtctgtatatatgtatacattccctatatttatatgggaaatcaaattaagtttatctttataaaatcttatatacagcttttccactttttgatatgagcatttgttctttcgattacatcttcttcaaaacaatttaatgccagctagttggatagactaccgtcaggaatttgttggctccgctcttgttggataattatacgtttctccgccttttgctctcataaatactgccacagtgaatgtccatatatatgtactgtcgttttacatgtgggtaggtgtatcttttgtacactgacaagcccatttgtcttcagaggtagaattttgtactcacctgaaatgaagctcaagagatacaaccccagtggaccatgcagagtttcaaagggcttgccaaaagcattgtacatgaagaaggctgtccccaccagggttaaaacgataaggattgtggagaagagaatgacattgacgtgaatactgactgggatagctttgagcaaatctgggaaaactgaagacaaaacaaagattgggaaaaatttcatcagtggtcatttgcaagtgtaatttaaaagattaaatccctcttttttcacttcaacagtccctaaaatccttcagatgaatacattctcacttactcatttacaagggatttacaaaaaggtttaaacatggtattactttatagaactcaccagtaaaagctagcagtggggaaaatttgagggattttttttgcccttggtcatatataattacttaagtgaacaagtgctagtcttataaccaaaacctatacattttgatgaccaaacttttaaagacatttctccgtagcctttttttttttttttcaatctatcttaactcgtaatgacattttcagaactgggagagttaaaccatcaggagatttttatacttcctttgctaca

SEQ ID NO: 56267 - DNA, 3515 bp, Bovine  19866880287763
  misc_feature (1)..(1): n is a, c, g, or t
ngtgctgtggacttcccggacggcactagtggtaaagaacctgcctgccaatgcaggagatgtaagagacaagggttcaatccctggatcaggaagatcccctggaagagggcatggcaacccactccactattcttgcctggagaatcccatggacaaagaagcctgatggggtgacaaagagtcggacatgactgaagcgacttagcctgcacccatgagtgctgtggtcaaagaaaacacagaaccagtgagaggtattagtgatccagaggagaggttgctcagataagtcgtcgtggaggaagtgggtctctgagcaaagactgaaaggagatgagggagccaagtggttttctaagggaattgcattccaggacagagagaatgatgtgtacagaagtcctaaggcagggctgagcttggtgtgttggcgattcattgaggaggccagcgtggctggagcaaagtaatcaagggggagagggaggaagctgtgagtagagaggggacaaggggggccagatggggtaggaccttgctttaactttgagactggagctaggggtggacgctgagcagaggagggacaagatctaacttaggtgtgaactggttccctctgcctgccatgtaggagtagatcgatgtgagctctctaagggctggaactacatctttgtcccttctgtctccttggcttctggtacaagggtctgcaaactatggcccacaggctaaatcctcggattttctgtttgtataaataaagttttattgaaacaaacccacacccatttgtttacatattatctatggctgctttcctgctaaatagaatagttacagcagagaccatctggctctcaaacctgaaaatatttactgttttgccttttacagaaaaactgtgctgacccctggtcaggaacaaggcctggcacatagtaggcactcagtaaatatttgttgtcacataactgagccggtctctcatctgtgacccacacgaggctgccagcttgctcttgtctcagagccagttccagtcacatgtgggaaaacaacagcccagggaccaaaaataaaatactggaaccattcacatctctgccacggaggaactgctcaggcaggaatatagtcaggacccacagagaaactcagcatactcttcgtccttttatttttcttcgttaagactcggggctcctttacccctgccaggcgtggaaactgctccccccatttttttctcacttaaaaaaaatcccccaaaccctcttccatagagaagccccccctccctgactttcctgtctcctctcctgtcaactccaacgttttgtttttgtacatgacttaggtcccagctgtttttgtttttttttttcccatgcttccgatgcccattactcagattctgcataatgaggcagttatgagttaagaataatggggctgtgccagctggcagaatatctctgggaactgagaaagctcccacactccaatttccttttcttcttacacacatcgatcacagtattctatctgtcctcactttccaagtttctcctttactgcagtttgtcctgtaccctcaggatccacagagcaatcagagccagtccctgagagctgggaactcacagtttaatggagacagtcccagtgctgggggtgaagagatggatgcacgctgggatgcatccacccaccatccatggtgggggatgacttgactgtcaagggaatgagtttgaagttttatgctgaggaccctctctggcagacttggatggaggccagatggagggctctgagggagcagggtgcctccttctgacctggtgtacattctggtgatttcacataggtatctacaccctagacactggggccagattgcttgggttcaaatccagaggctctcatgctttctaactatgtagtcttgggtaggtttccctcagtgtccttactgtaaaatgggtatgactaatacctaccacttagagttattgggaggatcatggggttaatacatacaaagaacctggaactgtgcctggcacacaattgttgttgtttagtcgctaagtcgtgtcccatactttcatgaacccatgaactatatatagcccaccaggctcctctctccatgggctcctctgtccatgggatttcccaggcaagaatactggagtgggttgccatttccttctccaggagatcttcccaagccctggatcgaacccacatctcctacactgaaggcagattctttaccgctgagccaccagggaagcccacccggcgcagagtaggcactcagtaaatatcagcaactattaaaagtgcttagcaacaggcatcctattatcatttagtgatgtcatcaattatcctatagattgagcagaaagaacgacatcttcagtttagaccctgggtggggatgatgacatcaccagttaccaggtagaaaatggttagaatgtactcgccagaggtttcattcccacttgaatttctgttgtgtcccagtccacactcttctctggggcacatgggattatcacctatttgcgtctcagttttctatcaatcaaacgcagataataaaagtatcagtctcctaggattgttgagagaatccaatgagttagatacagacaaaggccacagtgtcccgcgcacagctggcactcaatcaacagcagctcccgttagcctcatggcaagaggactccacggtagacacgctggctagggtaacaggtgctctcctctgtctctgggagtcttggctaagagcacagacccactgcagtctgagcccagatctgccttcaaaggcagccaggagaccctgggcacgttgcaggcctgaaagtgggaataatgacagtgccagcttacaggactggcatgaggaggcatcaacatgatgacgaccatgctcccagcactcagccttcgtacacgtgaaccgtataatcactgaggatgtccttgcaaaggtcctcccctccttggaaaccgtttgcccacctgcaaagaaatgggcagcgactgtggcaatctcaaagcttcttgcctataaggactcacctttgctatcgctgagtgtaggtgttgggagatggatgctcccacccgtgtctgccctcagcccagctccagctctttccttctgtctcctcactccccatctcttaaccgtcaactttcccctttctctggcttctttcccttgttctagactttttctttctctcttgtttctctcctgcatgctatcagaagactgtttgtagagcaataaatagtgatagcaatcataatttgtgtatttaatctttcccccatactaggacagctctttgcatgtattaactcatttaattcacacaaagacttgttactgttggttcaacaaacacttacggagtgcctcctgtgtgccagaccctgagaatccagctcggagcaaaagaaagatcctcgcc

SEQ ID NO: 56268 - DNA, 1761 bp, Bovine  19866880395137
  misc_feature (1)..(1): n is a, c, g, or t
ncagaactaactcccttgagctgtcccatccctactcagcatcctgtagattaagagaaacagtcagtgcaattacttcaatcacttatgcaaagtaagaccgacttcccaaattggaagtgagagtctgggccacctggttagtgagggcaggctgtccccagggggggaggtgtgcttttccttttcgttctttgggtctttgcttggtcgtgagatgatcataattaaaatcactactccttcaccagcaccaccatcatcatcaaatacaccaaagttaaagcacccagaggaactttccagttaacctgaaatgggctccagggaccacagagaagcaggcatcaagtacccacatgctaagagatacttctcaaaaaagttgtatggtcacagcatattataagcatagtaaaggtgctgataagccctgcagtgaagatatcaaattagctttgttccccaaagctttgaccaccaccgtttttagaaaattgctttgggcacttaacatcatgaacaccctacagaacaaatgtggggaacgtggcttgatgttggtagtctccaaccttggttgtacgtcagaagttttcaaagatactaatacctgagtcccatctcagagtagatgagctaccaatgcagatggcggccaacatgtcaacctgaccctgctgttctgcttgagaccatacctagcacttcaccaccatcccccaaacagaaccaacatcgcaaaacactaagaggaaacggacatggtgctgaactgttcacgaggtgacggaaggggaaatgttgcacacaagggtgcaaaacttcccaacaattcccttttaaaaaaaaaatctttgatttttccccaaagtttttttccaaatggcagctcctttgttctcttttcccttctcccattgttctccccgctggatggtctctaaaagcctctattattctgccaattccctttgaatctaagcttatacgattcactcaagaataatagtagcactctgttcttactcaaatcgtcccccaggggtcttgccccccagtccaaaatagcttatcaaagtgtattttccaaatccacatccactaaaacatcctttacaaagagttcaacatgaactcttatggctaggtggagccgaagacatttttataagactaactggggggactggactgagaaagatggaccaggaaggttgcatggaagaggtgagattccagtcaccttgaggcaaggattcatgcagaggaaaacaggaaggacccggagggtaaggacagggcctgcacaaacctcatcatctgagaaaggagctggggagcagggaggaggaagagaggagggaggtagcgaaaggtttgtgtcgtgatagattgaagagcttcaatggaacaaatgataataccaagcaagtaccttgccctcaccgtgtgccagacaccgttctaaacactccatttgtcttgctttgcttaaaccccacaacaacccagtggagtgggcactgttttcccagtgagtcagcagctgggctgagatttgagtgaaggtgcttgtcttcaggggccatttgcttaaccactgcattaaagagtaatgagctagagcaccgataaaaaccaagccaattaagcagccagagtgacagggttctggagtaacccagactcttgctgtcacagacaggcactcggaccaagagcctcagcatcacctgggagcttataagaaatgcagca

SEQ ID NO: 56269 - DNA, 3497 bp, Bovine  19866880428339
  misc_feature (1)..(1): n is a, c, g, or t
ncagcatgccaggcctccctgtccctcaccatctcctggagtctgtccatgttcatatccattgaatcagtgatgccagccaaccatctcatcctctgtcgtccccttctcctcctgccctcaatctttcccggcatcagggtcttttccaatgagtcagctgttcgaatcaggtggccaaagtattggagccatacgtacatgattaaaaaacttatgttcattgttatctgaagttcgactgtaagttgaatgttaagtgggtgtcctatatgttaggaccctctgggttcagtccctgggttgggaagttcccctagaggaggaaatggcaacccacttgaggaatcttgcctggagaatcccatggacagaggaatccagtggtctacagtccatggggccacaaggagtcggacatgattgagcccacacgcactactcccatagcctcagggacccctgcctccaccagccaggcccagtgcagcccagtcatcatttcagccagaatcaagagcttccttctacggacagacacagagaagcagccacagacattgtctgctttaaaatacgctgctgcgctccccgggccacccctactccaagcccagagcccccaggtgtgatttgaaataaaacaccaccacatcttttctctgggaaaagaccttcctcctcctctattcctgtaggttgggagatggtaaatctcttccctgaaccatggacttcacatgtcaggttcctggagagatctctctggagaggaaagggagagggagccactgaaatcaagttcagacttgttagagggagtcgtgttgaaaaggcgccctgaacatgtgaaatgcagctgttcccggcgccgagagaatggtgatgattttcctggcgagacacggagaccatcatatgaggagcagttaagcagtaatttaacactgctgttctgctgagagctgatgcgagctgcttctggcaggagggtttggggggaacttgttttctcggtgggaaatcacaaagcctttccatttgactttcacttaaatccctgaatgttttgttgtaggtgtcgcttcattcgttcatttacgaacatgttgtaagcacctcctacatgctaagcactgactgatttctcttcctcagtgtttgttccaggtatccattccttttttatccattatgaataaacatgcaggtatttatttgttagtttattacacaaacattttccaaaccaggcgcatgcctggagctgtgctagagatacaggagttaatggggcccatgctttcccttcaaagaactgattgtctggtgggggaagtggacatctacatgggtcaaggaaatacagagggtcagcctgataattaaaaacacggtatgtgcatgcgtgctcagtcatgtttgactctttgtgaccccatggactgcagcctgccaggctcctctgttccaggcaggaatgctggagtgagtagccattcccttccccaggggatcttcccaaccccggatcaaactcttgtctcctgcgtctcctgcattggcaggtggattctttaccagtgagccatggtgagattccatttactgagcatctgctatacaccagtcactttatccacattgctatttataacatgtcatacccaagccattccttgaagcagggtagccattaacatccctgttctgtggatgagaaaagagaggttctgagaggttgagtaccttgccccaagctataagtaacagaactaagattcaaccccaatcagagcccaagcatccactctgctgtgttgccctcaggcacaaacaggagagaaaaatgcaacaggagaagctgaagcaactggcaggctctgatggggggtgtctgccctgggttctggaggctgaattaagagtttgctgtcagagaagatcagaagagctttcctagggaggcaaacagaacatcttgaaagaatgaggcatttgggcactgagggaggcaaaggagaggctttggagggtaaagtgtgggaacccaatttctgggttgcccaggtaatctcaaattggtctgttcctctacaacagacagctgagagtctgaggctcttcatgggatgtgtgtgtgcacgctcagtccctcagttgtatccagctccttgccactccatggactgtagcccaccaggctcctccatccacaggattctcctaggatgagggcttagcacttcagagagccagctatcacccaccaggaagcggcaagtgcacacaaaggtcagtcacacccgtgtgaaaatttcatccacccgactctgaaatctcagccgtgaaacctccaaccacacatcagggcagaactgccagtaagcactgatgtgtgctgcattttaaagtctgggcaaggtggctgattacagatgctgttctcagagccctggaataaagtttctcatcccacaagagccaaggcatggtccccaaagtaattggcattgcattattgataaaggtgttgggccacgcacgcaccgaggaatccatcttcttctctgacatccgattactctgtgcagctcctccgttcaccttgggctggcatgcagctccagaggcacagattccttcactcattggcaacttcacgacgtgtgctgtgtccaagggagaaagaaaggggagggaggaggcatgagcagtgtgtcagttttgaaatatttgtcctgaatatatatatatattttttaaaaagggggacttccgccctcctgtcctttctctgccgtcttagaaatttgattagtcgttattaaatattttgaagtggaggaaaaacagggagaagtttccaagggcaagccacaactttgatcttgacagagccgtcattgtcaggagccgacataaaggcgccttgcgttaggctggcgttaacacgttgagatgctggtaattagggccttgtaatgacccgttccagaaagaaacagctctattccttatttgccattaaagaacaaccaagagtttatttgcagagaattgggtttaattcaattagcaggaattgtgaggcattcacaacacaaggtatattagcctggcacttggtttgtaatgacacccagaaagcatttagggaaagaaaagctaattatccaaaattcttcatttattttttttttcttttcaataacatggagggtttagtccaaatttcagaggcctgtattcccaaatcccttaagctttaattaacgattaacagagcagcaggatatggagagggacaagaaatctttgccgtggagtcagtgccaaaggggattattaataacccccaccctgagacagcacttcacagtttacagagcgtttccaccaccattatcttctttgaatattcatttccttgtctctctgagcccgttctctggttgctgagtgtctttttcacccggcccgtctgactttcagat

SEQ ID NO: 56270 - DNA, 704 bp, Bovine  19866880438239
  misc_feature (1)..(1): n is a, c, g, or t
ncctttagtgcagaacgggctgtgggtaggagcctgaagtctgtgactttttcttgagcttaaatctaacttcctctactgaataactttctgagctggaaaagattacttttcttctaagctcaatactctcagcaatgaaatgggataataaaagttgttctggggatgacataaagagcatggcacaatccttggcatcgctctttagttcagagtgtttgaggcattttggaacagaaggttgcagtttctgtagtttgtagttgtaccttttcagaacactgactcaaaactttaagggaaaaagaaccctccatgtcttcagtgcctttgctttttttggtgttcatttaatcattatcagtgcatgggcattgcacacagcccttccccttttttcttcctggcaagattgttataatgtgttgaaaatattaattatcctcttcaccttattcacaggactggaaaaacaaatcttgctcctgtgcttgatagaagaaaaagcacctctgtgtgtgtgtgtgtgtgtgtccgtcccacccattgtcccctcgggtcataacaaattattgatgccagttcctttaaaaagacaattaatccaattaccttcttgttgaatcaatactaatgtctttttttcttttaacttgcaggtttcagcaagcctggctgccagcacaactgaggtaggaaat

SEQ ID NO: 56271 - DNA, 1779 bp, Bovine  19866880491009
  misc_feature (1)..(1): n is a, c, g, or t
nttacctcttgaagatctcttttaatacagagatccagctcatcacccttctcaagcaccttttaataggaaacctcccaataaacttattaaaagcataatgaaaacctcactccgtcttctgtcagccttcggagctctaagtggcttctaatttgcacgagattggaatagcattgaagaattacaggaactaagtgaaacactctgtcggattttcaattttctgatagcatcccatgtaatttcttgtaacgcatctgtagccaaatgcggtgacacgtcaaggctcctgctggtgcttctgcccacgtcagcgttacaatgagaagcctgatgctgtcagcacttctcatggggagggtgcggctcggagcctttgtttggccttgatggatattccattagatgccgtcctctgaacaacagtctcataatttctaacagctcagatagatgtgtgtgatgcttgacatttgacttcacgtatttattggaacaaattgtgcatcgttccttccacgaggctgcttggcagaatatgtagtttgtcctgcggtacctgttgatttgatggcctcactggagccaagactacatgctttgtattctgatcaatggaattccttttggagcacctaggagaagctgcgggcagattgtggctctgaaccagagagatgagaccccaagcttcccttagcacatttcatattattctcaggtattgttttcaagctaaagcaattcactctctttttcagagaacctaagtatttttcttctaaccttaaactgggagtctcttgtgcctaactctaatgtcggttgttagattcatattgatgtatggcaaaaaaactatcccaatattgtaaagtaattatcctccaattaaaataaataaataactttaagccaataactgtcttacagatagactcatcacacttagtgaaggaaaaaaaaaagccagtcaggctttgtaattgtccatatagttaacggtgtggctgttctttgcatgtggtcccagcaagattgtcccactcccagggcgggtttttggctggcttttctacctgagtgaggatgaatttgcactaattcaccttcacactcttcaggggtcccctctgtaactaaaggcatttatttgtgaggcagtagggcttgaggttaagacagtagtctaaagtcttatcacggagtcaagctaattggctcacgtggggatgagagctctgtactaactatggtgcttcggaaaccaaggaccgtgtttttgacccctcctctcacccatggaactgcagcaaatgtttactgagttctcatggaaggggtgaagccctaggtcgagagctgtgtgagggggcagggcagggcagccaggaagggctcatttcagggcagccggacttcctgcacgctcagggcggatacgaatccaggcttctatttcaaacctgctgaaacaatgaaagtgttagtcgctcagtcctgtccgactctttgtgaccccatagactgtagccgaccagtctcctctgaccatgggatttcccagacaagaattctggagtggtttaccattctcttctccaggggattttcctgacctagggattgaacccaggtctcttgtattgcagacaaattctttattgtctgagctatcagggaaagtctttttcctttattatttgcatctttctattagatttatctaataggcaatcactgaaaatgagttgaatttagactgtgaaattatag

SEQ ID NO: 56272 - DNA, 1113 bp, Bovine  19866880516516
  misc_feature (1)..(1): n is a, c, g, or t
ncctgggtggcttaactttatggggcatgttgtgctctggcttccgaagctttagtagaatgaatctctggcttatcaacttggctgacaacacacttcctgttagctcctgtccctcctgagcttccttccctactggcttgccactgtttctaaggttcacctcccagataacacttacacacagatattgctctcagggtctgcttctgggggaacccaacaaagtgtctatagattaatacagcaggactgtttgaaccaagcctaaagtaacagtgtaggggaaaatcagaggaggtatggaagtatgccttatggaagagagttcacttttgaccagatacgcaaagcgtggcctttagatgcttgtactcacttccagaatcccatattttagccattgacccatggtggctcagtggtaaagaatccgcctgcaatgcaggagatgcaggttctatctctgggtcaggaagattccctggagaaggaaatggcaaccaactcctgtattcttgcctgggaaatctcatgaacagaggagcctggcaggctgtaataaggtcacaaaagggttgggcacgacttagggactaaacaacaactaatccatatttcctcatactaaccagtgtgtattcttgaaagagattcccgatgatttcttttttttttttttttagtttagaggtttgtgcctcttaagcatatggaataaatagaaataacaaatgtacaaatggagagcatagcggtgcatactttgaccatgatttacagatattttactgctcagagcatttataaaccactggtgaccactgcaaatgcatattctcccctgtaaggttgcatatttcattgtaaatggcttaactatctttacttatccatttgtaataaaatgacgaggacttaaaataaagttaatgcatttgaaagaaatcgattgtcaatactctggctgctaatatgtggaacattttttccccctgaggtgttagtacattaaagcaaaactatttatgttctgattataaattcattaactatttacacctcattgacttacaacttatttttttctttagaagactcactttcaacctt

SEQ ID NO: 56273 - DNA, 2899 bp, Bovine  19866880551675
  misc_feature (1)..(1): n is a, c, g, or t
nacaaagggtcggacacgactgagcagctttcacttaggatgtgtgaagctgcaggctctggcctgggtgaaaagtcacggaagctcttatggggctgtcctgacaaccaaacaccactggaggtgagatgcattttgtaaagtagtactcacaggtcacttgccagggttttttattcctgatatcatttgggaatcccaatggcaccccactccagtacttttgccttggaaatcccatggacggcagagactggtaggctgcagtccatggggtcgctaagagtcggacacgattgagcgacttcactttcactttccacttccatgcactgggagaaggaaatggcaacccactccagtgttcttgcctggagagtcccagggacgggggagcctggtgggcttccgtctatggggtcgcacagagttggacgcgactgaagcaacttagcagcagcagcagcaggctcatcagagacattttgttgggcctgagaaagcgaaggacctaccttgtagacaaaggtgcaaacaaagtcgatgaagccgacctgaagcttagggagttcatccgccttgtttctgtccatcatgggctgtcagggggagagagagttaattgcactgggcccctcttgggctgatgcagcagggaacccatcctacctatgaagtgaaacattcttccaaaacaaaaaccctctcactggtctccctgagtctggtggggagccagcggaccattccagccaagtttactttcaatatagatagattcacagctggacaggtcttccccttgcatggtctgtgctgttagcacagagccatgggaggtagactcctagactgtcggaactgaaagggaaatctaagttttggccatctctactgagctgactgagccaaggatacaccttagaggagggtctccaaactttagtagggagcatgttgctggacccacccccagagtttctgtgcaggtaggtccagggtgtgcacggggggtgagggggtggagtggtctgtggatttgcatctctaatgtgtacccaggtaacaaggttgatggtggtctccagggaacacactttgagaaccactgcgttaggggaagctcatctctgtggtaaggtcacacatctgtgtgtcaaggatgaaggggcacatctctccatcatggccaggtcactgctctccaccagaacaagatcacacgcccagtatcaggctgaggtcccttctctactcacaatgggattctgttgcagcaccgtgcgctccaggtcaccttgttcccagaattcagcagcaaccagcagagccacctgcaacaggcagacaccctccatggagtcaggtctcagccccggtcctcccaccttgctcccatccctcttgggcttccagctcagcacaaaaaccccaatcctgccctaccaccccactatatgtcatcacaagagattgccacatcttgccagaggatgatggagcagtgggctgcctcagcagctagagaatccaagctgcattagctgctgtcaccaggactgggatgctcctcctctcaggacaggaggacaggaggagtacgtaccttgctctgcacctcccaaggcttggtgatggctgagagatcacaggcggtcatcatcatggccctgcacacaaggacaccaaccatcagtccagaggcagtcagtgctgtatatctgattgattccatctatctcttctttttctgcccctactagtaggtggcctcatcccattgtgagcagaggtgtcaatgcccaactgcatctgaaggtcaggttttgtagtcaaacagatttaaatcctgcctttgtcagttattaggagtttggcattaagaaattaaactaagttctgggccacagtttccttgtctgtaataatactgctactttcttcatggagtgagtgcaagattcaatgagataatgtgtgtaaaaatcttagcatggtgcctagatatattatgtgcacaacgtgtgtgtgtgaagtcagtcgtgtctgtttgtgaccctgtagcctaccaggctcctctgtccatggaattttcccggcaagaatactggagtgggttgacattcccttctccaggatatcttcccaagccagggatcaaacccaggtctcctccattgcaggcagattcttcaccatctgagccaccagggaagcccaagatggatcctacatggagtcagagcagactgaaagaagatgcatgtctttgattcctcctgacactgagcccctacatctatcatggaattgatttctttcttaaataatagtcatttctgtttgcatctaatctctctagattagaatttttttttaccatctttgagtacccttaaatcctgcacatagtaggtacttaataacctctccgtatctgaactgtcccaagaaggggaggggaatcactaattagtttcaatccagactaattgcttttctaaactctcatataaatctgacttttaataggttctgagaatcgatgtttcattattttttgccgcagtggagtttatccctgttgatgggtcattacaaatcatcggtctctgagaggtccccttcctatctctcatttcctgatctttcagcagggtatctgtgttcttgagagtgaaggggtaaaaaattaaatgggtcttggaaattaacaactgggaccaaccagaccagaggaagagacgctttggttttctcaaggagcctactccagacagaatcctatcactcaaaaggaataaatggaaggctgtatctgcggtctctgtcaaacagatattttcgatatatatctgtcattcagtgagcgcccactacacaccagatgctggctgag

SEQ ID NO: 56274 - DNA, 2235 bp, Bovine  19866880566031
  misc_feature (1)..(1): n is a, c, g, or t
ntttcctttgtatgcctacccagcctccctaaaggcttgtaggtacgtacgctttaatatttcatatttctatcagtaccatctcctgggaaacatgtaagtaggatcaatgttattctcaaaaatcagctttgaatctgccagaacaccatggggaaagatacagtagccaccctggaggtttgctccacttaatttagaagagaaaactttgtgttaggaggacatgcttcagcacctaggagagcgacaagcctcagggtggccctctcttggttactataggtgaacaaaccttttcatctggactgcaaatctcaggggattcagcagctgtcccttggctccccctgcctgccccctcagtatcctgatagccatatgtgagtgcatatcactagacagcctataaatcatgccttttattgctcttcccttaactcctctctttgagcagatgggtttcactctgaaacgttacaggtttgtgctttgagttccaaatgtttttcacggttccctagaaggccagggatttaggaaagagcctctgtgtgtcaatcatagagtgaggttccgactgtgctacctgagagatagggacaggctggcccacagtgttcctgaaagatctgatgggcctcttactcatacccaaaactaatcagcctcggatgcattcagagtagagaatggtcctgggaccagagttcattgtccaacttgaccttcacagaggagtgatgataaaacagataatattgacaggttctcttttggacacctgcatgtaaaatcatatctaattctctccactgcatatatgggttctattctcaacaccattttgcagatgaataagtcaaggcatggaggggatgttacagagatgtgtctgaatgggcaagcctaaagcttggcaagagtttctgcagcaaagttatctaagttcacaattgtaccttgattgagtggttcagtgattagtatctaagcttttttcctgctttctggatttccgggttggggtggaatactatctcattttgtccctgtggtacactcagttgttaacacaaagatagacacagaagactcttggagtcccttggactgcaagatcaactaatctatcctaaaggaaatcagtcctgaatattcattggaaagactggtgctgaagctgaaactctaatactgtggccacttgatgcaaagaactgactcatttgaaaagaccctgattctgggaaacattgaaggcaggaggagaaggggatgacaaaggatgagatggttggatggcatcaccgactcgatggacatgagtttgagcaaactccgggagatggtgaaggacagggaagcctggcgtgctgcagtccagggggtcgcaaagagtcagacatgactgagcaactgaactgagatgcttaatgtgttactcactaattcatggatggatgatgtagctatggatgaggagagtggaggagagggtaggtatgctctctaggcagagggaatatagtatatgaaaaaaatggtttaaaattaaaaaaaaaaaaaaaagtgagagagagatacacagagagaagactccccagaccacagcagttctgcggagagattggtttcagatgtgagctcggtgataggattctatttcctccttagccctcttgccctgcttatcccagcacccccctgctctggcctcctgcagccagttcctcatccgtattcttcccaggccatccctccagcccagtaatctgttcctgtcctttaaagaagttaataggacaaaaacaaatcaccgctctccagcaagtcatgcggggttcttggggacctggcagccagctcggagaagggcgtgagagacgtgggcagtgccaggaataccaaatcaagctcccctccctgaaaggagtcaccagcatgtccatgccatccaggaaggcgcaggagcccccttcaggcccctggagctccaaccccccagggccaagtctacgcaggttagattacctggggaaattaaccagaggaaaatcttccccccagggggagtggaagatgcagtggttatgtttgggaggcatgtgaggggtaatggagctgttactccatcagaattcaccaagtcggccccagagacacccgcctcctctcctttatccagctcataatcctgtcttcactctctcctgtgcctggtgtcacaagaca

SEQ ID NO: 56275 - DNA, 1031 bp, Bovine  19866880679447
  misc_feature (1)..(1): n is a, c, g, or t
ntcttggataaaaacttgagctcttcctgttcctagctgtgagattctgggccaattatttctctattatgaaactcagttgcatgatctgtaaaatggggataatacctacctccaagggttatcaggatgagaagtaattacatttaagaaagctcctggcatgagtcaaggattaacacatggtaatctcttccactgcaagtatgtgtcagaagtacctagactgtgaatgtcatgcttatcttgagtaccgcctcataattacagagtttctcttttcaaagtgctttcccatcgatgatctcattttaaccagtttttatcgaatactacttgtgacagcagcatggtgtccctttttattcttagacccccccaaaggggatcagtggtgcccccatgatggtaaggtttttaatggatgcaaattttcaaggcatgacacatttattaatccttcattggagtaaactgtaacaaagccagcaggagcaatcattaatttacattaatagctttcagtgttgcataccccagcgcctgacatgaaacagtaatctgaaatcaaactatggttgtgccctacatgagttcatgtatcacagccctttagacccagtgctcatgcatttcaacaagggtaagatgcgtgagtgctacacagtgcacacaggaaaatattcacctccttactatggcctttaaagttctacctcctccagactcatctcagagcactcaactcttcttcagctggatgaatctttctatatattctgcatacactttaggcttatttccacctcagggcctttgcacatgccatagcactgcccgagacattgccccctccccactgctctttgcatgactggatcttttaatcctacaagtctcagaaaaaaaaaaaaaatcttttttttttttttcccagaaaggtctctctttcctgaccacgttatctaaagaggtcctccctagaaacattgctttaccctatttctttgcctcggagcccttttgttgtt

SEQ ID NO: 56276 - DNA, 1396 bp, Bovine  19866880687531
  misc_feature (1)..(1): n is a, c, g, or t
ncacaacctcaaaatcttttagggggaacagacagaggccaaaaggtgggaccttggagatccagctttgtacaaaacaccagcgttgactggggaaaaagaaggaagcatttcaaatacacagcacacatatggaccctgcccaggaccgcatgaacatctctgataaaggaatccactcttagccattcatttgtcactaccacagcatcttgccatattctttccatgttcttcttatttccatactatttttttctttaagtcaactcatcttttttaaaactttaatattttcaaaatacatttcactaccataaagagaaagccagtatccgttgctataaagagaagatcatcatgaaaccacataacaacagtcaatacaaaacaacagaaacaaaagcccatgtgccccttgacgtcatcgtgggctcaccactaatacacaggctgactgcacttcgggatctcaccacgaggttaaacatcctggagacattgggcaggagtgaacttggaactgtaaaggcagggaacatctctggtacctggttgacaggtggcgagggggagggggagggcgggtgcacagaaatccacagagatcctaataccaaccacggtcacgtgccctgaagcccccaatccaacgccacaaggtgggccccccaaggcactcagtacgcatccctttctttaccatggggacagtcaaatgataaacttccttcccactttcccagcaccttggggcccaccgtcacatcaagaagtaaagagattagcccatggcccctgccctggtcactgtttctcccgggtttgctctcccaagggacctggcccttctcagaggaaggttcttgtctttcacatcatgtgccagggctgaggctctggccccaggtgtttcctaacagaaattcagtgagtgcctgggaacatttattcccctctcaaacccagttacttctccaatgagatcagttttaagttacaaacacacacacacacacatgcactcccagtgatggatgatggtgaccaagaaggctgaaaaggatgcaaacgcagtttcaaactctaatctgttcaacaaaatgcttctacttactgaggcatgcggactgttgttggcactggagaagcaagctgaatgttcagatgtgtcgtcctggcgaaaacaaagacaggagtaggtgggaaaacgggttgaggaaacaaattctgatttggagtatcccagtttagcacaatcccacagcaagctcgcgcgccctcccattccccctctccagtagggggtctagaccctcactgtccaaaacggcagccgctagccaccacgtatgtatggctagtctcaactgaaatgtgctgcaagtattaatta

SEQ ID NO: 56277 - DNA, 2550 bp, Bovine  19866880710125
  misc_feature (1)..(1): n is a, c, g, or t
natattgctgaagcctggcttgaagaattttgagcattactttactagtgtgtgagatgagtgcaattgtgcagtagtttgagcattctttggcattgcctttctttgggattggaatgaaaactgaccttttccagtcctgtggccactgctaagttttccaaatgtgctgacatattgagtgcagcactttcacagcatcatctctcaggatttggaatagctccactggaattccatcacctccactagctttgttcgtagtgatgctttctaaggcccacttgacttcactttccaggatgtctggctctaggtcagtgatcacaccattgtgattatctgggtcatgaatatcctttttgtacagttcttctgtgtattctacacagcttcaaatggagcctctagaggaccccattgtctgtcggattccagagcttatgccatgtaagcactcacatggggtttgttgaaaaaagaggtttgtttgatagttcatggccaaaatgaagcttattgtcattgggtcaggcattcacatcatactcttcattttcacattacataaagcacttaagacttttgaaaatactctgaaatatgaaattacacttcttttggactatttcaactcatctatagaacaacgtgaagaattataagacagttgctatgtatcttttaacagtaattgttttggtgttacctgacatgcttacctaaaaatcagttcagttcagttcagtcactcaatcgtgtctgactctttgagaccccatgaatcgcagcacgccaggcctccctgtccatcagcaacttccggagcttactcaaactcacatccattgagtcagtgctgccatccagccatctcatcctcagttgtccccttctcctcttgcccccaatccctcccagcatcagagtcttttccaatgagtcaactcttggcatgaagtggccaaagtactggagtttcagctttagcatcattccttccaaagaaatcccagggctgatctcctttagaatggactggttggatttttactataacccacttttcggtaggcatattgatacagtggaaggataggacttaaatctatcaggtttcatgtaaataccagccccgtgcttctccaatatgacattctctttttctttccccataaactgttagtaaaacaacaaattgaactgtgaagatgtcattttcaaatgtatcccccacgtggagctagaattacgtttgcaattaaactatgcacattttccttgcccttctaagtgttaatcagtgattcatgcctttcatagagcagtcatatctcagaaccttctagctgctcatgaaatattaggggagtttagaagcggcctggattccctgaaagagttttcaacttcacagagctccagctctgctcttccaccaccctgtcactgcttatcaaccccaacatgttgaaaagcccaacatccctttgatttaatcagacccttttatgcagaaatgaagccaacagcctctttttcccaacagcgcagcatttcctggaacatgaagatcaatggtgttgatagatcattgatcaagtgttccccataagcccattaaacaggatatgaaactggaattgtgttcagaggtcccatcctgaggtggccaggagccaggaggagcaacaaagccagtttctttgtgcttgtcactttcacagcgcaagggtgcccttggaagggggcaaggaagcttgagaaatgagttttgcaagacacttttgtaacaccccctaactttctagcaaaagtggtcatcccattcttactcataacttctccccaagaactgcatgtcatcttttctctggggacatcacattccacttcactccacaacacatccaccaaagggcatcttatcacagttactgaattcagtcatcccacgatgcgaagagcccactcaatggaaaagaccctgatgttaggaaggactgagggcaggaggagaagggggcgacaggatgagatggttggatggatggattgactcaatggttgtgagtttcaacaaactccaggagatggtgaaggacaaagaagcctgccttgctgtagtccacggagtcgtaaacagtcggacatgactgagcaactgaacaacagcaagaatccactaggtagctaccaacaatgattttcccacatttaacccttgttgaaactgagatacttgcttaaacttctaaagttaccaactagcagagccagaatctaaactcaggtggtgggacacaaatccttaactcttaccacaaaatatatttactgtgcttgttctctaatctgccctgtcctgtagagctacattcagttacttccagtggagactccaaagaaggtaaacatttgtatttctctaatgctgcactcaatacgccagcaaatttggaaaactcagcagtgtccacaggactggaaaaggtcagttttcattccaatcgctaagaaaggcaatgccaaagaatgctcaaactacca

SEQ ID NO: 56278 - DNA, 1091 bp, Bovine  19866880713760
  misc_feature (1)..(1): n is a, c, g, or t
ntgtttctgtaatctataatccaatgtgcagagcactctggttcaatgagggaaataattatgtcaatatatggcattctacttcttaaggatgttttcaccccaagagaacaattttagaaacttgaatcaccttgaaccatctttttttcctcaaccctctcttaactacctcctccagaaaaaaaaaaaaaaaaaaagaggaaaaaaaaagtcaaaaacacaaaaaccttgattttcatccttccaggtaacatctcctgtcaaatggattgcctctccctaatcttgtcatttaccttccaaattatgcagaaataaatgagtgcagcaacctttcggctgctagataattttatcagcctcatttatggctttctatagattgcattagctgccatttctcgggagatgaaagataaagtgtgccttatgcaaaatgctccactgaaccatgggagccttggaagccactaacagcattagaaggctgaagggaaaaggtgaggatattcaataatccatcaacagcagggttaacgttgacgactgtcacaggcacctcgagccagaaacctgtgtggcaggtgtgtgctgagccatagttaaaatctgtcttggcaaaacttccaaagcatctccaaacagaacttgagacagagctgtgtaccttctgatcttttctaagcaaatgcacccacttagaaaaagtagttctttgatgacatttctattcactattagaagagttaagtatatttaaaaaaaaaaaaaaatgtcctcacctgtactatggatggaaaacaaaaaaaaaagaccatgtgcttaaaaatgtatgttgtttttgaagggaacattggggtaggggagagaaaattttccctttatacaatacaaaataacaaactgaaagtgttagttgctcagctgtgtccaactctttgagaccccataaactatagccagccaggctcttctgtccatggaattcaccagaagagaacattggagtggatagccactcccttctttaggggatcttctccaagtaatcgaactcgcgtctcctgcattgcagatggattcctcac

SEQ ID NO: 56279 - DNA, 2595 bp, Bovine  19866880747679
  misc_feature (1)..(1): n is a, c, g, or t
nagtatcttgttagggtgaatgtgggggtgtgttcagtgctgtacttgtttggaaaagtcatcctgaaaaaattccaaaagccccagttggtcaaaggaacaggatattatattataggatgttcttgatttgttttcttttctatgccaaagtttttttttttttttttttaaagcttctattcctgactatttataaccaggaggcggaaagacaacagtgctctgtacatttgcagcagatattcaaataagataagtacataattagcatggagccacaggtgaggtacactgaaagatttgaattctgcatagggaattaacaaatagttcctgataacaagacatcctaaacatgttgctttcagatgggagtgaatggggagtgtggatacagcccttccagacagttaataagagaatggattgtttatgaacaccagtttcttgtgtgcacagcacgtgacaaataatacgccggactgtgtacgtatataacttagtcctcacagtaaccatctgaggcaggtactgttgttgtccccctttgtagataagggcattgaatctctgatggttaaaagagatggccatgttctcctttctttgtctttctctccccatcattctctctccctccagccctcctctgtctccatctgtcccttctcttcctccctttctgttaacacccatgtatcctctcagtaaatggaaaagctggcatttgaactcaagtctcatctaactccaagccctattctcttagaggtcaattttggggattttagcaaagaggttacttttcgaagtttactttttttatggggatcttagttccctgaccagggattgaatccaggtcatggctgtaaaaaccctgaatcttaaccattggacatccagggaactcccaaggttactttataaaccattctgttttccaccatcctgtataagccccgtctttgtaatactgcccagagtgatcccatctggactttggcgtgccacctacttcagaatgcgaggcaacctacacagcccacgtgcgccagctcccgggggccacacggcaagcctctaagatgagcaccactgtggctgcacctgtggctcggatgggcaagctgagatccattttccaaaatcacatacacagaggtggcactggtatcaggcttctctgagctctgaatttgcactcttaactaaatgctctgctatttggtcttccaaccaaagctaaacagatgatatatgaataggtaggtagatgtgtaaagatatacatatgtgtatacatacgtctctgtctctgtctgtctaaatttagaactcgagatggccctgcctttccccttcttctgagtcatctggccagtccactgcattctggggagcagtgcatttaactccttgctgacattggtattcctctttgtcgcagcccccgtcatagcagcagtgggaataaaacccagagcgtagtgccgggaatataaatgggttatttttctcttcaactctgagtaggataaaactctcataaagaaccagggaacaaaggttctgtgagaaacatacaccaggggacttggctctgtctgatacagcctgagacaaaatggaaatagaaactcaggataaaaaggaattccagggagaatgttaggcttgcttccttgatggatgtccacagtcctgtgcatttagaagcattaatagcagttattgagtatctattccgcaagcaaagctatggtaggttgccctacctatcagcttatgattcaggagttatagatggatatgaactcaagagttgtgacgacagagaatgttgatctctctatgtattggtctacatgtacggttgtgtctatcaaaagcatggagctaatcattacaagtcataaaaatatccaggtgcctatcattggaagtaagacctttttgaataataataattttttaaaaatggatgtgaaagtaaaccttttcttttgagaagtgtactggtaaagtggttgagtggggcttggtcattatcttcctgaatttgaaggttggttccagtgtcacatgactggggctaagtgagtaacttaccttcagtttctttgtccatagacaataggttctttataatctgttcttgttcagtcactaggtcttctgactccttgcgaccccatggactgcagcacacccagtttccctgtcttcgctacctccctgagtttgtttaaacccatgtccgttgagtcagtgatgccatccaaccatctcatcctctgttgcccccttctcttcctgccctcaatctttcccagcagcagggatttttccagtgagttggctctttgcatcaggtagccaaatgttagagcttccgcatctgtccttccaatgaatattcagagttgatttcctttgtaatctgggcaacccttataaacccttgatccatggaatccagtctccttactgagctccagtcaatggggtagagcaatgaacaatattcgagtcgactttgaacatgaaaataagacaaaacaactcacgatttctcctgggggggggggg

SEQ ID NO: 56280 - DNA, 1719 bp, Bovine  19866880769929
  misc_feature (1)..(1): n is a, c, g, or t
naatgattggatgctgtattttctatttggtggtcttggaaacaaatataggacacagtgtttaaaaaaataagccattggcactggttggacctaaaattaggattagggtttttacatataacaagaatggaaaagcaatttgcttactaattgggaggaagaagcttgttgctactctgtactgaatttgggctctcaaattcttctcagtttcagttccgctaaggacatggcccgcttcttcatctgtaaaacagcgataataacatcggatacctggtagtattgaagtgagaattcaatgaactagtagatgtaaaacacttcgaacaatgccaagcacacacggaatgttttaagtgctagctgttactttgggctattattataccactgaatgaagctcactgcaagaacctcctaagacctcttttccttctaacgctttaagttgaccttttgcaaagcatctcttccaacgcaacctgtaagttagcagtttgatatattttggtgctcctctcatgctttgctctggtgttgtacacagacaccctccacacggttttgttgctaggcaatacagaatcagcatccatatcacccatctttcggctgcaagtaacttaaaccccttcttttttttttttaaaaccccttcttattaccttaagacaagaacgtatcttggaaagattcagagctcttttccacaaccaaaggacacagaggtcagtcacagaacccaaagggagacagttcaatcagttactcatgaagaactgaaaacagaaaaagactgtagaaggtcggtcacacagtcttttgaggcctaccttggatctctgctttcatctttgctctgcagatttttttcccttgtgttatggcactcggacaagcacggtcatgctgaatcttatcccaccctgcccacaagactggtgacagtcaatatatctattcatttcagattcctgattggcctgactcttttcaggagtcaccccttgtctaacctactgacctggaggagcatggtcatggcacctcatccacttggagggagatgtaagggtgggttccaggagaagggcttttagaagggcagggacccactgttacaaagtaattgatgagataagaaaccgatatgcccagattgactgttgttgttcagttgccaagtcatgttcgactctttgcaaccccgtggactgcagcatgccaggcttccttttccttcagtgtcttacagagcttgctcaaactcatgtccattgagtcaatgaagccatccaaccacctcatcctctgttgtccagttaccaaactttattttctcctcacactggggctctcaagactgtcttttactccactgttgatatcgtcctacattgtttgatcagataattagactatattgaatttgttcttcataaggtcagagcacagaactagagtcgattggtgtcagtgacatggactcaagtttcaagtcctagggaaggaatttctaaaagtatgcatgaattatagatgaatctccccctctctatatgtagatactaaatatctatatctgtgtgtaatctagatatctgtatctaagaaaatgtgtctgtacagctatcatctatttatctattgaaagagacttgctgtaatctctttcagtagatagataagtagagatagatatagagatcgatt

SEQ ID NO: 56281 - DNA, 2478 bp, Bovine  19866880800952
  misc_feature (1)..(1): n is a, c, g, or t
ngagcctggtgggctacagtgcttggaaatacaaagagtcacacatgaccaaacaactgaacacacacacctaattgacatatagccttactttaatttcaggtgtacagcatgatttgatatttgtatgtattgcaaaatgatcaccacgataagtataaagtgtccagatactcactcttcccctccctggcagcttgatgtgggactgtgcatgcatgctaagttgcttcagtcgtgtctgactctttgtgaccccatggattgtagcccgccaggctcctctgtccatgagattctccaggcaaggatactgaagtgagtcatcatgccctcctccaaggtggtggtgatttagttgctaagtcgtgtccgactcttttgacaccatggactgtagcctaccagtctcctctgtccatggattctcccaggaaagaatactggagtgggttgccatttccttccttcttggtgtgggactgtgagcgtgggccaatccagtgcttcctcttggctctggagggagagctcagagcctgttcttgtggcagcactagccaatcagcaccctctgaagagggcagtgtggtgcaaactggtctcttctgtggtcgttctggttgtggtggctggttttattctccagtctccgtggcaagttggttagcaatccagtatccttccctagaactcctttcctgattaaacatatccctgccagtttctatcacttataaccaataaccctaatcaatataggaagtgaagaggtctgtgtgtgccgggggtgggtggagggatgaggatgagggagtcatgtgtttttgacacttgaagtcaaacaagcataaagagagggtcctgtccatggtccagaatggtgacctgggtaatcagtactttcttctaggcatttgaatccctcccccaggaacctgttaaccaccaaagatgggtgaaaacctcagccgatgtgtcttctcttcctccgcacttcctactacttattttgtgtggacatatacatcatggagtttatctacatttgtgttctcagaggaaggtggtgacaaaatgtgcagggtggtggtcattaatatctactttgagtcagtcccctgttccaggacaattaaaatctgcttctcaaaactctctctcttcccatccttatttgcaaacccagctcacgagtaagggtggacagattcctgggaaagagcgatggcttaattaatggtaatgcaaaggatgtaggtgcctcagtgattggggctgtgtgaatgcagaattggatggaaggctgagatgcaaaatgggataattgaactgttagctgaactggaatttagcagttaatcacttttatgaaacctgcatctcaattcattactccatttatgccttgttgcaatacagagctgttcagctaattggtaaacagcagctaagcagtggagcccagaaagggcaaggccatcaaagataccatgatattttctgtgagtgcatatcttcattccgtccagccaggaattgcccgtcagcctgggttcaggtaggcactaatagtgaatagcacacggtagggaagtcatgctcgtacatcccaaacagaactgctgatcatcaattctgttttctgaagtccttttagccaattaatccctggtaatgaactttttagtatggggatgaaggtaatggcttttggcagcagagcattccaaattagagataagactctatatagatttcctgtgtaacactggacaagccaatctcccctctgaacctctgtttcggttgcacctacctcaggcatgctgtggtgaggactccatggggtacttttcataatgagagcaacgtgtctaggatggcgcctggtataacgtgtatgtgttcagtcaatgctagctatcactgttatctatcacctagaaatccttttttgcttctttatttgttttaagaaaaggaagagtcagaaaataatctctctcatatgtgtattgaatcaaagacagaaactgaagggggaattagagtaaatagctgattggtttagcaagagtttatcaacagggacttcaacaaaaaggatgggacttttaagggactgactaggaacaaagtcaagtgtaagggcatgaagcttggcttggaggtatggatacaggacatcatcaataaaccttttgttattctggggggcagtcttactgaaaacaaggccttagtctcctgaagatctgctcattttgtttgatggaggaataaagaggccccatttgaaaaaaaaaaaatcttcattttgacaccaagactgttataccccaatatcctagtgaactttctcttcctatttaatttcaggactctctccctctctctctctctctgtctcctagaatgtagacttgaaaccatgggggctaagttagacacagatataagtgaaggactcaacta

SEQ ID NO: 56282 - DNA, 1904 bp, Bovine  19866880817382
  misc_feature (1)..(1): n is a, c, g, or t
nggtggaacggaaaaatgcaagtacttgtgttttaatacagacattctcatgaaaatgatttcctatcagcactgtgagtgtttgctggttttcgctgtttccttcctttgcctctcctaccctcccaccttctagatctggatgtgctgaagatccagactttgccaacttctcatgcccttcgactatgctattgtttgtgttaattagatctctaaatccatctctatgaatttgtgatgttcttaatgacaccaagctgcattgtccagaaaatactgcgatcagtcttatatgtctacctgtccatccatctgttgcgggaagagggaacccctcccagtgcccaagagtgggctcttgtctaacatccagaagcgagttgtccaaagagaatcatgggctgataaagcaagagactttatgggaaggggcgcctgggcagagggcagcaggggaagggaaaccagaaggactgctgtgccgtgtggcgagctgtcttgggttttatagagatagggttagtttctaggctctctctgtctgatcatcctgactcggggtccttcctggggctgcactcattgctcagccaagacggaggctagcgaggcagattctggaaggtggcaggacgcgtgacgtctccttttgacctttcctgaattcttcctgttggtggtggcttgttagttctgtgttcctaaccaggacctcccgtcttaaaataactcatgcaaacggtgcctggtgcctggccagggcgggcagtttcagtcagtgtgtcccctaacacatccattcatccgtccttaatttttatattaagggcaactgcacagtggggcttaatcacttcacctcagcctgcctatcagtgaaaccggtgcacctctttcagaccttagagctggggaataaagaaaaatgatggccctaaatgaatgtcacgtctttgcaaaagcaaacatcttgtggactgttaattattatgctgcttccacttttaatcctcttcctataaaagtcatcatttgcatatatggggtcaggatttttcagaaacaggggtggaggaggtgaataagtcatcaggggacacggagtgaaagttttaattttctcctggactcaagctgccaactgcaaatcaaggtggctctgaaggaagagacagcccaaaaggagaagaataaatagaggatgctaataaacatccttattcaacagtggcagttataaaaatgaatcagaccttggagtgtttgttgtaaagggatacgtggccagaacagtgagtgtctcttatccaggggactgggataggattatttctatagagaaggcctggctaaaatctctgatattatttgattctttttaatgttctatttactgagcactttaaaacaatttttaaaaaaatgttttaagagaaaaatgagttccttaaaagagaaatattcccaagtcatttttgcttgtggggaggagcgtttgtgtttaaattggttctctgggtaaataaatatatttttgacgtgggattcaaaaatccctgtgtcaaactgtgcatctccaggttttctgtgttatggttcttctttcttctccctactttgtttcacgtttagaagctgaagcagggcctccaccatctgtttctctgtttcagccaaattcaccattcagataatgtagatttcccaacttaagcccacttagagatcacttttcaccacttaaagagcatttagccatgattccaggaatagaaagtgtatcttgagacccgtaatggcttgatgggagaataaagggtcgttttgttatgcagcaagtataaaattataacaacttccccctctgtttacagatgaaggacattttggctctgatatgg

SEQ ID NO: 56283 - DNA, 1155 bp, Bovine  19866880820012
  misc_feature (1)..(1): n is a, c, g, or t
nctgcagaaacatccaacgacatgccaggatcttgactcatgacagtataagagtggagactcagctgtcccgattcagggctgttgcacacccagggctaccccaccttcactggggtaaaatgctgcagcctgatatcaagcacttggaaggccggtctgtcccagatctcagtctccatcagcaccgacagctcggaaagccgatctgtcccagctctcagtctccatcagcaccaaccgcaccacacgcactgctcccatcatctcgatcagctcagcaccatctccagacacagccatggccacggcagcttcctccacacctcctgactccaagctgccctcaccctcgtccatccagctgtagcccaggacctggtaggcaccaagaaaatctctccatggctctgctttcaacaagaaactagaggcaagttccagttctgctcctggatctcaaatcccctactcacttgccccatcaaaatcatctctattctcagcatctcttcacgcagtcctctcttcaactcagtagatatcctaatagaatctcatggacagtgtctttgttcttgcatccgagcctctgcatatagcagccccttccttccagatttctctttgacaattcacactctctacctcctcaaactcagtccgaatttccttgtgtagaaaaatcatcccctaatatcgcactctaaccctgagccatcactcaatcgatcctttgaacaaattcatctatacaggactggcgatctacaacaaggatctgaagaacaagaaaaagcatttcaccacatatgatctctaaggcattgctccatcctgcatacaggatctcagaccaaatgaatgcctacaaagacacgatcacgtcaggacaaatatttttcaagtcctctgggagacctctccccttccatggcaagtaatgaatatccaaggaagaccgagaaataacaacatgagattgactttaagtcacagctatttaggccagaaagaagatgtgggtcggcctgtctgggactcgaaggaaaataacacatcctgccatccttctctgaaagcctctcgcctgccctattcttcaggatgtcaagcaaagaattcgactccactctcaattctccaagcaggcca

SEQ ID NO: 56284 - DNA, 1280 bp, Bovine  19866880861271
  misc_feature (1)..(1): n is a, c, g, or t
nattaaaggtttgagaagaaatgtatctgccacaactgacttttgttttagcgaaagaagatggcaaaacacaaaacacagtctttataatcctggctggcaatttcttccctgaggttattgtctatttcagacaaagaaaagaggtgtatgatctcagaaaccttcagctgtgaagaaaacaaaacagagagcaatatattttgtccctgctagtattttctgctaactccttgtttctcagctacccgagtgccatcaacttcagtaactaaattaaaaactataaagctgtgaacgaagaaatcttgcaagtaatgagcccacattgcatgaagtagaggaagaaatatatataaggaacatagtattcaccattcttatccttaaatggaaataaagatgttgcaaacttgcctgatgctgagaagtgaagtacatccagctcattcttagccagatatgtcaattttgtgttacccaacattttgggttaaaagtgcaatttgattttctttactaagggatctgaaataaaaggaattaggaggaaatttggtgaaccaaaacttagtgagacctcaagcccaatgcagggcttcccagatggcactggtggtaaagaatcttcctgccaatacaggagatgcaggttcgatccctgggtcaggaagatcccctgaggaaggaaatggcaacccactccagtattattgtctggaaaattccatggacagaggaacctttcaggttacagtccaggggggtcacaaagagtcagacaagactgagagactgagcacatatgagcacgatgcaacatgaagctagtcagttctgaaatattcagacacctttatttatctaacctgcgatgggccttggcacagattctgtcttccatgttgtgtgtggtttcagatgacccctgaaaactgcctgtggcatcctacacctcggatgattccattttccatctcttgtcatgccagtgttttgcttaccagcagctgtcagatgggtattataatgaatgcgttcatagcaaatgttataaagccgaatataaccagtgttcaggattaagccaacagcacggtgcttacaaagagactggaaatgggcctctcttgtctgcatcaggaaactggcttgaaactgtctcacaggctggtttacaaggacctgtgtttgccaactcagaatgaatctttccctagttgatgcagagatgcctgctacctggctacagggaacttcacagtaattgccatttagcc

SEQ ID NO: 56285 - DNA, 2971 bp, Bovine  19866880875622
  misc_feature (1)..(1): n is a, c, g, or t
nccgggcgcggcaggagttctaggtaagtccgggcggagccaccgcctccgtgtcccccgccccccccaagctgaccagagggtcccacagaggggagagctggctctgcgagcacgggcttcctccctgggccaggctgggcgcgctagactgggaactttctcagtgcgttggagagatttcccggcacgtcttcccgggggtctgagatctggacccctccggcccccgcgtccttccagacggacgcccttgctcgcctcgaagctcctctccggagcgccccggcggccccggccgtcctcctgggagcgagtgcaggtgcagcgagcagcgggaatctgcctgcgcactttgcataggttttctggccggcggcaagcgggcacttggtgcgccccgggcgctgtctcttcaccgcccttcgcgaggtctgggggaggaggcacttggtggcctgggagggcgtttggaagcgccgaatccgttctgggaggtggggaagtagagggtcgctgcgctggagtgagagtgtgtgttcatgggcaccgggagggacgccccaaaatgtctctgccttcgaccctgggtgatggggaggggaagggggcgccagcctgggaattcaggacttggaaactctggctgagccccttggttcctttggtggcatagggcaccttcactctggggaggaaacccaggagcagttcgtgaaggccagggtcgccccttgtcagccccagtttcccaactctccagggttagaggtcaggggagggctgacgagtctctgctcccatctcgctgcttcgcggggagccaggtggtcgagatggtccgggagccttcaaggtcttagctcccagaggccaggccagcccggaagttgcccacgcggaaagggcggggaagacccgacccgccctggccgcggagccctgaccgcggagcgagccgccaactccattcactgcctctaggaaacagggggcttctgctttctgcttctgcccgggcaagggccaagaaggtgcttctgcgggactctgggactcggggcttgtggggcggggttgctcaagtgcttgtaaatccgagcctggcagtccagagaactgaactggtaccctacccggggtcttagttgaacttggaaaagaagtagtggaggtgtcctggaatcgctttgtttgagccgaaatgtgatgcacgtgagtggagtgttctcttataataatactgattgtacatacgtttattattaaaaagaaaaacaacaaacccacaaaaagcctggccttctcagtcaagcttaagacacgccccagccggtgatggctccctgcccctgtcctagttcatccaccctccgtttcacatttatctttgttacaaagggaaaaataaaagagatgtgagggcctggatcctttcaatttttaagtgaccacagagggcctggctggagccatgggcagttttatttttggctaggtctttttttgtcacaggcaaggacctaggcccacgaagggtaaaggtggctctgacggggacttcaaggcaaactttgggactgactccaggccttgctctctcagctcatctggaaagcgctaggatctaaaggaatccactgggtttcccttatgttaactcatgactgagttggattaggaagaggctggcctcatccttcacaattttcgagggcaccattagcatccagagataaggcttgagaggagtgccaggccctggttctgacacctgcttgctgtgtgaccttgggcaaatggcttcacctctctgtgttttagtttattcacctgccagatgaaagtctcagtggtggtggtggcctccgagggtctaggggagaattaaagaaagcgataagcacggagcagggtctggcacacgggcaggtgcctagacaacgtcaatcttccttatttttatcaaatagatggctctctgttgtgagtcttatgacacctggtgggatatagaaggctggcagcctcccttacatacatgtacttcctcttaaacaacagctccaatggaagcagaaaaggaggttaatcataaagggagatttctcgacagaacctcattctctccaagcctgacctctcctcatgttctaaggaggaatcagcgacatgccgcccactggctaagagggggggttgggagcatctgacaacatctcaacaggcacctaaaccctgaaattaagttttttttcttcaatcagcagaaaagcccgcttctcctcggcctcctgggatgaaagtgccatcctgtgaaagttcctttcctaagcacgcgctgtctttaacgtcaccccacggtcccagagttttccactcagaaacgagccaaaacgtgggtctgagcagatttctcctcctggaattcacccactctgccctatttttctcttcatgataattgatgctatttttttacctacttctctaatggctgaggataggcctcttcgacatccttatgtctctgatgacttttttttttttttaaagcaaatttagccttttcagaacaagccataccaaatcattttattttataaaattcctttcagatgagtttttttttttctttttgcatttagaaaattggttctgccctgtatacatatgtctgacatttcacctttcccaaaattagaccattttgtttgcatcctttaagctgtggtgtggagtaatgaacacattccaagagggaaatcggacctgacatagaaaatactttggggaggcagtggatttccagtggcgtgtgtgaagactgttgaagtccgagtacatttgctctgaaggacacagggcagctcatctcgcttttcccacccagcatgggagccacgcagtaagcacactccacagatgaataccagatacttcccaaaaggggtcactgtcacatttcctt

SEQ ID NO: 56286 - DNA, 2621 bp, Bovine  19866880915881
  misc_feature (1)..(1): n is a, c, g, or t
ntccctttccttgctctcccagcaggttgcttcttcagccaggctggttttctaggctgcagaaacagaaggaaaggattaagagcacacaggctgcagcttttgggggagagatgcctggaaatagttgtaatatatctgagggaagtgggagtggtgggggcgctggtaaaataagtcctgtttgggggtgtgccttccatgagggttttcatgagacaaaaagaagaaactgagttgattttgaaagcattctctgctttcttgagccccctccccattgctgatcttgaaccatctgaggcctgatggtagggttacactacagtgaattattgttgttcagtcgctcagtcatgtctttgcaaccccagggagtgcagcgtgccaggcttccctgccttcactatctcctagagtttgttcaaactcatctccatcgagttgatgatgccatccaaccacttcttcctctatcaccgccttctcctcctaccctcaatctttcccagcgtcagagtcttttccaacgaagattatcaaactgactctgaaatgacctttcatggttaattttaatatctccaacttacagaggcttccccggtggctcagacagtaaagaatccacctgcaaagcaggagactcaggttcgatccctggatcaggaagatccctggaggagggaatggcaacccactccagtattcttctctgggaaatcccacagacaaaggagtctggcgggctaccatccatggggtcacaaagagttggacatgaccgggcggctaacccttttcactttcgccaaggcgctagctcaggacctcacggtcagcaggcagacctgcatctagatgtctctggtctgactgtgtcactctcctgaccactgaggagctgcagctccaagtcagagagcagagcagtgagctggagactgcagcgtgtggaaagagctaaagaatgatcatcattgcagctccgtgctggaaaatggcaattagcttctagtttgtttgggttaatatctctggggacctttgtgaaatattatttattgataaggaatgtgcagaacagcccaacaggagttgggagttctacgctcagtgcccttggaggagcatctaaatgacgtgaacctctctcctcctctcaaaggtgatgctctttggtttgggaaattattatgtagtttctgagttttcttttttttgttgttctggtaacttctatggggaagtgtgctctgagagataagtgtgccttaggacctggatgaaaagtgaaagtgttagctttctctgactctttgcaaccccatagactgtagccccccagactcctctgtccacgggcttgtccaggcaagaatactggactggcttgacatgccctcctccaggggatcttcccgactcagggattgaatgtgggtctccctcattgtaggcagattattgtctgagccaccagggaaacccttaaagtcctgccggtaatcaacactgttgctttgggtaaataaggctcttagcctcttggagccctagttcccatctcagggcaggtttgggaaatttgatatgatgtgtgtcaaactccagcatctgagatgtggaagacatttaaaagcaacaatcattattgtcataacctttaaaatttgaacacatgtcaacatgaattgccaaccatattcctgctggcatgaatcaagtgaagagtaaaaattactgagattcaaaaaaaaaaaaaaaaaaggaaaataaattgcccacaaagtatatattctgcacagtaagagtttagtgttgagcttaaatacacagagagatgaactgtagaaatcctccacccagttgcaatctttaggaatgggatcaggttgaatttaccttgacacaaaacattaaaaacccttttttttttttttaaaaaaaaaaagagagatacaaggagaataacttccttcttcaaagaacaaagagtttcgtgttctttagaaggctctgtttatatgaaaaggaggcagctgcaacatggtttgtgacagagggggaaaaaaagaggttaacattgcttaggcaactctcttcgacaaaagctacttctgtaattgactcaaattttatctattcattaaagtgagatcactaatgggtaaccctttcgtcaccattgctaagtaccatgtgccatgaaaacggagaagcctgaattcctttgaacagcaacccctaccttgaagctttacaaatgaccttcctgcaattagtgtaaatcaccgagctctccctgcacatgcctgtgtgtgtgtgtatgtgtgagggggatggttcactgtcatttctctagaagttcaatgaggaattaaaactcactgtcaggaggcactgtggagactagagtgagcagcagatgtctgctggcctgcgtcagggtgaggacacggctgttccgtcaggggctctgggcttgagctgcgttcccctttctcctgcccccaaccagtctcagaaccatgaggaccgacctgcctaaactgaaatggatacagagcatgccatgcccgcaacgctgacccagagacttcctgtcccctgggttcctt

SEQ ID NO: 56287 - DNA, 1383 bp, Bovine  19866880948358
  misc_feature (1)..(1): n is a, c, g, or t
ntaatccatctccccagcattttgtctggcacagattcagaaaatataatatgatcagacagatgtggctctaatcccaggcttatcgcttaccggctgtgtgactcctttcatcctttcatctctctgcgcctgtttccccatctgtgaaatgggagtgaactgagattccatctcatctgttaggagctttcaggggggagaatgcctgcaaacccctcagcatgatgccagggactgagttagcactcagcacatctcaatgctcagtgtcgttaggtatacagtagcatgtgatactcagtcctgtccaactctgtgcgaccccatggactgtagcctgccagcctcctctgtccatgggattctccaggcaaaaatactggggtgggttgtcatgccatcctccaggagatcttcccaaaccagggatcgaacctgagtctcttgtgtctcctgcattggcaggcgggctctttaccactagtgccacctgggaagcccaggtatacagtaggtgctatgccaatgtcagccatcccacctgctctctcaagattccatcacaggggcttcagacattgcaaagccgggcttctaagagaccatggtgtctccgaaagaggtggtaacagaggtcaggggtgcgaggtggagccattggcactgattccttccagctgatggtgacctgcgtgcaggaagggggatgcccttggttcaccattcttcatgttctttccccaaaactagagccttccatgccaagccgtctttcctgagcaacactttaatttacatcttttaataactttggttgccatggaagcattggaattcagttttaaaatagataaactaattgtttcagtcagtttgggtatttgctgtcaaggaaacagcccgcttttccccaccaccaagagcccacctaattgcatatgcgaggtggcaaacgaggggtattgactgccccacagccaggcagaggaggcaccatcacacacccaaggaatttcagccaggcagaggaggcaccatcacacacccaaggaatttcaaccagtcctgctcatgagcttgagaaagggacagtctggactaatgctggaggctggggaaggtagtggggtgaggcttccaagggccatggacacagctcctgaggcagcgccagaacagagtgcagggctcaggacattccggcagccagacacagttcctgaccttggatggaggtccaaaggccctccaccctgatctgagggattctgagaaccatagcagtaatagcagcaacaaagcacaggagcccagggccagagcctacttcccaatgagacaacaaatgttcctctaacaacaggcattcgcttacctcct

SEQ ID NO: 56288 - DNA, 1457 bp, Bovine  19866881061798
  misc_feature (1)..(1): n is a, c, g, or t
nattttggccaaatggtgcattaggagttcaagagcagaatcaaacgagagcactttccaagcaggggtgatagcagttggagctggagctcagagaatgagagggtcacgagaggaggaagaggatgaacaagggagctgggggacagaccgtgggcaaggccttattgacccgagtagggcacatggacttgacccagaaaagggagaggcacccagaggtgggagccatgtgagctttaggaaagggagcgaggatgctctgatgtagacgaataagtgtagttgaaagaaaaatcgaaacactcatttggggtttgtgcatgagacagggattacatttaagcagcagttgttgagaacagaaggtggcttctaattgcagttgttcggcatcaaatccacattcaaacttgcaattatttcaccgttaaaagagctgatggttccctcttgtgccggaggcagtcccaagggagctctaatcccagggacttggctttctcccggccccctgagccccagaccacactcccacaaagctgttctcattggctggtcacgcagacagattcacgtggcccatgaggtagaggggggctgaggaagggaaagggccatcttagcaaggactctggatgcattcagagcagccgagtgaaagggagtgatgacacagcttgggattgaaatcagtgtctcctcttctgcaggactttaactggagccacagaaagcatcaacgttaccacgcatcaaggttttgatgtgctattggggtccccattcccttaaagatgggaaaatcaagacagacaggttacataaccttccatggtcacatatggaagagagagcagagctagggtttgaacccaggcatgtcagggcctgaagcacatcgtcttaacttcagtgtccctgatggggctgggagctttctaggagaggcagctgccagttaagccccaagtgcctaccgagtgttgcaaaggaaagaagagtgagagctgtagtcagacagactgtccctcatcagcttagtgcgaatgcagccaagcaaacccctgggcaacttgcttaccttctctgagtcttgtttttgttgttgtccagttgcgaccccatgcactgcagcaccccaggcttccctgtccttcactatctcccggaacgtgctcaaattcatgtccattgagttggtgatgccatccaaccatctcctcctctgcttcccctttctcctcctgccatcagtctttcccagcatcaaggtcttttccagtgagttggctcttcacatcaggtggccaaagtattggaacttcagcttcagcatcagtctttccaatgaatattcagagttgatttcttttagcatggactgctttgatctccttgcagtccaagggactctcaagagtcttctccaacaccacagttcaaaagcatcaagt

SEQ ID NO: 56289 - DNA, 2261 bp, Bovine  19866881063290
  misc_feature (1)..(1): n is a, c, g, or t
ntacgaagaccccatttccaaataaggtcacttccacaggtaccaggggttaggacttcaacacaccattgttgggagggcgggtggatacgactcaatgcacaggaaatgccgccttcatatccagaaaacagagcaggtgggtctctgccacctccagcctcttggaaaattgcccattcagcccgatgtccaccaacatctggttcattcgttcaccccatgcttactgaacacccacacatgctccccacggcagagaaaccggagggaacaaaggcgagaaaacctctgttctcgtggagctcacatgttgctgagggaagaaagacagatgatcgacaccaacaaataaggagatgatttccagtcatggcaaagcattccaaaaataagagcagcaattgtagcaggacaataacctccacgccaggcattgttctaaacacttgacgtgaacatgtgcccttcgtcctcaccacaagcccgtgaagtagcttctgttcaattccatttttaaaggtggggaaaccgaggcacagaaaggttgcacacaacttatagcagaacctggattcgaacccaggttgtactgagccccagggaccccctgtgaggaaaacaaaatgctgggggcaagaataggactctagatctggtggtctctggaaggggacttttgagtcaaggcttgagcgaacagtagggcagatgcctgatagtagcagatgaaagagggactataaaggggggtgtgaagatggcaaaagaagggttcacgcccattctgaatgggatgacgtcctcccaaacaggacagcttctgaagcatccatcggccacatccgatagaatcaagattggtaggggctcagatggtgaagaatctccctgcaatacaggagacctgtgttcagtccttgggtcaggaagatacctggagaagggaatggcaacccactccagaattcttgcctggagaatcccatggacagaggagcccggtgggctacagtccaaggcgggggtcccaaagagtcagacacgactgagcagctaacactttctttacagcacattaaggaagggtttcttagagagcaggtgctgcctcccccagggacactgtgatcactgggttcccttctcactgactcatctccgtcctaaagcctaccttcccaggcttggctcaggccagccccactgccaggggtgattaataggtttaatttatctttacattccgtggagctgagctaggccgacgacgcctctggaatggtgtgtgagtaatcagtgggcaagcagaagcctctgcatccttatttatattcatgttactctggggacatttctaatttgtttgtttttctctgatctggcttcacccacccagacttggatgactgggaagagaccagagaagggaaggtccaggagaccaggagacaaaggaagagaggctgagtccatgaggacagaggacagaggcaggaagcgactggacgagggcctgtcaaccctccatctctgtgcccaccagctgctggcactgtattcatccacacatggtctcagccagtcgttggtacaggggcccagctgaacaccgggaggggctgacaagaggactttggggtcctgccttcacagggctcccagcaggcagaagagatgcacatgttgaggatgtcaaagcccagccggcccaccgatgggttcaaggcagcacaggctcaaagtcaagggcagggctcctcattctcattactggtaggggtttctggatccaggaccctcagagccagcctgaaatctgggcaatgtcatctctcctcccaggaccggaatgcacccagctcagggaatcgtgaccaggcagagccgggagagagggtaagagaaggtctccagcacagggagggtgaggctgcgcctgggtttgctggctgatgcgtcctggctgcgcgaggcttcggcccctcctaacacacccccacaggggatccccaaccagccctgcaaaagccacaggcttccaaagtgtgctgggcggggtttccttcgctctcacccctcctgtgagacagatgtctgtcatgcagtcagggctgacaaggagacagaaaccttctcagcaaagtgagaggcaggagcccacacagacgaggtggctctcagcgcagagcctggggtctgtctgtgctcagactggtccccagagctaggcctcgatgagggcaagcaaggcagcagaa

SEQ ID NO: 56290 - DNA, 1224 bp, Bovine  19866881088401
  misc_feature (1)..(1): n is a, c, g, or t
nctggagtggggtgccattgccttctcctatatatatgcgttaatatacaatacttgtttttctctttctgacttccttcactctatataacaggctctaggttcatccaccatcactagagctgactcaaccacaagaatgaccatgtaaaattacttgtatttcaaaggcagtgtgagaggaagcaggacactgctgtgctattacactgtatatgctgtagcgccatctacaagattgtatgttgtgcaaaacaagaagaactgaacaaaacaaagaggtgacccatgtctatgagaaaacattaattgtacgatatgattccagcacattctagtgtacattttggtcttgttttctttctcctcattgttggtaagaggctgtgaactgtactgtttccagctagttacccatgttggagaagaaatttttttaaaaagtatgagaagaaagcaggagagaaagagcatttgtgaattacagttgtccaaaaaaataaataaataaatagcctagctggtcttatttgtgaagcataattgcctttatcatatggaagtattctttcacattttctttgtataaaatttttgttaaacttaaatgtcttttttgataatggtgtgactaagccagtggactcacatggtatgctctttcggagtcctccttaactttttcagattcttaaccctttttaaattaaactgttttggaaaaatgaaaaaaataaaataactgtattttaagacccttgggcacagtgtctatgtctgagatcaggtatgtgctagttaatgcaccaaaaagtctggaataaatactccacaccatcaagggggagggggtaaggggcaccctcaggaaagggtgaggtgaggagaaaagagaatatatacctttcttctatgaacttctctgctcttttcatttgtttcacccacaagtaagtgttacttttgtgattctattttaagtggatggtgggaaggatggtggggagagaatcaggagcccaggatatggatcagattcaagagaagagagaaaaggtctgcacacctgagtgcccagaaaaatctcctggtctgagcacagaaatgagacttgtcaagcaccatcctcaaccctgccaggcatgaaatgcaagcagagtaatgacagtgactagcctggggacccaccagctgaaatttaataagcgagtaaccaactccatt

SEQ ID NO: 56291 - DNA, 1221 bp, Bovine  19866881100535
  misc_feature (1)..(1): n is a, c, g, or t
nattacctaacacgtttccacaggagtatcactgggggagtttgctgatttaatgttcctaaaaggtgtagcaaaggatgctaccaaaatgtaaattctcccaaaacttaagcctttaaattccactgcacaggggctgtcataaagtaatattttgtgagctacagattccaataaaactcactctgagatgatgaaggctttcttggtagcctaagggctggtgtatgaataatctgccagcattatgctgtgtcacttaaatattcctttggagatttgtcagaagaaaatttaagtaaaattaaagttcaaatggaaatgaaaaattaagttatgatcaaagctataatctcatattggattttttaaaagctgtagagaaaagtcccgttaaagatttcctggtttgtatttatggatccaaacagaggtattcccactgtgccctgcttaaaaggctgatgtgcagagtctgggcctccccctttatttagatgctgaacctgctgcggggggaaacagcatctcagtttctacaggcaatccaattttaatcatttttgctttattggaattttcataggagtccaggtacaagaggttcagaattaatctaagtcataaacaaagcagaaatggaaaggaatagagtgaatggtaacacctaataagtcatggttcttttctcctaaaataagcaccatggtgtgggatagaggaggggaccaaagcactgtttgcattcgaaccccttcaagtcagaggggttttatataaacttcatgtctgaagtttatgtaaaacactggcatctgtgactcccacaaacagcttttcactaaagtttcagaatattccctgacacttttcaaactgagggaagcagctgtgatggaaagggatggtgacagcaagcagaagtctggaatcccctggaaagagacccagcttgacatgggactgaaatgcacactcccaaagaaagcattaaccgcagactgagccctgtgtggaccgtccacatagaatccactgccagtgtgactcatgggctagagcctgacagaaaatcccagagagaacaagagtcatatccagtgtgccctgtgctgtgcggatccatcaacaccacgatgatcacattaacgaaactagtgaattacctctctagtctagaccaacagcctctctgagcataagcttagggcaggacttttc

SEQ ID NO: 56292 - DNA, 2272 bp, Bovine  19866881118386
  misc_feature (1)..(1): n is a, c, g, or t
naacatggaaaggcattatggggtagcagcactgacatcaataaattttggttcaaatgccagctccactgctgagttctcagtcaagacacttcagcttctgagcttctgtttcttcctccacgacataaggtttttgacaactctcggagttgttaagagagtcatcatgagcatacataaagtacccacatgactgttaacacatagatggttattaaaaagtagtgattattatttgtgtgtggagggcagcaaagagatccaattgtaaaagagctgggctagagactgtgttattcctagaggtagaaagtacacttttgttgtctttggccagctgtggcctggaccaaggtctggactctatgaagtgtttaataaaagtcaacaaatagataaatgaaaaatgaaataattgatgcatatacaaagccttagaaagatctcaaataaccataaaagccatcatcaatatcctcaaagtaaatgtatctggcgaggtatttagtgtctgattaaagaatcctcacagcagtcggaagacttaaaacctgcaacatagtacaaataagaaaaaaaagtaaagcaatcatttttgcttatattcataaacccatgtgactgacttacaaatagagaataagcagaaagagacgcgtacgcctacagaaccaatgtatggttggcagtgggaaggtcagggggaagggatagttatggagttcggaatggacaggtacccattgctatagttaaaatggataaccagccaggacctactatagagttcagtgaactctgctcaacattatctggcagcctggataggaagggggtttgggaagaatggatacatgtatacgtacggctgagaccctttgctgttcacccgaaactatcacaacatggtttattaatcagctatacctcaacacaaaataaaaaggttaaaaataaacaaaagccagctgtttaaaaaaagagagaggggaaaatatgcatcgttcatccaatcattcatttatctgtcagttcattcacaggcattagcttctgttctgattcggcaatgttatgcaccctagggactcacagatgaagacacagttgctgccagggaaccctcaaacaagggcatgaagaagacatatgaatgactaactttgatctaatataatacatatcattctgtcagaggtattaaaggctccagatctcctgaaaaatgagcattcactttaaagaaggagactggaatacaccaagacaggctgaggaaaaaaagtaactcatgaaggaggaaacagcatagcacaggcataaagtcatgaagataccctgttgtctttgggaaggacagtgaattgtctgatctctctggaacaggcaaacttgaggagagtaggggcgccgaaacgtgaagacggggttgaccagatatccacaggccttgactaccaagctaaaacaaagagagttcactctgcagaagctgacaggccaccaaaatgtttgataaagagtgtgacataaccaaatgggagtcttagtgaaataactgaaaggagagccgagagcaggttagaaaggatgatggcaagacagatattattcattttatattgaaaagtcaattgccaaagatattagtaaggatgagtacatatatggacacactggaaactgaaagagagaagtctacataagtcagggctctaagggacaaagcggaagaaaacccaacccaaagtgcatcaagagggttgggaagaaggcgttactgtcctatgtaataactgaaacacacgtgtctgtatgatttcttccagattttctcgacatccctgtaccatcctcatcatcatttatataaccattcccttgtaaggcagttagattatgtccagtttggggaacgggcagcatctctcatcacggtgccatctcccatcctcacaatttctaaatcagacaaatcaaggtgatttgtccagaaaattctgaatcatgtttcagtggtctgtctagaccaggtactcatccctgagtcatttttgaggccaatgtgtgggatgccctgatgggtcaggtctggattatgtgccatttgaatttgaggtgggttatacatgttctttgaaacgtatacaattatgactcttttcacattgatcaaacattcaaactgcagtacagtgattaaagatgaataaagttgaaactaaaaggagacctgggtcccaaagaagggccatgtgtttattatctg

SEQ ID NO: 56293 - DNA, 1177 bp, Bovine  19866881124204
  misc_feature (1)..(1): n is a, c, g, or t
natatatttcattaaatcatatagaaatataagctatatatgtatggtttatattcttaaaagcattactgtactttatgtactaagtactatgtactgataattatgcacatgtataacataataaatatacaaataaagatgcacatataagaacttttatatgactagaactttcatgaaaaaatacataagaagccaaaaatggttgctgaaggtgacctggccacctggaaagagaccttaaattttattctatgtttgaaattcttattttttttaaatgttcatctgttttatgggttcagtttttagaaacatgctcttcatatcactctactgtgtttgtttcattcttttaagtatcgacatttatttatttggctgtgctaggtcttaattgtggcatgtgggatctttagctgcagcccgcaaactcttagctgtggcatgcgggatccagttccctgaccagggattgaacctggaccccctgcattgggagtgcagagtcgtagccactggaccaccagggaaatccttgaaattcttatctttgcaaccatgtgcaaaatatcattccatgcctttttcctaaacgtgattttcactgacctttcccaatgcatctgctgttgtttatcctatcagtgaaaacgcccagcagaatttccattcctaatggtgtttgtgtgggaatggaccagcttttttcagaccaccatatttacatgcaagggccactttggtggaaacgatgctagctgattaagagggtttgtgcaaaagtacccactgtgattgaaacactcatttaatacattttaagtgcccgaaatgctcagcttccttgattggtgttgattgtttgcatttgatttatttcctccgtatcagtgttcattaagttacttaagtaatggccaccctgtagctgtgtctctatttaactccacatctttgggagcattctaattcagagactgttcacttcaggagctgggaatgtagatttgacctctgaagggttgtgtattcctcatagaaattatttacaagaaaaattatctttcaaaaaaaattcacagcagtctcctctgatttttttttctatttatagcttctattcttggcagaagtcttattatttttgacaatttattaactaccacagaca

SEQ ID NO: 56294 - DNA, 1478 bp, Bovine  19866881130242
  misc_feature (1)..(1): n is a, c, g, or t
ncgcctcctgtcctcccccggccccgtctggtggggagacaccctcgacctgtccctgctctgctcccttggggtgttgggggccggtgaaatccagggtgacatccagggctttcagggggccaaggctgctgggaggaaggcttctgggctttgagttggggactcggattcatccctgccagaagttagagcgcgaggcaatttagcaaattgtagcttgctgcagatgtctaattagtcctgaggctgggtggaggggagtggtgactgaagtctgcggagtgggagggccactccgtctgctgccgaggttgcctcggctgagggggccgtgggctccccagctgagggtggggctggtcgaggagagccagacacccgcccccagagagctgggctccggggaaggggctcagggggcagggctctggggtgtgggggcccaggtggaccatgcagggggagctgatgagtccagtcggggggacagggagctgctgacaccctatgtccagacagccgggagcactgagtgagttttccactgctcacgtccaggaccctggcctcaacctgccccaaactgagtttccatcctgatcccttccttgcttctcctcctctgtgctccccaagtcacaggatggaaccatgacccttcctgctacttaggacatgtcctccttatttcctatttcttcagcctccatgtctggttcatcatcagagctcccactgtactttctgaacacaaacccaactcttcatctctcagtgccaggactctgccttggcactgttgacatttttgggtgggtgatcttctgcagggggtgcctgagcactataggatatttagctgcatccctgaccctcacccactgtaagccagccccacctacctgctgtgacaacctgaaacgtttcccatcgttgccaagtgtctaggagcacaaactcccctggtttgaaaacgcattctacagcagcccaggccacctcttgctccccaaagatctttctctccaagctccagcttcctgccttgtctcccatctccaacctggcttccctcaatgcatcctccacactgaagccaaagggatacgcccctaatagaagctggatcatgagatactttacacctttgaccctccagtggccctgggcacctgcagaaggatctgtattccctaatgtgatttggaggcatctcagtataaggctttccaggtgacacagtggtaaagaatctgcctgctaatagaggagacacaagagatgtgggtttgatccctggatcagaaaaatcccccagagaaggaaacagcaacccactccagtatacttgcctggaaaattccatggacaggaggacccttggcagtttacagtccatgggcttccaaagtcagacatgactgagtaactgagcagacacagtataaggacccagcctacacttctggtcttag

SEQ ID NO: 56295 - DNA, 1980 bp, Bovine  19866881170845
  misc_feature (1)..(1): n is a, c, g, or t
ntagatttgaggagtattgcacatttctctctggagacatctggttgaagttgaaaggaatgcttcagtaaaacctgggaaatctggtaattgtacgagggttgcatttctctaattgtggctcatgagaccatctgtatcagaaccatctgaagcatttgttagaaatccagagatctgggcttgattttagatgtataagaatctctggggctaatgtcatggattctgaaaattttagtctcgctgctaaaatgctctgtggaccagcagcatccgtatggcctggatagaatgcagaacttgttagaatgcagaactgcaaaccgatcctgctcctactgactctgaatctgtatttttaacaagatccctaggtgatccctaggtgacacatatacttcagatgagaagcagtgactctgagaatgacacatctcattttacttaggtatttatgtatttttatatcttgctctaattatgtattttgtttgaaaggctatttgaataaagagttcttttttagttgaaatcataattgaagagatagacttgatgacctctctcttgtttactctgtggcaagtattattgttcagatcaggaaccttttgaaaaacaccactgttctattgccttcagtgtatactgactttattcagattacctaaagaaaatagtctctcaggggttggctttattccaaatttacggacataatgataactcttaggtatagaatgtggaatgtctgtcaagagtaattgactctatatagcttaattccacttccccttccataccatctgtgaaatgcttgtagtcatctcaacttaataacttgtatattgattttactgaatataaccaccttacatctcagtcaaggaaaacaatgaaagaacagattttgagtggacaaaaagaccacctaacacttctgccggtattttataaatgttggttttctatcaaagagagccaaaactgtcagtttaaaatactagcttcatgagtttttgagtaagtaggccacagttacgtctatggggtcgcacagagtcggacacgactgaagtgacttagcagcagcagcagcagcagcaggccacagttatgctttatttctttgtaggttctttgatttgatacttgaccatccatgttaatcgatgataaggcagggtcccagaagactcggtgacccattccaggaaacataatccagcagctgaaaattactttcagggtcgttcataaggattaggggatatggcacttggtggtcacccatggctgagaataatgcctgtttctaccagtcagagtagaaaacctctgaattcatgagacattgagtgaagtactcagaagtttcctgtcttagcagtgggactagtcagccctaaattaaacatggctttggtctcatctaacaaaccttaaaaataagacttaaagggatcaaacaatttccaagtaacttaactgtattgcagaacaaagctcaagaatacaaagatgttcagcccaactgaattatatataagaatcttaaaaatacaatgtaaaatgaggggggaaatcaatcaactgaaaccagtacagaacttatacagatgttagaagtagcagataaggacaagtttaaaaagtttaacgagaaacatggaagacatataagagaccaaaataaaaactccagagatagaaacctataatctccaagacataatgcgctgaatgtcatcaataacagatttgacattgcacccacacccacagacacaagatcactgaccataataaagtagtaatagaaattatccaaaatgaaacagaaaaaagaataatcatggggggaaaaagtgagcatagaacctgtgatctctgggacaacttcaagcaatttaatatatctgtaattggaatctctaaaggaatgagagggatggagagataggaaagacatatttg

SEQ ID NO: 56296 - DNA, 2568 bp, Bovine  19866881251355
  misc_feature (1)..(1): n is a, c, g, or t
ntgtgtcctggttggttcctattttagaaccttatagctttttggtgaaggtgaaaagtcatggtataaattgtgggaggcaattagcaatgttacctggtgcacaaataacccttcatatatgctagtcattgtagttatttttgttagggttcttgggcgctccttctgatgtacaggaggaaagatcagggtgtcaactaaaaccagttcatagtctctaaactgaatggattcatcagatcttgagccttccagaaacacctcaacccttggaaagtaagtaaaggtccctgagaaaggtgagcagtcaaaaacattctctttctactgcttatatcagaaaaaaattggtttctgttactctgagcttttgaggatgagttagaagaatctcaccacttgtacattgcgatgaggttaatgaaaaagagtaactaaagggaaagaaaaagtccgttgggtcttaattagtatctgactatatgccaggcactctacaagacattttatataacttatttaattgcacccttacaagagccctgtgcagtgactactagtatttttcctattttacagatgagcaaaccaaggttcaagtttcttaattaagcaagttacagagttcataggaaagggatcaagaatctcatccatgactctcagaccccaaagtcagctgaagtgacaagcttaaactggaagttacctcctgtttctcagagacatagactgggcctcccaactcccgtgagaaaaacccagtctctcctcttctccttctccctcctgcccgcctgcccctgccacagctcaaacaacctcgtcaactctctgtttcaagatgttgtgagggccctgtgatcacagagcccattcccacaccataaattatttcctacagttttgacaccatttatttccatagcattatacactccaaccttctgactacttaagatcaaaaggtatgctccgggctcacatctcactcagctctcagactcgatgcaccaaattagacccaacagcagaggctccaacctgccagggtctgtaatgttacatcactccgatagtttagcccatctttatcaatggcaaaggagaaacgaactgatccacgggggtggggcttccatggaggaggcttaaagatgtgacagttgaaggggagtgttggggatgttcagaatcagcctgggtggtaggaattcaactggctgtggaaaccgaggccaaaggcaaagctttgtaacaggccagagaaggaaaagctccatatggggaactgtgagctgcccctgagagaatcatagaaacactagtgaacaagagggaagagggattgtggctggaatcagcccgggctcagaggttctggaaacctgtggaccacatactcattagcagatggatctgtttggaggagcatgcactgatgcagaaagcggaaagggcatctatttttacatcactatttttttgagagcctgatggctcaggtagtaaagaatccacctgcaatgcaggagaccctggttcgatccctggatcagagagatcccttggaggagggcatggcaacccactctggttttcttgcctggggaatcccatagccagaggagcctggagggctgcagtccttggggttggaaagagtcagacacgactgaagtgacttagcacgcacacatgtaaaatgaataagacacatctcctgctctcatagagccccaaacctaaaaagatacacagatggatgaacagatgctttttattcaagttctgaaatagaggaggattcaagggagagaatgaacatctagaggggggtgatcaagtcatcctcctctcccacccacccctgtgacctagcattgaggtcagtaagaggcactgggggtcgtagccctggataccatggtgcatggcttattttaatcatctggaccaagtttggcaaacagcagagagactgccttgggtttactgtgcatataggtgagggatggacaggagaattgggaaatcccccagacatgtggattggcacctgactgtaggggcatgcaggaaagaagacccttgatgacggtggtggtggccgtgagaacagccagcatttattggatgtcctctgcctgccaagcacagtgctgagaattttacatggattacctcatttcttctttccagcagacttgtgtggataagtattcacgtaaataaccttcatttaatgggtgagaaaaccaaggctcggaagagttgatgggatccattcatggcctcacggctagcaggcagagttagtgtttgattctaggcaatttgcctttggcaccagcagcccagctaagatgggggaagcaggcttgaacacccccttgggttacagtctgattgctcagcacaaacctctcatgacaaatgatgttagcgcacactggagaaacttcatgactgagcctgcttctcagcactaatgtagcttgacttgaggctgatattccacttatctccccagaatgacaattaggaggagaaaaaaaagaaaga

SEQ ID NO: 56297 - DNA, 1916 bp, Bovine  19866881277393
  misc_feature (1)..(1): n is a, c, g, or t
nggacaatcagttttatttaaaaatctctacaaattctgcagcaaatataggatgatgagatataaaatagagatgtactgaagccagaaggtaggtacaggaagttcattatattgttctctaatctttaaaagaaaagatggtgatcaaccttttaagaataagcaaatgagtttacatacgtattttcaaagattcaatttatgtgtatattctctaattttctgctaggatttcctactttctagatttctctgtggagaaggaaatggcaacccactccagtgttcttgcctggagaatcccagggacgggggagcctggcgggctgccgtctatggagtcacacagaaacggacacgactgatgtgacttagcagcagcagatttctctgactttatccaaacttaaaatcatgtttaacatttccctctaacctcatatttcctacaactgtcaattaggtttaaaagcttcattagatttacatgcaatttattttctttttaatgttagcacatcatgggtgggactgggtattatatattgcatagatatgtctaatttccccacttttagtgattctaagactgagcagtgggttcaggtggtatcatttggatccatccatcatcaaattccccataatcctgttacttcgtggtttcagcagttattgatcattattgacaaactcttatttcattaggagctgcaaaacagtgattttctaatgatttttagggattgctggggggtttatcatcctgcttgctcttatatctgtggcttttctataaagaagctttccttcataactatttgcctcatgggtaatgaggcaatacttgggtaatgattgttggagttgggtggtaagtacataggaacttgttatactttctacttttcagtgtgtttgaaattttctgtaatacaattaaaaaccaaggaaaaaaattaaatgcataggaaaaaactgaaaggaaataccccaaacatattatcatcatcaatgagaaaatggcaggattatttaggatgacttttaaacactactgtatttccagatttattaagaaaatatatagtattacatttagaattagaaaccaaacagaattctacagaaaattagtaataatgatgggagcagtgagtgatctaatttaaatcggggttcagagcccacgtctctaagaggcatcatttgaagaaactggtttgacaaaacccttgggaatgagtgcagcaggcaaagaaacccggatcccagagcagggatgaccctagagtgtttgtgggaaagggaacaccacagagtaccatgagtatcagtcagctctcaggaagaacagagaccagccgatcctccaaaccaccccccagactcctgctgatttcactcaggagcctgtgtgcctgaagttacagaacccaaattgcacaggaaatctcaacttctgcccccactgggtaggtagaaggcagaaaacccgaaaaccctaaataatggatcgcagcagctctgtaatgacaaggcaaaatagtgataattaaatgattctaatagtgtgtcaagatgaaggataacagtcttggaaaatgaggttggtaaatcattacccctcaggctcgcatgcacaccccagttagggcgtgaaaaatgcagaatgcaaaatccctggctgcccatcttggttttgcacaatgttggctcccaccctattagggttacttctgagccaagcacagttgggctccattttcaactctgagggaaaatgagagctaagctcaaatttatctcacttacggagcactttactctgtgcccccaagctctacgacagacactggcaatggatacaaaagacatctactcagactggggaaaacaggcactgccggggc

SEQ ID NO: 56298 - DNA, 797 bp, Bovine  19866881282284
  misc_feature (1)..(1): n is a, c, g, or t
ntgacataaactgaggatgacaacaggagcagctaggcccttgatttatcatgaaggctgaatgcggacaataaagacagattgcgcacagtacggctgtgtgttagttgctcagtcgcgtccgactctttgttaccccatggggtgtagcccgccaggctcctccgtccatgggattctccaggaaagaagactgggaaaatacatttccttctccagggggaccttcccaacccaggaatcaaacccaggtctcctgcattgcaggcagattctttaccatctgagccaccagggaagcctggtgcagtacagattagtgggcttttttacatttgctatacttaatacatgtactacatgtgaactcttaccattgtcagcatttcccttttagacaggaagactggagcctcgcccagtttcagaaggtccactgggtttctgtctcaggccaaccacttcacgcaggtgaacacaggttagaacagtggtggctggctcatgctaccccctgagtgtaaattctgaaactgactctgtgccccaaagcaaaagaaggacggaagtgttgcctgtgagaaaatattatgtaagacacttccccagaatgtgtggtatcgcagccacgtgaacacaaatcacttgacgtgcaaatactcctcagaaatatttatgatgaaacttcagcaccaacccaaacagccttcacagagtgaaacgaaaccataaattatttccaagaacattgtaatgccaagggaactcacttaattatccattatcccagaaatgta

SEQ ID NO: 56299 - DNA, 1072 bp, Bovine  19866881300423
  misc_feature (1)..(1): n is a, c, g, or t
ntttcatggaatttcccaggcaagaatatagtggagtgggttgccatttccttctccagaaaatctttccaacccaagggatcaaacgctcgtctcctgcattggcaggtggtttctttacctctgagccactagggaagcccagagtcccattagaatctcctagaaatagctggcgcttctgttgggggagctgatttctcacctgggcccagcagcgggggacgcatgagccattgccttgcgagcctgtgtgtgaatgacgtcggatcttgtcaagtctgggcgctgaggccagatgttctttgcatcccttgtggatgagcactttccagatggagacccctgggacctcttagccttgcccgtttcttctgaagtagcagtggcggccacagtctgccaggctgatggcgtctcccgctggttcctctccgccctgcaggtgatctgtctccatacagcgatttcgtacatcgttaagggagatgtcatatgcacacgcatgaggctcttacccagaatgtcacattagactcctggaggctttggagaaaaaaaaaaaaattcaaatccaatcacattccccacacccttaaatcatccaatcttccacctgatgccccaaaaggaagctgttagtaaaatagcaatttgcagagttaagaaaagcgtcacacagaatgtaagctaaaaatgtgaacttttttgacctatgctgagggagtggagtcaggaccgatagagctgtgtggctttttcagagggcttcccaggtggttcagtggttaagaatatgcctgctaatgcacgagacatgggtttgattcctgggccaggaagatcctctggagaaggaaatggcaacccgctccagtgtttttgcctggctagttccatgtacagaggagcagaccctcctttctctctctaagtgaccagcagagagacttgggatgtggtcagctttctgcagagatcctggcttgatctgagctctctacttctgtggttcccttcaaaaattgtccctatgctaatgtttcttggagaaatttgctttgaaaccaaa

SEQ ID NO: 56300 - DNA, 1427 bp, Bovine  19866881312097
  misc_feature (1)..(1): n is a, c, g, or t
naggcaggggtaacagctagctcagaaggaaaagaacttcatggtgggttggggtcaagtatgttagtgcttttttaaagtgtatgcattacttttggctgcgttgggtctttgtggctacacgcgggctttcctctagttgcggcaagcaggggctactgttctttgcagtgtgggggcttctcatcgtggtggcttctcttgttgccaagcatgggctctagagcatggactcggtagccgtggtgcacgggcttagttgcccgcagcatgtggactcttcccagaccagggatcgaacctgtgtcctctgcattggtaggcagattcttaaccactggaccaccagggaagtccttatatgttaatgttgaccagagcatagtgaggggaaaagatctctcatctgaccttcccattgtttaagacctgatagaagcagtttagcacaggtgaaagcgtggtcttggaatcggacagatgacttgagctgaagactctgttccttcactttctagctctttgaccttaagcaagttaacttaacctgtccaagcctcagcttcctcatctgtaaagtggggataagggccaacctgatagcaccgttgtaaagattaagtgaaatcacggtttgtggcaatctgtccaacaaaacacacttcttcttgggtcacatctacattacatttccaggtctccctgagttatgaccaatacagcatgagttgaaatgatgtgttcttctaggctagcccattaaaacttcccacctatgctccccatgctctttcctccatctgctgactgaacaccagcagcaagggagggcaaccttggaagctgttcaccgatgatggtggatcacctaggctttaattcagggactccatcaacctgaatgactacatggaccaaaacttccccatcctttgccaaccaggaatgcctgaattaaatggttaatgaaaaagaaataaatttctgttgtgataagctactaaagtttgattatctgtcatgacctttaatcatacaaatgcaacatgcttttttttccccagtagtcatgtttttccagtagttgagtacggatgtgagagttggaccataaagaaggttgggcgccaaagaattgatgcattcaaactgtggtgctggagaagactcttgagaatcccttggaatgctaagagatcaaaccagtcaatcctaaagggaatcaacccttaatagtcattggaagggactgatgatgaagctgaagctccaatagtttggccacctgatgtgaagagatgactcattggaaaagaccttgatgctgggaaagattgaggagaaggtggcgacagaggatgagatggttgaatggcatcagtgactcaatggacatgagtttgagcgagctctgggaaatggtgaag

SEQ ID NO: 56301 - DNA, 966 bp, Bovine  19866881337605
  misc_feature (1)..(1): n is a, c, g, or t
nctacttgaaaacaacccatcttggtgttccatctcactgtgtatgtaaacagacggatagcctcatagcagtgtagtcccagatggtgggtgacaagcacccacgggtccccagagacagctcccagaatcgttctgagagaggaatgtgaccacgcgcatctctcttcttctggaattggaagcctgtttgtttgaagctaagagcattccaggcagctccgtctgataagcatgggattttcagccatccaccctttgtttctttcatgttctgactagaacaccagtcatgtaaggcaactggatgagaaaatcactttgattagtgactttcctgtggatatatttcttttctttcatatttcatgtactgaatattttatgaaaatgttttcctttccgagtgagctaatgctgtggtttaaataatatgactggaaggtacaaaccctatttctcaaaacagaatcgtactaaggggaagaaaaaagcacaaacatgtaaaagccagtggggcaaacacttgagatcaggttcacctggatgtgatttccagttctcttgggattgctgtgtgctctctcagcacctccgcttctgtgagatggggacagtcactgttacaatctgacaccatcaatgcatgcgtgcgtgcgtgctcagttgctcctgtcctgtccaactctttgcaaccccgtggagtgtagcccaccaggctcctctgtccactgaattttcctaggcaagaatattgatgtgggttgccatttacttctccaggggaattttcctggcccagagatcaaacccacatctcctgcactggcaggcagatttttttttcctttttttaccatctgagccatcagggaaacccatgagggtgaggattacatgagataaggcagttatagtgtggggggtacagatcctggtacagagcaagttgtcagtaaatggtcc

SEQ ID NO: 56302 - DNA, 1940 bp, Bovine  19866881363062
  misc_feature (1)..(1): n is a, c, g, or t
naaatttatctttattattcgcccctggacatgagacagggcctggatgctgaaggcggtaaaagaccagccagggcatttgagagatgtgacaaacttcccagaggagatggtccctaaggaggccatttacaagcaactgcgagagagtcatccgggaagccttgttcatctttttcacggccctcgctgtagggtttccagttttcctcaggtcgtcccacagtttgcatgccctttccccataattagcacaacatactacaattctgcgatgtttctgcatatcaatccagtgcaggagataaggagggatttttctgttcatctaaaaaatgtaaaaactggactcatgaagattaagctacaactgacaaaggggagggcttttctagtctgtgctcaactacatttctgtatctcctcatgccttgctgttgctgttcagtcatccagttgtttctgactctttgtgactcgatgaaccccagcactccaggcctccctgtccctcaccgtctcccggagtttgcccaagttcacatccactgagttggtgatgccatccaaccacctcagcccctgtcactctcttctgtcctcagtctttcccagcatcagggtcttttccaatgtgtcagctatttgcatcaggtggccagagtattagaacttcagcttcctagcacctaaattttttcacagctttccagttggcttactaaggtataaaactttcaccatgacctctgaggaattccaaggtctggggtctgggtgctctctgattttatctcccaccattccctcctcttcatcatgccttccaggtccagatgaaccagatggaagctaataaaacagattcctagggaaagtggtcttttgtaatggtcagctaaagctctctatcatgagtttgagtaagctccgggagttggtgagggacagggaggcctggcatgctgcagtccatggggttgcaaagagtcggacacgactgagtgactgaactgaattgaaagctctctgtgtcataggttaagtttcaggagaagccactggcttagcctatataacaccaaacagccacacagtatcaattattcattcaacagggtcaggctggaccaaaggaatgaacttctaaccaagacttccccagtcttgactccatccactctaaccgtcactcagctgccaatgtcatcaattaaaacactcttttactttataataataataactaatgtgcctaactaatgtgcctagcccaaataagtccaagcagtgatactaagcatgttacatatatgaacacatttaataagaaactttaacagcagggtatcatttttattctgattttactgaagaagaaactaaaagctcagaaaaggtgaagtagcttgtgtggcaaagcctagattcaaacccgtgtaatctgggtttcaactatcatattttccaacttcagtaaaatacttttaaaatatttatttatttatttatcttcagctgttctgggtgttcattgctgcacgggcttttctctagttgctgcaagggggcctgcactctagttgaagtgcacggacttctcattgcagtggcctctcttgttgcagagcatgggctctagggagctcggacttgagcaattgtggcacctggatcagtaactgcagctggcgggctctagagcacaggttcaatagtgcacaggcgtgttggatcttcccagaaaagggtttgaacccatgtctcctgcactgacaggcaaagtcttaatcactgagccagcagaagagtcctccagtaaaatactcttgtggccaaagttaccctcaaaagccccctaaatactcttataaagtgccatacacatggtttccccctattgacacttgcatattaactcatccactaaagcttgagga

SEQ ID NO: 56303 - DNA, 1738 bp, Bovine  19866881363763
  misc_feature (1)..(1): n is a, c, g, or t
ncctgacagcctatgacagagaattcaggcacaaatgactagatcaccagcttaacgtttggtgggtttctaaatcaattctcctagaattcaaggtctcaaatgctccccccacctcattttccttatacctttataactataaaaaacagcatttcaatgcagagaattagaactttcgcttacataacacacacagcaaaatggtatcaagaaagtgtctctagacaaagacgtctgcctgaattttctttatcatctacaatgcctaactcataggaactgctcaataactgtttgtttaatgaaactaacaacttgaaaggaagtaaaatacccaccactccatttgctagaacattagagatgaaatgacaataagtttcagtgaaaggtaatcatgtataagtattccaataaaactcaaatttaggttttatataaaaaccaaatgagattctttatggctgaaaatcaaaggaagccccaaggcatgtggaggtgggtaagagctgccattatttcagtcactattgactaacaggctgaacctcattgaacttctgagatggaactaaacagccttattcacaatcatctgatggctttaaggtacattacctgtggttcacagtcttcagctcaatctaccccacttgcagcaaaacattgactcagacagaaccagggccctgcccagttcactgcaagcaaagcattctttcagatcagtgctctgtctgaatgcccagtgactgggaggacactgttgttggttggtcagcattcatctcatcttccttctcagttttatcacagggaccaccctcccccatttccatgaaggctgactttccacatgaaaagtcaacctccagtgtcaaagctggtcacatgaccggtactggtccatccatatatcccatctttctgtctatggtaatgagtgtaagagttgatctgagagtcaagtccatctgctatgacctaacctggtggtttcatgtgaaagtgagttttcaaccccctttggttgttggcatgtctcttctcagttacttgatagatgggatgtcttcctatataagcctatcaagactcaaaagatgagtatcctcttttgcatgtctcttccaagatcaaggaaacatctcacaggcagcctccagcagaaatccttacgtcctgtggccaagaacagggtcacgtgtttacctcatcaaattataagcaaggaaatgttgtataattaagcaaagctcaccatgattcaggcttctctgatagctcagttggtaaagaactgcctgcaatgcaagagaccccagttcaattcctgggtcaggtagatctgctggagaagggataagctacccactccagtgttcttgggcttcccttgtggctcagctggtaaagaatccacctgcaatgcaggagacctgggtttgatccctgggttgggaagatctactggagaagggaaaggctacccactccagtattctggcctggagaattccatggactgtacagtctacggagtacagtataaagagtctgtatagtctaaagagtcggacaagactgagcaactttcactttcacttttcaccatgattcacatgaggccaggaaagcctcctgtgaaacacagggctatccaatcctttaataaaatcaacattctactagccaaggggtaggagagtaactgtggaaaagttatctacagggt

SEQ ID NO: 56304 - DNA, 1192 bp, Bovine  19866881364402
  misc_feature (1)..(1): n is a, c, g, or t
ncgaacagtatctctgcatcccttggaaaagcagggcatgttttcctgctgacacacacaagccttataatttagcattagaaaagaaaaatggtttagaacaagaaaaatatatttagagctcattattcaagtaggagtcgcagaaaaggggcaaggacggagccagtcaacgagaaacagctcatattacagggtcacaaggaagcgggagcctgctactcagaagacaggcggcaagggtgacagggtctcgctcaaggtcaacagtcactaagggaaggtgcagaaggttgctgtctccctaagtaaaactgtcctgaagacggaactaatcccttgcatgtcccctcccctccctgtctcccaggaaaggtcagtttcactgtgaatttccacgttccagccccaacgaggcctctgcttggtctccagatattggtatcaccgttatcaagactggaactggttgtcccatcaaacctaaggggtctgtgatgcagcagttctgactcagtgaagtcatgtctgccttcgggtagaaggcactctccccccacatatgcaccccccccacctatgacttgcatttcttcactcccctgccccagctacctgctgtgtccacctgccaactaccctctccacccactcatttttaaaatttttaatttatttttaattggaggataattgctttacaatattggtttgatttctgccatacataaacatggatcagccataggtgtgcatatgtcccctccctcgtgaacctcccttccgtctcccaccctttcccaccgccctctcccaggtcactatagagccccagtttgagttccctgagtcacacagcagatttccactggctatctgtgttacatatggtcatgaatatgcttccatgctactctctccattcatctcgaaccctggcttccatgtcctcctgctgctaagtcacttgagtcgtgtccgactctgcgaccccatagacggcatgcccatcaggctcccccatccccgggattctccaggcaagaacactggagtgggttgccatttccttttccaatgcatgaaagtgaaaagtgaaagtgaagttgctcagttgtgtccgactctttgggaccccatggactgcagcccaccagactcgtctgtccatgggattttccaggcaagagta

SEQ ID NO: 56305 - DNA, 1261 bp, Bovine  19866881509101
  misc_feature (1)..(1): n is a, c, g, or t
nctggtgatgtatatactctttggacagggctgtgggctgcctaaagatctcttttagccataggacatgagtataaataagctttatgtagttacagctgctaagagagattatggatagagtgtcttctaaaaggatagggcagtgtgttgattgttacggggacgtggggaaggagagacgagagatgatcccgaagggagaggttgggtgagttctactgaacaaaattcccctgtgatctttgtcactttttaacagccctttggggaggtgattttattttaattgaaaaaaatagagatatttgtggttgaaaagtggctcagcatggaagttaagagcacaagttttgcaaccagacatccctggtttagccttaaatcccagatttagcctttgtcatatatgtgcatcacacaactagcatgtaggttgcttaatgtctctgtgcctatctccatggcgatgactgtacacgttagctgggaagatgaaatgaaaggaggtgacacgtggaaagagtttagagaagaacttggcagatcatgagggctcagccaacatgtattcatttttatgcattttatttttcaaaattagtttattactttttgttttgttttgttttttggctatgtggtgtcatctgtgggatcttgctgccctgaccagggatccaacctgtgtcccctacattagaagcatggagtcctaaccatcggacacccagagaagtctccaacatttgttctacttattcgttcttatcctttgttcttcatcttcttaatatttattatttgttcttatttatgggtacatggacataaataaggccatgacaaaaataaaaaattgattctttcacactttgaatgtgcaatgaaggaggcccagttggggtttaattattggtagttgactgcttattgctgttgttgagtcattaagtcatatttgactcttaatgacctcatgaactgcagcatgccaggctcccctatccttcactgctgctgctgctaagtcgcttcagttatgtccgactctgtgcgaccccagagacggcagcccaccaggctctgccgtccttgggattctccaggcaagaacactagagtgggttgccatttccttctccagtgtatgaaagtgaaaagtgaaagtggagtcactcggttgtgtctgactcttagcgaccccatggactgcagcctaccaggctcctccgtccataggattttccaggcaagagta

SEQ ID NO: 56306 - DNA, 760 bp, Bovine  19866881598601
  misc_feature (1)..(1): n is a, c, g, or t
nttttcactttttgatgaaactggccgtccaaaatgccttttgtctcctcctaaatgcatattcagcagctttcagctgcaccgggggttctcatccagctgtgctcactctcctgcaaactcccatgaaatcaatagcacacatccatcattttatctccaccacttagcggaagcaaaaaaaccactttgccaaagtaccctccaccggacaagacgtatcaccccactgccatcgcacccatccatctcacatacaattgtttaagtggtttggggtcctttggaatcagagatttattcctgcttcccttacgttttattggggaaggtttatcatcgatatgaaactttaattcctccaaagccgtggattaatagactcataaactttaatacctggtgctttacacacttcattcaggctgtactccacacagctggggagtaacaattcacttcaatcttctggtctcccccccaccggcaagattcttagacctttagggacatagttagattcaccctgataaagtattgtgttgtgtttaggaggctgaacactagaatcaaaccaacatgagttcaattcacttacttgctgtacaactccaggctagctgctttacctctctcagcctcagcttattcatctataaaatgagaataatatttgaagctatctcccaaggttattaattgctcatggggtatgtgtgtgtgtgtgtgtttatgtgtgtgtgaaaagggatgggaggag

SEQ ID NO: 56307 - DNA, 788 bp, Bovine  19866881803876
  misc_feature (1)..(1): n is a, c, g, or t
ntggagtaggaaagtgaaagggaaagatttctgttgaggaaggcaaagatggttcctttcacatgccagctgcaaatccttggtttcctagagcactgcatggaggacgatcctgaagatctgaccgggacgggcgctgggattccttagcgatgtctgcacagtgcacagcctgagggcacagcatcacgggagtctgccttccgagtgcacgggctttactgacagatccagaaggaccaagacgtgggctttcccttctccttgtctacggcctttattttcacaagagaggcatttcacaagaaatttcttgcaagggcaagaaatatggagaagaaacattcaataaaatctcataggtcctaacaccaggctctaagtgctgttttgttttgctgatcaatagagtaaaatatggtctttaaagaagtcaggggaaacatctacagatacagcgttgaggagaaaaatagcaccctaatgtttactaccgcaatcagttaccttttgtacaagtaaaagtgcccctgctcgcaccatgaaagataagcaggtgtttagaggctccgtggacttccctggaagctcagctggtaaggaagctgcaatgcaggaagatcaagggataggctacccactccagtattctttgacttccctggtagcctcagctggtaaagaatccgcctgcaacatgggagaccctgggttcgatccctagattggggaagatcccctggagaagggaatggctttacccacttccagtattctggcctagagaa

SEQ ID NO: 56308 - DNA, 1256 bp, Bovine  19866881948463
  misc_feature (1)..(1): n is a, c, g, or t
naggacgtggaaatccgctccagtatccttgcctggagaatcccatgggcagaggagcctaatgggctacagtccatggggttgcaaagagtcggacacgactgaagcgactgagcacgcatacacgcacatggtgattttttttaaaacctcactactgtttgggctttcccggacccacatagtccttggaacatcttgagatgctgagaacttctaagttggttgtgagaaaatgagaattcctattcttctcttttcctggtaaaaccacaaggaggcctattgcaggacagatgatctggtatctacggtcaaggtggttgttttgagctgactttgtgccctgccttctcagtgcttcggcagtaactggggtgtggtccgtattctgtgtgtgtagctgttcatccttctcccgccagcgggatgctgcacaaaactgcacagggaggctctcagtccccagcattgcaggcagcccaggaagctggagacgggaggcttctcaggtgacaggggaagagggtgataaggggtgacaagggcaggtaggtcctgccccggggagtcccgggcaccccaggcaccaagcagttaaatgctctgcctggggggtaacttccaccaggtttcctctcctgagcgtgataaagaatgagggggagctggggcatatttacacctgctccgtgcacaagtttcaatggcagtaattctctgaccttttaaaatggataaatctccttggcagtggcatatttctcaaagcttagctcagagtgggggccgaggagctgggagacatggccagaccaaggagaagattgatgagccccgaggggtctgttctggaaacctgccacacccatggccgcactcggggtggtctgggtagaaaaaagcgtgttcttggctggagtgtgagtccttccatcacctcccagatggatgaaagcaggcaggctgtttttcagattgcagtggatttattcctttgatcacctgccttcgcctgcctcctctctgtgagttctgatggatgctctgttcccgtgtctctgttgttctccgtcacggggaacgcagggcgagaatcttattatcacgggttctttaactcccttgcagcatcaccagggagcataataacccctgtggttggcagttcccttccttttatcctcctttccttcctcctccctccagagcttccgaccaagagtgcgggagaccccagagggaagggtctggcg

SEQ ID NO: 56309 - DNA, 1167 bp, Bovine  19866881963793
  misc_feature (1)..(1): n is a, c, g, or t
nctggggctttgggctcctgctctgtggattcactacgcttggggcaggtggatgtgttcttgccattgaatacaagatgtggaaactgaccactccatgcttaaatagtctttgcattcccatgatgcacccagcactctgctaggtcctgaaacatagtagtgaataaaatatagccatgcccacacggagcttgtggtctacaggagggatcagcacactcctctgcccaagggccagattcagcctgccacttgcttttgtcaataaagttttgttgaaacactgtcatgtccatttgtgtacatattatctatgactgtcttctcactccccctagagaaggaaatggaaacccactctagtatccttgcatgggaaatccaatggacagaggagcctggcaggctacggtccacgcaatggcaaacagtcagacacaattgagcaactaatcaacaacatttaacagggcagagttaagtcattgtgacagagactgaacagcctacaaagccaaaagtatttactctcagaaatccgtttatccgttctcaggggtgccaacccctggcctagaaacttgctactaaacttgaggtacctgggctaggtgcatcagcaaaaatctcagttcatccaagactttaagagctggagtctgcctgttgagctacactcattataattaaagaaacactaactagaaggtccaagcccccatcattctgctcctgtttcgcatatttaaatacttgggtaggcacagttcccaagtgaggaaaagactcctgaagaggtactttcaggagaattttcctgccagagccaacctcccagcatcagtacttcagaggaggccacccaagtcctgactcttccacccaatagggtctgcctcgctcagtaagaatgaacccacatcatcggcccagacttacctatcctatattaattataggcacagcattgagcttaaacgaaccattcggccgtatgagcggcaatattcgagccatcaattttatgacactgctcaggaaaatgcagtgatacatcatcccaccccaaatacaaaggtcaaatgatattaattaatgcggcgacacaactcgctgcagctaaatgggtattcttgattatggctccttgattggagaactaat

SEQ ID NO: 56310 - DNA, 2476 bp, Bovine  19866880425065
  misc_feature (1)..(1): n is a, c, g, or t
natttccctcatcagagattcagggccttaatgtattatgttgttaagatttgaaagccttgttccagttctgatgaacactcttgcatacaacaaacaatgccttaaaatgaaaatctattttcctttttttcctctttttcacaacattgctttctctcaactactacttaaaattcaagaagggtttattttttttatgactaaggtcacattataaaatagcacataagatggaagtaatagagtgtagccaaagaggggcatgaaaatgaacacatcaggagccggggtgctagagagcagtttctgaggtgttcattttcattggatctttaaggtaggttgacaagaacaatcagtcgcctcatagatcactgacagaacctcaagaagacagatgacatacagaatagcaaaccccacagaaattaaacaaagtgctggaagaacaattaacatctttgggaatgaaaatgctgaggtggaacattgctaatttcagggcacaaaaccaaacctgaatgacatcttcatctcaatgtcagttaagcccacaaaataagtattgtgattctgcctacaagtctggttgtgtgttttcatatcattttacaatgtcatcaatttctcatcagttacaagcagatacacatgtcccaggaacttttgtgacttttatgtagcacattttaaatctcatcccagttccatgacaggaatatgcctcaataaacaagtggactaattcttcctgagatgagtataaatcccagaataaatcccatcctctacaaaaatgactctatagctggaaagtgaaatttggaagctcccagagcttagggtgctaccatgttcttcaagcaggagaaaagcctagagctcagcaaaatctccagactacaaaaattctgaaaaatgatataatgaaaaggaaaaactgtatttattattgagatcatgaattttgtagcataattcaactttgagtttatatataatcaataacgatagtaagacatagaaaatagcatattttgagtattaaaatttgtattggtggattccacttaaccagtattttaaaataccatatttccagatgctccaatattttttcttttcaataatttgtattattttctaatgcaatttcatacttcatggggggacaaagataaatatgtgtggggggtctaaaaatagaaaagcagagtcaacagtaaaatggtctcatgttgggaaggtcttaagaccatttcatgtgcttctacttccaaaaaaaaagaaacaaacaagtcatcagtcaatccttatattccctgcaatattcttggtatatttcctgtaatataagaataatataatattaaaatgttttagctaatatggcttttaataagaatctattttattactttttatattacttatgagtgtaattattacaaagcacaaattgaatgtcttcaactccacatatccaatgaaccaccagcatgtaactgaagtcattttgctttagacaaagtgtaaagatacagcatattctaatttttttgctattctaaaacatgcaaatcctcaaacaatatttaactgtatattacacaaaaataaaacacctgttaatcattggtttggagttggaaattcagcttgtccaaaagaaattcttttccaaaagaaataatttgcctaatattttaattcttgcctaatattttaaacatgtttattattttatagtttatattgaataataaaagtaaagtgtgagcttcttcacccaagtgtcaagttcagattttgctcactgcaagagtaaacttgcccaaattcattttgcagttcatgggttgtaaagagtcagacacaacttagcaactgaacaacaacaaattcactcagaaaagtggctatataacaaacttacatatgcagtgatctaattaaaaagaacaattttaaaccaaaaatttgatttatctagaaatctattccgagcatcctgtaaccttttcttattctcattcattcaaatctaaatcaattaaaagctaatccagagactgtcctgtcattgcaaaatatatatgtgaaaatgatgctttaggatctaagctgtcatttgctttgctcacaacattaaatatcattaatatgagtttattgtttagcaatgaaacacctttcctatgttgccaccaagataagtaacttgtacttttctagttataattttccccattaatggttgaaagctgctgctgctgctgctaagttgcttcagtcgtgtctgactctgtgcgaccccatagacagaagcccaccaggctcccctgtccctgggattctccaggcaagaatcctggagtgggttgccatttcctagaatgaacataatgaaatttatccaaagcatgattagaaagccacaaaagggaagatggccctaaaacacaacagacat

SEQ ID NO: 56311 - DNA, 1623 bp, Bovine  19866880504955
  misc_feature (1)..(1): n is a, c, g, or t
nctgctgctgctgctgctgctgtaaagtcgcttcagttgtgtccgactctgagagaccccatagacagcagcccaccaggcgcccctgtccctgagattctccaggcaagaacactggagtgggttgccatttccttctccaatgcataaaagtgaaagtgaagtcgcttagtcatgtctgactctttgcgaccgaccccatggactgtagtctaccaggctcctccatccatgggattctccaggcaagagtattggagtgggttgccatttccttctccagtgagtacatgttaattccctttatttaccaaaagaaagcaaacctgctgggggatgggataactcttcccagtgcaggtgctcatgaagcacagtctcatccagcttcttacaactgaaggtgtacactgctttaggggaatggcatcctactcaggctggtaccctagactcacgtgggttgttggaggaaacccagacactaactctgctctcaccacctcatctacccctaaggggagactgactttgctgtatttcaggacatgatagagcaacacttataaatttatctgaaaataaattatataaaatttaatatagggctttcctgatagctcagttggtaaagaatctgccttcaatgtgggagaccctggttcaattcctaggtcagaaagatcccctggagaagggaaaggctacccactccagtattctggcctggagaattccatggactgtatagatatatgaaatataagaaatatatataatgtaatataagaaagaaacataagagatatgcatttgtggtggcagcctgaggaactctgcaggatcagtcttcagtgaaacaaacataaccagtggaaattataaaaacaacaaccatttaaagtttctggaaattgtcctaagggtatccaactagtgcagaggcattttctcaagagaatgtaataagttgcagtaatagcagtgagattgtggcacttgagatacaacatgcatgtcttccccaccaatccccagcttagactgatgggaactctactctggacacatgtggccaagaagatggggctccctctctcctcaccttacagtcaacagctaaagtacacttcccctaggggcacgtacccagtagtatctgcacagaggggcagatttagtcaagtttaatcagtcagactgtggattcatgtataccacaaggcattgttgaaaacagttgagtcagtaagatttatggacacctcaattgaagtaggagcccggggtcaggcttaataccttgacatgaataaaagccgaaacaatgctgcagggcaatcagctcttcgcatccctagtctccacatttgcagatacgcagatccctctgtgagggacttgagcattcgtggatttttgtattcatggcggtcttggaaccaagcccctacagatgaagaggatggactatactctgttcagcattaaacatgctaaggtacctctgtggcggtatttagaaataagatataaacagctgacaactcagacgaaacaggttcccttacaatttcacttccaatttaagaagaattagaaaatgcagaaaagggagcattt

SEQ ID NO: 56312 - DNA, 2538 bp, Bovine  19866880665496
  misc_feature (1)..(1): n is a, c, g, or t
nttaatgtgagaagggattggcaagttgatgccacagtgtgatttccctcaggagggcactgggccaggctcaaagctgtgccacacagatgcagttctacaaatgtagaagataatgactcagtggccaaataaatagtacacatcaaaatacacgtgttgacttctcagggttccctccagtgctaaagtcccaagattctttctatagtctacaaaatatgcaaaataccgaaatgaaagaatttatgccctaaggttacctcagtgtttaaaaacacaagtcatagatagcaaaagactttagggaatggataaaatatagagaggaaagataaaaaaaataggcaagaccaaagaaataaaaataaagaacaaagaaccagaaataaagaaaaccatggctcatttaatcaaaagggaaaatgctaaatatttaaatgacaaaagtggtgatagcctaaaacaagaaaataagcactttaacatgcttgtctaaatatccagaaagtatagaggaggtatggagagatgatgtgttcttgcaaactatcaatatctttcaaaattgccatttttctttccaaatcttttttaaaataataatatttaaccatcactttaaaaaatccccataacctattatttatctgacaggttcaagtaaaaaatatatatttatttcaaaccaaatatacattcattttaaagttgaagggccggtagagatcatataactcaacctttaatttttcaaataaacaaacaggcacacagataacttgatgagtttacccgagaaaccagtgaaagaaatatgtcaagaataaagaatttcacatccctagctaaacttgctatttatctgtgatatttgttttccttgtaaggaacttcttcaatgcatataattgttttccagaatattaagtgcctgtcttaaggactagagtaagagacacacacacacacacacaaaaaagatattctagaagttacacctcccaaaaagataaagctaaagatcttttatgtatttatcacataaagaaatggaaacaaatagcaagactgtgtgaagatttccgctttcttaaattctgtcaaattttatcttgctttcttatctggagaaaatacagtataaaactatcacttgaaagtgtttaaattgtggcagtcataaccaccaggcacatatccttcatatcatcactaaagaacctccctggcagggccagggaaggtgtctgaggtgatgtttatgtttgacttcaggcacggatctcattgttcgtggttcttaataaaaactgtttcattgcaatttatggtctagaaacttaagcttaaaaggaattttggagttttgaaataaatgtctgtagcaataaaaaggtaacaatacacattttataagaaacaaacaaacatatatactttgttccctaagatactacacaatgactattaaattaacagagactattatattttaaagagaaatatttagcagtagcaaaataagaaaagtgactaattgaaaattcaaaccataatggtaagttaacagatctgcagagatattagtgattctcacaaacacttgagtatatggctttaaacttagtatatatattttataaagtatttatgttttgaactataaaactagtaaagtccaaggtcatatggagtccatgaaggccttcaatattatatttttattgatgagctcacctccatgtgttctccatcaactcagggataaagcaagtccccagctaactagccaactaagtatctaagtcatcctaagtgttcaataaatgtgaacttaccttttttgggaggggccttttttttttttttaatgttatacaattttaaaggttacattccatttatagttattacaaaacattgactctattctccatgttgtacaatacctacttgtagcttgtacctctcattcccttacacctatatctgccccccgcaccctgccaaactattatccaccaacttgttctctgtatctgtgagtctgcttctttgttatattcaccagttggttatattttttaggttctacatataagtgacttctgacttatttcacttagcataatgccctccaagtttatccatgttgctgtaaatggcaaaatttcattatctttcaatggttgaataacattccactgtacttggccacctgatgaaaccagcccagtcactggaaaaacactaatgctgggaaagattgactgcaaaaggagaagggggtggcagaggatgagatagttagatagcatcaccaactcaatgaacatgagtttgagcaggctcagagagagagtgaagaacagagaagcctggcatgctaccatacatgggatattgcaaacagtcagacacatcttagtgactaagtaacaacaacaaacatagatacacacacatacacacaccccacatcttctttattcatttatctgttgatgaacacttaggtgcttccatatcttcaca

SEQ ID NO: 56313 - DNA, 1166 bp, Bovine  19866880702938
  misc_feature (1)..(1): n is a, c, g, or t
naatgattaatgtaatattaaagttaccaacaaaatactgccttttaaaatggcactcaatattaatttgattctacaatatttaaggaaatttccattttccctttagaaacaacaaaaaatatattacatgaatcattatttcattcactataataaggtctatttcattaccatgtcaatatgagactttatatatttagcgaatctactccccacactctccatgtcttctacaatgtattgatacttagcactgtttccttaaaacacctaggttatagagcaataaaaagaaatggtgttactgattacatagacagacttcaaaagtcagaatgaactgagctcaaatctcagctttgaaaggtgtttactcattttattttggtaaattattcagtcatcctgaaacttaatttctctatccatgatactgggaaaataacaactttgtcatggacttgaggtaaatttaataatttatttttaaagtctaataaaaagtgatacctacttaacattgtttatgtcattgttgaatatgataacaatcatactaatgttacaaagtaacgtccctaaaagaattaacttcttaaggatttgtgtgtcacacaatttcaggtgctttccactttctgtcaaaaaatcaatagtaaccaaaaacacaaagtatagcttatatctgagattaagcaacagtttgtaacttgacaactatttgcttattttctcctataacatcttgctaacagcttaataacaaatatgttatggtgggatatactcactagacaattattaataaatataaattgctttgctaagcttaaaaaggactcatatatagtatcatataaataataacacttttttaaactcataatgaataatcttatgaccattaaaactgttatatcaattctggttctatgaaatttatcaaatttcttttatgaagtaatacagaatatgtccctttaatatgccaaagtttacttcactatcagaacatataaatgacagaggttgtgtgatttgcttatcttttatgtagcaaatttcactccataagtggtacttccagtaaaaagaaaggcaagttatcctatttcttcctggtaaaattctttagatcaacattattttaaaaatcaattctt

SEQ ID NO: 56314 - DNA, 852 bp, Bovine  19866881236517
  misc_feature (1)..(1): n is a, c, g, or t
nccagtgatggagagccagtcagcgcaatggtgagtagtgcctgagggcccagttgttaagaaacagcagaactgcatggtaccatttctacctgaacttctacgtgtattagaattggtttcagaagcactggtgaaatctagatattacccccatctaccctatatctccgcttcccaggtggttgagtggtaaagaatccgcctgcaatgccggagacacgggagacacaggttcagtttctcagtcaggaatatcccatggaggaggaaatggaaacccacttctgtattcttgcctggttaatcccatgcacagagaagcctggtgggctatagttcatggggttgcaaagagtcagacacgactgagcacacactcacgcaggcactctacatctatcctacttcttgcctcagtcagtttggagcatgagtggagtctgtacaggtgtcttttgtttatcacccaggtaggatcttgcttcacaaaaggagagcatcattcaagtctgctatttatttatttgtttgctctgcattaaagagcaagaagaaattcctctaagtctttaaaatgtgggtgccatccttttcaacttttctggtgttgaagcagattttactgaacaaccatacgttcatttattaatctaaacagcaaacatataatgagactattatgtgtggggcactattaagcactggggaacttgctgtgaagcagatctttacatcgacaatatgccccctcttaatgagccatataattgggatccttttaggagaaatagggctttgctgtcatcatctgtcttgggaaaaaataagggagagaaggaggtactgaaa

SEQ ID NO: 56315 - DNA, 749 bp, Bovine  19866881379108
  misc_feature (1)..(1): n is a, c, g, or t
nttctcgacccagggatcaaatttgcatctcttgcttggcaagtagattctttacaactgaaccacctgggaagcccctaaatacaaatgaaatcttactgtgtttgaagcaaaatgacatggtatgttgcaaacactaggtaacagttccatggaggcacgtatccaatcaatacggaggttttggggaaaaaaaattccagaagagaaaaagctacacttccatatcacagctttctattaacctagaaatatgcaaatataaagctatccgggcatcagaggataagatagctgaatggcatcactgatgcaatggacatgaacttgggcaaaccacaggaaatagtgacggacaggggggcctgggggcctgtggttcacagggtcacagagtcagatatgactggtgactgaacaaaaatgtgcaaatataaatgtatttaactctgttttgaacaattcctagtaacaagttttatcaatagcaatgaccaacagctcatatgttttaattagatttaaaatttaatagtatttcaagtttcccaactcagaataaatttgaaaattgacacaatacagtaaaaagtttccacaaattaaaaacatatatatttttattatgtgtggcattttttaaaacgaaagtgtattaaaaagttgtaccctatggcagtggatgtggaaataagagttcaatgagatagaaactacaaagcagatacctttcaaaataaattatatgg

SEQ ID NO: 56316 - DNA, 1329 bp, Bovine  19866881561373
  misc_feature (1)..(1): n is a, c, g, or t
ngaactgctaagcaaaatttgagcgagtaagatcataaaagcagaatatggggtgaggggatgcctacataaaatagacttaagggtgtgctgccaatatagctgtctacaaacttaaagctaaatttttaaaagaataaaactaagaaaatactattttatactttattggataatctgagtcatttttaatatttaatatcttcttctcttatccctcttaatgaagaatgtggaagcattaaatcccatgtaaataacactgaaaatatgagttttgttctttcatcactttgttgatatgttgttgctggggttagaatttctccaaggagcataatgtataaactttaagattgagatggagatagatttttaaattaattttagatatcccaaaactcagaataaagtatactgtgataaaacacagaaatggtgtgtaagtattataaaaaaataaaaactcaagatatattgaaagaagaagaaagagtagtagtgaatgaattctgatcccctgtgagctgtttggattatgataagaaaatggattattatagaacacttttaagagttttgagatctggaaagaaaagtgtgagacagtaaataaattaggtggtgggtgaaggtcattttaactgtactaatttagaaacgtacagagaaaaaaaaactttcccatttcttactgagaaaaaatatatgattagatatggtttgagatcctgtttgaacactttttaaattatattcaataaaatgaaatttaaaaaatgaggctaattcagcaaatcaatcaataaatactaattaattaatgtcagttttcacttataaagcagcttaaagatggaacattctgtgcttgttaagtcattttattaagattataatgatgaagaatgtggataaaaatctgacatggatagcatttttaaaagtcatttatattatgaaccttatatttaaagatggcatagtatttaggaatagatatacagctatggggaggagggcatggcaacccactgcagtattctggagaatccctggagaatcccatggagagaggagcctgatgggctatggtccatggggttgcaaaagagtcagacatgactgaagagacttagcatacacacactcatacagttatgtttcttaggtttcttttcaaaaaaattttttttccgaatcaattgattcttttaaattcactttctgcatcatttctaatgatgcaaaattatttacttagtaaatgcaaaagtatttactaagcccctaacatacactagatgctatagtgaacattaggaattt

SEQ ID NO: 56317 - DNA, 829 bp, Bovine  19866881954669
  misc_feature (1)..(1): n is a, c, g, or t
ngatcttcttagtatttcgtttattttataagtatgtgctaagcagatccaacttccgccatctgcttgttcttattctcatgctttttgagaataaatatattctataaactcagaagatactttttaaacatctgcttaattaaacttgtgaaacttttttttagcacatacactgaaacatctataaactatttgggtggttgttgttacaaggctgtctaagcacgtaagttttgtggggaaaagtattcaccaaagtttcactacacatactatcaggccatttgtttattttttgctactccttgtttgttttcatttataagtaaccattgaagcaaactagagcaggcttataagatatgcattataaattaaagtcatctgtttgaatctccaaatatttagatcaaggcaatattctctcttgacatatgcagatagaacaaaattgtctttctgtgttcatcatgagccctgctttgcaaatgaggactgtatgctttaaaatgcatacagttttgaccctaaaattacaaactgttagcttcaagagctataattataacctctttataaggctcttgaataacctctttaaagtcctcagcatttctgcgcattatccagaaaaccaacaaaaaatgtcatatgcaggggtagggaaataaaatgctgttaaaaccttggccataaggatgggagacattggctacactgaataaccttacatgtccttagtacattcaccttagaaagtcttcttctttaatgtgtaataaaatgttctgttttcattattgttaatttgtgtgattcatcactg

SEQ ID NO: 56318 - DNA, 2930 bp, Bovine  19866880413967
  misc_feature (1)..(1): n is a, c, g, or t
nttcccagcatccaggatcttttccaatgagtcagttcttcacatcaggtgaccaaagtattggagtttcagattcaacatcagtccttccagtgaatattcaggactgatttcctttaggatggactctgtagatcacaacaaaccatggaaaattcctaaagagatgggaataccaaatcaccttacttgccttctgagaaacaggtactcaggtcaagaagaaacagaacaggaaatgggacaacagattggttcaaaattgggaaaggagtacatcaaggctgtttattgtcaccctgcttatttaacttgtatgcagagtacatcatgtgagatgtcaggctggatgaagcacaaactggaatcaagataggcagatgacaccaaccttatagcagaaagcaaagaggaactaaagacggtctttgatgaaagtgaagaggagacttaaaaagctgtcttaaaacacaacattctaaaaatctaagatcatggcattcagtcccatcacttaatggcaaatagatggggaaacaatggaaacagtgacagatttcattttcttgggctccaaaatcactgcagatattgactacagccatgaaattaaaagatgtttgctccttggaagaaaagctatgacaaacctagacagcatactcaaaaaacagagacattactttgctgacaaaggtctgtatagtcagaggtttggtttttctagaagtcaggcatagatgtgagagttggaccataaagaagggtgaacgctgaggaagggatgtttttgaactgtggtattggagaagactcttgtgagtcccttggactgcaaggagatcaactcagtcaatcctaaaggaaatcagtcctgaatatttattggaaggactgatgcttaggctgaagcctcagtatttggctacctgatatgaagaactggctcattagaaaaaatactgatgctgggaaagattgaaggcgggagaagaaggggatgacagtggttgagatggatagatggatggcatcacgactcaatgcacatgagtttgagcaagctgcaggagttagtgatggacagggaagtctggcgtgctgcaatccacgtggtcacaaagagtcggaagcaactgagtggccgaactgaactgaggttccttctcttctgagccagttacttttatcaccttattttttcattctggcctttcatttcattgttcaaatttactgatattatttataatttaagattgtagctaaagaatattcactgaaatatcaatattttccccatattggctgtttgttctaataagactctcagtgtctggaagatgacattttaatatatcagtatttcaatacaattcatctggaatttattttaacaactacactgtgtaaagcatcatggtttggagaataagtaaggtactaacactgcttccagtattttatattttcctaaagaggttactctttctcttctttgagagtgatttcttttctcaagtcattatacctattttactctttatatgaaagctttcgtcagtaactagctaggatttttgcatgtttaaatgtttaataacacttgatgaatgtctaatgcataatgagtagttcctcagggagcaatacacttttttcatgtcattgctcagtctattatgtcagagaacaaaaagtaataaaataatttgaaaggaaaatacattttaaaaataaaggagtttctaagcccaactttatgttgctaaatgacatgtctctaagatatttgccagagaaggcaatggatggaactttgacctatcattaggtcaaagttcagttcagttcagttcagtctcttcagtcatgtccatttctgctaccccaatggactgaagcacgccaaaatagtaaactgtagacagtcttttatttttatgagggcttattaaattaaaaattgtaattaatctatttcataaagtttaaaatttttaagtgctctaggagctaagaaatgcttggcatgtacttgattgttcagaataagtcacgttaacttaacaccagagaacatttactaaatattatgatgattttttaaattgagagcctaagcaagtaagtaaatttatcagaagtgttttaccatattataataattgtcttcccttttctaatattcataattttccaaagtgaaagagaaaggaaagaaagaaagacaggaaggaaaaaaagaaagatagccagagaaggcatgtatattagaaactttccagataagagccagtaagccagagttccacaagtggcaatggacaactattatctaaactgttcaggttaatattaaacatcaaaaacaaacaaacagattgagaattatatgatcaaaaaccacattgctttagttcgactcagtaacttttaaaaaaggatctatcctgttttgcatgagatttaatgactcactttgaaacttcatcacagaacttttgaatttatgttatactacatgtaatattatttaatatgtttcagaaggtagagagtctgcctgcaatgcaggagaccagggttcattccctaggttggggaggttggggagatcccctggaaaagagaatggctacccactccagtattcttgcttggagaatcccatggacagaggagcctggtgggctacagtccatggtgtcacaaagagttgaacatcactgagtgactaacaatttcacttttttattatttaaggaaactaggtaataagaataaagaaaagagaataaacataagtaaaaagaaaaataaaacagtataaaggagtgagaaagacaaagaaagaagaaaaaaatggaagagaagagaatgaaatcaaaatgtgtgtgtgtgtgtgtatctgtgtgtgtgtgtgtgtg

SEQ ID NO: 56319 - DNA, 1192 bp, Bovine  19866880725332
  misc_feature (1)..(1): n is a, c, g, or t
ntgacacatacatggaatatacagagtatataagcatgtcattttcaaaggagaccactcgatggttaaaatcctccagtttaaaaaggaaagaaaaaaaaaaacaaacaaacactgaattctctctttataaaagcagcagcaggatggttgttcagattcaagtaaaggccttttggaataaaccaagcaattttgatttgctattttacctttgactgagaaacttcagggcttgctttatgtaaacagaaatactaggttttatgtctaaagagatattcaataagtatgtcacataacagaatttgtcttttcaattatacttttgcagtttcatatcaaatgtctaatctatctgtaggctatttttgataattttggttttaatgcaaaaagactataaaggatgacaaagtgtttaatcatcccatatctgtctcacaagtgcaaaagcattataatgctcttggtgaaattacaatgatgtgcatatgtttataaatcttttattttgacacatatctgttgggggataaatttccagggtaagcatgaatgattttaatttcatgacacaccacttttctagaatcaaaatgtatttagaagctcttggattttacaattttgcattcttagttttatagattaaagagctttgtagattaaagattatttatatcaaagccttgattgtatagggaagtggaaatagtatcccagagtggtgaagtaaaccactagttcacagctagttaaacagagtaaaacagagctcagaaagcacattccaataacatacatctctgactctgaacatttgagcattttcttgtgtaattcttcatgcttcaggttttgcttttcatatgatatgctttgaggaaatccaagcttcagcaaaaatctaggactaattggcttatgcgagtgaacattctgacctggaacacatcttgtcagaagaaagaggggaataattagacacagtttatgctggatgaaatttaaataaagataaatctagaagtacttccttagagttagtaaagctactgttgtattatttgttcaaagattattttttccaataggaaaacatttttatcttaatccctgtcagaagacctaacgctattctcagagacacaaatttttcaaattagggactttaatgttttcagataca

SEQ ID NO: 56320 - DNA, 1206 bp, Bovine  19866880798004
  misc_feature (1)..(1): n is a, c, g, or t
naatattttaatcctggttaaagaaagaggccattaaaacagaatattagaaataaatccccaatgttaaagcatgaaaatattcaaaaataacctctaaaatgcaaatagaataatatgactacaatagatgattggaaattaatttatattctaagcaactctgatggtatcagttatatttgtacaatgaaattcaagtgaatcatacagaaattcaagttaatacctggtatagattctatttcattgtgtactctctgtaagcaatgaaatcacataaaaagggagccagttcatcattaagaaattacttttccatctgggtctgtgaattatttttactgggaaacaataataatttcctactaatgcatgtgtcaattgctgctataatattgtattagcaatagcaaatatttaaatgcttatttacttttatcttcatttatataaaataactcagactcgagatttcacaagataaatagagtggtgttctcagatcagataacagatttgttaacagatcgtcagtcacttctgataatgcagtgtcacattgaaccatataaactgctctttttaataggtcataaattatgaaatatcagaaaattcatctagttctattttaagatatgataaattaattttttaattccataaaaatattcctaacctactttttaagagttctaacatatttcatgtaattctggatgatttaagatgtatctattaattacattcacaactcctctctctaagaagcccagagaactatcctcatagttctagtagaatactagaatagaatagaataactattagtaggtggtcataaacatggaatgagaattgtgagtgcctcaacattcttggggaaatatttaaattaataatatgtacttcctctttgaaaattataaatttcttgaggctttttaaaaatctttcttttaattttttgcccacactgagcggcctgcaggatcttagttctctgaccagggatccaacctgcaccctctgcagtagaagaatagagtcttaaccactggactggaaggggaagatcccctgagattaaatatgagaacaaaaaaggcatcagtcatagtctattggttgacataaatgatgcaaaaattcctattataagctgggcatgtctcagacaaaaagcctaagcaataatataaa

SEQ ID NO: 56321 - DNA, 2538 bp, Bovine  19866880849113
  misc_feature (1)..(1): n is a, c, g, or t
ntaatattatgagagtgtggaatagtagttgttagattagactccctgtttaataaaataagttagtaaaatagtaataatagttcatagactttctctaaatactgtggtatatcatgcagctgagattttatttatgccactataggaagcacacttgacaccctaaaatgtctctttagtatacatactacttgtgtactaaagagacaatcaaagcccaaaagactgagacagtaaatttcaattttccccctaactgcctaaaagaaagcagatagaagacctgttccaggaagggagctgtcactgtaggctaactataatgtgaactaggtgtggacagggaggaacttagcaaatctctatttgttaaaattcctatgttctattttctctgcagggcccagcaaacatttgtttaccaaacatctgctttttcatttgtctgaaaattgccttcctgccctctgaagtcctcttttgtctttagctgaggatggtactcaaggtgaggttttcagtcatttaaggtaagggtttcagtcattgaggacagtacttaaggtaagggttttactacttaaagtgacggttttggttttcctgggtctctcccatttatatacgttattaaactttgtttgattttctcctgctaatatgcctcatgacaacttgatccgtaggccagtcagagaagtctagaagggtcgtggaacatttcttcctctctgacactattctgtttgtccatcttccgtctctcatccaacaaagtccaaatccactcatcctgaagactcattcaattattactacctccaccacctctccttgattccccaagggggagattatattcttaattcactgaatattttgtgtaggattttctatgacatttatctccttctatcttaaatgatttggtataacataatataatgtgattttttataatataatatgttttcctgataaaccatagtattcctgttatcctaaagcatacaaaagaatgcttgctacagagtgaagttcaatgacaaacacatagacttcttaactatagattcaattataaattcagccacttaattcttaatttctcatggtttcagtttcttcatataatcttccaatgataatgctgctctcttcttacctttgaaaagttgtacacacctttaaaggatgaaatgtttactgagatatcccatcttgtattatgcttgcaatttaaagtggaaatacagcttaattaaatctgaagagcatactaacttcttgccttaaagctttataacctgcaactctttcatatttattactttgctagtatcaaataccacataaaatatgaccaatgtttaatgtaaaatgatgtgataattactatcattattcatatgaatttttagagatttaagtaattttttccaatatcagacagctgatgtatgacaggcataattcaaacatgatctttttatatgaaacacagtctatttcctgtctttttggaaaaaaaatacatgtgtatatatttggaaagccatacatatgtgaatacatataaaaatattaaagacaatctatttatctaaactgccctttaacttagattactttgtgattttcaaataccaaccagtttatttaatgatttccccccccaccttttttttttaacacacactctgaaaacattcctttctgtttttctgtctcctagttttttttctttggaattatttttaaagaataacctggcatgtagctttttaaaacaaaatcatctttacaattttgcaatacaaagtataaacattcaatttgaagaagtcttaaagcatttatacatatatcattcattctaaagtatcttaacgtaaatataaattttcattcatatgctaattttgttatcatatatgtaaactattaaacaactttattttacctataaggtaaaagagtcactgtgtaaataattaaattgcttttgataagcagtgacaaacaatgaagtactgttcctggtctaaaataaccttggaaatagcattgtggaattaatagctaaactagaatcaagaactgatagcaagggctactgaatatttctagctctttattttagaatattaaatcccttacctcttacattcttttcaatagagccaaacccttaaattttatcagttgtatcacttctcttcagtagcagcttgtactttgagatcaagcaaacacatcatattgggtaatgaatcaggaaaagaaaaaagaggaattagaaaacgaatcttatactcacggaatgttctataaaattcttcaagagccaggtgcttgtctgagttaaaatcatcatatttcagtagatcatacaaagtacaatcagaaaggtccttgccaagttcttcctgttttatcacctgaaaagaaaattaaaatcatgcaattatatcagtgtcttaacatttctataggtaaatttaagtctacacttgagcaaagaactgaacttat

SEQ ID NO: 56322 - DNA, 1625 bp, Bovine  19866880887409
  misc_feature (1)..(1): n is a, c, g, or t
ntttgccttgcttctatggagcccaattaccctttcaaaataaaagtgtattaggctactgaagttttattttattttttcaggatttaaaattattggaatgtagttgatttacaatgtattcgtttcaggtgtgcagtgaagttatacatatatgtatagccactctttttttagattattttctcatgtaggtcattaaagagtactgagtatagcagctgctgtgctatacagcgggttcttattagttttctcttttacatatagtagtgtgtatatgtaaatcccaatttttaaatgcgcatttaaattaatcagatgacagaggtgttttccaccacctcaaactgctcccatccccagcctcccctagtttcacatttgaacaccttatttctgcccagctttagaacgttggtctccgagtctgcgtgttggtcctaggttgtgcattgcatcacttgaggtcctgaggagactcttgttcttgcccttttctatttataattgctccacggttaagtcaacttgtagaaatctttgactcactgtgtaaaaaatttggtagttaaatcagtaatgaaccatttaggaataaaacgatattaaaaaagttgtactaccttgctagagttaccataacaaaatatcacaaacctggtgccttagataacagaaagttattgtctcacatctgtggatgctagaagtccaaatacaagtttggtttggttcctctgtgggctaaatgaaggatctggccttggcctctctcctcagtttgtagatggccatcttcatgtttacatggcatttttcctatacacatgtctctgtgtcccaatttccctttttatctaaataaaaaatcactcatactggattatggattactttaataacctcatcttaacaagtaattgcatttgcaatcaccctgttttcaaataaggtcacattcttaggtactgagggtcaaggtttcaacaaatgaattttggccaggggacagaaacccatgatacaagtagtcacgtcgaacacatttttaataacttaagtgtaaatatcatgtatatgtaaataatgtgaagcatagttgttggcattttcctttacaaatactgcattaaatgaaatttggacaagaatgtttttcttggtaaatttaaaaaataaaagtgcatttataagagagcttgattacaacttgtatgattaaggaaattgtgcaagtaatttaaccaaaatatgcaaataaatgagaatagtcagaaaaacaagtcaagtgttttaagtattctcaaaaatatgcaaatcatgagacttactttctagtttagtattttgttaaggcaaatagttttgattttgtatataagttttcaagtaagtaaagcattattatttgaatttgatcaacaccaaattaatttggttaactttctactaggtgttcccactatatttttgttcatttttgtaagcttcagtataatgcaagttacactttgatcatagtgtattacattaatcaccctatctctgaatcaacttcagtgatagcttttctaagttttattttattcttggtcatataatacttggtttcaatgtgctat

SEQ ID NO: 56323 - DNA, 2900 bp, Bovine  19866880945223
  misc_feature (1)..(1): n is a, c, g, or t
natttgaagactacattggatgggaaggtggttagatcaacataagtttattcatttctctattttctgattttttaataattcatattatcttttcaatatgacagtttaatagcatcctatcattgcttctatagtatatatttttatattgggacctcttcttccatagctagtagaagttatttaatttccttagctttgctttaaagtataagtcttatgatttttacacaaattagaaaataacctcatctcattgttccagtaagccttaaaggattcagcacttttcatcaccatagcaactaggagcctaaacaggaagaaggttaaatatctataaaactctgactataatttgatatatctgtttcacaaggtcttctctctcatctttccaaatatcaaaaatcacaagacatcttctgtcaaacatgtggaaaaatactatatatttatacttcttagaaattacagggacttggcagtgtgtattttaaaatggatttagaaaagtaggtggaaaattatacttcagatcatttcaattaaatttaatttttaaaaagaatgaaaaaattttaaagcaaatatttaagctggtattttgtgccaggatatttcttctcaattgtttgaatgatgcaggaatatttgcaggtcaatcagattctttattttaaacttgaacatgtggcaatatgcaatagaagtataattcaaaaacaaggtgtgttttaggtattgctattcagtgaatcatttttatgacaaaaactataataagctaggaatggtgcaaaatccatctctttaaacaaagctagaaaatcatattaatttataccagcctcattacaatcctaattcagtcacttcaccattactttctgtccaggttgatatgcacattcacagtcattgtcagattcctattactacctttccctgtcatttatcattagtgtaggaaagaaagtcaacgtgataaggaatatataaagggaatatagtgagtaaaatgaagtgtttcaaataatattccttgcctattatggtgcttataagttaggaaaagaatgttatttccttttttgtttcctttctaatattattataacattgttcatatgacaaacatgctaatgagatattattaagcaatgtataattatgaacaatttataaattagcaaagtcagttaaaagctagcctcttaccccaattcccttctcagagttcatagagatgggaaaagtacagaactgtgatgaaagactcaggtgaagttatactatgggaaattgagcctgatcctatgctgctttccattattgaagcccagatcaaaatgaacccttgaaaggctgagatggagaaagattttctatctagaaaagtcaaagagaccagttaataatgtaggcttttaggcatggttcacatcattatcaaccatgatggttcacatcattatcaagcatgatgggcaatctgttctccaagtcaggtactctatccttccatatttttagctattaaatcaattaggttatcccaataattgctgtaaaactggcaatatggactttaaggaaaagaataaagtaagacagtgaatgacatagaccctctcttattgtctataaaactactgcttggattttcagaaaaaaaaaaaaatatatatatatatatatatatatataccatggaaaagagaaacatgcagccaggataggaatatgattggttatttcaaatgtcaatatatgtaaatttagagtcattagttgtttgcatgaggatggtaacagtactatgtataactcaaaacataaaattaatcagaagcctctaacttcagaggagaacatgaatcaatgatatgcacccaggatataataaaaatgtaccagatattcagatcaaaatccaatgtgtatccaaggcaatattttggtcaatgtttttactggtgattaataaaacagagatatcatcaccattaaatatactcttatcttccaaaatggaaaagcaaaactaacaacgcttttgaaaagtgttccttattaaaatcgagacattttcatcatgttgaatatgctttcttaattctcaatatccatttgcttctcctatatgccttgctctatgtctaaaaactaattttccagcatctcttgctagatattcaagatgcagattagctgttactgattttatgaacttagaagacatagaaggcagaaaggaagccaagaccatctgactgatgttttattcttttattcagcaagaaaaacctacgagggcataggtatctccttcagtcaacacctttctgagtgcttaaggcaactgcagatttagggtggcattttcatcctgactttcttatcccgtaaccaataggttcagtagtgacttcctgatttttgctcatgcagcctttccaattattttgtaaaattcctagattaaaggtctttctgtttaaagtatctggaataattttgatttttggaagaaaatctaactaatataaagcaacaaaaagtagaaaatgatgttagtctatttgtattctcaaaccaatcttttttttttttttttcagagcaaactacatttactgtgaaatagaaagaagtactagaaaaaaacacaaaggaaaaagtctttcttcaatatcttggtctataattttccagttatggttcaggattggtgtgtctgtgatggaactattaaatacggaatgttttcccttgatcactaagggagcaatatgaacagggtttcaacatcactcttcctgtgatctatccccttgggatccaaaaagtaaatgaaagacatcattaaaaaatatcatagtaaagaatattaaa

SEQ ID NO: 56324 - DNA, 1139 bp, Bovine  19866880951895
  misc_feature (1)..(1): n is a, c, g, or t
nattgtataaatgaatgcagtttatgtaatttgaaattaatttaagtgctataatgattacaaaggtgtaaatgagaagtgccacatttagcgttcagtgtgaaaagaatctacctaaaaagaggaaagcagtcaaacaaagcaatgtttgatattactatatcaaagttttgtgtaaggaaaaactattgcaaattcagaatcaaatccttttgcttacatccttcaccatatgctcatagctatgaagcttgtaaatagagttgtagcattcaaaagatattacaataactgctgctgctgctaagtcacttcagtcgtgtccgactctgtgcgaccccatagacggcagcccaccagaatccgccgtccctgggattctccaggcaagaacactggagtgggttgccattgccttctcccattacaataacaatcccccccaaaattaggtggctaaatgtatctgaatgtatacaaggattatacacaagaatctggatgtatggagtgactaaatgagacctatacataatagagtccaattccaattaaaataaaatggcttaatcttatttttttcattattgaatctgataaaaataaagattctgtcactgaaaactcaatgtagattcagtgcaaaagtctatatatttatacttagattaatatgtaaatacatttaattttatcagaaaataaaactaatttttaaatattttttggtccctgatgaaaatgctgccctgtgattttacttaatttgtaaatcagtttcaatactatgttcagtttgtcatctgtttttcagatacactaattggagtgtgcaagaaatagaaattggatattccacaatttactgataagacttgaatgaaaaacagagataaaattgtattcataaattaattttgttttccctgaaaattagggaaagttttaattcatggtgcttttgctttttgctaacaatttagaatttctcagtgaaaaataatggataatcaggattcggattggatcagtcgctgagtcgtgtccgactctttgtgaccccatgaatcacagcacaccaggcctccctgtccatcaccaactcccggagttcactcagactcatgtccatcgagtca

SEQ ID NO: 56325 - DNA, 1298 bp, Bovine  19866881005072
  misc_feature (1)..(1): n is a, c, g, or t
nttaataatgactttctgttataatttttacactcccagtggagtaattaaatacatttaaatctatggttttctatatagtacaaaattactgattactcaaaaataaatcaccacatctatagatttactaggcttcctatcacattttctttcttttcagctcatttaaaagatttttgtggtttttatgttttagattcacagaaaagttgcaaacataatgcatatagtgcactaagtgataatcatgtaactaacccctagtatccccactgttaacctctgatttgtatgatatatttgtcataattgttgaatcaataccaaagtgtttttaataaagtctgtacttcattttgagttctttagttttacctaatgtcctttttcttccccaattatttcatgaaggatatcccattaatttggttattgcattctataggacctacagtgaccgtgaaagtcattcagtcgtgtccaactctttgcgaccccatggactgtagcctgtcgggctcctctgtccatggaattctccaggccagaatactggagtgggtagccattcccttctccagggtattttcccaacacagggatcaaacccaggtctcccgcattgcaggctgattcttcaccatctgagccaccagagaagctacagattcctcttaaatgtgatcttgcttgctccctagtttttcagaatcttgtaaatgttcttatctgggacttagtttctaaacatatttatttctttttagatcactctccctagcttaacacagaaatgttgctttttaaataaggccaatcaagtccaacttcaggaagcatttcacaagaagctgttttcacaacaggtaaaaatggaattttaaatctacaacacttctttgatgcttgttatttccaagtgtgtcttataacaaaagctgtaaggtttctttgtcatacagaattatacattttactattgtgagaaaatacaaaatagagtgataaatccaaattgaattcccatttttgtacactattttagttaagattctacatgagatcaattcactaatctttctctgaaggtttctagaagcattttttgtttgtttattcgtgtcacattctgagtttgtctacttgcttaggtataggaagtcataaatgactgatccattttctttatctgaatcacaatgtgagttacctagaacttagcattatctgaattacctagaactttgcattatctgaatcacaatctgagttacctagaatttagcatgctattt

SEQ ID NO: 56326 - DNA, 1916 bp, Bovine  19866881091494
  misc_feature (1)..(1): n is a, c, g, or t
ntactatttggggaatacagcaatgaataaggcagagaaacccttgcccttatgcatcttatattctacatcaggggttaccaaatatcttctgtaaaagaccagatagagtacattttaggctttgctgaatattaggtctttatcttagtagcactaaatctgcccaaaggcaataattaaacatatcaacatatgtattttctaataagacttttatatatggatgtgcatgtgtgctcagttgttcagttgtgtctgattctttgagagcccgtggactgtatcctctcaagatcctctgtccatggaattttccaagcaagaatagtagagtgaattgccattttctactcctgacccagggatcaaacacatatcttccacgtctcccacattggcaggtagattctttaccactgtgccacctggaaagcccttatgtatgaacccctaatatataaattttatataatttttttgaaagcaccacaaaataccatttctcttttaatccttttttcaaccatttgaaaatgaaaatagcaggtttaggtcatacaaaagtaggaaaagtgaaatggatttggcaagcacttctaggtctacattccacatgagaaatctgacttagcttatgatgagcttggatgctgtgggccatcctcgagcagatatttagaaaatatttgaaagagtagaaggtagaaggaacaaggtcaggtgtaaacatggagagttaggaatccagcacaagagaattcagagcaaggaagagagagacaaaggaagactggaaggagtgcagtgagccccaggatttaaatttgcattagaacttaaaaaaccaactgatttcctttcatattagattccagaaaagggaaaaatcagactaatattctacagagaagaaaaaaaagatttctgaaactatgacacataatttgatataaagcagttcactcagagatcaataatgtttaaaacagtttaaaattaatattatcttttacctagaccttctcatagcaccacatggaaagatatcaggacatcaaaagtgagggaaaaaacagcatgactgctaaatagtctgatccatatttcagactttagaataaaactgagaaaatacagcttatcatgaaatattcttaaaaatgaatcaattaactctttactatggttttgtgaataaaatctatggtccaatctttcttactatttcatgatagattgttgaatgatttttaatgattgttagcttgtgcaagaaaactttatcacattattcatcaccatacgatatttatactcaatttttcctcatagtaatagaatactttcctgatgattatacattttggtcaccatcttagacacgtccttttccctcttcttcaatatacaaatttcttacaagtctgtaaactctattcctcagtgtgtatttaacactgcaaaaaatgtgttttttgtgacatatcaagtatgttggacaatttgaatcattagtacctgctgtcatcttgagtttaattgatggccaaaaagcaaagtgatataaaagtcttactttccgcaaaatttttcttggctgagtgctatcagtgtcaaaaggtaaaagcaaaatattttattttaactccatcatttctaatggcagttgcttcatctgacatgtttttgggaaattggggtgagggagaatgaatggagagagaagtataacagaaatttgagtaaaagcaatgtaagaaattaaacccaacaaaactttttacaaccccttataaattactctttctcagttcagtcactcagtcgtgtctgactctttgtgaccccatgaactgcagcactccaggcctccctgtccatcaccaactcctagaatttacccaaactcatgt

SEQ ID NO: 56327 - DNA, 1585 bp, Bovine  19866881263022
  misc_feature (1)..(1): n is a, c, g, or t
ntatgcttattccaataaaacattagcttttttagaagatcttttctcaagaaggtggcaatttattgtatcagtattaggattcctaggtatcatgctagtggatttactatttctttcaaagataattttttcctttatatcctgttctacaaaatgtgtttaaaaatctaatttctaatacttattgacctctgcctcacgttgttaatatatattatctcattcaacctttgaaacaacctcttgaagcagggactattattctcctagtttatgaagaggagattaaggtggacaggataaagtatttgactgggccatgaagctaaatggaggtggaaactgattggcctcagaaaggaaattctctcacgatgccttctctcaaggatttgtgttcctctttgtttcagcttaaggtatgattttaccaaaggtagaacctgagtgtgatgcttttgtaataagtgtcagtgattgaaatctgtttagtcctcacttcttgctcatcgttggtgtgagaaaagagttgtgtgaaaagaatgaagcaagtatcattcagagcacaaaaagattgccttccttttgggcttttagaaagccaatgaaaagattttcctccatgagtttaaaaatatctggcaccttacaagtgacttatgaaaataggctgaataaattctgaaaacagagtgattgcaaagtttatttgcttctatgggaacataacaaagaagccagaagcaagcaaattcagtttatcctgttgcttgtgtgtcagagatgcccctgaggtgtcttataataatgttctatgaataattctgtcttaacaacccaggtttaataaggacaagtaattctgtttgtcacactgcaaactgaaggagtgtttcagtataaaattctaaaaattgtagacaatattgaacgagtgaatgatattaaataatgaactagtgtagtttttttttttttttttttctatactggatcaccttaaaagcaactgttctctgctaagcctttcaacccacagtattataatcaggtaaaattatgccttcatcaacttcctcaacttgcactatccagttttattttactcttgtgtatcacactgtaagtaacatcaaatatttaaagagttaaggtttaaaaacatttaatatgtttcaatttcttcaataaggtgagtaaagaaaaatggcattcttttcacatataggctaaataaaattgctaaaattaaacacttttaaattttttcagtaatgttgaaatggtgcctgttgttcaatttctaaatcatgtccaactgtttgcaactccatggactgtagcatgctaggctcctggcagatagctccgttatctcctgggagttgttcagattcatgtccgttgacttggtgatactatctaaccatctcatcctctgctgcctctttcttggtttggctttattctctcccagcatcagggctttttccaatgagttggctgtttacatcaggtggccaaagtactggagcttcaacttcagcatctgtcctttcaatgaatattcagggatttattt

SEQ ID NO: 56328 - DNA, 2033 bp, Bovine  19866881363523
  misc_feature (1)..(1): n is a, c, g, or t
naggtagtagaaaattttataatattaaattttgaaatttaatattaaatttaatatttggagcatcaactatatcatctcattaaaattaaagcctttttaataatgaaatcaataattttcttatttaacttaaaatagcatatgtttatatgaataatatttaacttattggaattgtcaagggaaataaaaagctttccaatctaaataagatacattaacatctaactgtatacagatgttcagagaagccacagaaagataattgcactttgttaccaatttagcaatctttcctgctctaattaaaggaggaaataaattatcttgtgaagaaattgctcataacattaacagtacaaatgctaatttaaattatttagatatatgatttattctgtaccacattaaagatttgtcacaagtttagaaatagtctaaatatgtttaagaaagtcacacacaaaaggtaaatattttgtcctattgatattaaagggaaaataaaacaagaaagaagcaaattatataaaaattttaagctatctcctattcctaatctaaagaatgagaaaaagaatgaaacacagaacagggacacaatttgtcaaatgtttcatcaacaagaatagaaagtgatacaaggacattcttgagataatcaatgaaatgtcagccatgggaggagcgtggctagtctcactgctacagtgtacaattgattgctcaggactctgtggggaattgctcagcataagaggaatacaaattagatctctccacagttcagacatgtgcaaagccctctctcacatgaaggaaaagctgtgaatttgaaaatatctttgagcttattatttcatcctctgcctgcacaatatagtgaaacagggtaacattcccagcacctggagtaggtaaataaaacgagaacagtgggtggtggttagagaataaataagagtgatgagagagacactggtaaacagtgcagatggggatatgaatcaccagaattttaggaaaataaacagtaattggaaaagaatgcagaactctaatgtgagtttaatgtttacagatcctgttgttttccctctagcctaaaagttagatggaaagaccaataaaaaataattggcattcctgcttggctgttccttttactcgggtaaactatagaaataaatattagagaaggtttgcgatgagctgattctcttggtgcattaaagacactgatgtcccatcaagagctctgacacaacttataactgaaagcaatttggattgttggaaaaggtgtggtgacccagggaggcagctggaattcacgaatgccaccaatggcatcctgcacacacttaagggagttttgtttctccaaaactaacactgattttaataatgttagagaaattgaggtaagttttatcttaaatttttaaatggctttgacccatatatgcacatttcctctatgtgtgatttaggatagtaacagatttgaacattaattctgtgattaattggctgtgaccctagtcaactaactttgtggaatttgatgtctttattgacaaaacaagaatgttaaaaccctgcctcatacctgcatttgcttaagtgaggtgacatttgtaaagacagtatcctgtcatttttatttattcactgagttgtgtccaactcttgcaaccccatggactataacactccaggctcctctttccatggaatttctcaggcaagaatactggagtgggttgccatttccttctccaggggctcttcctgactcagggatagaacccccaactcaactcctgcattgcaggcagattctttacaactgtgtcacctgggaagaccataataattctaagtcctatagtaatctttctaaataccagtgctctaattcattaagatataccttctctatctacttctcaaattgtttctaatgatatatcttttttttataaaaaaagttgaaaaagcaacttttcatttaacaattctatata

SEQ ID NO: 56329 - DNA, 1128 bp, Bovine  19866881394039
  misc_feature (1)..(1): n is a, c, g, or t
nctgttaagaaaaaaccccttcgtatccactggtagataacattagaaatattatcacaaataatacttacacttcttttcttagtaacaactattatttatacttaatggggtcattctgtttcttatatagatactgaactataatgcccaaaaaattaatttcaaaacttataaactgtaacttgatctgtattaagacatctgtatatgcttgctaaatttaaattaaattaagttgaattaattaattgtattttattttaaaattttaattatgaattcacattatcaattatgaatgtgcttatagaatttaaatctgagcacagacattcttgcctatctttagtggtcagtataatagttaatgctccttactaattggatatataattgagatcattactaatttaaatgcccaaagcacattattttcttcccatttttctctttactgcaaatatttcttggctctcacaattgcgataagttgcacattttttcagtaccgacatcatctcacacacttgaaaatttcaacagctatagcgacattatatatacatttttaacacacacacaaaaggagatgcatgcttttacagtttctaagcagaattttctcaaaagctttttgttttctttcaagattgcacaattggagtgtgaacattactcttctcaagatattgcatgtttcagagtcaaaatgatttaatgagaaattcaagacattgacattcccagggtgacaccccagttacagagttttcataattatattggaaacaaaacctgccagcatagttgaaagctttatttacaatatttgaatgcaatgaagagtagtgaagggccttcattggcttcagaagggaaaaaaaaaaaaaaacttgtctagtgactggtctgcaggagataaacaaaacgtattctaatgtgatccaaagttaatgaactttcaagcatgcatggaaagaacaaaattcaaatgcacacatcagtgatttatatagctataacttaattattttggaggaatttccatttgtgttatatgtgctattatcgatgtaactcaattggactgccttcttatatttgcattttaagcactaagaggat

SEQ ID NO: 56330 - DNA, 2198 bp, Bovine  19866881875982
  misc_feature (1)..(1): n is a, c, g, or t
nggatgtgggttcatgactgatccctgctccttccttcctatcagatgctttgtggctctttgtttatagccttggtgtagaagagttcttctgctagtcccaggtagatttcagcaagagtctttccaatgtatatttagtttgatgtgtttgtggtggatggcgagcccaggtgcctcctaatctgctatcttgatctctccctcacaagccttttaatcttgataaccctttggggatatactataatccccattgttcagatgaggaaaccaaattatagatgtgttaggtacccaatcaaggtatggttccatggagtgtagactcccaagactcctctgttcattggatttctccaggcaagaatactggagtggtttgccatttcctcctccagaggatgttcctgatccaggaattgaaatcacatctccttaattgcaggcagatactttcccattgagtcacagggtttacaacctcccaaaactttatttttttgccatgtatgtgtcagcagtgataaatatatctacatacattaacacatatgtatatatgtgaatatatattattccttaatatatatttttctctatatacatttttaaatagatagatacatagacatatatgtacactttattttttttttttttcagtcacgtaatgttcttagatttacctataaaagcctaagaatgaaattacttggtttggttttactgcaagactgccagattctcctatgtttttgaggcagatgtagattgttagattaaacaagtaacaacataataaaattcttcatgatttgttcctttagtcatgaaatgcatcagtgattgccaagcggcaaaggtcaaaacaagaaaggatcagacgttagaacccaaaaagttttcaagacactttttctcatttctatcctctcctgtttcccactttacatacatacgtttcctttctcccagcagaattctgctaatgtaaacgttggcatttgttaaatatttcctgtatgccaggactgtgtatcctgtggatcagtacatgtactgcttagtacactctaggagatggtctatactatcaacctcgcattatggatgggaaaatttagcacagggaagtaatttttccaagggcataaagctaataattggcagaaaatttgagttccgcagtttaaatttagagcccttgtccttatggactgtaatactcattgagtatggaggtaagagctcaaggagaaagtgaaagaaggggacaatgtcaaaggttttttttttttttttttaaagtctggttctgataaaaatcccttctcctaagaacaactgaaccctgattatattgtatttctcttagacttattttttcctaatcccttgaaactttgatatcagcatattatttggatacatcaatctataaatccaagtgattttatctctcttttttttttttttgtctacagggatcctgattcaggatggctctttgggatcttgtgaaaacaaatactgtggtttgggaaggcactgtgttctcagcagagagacagggcaggcaaaatgtgcctgtatggaccattgcaaccggcactacaaacctgtgtgtggatctgatggggaattctatgaaaaccactgtgaggtacacagagctgcttgcttgaagaaacacaagattaccattgtccacaatgaagactgcttcttcaaaggtaaatgcagggtgggcctaaagtgccacctttctctatttcttccttcttctttactagtgcccttaaatttaaactctagcatcgctactgaaagtctctaaataaaagagagaaatatgggcttaaagacacttgtgattagtaagtgaatagaaatttgtatggatacaattctgaatctgttatgagaacaaagctggccaaaatatgactcaaaatttaatatagcttacagcattgcaccatatggcttgccaatcatgacagttttcttagggacacagagtggccaattcagtcaacaagccaattccatgcagtgaaatgcacctggagtgaaactgagagaagagtgaatgccaagccatcctgtgataacatctcatttcttcctgattaaaaacgatgcctacagtatgcaccacctgattcaaattacacagaactggtaaatgccca

SEQ ID NO: 56331 - DNA, 1304 bp, Bovine  19866882067182
  misc_feature (1)..(1): n is a, c, g, or t
ntgtaaagctaacagaaagacttaggctacttttcttgaagttgtgtacttgaatccacaggctcacacattatactgtagtttagaatacaactcttctgaatttagagaacaaacagccatatttttaaagtatgctctggaggacctactcaggttgcctctgataatgcattcttaaggagagaaagagaactgaagtaatcctttgatcagccatctatctttagggcctttaggcagttaaatgtctaaatcatttcatagagttgtgtcttatattcataaagataaaaaactttgccctgagccaatggtaaatggtcatttaatttaatgtaggcttagttctctataaacccatctcctttttgtacatggttacgtttttaataaaatgataattcttaaagttatcaccataatgggaatttgagttatataacaatttttcagaagcagttaacagttgatagaaacaaaacatatctatttacaccctgatcatttttttcttagcctagtatcatatctaggtttcttatatatttactaaataaatgaatggatttattttattaaattttaaattgaacataagaccttgataatgttatcttcaaagccagatgggatccctttattgcataagaatatctaaattcaaagataagatgatttcatatgctaagtagctatctgaaatctaaaacaaaacttagctaaacatttcagatatttttttcaaggctttggctaaaagctatacgcagtctttttatccttattatatgatgggttaaatgattttccaatgacctcaaatctctctgtaataatcccttgaaaaccactgcattatattttaccttgtctcctttgtctggatttttatcttctctctcactttccatctctaggtctcctgaggcatgtttttcaataaggtcaaaagtagaactattgattgagtctgacaaatgtcaaaattcttttctaccaaaaaaaaagagatgagaaaactacctgagtgattgattaaagcaagtgagatgaacagtgtcacattaaaaagaaaatccattatttagccaatttcaacccttaaacacctttagttatttgttaaattatagttctctaaatctttttttcctacatattatttttaatttaaagctttgtcaagaggcttatgttttcattaattcaaagagtaaacatataataccttgaaggctgtatatttaaactaaataagaaataagtaaatttaattatagctacatctaaatcattttcta

SEQ ID NO: 56332 - DNA, 1339 bp, Bovine  19866882116473
  misc_feature (1)..(1): n is a, c, g, or t
nttgaacatgcttattcagtttctatgcttattcaatttctctaccagagatctaactggcactccctgcaggagaagtacagagtcttaaccactggataaccagggaagtccccccagtcatctcttaaattaaatagagttagatatcatttctaactggagaagttaatggcattcattggagaaggaaatggcaacccactccagtgttcttgcctggagaatcccagggacgagggagcctggtgggctgccatctatagggtcgcacagagtcggacatgactgaagtgacttagcagcagcagcagtagcatatatcatttgggtaatttgggtgatcatgggctatgttttctcattggagatattttataatatacattatttgtgggctaataaagctctattaatattttatactaaacaaatgaatccactacaatatttgttagcattcacacagtgaaaaaaaaaaaaaaaaaaggattgtggttataacaaggtcacaatgattgatatcaaaatcaaattctaaattttagaatgtgaggattctttggtaacttaggaataagttcattgatcttctctcaaactggccatctgctggcctcatttctaatgaaagtcacgtttcaaaagattcactctgttctctggaggatgtggctaagccattcaactctctttacagagatgatagtaatcaaatgtcacaatgatataaaattattccgtggaattggacatttcctgctaaggcagtggcttctcactgagaagattccctgggctagacagacacaaactgaatcggaacgaaagtcaaaagcttcagcacaggagagggcccagtggtgaccctgctttgtgcctttttcacctccttgactttcccttctttcctgcctttgctttctctgcactgagaccagcagacttgacactgtccccaaggcaaaagagagcctctgttaaaactccctacgttcaaccaaagacattctgatttcagggctttcagatgaactccaaggatctgcatttcaagcaggcatcacagataactctgaagccccaggctgagcagctggagtttgtcccctgtgaatggatacaccaagatgaatataatagcaggaatttaataagaggagctgagccctgccccgataaaagacaaagataccacatatttctcgttctccagggcaaggagaccttcccatctacacatgtgcagaaaggctccttgtggagcctattatacagagtgaagtaaatcagaaagaaaaacaccaatgcagtatattaacgcatatataggaattta

SEQ ID NO: 56333 - DNA, 1302 bp, Bovine  19866880398495
  misc_feature (1)..(1): n is a, c, g, or t
ntggcgatctgtttcttctgaggatactagtcatatggaattgttcagttgctcagtcgtatctgattctttgtgaccccatggacagcagcatgccaggctcttttgccctggaggtttgctcaaattcatgtgatggggccaaatttcttttgatttgttctggctgctgtgtggaaactggaatggagttgggacaccaggggggcccagctgacagttctctggggaactaacaatggtggctttgtggacagtagtccttttattgatgctttccaactgtggtgttgaagactcagagtcccttggactgcaaggagatcaaaccagtcaatcctataggaaatcaaccttgactattcattggaaggactgatgctgaagctccagtattctggccacctgatgcgaagaaccagctcattggaaaagaccctgatgctgggaaacattgaaggtggaagagggcaacagaggatgagatggttggatggcatcaccaattcaatggacatgaacttgagcaaactccagaaaacagtgaaggacagggaggcatggtgtgctgcagtccatggggttgcagtcagatacgactgagtgactgaacaattagtgggaggtattgctctaggtactgggggatacgatggtttggacagaaccaagtctccaaacctgtttgtaatagggaggtgaggaaacctttcagtgagatggaaacagaactctaaaggtgagaagggccacatggctcctggagagggaagagccttgtaaggcagaggaacaagtaaaatcatgcatgaccctcagtgaccaagctggctaaacagatggtgaacttgatgcttggagggaagtgagtggacaaatttaggtgtcggcttcttgaactgatgcctcttcgctttcctaggggtctgcaagattgaccaccagaatcgagctggctactctgccctcatgttggcggcacttacttctgtggggcgagaggaggacatggctgtggtccagagactctttcaaatgggcaacgttaacgccaaggccagccaggtgcatagatgcctcctccctggttgagtccaggtggcactttcacttccggagccaagtctctgagacccccctccctttcctgcagagcccacaccagccctgtccccttctttccctctccccagacaggacagacagccctcatgctggccatcagtcacggccgccaggacatggtagctgccctgctggaatgcggggcagacgtgaacgtgcaagatgcagacggggcca

SEQ ID NO: 56334 - DNA, 1228 bp, Bovine  19866880518797
  misc_feature (1)..(1): n is a, c, g, or t
ntaaacctcagccggtgctgcaggtggtctgactcacagtaccccccagagacacctgaggagctctgcaggcaagaggatggcccaggtcctgcacgtgtcagcccccttcccaggtcaggggtctcgtgggaaagagggcccagccttggggttggaggtggggcgtgagggacacaggccaggtcctgtgtggcctggaggagagaagggggcctgacctgagtggggctgagggtaggacacagctctatcctgagggcctgaatggggacaactcggttctgccctcgacaggctaatggaagagacagggtttttcaggaaaggaggttggtctgagttgggagacagggtcctgactcatttgggaggttggaagcacagccctgccctgggagggttcaagggggacacagggccttgccttaggctggggaggtggagaggggcctgagacttacagctgagcattgagcagccagtggtgtcccatcctttgggccaataagccatgactcacccaggggcatcagtttgccccagaaggggaccacagtgttcagaggcgctggcttttctctctacctcagggacccccggcccagcctccccgcctgccttcccctctaaagagcctgatgtcccctactcggtggagacgccctacggctaccgcctagacctggactttctcaagtacgtggacgacatcgagaagggccacacgctgcggcaggtggccgtgcagcgccggccccgcctgggctccctgccccgtgggcccggctcctggtggacgtccactgagtctctgtgctccaatgccagcggggacagccgccactcggcctactcctactgcggccgtggcttctacccgcagtacggcgccctggagacacgcggtggcttcaacccgcgggtggagcgcacgctgctggacgcccgtcgccgcctggaggatcaggcagccgcccctgccggtctgggctccctgacccccagcgcggccggctcgacgagctcactggtgggcgtggggctgccacccccgacaccacggggatcgggactgtccacgccggtgccgcccagcgccggacacctggcccatgtgcgggagcagatggcgggtgccttgcggaagctgcggcagctggaagagcaggtgaaactgatccccgtgctccaggtgaagctgtcggtgctgcaggaggagaagcga

SEQ ID NO: 56335 - DNA, 4064 bp, Bovine  19866880551554
  misc_feature (1)..(1): n is a, c, g, or t
nggtgagcttgagttggaacagttgctctccctagaactcttgccacccacctttagggagccccccacacaacacccgcctttgatcggaatatgtactgtgaagagtgggggtggggagggggtcagccggtgccctgcccccccccagcactgccctgcccctccactctgagctggggggcgaaatctatgtccgctatgggggaggggattagcaccacctccctgccaccctgcccccaaccagaccagctagaagcgggaggcagagctgggaagacccaccccattctctgccttacctgccccagggggaccccgtcatccaggctacccccatgatggtgctacaggccctgccctggggcccacacaccccctcaccaggaagccctacatcaataaagttctgtcttgtgtagatttctgtgcccgactgtgtgtgtgtgtgtgtgtgtgtgtgtgtgcgcgcgcgcgcgcgcgaatgggtcccatccaattatccccccgccctggaagcggccacaccccctcacaggtcggccccaacagcccaaaggggacttgtaccaatacagactagagcccagtaaccttaggtcaaaaatacagttgcttcttggacttccttggtggtccagtagttgagcgtccgcctgccaatgcaggggacacaggttagatccctggtccgggaagattacacatgcccgtgggccaactaaccccgtgcaccacaattcctgagcccgggctagagtctgtgtgctgcaactacagaagcggaccagccccatactctgcaagagaagctaccgcaatgacaagcccacacgcaataaggaagagtagcccccactcgccgcaactagaggaagcagggtgcagcaaagaagacccaacagaacctaaaataatctttttttttttttttttttaatacagcgtctcttagagactctcaaagcaacgcaatctggcacctgttaccccagccaccacactccctgtcactctgccatctccagccgccctggactcctgaaatttcctcagagtccccatcttcccatcttaaggcctttgctagagctgttttcctctgccaggtgtaccctcccgttcccccttcacctggttaactccagctcacttcgcggtctcagcaaaaaaagtcgcctcctcccagaagcctcccctgacgccctcaataaggtggggggcgggggtgtcgacctgactgttcacttctagtgccctggagacattgctgaggtttgcaggcaccaagcccgtcggttgagaaacgggctgctccccagatgtggccactagggggcgccgcggcactccagtctccgcgcaggatgcggtgtgtggcctggagcgcggggatacccgagtatgcaggccttcctgccaggctctcccagggtctgtttctgcctccgccacttccccactgtgtgtggcagacgacagcctctgggaaatgccatttcctcacacggcaggaggagaccagcacacggcctactggtctcccaaacatcagaagatgggccatcatttgacggatgtcatgtgcttccttggtggctcagacggtcaagaatctgacggcaatgctggagacccgggttcgatccctgcgttgggaagatcccctggaggaaggcatggcaacacactccagtgttcttgcctgggaaatcccatggacagagaggcctggcgggctacagtccatggggtcacaaagacactactgagcgactaatactgatgtgcgcgccaggcgctcccggcaggatccccagccccaccgccgccgttttaggatgagaaaatgaagagagctggggcggcgggtgcagtcattaattctagacgtaacattcaaagtctgggaccttccaaatgcccctggctctcgggaccctccactcccctggcagaaacgcacctgattcccaaggtccctcctggaagaaggaccagcggaagcggcttcggaagtgagagtttgcccagggatgcccagagcagatacacatctcaagtgggtcttggaagactcctaagcagcccaggacagagcaatcagtccgcagccaacggatccttgtcccgcctgctgcagccgcgtcccgcggggggcggggcggggcggggggcgcgaagggagttggagactcggtttcctggggtctggcaagctgctgccttccatccttaacctctcccttcgggctctgggctccagaccagcagctccctcgggccagtctgggcgctctccccgcccccaggctcagcttccctccccggtagccgcgggcccctcccgccaaaggaagtgagaagggggctgttgtaagaggaactagggccgggagtctgcaggaggagcaggagcagggccatgcccgagccgcccccaggagcttcctgagcctgcaccccttccacgacccctccaggcacctccccagggacccagacaccagcccctaccatggtaagtcattcagggtgggccctgaagtgcagcagtcgggggcaccagtcagatggaagtgcctagaggccaccaccagaaagtggggccatgggaacgggcacagcagaccctttgggattctgcagtacagctcaggtgctccaagcatcccacaccgggcaccaagctcccactggatggtggacaagatgccagggtggggatggggcaccaaggatggagcagtaaccggaggacagaaggtggttttgaaggctcccacagtgcctgcaggtgcagggacaaaccccttttctggggcgtggggaacccagttcctagttgagtttggtgcctcatctccgtgtggccttgggccagtcacttccccctctgcgggtctcagttcccacacgtcatatttggaagtctctcaggatgtggaaggtgtttgggggctcctctccattggaaccttcagagggtcttgggatccagcctctgtgagtccaccagagctgggagagaaagctgggtcaaatgggtggtgggttgccatgatggtggcatgccggcatcccagtgtgggtgacagggtggtttggcagtagtcatcacagaagcgggaatgggtgagatgaaacattccacaccaccacgggttccttctgctggagggcagcagggaaaaaacactacacccagaagcctcaccacctgctgagactgaggtctgatgatgactgtggtgataaggctgtggagatggtcatggtcctcggtctagatccagtagcatcatgtcacacgcatgaagaggagacttggctggctataaatgtcacacctccatcccccgcagccaaagttccatggctctgcaagccacttcagctttcattttttgtcaatctgtccatgagggcgtgtggctggggtcagtcacagagctaaaagtgacaactgcagagttgctggcagttgccgcaatgtggaggcaggggttgtgagatcaccctacttcagaaagccagtgataaatggggcaccacgggccaaggacccctctggttaaccggcaagcaaaccatcaactagagctctgggcttgagacagaagcccttccaagacggagccagcccaggaagactccttgatcaaagaagcacaggaaataatttgctacttcagagaaaagcaacccctcccaaggaaaccatgtgaaatgctgagtcaatgatctgcttggccaactgggtctgggaagggagaaactcacccaagaggatcatgaattaaaaaaaaaaaagagtggaatttatccatgaggttaatacctctgtctagaggtgctgacatctttctggaggaatgctggatgccagaaagaggtgttgaaagattcagtgaaatgatgttcgtcaagtgcttcacagagcacataatgtgctccatacaccgcagaagccatattcacagtgggagttagccatggtgatggatggatgggcttcattcttggttcctgtagaagaattgggctgtgatgtcattgtt

SEQ ID NO: 56336 - DNA, 1700 bp, Bovine  19866880607942
  misc_feature (1)..(1): n is a, c, g, or t
ncctgggctcttctgccccggcctcaaagaatggagagttggaagcaggaccagcggatgaatggagaaggtggtggcagaagaccggatcctcaccagacttttacactctccccagactcagctggaggctcagaacagcaggatccagcaactcttccagaaggtggcccagcagcagcggcacttggagaagcagcagctgcgaatccagaatctacagagccaggtgccagtgcttgctccagatggggaggggaggttcaaggtggacccctgtggggtctggctgtggagccaggcaggttgagcagcctgaaccagccagacctgacatcctcctcctggtcctgtcctagatggatcacctggcccccaggcacctgggccacgagatggccaagcccgccaggaggaagaggctgcccaagatggcccagcttgctggcccagctcacaatatcagccgcctgcacagtgagtgtccaaccttttgctggactctagcaaactccccccaacccccaccctcattccccgacttaccattctttcccctttccttgttcggtccaccttactgagaaagagagaggctctggctgtgcatcctcgtgggaggacaggtctctggtgaaggggtgaccaggacatcccccctcttcagcccttacccttcctctctgggctcccctcaaacccttcttcccagaaagtcagtgggattttcccaaagcctcgagagccactaactggagcaggggttgggaaagtgggtccaagagggggttgagctgcaagggtgtggggaaagggctggcatggctcagggacaacttcctgggggttagacccttgcaggagggcgggatggtggacaaaagggtgccagtttgggagactggagccccccttgggttaaaagagaacggctgctggggagggggatgttctgacgtttggggccaccaggtgtttgttgttgtttgtttgtttgttttctgcatcacttggcatgtggatcctagttccctgaccagggattgaactcacgccccatgcactggaagcacagagtcttaaccacaggccggccagggaattctgggccctcattttagagtgtggatctgggaagggagactaaggcagggaacccccatctccccggccagtcacaccattcactcttgcatctcttaacaagtctgggccccttgatccatgcaccttgcctggctctcacggctctattgacctggaagtgctgatcgccccttctcaccctgccccgactcctacaagttctagatcctttattgtgtgtgccccagagcaccccacatctccaaaccagcatgtctgtaggtgtctgaccctggctcccagctccccagtgtctctgtcccaccctaagttcacaggtccagacctggctgacttccctgaggtcctcctaccccatccccccactggcatctgcagcagtctacagccaaccgggtgaaagttcgaatccccctcttcacacccgccctcgggctggttgctggcttgcagccctctggtcttgaaggctctcccacctcttggtcccaccacctcccccaccaggaaggggaagggtccgctacaccctcccaaatggtagccctgccatgaggggcttcgggaggggccagcaggcaaaggtcccacct

SEQ ID NO: 56337 - DNA, 1918 bp, Bovine  19866880878643
  misc_feature (1)..(1): n is a, c, g, or t
ncttctcgcccccggccccccggaggcagcgtcggggcacgggacctcaagcagagtcccgtctcttctacaaggtggccgcacccagcacccacttcctgctaaacctgacccacagccctcgcctcctggcggggcacgtgtccgtggagtactggactcgagaaggcctggcctggcagagggccgcccggccccactgcctctacgcgggccacctgcagggccaggccagcaggctccacgtggccatcagcacctgcgggggcctggtgagtggagggttctgggagatagggaggaacgcctacaagcttgggagttaagaaaaacacttatataggtcacagaaggaatcacagtggcaggggtttttattaattccaactttttttttcccctctcttttttcctttctgtctttattcagctgcgccaggtcttagttgcagcacacgggatctttaatcttcatcgtgcatgccgcatctctagtggcagcacgcacactcttagttgttccatgtgggatctagtttcctgaccagggattgaccccgggtcccctgcctgggaagtgcagagtcttagctactggaccaccagggaagtccccttccgtgggagttgttgaaacattttgagctaacccagaggattagctattttaagatgcagctaaagcaggacttagaagaaaatgtgtagccttaggtcaggctgaaaattaatgggctgaacacccatctgaagaaactgaaaaggcagtagcaccgtaaaccaagtaaaacggaatcaaatcagaacgacagagatagggccccaggggtcccgggacccggaacctgaccgaaccttctgtcccactttcccgacccccagcacggcctgattgtggcagatgaagaagaatacttaatcgagcccctgcaaggggggcccaaggggcaccggggaccggaggagagtggcccccacgtggtatataagcgttcctctctgcgtcaccctcacctggacacagcctgtggagtgagaggtacagctgtctgtctggggctgggcagaggcacaatacctgtgcctcaagatagaggtgcatgcccggcgtccctccacctggaaggtcagctgcgtgcagggagcaatgcagatggtcagcagggcagtaggcagtggacaagcccatctgtcacttccagagtccgatggcccaacagtgagtgagaaaggcagccggatagccagccaggtgctgtaaaaccatccatctgtgggattatcgtctgatcagacagttaagcagcgggatagtggtagcagatactggagcagttgcacaatggaaaatgtcaggagaacttaaccaccatttgggagatcagatttacaaccagatgtgcagggggacagttataacatcagatatttaagggatgggaaaggaagtaaagtgttagttgctcagtcgtgtccagctcattgcaaccccatggactatagcctgccaagctgctcagtccatggaattctccaggcaagaatactggtgttggtagcctttcccatcttcaggggaaccttcccgacccagggatcgaacccaggtcttccacattgtgggcagattctttaccatctgtgttaccagggaagccccaagaatactggagtatgtagccattcgcttctccaggcgatcttcccaaaccagagattgaacccaagtctcccacattgcgggcagattctttactgtcttaagccattaggggagccagctggacatcagtgattcaccaggatagtcatagagctaaaaacaataatctctgtccgtgaaaatacagaccactggaatgttggttagttgcatagctgacagtctcaaagtagcatatcgtggcagacacacaac

SEQ ID NO: 56338 - DNA, 1100 bp, Bovine  19866880910953
  misc_feature (1)..(1): n is a, c, g, or t
ncagactcgagtcctggaaaagtttggcaacctgacctccaagaaacaagagagaccgagttcttaagaggggcccagaataggaaacaaaaagaaatgaggacaacagcttgtatcaatcaagagcctactgagtgctggggctcaggctatgcctgccgcccagatcttcacagtagatattagtatttccattttacagataagccacccgatgctcagagaggtcaggacgcacagctagtaggtgctgaaagtggaactccagtctggctaagccttcctgctagcgtttgtctttctgactcaaacccccagctcagcctgtctacttgtcctccatcctcgaggcccacccaacagctgcctctgcccagaggcggcctgaaagatgtgcacatctggcctcattccatactgtctgaaggcaccgatttgagcatcaccactggaaagtggatgtgtggaggctggaagctctggagccagtggtcagaggggaggtggatgactgaggccactctgtgcaatgaccttgaagccctgagccatcaccatcccatgtggaaactccccagaaaccctggcaggtttgaggaaacttggaagcccaaggaagggaggcagagcctgggcagaaaccagtggggttaggcatgatattatgtctacataataggtcatctgtctgtgctaaactttctctcttccctttttgcttcagtggaacaacagcatcactcatcaaaccctgactacatgccaagttgtctagctgtcttccctcccaccacagctttgtgacaggtactattagaatcccattttacagaggcgggaactgaggctcagaaaggtccagagtcttgatcaagatccaagacgggcgccaactctgagtgtgagtcagccagctcatcttgtatgaatttacaggaaggtgctcgggtgagccctgcatgcagagagacgcacgcccataagtgtactgctaacctcaacaagtacctgcaagctgcctgtttaattttatacagtaaacaattataggggtaagtactatgagttaggtgtatggtgagcactttagcaattcactg

SEQ ID NO: 56339 - DNA, 1523 bp, Bovine  19866881072377
  misc_feature (1)..(1): n is a, c, g, or t
naacactggagtgggttgccatttccttctccatgcaggaaagtgaaatgtgaaagtgaagttgctcagtcgtgtccaactcttagcgatcccatggactgaagcctaccaggctcctccatccaagggattttccaggcaagagtactggagtggggtgccatggctgcagagacccaattgagcagaaggaacctcatgaggaatgggggagatgtgctccaggctgcagaaacagcatgtgcaaaggccctggggtgggagcgtgtgttccacacaatgggtagtggggagagggtgagctgtgtggacaggccggcttgccctcccactgttctcttaagagtaggtcctaggagggccaggggctcttccaggagcccccacctcagctcagtgacatcaccccttgtagttctcagatgccccatgccaagctaggctgggcatggaggagtctggagggcaccctggtaagcagcaactgctctgggaagccgtgtggctcccaccacacttggaaataccttgtgtcgaccccgacccactgcactcaagctgagctctcgggattggcccacaaagtcccccggccaggtcaccacccctccttcagggccactgtcctcctcctttaactcccttctctccaaccacgtgggcttgaccaaggacaccaagctcctcctcaaaggaggcctcagggcctttacacctgctgtgccccctgccaggactgtccttccccaagttggggctcctcattcctcaggtctcagctctagggtcacctgaagtaaccaaaacagggaaggggcacaggacctgtcagatctggaacctcaggcccagttcccacccccatcagcagaagtggccccagggagaggagagagggtcctccctctagagaagccgcttccccagcccactaggatcctccaaggccatttcctccttcggccccatgtctgccttcctcccttctcccaactccggcctctggctcccaagcgtacctctgtgagagatcgggaccgcttctccactgcaaactctgtatggcacagctcgcagtagctggtgttggatgaggaaagccacctctccagacagctcttgtgcacagcgcccagcgtgccactgcacccacatggagacagtaggctctccccatttgccccctcatggcagatccggcagaagggaccatcgctagacacagagatgggacacatgagtaatggttgagcctcctgcctgctcctgcttcactctgccctggatcgtaagctcagtgctgcccctatatactgctttttggcaaacccctattcatccctcaatgcccagctccaaatgtccttttctcttggaaagccttcccagactcccacaggtggagtgatgtgctccctccccagggttcctgcagcatcgttttaggcccagggtgggcatcacttgtacctgcctgcccagtgtctgctcctccttctataccaccactctaactggggttg

SEQ ID NO: 56340 - DNA, 1145 bp, Bovine  19866881200447
  misc_feature (1)..(1): n is a, c, g, or t
ntttttttctctctccgggaatttcccaatccagagattgaacccttgaaccctcatctcctacactggcaggaggattccttacccatgagccaccaaggaagccctctacacccactgaggaagaattgaaagtcttcaactttcttttacagctaaactatcattattttttcctgcttgactgctttcctttgtttctttattttctcacttttctgattaaatttgccctttggatttcagaggcctaggaggctaaaactttcaaacagaaaataggcgggggacatgggaaggaggaggaattgtctgtctttgggaagttcccctcaagggtcctgctcaggttcaccaaagtgaatttaaccaatcccctgttgatggacactgaggttgtgcccatctgtgggtatcacccacggggctggagcatcaaggtccttgtctttatttccccgcacgcatgtgcaagcccctgcctgtaagacatttcctccaaggggacctacctatgatgccagagatgccacatcacttagtcaaactgtcttcttttacttgctacccaagtcatgcacagtcacggagggaaaagtaacagtacaaataaatcaaggaaccaaaaggatgaaacccaccctctggttctcatcatcacacccaccaaccttcagggagaaccgcacatgtacagcatgatctctgggtcccagacacctcaacagccccacctccaggaaggcacccaaggttcacctacacctccaaactccttctcttcccccacccagggccttcctccggatgctctttcccgagaagctggacgtggaaaagaagggccgccccagcactgccggttccaagatcaaggtggacatggggagggacaggcccagttctaccattcctgtgtccatctctccccatcgcagagcctctgcccctccctctggcatctcctattcaacaagggcttcttccagtgctggggttgggggagcttggaccagcttccttaatgtcctcctaaccccctaaatccatacatgagccatcatcctaatgattttttttttttttttggtcttttggtcatttgtcactttcttcttcgttatggtaaaatatacaaaaagtca

SEQ ID NO: 56341 - DNA, 1013 bp, Bovine  19866881364485
  misc_feature (1)..(1): n is a, c, g, or t
nagtagcatatcgtggcagacacacaaccacagtgggttgtactaacagaaaagtggtgtcatagttggatgaccagtgagacagctgatcagaaaagactgtcaggcagggggattattctacagccagacagttgggctgcagggtgagtaaaaagttgcccagtcagaaggccagggagccataccagcacacagttttggcagtagagcaggctgctacacacctctatttgggcagtagaattgtcgggaagctgcatggtcatgttaattgtcatgggatgctgggtggctgttcgaccaatgagtttggcagtggggcagcctcaccactgtagaaccaagagcaaaagaatgaggtgtttgacaggcagatgaaccgtcagacagggactcggacagctagagaaagcagcagaatgaccagaaattgcccatccagatgagaaaccgtggaaggggcggccgtggtggctgcgcaccctgaaaccgccacctgcccggcccctcgggaatgaaacagagcgtggccaaccaggcctgaagcgctccgtcagccgagagcgctacgtggagaccttggtggtggctgacaagatgatggtggcctaccacggacgccgggatgtggaacagtacgtgctggccatcatgaacattgtaagtgcctccccctccctggacatggacccccaaaaatgtggagcccacctccagagtcaggaaaagggctgtcaccatcccccccatcactgatcaaatgccagtgaaacagaatgggaaggggacagggtgcctcagaaagaaagcctgttagtgaaagtagcctagcacagtggttaggagcatgaactcaggagctagccaacctggccttaaatctcagctttgccaatctttgactgtgtgcccttgggcaagctactttgcctctctgccttggattacccacctgtaaaatgggtttaatcatagtaccaacttcataaggctacgtggatacagggaat

SEQ ID NO: 56342 - DNA, 750 bp, Bovine  19866880071296
  misc_feature (1)..(1): n is a, c, g, or t
natttgtaaggcctcctcagacaaccattttgcctttttgcatttcttttccttggggatggtcttgatccctgcctcctgtacagtgtcacaaacctccatccatagttcatcaggcactcgtctatcagatctaatcccttgaatctaatccctgtctatcagatctaatcccttgaatatttactaaaatattttagtaaactgtaaattattccttaaaactataatccattaatatgtaaattatgacagatatatagataataaataagaaagaaactggacattatagtgtttgctgtcatgattcagttgtcaaaagtggaactcctttaccagatgatgctacacattgcatatgtttgttttctatttggtaggtcccagcacactttgaaagtcctgcaaggactcagctacagaaggttcagcgacagcaagtaaaacccttcatgacccttgacccccagattctcaaccaaagttttaaaaggtcacatcctcccacgccaagcagtgaacttttggtgcagcatggacacccgtctcccgagagtgacactggtctcactggaaatccactcaccaagttgctaactcttggcaaagaagatgacaatacagaatggcatgtatgtctaatgactaacttaagaaaatatatagtttttttaaaaaaaaaaaaaaaaacaacacttcaagaaatgaagtcaatatttttatagtaaacattctatatgcaaattc

SEQ ID NO: 56343 - DNA, 1135 bp, Bovine  19866880351454
  misc_feature (1)..(1): n is a, c, g, or t
ntcaccttcatcaagaggctttttcgttcctcttcactttctgccataagggtggtgtcatctgcatatctgaggttattgatatttctcctggcaatcttgattccagcttgtgtttcttccagtccagcatttctcatggtgtactctgcatataagttaaataagcagggtgacaatatacagccttgacgtactccttttcctatttggaaccagtctgttgttccatgtccagttctaactgttgcttcctggataggaagacctaaaagcctacccagggtcttcatcattctcccattcagtgtcatgaatggttaactcatgcaggcctgaattggaaacgctgtttgatgcctactgactttttgacagacactgcacaatttacataacctctcttaacctcaagaaataatagtaccttatgcatctgcccttactcccctgcagttcttttttcaatacagcagccaaactgatcctattaagacacttaagtcaaatcaatttatgactttgctcaaaactcactaatggcctttcatctcactaagaacaaatgttggtctttataaggatctgcaaggctctatgtgattggataaatgcttgacctcattttctatccctctccgtgttcactctgttccagttcaccagcctacttgctaattttaaaaactgcccagtggaaaacagggtataaaaacatgcttggtttctgtctcctcagcaccattattatttctgataatattctgagagcttccataatcttcagaataaactttccccaggtggcgctagtggtaaagaatctgcctgttagtgcaggagatgcagagatgtgggttcagtccctgggttgggaagattccctggagaaggaaatggctacccactctagtacttgcctggagaatcccatgggcagaggagcctgatgggctacagttcatggggttgcaaagagtcggacacagctgagtgactgacacttttatcttgagtaaaagtgcttttaacagatatagaaaccatgattccaagtggccaactaatacttagtttaactggatgacaaatcacacaataactttgatacagagttcaagagagttcatgatgt

SEQ ID NO: 56344 - DNA, 1236 bp, Bovine  19866880389898
  misc_feature (1)..(1): n is a, c, g, or t
ntaagcccaggatgaaatatgagtggcagtaatgactggaaggaacagatgttgtcataagacatatatttactctatgcatattgactgagggtccagagtgtgccaggtcctgagtgaggcgacgagtttacaaagatgccaccaactgagacccttcttcaataaactctcagtctaatgggagaaacatatgcaaacaaccgatttccctacagtggaatatatgaatatgttagagtggtaccaaaaaaaaaaaaaaaaggaggaagtccaactggctcaggagcaggcaagtgctgagacaggagtgtggtgtgggaattgggtatgacagaaggtttggaaatatcaatgagctggaaactaggggtgagttctaaaaaggcaatggataaagaggttcttggattttaacagaatttgtaattacatgcttaattttttactgtttttttttttcttaaattcttccccaatttgcaggtcttagctgaatttgaattttaaaaaagagagagagataaagagacagtctttaaggaaaccaagtgtaaactatatgtagaaaagtgaaaaaagtcttcagttatgtaccttatttacacatagcaaacatggtaaatttaccctttgaaataattttgtgtgcttcacacttatactgtttcagaatgaaggtataacagagcaggtttggcttgtttctttctttctttctttctttttttaagcatctatttgcatttgtgaatgacacagcaggcaagtatcatcagagtatgtagttccctgaaacagtggaaacagtggcagactttattttgaggggctcaaaaatcactgcagatggtgactgcagccatgaaattaaaagacacttgctccttggaagaaaacttatgacaaacctagacagcatattaaaaagcagagacattattttgccaacaaaggtccatctagtcaagactatagttttcccagtagtcatgtatggacgtgacagttggactataaagaaagctgagtgccaaagaattgatgctttttaaatgtggtgttggagaagactcccatggactgcaatgagatccaaccagtccatcctaaaggaaatcagtcctgaatatccattggaaggactgatattgaagctgaaactccaatactgtggccacctgatgtgaagaactgactcatctgaaaagaccctgatgctgggaaagattgaag

SEQ ID NO: 56345 - DNA, 982 bp, Bovine  19866880401118
  misc_feature (1)..(1): n is a, c, g, or t
ngaactgcgtgtcggctcgccaacagcagccagttatggcgatgccgccacaaagtttgcatctccagaatgcaattcattttttaaaactagaagttcagagccttttgtttgccaggcctcaaactagtaccagacctaatgtgtttcttctttccactatacatatttactcaagggatttagagtgcctgactagaatcatttttccatatgtattatagcaacagtgggctctttagtaccaactaaatgaagcttgaaaaactgttatatgaaagccaagtattacaaaggtagaagtaacagcaggcctgacttttctaatgttgaaatcagtctcggttgtttgtagttacagtatgggttagaccagaaggatagcaggatttactatgtctatctgcagatttggccaaatttccagaaaacaaaacaaaacaaataaaaggtttacagcccccacaatgaggaagtttctctctcaagaggtttttttcctttttctttttgtattatattatgcagaaagtatgtataatgctcccaggaagagcacagaaggaagcacatagaggtttcctgttgccaagacaattgggtgattggtaactctttctggaagatctcctggagaaggaaatggcaacccactccagtattcttgcctggagaagctcatggacagaggagcctggtgggttaccgtccatgcggttgcaaagggttggaaatgacttaagtgacttagcagcagtagaactctttctggaagcaaccctgggtcttccgtgactccatcgtgcacatctctcccagaccagtgttcctgcaacatcttcattatgtcgctcccctgtgccacgatggacaaaagatttagggcttcccaatgtgcaactccaccatttaatctccttgtttgagtgctgaggacatttgtctctataatctgtttccactgcatttatgcaaaattttc

SEQ ID NO: 56346 - DNA, 1417 bp, Bovine  19866880429313
  misc_feature (1)..(1): n is a, c, g, or t
ncaaaaaggaacaggtaaagttaattgataatatccagtatttaactcatacattcaaatgccaatagaaaatctactttaatttctaaaagaaattccaggcccaataaaagccttaacaaatcaaaagttcatttttagcatatctttattccagatttaagaatgacttttatataggttcatagaccttttttaatgcatgcatgcttggtgattcattagaatctcaatcatccctcccttctgccaaccatccactaaaaaaaaatggaaaaatcctataatgtttttaacctccagtacagggtactcatacatggatggagttaaaatctcaagaggaatatcctgaggcctttataaaggcaatatgacaactaggaacaaaattcagaagtaatatttaggattaggggatggtaaccttactgtgtgatgtttgactaatgtctagtatatataactgtacttgtttagatttatttgagaagctaaacctcttaattctatttattccatttatgcaaaatctgagtatcagtcaggctagtgttggataacaggctaatgttgagcaagataccattctattatattataacagtgacaacttctcttttccattttacaaagtatacttaaattcatctgcaatctgtctccacacaaatatgaccaccaccactaaccatacacacagtgagtcacccatgttaagggaccaggatctcaggtatgctgtttattctaaatacaatgcacgtctttatccagtaagagatcagagtatgttccttttaattcaactttaatggaaattttatcctaccaacacatgtaaccatttaattctttaccttattttgactggggtcagaacagctttactaagtgatcaagtttctctatgctttggtctacaatgtgaaataaaacaaaagatggtcaaacggcacacatccaaagtttttaaacgttgataatcattttttataaactggataattttataagtgaaatgtcttgtattattaaaacttagaacatctttatctaggggaaagaacattttctgttatacccgttagaccatacaaatcagcacagtatgtctaagcttttcttagctgatttgaaacaattcagctgtgtcaggtggaaaggtcataagagagtctcacattctgggtgactgtgtgattggtgaattaaaagaataaagtgttaaactgacattcacaatatattttcacatttatatttttgtcttttcataattcctattttattggttcttttgctttatgataaaatgcagaatggaagaaaagtgtctatgaatcacaaaccatgtgctctacttacaacaataattagttgtcaaatttgcagtaagcttattaacttctttggg

SEQ ID NO: 56347 - DNA, 1667 bp, Bovine  19866880447037
  misc_feature (1)..(1): n is a, c, g, or t
nctgtcatccccttctccttctgcccccaatccctcccagcatcagagtcttttccaatgagtcaacccttcgcatgaggtggccaaagtactggagtttcagctttagcatcattccttccaaagaacacacaggactgatctcctttagaatggactggttgaatttcgcttgcagtccaagggactctcaagagtcttctccaacaccacagttcaaagcatcaattctttggtgctcagctttcctcacagtccaactctcacatccatacatgaccactggaaaaactgtaaccttgactagacagacctatgttggcaaagtaatgcctctgcttttgaataagctacctaggttggtcataactttccttccaaggagcaagcgtcttttaatttcatggctgaagtaaaagattaatttctttctatgatctgctcttggacatctttggttgccgacaaaatttttcacctttccctcatgactggaagtgatgaaagatgataaggtatttgtatacaatcttctctgtcatgaaaattaagcaatatatgcaacatacatatgtgtatatgcaacataagcattgcatttaaaaccaccacagaactgaagattttgtggtggaatctgacattgagataaaaattgattgaaactagaatttttataaacaaatttctgttatcagtcttcattaaaattaggcaactctaaaatattttgttagttatcccatcctgtgtcacatgtgtttattatgtgtaatgtgagactcaacatcaggccacaatatctatcttgtcaatgccttcatgcagataattcttggatatccaacaagtaagaggtcattagaaccattttctgaaatgatgttatcatgtctcacatgaaaagacatcacttatgggtagataattcatgctgctgccttctgaatatctagggctcctcagcaatcagtttaaaacatgatgctcttggatcctatgtagttgattatgacacaacaggaatcaaaaaactctgcatcttttttatttccacaggaggtagcccaacatgaagaatgtgggctctacagtgagaaagcatagggtgcccttattttacattattattccacatctgcagacaaatgatggactaaacactttgggaattatactggagaagggaatggctacccactccatttctcttgcctggagaataccatggacacaaaagcctggcaggttacagttcatggggtcataaagagtcacacattaccgagagactaagcatgcgtgcacacacacccaagatggacgggtgttggtggacagttctgacgaaatgtggttcactggagaagggaatgacaaaccacttcagtattctttccttgagaactccatgaaagtatgaaaggcaaaaagatgggacactgaaagatgaactccccaggtcaataggtgcccaatatgctactggagaagagtggagaaataactccagaaagagatggagccaaagcaaaaacaacgcccagctgtggatgtgactggtgatggaagtaaagtctgaagctgtaaagaacaatattgcataggaacctggaatgtttttccataatcaaggcaaattaaagggtcaaacaggagaggcaaga

SEQ ID NO: 56348 - DNA, 1000 bp, Bovine  19866880448415
  misc_feature (1)..(1): n is a, c, g, or t
ntttcccttgtaggtcaggctacaagctggactctgccctagatcttaataggagctagtgacatagaagagtacggagcatgaagagagcacttcaagcgtgggtagtggaaccagcagtggatgtgctcactttgcaggggtagcaggcagcattgctggccccagcaccccaggttcagctgtgggggtgccagtggggaaaggtgggctgtccgcacccaagggcgatgacagcggtattttcacaggacaaggtttgcaagatgatttcagttttgtccttagctacatgtaatccctatatctagttgtctgatcataccagagattttgagagctgtatacttgagatttatttttctcttaaatcatctagagtttatttctaccacctacaactaagaaacttctgtgatacagagatataacacttttagtgttcttttcaattgttttttattgttaagcagttggcttcctgttatttttgcagctaaatagattttctaaatgtatcaactaatatctcaacaagcatgagtctctagtatctaaaaggcacatgctgttgcaactaccaggaatataaaacagaaaatttctaatcaggaaacaaaatttctaactttggtagagataaataaattttaaaagtactaatttccccatatagacagtcaacagatttacttatataatggtatcttaggcagaagtcataacatatttcttcatacagtggaaagagttatttattatcactttctttaaaagtcttatctaactaagacttaatgctcctggttataacatggtctttaatgagttcttttattttattctaattttgaggcactgcactccctgatttaacctggggctaaaattgagtatcgaaattccagtgtggtttctggttcatcagaaaacacactgagctttccccaaaggctcatttctctatgtttataacagaggaggaggaatacaggataag

SEQ ID NO: 56349 - DNA, 3630 bp, Bovine  19866880467552
  misc_feature (1)..(1): n is a, c, g, or t
ntctgtcttataatctataaaagaaaaaaaaaatcgaatgcaactggatgacctttaaagtaatgagagaaacattaaaatctgtttacctagaattttatttttcatgagaaatacccctccaaaatgaaagtaaatgaaaacattttgagataactttaaagttatatttaggataatagaatctaaaaccagcagatcagtaggagaaatgttaaagttcttcaggcagaagggtcaggatatctgatggaagttctgatcttcagaaactaatgaaaacctctaaaaatggcagatttgtggaaaattacaaaatacaatacgtgtttttcttctctcaatttaaacatttaaacattaaaaaaagcataacttgtgtggcttttacatctgtatatacacaagatgctagcccaaaggacagaaggcaaatggaactatgttattccaaatttcctacaatttatgagaagtagaatattaattctgaatagactctgataagttaacggtgcataatgtagtccctggagcaaccattaaaaaatgcatggaaatagctaaaagtcagaagaagaattaaaattgaatcccaaaagtctgtcaactcaaaagaagacagaaaaggggaaagaaagaaacaaaaatctgatgagacaaagcaaagaaggcaaataatggttcttgatgctttacaaaatctgcgaagtttttatttaaatgatcttttcccctagaacttatagcatagtcgagaggaaagtgaaccaaagataaaactgtgagacagaaaataagctgcatccctccctctaacaaatgaatctttgttagtgaatcaagtcttgtcagtttgactgcaaaatacctcccttctgactcactaactagtcagaggttctcatgtctcttctacacgtagacttctggtgagttacttgtttgcaaaacaatggtgagtttgtcttaaaaccaagtgagggtagagtataagctcaaattgacaccactggctttactagcatactaggagtaactcttgtctcattcctcatggcagtacattcaataaacagtaaatcactaggttttgtccatatttccctccaaggaagataatttacaaagacaaattctctatccttaaaacccaccacattagtttgggctttactgttgtctacctgaactactgtagtatcttcttaacacatttttgattgccaacagcaccaagtctgacaaatggggtcagaatgtaagtatgtacaattgatttgaaaaactgtttggcagttactaaacatgtaagcctctacctatcacatggcccagatactcctctccgaggtatttacccaagagaagtaaaaacatgttttcacaaatacatgtaaacaaatatttatagctagcgcctttattcacaacagctaactgctggaaataccacaaatgtccatcagcaggtaaatggataaacaaaatgtgctgtatccatacaatggaatactactcagaaataaaaatgcatggactttttttatacatggaacaatatagatgagccttgaaagcatcatgctgagtgaagggagcaagacaccaaatatagatcatataattgaattttaattcaatgcaaaagcagatcagtggttgcctagagccatggatagaaaaaagaatacatctgccaatgcaggggacgtaagaaacatgggttccatccatgggtcgggaagatcccccggagaagggcatggcaacccactccagtattcttgcctggagaatcccatggacagagaggactggtgggctacacacaattcatggggtcgcaaagagttcgacaacctagcaactgaagcaacttagcatgcccgcacctgctctcggtgcctgtacctagggcataatatgaagatcagtttatgttgtggttattgttcttagcagccaacttctaatttacttataaatctgtagtgatgcaggctctgacttggaagacattatgatattaaatagagcaggccccatggttcatttcttcaatctaaactttaagctgatttgttttgctttcatttgtctaccataattcctttaggatatctattgctctgttgctaattttaactgtattcgttgttaagtgctctaggattgcagaacaaagggcactgttgcactgtgagaatgtattgttctctgttatattccaaagggatgcgttaatggcagagatttaagctaagctcaacatgtttagggttttgttttttatttccaaggtatctgcttctttaaaagaattgattttgttccccaaatttgaatctcattcaacacagtaatattttagaaatattcatttaaagcttctctcgtacagtatatccgaatgataaattacaggcaagaatgttgtctgcattgcatgctctctacacattggcagagccacataacattacatttgtgttttccaagatgtgtactgacactactgtacatatttttatcaataatttagggtatccttacacaatcaccttttaaccctatacgttcaggactgtgggttgctattttaaccagctaaataattcactagaaagaacaaattgtttcactgactgatctgaggattcagccataaaggttggactgcaacgggcacctgatgttctgcatccatccaataggctcaggtctagggaaaagagaaagggcgacactgagagcaaatcactgggcctctaaactcccgagagtctcaaattacagtaagagagaaaattagggtgtttcttctgtttccttattagaaagggaccacacagagtgaacatcagtaacaaaatacaactgtgaaaacaagattttggcaggaaagagaggtgtgaggaggaaggtgagaagggcatatttggaggtattccacctcattttccctgggaataatcggtgagccaactacataaatcaaaaaaatgcttgaaaacattcattatcttggaagaccatttattacacatatatgaggtcaagcctggtgctctataaaagaacaagtgcccatgttgtaagtgtgcttgaattatcaagaaatgaaatagcatgtttactttttttcctaaaaaggaaaaaaaacccctactgagtaatgtatttcataactcatttgagtaaaattccagaaggcattagttcttccttgagtacttaaaaaccaaggacatgagaatatcatttctgaatatattattaaactttatttagaaaacaaagcttgttttctcaaaaaaataaataaaaggcatttttctaacactgtagaattttccatatacctatgaaaatgcagggtactctaagtgcatgctaaaacagtttgaaaataatttatttcttatcagtatattccagtgacttgtttcataatctcatttgatatagaattcagtgaggttaagtaatggtggtgactacctatataacatggtcaaaatattacttctaaagtggtaaatgaaaactaaaatatcagacttgagatgaaagtcatgtctattagaaaaggtaaacattagctctggaagaacgaatggaatgttt

SEQ ID NO: 56350 - DNA, 976 bp, Bovine  19866880474481
  misc_feature (1)..(1): n is a, c, g, or t
nttattaaagattttagtttataatattggttgatgactgaatttgggtgagacacaaaataaatgaaaatgaatatttgacctagatttttagaataatgcagatactatttaagttcacgttatatgtaggtattctattaactatcactatcatatgtaatgataactttatgactttgtaattaaaatcattttgccctgcaaaaataatattatatgcctataatcacctggaaagaacctttgcccttttatcatttcgaaaagaaggtcatttagatgagaaactgtaatatgaatttggaaaggactggtacagtggattaatgcactggctttgtcatctctggaggcccgtgttaaaaatgtgacttaggacacttgtgaaatgaatttgatggtagtgatgaaacccttaagtgtgccttagtatacagaattatcttaaaacttaaagatgcaactaattaacaaactggcctcaaaacagcaaaagtctctacttcagaattaagatatatttatagctctttctgaggattctgatattttcaggaagcataaagcccttacacattatttatgatttgagctaaatttgaaatggctaaattagagagaaggtaaatttaggtccttatataagagttctttggtttcttattttaattgtcttagatcgcacaggaactattaatattagcttaggtttcagttagataagtataaagtagagtaatttgccaatacagccaatcaggcagattcttctccaattctgtaatttttctgtggattaggtagttttatataagttggaaaataaacactcatattttcgttttatcaggttaaacacaatcgggggaaagtagggtaatcagaatttagtgaaatatttaaccgaatggttattggggttggagctaactacttccagtctattatttgtaaattctaggacaagtatctc

SEQ ID NO: 56351 - DNA, 2601 bp, Bovine  19866880508434
  misc_feature (1)..(1): n is a, c, g, or t
nactcttttgttgactatgagggctactccatttcttctaaggcattcttgcccacagtagtagatataacggtcatctgagttaaatttgcacattccagtccacttcagttcattgagtcctaaaacgtcaggtgttcactcttgccatctcccgattgaccacttctaggtttaccttgattcatgaacctaacattcgaggttctgtgcaatattgcaggttctcatgcaattccagtttcctatgcataatccatcatcctggcgttggacaatttttctgtcctcattcaaaatgtgactcatcttagattaattggcaaccaacttttcagatttttcaagtatcatctttctatctctctctattttctccttagtcaattttctagactgagatttcactgaaatatccagtagaaatcaaaactaaaaacaaagtaaaaataaaacaaaacaaaacaaaaatctggacttagtcctgccagtattttcctttacctgccaataatttcagtatagttttcactcatattttaaaaaaaagcaatgtaggcattcatgacactgagatatttttaaagtgcaattacattcaaaagctacagttcccaagaaagtatttcagtttttcatcaatttaaaactaaaatagttatgaatttcaccctgcttcagtctcctcatttgtaacatggagacaaaatttgtaaatatcttatgatttgggggactaaataaaatagtaattgtaaatgcttagaatagtgtgtggcaacaagtgcttaataattattttcttctgttattataattaataacttacaaattcaagtaacccaaaccctgccacagttttttgaccttcatatgagtttctcactaatcatgaatttcagttagtaacctaagaactaaatattgcatgtggatttttaaacatctaggtgcccttaaaattgaaaagcaaccacaaacacaaaaggaagaaaaggaataagacactggattaatgaaggaaatgatgctattggagactctagtggctacacaatatatctgccccaggcattgagcttgaggctgtttttatgttttcttccatcactttttctctgggtttatgcccacatgtaaatgcaagatcagtccattctcctctccattagtgtcttgacagacttgataaggctattcatgctgttccctagagtttaataattgccaaaagatgcattaaatgataacactgatggtgaagtactttaagtcactcaattctctcattttgtaacaattaatttcatatccttccaaaaacaatttcaactgcttggcacagagcatatggtacttaatattttactgacatttaaacaagtctaaatttgctggtttcattaaatagctttacactaaaattcatttaatttcaaaaacgtatgtttggcaatgaacatgctatcttatgtaacctaaagggtacatggatagtaggctgtggcccaaacatattagatatcttgctaatggatgccggaaaatttctgctctctaatatcaaaattttaagtctggggacttaaagtaaaaataaacttagatgagaaacaaactagtttctatatggcctatttgaaatatgaaaagggaaagcaaataaaattttctctacccctttagctttaattataaaaaaatattttccaactcctcatgctgctgctgctgcttctaagtcgcttcagctgtgtctgactctgtgcgaccccatagacggcatctcaccaggctcccctgtccctgggatcctccaggcaagaacactggagggggttgccatttccttctccaatgcatggaagtgaaaagtgaaagggaagtggctcagtcgtgcccgactcttagcgaccccatggactgcagcctaccaggctcctccgtccatgggattttccaggcaagagtactggagtggggtgccatcgccttctctgatgctacagtccgtggggtcataaagagtcggacacaactgagcgaatgaactgaactgaagtgaaggccatctatgttcccattgtctgtctcttggtggtataaggcccacaaatctgaaaattaaaagcttcatcttcaaaatacagcaagcaaggtaacttaaaaagctaaaagctattctttttcataaaaatgcaaatcatctagcccatagaaggaaaggccattaaggaaaaatatcaacatggccaaagtgcgataagagtgacatctggaaaatgctcacggagttgagatactctctttttttttttagcatttcaaacatttattcatttatttacttatttacgtttggttgccccgggtcttcggttttgtgcgcgggctttctccagctgcaatgagcagggcctcctctctagctgcagtgctcaggcttctcacaatgcggcttctcttttacagagcacgggccccaggcgcagggccttccgtagctgagctcctgggctctggaacaccggctcagtcgttgtgcacaggcttagctgctctgcggcatgagggatcttcccagatccgggatccaacctg

SEQ ID NO: 56352 - DNA, 1273 bp, Bovine  19866880557824
  misc_feature (1)..(1): n is a, c, g, or t
ntcgcttagttataatcatattccatttttatctgcattatgaaatgctaataacaatgctattaattaataatacatattcattgaaatttagtgacttaaaatctagcttcctatttgtattgtcctttgggacacatattcagacctagcatcatatccaaatatagtgagaataagatgatctaacaagcataatgcttttataacaaagatgaggaccagaaactatacacatcctttgtctaacatgaccaagtcaagaggatgaccaaggaccatagctcggtctttagactcataacctaataactctttttctgttataactaaatctattttcagtaatgaaatgacagaacaatgatctgattaagtcaactcattctatcctagataagggatctattgtcttgcttttctttctaaggttactcactagcctttactacattactttcacatatccagtacatctataaattgatttatttagtcaaaactgtttgaacaattaacttgactaattacatgactaaattactgggtaacaagagcagctagtaaatttatgctaaaatttaatcaaactggttattgcttataaataaacacattcagtggttaaggacatattttattcttccttctattgatttaacagattcagcttttgagtgaggccatattcaattgttaaaggttgtaataaactcaggacaacgttttttacatgacatcaaataatcactttgacttgcttttcatcttttttctagtaactctggcatcatgtttcctaagaaggcagtatgttctggatttccttagttcacttctggaaatcatcatgaggaagaaaagttggtattgtttgccacctgggaactcaggactggaggagacagagggaaattgggttaatggctcacaggagacagtaaacagacaaagaaagatacaaaaaatgtgcaagaaagtaagaaaagaggatttggtgaatgtgaagtatcaccattatataattgcaaaaaaatttcagttagttaccttgttgttggctccaaggtttagaaacaatttcaacaataaaaagctatttttgtttccatttaaatgttgacctaattctatctgtgttaaacaatcatagcatatgaggaagtcaatgccaaaacaaagatatctgttacagaaaagaaactcatagcttgtaactagtgttttattgcttaaaaatgtccagaaattgttattaggagttgtcgattct

SEQ ID NO: 56353 - DNA, 1167 bp, Bovine  19866880677452
  misc_feature (1)..(1): n is a, c, g, or t
naaaaaaaaagttactcatattccagaaattctaaaaattattttcagttctcattcatgctatacactgcaatgcatactatataatagtaacattattaaatagtacaaaataactttggaatcccttggtgtcttgaataattttggtgaatgttgtggatagagaacagtaaaactctgaagtgcttatacacacaggcacctcacttacttgggtctcatttgaactcctaaaattgcttaattttacatcatgtcaaaattgtcttaattgattttcagattttaagtgtcatcactgctgtttttgttcagttgctcggttgtgtctgactctttgagaccccatggactgcaacgtgccaggcttccccatccttcactatctcctagagtttgctcaaactcatgtccattgagtcaatgatgccatccaaccatctcatcctctctcacccctttctcttcctgtcttcaatcttccccagcatcagggtcttttccactggaatgtgtttttattttactactctgtctctgcttcatcatttttctcaaaactagcccattgagatctcttgacgtggggcattattttctcagccatattttattgaaacatcaaccagtaggagaggtttccttcccctggatttttgaaactcagggtgatcttggcttttacatgatccttaaataatgatgccaatcccctgataagttgttcacatcagctatttagccccagtatctaaagcttgtgaatagcaatgattctcttcacactctgcttctgcattccaagagttatgaatattaagttgtatttgccccaaagcaaaagtatattcaccaaggtatgtgctgagatcaggagtctgcacctcattttgaaacaatagcattaataataaagcaacacaaaatatatcacatttgaaaagtcacagaaataagaactcagaatttttagtaaagttaaaaaaaatccattggttgaaagttaccctgagtaatgtaacaaaggactttatatgaggctgatgttgaattctttcaattcacaaaggattcatggatttttacactttaattactatccttggattgcatttgtatgaacttccataaatttttaaacattttagacagtaaaagtttcag

SEQ ID NO: 56354 - DNA, 792 bp, Bovine  19866880716619
  misc_feature (1)..(1): n is a, c, g, or t
ntaagttgataacatttaaaatgcatgttcaaataaaaaaaatcccaaatttctagcttttaataaaaataaactcagaagttttattaggtgcccaaatatctgcaaagcaacaggtgattaggctaaatcagctcagcccactctgactacatatgtagtgtccagaagaacaaagcctctgtcaagcctggttaactccttatatcacctgactggtccccataggcactcagggttgcaatctctttaaatctattcaacaaattactgaagaagggtaaatataaaaaacagggagtggggaatttaatttatattaataatattatcctgttgaaaacaattcattacatacaaagaatataacaacatttaactgatttggaattggtagggaacatcaattgcactaaatcactggaatagagggaacattcattgatctaataacaaaatctcattcaaaatgtgtttaaatctgcattttccctagttttatatttgcaaaatgatttctacttttcaataactcatatcttctgtttgattttcttttatttttctgagattgcctaaaacttttggggataaagattctgttaattaattaaataacaaagtagctcatttaagtaatcagtcttttttggtgaataccactcgactattcatctttgggcttcaatattccactgtgcgatggtgactgttaggtgagtgctagctgcctaatgtctggtttggtagcctgggcattgtctgccaggcaacaaacatgcatttatcacc

SEQ ID NO: 56355 - DNA, 5249 bp, Bovine  19866880768028
  misc_feature (1)..(1): n is a, c, g, or t
ncattatatacaccttaaacctcaacgatatttaaaattttgtcagtttttcacatagcagtatttgaagcaaagcaagccaaccataattctttgtcagtaattctcagaagcatcaaatattaaacaaattattttataattacagtaatgggaaagtccatgtgatatcagaatactttaaaacataagttaaaattatatccatatattttacttcttaaaagtgattattctatcaataataagtctgtggtttttaaggcaccactgattaattctcagtttagtggatttagaggcatacagaaaaagtacatcccaggaactcatcaatcatcagctcagtcacatgatcaggagactcatttaattaataataccactttatagtcatatagcattttgtaaatctgctatctttaaatttagcagacatgctttatctgcaacaaagaaaacaatcagaatcaaggataagatttaatgtgtagtgctttaatatatgagatcaaagacagccatcattttttttttccagaaaaagggaaatttgattaccaagcttaagtatgctgtatcttaaatgaaattctgatcataaagaaaggtactatctactcaaaagtataatttctgtactttgaaaatcatctcagcaagaattatctccctctatcaaattgtagcacttgtcaaaatcaactgtaaagcatctcaagtgctcttctgaatcaacaaaacagatgtatagctatgtgaggttgcaaggagaaggaaataacagtgactggatgcccatcagtgcccttaatctcttgaacccacacttaacatggttgacacggcaggtctttaggactttcctcacacaagggaaatgcaaggatgatttttaataatatgtaaaaatatgtaaaaataattttctttctcctttgctgctagactttcattctttctttatattcttaaacaggccttagacatgtagcgtggcattattttttcctttggtctgctagtaattataagaagttttttatgatacacttggagaaactagaagatcaaactctagaagtcaaaaaggaaataatgattttatcacaggtaaaatttttgctttaatcaaattgtttttctcccttactgataagcaggtctttgtagcatgtaagaccagaagctctagagtaagacttgaggccaactctttgtttgagcccgggaggggttagttaatttctttgtgccttcgatgaaaaatggatatgataatgtactgaccttatgaggtagttttgaagattgcctgagatgcatcctgctaaggcgttgaaaacactgcctggtacttaacactcaaatgtgattcttatatttttgtctcttattcttcatttcattaatattcagatgctgtggttctctctttgtcaaatggtagtgaccaaataataatgtaccctagtgtactgtaagaaactactacaaaccagagtcctagagactatgtttatgatttatatgcatattttaacagctagcaatggaaaagctcttattaggctagctaaatatagatactttgtggtttttcagagagtgtcatccaagtacaggacaaactttgctggttgatagagacataaaccacgtggctgatgttatgattttgtggtcccatcataggcacatttagcttatgtgttgaattcggaacctaaccgctgtgtcagggccattatggtgagacaaccatctaatggaatgagagtggaaagttttcttggtgccactacagataaccaccaacttcgaaactcagaacactggctggattcccctagtcttctatactgtttctatacagtatacttctatactgtttctctgaggattttaatgagggggtgatgagaacagtatgggaaatacatccatagctccagactatgaagacaccacttagaaagtaggttttgaaaaatctgccactaagaagcgaggaagcaaaaacaagacatcacctaaggaaccgtatcccattgcaactacggatgacttttcttctctacattacactgtcctactcaaaatttaagattcaatcagtgtatgaataaatgagcatctttcctgtttttcttaccatccctagtatctctaagaaactacgttatggactgaatgtgtcacctcaaaattcatatgttgacatcttagcccccattccctcagtgtggctgtatttggactaaggaagtaatagaagttaaatgaggatcattagagtgaggccctgatctaacataattagtgtttttgtaagaagagacatcagagtgctctctttctgtttctgcaaagtcacataggaaaggctgtatgaatgtatagggagaaagtggccacctgcaacccaagggaagaggttgtaccagacactaagcctgctgcgactttgatcttggacttctagtctccagaactataagaaatttctcttgtttaaaccgcccagtctatagtattttgttatggcagcataaacagattaatacaaactattacatgtaaccttgattgtttttattataattatcaaagtattttctgtactctctcttataaagcatcttgagattgggcccttgtttgtttcaggattagggttagccaatgacttgcttaaaaaatagatgaatggatgaagcttctttattaactgaacttatgtaactattgctattgggctttcctggtggctcagatggtaaagagtctgcctgcagtgcaggagacccaggtttgatccctgggtcagtaagatcccctggagaagggaatagctacccattccaatattcttgcctggagaatttcatggacagagaagcctggtgggctacagttcatgggatcacaaagagttggacacgactgagtgactagcactttcacttgtttttgctttcaactattgctaaaaactcactgaatatcttttgatagaagtgagttaaccacatttaacagaatattatatatatctttaagtttatcataaacaggtaaaaaaataacactaaaacctgacagcaaataatgtaaacagttttatcacaaacatgtaaatacaaatggatactgagaaaaagaaaccctttgacttcagtaaaacaaatagatgaaagttgtaataagatactcttttaaaaaatgagatcaatgtccaaaagatcattaacattcaaatttacagagattgtatttcctattatattttagaaaatagcctagcaatatgcatttagatactttgttatttacacaagtttgcctattatttccaattctagattccatcctaagaaaataatcttcaaagcagaaaaagttttgtgctaaaatatttgatttcttctgaatttatataattctagaaaagggcattgtggaacttcatgcttaaagtgtgcataactgtcactcattttaattatagaaatcaaacacagtttatcttgagatcttattctcttaactcagttgcactttgaggtgctcatttccctctcttgggtaatatatattcttggaagtctgctgcctagaaaatgtgagaaaagcccccagtctatctaccccgtggtcactctcaggtgtccactgacctatccatgcagtctgttccaaagccatcactctagtgattcttacgcaccatgacctttagaaattttctactatctccaaggtctcaacgaatcatacttcagtgttcaagcaaacacgaactttccctatttgtggaatttcaacctttcaggcattcctaggataaaaaaaaaaaaaaacagggcacagatttccattatttctataatctaacatttcctttattagtttcccaactctctctgaaattagatcattttagaagtgacttaacagcagcagactctttccaaacctgtggttctctctccaaaaatcagtccagttccttgctctctggaggaaaagaatcaatttgtcgatttgccaacctatatacctaccgatctacctacatttatctatctatcttctgtctatctgtctgtctatctgtctcccttctactttcatgacagtctcatgggaaaataagagacttggtaaagagagtctcttaaaggtgagcaagtggaaacaagttaacaatgatgactctagaatgtggatgtggcttatgagtaattttcttcttctgaagtttggcaacaagtgcagttttacttagactgcatatttatttcatttagtttgtgtatttttatttgggaaaacttgtgggatttaggactgatggagagtagaggagtacctttctcaattagcccaatccattcttcagctcatccactgctagtataattatagaatttgagcaatcttgttgggtaagatatcctgaggtatgatgctaacagagagtggggctcaaagaacttggcatttgtacaaaaggaggaaattttaataatcttgtctccatttcccactactatggccagtacattttataggcaatacattttaaaatttatattaaatccaatgtattacattttcaaataatgtattaatttatcaattatctttagacaaaatgacttacaaacacatgaaatatttcagtcttcttgtttttgttgttcagtccctaagttgtgtccaactgtttgcagtctcatggactgcagcacgccaggctcctctgtcctcccacatctcccagagtttactcagattcatgtccatggagttggttgtcctcagctgctcccttttccttttgcctttttagtctttcccagcctcaggatattttccagtgagacagatcttcatttcaggtggccaaaatgttggagcttccacttcagcatcagtccttccagtaaatattcagtgctgatttcatttagaattgactggtttgatcttgcagtccaagggactctcaagagtcttctctagcaccacagtttgaaagtatcagttctttagcactcagtcttctttatggtccaaatctcacatctgtatatgactactggaaacaccatagctttgaccatacagatctttatcggcaaagtgaggtctctgttttttaatacgctgtctaggtttagtaagagaggttaaaaatcataaaacttgttgcaagaactaaataagagcaataaaccaca

SEQ ID NO: 56356 - DNA, 1065 bp, Bovine  19866880799493
  misc_feature (1)..(1): n is a, c, g, or t
nttttagagtacatatagcttcagctgttctgttccatacagaaaaaaaaaaacagataattatatacactttaaaccttatatacatattgtttttgaaaatgctcctgacagaagatggagacgcagcctccaaaagtaaaagaaatggctgaaaaaaatgttgtcacaagggaaaaagagaaatacattacacagttttattcctgagatagggaacattgtacttggtgagagacgctagaaggagtgaatgaatgagtggtgtattctagatagaagaaagtgccaagtaaaatgaatacagtatacttgtaaagtgttcctgatggagagatagagtactagatttaagagacagttggcatttgctaaaacacttgagtgacaagtcccggagaaagaaaggaagtgctgggcataatggcagctagtgtagagagcatggactacagtttttctgcggagcaatgttgttcgtggctagtagtgatctgcagaaaatgtaagtgaacagttttgacagagcagcatgtgaaggagaataaactagccaggatatctggctgcagtgcaactgactaagggaaaactgtatgggtacaaaatcaagctgtaatctctttggaaactaggcagtaagtctgagaaatatgttctgaggtagaagtgagtagtatacatttcaactcaatagatttgtatggtgatctttcttctgtgttatggaaaaaaagtgttatagaatgctaatgagttaattacaaaaacagtatgtgaaactttgtcatttgtttaaatgatttttctctaattgatacagctgtaaatgtaaaaagcacttactgaatgggttccatgcacagagcacatgtgaaggacttggtggacttagtggggaaagagcggtacagtgtaggtgattctgactctgtggcatcaggttctagtttaaataggtcttataaactcaaagcacagaccactgaaaatgcgccacatcgaatatatgtgtagtggtccaacataaatagatttctcaatgttaatagaaacatgtcaaag

SEQ ID NO: 56357 - DNA, 2621 bp, Bovine  19866880813553
  misc_feature (1)..(1): n is a, c, g, or t
nggagaacgattatggacaacaaagatcagaatttggctttgaatttggtttgagataccaatgagatatctaactagaaatgctgatgagtatgctgaatgcttaagcctgcatcagcctgtaagagtctgtgatagggagaatcatggcccctcaaagatgttcacatcctaccccactagaacctgcaaatatgttagtttacacagcgaggggtttaagatggctagtcagttgaccataaaataagtagattatactggattattacagttggtccaaagtaaccacaagggtctgtaaatgtggaagtgggaagcagaagtgccattgtcagagtgatgtgtgtatttgctcagtcattcagtcatgtcctattctttgcaacccagtggactgtaacccaccaagctcctctgtccacgggattttccagacaagaatactggagtgggttgccatttccttctccaagggatcttcccgaccccgagattgaacccttgtctcctgtattggcaggaggattctttaccactggccacctgggaagcccttgtcctctggatctcaaggataagtttgccctgttttaatttactaaatctgtgtggttcagatatcagaatggcattggatttctcagcattaacaagagatgagacaaataacaagcacaacaatagcaataccttcttcctgagactacagataggagaaccaagcctccatgaggctatttcagtgaaaataaaaaggatcttatacatttcagaacttttgagtaagttgagaggaggcatgggagaaagttggaaatgacaagtcaatgatacacttagctttgtacggtgcatggaccagcacgacaactaggtacgatgtccgagtgctttattttccaaactgggatattttgagaaagagaaagaaggtattattaatacttataggcctccatcataattggttgagagcaaactgaacgtatggtcgcactacacagagttggtttcttacagtatgtaacgatccctcagccactggatagtcagcatgaaataagcagctgtgttgctttcgaaagcgtacctaattgatgaacatctggtggcaggtagccaggccattaaaaatcaattatactcaatgacttgcatctgagccatactgcaccaatctcctcgcactcatcagatccacatgttcctgaataaacacacgcaccactcaagctagtgcctttgaactttgcgtggtttggaagtgaatttcatcagtggctttcctctgacccatagcagagagaagaatttctgttgatctacccctgactgttgacaggtcaagagaccaggcagcagtttgaataaagctctaaattcaagggtacctagagcattcactgctctgtgaaactcgtcagggtagcataatatataacattaatagcataggctgggtaacaaaataaggagggaatgatgatcagggactagatttagggtatgataaggaaataagttactaattatggagaatgtggaaaagcttcctttacaaatctcagctgagaagttggatttatgtttctagattctctgcagcaattagtgaacaattttcctgctcttttgagatgcacagtccaaagagctgtactgttaaggaaagtgggttgagagaagaagatggacctgttgcctaaactaccacccccaatgaaaaccaaaatctcctgatcagaagtatccttgaattgtaacttgaatggcaacagagatgtctgtaataaatcctagacttttgtcaggtcatgagagtgattgtgaagaagtcatttaaatggaagataaattttattttaaaattaactttccattaataatcaaagaactacttctaaatacacaaagctctggaaacacaaaagcatgcttgttacggggtcaggaggcaagcatcattctttacccgttcaacaactaacatactagtcacaaagaagggttttaggaaaaaacagaagtgagatttagaaggaatctggacaaaaatgtgaacaattccattgtgaaatatataaacaattagatctcttctatgaacatggtttaaggaaactttcctgtaggtcagtgtatagttttaaacacaaaatacataaaataagagagctcattatcttgactttatgcttcaaacacgtttttccctccattttaaactgtgataatgactgtctatttgcaatgagagttcttaaatttgtaaagaagcttagagatcatttagttcaaccctcttatttatagttaacataattgaggccttgaagggtgaccccaggtcagccttacctcaggtcatgcaccttataaatggagattggagactcaaagccagatcttctggctccaagtccactgctgtattttttcaactgtttttaaaatgtaagacttatatttcatattgacatgtttatgaagagctaagcctgattatggcataatataacttaaagccatattgaatctttggaactgaaatataagcaaactaacacttgttaagctagttaactattcttcctcctaatgggcttaataatccatca

SEQ ID NO: 56358 - DNA, 1268 bp, Bovine  19866880845422
  misc_feature (1)..(1): n is a, c, g, or t
nccctcgccgacgccgtctctccttcgaataccctggatcagccggggctggtccccggcacttcaccaccaccacattagaagtaatcattcatgtgaagtgaattgaagtcactcagtcgtgtccgactctttgcaaccccatggactgtagtctaccaggctccactgtccatggggttttccaggcaagagtactggagtgggttgccatttccttctccaatgcatggaagtgaaaaatgaaagtgaagttgctcagtcatgtctgactcttagcgaccccatggactgcagcccaccaggctcttccgtccaaggggttttccaggcaagagtattggagtgggttgccattgccttctctgatggtgtttctctcagatactgcataattatttaaaattaacctaataagaacaggatgcagctgataggttttattggttccatggagattaaaataagaattttatttatttatttttttggtcaaatatcaaccaagagtaaataaaagaagaaataacttcggaaagctatatgtggaacataaatgtatgacaaaggatatcagcaaaattttggaaaagtaatctaaattttttataactgtaaagatactcaattgttctaaaaggaaaaatataaacaatataaagactaacagagaaagtagcacttggtgcttcatgtaagaactaattgcctgtttcataaaatatacacgggagttacaatcctcacagtctacttaattatatatttaaaaactcataagaactaagaaaagattaattatcacctactgcataattaaaattcttcaatgcatctttatattttcccttttgctttgtatgtacacttgtttcaatttgactaccagcacatggtgcaaaaaatgtatatactgttaaaatcactgaatttatgacatttttctctccaattttatatatgaaataagtgaatcaaagactttttttttcaccctattgtttttactctagaagccactcaggtcttaagaagaagaaatagtaagtattagttgtacagtagtctgtcaatcaattaagcacttacactttgggcagcccactcatggagctttagaaaagatttttaaaaacacaaataaaggaaagtcacaattaaattaaatgtggattggaaaactccattttatattgattttattaccagaatttggagagaagtcttctgattgtattaagctaatgttgtaatgggtgaaatgaaag

SEQ ID NO: 56359 - DNA, 1323 bp, Bovine  19866880944396
  misc_feature (1)..(1): n is a, c, g, or t
ntttgtaggaaggagtgtacatttatatattctgttctcagttgttgaagaagcatctggttaaatctccccagactattatgaatccctttttaaaaatctctagtgccgtaaataatgaaatagcaatatcttgcaagcattgtattgactataatatccctttgaagtgaagatttggcatatgggttactcagattctgttcttccattaattataattcttacatattttttgagggggtgaatatcttaaaaatttttttcctagtgacaattcaattatataactttcttactgaccaactgtcctataggagtaatgacaacgacagcataattaccgcacacacatgcacacacgttcacctccttcatggctaagaggacaaaaaatacagaacaggtcttttcatacagttgatcaaatatggagcttcttgaggatcccagggtcagattggttccaatgtatagaaagtatgactccaaataaaacctttcctacattcacaggtgaaagaataacaaataaaagcctagctgcacaatcaagtcttttacactgcaaccgtttgcatttccaatgaatgttgactgcaataccagagtcaagtaatagcaaggtgacaggtgtgcaggagatgattcagattcacaatgcatgtaacttaaggtacacttgtgcatatcagatcgtataacactgtttatcagaaatgttctgggacagcaaaacatttaggtaaacaaggttttatgtaatcaagagagttacagggtaattgattcatgtcaagagacataatctagattttgatgggaggtagttttgaactgaagattttggctttgtggagctttaactacagaaatataagattcccaaatttcattagcaatattaatgtgtatcttggtttgcattttaaagacataaaaataagttacctggaatcctgaaggtaattccagagacaaaaaaactaaagcataaacattcaactatttgaataaacattgtcctaaagtataatttgtcttgaagctaaatactaactaaagtgaaaaagaatttaccagtatatgggaatgtgggctctgtttttggttcctgaaatatgtgccttaattttttcaaatactaaaaatatctctgtatacagcctgttttctacataattgttcatattacactttaggttttcctggtgtgttcctgaaccagcaatccagatggaaccatatcagttctaaagtatgggttgatgattgctttaatggttgatttactgatatttctgatcttcactacatgcttcc

SEQ ID NO: 56360 - DNA, 1113 bp, Bovine  19866880949097
  misc_feature (1)..(1): n is a, c, g, or t
ncactgtggcccaacttctctttccccttaatcttttattcacgttagtgtttggaggactcctgggtgctttcttatcagagattagaaatgaagaatacacttgttagaacactggctgcaactgtaggcttggctctcaaagttcatatattactagggtattgccatgcctctgaaaatgcacaaagtgttattatgcttagcatgagccttgcaatactttcatttggagaatttattttgatgaaaatagctcattagaccagaaaacgcctattttgttttcatttcattaaaaaaaaatctgtgcatgtttgcatagcaggtagagctaaaaacccagtatagcaagacgctggctgtttttttttttcccctttcaaaaacaataacagagaggggaatttatatataatatggcgtaatttacttgaatataatgaatgcatacaattttacatcctaaagtattaattatagaggtatttatagtaatttataatgcattagaagattatttttttaagagaacttggccaaagccaacggtaactctagctctcatttataataatggaataactgcactgaaacttgattttttattctaatcgtataattgaaaaataacatttaacataccccaaacatgatgaactcattaaaaagctttttatttgttattttacaatattcaaaataattaccttgttttaaacaaaattttagccattattttccttagttctttatagactaacaaatagcaatggagttgtttcttcaattatgttactgtatatgtccaaataaactggaaatctattgaattatagtgccctgaagtttctatttaagaaactctctataattataaacttacatggtattgtggctctagaggtaataggcactttttttctttttttttgtacgtaaaagaagatgaaagttttccagggttggaataaggaagctgaatcagttgttgaataggagcaggtagattttatggtgttcctttgggaggttttaccatatttattcctactgtacttgcaactctcaccctgttcctagttttgctctgagaagtgggtgtagtgtttt

SEQ ID NO: 56361 - DNA, 1546 bp, Bovine  19866880949580
  misc_feature (1)..(1): n is a, c, g, or t
nacagcctttatgtctgcttttaagagactcgttcttgaattccttgggtgaggaattcctaaggtgaggtaacgtacctcagcttacctcacgataagttgggtatcggggagtaaatctttcttggaggtgacatggccttagcaagaaacttgctaatggagcaagttgggtggcctaagaattactttagactaggaattacagtctgttcagtcttagagtttcttaaataatataattctattattgagaaggtttccagtctatttactttctatcaagtgcattgggtaataaccaaagccaaatgtcctgtctaaatataaagtttattgattcctgtctccaagccactagcctcagtgatttgcccatctctactttaattcacattccttagtttaatggcctctgattcaatgtactgctgcttcttatttttaaggtaaaatatatcatgacttcacattgatttttcaattcaaattcagaacttcaggaatttaaagtttctttgatcttttatctatacctactttctcatatcttgaagagcttggttctcaatgagattaggaataatagaattaaagtattatcttataatatgcacacaacaatctcagaatgactatagaaatgctgtgaccaataatatcattactgaaaacagtaagaattggttacagttctgtatatcctactagggatgtacaatcaaattgctgtgttttaaaatcacttacagttactgttagtgtggttatgccagcaactcaatatgcatttaggttcatttttttatttccttttcaatttttaaaaattgtttttcaattaaattttatactaatgtaacatatttagagagttacaaagttaacaaaacaagtacattcagagaagataatcttttaacattatcccttttactctactctcttcctcctactttaggtgaccaaatttaatgatttatccattttttatgcttaaatgcatatttatatgctcatttacttagataaaataaatgtgtattgtaccaccaccttgtttaattgctgatgttcaatatatctcttcttaatagattatagagtataattattgtgtggagttaaaataaataattcagtttcctattaagaaacattggagttgtttatatattattagtaaccttgtgcatatatattttcatatttttgtcagtgtgcctatgtatgggatagactcctagaagaaggattgacagctaccaaagacacactgataatgtattcaaatacatatttctcatcataacctcaccaatataaatgaatactaacttttagattcatgccaatataatagctaaaaggattggggtcccactgtagctttaatttacatttcttttaaattgtatgaggttaagtttcttttaatacaattaagtggtattgtattgcttttcttagaacctattcattcactagcacattttatatagagttcttcttctctctctgtaaaagctaaagtgtattttaaaaa

SEQ ID NO: 56362 - DNA, 1631 bp, Bovine  19866880951364
  misc_feature (1)..(1): n is a, c, g, or t
nttgtatggatttccattttgtggtgtgttagtgactgtgaagaggaatgtgtgtggatatgggtatattttcatagtgttcttagttcatgtttttacatctttttaagattttagagacagtaacacaagagataaaaattttaaaaaataattgtttaaacgacatattaactaaatgttttctcacttcacaaatgctgaggctttgtaaggaaggaatcacacatcatcctttctaaagaaatgaaccaagctttgctatcactgctttcacactggttccacgtgggtggtcttttatttcacagggcgtattaatctcctgtcatacgtggcagccactactgtgtgtcatctcagtacaggacaataaagtgactccagaatttctttctaaacttagtgaccaggcttctcttactgtgacaaatgtttatggattcttctaattacacgtctggtttaaaactaagataccaagagaattcagttctcttttgtaaagttcccaaggtttttctataataatcaattaccataatgagtttttttaaagcttccattcatcattttcttaaaatatataaacttctaggataaagataaatagccatagccagtataccctgaggcactctaccaaaggtttcctttaaatcaaaatcaactggaaaacatgttgggttttatttcaaagtcaatcctgcttaggttttaaaaaaatgtgtaaaagcaaaaaaggagtaaaataaaatccatgacaagttggcttcatgagaggaggttaggcaatgcatcactctatgaacatccccatagttcacatgtgtttgttaaatgggtctcactagccagctcttgtgctattgaaactagaaactaattctcttcatggatcttccctcacctatcaacctattatctccttctgttcttaggaaaacagtatcccaactgggagttatttgacatgtctttatctaagccagggtttctcaacctgggtactactgttactctgggaagtacaattctttattttgtggaaagtgatcttgtgcagtgtaagatgtttagcagcatttctggctgctatccatcagatactagaagcagacacctccctcccctgaactgtgataaccaaaaccctctccagacattggcaattgcccccagggggacaaagaccctccaccttcccctgtttgacaacaacgttccataagcattcattccataagccttaattgtgagggaattcagtagaatattctactggcataaaaatgttataaaattaagaaaactagggcaaagaagagcaagatcattaagctggttggaatttaaaagaaatgaaattgggtaatatttgggtgatgatggaggaaataaccaagaaggcatgaaagttttcctatatcatttaactgagtgtgtgtgtgtgtgtactcagtcactcagtcatgtctgactctttgcaaccccgtggaatatagttgaccaggctcctctgttcatggaattttccaggcaagaatcctggagcagattgccatttcctattccaggggatcttcctgaccgaggggttgaacccacttttcttgtgtctcctgtactga

SEQ ID NO: 56363 - DNA, 2635 bp, Bovine  19866880983145
  misc_feature (1)..(1): n is a, c, g, or t
ncatcgatttaatagatccgtttaacatatatttaacctgcaatcactattttaacatctctaaatgaccacttagattttgaaggatatagaaccatacacagtcagctaacaaagaattcaggtttttattagtctttttcctatgatcattactgcactgaataaagataattgtgaatgcccaatattttcatcagaaggtacaaatgtatttaatgtattaggtagaagggttgttggttgatttctaccagtgtcaagaatagagctggaaaatattaaaataagcatcttggttcacaagtcttgaaaattaagttaaaaaatcccatgctcccctctatgttttgttccactgaagttctaagaggttacaagctatttctactctgtttcccactgtctattcttcatctagcattgcttccagcctttctcaatatttattgaatatgtttattattgaataaaggaagaaatgaatggtaacttctgcattatgaggagctacaaagcaggcatcctttttaagaaattttccttatgaatcctgtagcttgatatcttgcacaattaaatatcgagtaaaaattatactggaatgaggatgaaaaatgataataatgattattgttctcaagcttggcttcagttcagaatcacctgggaatttaaaaaaaaatactattgcctggttcccacagcaattctgttttaattgttgcccaggcactgggatctttaaagtttctccagtagttctagtgagcagctaaaattgagaaccattgttatatatgatgatataatgatatgatgatgaatatgaggaataagagaaattcaggacatctaccttatagtctaatttatgaaaataaaagggtgtcttttcccttgaaaagccaattttaagtaataaaaacaaattcattccatttcagcctgacacaccagcacacatggatgtacttagaaatatcttaagctctttcctttgtcccttttaaaaagtgcttaagggacctttacctgttactcagaagctcagccccattctaataccatgtgactttggcctctagatccaggaaacggatttctgttttgtccccacatgcataaattcttgctgtgagacactttttatattaattaattttatttttatcaaattatgattgatatatgacattgtgtaagtttaaggtgtacagcatatccatttcatacatttatctattgcaatatgattaccacaatgatatcacttacatatggaatctaaaaacgctttgaaacactttgacttgacttatgcactcatcctcaatggtaaagaatctgcctgccaatgcaggaggcacaggtttgatccctgggtcaggaagatccccctggagaaggaaatggcaacccctccagtattctagcctgagaaatcccatggacagaggaccctggtgggctacagtccatggcacaaagcatcagacacagcttagtggctgaacagcaacaatagattcatcctgtgagcagagttcttgtttggttttctcactctcaggagccagaatcttgctctttctactctccagaaactctttaattttttcagaaaaagtatagctttgagtccaagataaccaaggggcagagttgatagccacctacaaagtataatttatggatctacaaatagccctcatgaaacacatcccaaaatatccactaaagtatctctgctagagatgtttacttctgttcaactagacaaattcactgagtattctagggctgttattatggaagctgtattttccaaagtaataagtgggatacaccttgagagtatctagcagtaggagaggatatttgatgccaaactcactaaatccaaagttaactaaaacagcttttcccaaagtattgttttggtcataaaataagccatttatcttaatgcaagagtttttactgcatttcacaacaggggaaaacaatttcaatccgaatgccaaaactgtttagaaaaaatgaaaacaaaaactctggaaaatttttcaggaaaagaacagtaattaaaacacaacgtttcatctataattttttaattttttgactctgtgaaaataaggaaaatattttttctctccagaattttcttatctgtattttgagaagaatcatttgtatttcacagtgttgtcatgagaattagattagataatgcactcaggatgttactcagagaagcaggtactaaaatgtagttcccataacaataattaatattgttgccaagaatataaattacttttcctgtttctccagaaacataaaacttattttgctctttcatttcgtaacggacctcacttgtgacctctaaaattgtccatcagtagttagttaaccattggtggaaatgcagattatcttgcagccaatctagaaatacaacagcaagcataacttttctgagaaagaaagtagagttaacagggagacattttcacctattttaagctaatttttaaatacttctattccacagcagtattgttttagttccaacagttcttcatatgcaactatcagcaaggttaagaatttaatgcgtagttat

SEQ ID NO: 56364 - DNA, 1040 bp, Bovine  19866880993512
  misc_feature (1)..(1): n is a, c, g, or t
ntgtctgttaaaggcatacctttggcagatcacatggtaactgtcacatcatagaatgataagcatgaagaatacaaaaattttggctggccttactgtgtttagctgtacttgggagttaaaggaagaacatgacaggctcagtcaggactctatggtctcagctcaaggcagtgtcagaggcaaagaacatttcgtctcttatacctcaaatttacatacagaatctgattgtacaaattggagtatttataatatagagtgaattatagctatatttttacatgaggttaagagtttcaatttgaaaaatgaggctctgagaattaaaatagcaacatttggaaggatttagatgaccttgagtaccccagatccaaactgcattgagcaaaagtagctccattttccagtctaaagaggggctgttttaccttatttggaaaacttaaactaactttagtaaggattattggtagttctccttaggctctaccatgcccatgcctcacaaactccaatcttccagccagagttaaatctcagcatgcccaaggaagacaatcaccaataaaaccaagaatggaaaacgtatgtgtcgaaagaattcaaatctgaaattaaaaataattaaaaacctggggaatatataggtggattcgtcagtgatagatggaccatgcagaaagccatagagttttagatagggcaaaatatattaacatggaggcatttatccaatatgctgcattcagtgttgtagcttgagcaattaccattttcttagctggttaactaaaagcagaattcagctgtggtctgtactgaatgaaatgaatgctccttgatgtgatagactttatttttgggggcttcaaaatcactgcagatggtgactgcagccatgaaattaaaagacacttgctccttagaagaaaagttatgatcaacttatacagtatattaaaaagcagagacattacctttgccaaccacaggtccatctagtcaaagctatgatttttccagtagtcttgtat

SEQ ID NO: 56365 - DNA, 962 bp, Bovine  19866881014577
  misc_feature (1)..(1): n is a, c, g, or t
nttcttggtgacattttccttagtataagagcagacagcattgttttccttgctgataatgccttgagttattttatgacatggtttcattcgtctccacaaaagcaggagaatattgagaaggctggaatataagaaaaggccgttcagcccaccaggctcttttccttttaatgcaccctggagaacatttaattgcttcttgaatgacccccaaggtcttcctagaatgagcttgttgtcttctttgtggaggagaccatccccatttcattcgaactcattgtgacttaattataggatacatataataaattggaggcaatcagtaatccttaatcaaacagggtaaatttgtttcacatgcaagacacaatgggcccttgtgaaatagatggcacactttcatttactgcacgatacccagattaattaactcacctgatagctgtggttccaatttcccaactgcaactcaagtctatcttatgcttgcccttcttttttctctttcttattatcattctataaaactgctcttaatagactttcatattcagatattataatttctctccacagatattatttttctgttgtataaaagaagatgtttatctatgaataacatagtaatgtgtatatgtgtgtatatacatgtatatgcacacacacaaatatatacacatgcatatacacacatccatgcatgcaaatacacatttataagagaagacacgagaatgtattcagatatggcattttctttagttacagctctgtcacaaatctgagttcaatgggtctacatccagaatgttacagtaatttctgcaagcttccagcagtgcctaatcactctctagagcagagcttttagctgtttggtttctgctggctgttttccctgaaaattactgtaagagatttaattgatttatattcatttatcttgtaaaaag

SEQ ID NO: 56366 - DNA, 850 bp, Bovine  19866881042655
  misc_feature (1)..(1): n is a, c, g, or t
nttgaggtttttattaactgtaagtgtctgtttagtgcctctcattgtgtatcctgattacttttggtgactaagtgtaacatttaataactattagttttcttttggagagttcttaaccaggaaacaagagttcttacagctacatagataattaacttgaagcttgtctctctcctgagagacatcaaatatgtaaatgaggaacttaagccttaaccagacatggtaaggaaatcactaaaagttttatcacataaaagctaaaatctgcagttaaaaaatatgtcaatatgctttgaagaactaatatatgcttcttacttaggatttgtgaaatttatgggctttaaattctttttcaaagccgctggagctagtcagatctattaacaaaaaaccaaagcagttaataaggaaacaagggcagaagcatatttaactactgcacaatgtctggtacatgactagagctcaacactgcataaacttgtaccaaattttcatcttgtattttacaaaatcctcatttgtcatatctaacactgcttaaattttttaatgatagtgcttctcagagcaaaccaatacatatctttcatctgttcttattcctaaagacttaaaaaagaagtaagagccattcacatttgatattttaaactgaaaaccaattctcttcatttttcatatatatatgcttgtgctatatatctcaaggaaaatatggaggaaacgatcttttacatttctgtgcttatttgtaatctgaagagaaaacattctatcattacaaaaacttttagtgacctggataatatatttttgttataattggtggattatgttt

SEQ ID NO: 56367 - DNA, 3325 bp, Bovine  19866881048723
  misc_feature (1)..(1): n is a, c, g, or t
ntacatgtaagaatctttaaatgtcagagtctatgggtccttttttattggagtttatttatgtccatcctaaaggaaatcagtcctgaatgttcattggaaggactgatgttgaagctgaaactccaatactttggccacctgatgcaaagaactgactcatttgaaaagaccctgatgctgggaaggcaagaggagaaggggacaacagagggtgagataaatggatggcatcactgactcaatgggcatgagtttgagtaaacgggagttgatgatggacagggaggcctggtgtgctgcagtccatggggtcacagagtcagacacgactgagcgactgaaatgaactgaactgaactgatttatgttctccagggaagactactctatatccctcgggggtgggcatgtgggtgcaagattggctgtcggcatgacactctgggggtgccagggaagggagctggtatggtttcatgaatcatgtgacccctgcgccctgcattatctctatcctccaaaatactaaatatcctggactgtcacatttctggtgctttccccaactcccacccctatcagagactacagccctggtatttgagggtaaggtcaacagggagaagtagcctggaggtatgccacgtgtctcccctgttctctaaacagtaaagaaggccacttttcatattactgtgcctgatattagacttcaaaagctttggtaggcactttattaggtaaaaggttttagttgtctcaaaagttattcttctttattcataagataattggaattgcacttcgaggtaaaactttattgaaagctttatggctgaccaggtgcattaaactaaatacttttccctcacccaccaattttgtaattttgttaaagaaaggaggactttagttttttgagcgatttttttctccctctaatatcccatgctgcttattgctcatgtttctattatcccatataggctgtagggtttctctccccacccaggggcctcacaatagacttgccaaattgtaattatcatggcaaatctttttgttctgacaaataatacctacatgttttattttatcccattttctggagctacttagttgagtctaagttttcaaaagtaatcactagtctttttgaatcttgggagtgtatttctttagaccttgtaatatgcacagtgtaaaaccatttaaagttatgttaattttttttcttagaaatactatttcaaataatcatgcagaggaaaaaaagtgaaaatgactatttatatcaactgaggacctcaatgagagttgttaaaaggttgagaaatagaagctataaaggaaagtttaagcaaaggaacaagattattaggctaagagaatggtctaactacccaccattcaagagcagcatagaaaaataatgacttgctgttctctagatctagggaagatgtaagaaaaggaattaagcttaaagtgaaatgtgaaaattatgaaactttatgagatgcttcaaggctgagtttcactaatactctaatgaaaaggaatgaaagtgcaggtgaggactaactagatactgaggttaaaaaagatgattctgaacattgcctacaactgaattattgcttaggaccctaagattacccccaaaacaaagactttcacttattcataaaaaattataaaagggaccaattaattcatttggcttgacaaaactatttagttaaatgtccatctccattttttaataaaacaaggaaaaaacctagggaaagaaacaagatgtgtgggtatgtgtatatgtgagtgggcatttgtgggagtgtgtatgcgctgtgtccacactatgagggacccatgtcaaggcagagcatatggactgtataggttccaagaccaccatcactacatgtgtctcatcttctggagtctccctgtttaacccagtgacttctggagggaaacatgggccttcagtccagctcccgtgcatgctggagggccccttcagtattccttcttttagacacacagagcagtttggctccactaggataattgtataacaaagcaaagactgacttggctttcttagtgctcttcatacatttttattcttgaaatataatttaaaagcagcagaatttttcacttagctttctcatatacatatacataatttacccatttgaagaatacagttcagtggtttttagtatgtccatggaattactcaacccaccccccataacctaattttagaacattctattatttcaaaaagaaacctagtaacttttctaaggattctatagaagttttcatgaagtcctttagtttcaccaaaaactattgtattttttttaacagacatatctactttaaaaaatgagtgctgtctttcaagttgacaacatgaacttggcaggaaatgtaattaatataaatatctgaatgtatacctttggtagcgccatatctatcacaaattaggaccaaaactaattcgactgcaacagattacacaaagagttgttatacagaagatgagactaggatttctaagcattttcctattcaaatatgattagattaggattaaaaggtgttaaaagacattcaaaaagagattcagaaaagatgatggatgacctgttctgtttttttctcccaggagacctgtaaagtaacagaaagatcctttcggctcttttctttcacactctgttaggatacagctgctgtgacaaacacagccgtgaacccagtggctgagacattacagtcctgagaagggtgagtggtccagaaaggttacacacctctatttctatgtgaagaaatcatttaggacccagatgttttccatcacagtgctccactatcagccaggggactcaaagctggctcctatggactgactagtattcttcccccaaatcccatgttgaatgtctaacccctaatgcaattgcatttggagactgggcctaaaaggaggtgcccccgtgcatcctcagtcactcacatttctgactgtgaccccatggactgtagctcaccaggctcctctgtccatgggatttcctaggcaacaatactggagtgggttgccatttcctcctccagggatcttccaacccagggatcaaacctgtgtctcctgcattagcaggcagattctttaccactgtgccacctgggaagccccctaaaaggaggtgtgtgtgtgttgaccctttgttgacctttcagtcatgtctgaccctttgcaaccccatggactataacctgccaggcttct

SEQ ID NO: 56368 - DNA, 1988 bp, Bovine  19866881053955
  misc_feature (1)..(1): n is a, c, g, or t
ngaatacaattgatttgaactagattggttcaaacttcagtgcaatcttaatagttagaagactttacttttaatatgttttgagtgagggaaacagcctagaaccacctccctgaaatgcttttctcatttcttcctcttttttcattatttctccctctatcttttaatccttttttaatccctttctgtttcattctcctctgacattttagaaagttatttgcttaacttttgttcccacttccattttaaatcctggatgagtttcatgaggtcagtgaaaaccatttggaaggcaacataattcattttggtgattttttaaagaatgtacttcttaattcatatgtatatatggattccccccccttttttagtctaccatgggaatagaactattcaggtacacccttacagtattaaacagctatacattgtagtaatccctgatcgtagataaacatgctgagaatatatggatcagtagtgtgttccctcccctgagatgactgactttattgcctaggcagtaagttgcgccttcttcctgtgtggccaggcagggtgtgggtgcaatttattagataaaccccgaaataggtttttgttttccttttggaaatttgcatgtttttttctctgcccattaagcttttaacaagtgtttcacttgatggagtgatttatagctgcttgtaaaggtaaaacagcactttaccctgccagtggagtgacttttcactgactaaatcatgcagaagtttgtgtaggaagagcaagaggcagttggatttagctctgacttgagtgagcttaaaaggagaatttgtcttttctttctttaaaggactctttcttagtggaaaaattatttttctgaagcaaatgattcaagccatcttattgacagttctttcagtctggcggataactaaaatggtaggggaaacataatgatggaatgtcattggctttattttacttttaaaaggagctactttattttcataggactttgacatatttatgtagtttctttttcttttgaagtatgagtagttttaaaaaactctttgtcagtagccatctgatacatcatttcaatcgctttgtttacagcaaagtcttgacaagagtaaataagaatattgaactagtgcaaatgccttgagtagtcagcacagcgaatcatgtatcaactgtcatcatgagctgaaacacatctacatactgagtagcatgtttggtgtgcctaatcagaacagtatgtaatctgtgagtacatatgaggacttgccaagtcagaattatttacaagttgcagtttgtgttctggaaagtttcataaatgaagaaaacaataccgtaaaaaaaataagaaaaaaaacatgttagcttcagatatacaactcaaaaaatgaataacaatttttgagatttttattcaatagatgctatcaaacacagtttttttgttcaattccaatcaaaacagttttcattaaaatttctttttgtattatcttttatgctgatcctctactcctggttccttgtgaaaatgaccatggaaactctgcttggttagttttctgttttccaattctcaactcaaaatgccaaagctggattggttgacagcttaagtcatataaaagagtatgtctgtggttgtatattccatataggtgaaggtaaaccttgcttgttgaaggtaaaacgacatgtgcaatattaagaagggcatagatgaattcttgaaggagaaggaaagagacagtaaagtttaagaaaagcttggaattaccaaaatttatttttaaggacctcagagtcctcttctatatccttctttctgcttcaaacactcggtgtttgtatgctttttttctttacataatttttttcctgacctcactcactcttttcatcctgcttttaaatcattttaatgaccattaaattgttaaataaaatgggacaaa

SEQ ID NO: 56369 - DNA, 2166 bp, Bovine  19866881058470
  misc_feature (1)..(1): n is a, c, g, or t
naaaagattacaaaaaatacaaaagcatacttgcatcatgaactttccgtaaagttttagaatttttcttacaaatggaacttcaagaacctgaaatttgaattcagatttcaaggattcattaaactgcttccagagacttacagggtctattttttctgttgttaacatgtagaggagctatataccaaacagagcttttgacagcatttgcctccgtttgttataggatataatacatgggaagaggtcagtttattattttggctcactttgattctggggtgaaatgatcactattcaaactcccacacagtatttatcttataaggtcacttctaaggtaaaatgatgaaaacactattggaatataataactgtcactaaatgttagcctttttttttacttagtaccactacacttgtggaagtagaagtatcaaatatttctgtacccactgacacaatatcaaaaccatcaccatattagacaaaagattgtcttgagtggattatatatgctaggaatatagtcttttaatggtaacttttctagcactttggtttttccttttagacaagcagcatgtatgcctgctaagtcgcttcagtcatgtccaattctttgttacccaaaggactgcagcccaccaggctcctctgtccttaggattctccagacatgaatactggagtgagatgccatgccctcctcccagatgatcctccagatgcagatggggtttaatttcagtgtttatgtataatctacatttttttcctttgcatctccttccttcctcttttccttcttttttccagttgcttccaattgccacttgtctaattatcctagtatatatgtatttgctatgtttgtataaatttggagaggtatagaaaaacaaacagatgcactgaaaagattaatgaagcatatcaacccaaactagcaacagggatctgttttgtttatcttgaatgctatagctatatactaaatatattataagtttatattaccataataatgcatttctccctagctattaatctcaactacagaatatcacatatatatttaatcttccttcaaagagatctaagcttatttacatatagcatagttttaaggacattttaatattggccactaattttatactgttagaatgttttaatgtaattacaaaggaatgtagctacaatctaagcttatttaatctacattctctctgtttgacctttcctgtagcaacatataaaaagaaatccataccattctaccaaattcccagtgtgaggaaaacagtaaaaattttagcacaaattattttgtattgcaacagcctgtgatcagaatcatatggcaagggaaaaagacttgattcaaagctaaacaaatagctttcttgttgctcactttcttaatctctttaaaataaaataaataaggtatttcaatgaaataaattatttccaaggaacacagtaccttctgtacgatggctgtatttactttcaagtaataatgcttagaggtagtatgtacaaaagttgacataatcatttcctttatttgactatagtgtctggatctttgtcaaaggacagagtgcagttggcttgtttttcaagttatatcttgtctcagttacatgtcagaaagatcatagtgttactgttttaattttgattgctaacataaaattggaatccaaagtaaaggaaattgtgaaaattaacttgttacaagtataagagaacaaagcatgggcattatgataatgtaatcattgagaatccatgaagtaaaatgtatttttaaagacacaaagttaatgctttcctttgaaatctccatgtaaaaaatggaaaacataactttaatataagacaggcacaggtagtctatgaagaattacagcttggaaaattaataaaaaatagtatctaaaatagtattagtaagatatgaagctcattcattaacggtctctatgataatatatcactgaaaatgttgcatgaaggacagtctttgataggattatgtacagtataatagcaagttgctggaattaaaattcactgagaagatacatcttgtgaactgaagggtaagaagataataatggtaacattaataatagtaaataataagaa

SEQ ID NO: 56370 - DNA, 939 bp, Bovine  19866881059826
  misc_feature (1)..(1): n is a, c, g, or t
nagtgaggtgaggcacatcctagagacagtgagggaaaggatatggatctcaatattaacccaagttgtcatctagatattgtataagtcacttaacttttgtttgctttcttctgtgttatgagaataattaaaaatatttattgccaatactgtttttatagtaaatcttagtagatacacacacacacacacacacacacacacacatatatatatgtatatttaatgctagtcagagagtctccctggagtttgagtaaagcagaaaccttgctaaattgagacatttctgaaatactttaggaaaagatgacatttgaaatacagttatgaaggaaagttaagattttaagaggtagacatgaaggcagcaaagtagcaagaagaggacagcataagaaaaggcaagaagtgagaaaaaagagaatgtataagaatagctggtagaacagagataggaaatgctgaaggatttttatagttcatgtgggtaaaaataaagacctgttagattcagaggaatgctttgagtaagcattttagccagtgaacttttggttttagatgatagagcctagcttataatggggtgtaagtatgaaaggaatttgttggctcatctcatccataaattcctaagtaatattgcatgtgaacatccctccataagtttgcctttgttctgtgctggctttattctcagctattgaacagacagtctcacagcttattcccagccatgcacacagcttgtccttgctaacccagcggttttttttagacatccactctttgacaaggaagaggaagtttctgattaatttaagccaaccctggtggccccgtttccttagccagagattgttttaagaacgagcttgtgttgcagttctggaggtttagcaggttactggagtcttctaggaattactcagt

SEQ ID NO: 56371 - DNA, 1326 bp, Bovine  19866881080277
  misc_feature (1)..(1): n is a, c, g, or t
nagcttgcagttgctctgctagaagagaaggccttgctcaaaatcgagcaaagtgcacactgataaaaataagacaactactcatagatctaaacatgtcagttaatggcctggatgccatgctgattttaaaggccagagagtcttctgtgtcttatacatttgacaattcttatgttttatttattttggttggcatgtggattatagtaccctttcagtatgtgttactttgaaatgatgaattaacataatgggctagattgtacgcctttcattttcaagcccattttacagatttagaaactaagagttgctgacaaaagggccaatggtgattgcaattgtgcagtcagaaagggttcacaggacattgctcacccaaatcttagatgaatgaagaaaacaaaagttgtaaagcagggagggacagacagggaggagagacatgtcagaggtttacttaaagtttcttttttatcccatatgctaagtgcttgcttatgagagagcttttgtgtccaccccctttaacaatatgcattatgacctcttatgttgctccccaattttcccctgtacaaataatctcatatcatgatagataatgaggaagaacactctgaaagatcatcatgtattaatcactttagttgttttaatataggtaaaatggaagttagtctttgaatgtattgctagaatctctgattcccccagtgaccatggatgggtggtgaggcatcctgagcgttgccagcccctcatgggctgcgtgatcatttttgtcttgcttcataagagtgaagtcttctaagttcattagaggagaatttttgtattcaaccaaaatgaactcagtttacaattaatgcttggtaattaatccatgcacattttcctcttttaccctaaaacatattctactaggtaataaaaaggtattttttctccttcaggcatcacatctctataacctgcctcttggccttagagaaggctctgtaaatggaagagggagtctcctcatttaatttgatacatcaggtcatcatcaaaatatttatttcctgatcttcccacatagcaggtgactaaaggttaataagaacgcatggaaaataattaaggatgaaaatatatacaataaaattcaaaacaaattagaataaataaagtttagtgtgactgttaggttaaattgtcttgatgctcactccaattataaaatgttgtgggtttttttttttttttttcttttcttttgaaggacagagaagcttgatagatatagtaaactattcattactacatatctaggaaata

SEQ ID NO: 56372 - DNA, 1467 bp, Bovine  19866881080468
  misc_feature (1)..(1): n is a, c, g, or t
nagaattttgattgaccctggttactgtgattgtgtgtctactgccaatgaaaatgtagctgaaatacacaaatatttttaaatatgctgcatgagtgtttcctcactgccaaaaaagaaaataagcagcacaattatgtaaactcttctgttattcccagtgcacaaacattttacagatgcttctctatgaaaacattctaaaacatacacttggctgtctttgcttacctagagttgtttggcaataactatttcttttgggatgtagcttattattgagttttgtggttgagcagatgaaggatgagaagcacagaatttatgatctggaaataccctagcttactgatattacatgtctatcacaaatgaacatcacaaattcaaaagaaataaatacacaaaaaggagggggtgggaggtctctgtagttttgaaacgagtgtgactactttagctacatccacttggatcagaattcacagatgtctgtaagactgtctcatgacccccacccttctccatttcagcaagaactcatactgtgtgacacagtttggcaactgagaatgaagtcatggtaaaggagaggaaaacattccacgcaaggagaaattcagttttgtactctccaacctgcaccaacttccagtgagttcttgcctctcctttttctacataatgacagtcaagaatgaaaatcaggctatatcagcaaattgagaagaggaaacaagaacaacaaagattaatttttaaaacttactacaaaacaaaaaacatccatcatcatgtgtaaagaaattgaaagcttttaatcttcactgaataatggatatttacccaaaaaatatgctttaaagttgtggttaaaatgccactctcaatgaagtagtcttggacaaagacacaattcatcagtttacaggtcatgtaaccttgcatactgcagttaatctgtctaaaactccatgtttttatgatgataaaaatattaatagctaacatttattgaaagtttaccatgtaccagacactgttttataatcagtacaggctatctcatttaattctcacaaaaatcctgtgaagtaaattccatattgctatccctattatacaggtaataaaactaaggcacaaaaaataagaaaaaaataagaattcatttttatttcaatgtttagcaaaaacttatgctatatgctcaactttcttctaggtactttacaaatattaattaataactgtctctcaatttaatagaaactgctattttaatctcattttacagattaggaaactgagataaaacagattaagtaccttgcccaaagtcacagtcaataactagtggaaggaaagttgaagcactcagtgtgattccagtgatttttgcacttcaaaaccactgggtattattaccaccccttagggtgtcatgaagaatgaatgacatcatgg

SEQ ID NO: 56373 - DNA, 2849 bp, Bovine  19866881140451
  misc_feature (1)..(1): n is a, c, g, or t
naaatcccctgatgctgggaaagattgaaggcaaaaggagaagagagcatcagaggatgagatggcgggatggcatcaccgatgcaatgtacatagacttgggcaaatctcaggagatggtgagggacagggaggcctggcgtgttgcagtccatggggttgcaaagttggacatgactgggtgactgaacaacagcaacaatgacaaatgaagtgccattttggtgatcttggtcataacaggtagggaaaattaaatctagttattaaggaggtaaaacaatatttcaacatagaagcgtttctaacagaaatcatagttctgtgtttattactaaaatgaaagccaattaagatttaaaaacatcctttcaatagacagtatgattctcaagattatatgacttatcttttcttctgggacaaatacattctgaacagttaatatgttgttgttagatctgctttttagtgagtggtgaataaatacataaaaagtctatttactttgatattcttggcaatgaccaacataatcaataataggcaaatccattaagatggttgaaaattcagggtctattacagagatcattatcataacttgaaagacatctcctccactttcattccaactcttaaataccactcgcacttaaactttaaaaaattcatctttcgggatctacaacgctgctccaaagtttatttttacattttttttaaggttaaaacattgctcatgaaatgttcaatttatctgaatagcattaatagaattccttcactttttccatgaaaactttttatcacctcaatttattatacagtgttgattttttctccaaaccctcatattttactgtataatatgtgaatatttttctaagtcttcgtctgatcattcatcaggctttgatatttataaatgttagcttaaacctaaataatctgaagagaaaagaataaaaatctgtagtttcaaattggacaaatatatttttcttggcagttgagagtcagtgtaactgaataatatagaatttcattgcaacgtaacaaatatagtgtgtgtgtgtgtgtgtgtgtgtgtgtataaaatctttgaagttttaatgctctctctgtgctataccttttaaaattttatttataaccagtatatgacatataaacaatggaaagctttcaaagttgaattcattacaggtattaaatgcacccataattatacctttctctattcacttgagatgacctgttatttggcactttttggatggaaatattcttgttcaattcatggaatgttttccactatattagtgctagtatgtagtggctgccttatccagacatataattcttacagaaatactggaatggaactccacgaaattaatattctgtgtttcccctgcagacccttagaaagaggaattttatatgtttttttgcagaaatctgatataagcctgtataacttaaagatcacattcacgttatttcccataattacttagcactaggccaacaccctgtatacaatggcatatttattttaggtgaactatagttttgaggttttataatttctttgcgtaatgtgtatatttagaaaacatatacatacagttgacagacattataactattcctgctatacaatataaccattgagcctttgtctatgaatcatataaacataatgttatgaaatgttttaaacttcaggaaatagattactttatcctgtatttcaaatttaaaatttttatggcaatatgtatatatagaacatttatatatgtgaaagaaattcataattgcctatgtaagtctgtctgaattaatttattcatttatttcccctgaaagtcttcattcactactggtccttcagtggtaaaaaaatatgatgtcaaggagagtcattgacctacctactaaaaacagattaacttctataaaataaaatcatccagggatgcactgatattttttgattgtttaaaatttgagacaaaaaaatattaaacataataataatcatgatccccttgattctaccacccaacttaagagctggaatattattaatagtgtttcatctacttctgtgtttccattcttcttcctcccccagaagtaactattatactgaattttgtgtttatcttactaattattttaaaaatagttttatcacaacaaattatgttacttaggttcgtttgcttttgagttttataaaaacaatgtatttattatatgatcattaggtttcaacgttacatagcagggattggcaacccgtcatctgggggtcaaatttgacctgtgaatcaaatgttacattttacataataagaaaaaaaaaacttgcagaacttttagtattattgtctgaaacagaacttccaataataaattaccagaaactagtaatttggagattgtcatgaatcactaaagaactaaaaattctttctaaattctaaaggactaaaaagttgtttcaaacttactgtcttagctagagctatgactgttgtttagaggctaagtcatgtccaactcttttgtgaccccatgaactgcaaaccaccagactcctctgtccacaggatttcccaggcaagaatactggagtgggttgccattttcttctccaggcgatcttcccaacccagggatcaagcctgggactcctgcactggcaggcagattcactaccactgagccatcagggaagaccataacagggctgccataataaaataatctgcttaaaaaaaaggcatttatgatctcacagttctgcaggctagaagtccaaggtcaacatg

SEQ ID NO: 56374 - DNA, 1405 bp, Bovine  19866881155178
  misc_feature (1)..(1): n is a, c, g, or t
ntctcttactcagaaaaaagtccttcagaatgaggtattcttacaaaaaaatcattatatccacatatgttcataagacacactattaaatttagtagtcccatcacatgtaagcttcagatattgttgctttaatgcattccctcactactttgataaaagccttaagatgttgccactagttctttgatgatttcctctgatgttacagtacctttctttttttcctccaaaaaatctgttttgcataaacatgagaagtcaaggcagtttgagttaacgagtaaaaaattcaagtttttgcaacaaaagtacatatatttgtacttagagccctctttctcaacataagagaagtttattttctatttctagaaaatatgaacctttaggtctaagagaaaccccaatatgtttttcaagtttataactttgagctttattcagctatttccccattgaattaatgagatttattaatggaattagagggggaagaggtatattgacctagatattgacacagttattttccccatcacgcctgcctcactcctggagtcctgcattctgttggattcagagatggatgaatttgtttttaatgtttagttctagcttccaaatcattttgtaacaattacatttaataaaatgccatttttgttagattacttattatatccataattaggtttaatactcctgtatggattaaatattaacaaattaataatcaacttgtttgtccatttgaacaacaaagttctgctttcaactgctgctgataagtcgcttcagtcgtgtccaactctgtgcgaccccatagatggcagcccaccaggctgccctgtccctgggattgtccaggcaagaacactggagtgagttgcgatttccttctccaatgcatgaaagtgaaaagtcaaagtgaagtcgctcaatcgtgtctgactttagtgaccccgtggactgcaccctaccaggctcctccgtccatgggattttccaggcaaaagtactggagtggggtgcggttgccttctctgctgctttcaactagactatagttaataacaaggtattgtatacttgaaatttgctgagagtgggtaagtgttctctgcatttaaaaaaagagttaactatcagaagcaattggatatgttaattgttttgatcatggtgatcattccataatgtatatgtatatcatatgcatttttaaaagccaagtgtcatcttgtgtgactctcttctataaaaaaatgccattctaccagctctcagtggtacctgtgaatttttattcatctcattgtgctaagatgccatttttttcattttgccccctatattctgtgacttgatagtataaacatctaaaatctaacttttgcatctg

SEQ ID NO: 56375 - DNA, 943 bp, Bovine  19866881162727
  misc_feature (1)..(1): n is a, c, g, or t
natatatatatattttctgttgtactactttgtcccagaaattcacttttctaattctccttttagccttacttcaactcttctagaacaatgggtctactcagcatttttaactttttggactctacaatgtgactttctagacatttgattccttgtatcatggttcaatttttggctttttgtgtttactttctaagccaagaattattagtttcccctatatcatatctggcttcttggtctcccagtctgctgaggtggtcataataaagtgatttaaggtagaaatacagaaatgctctatgaccctttaagttggccatcactattggctctgcatgacttagcacattgatggtcagatactcaccttccaaccagaattggtgactttctcctcttcttccttcatggtggacacccatcttagagaaatgaactgctggatggaatgagtctgtccagggcaatcggcttttcccacagagtttctcccatcacactgttctttccagtaaacttttctctccccttttccctgacttttggtccatcagtttttccggagagttaatcagccgattcactgttaagtctattctctctctcagttctttttttgtttagctaagtgtcagatatgtcaaaaattgaaggacaagatacaggagatagatatgtagatatatatatatatatttataaatatctatatatgtatgtaaagagagaatcatatgttgcattatgttatctgtataatgtaggtaattgaattgagtgaggggaaagatttattaagcaaatacttcttttagatccaatcaacgtttatacaagaacattattttaaatattcattagtaataaagcataaaagtttggctatagagtttcctcaatataaaaagaagatggactttcctattcctatattcca

SEQ ID NO: 56376 - DNA, 775 bp, Bovine  19866881166146
  misc_feature (1)..(1): n is a, c, g, or t
ntaatactatagcactgattgattccaaactgtggtacccactgcttttaaaagcatgacttcaaacacaatgcaaaattgttttaaatataactatggaattaccgagagaactctttttccatttatgtcaaagatgaaagataatttgtgataatgcatagctattttcctgtcatcataactgaacttattctctaaactgtattaacaacagggatcatcagggggcctacccactgatatcttactacacacataactagtgataaaacttttagatcacagttcgtgttttcaaaatgcatttactttcataaaatgccacgttcacttatatattaatatatgagtatcatacttaagatcatgaaatacatttgctctaatttagcaactaggagtataaatttgatttgataagattttttcattactttatttgattgaattaatactaacaataaaatatattattgggtttaggaactaaatttgtggttgcaaaaatctgaattcagatgctgactctgttagtaggattgccagataaaatacaggatgctcagctatacatatgagtttcaggtaaatgacacgttattttttggtatatgtatgtccatacaatatttgtacatacataaagaaaatttaaaaatataaagaaagctgagtgcagaagaattgatgcttttgaactgtggtgttggagaagactcttgagagtcccttggactgcaaggagatccaaccagtccatcctaaaggaaat

SEQ ID NO: 56377 - DNA, 1134 bp, Bovine  19866881172542
  misc_feature (1)..(1): n is a, c, g, or t
nttgctttcatttttagccagcttacttgatccgggggttaagaatagctttcctctaatggtgtcaatctggaaaaagagagagactttctcagaggaagtagctagtcagttgctgtctgggcaaagtgtaatgtaaagagagtgggatcatccagaaccctcctcctctgtctcctgctccttccatcacgtccagctgctttttcctcaaactatggcttgagacttagaaaaaaataaatgggtctagcagaagcatgtgacgaaaactctatggaaaagtacctgtactattgcaacactgactctgtagctcacagctaattaatcccacaatagaatgtgagttggctagttgtattttgaatgttctcatgtggcctctcttgacgggacttgccaccaagggttttaagctttcaccctatttaatattcatgtctaaagaagcaaggtgccttgggatattaagaatttttaaaaaattggtcctttaggtttagattataatggaaaattcaacagctatagctgctggagacaaaaggtgaacaattcacattctgaaagtaaactatcaactatatgctgaataggaaaagccataattattggacagtgaagtgacaggctttgcaattgagtggtttagtaaattatacccaccagaagttaatatcccacatgatatgattcctgagggcaaagttccttacagtaggaacatatttcaatgagagatttagtttggatagagggagtgaaatcagatatcaaaaatatattgttaaaatttacagtactctttttaatgaagcttcaatccctacgtataaaactcattctctgttagtcattcaggcatttgacatctattgtgacttgaaccatgcagatttgaagtttactaggaatttccctccctgaaattccaatttgttgccaatactgctctagtctcttgatgtgtgcatacagcatcgaatagatacaactgaagacagatgtattgcagcaactcttgagttaataatactcttgatgtctgccagggctgttccaggcttgggtgtacattttgggaaaactcccaagtgatgctggggggcacctttgattatgaagcataga

SEQ ID NO: 56378 - DNA, 730 bp, Bovine  19866881309090
  misc_feature (1)..(1): n is a, c, g, or t
natatgcttgttaaagacaagacttttgaccttaactttctcttctcccttcctactctctagaaatagaaatctggaggatacaaggaagcagaaatacagggctggcagagtggctcaccagcttgggtcagtggaatgctccttggaatagaactacctgtatgctttggactcttacagacaagagaaaaagaaaaagaaaaaaaaaaaaaaaaaacttcaatcttacttgaagtttgtattagggttttgttgttacagcaacatggcatatacactaaattattacatgaagatatagtgaaagtcttcaccgacttactactggtcttaggataaaggctaaaatctttccctggaacacaagaccctgtgtggtgtagttcctgcctgtttttcaaaccctatcttaagacactctgctttttgcccaccctgttctagccttaaatttaaaccttccatcagtgccctgcatgctctaggctctttccatatgtttttaccttttcttagttctctctttcatccaacaaatttccccttgtgcatccatatatataattcaaatcttagctcgtttaatgttctcatgaaaatgttccctgaacccacagtccaggtcacattctttcattataagtttaatagtgtcctgcttctgaatgctgtatggtcaatcaagcaatgatcctctgttaggctgtaagctacatgacagccaagt

SEQ ID NO: 56379 - DNA, 1225 bp, Bovine  19866881357806
  misc_feature (1)..(1): n is a, c, g, or t
naagtcatctaatggggagggaggagagaatgtaaatgacgaaaatgaggccgaaagtaaaattaagctataattgtttgcacttcaactttaagaagttcaccattaattaaaatgtttctgcaccactcgccaccagactggcaagaaggaggcaaggctgcctatgagagcgttctggaaccttcaggaaggcaagcaaggcctgtgaggagggaacaagcatctccatctccagcacacagaggcggtagagacaccagaatgcagggtggcaacctcatcgccgcattcctctcacggccctcagttttgattttggctctccttgtgcctcgctataaattactcttgtaccttttcagaatgaagggggatagggacaccgtttgtttaggaaacatttaccctgtttcatggagtctgtctcacatttcttttttcccatttgaacagctctgaaatgtaagtgcatctcacagtgatgaccatcctagagttcactagcaacttttttcttgagctgtttttttccataaaataatgctgatagcatcttagcttcaattaaggatggaactgaatctctcttctgtgccaggcactgtgcaaggaatgaggaataactgagatgtaatataatgtcaaaggaatataataaagttaggcacaatgaacatgcttgaaattgaacttgcagaatggtcgctgcaattacttagtggctcaccaagcatttgaacatggaatcttgtaccagtgtcatgcactgtaacccagcattgttctggtgactcttttctggattgatgagcagtgtcagtggatgaatgtagagtgtaagctctgtggtgcagtgagtttctcctgtttgttcactgcagcgttcctatcactgagaacagtggttggcacagggagtcactggataattgctcattgaatgaagaagaaaccaggccaggggttggctttgccctgggagcaaaataatttttacatctataaattggttgaaaacaaaaatcaaaggaataataatatttcatggcatactaaaagtgtaggaaattcaaagtcccgagtacataaagttttattggcatgtgtccacattcattcacattttctctgactgttctcttgccacaaaggcaaagctgagttgtaaaggtgatcttaggacctacaaagcctaaaatatttactatttatggaatagtaa

SEQ ID NO: 56380 - DNA, 1629 bp, Bovine  19866881364894
  misc_feature (1)..(1): n is a, c, g, or t
nagtacattatcatattttctactgaatatttaatacatttagtttttgtacaagaatatagcttaaagtttattctaagaacagactaggagagatactataattatcatcctttataccaaatagccaagggaaattaaattttattcatattaccttgattcttgagattttgagagcatgttgtaggaatttgtacaatctttattatagtacttttatccctaccaggtagggtggaaacaatggacatatcataggccctacataactttcaaatctcacccagcacctgagcctaataatcaccagtggtgctcagaaatcgttttaggcaaaactaagtagacagcttcagcctttctgcctcccgtgcctatccttctagcattttttctttcatttcttcggaacccactgttcataaatggttccatcctgaagtcagctaaacataagagatttgataggctatctcattcaaaaattaattgcatttacacttgttttgatggggaaaaaacttattttgtgggataaataatgaaaattcagtcactctgtatcatagaaagggaatattcttggtaaaggggtctccttagcattactgtaaagaaaaaaaaattagaacctctttcttcatccttgagacattgcttaaaggggtgtctgtggggggaagaaggaggagagggggagaaagactatattttcctagcaataaaaatgaccaaaatcctataaaaacactcataaatctctaaagggatttcttatatatgctataattttgagggttgcatgaacgaaatgatcacatccagattagcaagaaattacaactaatttgtaagggctgacaatagggactaagccatggcattcaagccagtgagtaatcagaatagttgacagccgttcttcaagactcaaatttccgatgtggcatgacacttggacaaacaattattagcaaactatagtcctatgaaaatcagtttataattaatgaaattttaggacatgccaatagttaccagaatatgctttatgtgttgtataactttcattagaaaaaaaaaaatctgcaaaaaggtatctgaagctataactgcatgattaatttttgccacaagaaatatcaatcactaaataccaaacattttcctcagagctactggagacattaaatcaatatgtaaaatgccaacaagacattgcagaatacattccttgcactgtcaaagagcactatccagaatattcactgtagaatgttactgtctaccaagaaagccaccatcctagcaataaatgagtcaccatctattaaaattaagaacttgcttaaatctggaagttttgcagtcttgacaaggaagttaccagactagaaaaaggcagagaatctgaggcattcaccaagtagtgtcattaattgtccagtggtccatatcattaaataagtgttgggggttggggaggaaaatcagcaaacaggagatatcaaataaccaaggccagtccttcagaaatccccaagtaagctagttttttttctcatgtctcattgccagtgtcctgacaacctcctcactgtgataccttcttcctatttcctagaa

SEQ ID NO: 56381 - DNA, 1921 bp, Bovine  19866881378103
  misc_feature (1)..(1): n is a, c, g, or t
ntcacagagcaggtcatgtaatttttcaaaaaaaaaaaaaaaaaaatcgagggccagggcaaataaacaaaaagtcacaccaagttcacccctccaaagatactcaggccagactgtgcacacaaacttcacttgctactcatcaacatcagcaatttatggccagatggttataaatttacattctataaaattttagaggatgttattttttccactcagtttgttaattaactttcagtcttttttatttcctcaaacataacagttcactcttcttttattaatgatacagtatcatattcttgcctgtttcttcatcaatctatttgaacaaacttcaaactttcatgaaggatataaaaaaattaggatataaaaaaaatcactcacagccaccagtactggaaaactttttctgggcattattttgcactcctgaagtgaactacaatgaatagggaatcattaaaaaattctgacaaagtaaattaacattaaatctagccctttgtgctgttcttagtcgctcagtcatgtccaactctttgacaccacatggactgtagcccaccaggctcctctgtccatgggaattctccagacaaaaataccagagtgggttgccatgccctcctccagggcatcttcccaacccaggaatagaaaccaggacttttgcatcatagtcagattctttactgtctgagccaccagagaagcccagccatcagggaacttttacaccattattttaaaatccctgtcccacttaacattgccttctccgatatatatatatatatatatatatatatgtaatatatatatataatatatattttttcatattaactaaccggagaaagctaaaaatttttctttaaaaaaatactctaaaatctaaaatcctaatattaaaagttgtatttttttttttctgtagcactaaaactgctttgtaaaatatcaagtaaagacaagaaatgaaaaaaaaaaaaagacaagaaatgaagaaatgaagaaaggaaggaactcttagagctgacagttgtagaaattccatcagtttttggtgtatgtttgaaactgggccattgtgaactgagttttaaatatatctttgttttatagaatactaatacttgttttttgttatacaaatgaaacaacaaaataacttttgatataaaatagataaaatattatgtggcaagtataatatcttaatattatttccaaatttcctttattgtaaactcaaagtgtattgttatttgggagagcagacatgtttaagcagacttctttgagactatttttcatcagtgtctaatggcaaactctttttaatgttgacatttactgcatttcatagaaatttactggaaaacattttacagatgctgtgtgcacagagcaattgattaaatatttgaaatcatacagaggaatatattgctggggtcacaagatcctaaagggcacctttgtgtgtatttttctgagctcacactcttacaggtatatcagaaggagagtggttcaagtaaacattgctctgggtatggatttatgccagtatggatctactctgaatgttagggaaaactgaatttgcttattttcaaaaggttaggcagccacagttgtggccatgtgagtatgaaactgagcaggggttgtgctttttaactttttgtttcacccagttacttctttgtgctttttcctgcttatacgttttaatggctttcaaacaaatctgaaatcaggcataaatgtagagtggaaagaatcctctaaaataagacttgtttcctcaatattttttttcccttccattaagtgattaactatagaaatctctcagtctgggtcactcagatcgactccctcttcttccaagagcagatatcaa

SEQ ID NO: 56382 - DNA, 732 bp, Bovine  19866881414147
  misc_feature (1)..(1): n is a, c, g, or t
ntaaaattgtagttgttaataaaggacagtcatgaatagagaaattatctgaagaaatccttctttatgaagtagcaagagtaaaaatcctacgtggtttcatattcatgggattagtgtggaattggaacacttttcctgtagcaagatgggagcagaaaagtgtcttcatctctgctttccggattctgacactgaagctttattattcaacctctttccttcacccaattaacgtacaaaaaatattaatgtacaaatagtcttcttggcagacagtacaaatcatgtgacctctgttagaatcctatacactttttctgaaaacggtacaagttaccaggcaacatttactacagtttattttttcttatcttacttaattaggcagattttttttaaatgtgtttttttatagctcagatgtagcctaagtgacatttgttgccatagtcactatggtgagtgttcagttttttgggattataaatagtcacataaaatttatgtaaataaccagagatcaggttagagttttcccaggaagcgtgatggtatttcagccttctttttatacttttatttatttttttctttcattaactagctactttaagtattggtagtgagggtctagtttgattttctcaaaaaatggttgaagacagccagaagggccaccattatccaatcatttcagaataatttttctctcttttggatctcatcttc

SEQ ID NO: 56383 - DNA, 1173 bp, Bovine  19866881497148
  misc_feature (1)..(1): n is a, c, g, or t
ntcctgctttgccctagatgaaaagggaagaccccaaaacattggtaggaggggaaaaatgcaagaagtaaccaaaatactctctttatttggctggttctctggtgctagcaaatgactgaatcttccttcaagctcgacctttcttctggcagccctttccaatgctttaaagacctacacccaggctagggttctctctcctgcaaaactaaggcctgcaggtatacatcttgcagcatctgagggcctccttcacttaccagcccaagaagacaacctcacctctgagttggctctgatgaagtgtgtacacctgcccaaaggctctggcctaaaaccaccttgtctcattctctcttgttatcctgtctagttcccacaacaaactcagagagcagagccacatcttcaatacccagttgacttctcaaacttaagatttctcaggaaggaagcagactctaatccattaagtcctccaacagaacaggacataattctggatttcccattgatatggtgaaaacttattttataaatttcaaggtaagggtcaggtaacctagccctacctcacttggaaaatgtgtccaatatacagcaaactagcagctccttcccaaataaaaatcctaataatctcctctccatgtatcattttcactatctttttttctgtatggtaagagatttaggagtcatttaaccatgtcttggcaacctattttttgcaacttctgcagggtgatctgacttatatcttactggcatttattattttaaagcactggcttaaattttctctttaatataatgttataaatataatagtctttgcttttgagagtgtagagacatgtgcttctcaaaaactactaacatgaatttaaattaacaaaaaatctttgaaaaacatgttgacagtatgattcatgtaatttctaatgaccagattttttggtttcataattccatttctgagataccattctaagtatacaatcttgaatgtaaaaaaaggaaaatggcatataccagctatctttaaaaatatatcagaaacaatctaaatgaaaacagtaagtggttaaataaagtaatggaaagccaggtaatgaaatattacacagatagtaaaatatttttgaagcttatacagtaatacaaaaa

SEQ ID NO: 56384 - DNA, 1797 bp, Bovine  19866881600935
  misc_feature (1)..(1): n is a, c, g, or t
nagtctttcctaagtcatatggtgaagggtgttctcagaacacaaaagagagaggatttctcaaccgtcctattttcttggagcacagggcttgagtacatttcaacactgggagatcagaagttgttttcttcagctagctctaagactttgactctgcggcacctgtgctggtctctcctgggcctcttgggccttttgaacctgaatgttgtgtacagggccccagattgcatccatgcagaaggaaatagaaccagaactgcgagacaggtgaaaggtgcagccggttagctagcctgactgccctgtggcaaacagcatggcacttctttcacacttggctgcagtgaatgcccagaactgctttctcttcaagactgtcctctgaccctttgagatttgagatgtttggacatagggctttcttctactttgttgcgagttgaatattcagttggaatagttttctatttttttaactgacttttaaatccttctataattctaattaagctcatcttcatctccggagcttggctagctctaaggcaagaaataaaggaagcttgctcgccaggccaggcttcctaagctctcacatctctacttgaattgatttgcattataatgcacatgggcaggaagataggtaaattgaatgtgtgattaactgagcaaagaataaagtccatatagagttaacattattgctaggctacttgcaggtcatttctgaaggatggaaacaggcactcgctaagaatgaatgtatgaaatatgatgattatcttattgaatataaaacatttattacatcatccagttcctttttatttaacatgaaatgtgttaaacaatttctaagatgagagctaatcatgctatgtggaggtagcccagtgctggcaaatgggaaaaccaatggatctggaaatgatccttttagtactaacggggagatacagtaaaataatacagccctacctgggatgctagggttttcacattgtcctgcaaaaactaatgtttttataaagtatgtatctggcaaaaaatatatatcctatatctaattgtgtttgggggagtatttagtgcattcagaaataggtaccatttttaaaaaaatgaaacttagacgacttaagaagtagctttgtgaggatgtactttaaaacaacatcctatacataagcaaaatgttttgtctggcatatgatagtcatgctgcatgacctaatggcacccagagaaaacattcttttgacattcattgtgaatttgggttccctcattcttggcattttgtaaaatgctttgataatttaaatatcacctttagactttcacaatacaattgcttagataaagtttgtattaatcataacaatacacatataaacacttatacttcattgtctctttctatgttagtgtgtccatggacagatttttgcataatcaagttaatagtattcgtgaatctgcatgatacttctggtttattctcagtcttggttctttccactttattaaaaccaatcataataagaaaatgtttatttcatagggaaaaaatcctatttgtaattattagcataccatatagggtgaaagcaagcagtgttttataattgaattatgtacaataaacatgtgctgggaataatgcttctgtatgttaagaatgaactcagatctctaaaaaaaagtcttgtattttttaataagtaaaaggtttatcttaagccatttctgaaaagcgatgttgctgatgttacacatgctgaacat

SEQ ID NO: 56385 - DNA, 1744 bp, Bovine  19866880372845
  misc_feature (1)..(1): n is a, c, g, or t
ntgccaaaaaaatcttgaatacagatattaagtgggatcatagcatcctgcaagggctattacagaatatgaattgagtgggatatttgtaattcattgattcatttgataaacttttatcaagacttacacatgccaggcaggtacctcagtatcgggaatggggggaatttattaattattgagatgcctacgtgcacacacacacactcagaattcacatcacaaaatctccttttgacacctgggtactgttgacctgaagcaccagctgcggttgcttgtttttgcttcagttacccgacttctttatttaccttcccctccagtttaatttggtgttgccactgtgtaagaagaggcttagatgttgggagagaggtggaaagagatatgtgtatttggtgtaagacatttgtgtgcacaactgagccgccgatctaatgagatgacatccgggtctgcaagctgaatgagaaggaagagagatgggatttacaagctgtctggataattaaagatttgtttaactctcaccaggattccatttcatggttttgtttttgtaattaaaattatttcaccacagggttaaaaccttatatcttaagtgtcacccaaaagcatatttttgtgattgagttgttctggaaagcctttgaaacacaaggtttaccaaggaaataataaaatgcaggcataataaatacaaaggggcaaactcaaggtggctgattagcatggaaagattattgaagtgtgcagtgaaatatggggtaatctagtggacatggtttatgggcattttgtaaaacccagctttgattagtgtgtgtacttttggtaataggatacatagtcttgaaaaaatattggagtcccctttgaggtataatggtttagcacagatttttcatttgaaattagtgtttactttcagccagagaaaactcccagatgttttttccattaagttgtgtatttaactcgaagccataattacagagcactttgcaatgtgtggtgttattgcctgtatctgaagcctatactaatattaataactaccattcattaagggtttgtcttatgcccgaccccgtgttaagcattttgcaaaccgattttaatcctgaggaaaacctgtgggtattattatgtccattttacaaattaggagcctgctacccaatgaagttaacaagtcccctgcccaagtttctggaaaggcagagctgggatcctgggcaggtgtgtctgactccagagccttggagctctgtaccgactcaggtcctgaatgggggtggggtgtttgcatggggctccctaggtcttgcctcctgtgtcaccagggtgctgtgcagttggaaagaacatgtggtcctcctctactccagcagccagcacctcagtttcatgttctgtaaaatggagatcataattaaaaaaaaattatttatttattactgtttaactgaagtacagttgatttaaaatgttgcattaatttctgctacagcaaaatgattatctatatatccatatctatatataggacttccctggtggctcagtgataaaggacttgcctgcaatgcaggagccacaggtgatgcaggttcgatccctgggttgggaagatcccctggaggagggcatggcaacccactccagtatgcgtgcctggagaatcccatggacagaggagcctggtgggctacagtccatggggtcacacaga

SEQ ID NO: 56386 - DNA, 1147 bp, Bovine  19866880379314
  misc_feature (1)..(1): n is a, c, g, or t
ntaacggtaccaaactgtaacgaccagtatatacggcaccgccgtgtagtcctggatttttcttaaagtaccaatttcacttagcaatgaccttgataaggcaataaaaagtattcactgtattaaatgtcaacccttgagcacataacattttaatattctgtgtgaaaaatgggatgttccaacaagacctccgtgtgtatcagttacaatgggtgtgagctaagctggctgcctttttaatggaatatcatttttacttgaaaacaaactatgcttattcagatgtgggtatttggcagacattttttttctaaaatgaacaaagtgagactatcacttcaaggaaaacaactgaaagtatttattgccaataataaaattccaactttatagcaaaaatgaaaattttagaaaacttggcagtataccaatatctaaagaattttaggatgaaatcggtggtgatattgaacaaagtgactgtttgatattgtataacaaaacgtgtcaacatttggaagatttacacaactcagtgaatcaatgttttccaaacgaccagtgcatgatacaagtacaagacagaccagtggattttaaagtaatgaaatgcagggacttccctggtggtccagtggttaagacttcaccttttactgcagggggtatgggttcaaccactggtgtgggagctaagatcccacatgcctcatggctgaaaaaccaaaacataaaacagaaataatattgtaacatattcaataaagactttttaaatggtccacattaaaaaaaacctttcaaaagagtcattgatatagttgcagaatccatcaacttcgaagaaaccaacctttagagaccatcagctgttggtttacagtatcaagtcaaaaagcaatatccacaatcatctaagaagtctattaaactactcctccctttccagttacatatttgggtgaggccaaactttttttttcatttttgcaaccgatgtatcacatcagattggatgcagaaccagatatggagcttcagctgtcttctattaagctaagcatttaaaagatttataaaaacgtaaaacaatttcactcttctcaccttttctcttttaaaagtctcttatttatgttattat

SEQ ID NO: 56387 - DNA, 2115 bp, Bovine  19866880400036
  misc_feature (1)..(1): n is a, c, g, or t
ncttttcctgatgaaatgccagtatgagagcccaagtgcccatgtctccagaacactccggaacaggcattaccctgcaatcaaagttcatatgaaatcagcatgacttaactacatcacactgaagattcatcatactgaaaatcaaattctatgccaatgatacatggcacttgtagcttattttacaaacattaactaattaaatttgcaaaacatccctgagcagcaagacataatgatatctgagctgacaacctaattaagcctaattatttctaagatttccctcttccaagtgggttctatctccagttcagagaagcgggctcgctatgtgctcaaaccagatgtggaagtcagctatcacttattccttccaaaattctcttgctatgaggcgcccacatttccttttaggacagctcaacctgtaccattttctactggaaaggctcatagaaaccccaaaacccccaaacactaatctagccttgaattcatagttctatatcttaagtgacattttttgctcattttttatcagcaagcagttttgattgttatccaaattgcgttgaccagcttctctctactgccttcctttttccccccataccgtctttttctaccgtgtgtcctgatagacacaggccctatcttccacgcagtttcttgcttccaaattctgtcatcaggaagttgccttctttgtgctttttttcatattgcctctctgacttgaacgctctcaggtttcctcaagttctctgcagtccctcttttcctttctgcttaaaattaggcaactttgttccatccgttcattacatatcagcttctaaattttctcttcagcagcaagctaggccttgaaagtgaatgccatatgtttaaaaacattgctagaagacatattgtgaaggggaatgttactgtttgtggggggaaaaaagaaaaaggttatacaagtatgcttaaatatacacctcgggagtgggaaataaataattcttatgagggttgtattagaattcttcagagagaagagagagagatttatttttaaggagttggctcataagactgtggaaaatggtaaatccaaacccagcagggtaggctagtaggctggaaattcccctaagagtcgattttgtagccttaagtttgaaggctgaattccctctccttgaggggaatctcagtctttgctcttaaggccttcaaacgattgaaggaggcccatttatgttacgcagcataatctgctttattcaagtctacttatttaaatgttaatcacatctaaaaaattaaggactgatgctgaagctgaagcaccaatactctggccacctgatgagaagaagtgactcattagaaaaggccccgatgctgggaaagattgaaggcaagagcagaaggggatgacagaggataagatggttggatggcaactctgactcaatggacatgagtttgagcaagctctgggagttggtgatggacaggcaagcctagcgtgctgtagtccatggggtcgcaaagagtcagacaagactgagcaactgacctgaactgaactgaaaggcagaatacaataggcattgtggacttcattcatcctgtaagcagtcgggggaaagaaaatgaattacatccttaaaaagatcactgatctctaccctttcactcttcacctcccctcccatgcaagaatattggagtggactgccattcccttctccaggggatcttcccacccaagggatcgaacctgggtctcctgcattgcaggcaaattctttactgtctgagtcacaaaggaatcttgagagtaggcctatgcaaaaaaataaataaataaaaattccaaaaacctgtgtcctggctaggagcagggaactaaggcaccgaaattttagaaaagacaatttttgtaattttttctcacaaaatgtacatttagaaaaatgcatacatcataaatgcataaatcagaaaaatgcattagtgtacatcccaatgaattttcacaaaattaagacattcatgcaatcacaccaagaacagagtatccctagtgacttaggcatctttctgggctccctt

SEQ ID NO: 56388 - DNA, 1657 bp, Bovine  19866880413328
  misc_feature (1)..(1): n is a, c, g, or t
ngttggcagtgagaaatggagctcgggcagcacgttagcatcctccagtgcacacgtgagcctgtgaccagacccgcagaccacagggtgaggcccaggccaacagcgtggggagcagctggcctgaagtgcaagtgctatgtgaaaggccccgcgtccacccagacgctcaggccaggcttgctgacccccggcttaaacaactggaggtgggaaatgtcactcttcttgcacgttccagtggtacaaatcttgcactggacagaaaaattctgttggcgaaagctatgttactggcgctgcttttgtaataatgatacttgcattatgtaaagtctacaaatctgtgttatttggaatcattgaaaacttagtatcacatgcaaatattttttaaactaagctactgaatgtgcctttttagggcttccctggtagctcagtggtaaaaaacccacctgccaatgcaggagatgtgggtttgatccctgggtcacgaaagtcccctggagaaggaaatggcaacccattccagtattcttgcctgggagaattctatggacagaggggcctggtgggctacagtccatggggtcgcaaagagtaggacatgacttagcgactaaacagcaacaactggatgtgcactttaagggtaactatttacttcgaaaaaataatataggaatttgaaaaacaatatgtagctattgtaaatattcttaccctaaagttaattttatcttctgtccctattgtagggatcatattttatcaggagtttcttggtgcagcttttctcactatatttatatatctttttgggtgagtaaatgtctcagaggtaaggcatgtgaaatcctattacttttacgtgagatttttggcattggacctgaggcatggaaaattggaaaataatataagaaacatcagtttcccgagctcttaaaagaagcatatttttcaacttaacaccctacccagagctcagtatctttgtgatttaaatatctctgtgagggatctgaaacactggagattttcagttccagccaaagtcaaggtaaatcaaaggcccttgtagctactccacctttttatactccatcagacctatcccagccttaggaacctttaggttagatctcagtcagggaaccacagatacctctaggatcacctaggatccaaggccaagactggggcagatctctgccttgagacctaataacatcagattggtgccatccctctcttgggtctaggtgcccagctttaaccctgcctcggaatttgctggacaatcattgctggtgttctggcagatagagagtagaaccttgacagaatatcaccgatgtactgattcttcccttggctcccacctggaactctctgaatgcttagttgcttcttgatgtggtattctgcatgaccattgttatgcaaacttgagcccagactattttcaacatagaaagctatctatcttgaaaattcatttttgtgagatttttgggcgaagctaaacttctggggtctggaaactatgactatgcttatggccaaggacaacgaaatttcttagaaaattaaagaataaattatttttttgcttgtgttgcatgccagtaatgggtctgagcatgcatgg

SEQ ID NO: 56389 - DNA, 1756 bp, Bovine  19866880448873
  misc_feature (1)..(1): n is a, c, g, or t
ntactttggcccctcatgtgaagagttgactcattggaaaagactctgatgctgggtgggattgggggcaggaggagaaggggacgacagaggatgagatggctggatggcatcactgactcgatggacatgagtttgagtgaactccgggagttggtgatgggcagggaagcctggcgtgctgcgattcatggggtggcaaagagtcggacacgactgaatgactgaactgaactgaactgaacttcaaatctagcagcagaactgagcaagtgcctcgggatgtttcagcttatcattcttctgtcttctagcaataaaatatcatttgtatggtcaatttgtattgtttgtactgaaaggtaacaattgttgagaaatctaaaaaatgacatgtttgatagcataccttttgaaaagtattttgcaaatttgcaagctgctgtgactttgttaaaccagcacttgttacatagagcctaggggtgtgtcacagaatgctgacccccagttcaataatggaccatggtagaaatgaaaatggagagatctcaggggaggtacacagcccacctccagaggccacagggggaggaggtccaggcggggtgtagacacagagagtggcaggacctgggacacatgcctttatctgggtccttgggtggagtgcttttggagttcctaggctaagccttggatcagtcctttcaaacccctcaaagcagggcttttgcaagctccaagggggtcttatttaaggggcctagggaaggtcctgggaggcaggaaagacttgatcaccggttgctaggggagttgtatcaagaactgacatttgtttgtgactctgtgggctgttatccaggaatacgctcagggggaagagctagggtgggtccaacaatctacttggccacacagaatacgtgcggaggcagcagtactatggtatagtttaactaagctctcaacacacccaaactcggttgaatgattctacaattttgcctacagggaaaatgcacattttcatataaaggacaccaaattaaccctctcattatggtagtggtcaaattgaccatgataagcagagaagtagaatgaggcttccatgatcgaaagaacagtcgacccattcctggtcactacgtgtgttcctcagatgccggccactgtgcctcttgcttggaagagaggaaccgagcacagcgttggtggtacaattcgcattgccaggattcctcccatgagctctgatatttttcagttaatttttaaaaagtgctggtagtgaccattggttttaagacctgccaataggtggggcctgcagtttgaaaaacacccagtcaatgaaaggggttgagtttccccactgggtcaatgccagagtagagataaatgaatatccatgagacgtggcatcccaagaacagggattatggcaagtttagtggagccacccaattagtgccagaggtgaccatgagacccttgaccttttgaaaaatttcaggatgtggggagaacactgcagtttcctcaagatagggacgcaagtttgggctgaccttatcttgaggggcctggtggtcccagttgccattggcttgacaacagcagcagtgcattgagttttggggcatggatgctgagtgtgaatcttggttctgccacttactacctgtgtgaaggttgttttacctttttgtggttcaattttctcatttgtaaaatgggatagtagtat

SEQ ID NO: 56390 - DNA, 1669 bp, Bovine  19866880449171
  misc_feature (1)..(1): n is a, c, g, or t
ntgggattcaaatcctggccaagttcaatgttttatttatcagttttgggtaagcctttcaagtactaggtttttattttaaacttgttgtaaaacattaacacaaaagtgaaagtgtacacatgagctgggacgtgtggcaaccttgcagaagtatgatttcagagaacacaagaaagctttgttttgctgtgttggtctttttctgcataacctaggaatcccttcacaacccgaccctgtcttctcaagtccacctggaccaactttaccttccagtctttgttattctgccggtcctgatgcctaccctccctctgcttttctcagtagcactctcatctccctgaatccccatctctgtcagtccatccattcacccagccaccccctcgatgtgaactgcatgtattctatgttgacggccacacgatgagttctagcagaactgggcctggacccggatgggactggagtttgtgaaaagaacaagatccatcattcactagctctgagaccttgggcaagttacttatcctccccaggctgcaattttctagctgaattcggtgaaactaagattcttacgaggattatatgagaatacaggctcaagtatctggaaccaagtgggtgctcctacttcgtctcctgatttctgctccatgcccatgttttgatgcaactatactaaatgtcaaaagccttcaattttagaaaaagatgtgttggtgatgagagtgtcatttggtacaacccttatgaaggcatttaggtagttagctctcaaaattataaatgtgcttgccctttgacctagtaatgccactttttgggaaatggtcttacagttacgcttgtgcactttcaaaatgatgtatgtgtaaaggaattcactgcagcctcatttgctggaaacaaatcaaatgtgcctcactgggggtttggttaaataaattacacagtggattcttaaccaagggtaaaaaaaagagaaaaaagttctctatattacaaagagattatagaaagagctccatatttttaggtgaaagaaattaagtgaagaataatagtgggtataatacaccacattttatgaataaagatgggagagggaaataatatttgaaatgtataaagaaactttgggagaatatatccaaaaaaaaacctaataaaaatttttatccatagatgtgattgtattgagcagatggtgaggctggggtggggaggtggacttttcactgtgtgcatttttcagatgttttcagttttatgactattccattacaattagctgtatgtaatcagcccacccaaagacttaccaagcatgctatgtcaagctctagaggcaacacaaagacatacaagactcagtccagagactctgcacttgaaccaaagaaatcccatttatataatactcgtatgcaagaaaagcctctaaaacttactttaatgttaatgatttttgttcttcaattacagaggagaagtgttcaggactgaaatatcactgtgtgaaaatactggttgataactaaaggtatttctgctacacaaaggtcaattcacataactgtgaaattcaagcctcatcctatttattatctagacagtggactccaagcagctaggagagttcagataagaacaaaca

SEQ ID NO: 56391 - DNA, 1778 bp, Bovine  19866880453101
  misc_feature (1)..(1): n is a, c, g, or t
nccccggctgtcccctcagctcctcagtatatctgccttcttgaggcctcgttcatccacagtgggtacctgatgaaaactccaaatatactggaacaaaaaaatacataacaggacatgctcagtcctcttctcacagctcacctgaaggcccagtccatccaagctttgcggaagtggggctaactctcctcccctcccctcccctgaagcctctgtatgcctaccccacctcctctctacagtaactttctcaggcagctgaattgttctcatcactacttcatttggaaacttgtcttctcgctccactctgagacaacactccacttcctccattcttacttagcttggcttaggtttccactccctaagtacactaagacagtcaacacaaaaggaaatctactgagccagcgacttgtttcctcatcactcgggtgctccagcaaatgctgggctccagctgctgcagttgactccattaagctatccacccaatgttagggttgccatggaaacccgaaataacatttcaggaatccctcacagactgggtgactttggtttctaggcagtttcacaaatagttctttcttgcagctgataattaagatgaagagcagttaataagacagcaaatttaatgaactgaaacggtatttcttgcagaattaatcatcacaaagcactgaggatatgcaaattctaaagctgaaaagggacttgaaagactgggttcaggttccgtattttacaaacagagaagatcatgtggggtaaacgctggagcagacttctgactccttgtcggcccacaccacgcacattctgcatcctgatcaaggtccttgctttctctgaccttcagtttcctcttctgcaaggcagagacaatgaatgtacttatctcagaggggtgccatgaagattaaatgagtgagcatgtgtaaagtgcttacaatggtgcctggcatgaagtgaaagtcaaataattatttctgttattattattaattctacctgatattgtgttgagggctgcatggaagcaacatggcaaggcaatgaaagcattgctgtggactgggagcccacagcccccatcttctggtctccactctgccacctgctagatgacagtggccacaaaaccttcttcttttctggagggagggtggctatgttactctgatctctagggttggactaaataatttctcagttcctttccagctcttgcatgctatggttttaagaaaaatgaattaaatagagatataccttgacttttacaagtgactagatacatatatggagaaggcaatggcaccccactccagtactcttgtctggaaaatcccatggacagaggagcctggtaggctgcagtccatggggtcgctaagagtcggatacaactgagcgacttcactttcacttttcactttcaggcattggagaaggaaatggcaacccactccagtgttcttacactggagtgtaagaactgaagaatcccagggacaggggagcctggtgggctgccgtctgtgaggtcgcacagagtcagacactactgaagtgacttagcaacagcagcagatacatatatataatgatagctaatattaattggcaaccattatatatcaatacaatgctacatgtactaaacccttacttcacacaacaacctgttatctccatttaacaggtgggaaaacaggctcagagaggttagagtaatttgtccaaggtcacacagttagtaagtg

SEQ ID NO: 56392 - DNA, 1587 bp, Bovine  19866880464955
  misc_feature (1)..(1): n is a, c, g, or t
ntctctctccgctgttctgtctcctggtccatgtttagtctaacgcatgtaacaacagaggaaaatagactttcggaatgccttctaaagctcttactgattctacatatacaactgtgtgaagtgaaaaaaagttaaaagtaagtaaacttcacttcctaccaaagaacccctaaccatagaaggcctctctaaggcacagccttgccatgaacgccgattcttgcgctgagtgttcttagctgataagatggttcaaatgggaaagagaacacagaactcatggggccatattttctcagtcataggcacaaggttttaacggttttttgcttcaaaggcttggtcctaactgcatggtggaggaagctgtgagaacataactactccttgcctagaagcctataggtcaccccaaatccctagcaaagccagagattgttgggggtggtgagcagggaaggaagtgaggacacagaaacctgtttcctttgttctggacatcgcttctgttgggtctacatgaaactgaaagtgttagtcccttagttttatctgactctttgcaaccctatggactgtagcccaccaggctcctctgtccatgggagtctccaggcaagaatactggagtggattgccatgccctccttcaggggaccttcccaacccagggactgaacccaggtctcctgcattgcagctggattctttaccatctgagacaccagggaagcctaagaatactggagtaggcagcctatcccttctccaggggatcttcccgacccaggaatcgaaccggggtctcctgcattacaggtggattctttaccagatgagctaccagggaaaacccccctagagtgggtagcttttctcgtctccagaggatcttcccaacctggagatcgaacccaggtctcctgcatttcaggcagattcttaaccatctgagacaccagggaagccccaagcctgcatcacggaagtgttattctcagtgggagtggagagctgggatgacaatgcatgtgaaacccctctggatggatgaggtgaggatcaggggaagaagctcttcacgttcaggtgaccaagaagaacgtcactcttggacccagtacaagggccacctcacgcttcccaaggaatgatgttcctaagcgtctggtcttagatgtagaattcccctcaaaggttctccaagcaacaagggtctgttcctgccattcccactcttttccctacccttttccaatttaaagaaatctaaaacagaaattctcactaccacccaaatcaagaaaacagggtcagtccttttctatccccagtgttttgtgcaaaactgataatcaaataaatgattattaacatttacagttaaactatcacctctgctttcctcattaaatgtacattttctgagggtaagaattacgttttatattaattcaactccagaaatcataccagcaataattcatttgtaggataaaattttctattataaattaaggaatatacatcttaccaggaacatttccaaaatcaatgtaaggctgtggcagatgttccttttct

SEQ ID NO: 56393 - DNA, 4144 bp, Bovine  19866880505418
  misc_feature (1)..(1): n is a, c, g, or t
nctcgaggttctcgatttctacccagactcctccagaagctttggaactgctcttaccgcctggggtcctgccccttccctgctcagcttccaactgcggcctgcttaccatcgtccacgcttaaggcccaccggccaccctccaaccccacacgcaccccagccccttgaccgctgccagaggaactcagattcttgtgctagctgggtgccttcactcaggctggtcccttggcccagtctacattcatcagaactgccttggaggacctccctggcagcccagtgtttagggctccatgctttcccctgccagggtcctgggttcggtccctggtaggggaactaagatcccacaagttatgcggtgcagctaaaaaaaaaaaaaacgcaacaaaaccgcattcattcctcaagtttcagctcagatgttcagccactctccagaatgttctctgattttcccagtgaggattgatgttcctacaccctcttagcagtgagttggctgtccactctggccctgggtttctttgtcttgcttccgtatctgcctccctgactagactctgagcagttccatgaaaccacaccttgtcatctctgtatccccggtgctgaattttgtaaatgaacttttagaaaataggtaaatgctgaataaacacatttactgatcagcaaaagatcaataaatgttgaatcaaattggccctagttgaatcaaattggcctttgacaaggccaagcaggtcttcatctatgtacgatgtttgccaggatgggggtgaccccaaaggctctgccttgtgatgggaggaaactctcccccagatttcttgtccgtgttgagcacataattgttaaatggtatcgatgaaatatcaaatatctagttgtaataattaaagtatccatttcatcatacatgcatattcaaaacatttcaaattgcaaaatacagattcgtttagcaataatgctgtattcattaaaaatgtttcatagaaaaagtgtttttcataaaacagtgttttttcctcacttcataaaacagttttcaaatgcttgcctttccaacatcagtatttcatcaaactaaagatgtttttcgagtcttctgccaccctcacttctgtttaagttgtgtgagatacagtactttctgaatccatatgtgatgttgtcactggaaagtttatctcaggccaccagtccccacttacgtaacatgaggacagttgggttttttcatgtcctggaaacataaattcaccgtctctgcaacctattcattgcgttgctcttaaggtattgtatccagtgtcatccaacacttataattgtgaaattgtgtccagaagaataatgactaaatttgaattgatttttcttttactgttttggtcagttgacttctacgtgcattatccaaaattagtacattgattgaggacagttcaagccaacgttccatcccaaatatgttcaatgtatttgacagagctccccctactttgagagctctgcaaggactcaaatatagagcaaattcctcttttccaaggaagcattttctgggggaaaatatcctcacctcatattttggtatacagggcattcttaccatatcttttctcccttccagacaagcaagcaccacattctaccatgtgatgtctctcatgccttctcccctttccatccataccaaggtcacagccttagacctggcccttactctcactggagagactacaaaggtcttgccagacattgctagttgtcctccaatatttcccctccttctttagtaacagaatctcccttattcacttgacatgtgtgggaattaagaccaaatgctcagccttcccttcttccctacatgggtcggggggatagaagtcaacgttgtgtgtacaacttctgagaagtgtccttacaggagaggagctgagggccaattgtggagtgctacaaatgttctgcagattactcagtgctgactcattaatgaaattaatgattactcaattaatgaaaaataatccagctatgtccctgattagtgcactttcttatatgcgtgcttcagtaaaatgtttacttaaaaaacaggtaatgctaagttagaatagcagttacctttggaggaggtgataattaatcgggggtacaagggggggcttctggggtaccgatctgagaagtggtcacatgagagtgttcattttcaaaagatccactgaactgctcccttatggttttttggcatcgttttctatgtgcttttgattctaagtttacttgacaaatgtgtgcagtactactcctgccccccttgctcccagatcactccatggacatccagggagagatgtgagctgcagcagagattttggaggaagtttaatgggtgttctctcttgaatgggctactgtgcacacactgggagggatgttaataagaataaagctgtactggtggtcctgacctggaactccttcttaagccctgggatgtgcaaaataatgtccctccaaagatgtccatgtcctaatccccagaatttgtggatatgttacattacacagcaaaggggaattacggttcctaatcagctgactttaaaaatggggagctactgtatatcaactatatctcaatttttaaaatagaagaaaaaaaaaaaaaccagggcgagtatcctgaattatccaggtgagcgcaatgcagtcgtcaaggtcctcaaaaacctaagagggaagcagcatgaggagtactcagcctgacactgctggctttgcagatggcaagaggcagtaagccaagcaaagaggagggagtctagaagctggaaaaagcaaggaaatgcattcttccctaaagcctcccgaaggaacgataacacccagtaagaactatttcagactcgtgacttccagaaacagaggatgagactttttaaaattgaaatatagttagtttaccatgttgtgttagtttcaagtgcatagcagtgattcagttatacatacatgtatatttacacacacatacatacatatgtatacatattctctttcagatttttccattatatgttcttatgaaatattgagtattgatccctgtgctatacagtagatccttggcattcacctagcttatatttagtagtgtgtgcgttattcctaatttacctctcccactcacccactatcccctttggtaaccataagtttatttcctgtctctgaacctatttctgttttgtatcattcatatcatgttttgagattccacatataagtgatgtcatatgatatttgtcctctgtctgacttcacttagtatgataatccctaggtccatccatgatgctgaaattggcattatttcattcttttttatagctgagtaattcagctagatatactacatcttctttatccattcacctgtcagtggacatacaggttgcataaacttgttttatgtctctgagtctgtggaaagttactacagcatcaatggaaaactaatacagacattgtctagggaatctcagaaaggtggtgatattctcagaggagatcttgggggatgggggcattctttctgtttcactgaaatggagaaggagagggattagaaaaatcagaagacactgttgatggagaaaaggagaccattctgaggggccggtgttaaggtttgtcacagaaaggcagaaactgaaagtagtaacttgagaattgcgtttgaagaaacccagggctcgcaaaagatttgacccttagccttgaccccggtggtcctgagcgtctcatcttttagacaagtgaaaacaaactcacctaactgggaaggtgccgggatgagccctaaacagaaatgagataaaatcctttgatcgacatcattttctctaatagtaactgtttattagaataatgcccccaaagatgtctatgacctaatcatcccagaatctgtgaatatgtttttgccttttgtggcaaaagggattttgtagatgtgattaaactaaggatatcgagatggagaaagtagcctggattatccaagtcggccccaagtaagcacaagggtctttataagagagagaagtgggga

SEQ ID NO: 56394 - DNA, 1326 bp, Bovine  19866880505724
  misc_feature (1)..(1): n is a, c, g, or t
nttgaaaatagttcccctgtggtatacaggaggtctttgttgactatctgttgataatttattgttgttgttgttcagtcactcggtcgtgtccagctctttgcaggccacgtggactgcagcacgccaggcttccctgtccttcaccatctcccagagcttgctcaaactcatgtccattgggtcagtgatgccatccaaccatcttatcctttgtcatcgccttcttctcctgccttcaatcttcccagcatcagggtcttttctaatgagttggctctttgcatcaggtggccaaagtactggagcttcaacttcagcatcagtccttccaatgaatattcaggactgatttcctttaggatggaccggtttgatcttccttgataacttatatatagtcggatatttatgctcaatgctcttatgatatgtttgccctcccccttttccccagggagcgcctgtgagaacaagcgagcggacgtggtctttatcattgacagctcacgcagcgtcaacacccacgactacgcaaaggtcaaggagttcattgtggacatcctgcagttcttggacattggccctgacgtcacccgtgtgggtctgctccagtatggcagcacggtcaagaacgagttctccctcaagaccttcaagaggaagtccgaggtggagcgtgccgtcaagaggatgcggcatctgtccacgggcaccatgacggggctggccatccagtacgccctgaacatcgccttctcggaagcagagggggcccggcccctgagggagaatgtgcctcgggtcataatgatcgtgactgatgggaggccccaggactcggtggccgaggtggccgcaaaagcccgggacacaggcatcctgatctttgccatcggtgtgggccaggtggacttcaacacgctgaaggccattgggagcgagccccacgaggaccacgtcttcctggtggccaacttcagccagattgagacgctgacctcagtgttccagaagaagttgtgcagtaagtcctgctcctctgtggctcttctcggggcatcgttgggatgaggtcattcaccttcccgggttcattctgtgctacctggtcccaagtactgtgctggcaaggggtctttagcaaaggtcgagataagacacagtgttctcttggggctcacactctggccaaggatgctcattaaggatgcaatttacaaataagtaattaactgtagttgtaagtgtaaatgggggaagaattcagggcaggacctgacctaggccaggggctcagggagatttccctggggaaaggacatt

SEQ ID NO: 56395 - DNA, 4868 bp, Bovine  19866880540164
  misc_feature (1)..(1): n is a, c, g, or t
natcttctttttttttgtggctgtggacacctttcaacactgctttcttggccttcaaagcctttgctttggcttcagctttaggaggagcaggggcttccttcttcgccttcggcgccatcttcatgaaaaggctatgtattatctctaattacaggtaaggaagccgaagcttccagatattcaggaatttgcatatttcaccttggccacctgtcttcaaagaggcactggataattcggtgtggctggctcaatgctaatccttcaccaaagtgaaaaagtagctgaaagacttgtcttattgatcagtaactaacaacatcagacacaaaggatatttcattgctttcacttttcacttttttccttgattatttttattttttctcacattaaaaaattatagttgacttacaatctcatggcttttactatccatcatcaatttatagttacttttggtccagcatccttgtttctacaattctaccatttggtccagtgtcactatccagactttcgtgggttctgtcctgtgtgttaccatctttcctgtgcagttaacttctgctttcctctcaggggtttttcatatattacatctcaggtgacagaatgcctctgttaacagagaagagctctcagaggtctttactttttctctttaagctcctattttcctttttatcagtgatactatttcctttctcatttttttagtttgaatatcctattgctaccaatgatgaatatttcctaaaaatactaacattgacctgattatagctattgtgaattaatggaaatgattcttggactagcactgaattagttgagtcgaattagttccaagaaataagtctaggacctttacctcatatcttcaagagcccccaccccccgcctccccaacacaaatcgtccctcagaaagagtctaggagtagagtgtttaggacaagagcactggcctgaagctcacgatctggagtgtggttctctgggtctctgttatgccatcctcagtgctggttgcatcttcaggttaattagcaagacagctgcaactattccaggcagccattaaaaaaagacaacccaaagagccttccagtggctcttgatggagaacgtgtcttagcaggctttttcttgcgtctccttggccatccctgggttattagcctgtactgatccactcaccccaaaaacagtggcatcacccttggtgggattgactttggtgggagtcaccttcctccgaggcacttggctatgttacacctaagcaaaattatggctctgttaggaaggaagaaaagagaatgggtgtttggcaggcaacaaaagtacccactccagcaaagttagcacagatcaatatggtacaggtagttattttggtggactgtggtaacatacagaaacattagagtcagtgactagattttcggggtaattaagaagtcatagtatccagtaaaacactctgcaggcattgaagtttcattgtcaagaatacagttatatataggattgctgtgttattgttctgctgatgaatccaggcctctgcaggggaaaacagatgtttagagcaaagagctagaagagagaagaaatgaatccaagttctgctgcgtaatattcaggtgtttcatcaacttagctgcttgagtctctggagagaaggcaagaggctctgagtcagatgttcacacataagtagtaggtcaaaaataaattagccttttgctacatcacgcagcctggggtagtgtttagtcacatcagatttcctatttattcacattaacagtaggcactaacaggatgagtataacatgtgggactggatccgtaccacactctcccttggggatagtgggaagttctgcaaattcttgattattcacagcaacggatgaaagcaagagcacagctaatctaaactggcagtcaaaagggtttctttttggcactatgacttgcctatgaatatgtgtgttacctgctgttttgttactaaaaaatctggctccagaattagcaatctctccacttcctcccttctgtcctcctgctgctctttggacctctgtttcactcagatggaatcacccccaggcctctgctggtcattcctagaatgaccttccctgccttgttcacctggcaaattcatactcctctttctggattcagatcaaggctttgaaagttctctcccgctaacgattctctgccacccgagtgactaaagcgttctattgtcttcggaatatctccaggctaaaaagaagctcttcatcacaaggatgacacactgttcccttcgcctgggcctgagttgggggggaagagtgtccggggatgtgggattttcagtgccaaacccacaaaagtccagggaacactggcacaatttggtaatcctagaagatcagccacttaagtgtaacgaggacagagaggcaaggtgggctgggaggcaagaagtaataggcgagggagagggtgaaatggtgaccaagctctcacaaatccctttccctcagacttcaaaattcatcatgaggttcaggctttgaaaaactgagtgaaaacagttttgagatggagacaattaacaagatgtttatcttttccgattaaaacatgtgtattaaaagctttcagtcttaccaggaagcagtactattgaattgccatgatcacttcagttcagttcagttcagttcagtcgctcagtcatgtccaattctttgagaccccgtgaaccacagaacgccagggcctccctgtccatcaccaagtcctggagtctacccaaatccatgtccattgagttggtgatgccatccaaccatctcatcctctgtcgtccccttctcctcctgccctcaattttccccagcatcagggtcttttcaaatgagtcagctctttgcatcaggtggccaaagtattggtcaagcacttacgaggtgcttagtgagagctcaatctcccaaactgcccttgtaagttattccccactcattcattcatttatcccttcaacagtcattcgctgagtgccaggcaccatgtgggggccgtcagtctggaaaaggcaaggcgggggccctgtctccaccaggagccaactctcaactctttcctgtacctcttcttatttgtagttgatggcttttctatgcagggggatcttggtgggcttccagaaccatcttgagaacgaaagagcagaaccttggcaagtttgactataacttgagactcaagttctctgagttgcccaagaaagagcatcaccaactaaagagcttgcctggtggctcagtggtacagaatccacttgagaggccagagacatgggttcaatccctgggtcaagaagtcccccgaagaaggaaatggaaacccattccaatattcttgcctgaaaaatctcatggacagaggagtcagaggagctacagtccatggggtcacaagagtcagacatgacttaggactcaactacagtttattctcagcttaaatgcaattgtgagatgtagaagcaaatcatttttgggttaactgtgtagctcctgtcctcatcacttcccctccatctatccccagtgaactattcatagctccctgaacatgcttgctcctctggcttctaggctttcctgtgggctgtttagtttgcctgacacccttcccaagataacagttgcctcagtccccatgaagtttcatcttcttcacctgtagaagaatattgtgtaataaatgtaataaagaatactgtgtaataatgctgcattattataaatgtatagcatttattacactgtattgaagttatttagttgaagttatttattgttagatgtctttgtcactagattgtgagttttctggaggcaggactgtgctctgctcatgacaaagcaggtgcctaatagacatttgttgagtaattgaaggtgagaataaaataacattttcttaaaatgacagtaaatgtatattccatgatctttgaggttgactgaccaattctagttcgagaataatattcagaatatttattactactgaagtaggctatcagttggaatagaccctggctcagtggggctggattaaggtgctggagccccagctgtgccggaggatgttaaccttttagttgctggatcctgaggaggtggggagtcccccagggaggagcttgatgttggggggtgggtggtggggcatgatgaaaagatgtctatctaccaattgatactgaagcattttaatattttaacaactgtcatggtaatccaggtgcatttggtccacatttcagcccaggtcaggttcattttctcattaaaatggatgctgtagagtttttagcaggaggagaaaggctgcattttaaatcaccctagtttcccctggtgggatgctctgtgtaatcttatcagatatgtttatgcatagggaggactctttattcagtttccatggcaaagcagagaagcatcgattttgtccagaattctctccattagaatgccaggctgtggggcttcactggggtccatgctggccaccgtccctgacattggcgttattaagccccatgctttgacagaaggtgtaacggtttggggaagttggttgtggggaagttggtggtgggaatgttggcagtcgggcagtattgggggatgctatgctctccggagctttccaaaagataccaaccttcaaattggagttttgaaacagacagacaacccccaaactgatttctttcagagcctgaaagtgccaaagtgtgaaatcatcagaaatgaagacacttggata

SEQ ID NO: 56396 - DNA, 1886 bp, Bovine  19866880577234
  misc_feature (1)..(1): n is a, c, g, or t
nattaagtaagaagtctcttgcccacagcaggaggtaccactgttaagtttcttatacattttgcctacttacaagctaaattaagtcaaataaaaatgggtcagttctaacactggcaactagaaaatgaataaaatcccagggatgtatcattatggggtatacaccgtcttatttgaaaatttaacagtgcacacccaaatcttttaataatgacctgagtatagaacattttcctggttaaacaaagtcaaattatatctagtaaacagatgattatgctgctatcacaaaagaaatctacttcaacactacaataggacaatctgtcaagctttttaggtcagatgtgcactattagcaaaggtaacacaattttgttttcctgtaagaaatatgtaacatatctggaaccttattcatataaaagatgttcaagtcgtgaataagttgtctttggcagaatgcttaataacggcacagcaatgtttagaaacacatagtgatacatccttccttaaaaacacacaacttacttaaaccttcaccatttatccatccactatggtaagctcacatttttagttttccttaaatgggggggtggtatatatgtaacattttgtatgtcactctctttattaagagtcttgcatataatttcataggctcccaaacttaccttttcatttttcttgtctgtctctattggctgctttgctgttacacttcgaggagttcggacaacttcttcctcagccacttcaatggtccgtccatttggctgcagagcaacaaaaatggattctgttatcaaattgcctggcagatcaaaccaaagatttatactcaggaaatagaatcaatgatcaaattcttcccccaacccaaattaaaaagacttttgtacagctgtgtcatctaaggcttgtcagactaccatttctaggaacttgtagtgtaaaaaggaatgaacttataagcaaaatttgtaccacaaacttatattctgatttcacctaggcatcagtacctccaacaaaaaataatggaatggaagcaagaactaaattgtacttgcattctgaccaccaactggctgtgtactcagagtatttcattatctttgagtattatttctacatctgtacaaatgataggtctgatctattcaaaagtccatgaacgtttctggtacagggccaaacagaaaatattttcggctttatgagccgtgtaagtctctgttacaacacaaaactccgctagcacaaaaacagccagagatgacacataaacaaatgagtgtgcctgtgtgccgaagaattttacataggtggagggccatattggtccatgggccatagttcattggtctttgtattagataatctctaatgtcccccgtaatcctacaatcctattctaggatttagaagctttactaacccaatgccacaatttaaaaaggctatctcagctttcccaacatctctaaaaccaaatgatagcactcagagattttcatgagtagaatgaagtctgtgaacaccaatcctaggttttaatcagaatcactcattttttttttttttaaattaagcatttctgagccccatcgccagaaatatacttagattcagggctctaaagaaaaggaccaggaatctgtattctctcttctttctagatcttattacttcttttcacttgcccattctcatattcaacacagtaagttaataatcaatatactagttttaattgctttattcccagttcttgcagaacaaactttcatcaattacttattatagcagagctatagtcaagaaaacaatatggaacgtgcaaaagtcctctaatttggacattacctacattt

SEQ ID NO: 56397 - DNA, 726 bp, Bovine  19866880594538
  misc_feature (1)..(1): n is a, c, g, or t
ncccttctggttagcaatggtgactcgaaaatgcaaacacctcttaaaatccacagtaaacccaagccacgtgaaatggtgtttgttttttgaaaatgataattatccaccacaacgtgttctaaatgtttggatttaattgtagatgtgtcgggatggacgtggacccttgagagagtgttatatatattttgaaagaaataaacatggactttgtgcatatgggaagaaggagaccatcgctaaattaataaatcacatataaatgacgtactacacttagaattgataaaaccaagggaacttgaaataaacagtaggtttaggcatcagagaaagaggggaaatcttttaagttttcttccttttctaaaaaggaacctcacaggttaagctatgaaaagggaccagttagtaaagagttttattttgttataaggggtgggcagtagttatccataaggaaatagcaatgctctggagcttcacccctttatcacctgcataaccttaggtaaattatttaacttctttacttactgtaagaattaaacggcttaatacatttaaaacacttggctcaatgcctggcacatagtaagcactgaatgaacatctgctatttttaatggaaccttaaggcagagtgagaagtgagctagtgcaacacagcaagtgtgaaaaactgtggtctttgaaggtcgacaggcctaggttcatctccag

SEQ ID NO: 56398 - DNA, 1244 bp, Bovine  19866880669119
  misc_feature (1)..(1): n is a, c, g, or t
ntctgactctgtgaccccatggactgcagcatgccaggcttccctgtccttcacctctcctgaggtttgctcaaactcacggccatcgagttggtgatgccatccaactgtctcatcctctatggccccttctcctcttaccctcaatttttcccagcatcagggtttttttccagtgagttggctcttcacattatgtggctaaaattctggagattcagcttcagcatcagtccttccaatgaatattcagggttggtttcttctagggttgacaggtttgatcttgcagtacaagggactctcaagggactctccagcaccagagttcaaaagcatcaattcttctgtgctcagacttctttatggtctaactctcacatccatatacgactactggaaaaaccatagttttgaatatactgagctttgtcagcaaagtgatgtctctgctttttaatatgttctctaggtctgtcatagctttccttccaaggagcaagcatcttttaatttcatggctgcagtcactgtccccagtgattttggaacccaagaaactaaaatctgcctctgtttccatgttttcagcatctatttgccatgaaatgactggaccagatgccgtggtcttaagtggatacatgtatatagtggattcactttgctttacacctgaaactaacacagcattgtaaatcaactatactccaatagaaattttttaattaaaaataaatcataaaaagagtaaaaaataaaagatgtctgggaagaagagagggaaacatggtaaaaacaaggggaggtcccagtgagcctcatagatacctgggtggggagttcattaggcaaataagtgaagtgccaagtcacttaatgctgaaattttggagggagttactgaaaggagtctaggaggccaggcagaaaatgattagcagaaagtaatcatctaccactttcagttcaacactgaaaatcgtactaaacaacacaaaccaaaaacatcacagagaaaagccagaagatgtgctctggagcctgaaggctcctgtagtgaggagggttggggtgggtggctgctgtcctgcagacagagagctgcaatgggggcagggacagtctatgatgctctggaggaaatattgatatcccagagctttgtagttgacaaagcagtggttctttcagacagagaagagaaggtcaggactgtggaagcccagcaccccttcctaaga

SEQ ID NO: 56399 - DNA, 1215 bp, Bovine  19866880807691
  misc_feature (1)..(1): n is a, c, g, or t
ntgtcttgtcttacccttgcccctgtcctgcctcttgccctggtcttttaatctgtaaactagggatagcaacctccctgagagagagatgataagaactgaatgaagggccaaagtcaaagacttacacagtaagggctccagagatgagggctgtttgttctctgacctaagctcctgaagtctttatgtctaactcgtttttatgtttctaataactttaaacacattacattgaaaggagcatgtgatcaattatgtgtgagtacattaatgcgggcttgctgtctgaggcatgtaatttgggttagcgtctatcaccaggcagacaagtcaagctccgagggcctggatcaagacttcttgaactgattcatttccttgttcacattcactgtttagcagatttaggtgaggtgttctggacagcgggagtagagcccaaagcctcagaaagtcgctgaggctggttttcaaattagagccataagggaagaggctcccagagcgggatgcgtgtgccctggagtattagctcgtgtctggagagcagcggctcaaacgtgctaagtggcatgggtccatgcgtgccggttggtcagggatggatgggctcctgcctcgttacacacacttgccagctccctgggaagcagattctttcctggaactcagagcctatcttgcatcttgcctggaatcccgtgaaactcttggcagcatctgccctggctgcatgccccccacaccccctaagcatcacatttatttgatattgggattgatattcctctttttacattgtggttggtcctcattaactcaataaggaccaacatggaaggcagagtttcctcctcttctagggggaaaaaaaaaaaagtttctttggatgggccacagctcctgtgactgacttggtctgctggcatgggacagcgtgctgtgtggtaccctgaggctggtgagaaaggggacagagtcaagaattcctgggtggaaggctctaccctgtatttaccacaactactaaaacaccacatttaatagctcaagactggtctgtatttgcatggaaaccacatatatgtggaattctattttattttttaacttcaaaatggccataataggagccagactgttgatgagtctaacaattagaagcagcttctaaatttcccaacacagtcatcttgggttcaattctgagat

SEQ ID NO: 56400 - DNA, 1420 bp, Bovine  19866881042860
  misc_feature (1)..(1): n is a, c, g, or t
nggggtctccaacccatgttgaaagtggctggtttaggggagcattcccagggaaagttggggccgcgtgaagctgggagatgagctgccaggaaaggaatgaagatggagcatggaggtggggtctggtgaggccatcaggaccgccatgtctgtaaggcaaggggtctgggctggagccaagcccagaggaggtaggaaccaggtaacttaggaccttgggggcaccaacaaaaagtctgggctttgtgctgcagaggtgggagccctggaagacttgaaactggcaacagtggtgatcactgctgattccctttctacccactgtgccatctggacagcctaagcagggcgtgctgtgtgtgtgtgtgtgtgtgtgtccggctctttgcaaccctatggattgtagcccaccaggctcctctctacatggaattctgcaggcaaaaatactggagtgggttgccattcccttctctaggggatcttcccaacccagggatcaaacctgggtctcccacattgcagacagactctttactacctgagccaccagggaaacccagggtgggctaaatgcaaagctaagctcatggaagctgttagattctgccctctgtacctctcctgcctcagtggcacctgtcccctcccagactccctcctaagtcccttcagagcggtgctagctggatgttgctccccactcctaattaccgcctgctctgcatctgcacacttttctctttattgtatcacagtcatgtagggatggagctgtcaccaaggccaccagtgggggcatatcagcctttttggaaaccttaaccctccttgcctgaagccccactgtatcggcaatgcccctcaccttggaatgaccgtacatgcaaactgcctgtgcgcttctacctgctggctcccctgttttgtttgtcttttacgaggtcctgttgacatgtgctgtcttttctaaatttaccaagctcgctcattttatttctactaactaaccttgaaagcttttcctttccctgcaatagactcccctttcagatcagtggcacccgcaaagaattcgtgtttgtgatttaaaagagcactttgtgacaacagaacagtaggtctgagaagtgggaggtggtgccccaaagtctgttggagaggggatggtgggagctgacttcccatcccctcaactctgctaggaaaaattctagaggtgttcagggggtaaaggtcagggaacttagtaacatttctttcaaacagttactgctaagtcactcagttgtgtccgactctgtgcgaccccatagacggcagcccactaggctcctctgtccctgggattctccaggcaagaacactggagtgggttgccatttccttctccaatgcatgaaagtgaacagtgaaa

SEQ ID NO: 56401 - DNA, 930 bp, Bovine  19866881054668
  misc_feature (1)..(1): n is a, c, g, or t
ncaaagcattgcttcatttaaattttacctaaatttcattctgcagcaagttaataaacctaacattgtagggctactagtatgttcctggtgagttttatcagctgggttctatcaagtgacatgaatgctgatgtcattaaatatgtcactaaaatgtcaccttgcgtttgtcattaaatgcaaaacagtaattagtgtatgaatccatttttgttcttaaattaaaatactttaaaagatgacacaaagctatatgtgaaaaatgattatatctgtattaccatatacagtaaacattttctttttaaggtcaaaggagaatcacacggaaaaaaaaaaaaaaaggtgatgggattttacataatcagtatttgccagactgccaaagaacagggatatccagctactattattgtataatagcttaattcataagccctcacgtgttcacctagaatggggttcttaggaaagataccctcatgtctctggaaccaaagcataaatgtaaaattgtaaacctactttcataaatataaatgcaatttggaaccttttagagataaagtagttccaaatacatcttccaagtttttggccttgtaatttacactgtctttaactacagtctttaataataagtctgtataaagcttggctagagtaacagtttattatttaccaaactccctttcactcattaatcacaatatgcgttacaacacagttgcaaagtaggtcaaaatactcctaaatacatttctggcattcggtacttattactcccctttctaatctttgagaaagcctgcatttagttcacttaagacacttgctaaaaatgctaattatcatttaacgataacacatcaagttttctcatagggaaatacaacgtcaaaaccctaaggcagccgggaatatcat

SEQ ID NO: 56402 - DNA, 1041 bp, Bovine  19866881134447
  misc_feature (1)..(1): n is a, c, g, or t
ntaattcagcgagctcccaggttttccagctcaagggaggaagcctcttgcgcatcctgggatttccctgtaaaaggcagccggcaatcctgcttctttgaaaacaaagaatgaccaatttagttaaattattattaagagtatgttcttgcaaaatttgaaaggtatgggacctcatatctggatgcaaacaatagcattctttgtgttcagcatgtcagtccttgtttcaaagatcccctttccaacgttaaacaggattgatttgttttctaatagacccaagtttaagatttccttaagtgatatctcacctttcttgactattgttgttctccttttaatgaagtgttaaaagcccccaaaggatgtcttattaaatttttcccataaatttgttctgctacaacttaaatttctcaaaaacaacaaacatggtggcttagtaagctaagtaaggcttatcgttaatggggttcagttttttaagataacaaatgtataatcatgtaagtaaacgtgttcccaagtaaaagacaaaatgtagcagtgcttagttgtatgggaaggcagtatgttgggcttttctgcctgggtttttgaggttgattaaaaattggcatagactagcttgtagaatagcaacgatacgctgtgttttgtaaccctgaccttttctgttggctttaaatcaccagatttggacccaatgctatgagactttctcaggatagaaaggcaataaccttatggcgtacaaaaaccaagataacaaattaaaaatctcttctggaatgaaattttttctttcttcatttttacatatgggattatagctttaacttagtttgggttagtactgcagacaatgcaattatctacaagggcaaaggagattaggggtaagaatagtccaacccattcagcattctaaaaagcattacatttttccagcgtttgctgcaatgaatgtgaatattgtttcttcatggaccctgttgtagttaactctccacatttaccctccttcttcgagatccc

SEQ ID NO: 56403 - DNA, 803 bp, Bovine  19866881187143
  misc_feature (1)..(1): n is a, c, g, or t
natagtaaccttaagtgacctgcagccaaatgaaactattctgcccacccatcttgggaggataaagccttgtaagaaggtgctaagctgaaaaggagaatctgcagaccactggaaattccctaagttaaaaaaaaaaaaaaaagaagaacaaacacaagtatcaactttagatttcaacaggcatatgagattgttccaaaagttttttataaaaacaattaatcattagattcccttctccaatatcctcttcatttgaaaattaaacattaataagaacttaagttctgcttgattttcaacacttctcagcagatattatactctggctaattcattaaactagatttttttaaaaatagacataaaaatggctctttaagtcaaagggcaagaattgtgcctcattctaaagtctctgtaaggtcaacagccaagttcagcataattgtttgagagcccagtgactttacacacagtctcctaaaaaggataactactattttaagattgtgttcattatacatgagtaactaagttaatcagaggaagtcacttcagataagtcttgttgattcaagaaccaagcatatatgtttctcccaccacccgcctttggaggatttgtggaaatttgagtcggggagagagtaaggtaggttggcttccataagatagataagaggactaaccactgtctttggagacaaggtgttgccccagtacattctaagaatacaggctagaggggttggtgggtttgacaggagctcagctaagctagtccagaagcagggaaa

SEQ ID NO: 56404 - DNA, 1190 bp, Bovine  19866881208870
  misc_feature (1)..(1): n is a, c, g, or t
nttgcagcctggggcacgtgccagggcttgatgtccttgacctctgtgccctgagtgtccccagctattcatttaatgatacattagttcttaaaagctgatacattaacttttagaaagatctggtgctagctcagtgtttatattgtgactcaagtccagcagctggctgacgtccatgacattcagatcctgagactgtgtggatgcactgttcccaccaaaacggcttgtgtgttaaaaccacaagtatcaggctttattagaactctgtagggagggacattagagaaaacaacaccttagcagaaacttaatgaagcctgggagcaaaagaataaactcaacacatgttaccagcctttaaaaatctttagcttttccctttgtgccttttgattactgtgtttgtatgtcattattttctcaatgcctggttttgctttttaaaactgtacatgtgcgttaatttgaagattcgatttccttgttattatttacaaatttttcggtattcagatagcctaaatcgttatttagagggaaacatttttaaggaaaaaaaaaaatccataatcctaccaccttaacacaggaagcaaagcatttttatttttaattttcagattttgccttagagctctattgaaagtggatctaatcactgtaaatatacaattttcaaatctacttttttcaccaaattttgttctcctatttacagttatgttatgctactaataactacctactgcctcaaatggaactcctgagtatgccctacaaaacccaccccacttgcaccttcctcatccccgagtcagcctgaatccctctctttctcccttcacctctaatctgaaaggaatctgactggccccctttcaacctggtgtactgtcccctagggttgccagaacagagaaccacaaaccaggtgactggtaaccatggaactgcattgtctcctagctctgggagggcagaagtctgacaaagtgctggcagggccgtgagccctgggaaacccgtgagggagagtcccttcttgctgctgacggtggctgttggtcctcggcactcctgagccgcggctgcttgctctcgtctgtcttcgtgcggcgttcttctcttcctataaggacaccagtcaccctgaattggagaaggaaaaggcgacccactccagt

SEQ ID NO: 56405 - DNA, 1030 bp, Bovine  19866881278745
  misc_feature (1)..(1): n is a, c, g, or t
ntgaggtgacatcgcggttctaggttcctcttcgtgttctgcagagcttgcctggtatggctctatcttgtcaacaaaagcgatgtttctattatcaataagggaaaaaaaatcagtacaagatttattttaggcttcgagttctgtgagccaacctgtctgctccttgttttgcttatgtgctggtcctcttctgtttggtagtctcattttaatctgccctctaggaagcattctaatgcaacataaaacaaaaagttctactgtttacaaggaacaaatgaaacgggcaaagtttgtatttgagggtcttcatgaacgtgaggtctgggtaaaacgactgccctcccacccccatccttactctacaatagaccccccctgccagagacagagaagtgagttgaacccagtatagctatcaaggggtaagtcgtttcaacaattacagattctaactaactcaagagaccagagatcctacacacccccgttcctgtctgcttgtgtgagtgcccaggtaagacctggaatcatagccccatactttttatgaataaggctctctgcactaagccagtagtagagcctctgggagaaaaggcaagtttggactttgcctagcagcctttattattgtcaaattgcattcacccccaaaggtaactgagaaacgaacaccattgttttattctgacgatatttcaggatactgaactcacttttgcttctccttttttttttttttttctggcagacctgaagatcatttcacaaggtagaacagctcactgacctatttgacttggccctacgcatactttgtacagagacttctggggaattcttatagaactccctggggcaaaacatccatcttagttggcatataccagaatcactgaagtcttttactaaattacaattcgttaacatttggaaggattttggaattgctattgtttccctggtaagttacggatcatactggtgtactggaataaggcaacgcatttaaactgtaagtttc

SEQ ID NO: 56406 - DNA, 1925 bp, Bovine  19866881355804
  misc_feature (1)..(1): n is a, c, g, or t
ncccctctgtcttgattaaaacccaatctccaaagtgggacacacaagatgaatcacttgggtgggaagagaaagcactgcaacttcctttgactgtaagatgcaccattattttatatattagaaggaaaaacactgccaattaaatatgatatagcattcttgtcatttacaagtttagttaatatttcttacaagaactcatttagatttatgtaagcatacatttatttagggaacacagatggctcagtggtaaggaatccacctgccaaataggagacaggggtttgatccttgggtcaagaagatcccctggagaaggaaatggcaatccactctagaattcttgcctgggaaatcccatggacagaggagcctagcaggctacagtccatgggggtcacaaagagtcagacatgactgagcgactagcactttcactttcatggcctatccagattaatcaataagtaataactttactattagttctatcatgtaatgattaatgttgagagcatcaactaatgctatggcagcggaaagccagaggaaggaatcttgtcagcaatgacctggtgaaatacaaactttgataaaattactttccaaaaataaaaaagagagagaagctcttttttcattgtatcagagcagttgaagtaagaaagctagccaatttactctgaaatattatgatatgattaagaaaaacaagcatatggtgagaatgatttgataggtttcaaactcctaaattgaggatcttttagaaaaaatttaatacaaagactatatggttagtgcaaatatttgcaaaaatcagtcatttctttccagccttgattcttttagcttcatggagatttcaaagcttgtcctttttgggtcaatgaaatgtcaactggttatttttccctttacttaggtgtttctgttcacctcaaaacaaagaagaggtgcggtatttaaaatctctggctctcttcagggtgccccctgatgggagctctgaagacaacggtgggaagggccactctgctatggaaggccttccagagtgatgcagggactgtgacctggctttgggtcattcataagcaaagggcttgcagagggatgaagcatagcagagccgtatctcctgcacagaatatgcaaaaacataagaataagagtttctcttccattgtgtcagaacagctggaatttttatgagatgactttcaaggctacggctgggtaaagtggtgaataccacacgcacaccccacccccaggaccaattgatgaatgaacaccaaacaagatggcttctgaaacttcatgaatttccccagcaggaagttataagtaatacttgcacaatcttgtgaaattattttcctttccagtcccctgttctccgcgtactcaagaacaacatggcagccactgggccataagtgtttactcaacaattgcctgtgtccttaggagcctctctggcacactccgaactggccccaggaaggatctcattgcttttccaaaacactggagatcatcaattagacaccagagttagaaactgcctccatcatccaattaaaaacaaacagctatctggtgaggaaagagatttatttcccactgcgcccttagtattgaggtctgtttccgaactttgtacctcctaagactattgagacccatgctgaataaacaaggctgaattttaaaatacatcaatttttgaaccctaaacttgtcacggcaatatcaacctcacataacttgaaaataaaaactcatcagagtatatcaacttctgttttggaaatgacgtttaaattagaggtgaaaaataggggaaagatgagcagcagagtgagaacaggacggctggagcattgagccccacgagggctctgagtccatgt

SEQ ID NO: 56407 - DNA, 2098 bp, Bovine  19866881365445
  misc_feature (1)..(1): n is a, c, g, or t
nagctcctacccttaggtgagggatctgacgtttctagttacagtccagcaagcagcgttctgagaaatcacgcttgttccacgttccctcgttagcagcgatcgctgcggcctccgacagccctctccaatctcccctctcttcaccctctttgctacctccctgcgtcaccactgcctcatcttcaccatcgccctgatcctgaccatggaaatggtctcctgaatgttctctctgcttctctgagacgctgccaagtctacctcaacctctcacaattttaaaattaaaaataaaaagcttagatcacacaaaactacttaattacaagggaaaagaagatacctaaaacagagatattacaaataagatgtctcactcatattctagtactcactagggtcacaagcttcagagccagtaactcaaaggctgaagttttaaatcctgttatcaaagaaccttcttccaaccattccctccacactgcctcctagaccctctggttcatagaggcagattactgtggtcaaggggctgttttgtgaggttatgttcaatcgacatgaatctgaagtgcccaggactggcagagatcttcagagccggcctggctgtgtctgtgctcagtcctgtctgactctttgggaccccatggactatagcccaccaggctcctctgtccatgagattttcccaggcaagaatgctagagtgacaagttttcgctgctgttagccgattaaaagaggttttaacaattcaatttgcataaactttaatgtgaaagaaatctatttctataatccacgtttagtattttaatatgctctttctcttaaggcttgattttgatgaaggcaggggagtgaatgtggcattatgtagtatgtatccagaacgtgatttctacaacattctaaagagaagactgcatctctttagggtgcctaaccctatattgtatggcagtgactcaaagggatattttaaatgttcaagtaaaatactacaaagcctgttaggtactaccctaatactcaaaagtagtctggacctgactatttaatgaaatcaacaatgtggtatttcttttggcctaagagcatcatggaggaggaaacagcaacccactctagtattcttggctggaaaattccacggacagagaaagcctgatgaggtatgtaggccatagggtcacaaagagtcagacaatgcctaagcccaagtccgcatacgctggaagagcatcaagggggaacaaaaaacccaagaccccaagagacattataactaatagcgcttgtgacctctctatcttcaagtgtttctttcaaagatttttgttttggtttagttaagaaactagaatgattaacccagagaataccctccaatatctaatgaactctattctccctgagtagtatctgaaaaagtaggtatttgccgaataatatgtgtgctgttttagagaagaaaatggaagcacatttattttctaccaaccagagccccagttctcttcccacagaggtcaccctgagactcttcagcctgggagaaaagccatctggcttaacacttgataggaaatgaaagacacgacgtgttattatgtccatgtggattcccaataaagacatgggcaacggggaaacatatgttattacacactatgaggacatcttaataaagctaggagaccaggggaaatgacagaacaacatcattcaaacccctatttagggtgcagagggaggcttcagtatatttgttgtcgttttatttttttttttaagttagctaactagaattcctttaatactagttaaaacaatctttaaatatgtagagtcctctttaaaaatccattctccaaccctagaaatgcagattatggtccttactgaaaggaagcagggttccttagagaaatagctgattccaggtctaggacaggatatggacaaggtgagcctagaacaatgtcaatgtcagtgagacagcaaagaagcactcagagcaccagttatataaagatgccaacttgaagaggccctaactgggaaagatggcacaatttgagcatta

SEQ ID NO: 56408 - DNA, 1240 bp, Bovine  19866881575507
  misc_feature (1)..(1): n is a, c, g, or t
nttgaatccaatgacccagaatcagactgccccttatcacgtttacgctgctgtcgtttctctctgtgactaattttagtttcccaggctcctgacatagccccagaaaaaaaagtgttattcagtagggggaagacaaaaaggttgcgattttgggggggaaatagggtggggcacctgaaatatgataaatttagatattaaactaaaaaccaagagtgctgattatattcatttatcctatgaatttattctaattgtgctgtttcaggcagctaattgccattatttattctggtaattttgatctgtcatctatggtttagaaaaaaattgatgtaagttatcttgtatctttttttatcttgctgggtagaactagtaggggagtgttatatatactatgggtttattaggtgaggacaataaatggcttacttaaaaattttgtacagagtcttctagggatggtatatttaagaacaatgggaaaaaaccaagccacacttctaggaaacaaagacaaaatgaatggtttttaaattgctcaagatattgagctagaccttaaatttcaaggcagttccctttaaggatagaactattagatccttaaataatttaggggaaaaagtgtctcctaataatgtcactgatgtgtacattaaaatctcaagttattaaacagaagagctaaatactagattaagcaaaacaaatgcggcttttatataatgcaccttggttaaaaaataaaaactttttttttctacagtcctttcacttgctcaagtaccttcatcaacttcctttccatcatggcgtgaactgttttgcactgctttagcatctgactttgatttcttcttatttttctttgactgaaaataaaatagaatgttacttaatatttcattatgttttcgaaaaggtagaagtcagtaaaatacataatgaaatgtatgatgctgacaactaaaaaaacttaatgtttgattaaaaaacttaacatattacatggcaataatagtatgaggttatcatttatttagtcgttactatatgctaagtactttacacttaattctttattccttaaaaaaaaaaaatcactgaagacagtattattcccattttagagatgagaaaacaaagatttaggagatgttcaatattaaataggctgctctgggtcacatgaagttaacggattaggaaataggtctatccggctccaaag

SEQ ID NO: 56409 - DNA, 747 bp, Bovine  19866881981764
  misc_feature (1)..(1): n is a, c, g, or t
nccttattctgcattagaggtcttctcccccttcttgctttccaaccctactctccctttcttgccagactcctcccaggagccatccaagccgagctcctgtttcagctctcccagaaggtcagcttgtcctcttctcggtctccagcttctgccactgtcttctcgtcctttcttcctccagaagggcaggggcccggggtggcaatgcaggctctacactggtccctggaaatgggacaagcctcctgacctggtaaaacagtgttcagtcctgcctggccacccccagtggcctctgtcccctccaactgccttgcttctttgatgggaaaacaaaagcaagtctattctgagatgactagtatttccctggagtctgagtggagattgaccttattggccagactcatctctgactccccaggagcgggaacctttggactacttctcagaatgtgaaaaagtccctctatcacctctcccctgccccaccccatcaaagcctcaggaaggaagaacagtgtgcttttgatgtgtctttaaagttctctactgaaaactgacttcaaaaagcagagagcccattgattttttactccaaaatcaaaaggtttacttgaaaaatcaatgccatgaaggaaaaagaacctttcgctctgcaatgtcacttggaaaatattcagaagtgccatttccctggcgccgcagagggtctgggccgctacggcgtgccgtggcctgagt

SEQ ID NO: 56410 - DNA, 1707 bp, Bovine  19866880426822
  misc_feature (1)..(1): n is a, c, g, or t
nctgggcccacaagcagttgtgtgggctctagctgtcagtgtgcagttccatgactgcaggatattttcacaggtatgcacactgccttagagactggtgatgggaatctactattattgtatggctgtctgcttctcccctcagttctttaaatatttgccttatatagttagatgctgtgaggttgggtacataaatattaataaatgttgtatcttcttagttacttgatccctgtatcataatatacactttcttcatctcctgttacatttttggacttaaagtctatttaatctgatgtacttatagcattccaggtggctcagtggtaaagaatctgcttaccaagcaggaaactcaggttcaacccccgggtttggaagatcccctggagcaggaaatggcaacccactctaatattcttgcctgggaaatcccatggacagaggatgctggtgggctatagtccatggggtcctaaagagttggacatgacttagtgaccacacaatagcaatgacatatagttaccagtgctctcttttggtttctatttgcctgggatatgttttttctatcccttgatttgagcctatgtgtgtccttaaagcacatagtgaatctttttatccattcagccactctttgtcttttcattggagaatttaatcaatttacatttaaagtaattattggtgaaaatagatttaatcgttccattttgttaattgctttttctagctgttttgtagttctttgttcttttcttcctctcttgctcttttcctctatgacttggtaattttccatagtagtatgttttgagttctgtatcttttgtgtatctactataggtttctgttttgcagtcaccatgaggtttacataaaacatcttttacttataataatcaattttaagctgataacaacctaactttgatacatataaaagttctagatttttaaactctcttctgtactttttatttttttaatgtcacaatttacatatttttattttgtgtatctattaatatttagctactgttatttttaatacttttgtcttttaaccattatgctagagttataaatgatttagacaccaccattacaatattagagtattcaatagatgcccttaagcacattgaggtaattcccttctattttgagttcactgagtgtttttattatgtaaagatgctggattttgtcaaatgctttttctgtatcatttgaggtcatgtgggatttttcttcattctcttgatatgtgtattatgtttcatatgttcacatgagaaacaccttgtattcctggaataaatctcacttggtatagtccttttgattttctgctggattcagttagctagcatgttgttgaggtttttgcatttatatttataagagatattgctatacggttttcttttttttcccagaaagtaatttttttattccaggtttgttgagatataattgacatataatactaggtaagttgtactgcacaaagatttgacatacatatatactgcaaaatgatcaccacagtaagattagataatatccattccttcacatagttataatttttttccttgtgataagaacttatagaattgactctcataccatacagcggtattaactagtcagcatgttgcacattacatccccagtatttatttatta

SEQ ID NO: 56411 - DNA, 1446 bp, Bovine  19866880628971
  misc_feature (1)..(1): n is a, c, g, or t
ntacgtttgaactgtggtgttggagaagactcttgagagtcccttggactgcaaggagatccaatgagtccattctgaaggggatcagccctgggatttctttggaaggaatgatgctaaagctgaaactccaggactttggccacctcatgcgaagagttgactcattggaaaagactctgatgctgggagagattgagggcaggaggagaaggggacgacagaggatgagatgtctggatggcatcactgactcgatggacgtgagtctgagtgaactccaggagttggtgatggacagggaggcctggcgtgctgcgattcatggggtcgcaaagagtcggacacgactgagagactgaactgaactgaactgaactctgtgccaggtgctgttccaggcactgattacaataagaacaagtactagttcaaacttaaattcttttttcttcacagtcatttttcttcacatccagaataccctggggattgtcatctgacacaccaagtctgccgacttgcctcaggtcataaataatcctcaggaactggctctttaatgtccttgtagttactaggtgaccatgccagtgccgtccatctaggatttggattagtcttctgtccatggaattcttatatccctaaaagagtaaacatgactcctagttctccctaaggaatcatgtttttctctcaggactcaaaatcagactttcagcactttgaatttttgttaccaggctccagtctccaaccaagatatcaatgctgcccgctgtatccccatttagtcagtgtacaggccttttccatcagcttattcattctagtcatggttcccagactccatgtctccagttgccatgaaaggttgataatgattcaagaattaaagtctgaaatgaggacagcccccagagactattcttcccaaataaaattcaagtcaggtctctaaaactccgttgtcttcagggatcaggcaggtaaagtaaatatataaagctatttatgtgtaacacagtagggagacatgaggtctatggtaaaacagagaaagcacacaaattccagttttaaaaaagaaagctgagcaggccaccagccttctgtccttaagcctctgcagcccttaaggacagaatggcagcttctcaagctttatagctcacacacatagcacatcacctgcagttagtaggtgcttgagatgatgactcacagaaacaaataaagctaagtgagagagctgaaacagacaatttagattgtaccctcacagtatgggtaaatctcactcatctgagtttctttgttctcaaaactctgtctctgagacatttccaaatctatgataatccctaaattagtttttctaaaggatttcgttttcattaggacttcatatagatagatatatagataatcaaggataaataa

SEQ ID NO: 56412 - DNA, 1484 bp, Bovine  19866880737168
  misc_feature (1)..(1): n is a, c, g, or t
ncatcaaggtctggacatgtgcaccaagaaactctgaagcaggtatttactcttagaggtcaatttctaaagattaacattatgctctggacctaaattatttaacccttatcatttacatattttttctaaatcctaacaaactgttttcacctgtgatgcttcttgggttaggagtgctactatatccataaccgagttgtccaacagtaaaaatctcaagtttctggcatcacatgggaagactgcattttggatgggtcattttcactattataaaataattctatgtctagatgagcacagattaaaataaagagtaaatgaaatgatctcgctgtatcatttctctaaggggataatcttttttgagacctctttataatgcttaaagccagattatatagctctctggggcctatttttttcaacttcaaacttttcagactagcacttgaggggttccaaccagtctcctctccccttcaatcacattaacttcatccagcattagtatcctccttgtgcctaaataggctcattgatttagaatgtccatgcagttcaattttctcaacttctaaatcaacagaattgcaatataacctaatacatcgtactctgaaaacaagtgctgagcaggtcattcaattcattacatttctgcttttggcatggcaacaaataagtccacatttgagagagggctgtttacatatgagttgtccattattttatgtgtttcttacttttatatcaaagaatgtgatttaaaaattcagagataatttttaacaataatctcatcagtaaatcgaaataaaatcttatctctgtttgcaataaatatatcctagtggatcaaatacttaagcataaagattcaaaaagagagagaagaaaagaatagaccaagaaaaagatacaactctttatcacccatatacctgttaaacaggtatgaacagtagaagggcctctaaaacaatgagaagagcatgagatatttgtctccacacatcttttgaatttattaaaaggagaagattcctagtcttaatgttaccaacagtaaaaacatacctgattttattttccatatcttcactatctgactcttcagagcttctgtacttatctggatctggaagtgtgcttggatcaaatccatcatcatcatcatcgctccaatccagaaaggcttcctcttcatctctagcctaagaaaacacaaggaaaactgtggtttaagaaaacagctgataaataatcaggtcttatttctagccccaaataaatactgctaattgagatcctcaaattagaagtcttctattctggtgaaggcctctatgtgactttcagaaccataatcatttgcactgagggaaaaaaacctcatcatttcaaaagtaaaacaaaatacgattcaaaaagtaaatcattattaagtcccttatatgcaatataggaaaaattgacag

SEQ ID NO: 56413 - DNA, 1662 bp, Bovine  19866881098562
  misc_feature (1)..(1): n is a, c, g, or t
ntaacaaaaggtgaggttatggactatggtggtggcagagaaaatggagattaaagtaacaaatttgagagaaattttaaggaaaaatccaggaaatttaataactgattaaatgtagagatgaaggagtcaaagcggtttgaagatttccaggccaggagcctggctttgaagcagtgttctttgaagtactatgatgctcacactgtggaaaattatattagcatagccctttgacattttctggagaagagaaggtgcttcttattaataaggaagattgtcttcctattattctttggttacaacttaagacattctactaactcttttactctaaaagtgattgtttagatcatatgatgcataatataatgaaagtaaatatatcttatgaggcctgaggaatttgttcccatggaattggaacttgggtgttcagaaatgatgttcgtaattctgtcatattctgttagttattcaatattccagttgacaggattggcaccagttacttctgctattaatactgctaaatatacaggtttatagccatctatcttttcttatatcttagttataaattgtaacctttggtatgacatataactagatatatcttaaacattttatgctttttataatgtggtaaggcctttctcatacttgtggaatattagaaaaaacttttctcttttgatacaataattttgtaagcaattgaagtttacatattttgtcttaattgtataatatttctttatatatacaaaaactacatatggatattttgctttatatatacacaaaaaagtgatataactactagtgtggttcatttttgtgtaatactttctcagcacatcacatgaagaatccagtaagatggtgaaaaaagagactattgtccctactttatagatgttaaagttaggtctaataggagtaaagtgacttgcccgaagttgcttagaacataaagtggtgggaaagaagcatgaaatcaggtcttttttcccaactcaagtgtttggagtgcattgcacaagggagttcccttgtgcattgctttcttattctaaagcgttaaaaagtgattctttggggttctgcttttcccaggttgtgaacattcctatttggatatctcacttacatatgagctgtggcttttaaattttgggaagcaacagtggcaacaacaagtatcaatttgatattatctgttaaatgacagacactatgcttgaaattttgcaaatgtttgctctaatcttcttaataacattatgccatatgtagtaataacctcattttgcaaataaaaaaactgaaacttaaaatggtgttattctttaacaaaatggttacatcatattttagatttcacatataagtgatgtatttgtctttctctgtttgacttactttacttatgatgatgatctctgggtccatccatgttgctacaagtggcttttatttcattctttttttgtggagatacaggctttcctggtggctcagtggtaaagaatctgcctgccaacacagaaaatgtgcgttcagtccctgagttgggaagatcatctggagaaggatatggcaacccactccagtattcttacctggaaaaccccatggacaggggaacctggcagg

SEQ ID NO: 56414 - DNA, 777 bp, Bovine  19866881218861
  misc_feature (1)..(1): n is a, c, g, or t
naggctattgctttgctatttaaagagatatattctattccaaggtttagacccatttaccacaatgaaaatttaacaccactccattctgcactctatgggaaaacactttgctttggatgtatcacagggttacctttattctttctttcttgcttaagttctcagccacctaatctgtctcccctgttgcagcagggtatgaatgtggctttttatagaacccagtgttggaataaatgctgaaaataatcttcttctctctacatctggtattgctgtgattccttttaaaggcagagcttgaatccttattatttaaaagtttgaaagtcgatctctgtattcttatggaaattgcaaagaaaaggacaatgttttgaaagattgtggagcgagtgttttagtagaaaaattacggcattgttgtcactatgatccagaggtgaaaagttataaaacattcagctcaaagagatgacacatgaatttaataattttcatgtggataatcatttaccaaacaaactgtagacatgacttaatccctcctagaaagacaggagtgtatcttcaaacaaactgcctaagctgtttgttcacagtttgctttttgattcagcaagatggattatgaggggtaacaaccagagctgtgacagctttggctaaatcccacctggcgttcaatccctttctcctttaaaaaactccaaattcatattctacaaaaggcttaatcaaagtcattgggaggagtgccttggcttaaggtta

SEQ ID NO: 56415 - DNA, 1700 bp, Bovine  19866880381015
  misc_feature (1)..(1): n is a, c, g, or t
nacatgacatcttatttgctggatctaacaagttacattgtatagtttctgggactgtttgactattcctttccagtgggcatttatttttttatcctgtcattaaaaagaacaactgttatcttgctacacactcctgtgatttcattttctttgattaatttaaaagtcatttccagaaatgtgcaggtcttgtgtgtgtatattggcatgtttgttcacatatgcacatatacacacacactcaaaacccctatgcgtgtggttgcataacagatgggttttaaaaatatgtatttccttgcgtggagtaatttccccggaaattccattgtaaattggtaacggcatttttatgtcaccagaagagattatttgacttcccaggaattttctgtctgtaatcactgaagtctacttcaatggagttttaaaacattactgtgcaatctgatggattgaattttaaaaggccatatttttatattaatattaaaggattataatatgagagaatgtttcagccctgattaatttctaagtgggcaatggtataaaattgtaatctgcatttttatcaatgtatccaattatagaatgttaacgcacttacctttttattggcagagaaatctggttactctagcttaatttcaagatcgttttcaagtgttttcaattaaatcataacagcatattctaaaaccaatcttcctaaaaggtctgcttttattgtatagtttatttaacaataggcaccgggtttgtgttacatatttatattttttattttatttttataatatagacatcacctagatgaaacacctttaccctgtcctgtaaaatactaaagttacatttttcaccaacttaattggaaagaaggggagtgagaaagcaaacagcctttaatgtgctgtggatctaatctagcaatgtatccttgtgccaacatgtaatcattaacgacggatgaaaaagcaagaaaacagccactcattataaaattccagcactaaacattcgtaaaatgcttttcaccatagcaagcctgtcagagagtatatgtgattagaatgttgtgggtttcacactgaatcgaacctcactggaaaaagagttcactcgttttgaacaaatcttgcctatgtaagctgtcacttgtacgaatttttaatatgctcattcttgccaaatatgacttttaatgtgtacattccttcagaactcaatgaaaatcctctccggttcatgtatgaataaatatcctgtaaatgttcttttgggtttttcaagaaataccatgttctaacttaaactgcagaaactcaggtagacgcttctctttcgtggtttttgaagtcagcgtgccatgtttggattataaagaattatcaggacattttgcacctctgaagaaacatcgaactcatgacacgtgggcccccactttcggttgcccttctttaacatctgtccctccagagtctaaattgtagagcagggcagattatacaacacagattgacttcccaaacctgctccttacctttaagaacagaagcatcaatttaaaaaataaacaaaaccttgcaactcgtatttgtttattgttggaaagcgagagatttgcaatgaaagcacagggagaaaccaccaagtagaaagttggttaagtaccctgttcttgtctgcca

SEQ ID NO: 56416 - DNA, 1792 bp, Bovine  19866880811736
  misc_feature (1)..(1): n is a, c, g, or t
ntatttgtaagaaaaagaacttggaatttgggaacaaccagtgaggcccatcaatggaatatgaaagacactaaaaagttgattttctgtgagcttaacccaagtcccctccaacctgagcgacttcactttcacttttcactttcatgcattggagaaggaaatggcaacccacctcagtgttcttgcctggagaatcccagggacgggcacagagtcggacacaactgaagcgacacagcagcagcaacagcaacccaagtcccctccaacctaagactaactaaccttggaatctgagggtcccacaggactaaaacataatatatattttgatctaacttgtgggtgaagtgtattatccctgaatttctgagacagattcttcaatgctgatacctgactaacccattgagacagggcttccctggtagttcagctggtaaagaatctgcctgcaatgcgggagacctgggttcaatcactaggttgggaagattccctggaggagggcatggccacccacttcagtattcttgcctggagaatcccatggacagaggagcctggcaggttgtagtccatggggtcgcaaagagtcggacatgactgagcaacgaagcacagaattgggagacatcttatctttgggaagcaggtgagtaagaggtgtcattgggtgtgtgtgtgtgtgttgtggggatgggcagaataaggagccatggtagctgggaagggtgctccctggaagtgtgtgtgtgtgtgtgtgtgtgtgtgtgtgtgtgtgtgtggtgggggatgggcagaataaggagccatggcagctgggaagggcgctccctgggaggggtaaggcagatggaaggaggttatctttctttgaaaaatccagggattagaaattgaggacagcaataaaggctgcaacggcatttactcatcttcagcaatttactgttcataagaaattaagttttctcttccattctttaatggctaagcatcagaggaaaactgcacagtggtgttcaataattctgtctgaggtaaaaagaagagaaggaaaactgagttgctaaatcaaactttttccagttttggcccagatgttttggggagctagatgttttatatataaatacagatatagatctgtagatagaaatatatatttaccttcaggcaggaagttctctatgccaatatgatgcatgcaggaagactgctatactatggatatatttataactgaatatgtgaaggagaaattttgttttaactttgttttacctgcaggggtcacacataaatttcaaagtacgactcagagaacattttgagttcatttttaaaaaataatgtttttcaacattatagtctgcaaacccataccattttaaggggaaataaatgaataatccccgtggctgattgcattttgtaaggaattattagctagggacaaataggaggaaatgagaaatggttttcaaatgaaacatctgaagatcaatgagtacagattcataaactctgacactccagagatattatgctgtcttagcaaatcaaacaaaaccagaatgctaccaatgaattattctgaggtttttacagtattaaaggcaaactgaacaatctaagtgggaagaagggagccaacttagaggacttttacataaacatatgggcattttctgaccattatgataatatgaatggaaacatctaatacttttattagtactttatcttaaatgatctgattttatagacagtgatgaataagata

SEQ ID NO: 56417 - DNA, 1018 bp, Bovine  19866880831622
  misc_feature (1)..(1): n is a, c, g, or t
nttccctgcattaaattccctttgtctaaatacaaggagcagtttctgttctccttttttagaccctgatccagtggtgaagacttcgtgctaccaatgcaggggacccgggtttgatccctggttagggaactaaggtcccacatgttgtacaacatggccaaaagatggaaaataaatacttaaatgatacatatgttagtaagagtgacttagacacagatgagaaaagagattacaggtggcattacaaaggaacacgatgagatctcctttaggagaatatcttaagaaaccattgcctagagtcccaacatggtcacagcaacatatagtcagggggatcctaccttcaaggtaagggatccttacttactgcctaagtaattgcagggttatatatggaaattcccccagttatcactaagagatctcatagctcacctttgtactattaaacctatcagcttccatttgtccaggagttggacagctgatatgagagagagttctctgaacttgttccttactttcctgttttttttttctttttttgaatttcattttagactaatgtattaattccaatggaagtacagcttaaaaaagcaactacacgatctcatcaggaaaaaatacatttttccccctatttgaaggtctgaaagggtctctctggagattaaattctaccagcatttaaagaaatgaaaggatcaaaggaagaaaaataatttagatacaatatttcttcaatattttcataatttgatttatgcttgatttctcgatgatcatttctatgattaatacaatttaacagggggaaaataggggctgggagaaggggagagaagcctgagtagcacttgactataaaactcattcttcttgggattatgcccacaccagaaactgcttgagctcacttttgtaatttaataagatgtcatcagatatttgatgatgcctttgacatatttatagccttataattaaaactacttgatgcaaaatc

SEQ ID NO: 56418 - DNA, 639 bp, Bovine  19866880832648
  misc_feature (1)..(1): n is a, c, g, or t
nctatggtttttccagtggtcatgtatgaatgtgagagttggactgtgaagaaagctgagtgctgaaaaattgatgcttttgaactgtggtgttggagaagactcttgagagtcccttggactgcaaggagatgcaaccagtccatcctaaaggagatcagctctgggtgttcactggaaggactgatgttgaagttgaaactccaatattttggccacctgatgcaaagagctgacttattggaaaagaccctgatgctgggaaagattgaaggcgggagtagaagggaacaacaaaggatgagatggttggatggcatcaccgactcaatgggcatgggtttgggtggactccaggagttggtgatggacagggaggcctggcgtgctgtgcttcgtggggtcacaaagagtcggacaggactgaatgactgaattgaactgaagctgatctgccaaaggtgggtagctgttctgtagccatagtccctttcttgtcctcattaattcagtgattcccagaatacaatgtttggcagggatcatgacgcagacctgctgtgacttaaggtggaactaagtccatatagggtgacaaatttttcctgtatggtttttcttaagaggagaaactcgacc

SEQ ID NO: 56419 - DNA, 1810 bp, Bovine  19866881006713
  misc_feature (1)..(1): n is a, c, g, or t
ntccccgtctcatgtctggcagaggggatcttcaccactagcaccacctgggaaggccaactttcacatccatacatgactgctggataaaccatagctttgactagacggacctttgttggcaaagtaacgtctctgctttttaatatgctgtctaggttggtcatagattttcttccaaggagcaagtgtcttttaatttcatggctgcagtcaccatctgcagtgattttggagcccaaaaaaataaagtctgccattgtttccattgtttccctatctatttgccatgaagtgatgggaccagatgccatggtcttagttttttgaatgttgagttttaagccagctttttcactctcctttttcaccttcttcaagaggttcattagttcctcttcactttctgtcttaagagtgctgtcatctgcatactttgaggttattgatattttccccagcaatcttgattcctgcttgagcttcaccgagtaaggcatttcacatgatgtagtctgcatataagttaaagagcagggtgacaatttacatccttgacatactcatttctcaattttgaaccaatctgttgttccatgtccagttctaactgtggcttcttgacctgcatgcaggttttgcaggaggcaggtgaggtggtctggtattcccatctctttaagaattttccagtttgttgtgatctacactgtcaaaggctttagcatagtcactgaagcagatgtttttctggaattctctagctttttctatgatccaacagatgttggcaatttaatctctagttcctctgccttttctaaatccagcttgtacatctggaagttctcaagttcacacactgtggaagcctagcttgaaagattttgagcattactttcgtgtgaaaagactgctgttgtgcggtagtgttaatgaaattattagagagttcacaaatacctcctcagttttgttcaatggttaaagatacaaaccgaataaaagcagatatcgaagccacttacacctttcagtaatttcacattcaactttatcctcatgagatagggctgaccttgttactcccaagtttagaagattagaacatggatgaaaatatgaaataactctcatacagcctaagtcaagataatctggaattcttttctagcatagatttttactcaactggtcctcttcaggaacaatgggagctaggcactgtatttcaggccctttattaacctcctatccaaacaccaccagcaagatacacaagtatctaaaagggtgtgtgaattgccttcattcaactttatcagcttaactcaatgcatgtatttccagggggaaattaggaaatgaaaaggtatatatttccttgaaaggaaaacctaggagaaatgactaatgaaactagataaggttgtttgcttttagggagaaacaaagtccagttttattaaattgccttaggtgtttcttgtactatttttgttatgtctttaattcagaaactggtctactataattattagaaaaacaggcatttcactttaactcagtggacttgttcctgaaaaatcttgtataataaaaataaggtttataggaaaaatagagctggggcagactcctcaagatctatgcaactctgtacctaaagcactaataaaagtaaaatgtggtgccatggagagggtatcccagggataccagagatcacctgcaggtggaggagagattcactcaggggagatgagaagcacagaaaatatcgtatattaatgcataaatgtggaatcta

SEQ ID NO: 56420 - DNA, 2315 bp, Bovine  19866881187395
  misc_feature (1)..(1): n is a, c, g, or t
ngataagtcatttcctgtttcaacttccaagccccctggcattccttggatgctgctgccttccttccatcttcaaagtcaataatagcagggttgaattctcgtatctcaccactctgaccttctctgctgtcctctctacttttaagaatttgtgatgacactgaacccacccagataattcagtataatcttaattccattgcaacctcaattcccctttgccaattaggatgaggaaatctttggggggagctttcctggtggctcagatgataaagaaatggcctgcaacgcaggagccccaggtttgatccatggtttgggaagatctcctggagaagggaatacccactccagtattcttgcctggaggattccatggacagaggaacctggcgggctatagtccatggggtggcaaagagtcagacataactgagtgactttcactcactaacatctgttagggaagggcattttctgcctgctacgtggctattttaatctgttttttaaaaaggatcctaagcactgatgacttgagccatcttggccgtgccctgaaagagaggactaatgaagctcaccaatacattcataaggagatatctaaggagattgctggtgctggagaagactcttgagagacccttggacaacaaggagatcaaaccagtggatcatcaaggaaatcaaccctgaatactcattggaaggactgatgctgaaactgaaactccaatactttagccacctgatgtgaagacccaactcattgggaaacaccctgatgcagggaaagattgaaggcaggaggacaaagggatgacagaggatgagatggctagatagcataccaattcaatggacatgaacttgggccatctccgggagacagcaagagacagggaagcctgacatgctgcagttcacaggttcgcaaaagttaagacgtgacttagggactgaacaaaaacaaccgcaacgacctaaggagagcactttcacagcaagcactctctctgagctgtcagtatcacaggaacaaccaacacccttcaaagtgagatgagagcacttttcagaatggaggaggagaaagtggagaccatctctatgtgggcacagatgaactcagtcaagagcagaactcctgtgttaatcacaggatgcaaagaaggtacaatcaatggagccaaaccatttccaaacactagaggacctcaatctcactaaaactttattttggcttgttggtaagtttggaaaagcactgtattcatttctccacaactgctggaaaagatgaagagcattgcttttcaatagttcccaaagtctaatttggtctcagaagaggagccaatctcctgaagaacccagagggtttatgggaggggctgcatgatgctacagcacagcatgacgtgggctgttgtataatacaatgaaaaatatacttgattttttggtcttgtttcttggcacagctcttaaaaccattggaatttcctgagtgataggagcgtcttttgttcttcattagtcttacctgagtttgtgctaacaaagtgacttggtatttcccctagcccccataggttcagggcttccctggtggctccggagtaaagaatccacctgtaatgcaggagatgcgggttcgatccctgagtcaggaaaatcccctgggagaaggaaatggcaacccattccagtattcttgcctgggaaatctcatggacagaggagctgggcaggctacagtccacggggttgcaaagaatcagacacaacggaacaactaaacaacaatcacaacaatagatagcttcaggatggagactggtagccagaggagccaaaaggtgtaactgggggattagaactttcagccccacccgccaacctcccgggagaggagagggacctggaggttgagttcaatcaccaatggtcatgatttcatcaatcaatgaagcctccataaacccttaagtgggtggagtctggagagctcccaggtgggtcaacacattgaagtactggagggtggcgcccctggagaaggcatgggagctctatgtccccctaacttctataccttgtcctacgctcccttgtaactaactgctcctgagttacagcttttataacaaacctgtggtgaaaagtgaaagtattagtcactcagtcatgtctgactgttttcaactctgggggtcttacagcctgccaggctcttctgttcatggaattctccaggctagaatactagagtgggtagccatttccttctccaggggatcttc

SEQ ID NO: 56421 - DNA, 925 bp, Bovine  19866881626529
  misc_feature (1)..(1): n is a, c, g, or t
ngaggagaagaggaggacagaggatgagatggctggatggcatcactgactcaatggacgtgagtctgagtgaactccaggagttggtgatggacagggagggctggcgtactgtgattcatggggttgcaaagagtcggacacagctgagcgactgaactgaactgaactgagatgcttagtactacatccttataaaaattcttgaactttgctctgaagtttggttaagtcacttggtaacagtttggtcttttcaagcctcctgttaaatcttgttaggtgaaactagaaccacctttaatctaaggctaatttcttccactactgaggtaatacgattgtaaataccctgcctgattttccttgagttatgatgttttccctctggctgcttggaacatgcactattcttggacctgtctgagttctgattatcagttccttttaagtggttctttccttttcctcaggtaattgcgccatgggcatatgctactaaatatgaaaactcacgggggtatcccctgtggatcttcatagctgtttctctgtgcagctgtcttctccccaggactctgctttttgaactccagctcctggcctctccagactccctgtgtctttcctcagttcaaggttactcctggctctgtttggattctgctttgcaccgcagcctggaaaatctgtctgggcagtaagctggaactgtcatggggcttatattatttgttttccctctctcagggaccagtgtcctctgcttagtaagttgatatgcagtgcctgaaaacttttgtctattttttttggtcttcattgttatagtaatataatattaactgtttagttgtttcaggaagggtgttctaaatggtctctcctactccgtcttagttagaaaatatagaagaagtcttat

SEQ ID NO: 56422 - DNA, 817 bp, Bovine  19866881812685
  misc_feature (1)..(1): n is a, c, g, or t
ncatcaaggtgagagattacgctctgctaatgcagagcaatggggagacgtgggaagaagtgaccggagtcactgagggtggacttagaaagctctcataatcttcaggccagtgatcttctgaagatgtatgactatataatatatgtatgttctgtgtgtgctgacttactttagtcgtgtccgactcttttgccgccccatggactgtagccttccaggctcctctgtctgtgggattctccaggcaagaatgctggagtgggttgccatgccgtcctccaggggatctttccaacccggggattgaacccacatctcctgtgtctcctgcattggcaggcgtattctttaccactggtaccacctgggaagcccagtatacatatagacatacacacggggcttcccgtgtggtaaagaatcagtgatttaacaaaaaaatccacctgccaatgcagaagacataggagacttgagtttgatccctgggtcaggaagatcccctggaggaggaaatcgcaacctgctctagtattcttgctgagataatcccattgtcagaggagtctagtgggctacagtccatggggtcgcaaagagtcagacacgattttagcaactgagtatacacacgcagtcaatgaaaggtaaagccttacaatactgtgaactaacttacggtatttctctctccataggtgaagtttacattctatcaagtagtaaaagtatgacccagactcacaatggaaaactctataaaattattgatcccaaaaggggagttttttttaatattctattaagtcaagta

SEQ ID NO: 56423 - DNA, 1846 bp, Bovine  19866880355892
  misc_feature (1)..(1): n is a, c, g, or t
natttccctatgcacaattctgatatgaattctttacatctctcagctgcgttttttttttttttttttttttgctcgttggctttatttcctccagatggtgatctttcctgtgccctttaacactggtggagatggatgaactggagctccagaataaggcttattatccaaaaggagggcttcagtgcaattttaattgcttttgtcttattatgagtgaaaatgggccccttgtcgtctatttcggggccatttgtatttcctcgggcacctggggaaagtgattactaaagcaaaaggcaggacatgcataataggttgactggtctatttttaaatcccagcctctgctgccagtcaacagtggcagccctgattatcatttggcttggtttttggcatggaattggcattctcacctgcttaagtgcctgaagtctcggattaaacgacacctccccagaacacgtcttgtgtgtcatcttctggtgccacccagttcatttgtatgttttctattgtctttgcttgctccctcgtcctcatctgctcgcccccaaagagaatgcaaaccccatgaaaacaaagatgaaggaggatgtggttttagagttttcaaaaatggttttagatgagttgtgctcatctaaatggttttagatgagttttcatggttttgctgtgctatgctatgctaagtcacttcagtcgtgtccgactctgtgcgaccccatagacggcagcccagcaggctcccctgtccctgggattctccaggcaagaacactggagtgggttgccatttccttctccaaacagtgaactactagtccccagttctgggcctgaagcctaattggcttttaactctttccttgccccacagggtaaccgcttggctgtcaacagcccccactgagcctctgactcactggcatcaggtgcggtgtcttcttcagactcctctcttggccacggaaggagagaccctctcagggagagtgctgtttgtcaccaataagcagtaagcaagagagtatggactcaatcctacctctggttactgggcctgtgggaagccggtgggcccccaagaccccaggacttggaagtggccaacaggctttaccaaggcctggctgagcttgcaaaggtgcccccggcttcaaagcctgcagggcacacatcgccttgcactgatcacagccaggaaagggagcttaggataagtcaaaggcagtgttccactcctgactgcacagccaggaaggaaacccatcaacttgtggggacactggcaaaagcttgagctctcaatgctctaaagcccaccacagcttcctggctttacttgcatctgtctggccaaacatccccaaatttagtgccgggaagtccatctgtaccgcagcggggagagtactacaagggcacatgcggtgtgtcaggcaggacactgctccccatggacacacgaggtctcagctgtgattacttcaacttggctcatttttagaatgctctgttttctttcatcttgtgggagcttctcctgtgtgagttagcagagaagggcctagaggagtgtggttcaaggacacttgaatattatatctcaggatattaagggtattcagaggtcatttcacccaactttcttcccttcctacctctccccatatcccgcttccttgggcctgtgcttttccatttttaaagtctttatttcattacaaaacctaaacatgctcacatataaattgaaaacttcaaaagtgtctagggtcaagccacacacccacccctaaccccattcctcaaatatgcttgcttggtccatatt

SEQ ID NO: 56424 - DNA, 1477 bp, Bovine  19866880379871
  misc_feature (1)..(1): n is a, c, g, or t
ncttctgggcctggagtctccccagcccctcactttgtccagcaccctaagacagatgccggtagctagtgcagaccaggctgttgtgttcatgaagccactcctgagtaattctaggaaaatgttctccccttttgtttttgttttttaatgtatcatttcctcctttgcttcctctttctctctctgcttttccctcttttccctgcctcttctctaaccttctatttctctgatttttttttgggagggggccacatttcatgcagaatcttagttccccaaccagggattgaacctgtgccccctgaagtggaagcgcagagtcttaaccactggattgccagagaatcccctctgattctttctatagcagacttctttctttgaactacttggctttgactgatattctgtcttggtccctccctctctgtctgttagttttaattttgtctttttgtctgtttcttgctcttggctccactgcctccttcccttacattcctgcttgtctcagaaatgtccctcaggtgacctccagagcctttgcctcccctttctcatccctagttggcattagcagccagagtactctgtccctttacaaataattagaccaagggcaagtgtattggggggttgggggagaaggtgacgcctggccctgggaggtagggacactattaatagtcctaagagcagctgggggtgggggtggctgtctggccgggccgggccggggcagctcgaagggccagaaagggcagcactggaaatagagtggccggggcgggggagccgctctgcgggcccctgacctggacacggcccctctgccgcggccctgccttctcttggtgtggagggcattctccactatcagtttttatccatcaggttggtgagggaggagaagcctcagggccggggggccacttttctgggcccccagcatcacatgacgcctggccccaggccctctcagaaatgttggctcctgctgccggctgagtcgtggcaccagcctgtgctgccaggagaggcacccggccgcttgtgtggccacgcctgtgccccggtgtcctcagctccccgtatgcccagcgcccagctagtgtgggcagggctttgcgctcagcatcctcagcatcctggggcacaagtctctctctgcctccctgttagccttgccgtctcctggcaatccctggccctgcctctccctgactgtttccaatgtggtatctgccctgggactgtggccattgtattcggggagagatgtacacgtagaagacattctgctctgccctttatttcccaagaaggctccctgcccctctttgcagagggtaatgggccaagtcttgagggagctcctctgctcactggccagtggtctctagggtgagataccaagaaccatcatgtcgagttcacgcaatgtatcataaagagtacgaactccagtggg

SEQ ID NO: 56425 - DNA, 2655 bp, Bovine  19866880402457
  misc_feature (1)..(1): n is a, c, g, or t
ngagagggggttaagaaatgaatagaatccacagcaggggggctccttgtagcgttcaaatcaggaccccactgagactctgatgaaaactacagaccaggaaaatacacacacacacacatacacaattttggcatgaaatttcagatggctcatggatcccattaattccaactacgagcttgcatccttaggatcaatctgccccagaggaagactctctcctctagaggctcatcaaatatcaggaagctgagaaaaaaagatcaccttgttgtaactgagtagtagatagaaacatccaggcagcagactgacctatcaaggctgcctttcaacttgtgtgtgtgtgcgtgtcttggtcgctcagtcatgtctgacccttggcgaccccatggactgtagcctgccaggctcctctgcccacggaattctccacacaagaatactggagcagggtgccattcccttctccagaggatgttcccgactcagggaccaaacctgggtcttctgcattgcaggcagtttcctgactatgtgagccaccaaggaagccctgcctttcaacttactaatcacttattgagacttactatatgctcaacagtgtatgagcttccctaggtgttttaagaaccatgtcacagaaaacagggttttgaaggcttcttcctgccatcaaggtcaagccagcctctggcagcagaagtcagcccccagggagcataagttagtacaaccactttgcagagcaatttggcaggatctagtgaagctgggaatgcatagagcatacaactcagcaattccactcctgggcatatgccctagagaaatgcactcacaagaacgaggggacagctttgttcaaaatagcacaaagctggaaacaacccaaatgtataaatacgtggtagaatgttcataccacagaataccatgaagcagcgaaaacggatggatgggaccattcttgtcaagcagattaagctcatacttcttacatgcttatctaattaactgtaacataagtatcacatatttcttatattcttatataaaagtgtaaatacataaatggaaatgataagcacaaaattcaggaaagtgcttctggatggagagaaaagaatggggccaggaaagggaatgcaggggcttacgccgtattaaaacggttgcatttttaagaaaaaagttattattggagtatagttgatttacaatgctgtgttggtttcaggtatagagcaaagtgaattagctttgcatatacacacatccactctttttaaattcttttcccacatgggtcattacagagtactgagtagagttctctatgctatacataaaggttttgctttttttggtcaccaatatgtttacttttattggttgtatattttactgcaacttcctgtgctttcaaggacagttgaaatatactgttttcttagtcaaaaagaaccttcagtgaaatacggataagatctttttactagatcttcctaaagttactgattgaaggaaaaaaggaaaagaaaaaagaaaatcaaatgatgtattgttgaatctgtgtaaaggttaatctacttgaacaagtagtctttaaatggaatatcaaattcttaatcaggtaaaggtttcatttcgatggcagtttgccccatcacctccctgtgctcacctccccgacttttcccctcacccactctgctccaggcatgctggcctcgtcactgttcatcaaacccaccagatgcagctcaacctccggcccttggcacttgctgctctctctgcctggcactctcctccttcggctcatggcttattcactcacttcctcccaggttttcattcaaatactacctccccaatgctagtcttccctgacttctagccctcctgcccataatacgacccatcccttctctgctttattttttctctaaaaatatctcatcaacatctaacacactagatattgtattcattcatgcatcttgtctttcttcaccactagaatgtcagcactacaagaggagggatttttgtctgttttgaccactgctgtgttcgagagcatatggtagttgcctaataaatattcactgaatgaatattgttcattcaatatttgcattcaatgaatgcaaatattcattcaacgaatatttgttatatgatttgctatgtgattttccacttcttttagaatttgttacacaggcatttgttatatgattctctacttcttttagaattattctattatacctttttagaaatggttatttctatcacatctttttttataatacatttttaaacaacaacaacaaagtcaaccactgagctgttgcacacacaagtttcctagtaagcaaagagaaaagtgctcaatgccatgatacatccaaggaaccttccaaggtcatgaggcaaaggaccgtgggcacagcagagcccctgtcagaaaacactagagctagccctcataaaagaccactcaaacctgaaagcctctaccaaaatagcccaactgacacagctgcttctgtgagaagaaacgttgctttgaaacaacagatacatttaaaacctgaattatgagaggccagccaacacagcatggtcactaagacc

SEQ ID NO: 56426 - DNA, 1423 bp, Bovine  19866880465116
  misc_feature (1)..(1): n is a, c, g, or t
naatgggatggagggtcgggaaggataaaaagtggacagacatgaaatagactaagaaggtaaaaccgataggacctggcaactgaaatgggcaggagcagggtgagagaaggcaaagagttaaggtaatgcccctctttgctggcagaggaagctgagtgtctggcgacgtccttcactggacagggaagtcaggagtggcaggcctgggggacagaatgaagtaagttcctacatgttgactttgagggctctgggactttggaggggtgatgttcaggcaatcaggagggtctggggagaaagagagagagagaattctgggtcaggaatatagacttgacatgggctcgggacactcaaagccccaggagaaagtgaggctgccatggagagcaagaaggatgtggagaaggatacggagggctgagagcagagcccagggaactcaaatcacggaagagggctggaaagacaacagaggggacggggggccaggaaggcagagggcagactgcgactggacatcacagagccaggggaagaccatgcttgccacgggagacacatcacagcagcgcaggcaccgtggagcaggctcaccaggctggcaggagccaccgagaacacgcagcggtgatgggtctgctgggaatccttcagagtcctgcagagcagctgaggccagtgaagtgaaaactgtggaacaaggggctcatctattcatgccatgctgctgctaagtcgcttcagtcgtgtccgactctgtgcgaccccatagacggcagcccaccgggctccctcgtccctgggtgcggcagcagctaaagataccaccaggctggacacccccagccatgcttcccagacccagagaggtagagatacccagagggtcactttcggccaaggaggctgtaggaactccccagagtgagcctcccctccttcctttggccgagcccccacccccccacccccgcccgcaacacggagccctgggcaggctaaatggggccatggggagaggaagctgagggggtggtgggcaggcggctgaggaagtgatctcaccccagctggcgccacttcctagaagcctgaagggcaggaggaaaccactagggcctccccccatggccctgtctcctcagcggccaggcctcagcctgcgccccaccagagcggatgccgacagcgggcgccccgctcttcccccaggcacgcacccacccagagcaccagacccaggctccaggtgcaaatcccagctccatggtttccaagataccatccaagcctcagtctctccatctgtacagtggcaccaagagcctctaccacgtaacacagtgaggtttcaccaacagtatgtagcaactacccagcaccaggactccctacagaatttatgggactcagt

SEQ ID NO: 56427 - DNA, 1441 bp, Bovine  19866880489148
  misc_feature (1)..(1): n is a, c, g, or t
nctttgggccctgcctaccccagtgccgagtctctgggcacgtggcccacccaaatccaaggagaggggagggccaggggcaagcacatgccccagagcggcaggaaagcaaccgggcagaccttgtcctcctgatggagcctcccacttccaccttcgcttccaccaggcctggcccagagcgcctctagccttgggtccttggctgccttccccagggccagggctgtcagagctaattatccaattagctgattagccagggggcctgggggctgcctggggaggcaggctcagctgggcgtgcaaagcctgagccctccaagccctgccccggcctcttctcccaactgcccccgaggaccctggcctcctccagaacaccggaaggcccccacccctgcctgtgtccactcagtgggcagggcctcctacctgagactgctgtgggatgttcagaaagttgccgtcccggggtccgatgctgacaaaccggttggcagaggaggcgcctgtcgttgcgaatgctgtggggagcaggggagagagggagagaccccgtgaggactgggggcccacccgggcactgccccacagggctgctgagagagggagagactgggttagaccatgctgcctgggctgaggctggcggcgggaaggccaggccggaggggcccccttatcctctcactgaccaggagctcgcggtcccccagccccggcactccatctgctgcagccagggaagctcctttgtggccctggaggctctagctgtggctcagtggacccagttctgtcccctcctccctgaagtaagaacacttgctttcctgctgggcctcttgcttttggagagaagggagcccaggaggctgggagctctggggactggccccaacctgctgggagaaggccatctcagccgggctacgcctccaacaggggcgcctagttgggtgctgcaccgcttaccaccctgggcccaaggtctgggcccgtggcttggggaacttgaagggtcccagtagagggctaagctgggtgggacaggtcagagagggtctgggagctggctgctggctcaggcgcaggggcggcagggctcaggcctggcaggcattctcctcctctgatggatgagccagctcctatggtcctgcggttcccagggaccaagatgggcccacgtgcagagaaggaggaggccggagggcctggcaaagccccagggtgtgggcagcagaggcagttgttctgaggcctgagggggcaaacgggccaaacattctggagctcttctgggttgtctggctggagccctacgggaaggagccggccctgtaccctgggaggaaggaagcccccagaagggatgaggagtgtcacaggctactggggagtccccctcccatccctcccagcacaggatacaccc

SEQ ID NO: 56428 - DNA, 895 bp, Bovine  19866880515128
  misc_feature (1)..(1): n is a, c, g, or t
nttctatgtatggtagtgtgtatatgttaatctcaaattcctaatgtatccctcccccccgacccctttggtaaccatgtttgttttctatgttggtgggtcaatttttgttttgtaaataagttcatttgcatcatttttttagattccacatataagcaatacatgatatttgtctttccagcttaattcacttagtatgacaatctctaggttcgtcggtgtttccgtaaatggaatcgtttcattcttttttatgactgagtaataatccacggtacatagggaccacatctcctttatccatacatctgccaatggacatttaataaggttgcttctatgtcttggcccttgtgcatagtgtgggcaggtgcttcctctgaataaggtcgggtgggtgaggtcaatgaggcctccatcctctcccctgttttctagccacgctaatatcttcttctcatattctcctgtcctctgcccctgcccctcatctggtaaccccgctgttctccgtacattctctccagccccaaggcctttgcacatgttcccctcctcacccacctggcacaaagtagttgctcctctgcaaatatttattgacattctgacttccagggagctagagaaaaatctagatccttcctatacttgggttgacagagacataaacttggctgagatcctgggagagggtaagtggggtgggggaattaaccaggggcagcacagtggaggcagccaagccagactcgggttacaggtaccacatgttagctgtgtgattgtgggcaagtacttaacccctcagagtctcagttcccctgtcaattaactaagtgtagaacactcacctccgagaaggtgatggcaccccactctagtactcttg

SEQ ID NO: 56429 - DNA, 1416 bp, Bovine  19866880534964
  misc_feature (1)..(1): n is a, c, g, or t
nttccggaatgatatcatctcaggttcaaatcccagctccatcacttactagctgggtgatcgcgagcaaattccttctatgcttcagattcttcagcgctcacatgggaatattaatgtttcctaattcattggattgttgtgaggattaaatgagagaatgcatgtaaagcactttggaagcagtcaattctaaaagctatttattctaattgtaacagaaagcatctgccgtaatctccagccgagatgaggaggtgaggggggttgggtaagagggcagaagcacatggaagaacatgggggctcagcatttctgagcccagcccggatgccgccaatccttatgtttccagagttctcatcattcaagatacttctaagaaacacaccacagaccacttaccctgttagcaccaccacaaagtccatcacattccagccgttcctcaagtaagagcctttatggaaggcaaatccaagggcgatgattttaattccagcctcaaaacaaaaaattccaatgaagtatggttctgtgtcatcctggaagggggagaaggtaagattagtgtctttggctggacagagggcggcatgaacagggaaccacccactcagaatctctacccacttcccctcacctctccagactttccagccctcaccgcgcctcactgcattctgcctggagtaaccttgtccaaagcctactgcgagaaaaacagaagcatggagaagacgactcctttccatttggccaactttacacactacttaggcagccatgtgtgactatttaaattgaaatgaagggatttcctggtggttcagtggttgggaatctgcctgccaatgcaggggacacgggttcgatccttgattggggaagatcccctatgccatggggcaactaagcctgagtgccacaactacgatgcctatgcacctggagccttgccctacaacaagagaagtctctgctatgaaaagcctgtgcactgcaatgaagagtagcccccactcactgccactagagaaagcccaggcagagcaacgaagacccaacacagccaagaataataaatatataataaaaaataaatttaagtgaaataaaacgaaagactcagttctgctgtcacactagtcccattccaggctaacgtattggacggtgcagatgttggatatttccatcactgtagaaagttccacaagaaagcgttggtttagaatgtttacttgtcacatacatcatccaggaccctggggttggtccctgtgcactgacctcacctccaagcccccaaatctgacacttgtgatgattctaagctggtgtgcaccagtagagcagttcaggttgagaaaatattggaatgaacacttctgcactggctggtaaatgactga

SEQ ID NO: 56430 - DNA, 1954 bp, Bovine  19866880560463
  misc_feature (1)..(1): n is a, c, g, or t
ngcaatggcaacccactccagtgttcttgcctggagaatcccagggacagcagagcctggtgggctgccatctatggggtcgcacagagtcgaacacgaatgaagcgacttagcagcagcagcagcagcaagcaagcaatcacgcaaaagtcagaatgtgggaccttccttagggcaactggactggtttctgcagagtcaatggcaggagggaagataactgccttagattacaagccttaacatcaaatctagaccatgtacggatcttggttcaaacaaaacaacctgtaagatgccatttctgatgtaattgtggatatttgattactggctgggtttttgatgattcccaggaaccattggcgtgctggatgtcaacatgtcactggggtgatgtaagaaagcatcttttttggccactctatgtgccttgcgggatcttagttcttcaaccagggtttgaacccaggccatggcattgaaaacactaagtactaaccactggactgccagggaagtcccagaaagtgcccatattttgagcaatgcagacttaagtatatggcagtgaattgacgtattgcctgggatttgccctaacatagtttggccaagaaaaacaaaccaaggaaataaaaaacaaaaggaaacatgaagtgaggcaaaatcttgatatttgttgtctctggatgaggagttcatgaggggttcatggtactgttctccatgtatttatgtatggttaatatttttcacaagaatttttgtttgtttttcttttttaaaaacttatttatttatttaaattcttttggctgtgccaccagacttgcaggatcttagttccccatccagggactgaacctgggccctgatagtgaaagcatcaagtcctaaccacccaattgccagagaattccccaaaattttgttctgaatgtgactcctcatggacaacgtaacccctccatccctctccagattaacaaaaggtctgctggggggcaagagtggaggatgggcagcgaggacttctctctccccagattattagtattcatgaaatttaggttccccagggctttcatggtggctcagtggtaaagaatcctcctgcaatgcagaagacacgggtttgatccctaggttgggaagaccccctggagaaggaaatggtaacccactccaatattctggcctgggaaatcccatggacagagaagcctggtgggttccagtttatggggtcacaaaagagttggacaggacttagcagctaaacaacaacaggcagggggcccaggatctggttcttggagacaagactaagagcccagtctgctctcagatcccacaggcacatcagtttgcccccaaagcagagaccccggcggggaaacatcactcaccagtcgttcagacatcggagtcttgtcatcatcaggtaggtgttgctccagggcgaggacgatgcagtttgctatgatggtggctaaaatcatatattcaaagggagtatcacagagttaaggaaaatcttttcagctttgtttagattcaaagcacaactgagtggaagatacagggatttcccacatgtcccctgcccccacataggcacagcctgccctgttatgaacgtcccccactggagtggtgaattttgtcacccgtgatgaacctacactgacatatcactattatccaaagtccttagcttacactatggttcatgcttggtgtcgtacattctgtgagtctgagcaagcgtatgatgacatggatctaccaacatagcttcatacagaggagtttcactgccatgaaaacccagcagatgactccataaggaaactgtagatgctcttcctccatctcacctccaaccttcattggacaaatatcaatttagcacctattgcgtgccaggttcctgggcacagggtcacag

SEQ ID NO: 56431 - DNA, 588 bp, Bovine  19866880629811
  misc_feature (1)..(1): n is a, c, g, or t
ntcggggctggctcgggccggcagcccgggtagtggctcgaggaccactttctgctgcggcaggagcaggtgcgggggcaggaagcccaccagctccacccactgctcggcgcccggctcgtaatggggcggcagcggctcggggctgcctagctgcgcggcctccccgcggcaagctggcggttccggggccagcgcacccggcccgggcccaggcgtgggcggccggggcggcggcggctccggtggcggcgtgggccagggctcttgctgctctgccttcctagcgggaaactgactgcctgagctctggaggacaaacagagatactgaggggtcaccggggccggcagcgggcggctgtccaggcctccaccgcccaccgggctgctgacactaggcagcaacccgaccagaagaccccacccggtgtcagggaaggggcaatccagagctctctcttagcaaagcctggaccctgaactgcccggtgctggcaaagaggaaggcttgaggcccatggttggaattgggagtccagggtggggctgggtttctcaaagttccagctaccaccctccacccaga

SEQ ID NO: 56432 - DNA, 1531 bp, Bovine  19866880655206
  misc_feature (1)..(1): n is a, c, g, or t
ntggacatgagtctgagcaaacgcccagagatagtgaaggacagggaagcctggtgcactgcagtctgtggggtcgcagagtcggacacgacttagtggctaaacaacaactcagtctcatccataaaggagagtttgacttgggtaccccacggtttcagtgcctggcatttaatacatgtggtatagacaaaaatgtttgcctatcaaaatttaacgtaacagattagaaaattgggcaacttaaatgggagatttgtgggacggacataaccaatcaaacgcacagggcgatgatggagcaccctgattcttgaattttctagaaggacagaaacagatgtatccacaagtggaagcagggtttgttcatcattatgaggaaaaagagtgttttggctagaaattaaaaatgcaaattaaaacaagctttaaggtatcattacaaactgatttatccagaaaggaaattaaacacgtaataggcaatggccggggtgggagagtccataaacgtctgcatacttggcaggtttataaatgggttcaatgtttttgaaactcagaacagctctgtgaataatgagttgaaaagctgttaatatctttgatcctataattatccccaaagaaatcctcccaaagggtgggaggagtcattgtatgtaaatgctcccagcagtgctcctcgtaaaggcaaaaactggaaacaactcagataccatataataaagctaaggctgagcaagccacagtgtggccaccctctggagtgtgggatggcatggaaatcatgttgaaactcagcagtaagcttataaactaggggggagtgaagcaacctgagtatgaagtagtgggttcctagggattagaaacacaagtaccttttgatttttatttttggccgtgctgttcagcttgcgggatcttagttccccagccagggcccaaacctgtatcctctgcaatagaagtctggagtcctaaccactggactgacagggaattccccaaaacacgtgtagattttgaattccctcccccagcattgcctctatactccagccacacgatacccattcagccttaatgtctgctcctctcagagtctcctgttattttctctgcctggaagctctctcatctactcttcatacttagactttaaaaaaaagaaaaccatttatttatttaggcgtgctgggcctttgctgctgcaccggctttctctagttgcagtgagtggactactctcgggttgctggctcttcactgtggtggcttctcactgcagagcacaggctctaggctcacggacttcaaaagttgtggtgcacgggcttagctgctcctcagcatgtgggatcttcctagacccgggatcgaactcatgtctcctgcattggcaggtggtttctttaccactgggccatgagggaggccccgtaactagaatttttattttattttttggccccaccatgtgacttgtcggatcttagttccccaatcggggactgaacttgca

SEQ ID NO: 56433 - DNA, 1087 bp, Bovine  19866880657710
  misc_feature (1)..(1): n is a, c, g, or t
ngtgccaggggagctctgtggggagcagtgctggctttgaacacaaaggccattgctccacaagagtagtaattctcggggcactgccagcccgagacgtatggccaaatgagaggcccctgccccaaggatggtccagagttctctgacttattcatgggcagagtttcaaatacatgcattaaaaaaaaaaatttaaaccacacacacacacagtctgttgtagccatgctgctgcccaggagtgtccctggccacatgggacagtaactgaggatgatggtcctgaagccaccgtctaatactagattttgaaacttggagactcattaatataattactcaaatgccagcctggcttggcagggcctcccgagttgtatttctctccaaccaagcactccggctgcagggccgtccctggtgagccaaagccctgctccccggtttgtggatggtggttgcaggcatgtgttggcttccccagtgaacccttcctgggagaggccgggcattcccacagtgccaaatcctgcctttatgtgtcttgtcacgagacagcacctctggagagtcttctgcaggagtgagcagtcagctgggcgaggccttgtttgaatgcaagctggacccaggtttggcggagggccgggtaattttgctcctctgtgacactttgcacttaattttgtagctttctcttgctaggctggaatcttgtgctgggactatgttttatctgccttggcatctggctttcacccagagtatagttttatacaaccccataaacccattttgaatattgaattaccttcagatgggaagcagctgacagcccatcccatccttgagatgatgcaaaggcatgaaatggcataaaaatcagagatggggctgataaaggacgggagtggggccagggagagtggtggtgtgctttctgtgtgggcatcatgaggagagaatgcaggcaggtgaggagtgattgaagcttctgaaaggctggaatgaatgtggcaggcaagtgggaagctgtgggttaaggattaaaaggactggtttctcaaaatatgttgttttttcc

SEQ ID NO: 56434 - DNA, 1739 bp, Bovine  19866880680734
  misc_feature (1)..(1): n is a, c, g, or t
nctgaagagcacagaacagaagcgaggtgctggaagcggtccgcgaaccttccacagtacctatttcctggcttcatccttcctgctctcggtggtctgagaaatggactgctgctgctgctaagtcgcttcagtcgtgtccgactctgtgcgaccccataagagaagacagccccaaatcaagaatccagttttcatcagctagtactcaatcgttccatatatggcgatttcttttccatacacaaagtgcttggtaaagacgcattgagaggactcagggcttgattagcttccagaagcgctaaaaggtttcaggtgggtcctggggtcaagtgtggggcccagctgtctttgttctgggttgtggttgaattcctggactaggagccagatactgctaagtcacttcagtcgtgtccgactctgtgcgatcccatagacggcagcccaccaggctcccccgtccctggaattctccaggcaagaacactggagtgggtttccatttccttctccaatgcatgaaagtgaaaagtgaaagtgaagtcgctcagtcgtctccgactcctagcgaccccatggaccgcagcctaccaggctcctctccgtccatgggattttccaggcaagagtactggagtgggttgccattgccttctccgaggagccagatagcaggggttcaaattgcagctctggctctccctgactctgggattattctctgctttgcctcagtttcctcatctgtaaaatggggacaacggtaacacccgcttttgggcttctgacaaagatgaaattcaatgcattattagatagcaagcgtttagaacagtgcaggtgtatagtaagccttgataaccatttgctatggactggagaagggtaggcctttaagcttctggaagcctaagttaacacacagttacaaagaagaaagaatagcaggttgtgaagacatcaaaactgaaacctggcctttaaagaagacctgcttgagaatcagagcacatttttttttttccttctcttttcagggaggcagttggacaattctagcctagttgatattaaaaaaaagaaataggtctggtcccagggagcttctttttcagtgctgctgtctggttttagtgcagaaagaccctccttttgtcctttgaattagcagctttggctgcagctagcggtggagggcctggggaagccaccctgccccccagagatggcgtcctttttgatctatcagattttccacgtgggtctttggaacccaagcagctggtgcgatcctcccagagtcaccatcctgcttaccgctgccgccatcttttattctgccaccatcactccgaaagtctgtccttaaaaccctgcaaggctcttttgatggtgtctgtgcactttcgctccaggctctcgcaactgcttccacccagggggctctatcggcttcatctctgcctacgcttttactattattattctcacttttggccagggctcactagacactttgctgttctctgtgtttgcaagtgctgctcacctcaggacctttacactggctcttccctgacctgcagtgcttttgccatggctggctccagcttgccttccaatctcagcacagatgtcacctcaagtaaagctgccccctccccctcccagggatcacatcactctgttcattacagttaggtattttctcttacattattagactgccagca

SEQ ID NO: 56435 - DNA, 1348 bp, Bovine  19866880686041
  misc_feature (1)..(1): n is a, c, g, or t
ncaaagacctgaaggaaatgaaacattaaatctatgcatatctgagggaaagcatccaggcagagggcacagtccatgcaaaggccccgggggtaaactcttggaggttcctaaagagattttttggagaaggcaatggcaccccactccagtactcttgcctggaaaatcccatggatggaggagcctggtaggctgcagtccatggggtcgctaagagtcaggcacgactgagcaacttcactttcactttttactttcatgcattggagaaggaaatggcaacccactccagtattcttgcctggagaatcccagggacagaggagcctggtgggctgccgtctgtggggtcgcacagagtcggacatgtctgaagagattcttggagcaggcacaagttgggtagacgtgtataagtctttgaagccttcttagcaacaatccgggaatgtcagggtgtctaaacttgttactgggtgtcaaaacccatgcatttgtgtattttgggggtgaggatccccagattctcaaggattccgcaaccccaagaaccaccatgagggagacgtgacaatagcttaagtacatccactgaccaaatacctgccttgttgcttctcctccctgcaggaattggggtttggaatcctgcctttgatgtcaccccccacgacctcatcactggcggcatcatcacagagctgggtgtctttgcccccgaggagctccaggcagcccttagtgccaccatctcctgagtggaacaccctagatggaccccagaagtaaccaacctagctctccatagcttccatatgccctccatatccccattatttttataataaacttattgaatgttctgcacaaccgctgaccttcttcccataaccacagtacttcccagagcagggcatcaggtagaatacgggaagagcctgtgtgtggcttgagaggccagcatctggagcccagctgcctgagttcataccccagctccacctctttttctgcagtgtgatcttggccacatcacttcatctctcccatactttcttttcctcatttataaaatgcagataatactggtacctccctcttaaattgctctcagggctgaaatgaaggtgacaccttaggtgcagaattttaaaggatgtcataagaagctcagtaatcaagataaatgggcttccctgatagctcagttggtaaagaatccacctgcaatgcaggagaccccagttcaattcttgggtcaggagatcccgtggagaagggataggctacccactccagttttctttggggcttccctttgtggctcagctggtaaagaatctgc

SEQ ID NO: 56436 - DNA, 1836 bp, Bovine  19866880705133
  misc_feature (1)..(1): n is a, c, g, or t
ntcccaagggccaccgcggcagaagcagcggcagcaacaggccaggtccctccagggaaagtgagcagctccaggccgcccaccctctccccgcccctggcggcccggtttcctccctctcacccctggcgcagtggctggaggatgctgggccagtgcagataagggcctggctgcctggccgcgcctgataaggagccgggctgaccccggaggaaacccggcgggcggggatcccccgagcgcgggcctccgggccccgccccccgccagtgcaggcaggaccgcctgtcaccctcaaggcctcaccttctgtcccccaggcgctgcaggatccctgctccagcatacacccttgagagtgaggtgcccagttgcatgcagaggggaaactgaggcggaaacgcagcagtccctatgttacttgggcctgtcctccagctttgaataccccttgtcctgtgctgatgggggtggagagtcctttccggctctgctggggcctcgtgacccaggggcccccttctcctcctcagcctggccggttcctctttctacaagagtgcctcctcgctcttctgccaaccccaccctgcactgactgcagggcagtgttgacagtttggccctgggtgtccaggctgggccagtgtcttgggcccctggtgcaccctcccacaccaccacgccaggtccaggagggttaaagaaaaataccacagctggggaggtgcggccagtgccagtggcagaaccttctgataggtgtgcccaccaggtccccgccatccggggcctctccccgcaggctcacatggccccagctcagagacccccagcctttgtcccgctgtgtgggccacttcagggtggacagtgataaagaggcattgggtcaatatcttggaatggtgatgaagctcaaggtatgaccctgttcccacccctggtgtgctcccacctgggtcagtcatgctttgccccgtgtgactgcaggagtgcccaggcaggcccctgggttcaatccctgggtcaggaagatcctctggagaaggaaacagcaaccccctctagtcttcttgccccggaaatcccatggacagaggagcctggcaggctgcaagtccatggggtggcaaagagtcagacacgagtgagtcaccgagcaggctcacactcaggaatcaagtgaaacccagaaccccacagacaaccatcctactgtccagggaagccagagtacagttctgaatgtttgagttaactctgggatgcctactagttgggctctggaattaggtttagggtcattgtacagatgatacgatgccagtaagggctgcctccacggtcccatggctaccacgtggcagggtggggattctgccccagtcctctcgttaatgctgctaccttccccggctctggcggggaaagggttgccacaggctgctgggtgcctcagtgtaccagcccaaggggccgcagggcaggaagcacctggtctggagcggatgcaggaggcgcctggttccggtccagtttccgccactggggccctcaggggcagctgggccagagaaaccaggcggcgaggaggaggaggagacactggggcgcgagcccatatgcgggcgcagtgcctagaggacaggtctgagtactgggggtgctgcccacgcttggaggatgggaagaaggggaagaaggtaaaggcccccgcgggcgtgagcgcacggctgccgccccgtggccaccttgggaatggcaggcaccagcaaatgtgtggctcaccggtaaagaagctgcctgcggtgcaggagacgcaggttccat

SEQ ID NO: 56437 - DNA, 1656 bp, Bovine  19866880705890
  misc_feature (1)..(1): n is a, c, g, or t
ncaccgtgggagggccattattctattctctcttctgtatatatctgagcttttccaaaaggaaaaaaaagagtttcttttcatataaagtacttgaaataatcttgattcatattgcaacaagaacctcacaattatagaaacaaaagtactaagcttactatattctcaggcaattacaaattatattcagcatctagcccctctggtaagtcagaagcttgattaaatgcttacttatatattcctgtgtatcctgagaagttagcaagggaaatttaatcaaatgaactacatctgcttatagaaattcctgtctcagtttttcttgagaactgagctgctgctgctgctgctgctaagtcgcttcagtcgtgtctgactgtgcgaccccatagtcggcagcccaccgggctcccccagccctgggattctccaggcaagaacactggagcaggctgccatttccttctccaaagcatgaaagtgaaaagtgaaagtgaagtggctcagtcgtgtccaacttttcacgaccccatggactgcagcccaccaggctcctccgtccatgggattctccaggcaagagtactggagtggggtgccattgccttctccgtgagaactgagctagatcccctcgatttgcaaattcataagtttaccacacccagagataaagtcacaggtggcagaatagagcatgtcattccacctggaacacttgagaaaaataatcagcttcatttgctcagttactcatccatttgacaaatgagtttttaaaaatatctattctttttaaaaatttttattgaagtagagttgatttacaatgttgtgttagtttcaggtgtacagcaaaattattcagatacatatgtgtgtatgtatgaatatataggaaagtgaaattgtcagtcactcagttgtgtccaactctttgtgatcccatgaactgtagctcaccaggcttgactcctccgtccatggaattctccaagcatgaatactgaagtgggttgccatttccttcttccatgggatcttcccgaccaaggaatcaaacctggattctcctgcattgcaggcagattctttactgactgagccacccaggaaagcaatatagacatttgtaaagcaatataggctcagatttacatgtgtattatccatttcacttaattaacgtactcagtttcattatattttttctaaatttagttttcatggaaataatgagcttttcctttgcatgtttcattggtttcagttcagttgctcattcgtgtctgactttttgcgaccgcattaattgcagcacgccaggcctcctgtccatcaccaacgcccagagttcacccaaacccatgtccattgagtcgttgatgccatccaaacatctcatcctctgtcgtccccttcttctcatgccctcaatctttcccagcatcagggtcttttcaaatgagtcagctctttgcatcaggtggccaaagtattggcatttcagcttcaatatcagtccttccaatgaacacccagggctgatttcctttaggatggactggttggctctccttgcagtccaagggactctcaagagtcttctccaataccacagctcaaaagcatcaattcttcagctctcag

SEQ ID NO: 56438 - DNA, 1037 bp, Bovine  19866880729650
  misc_feature (1)..(1): n is a, c, g, or t
nttctcttgccgtgtttccttgttggagctctgcggagagccctataaagaagagcaagacagacctgctcaaccccgaggaggctgaggatcagctggccgacatcgcctctgtgggtaagtcccccagctgctgcctggccatcatttattatttcctgggagatgaaggtgagggcttggagctgcctggattgggttttaattctgcccgttctcaactgtatttcctggggcagatgacatgattatgggaataacaacagcgcctgtcttctcgtattgtttcaagaagtaaaattaaataacacacatagaagtaactggatctatgtcaagtaaaactaaataaccactggactgcacttccctggtggtccagtagttaagactctgtgcttccactgcagggggcacaggttcgatccctggtcaggaactaagatcccatatgccttttgctgcagccaaaaaaaaaaaaaaacacacacatatagcatttagaacaccatgtggcagaaaagaagatcctcatgatattggctaatattattcatgagtaatgttattattcattaatgcttactcgggaggctactgttactgaatgcccatttgtgaacaggactgagatcaaatccctacccttgtggaacttacagtccagtgcagaaaatagatattaagcaggtaattacagaaataagcttgtaatgataacgacactgcagaggagatgctcctcactcagctgctctggaagagtggagtgtagtcagagagggcttcttggaggaggtgacattgttctgagaaccgaagggaagataggagtttgccacagcagtgggtgcagagtgaaccaggcagaaggctgtgcccaggccgttgtcattggttattgccaaggacagagtttgaggtgggaacatttgtctttcctttttacccctcttgggtgagactgttgctttgaccttctctaaggagattctgttatttttttaaactagtcttcattgctgcactcaggcttt

SEQ ID NO: 56439 - DNA, 1490 bp, Bovine  19866880780567
  misc_feature (1)..(1): n is a, c, g, or t
ntatcgtgagtggctagagagggagcctggtgataggccaggcatgagctccacgcaggcagcttcctccggagtctgcagtgtcctggtgtcgcttcttggcaagtgggtcctgacctcacccctcacccttgaccctggctgaggtggtgtaggtccaccacgcttggggtgaaccccagagacagcaaacacctctttcctgcatgagggacctgtggggatgcgagaaatcctggactcccaattcccattttgattaaatgatttttaaaaaagatttttttgatatggaccattttaaaaatctttatgaaattggttacaatactgactcttgtgttttgttttttttttttagctgtgaggcatgtggggcttttagttctctgatcaggaatcgaacctgcaccctctgcatagaaaggtgaagtcttaaccattggaccaccagggaagtccccgattaaacagttttgaatcaggatcttgtcacctgcaaccacatgattcccagtaggtaggtactctctttacagtaaattagagtgctcatttcttcttaccaactacagcatgcatgctaagtggcttcagtagtgtctgattctctgtgacctatggactctagccccccaggcttctctgtccgtgggattctctaggcaagaatactggagtggagccctccaccaggggatcttccagacccagggaccgaacctgcatctcttatgtctccttcattggcaggtgggttctttatcactagcgcctcctgggaagcccgcctagacaacaacagcactgggtgttaatatttctttttcgttttttccaattttccagtgaagaatggtatacctggtttaaacttcatttatttaccagtagtattgaatgtctccacacaaggagtggccatttatatttctctttggtgaactgaatttagcttactttggcaatgtgctgatttttcaagctggagctggatttgcatagggagacagttcccaagtgttttgggtgttgaaatggtttttgctgttgattataacatccctccaggctgagggtgtttctaccttcatgtagtcgatgtttcctggggaaatgagcacataacgacttgtgccaccttttccaacagccccgatgaatgttattttgagttagagagctaaagtaagaaaagacagaaggtaagacagctgtcacaagatctccagaaagtggcatcatatttcacttcacagtgccctgaaagaaggcatggcaacccactccagtatgcttgcctggagaataccacggacagaggagcctggcaggctatagtccatggggtcgcaaagagttggacgtgaccaaagtgacttaccatgcacgcgtgctctgtgaagcatgacaacttcctacgagaaatctgatgctcgaaagaaaatttgcctattaaaacaacctgaaattgatgaatccaactaata

SEQ ID NO: 56440 - DNA, 1603 bp, Bovine  19866880795641
  misc_feature (1)..(1): n is a, c, g, or t
ngtgggccacggaggctccgtctcgccacccaggctgccccctggcgtgccagtgatcagcctgggccacaccaggcccccaggggcagccatggccaccacagaactcagcaccctccgtcccccgctgctgcaactctctgccttgggaaccgccccaccccccctggccctgcattaccaccctcacccgttcctcaacaggtcagtgggggaccggggcctggggggaatccaggggcagggtccttacccacaaggcattagtgacccacgaccccttacagcctctacattgggccagcaggacctttcagcatcttccctagcagccggctaaagcggagaccaagccactgtgagctggagctggctgagggtgagtatgggtttatgtccacccaactgtctctcctggggcccacgtctgccctacaaccttccactgggaaaacactgggaaaagtgatgcccctgcacacagacacacacaggggctcagtactcaggttacactcatgcagcaaaaccacagactcatggccagttctacaacaacccctgtcacccaacaagccacagcgattcatggcaaaacagcacagcatgggggctccattcgcatgcacagccacacaggaaacagccacagggcaacatccactcaagagacagccacaggaccacaaccacacaggaggcagatacacaaccacagccactgaggtccacagccacacaggaattagccacacaaccacagccacatggcagtgatcacacaccacagccatgtggatatgcaggagtttacatgaccacctgagaaaggataggaccaatcacgatgaaggaaactctcagacccacgagcacacccagccgcacagagggaccacacagaatgggaatcacaaggacagctccccagccacattccgaagggaaccccagctgttgacataaaggagtggacagaggtacaggaggcttcggttatctgcaacctgggcctgtgatagtccttgtctaggcagcttgggggcttccctcttagctcagtgggtaaagaatctgcctgcagtgcaggaaacccgggtttgatccctctgtcgggaagatcccctggagaaggaaatggagatccactccagtattcttgcctaaagaatcctatggacgcaggaccctggcgggctacagtccacggagtcgcaagagtcggacacgactgagcgactaaacccccaccaccaccaggcagcttgggggtgggggtgcgggggttgctaactgagctacacgtggatcctacacgtgaaccccttggatggagaaagcctcagtccactgccagtgttgaagtcccccaagagggtgttgggagtctcaagtaagggtaggtgggggtgcctgcctctcttgggccatggcgccaatcctgccactcctatcctcagggcatcagccccagaaggtggcccggcgcgtgttcaccaacagtcgggagcgctggcggcagcagaacgtgaacggcgctttcgctgagctcaggaagctgctgccaacgcacccgcccgaccggaagctgagcaagaacgag

SEQ ID NO: 56441 - DNA, 980 bp, Bovine  19866880804644
  misc_feature (1)..(1): n is a, c, g, or t
nctgagtttggctccaggaggaggcaccttctctcctgggccaggatgaatctcaaagttccagctctgggccctgcatcccaggaagcaaaagtggccgtcttccaaccatagtgtgaatactgaggacccctaattcccatgaggatgtggaggcaggcgagctgtggatggctgggaggatgggtgtcatcagtcagactttgaggtcccaggctgagacattcagttctgggggtctctggacaggccctcagagccttctgagcctagagttttcgaggcatgaaacaagtaatgatacccacccctcatctacttcccatgacacagagctgatgggggctctgcagccagcccacccaaggtcagcacttggtgccaccactcacagctgtgtggccctacacacatcccttcccatctgcgccttcacaactcgtctggaaagtggggacccccagacctagcctttctcacctcagggctgcagtccagctgctgatggaggcagctgggggccgctgagtggaggccaaagtcctcatcctcctcactggggaagacgggcctccccagcatctctgggctgaactctgagccttgccctgggatccctggggctgcgggagggaccaggcgtctggacgcccgggacagttatcagcttaggtggctgggagacgtcccccccagccgttgtcctccccgaataactcttgggacagggtttgtcagggcccggctgccccacacactctctgcgcctccttcccttgcagcggtcacccgtgcaggccaacagctcctccggcaagacggccggagcccccacgggcacggtgccacagcagctgcaagtccatggcgtccagcagagtgtccccgtcacccaagaggtgccaggccaaggcgggcggtggcaggggcaaggggtgccagcccagtggcctctgcatcctcctaaagctgtttgtcgg

SEQ ID NO: 56442 - DNA, 2080 bp, Bovine  19866880906841
  misc_feature (1)..(1): n is a, c, g, or t
nccagggccacgtcccctggcaacatttccggccttggctttctctccagcctggtagaccgaagcagtagggaccctaaccacccactcccagcttggggccaccctgactgaaccccagccccccaggcctacaactctcttcagggacaaaggctgccttgactttctggagagactggagaggggatggaggggccagaggcaccgcaagctccgttcagtcctgaggtgacatgttcccgcatcctggtgcccagggccagacagtgcctcctgggctctaagcttctttccactcaaccatcacacacagcttcctcaaaaccaagtccagccactgtgtctgaggatggctgcctgggcgtgcaggcgtcaggcctctgcctggtccaggcttaggggatgaagagaattttggaggctgccgcttgtccttgaagccaccagggtggcgaggggtgtgttcaggctggctcacgttgcatgtgtgtgagcgcaggctctgcttcctgtcttcccctagggaccggggtactcatgcagtccacaccctggggcagaaggcaggattgcgtgggggtaggtgacgaatctgggctcttcctaggtgtgggaccaagtgggctctgcagagcaaggctctgaaatgggattggtgctcaggtcccaggctgctctgccttcatccccttacggcttcagtcacccccaacccccggtcggcgcttgtagcctggaggcctcgtgcagcaccccgacctaggccaggctcagccagaggttggcagcatgggaccctctcttcctcagggttcttctgtgtctcctggaacagccctaagccctgaaatgccgttcttctcacccgcagctctgttcatcctctacctctgcttagttattaaagccctcgacttcctttcttcagctcctcgcctttccctctggaatcctatttctggtctcattttgctctgtcttggctccatgcccctctctctgtccttccttctccttcgctttccctctctttgggcccctttcctctccccgtcctgcctgtttgcacaagtgtgtgcgtgtgcacacgtgtgtgcttcggagaggcctctgcctcttcatcagagctgtaagaggggaagctccagcagccagaaggagcccagaatcacacataaactccaactgacagcatgtttttaatatatatactcccagccatagacagggagatatttatggctcccactaggtgagggagggattcctgctcactgcagcacacgctccgcctcggcgcccgccccaaacaacttctctccgagaaacaggccacatgtaattcaccggttggctgcccccacgcacatcacagactgagtgcattttttgggggggctgagaggggcatgcaggcacaaccgcactgacacatgcgtacccaggcacatgtatgtactagggcgcacatttgctctacatccagacacacacacacacacacacccagagatgccaccaaccacttgatgctgtccagcagggatggggtgagttggtgtattaagagcggtggtcaggacgctcactgctaagaggaacctcctttggctttatccagaccactggcctttgagggtgggcagggagaggccagccctctgggcatgcctgcccttcccctcccccagctcttcccaggcctgaggttggagaagcaggcaagagtatgctctgttctgggggtgccatctcaaggaccaattctggagctgatccctggccctgcccagtgtggcacacctcctccccccgccctcctgcacacacacacacacacacacacacacacacacacacacaccctctctttgcaactgaggagcatccagggcaggagaaacccaatctcaaggggagccgaggcctggcctgcagcaatcagagctggagaatgtaactattgtgtctcctgaaacccaagtccgagaatctgagacaccctgaggaggggagaagcagatggatggggggctaggggaacgggtcacagaggggttctccctgtctctgcaaa

SEQ ID NO: 56443 - DNA, 1670 bp, Bovine  19866880916191
  misc_feature (1)..(1): n is a, c, g, or t
natatggatctagaatcctttttcttgagtccattttccctaaagtcacgtttttcagggaagtcagcaagcagtccttcattttctccctcatcttgggctctgtggtggcaggaaagaactgggcaatgtaggtttccaaaaatgggaagttggcatagtctacatagctaagacctgggtctcaaagtcaggggctgactgtctgccactgatgaacttgagaatgtgagttgatctctctgaaccttggttttctcacctggaaaatatgagtaatgagagcgtctacctcttagagctgtggtagggaattgttgtttagtcactaagttgtgtccaactcttttgtgactccatggactgtagcctgccaggttcctctgtccgtgggatttccccaggtgaaaatactgggaagagttatcatttcctcctccaggggaccttcccaactcaggaatggaacctgcacctcctgcttagcaggcagattctttaaccctgagtcacctgggaatagagaaggcaaaataagtgtcagatactgtgacctgtgcccctgaaggtgtttgagtgcttcataaatgggagttggtgaactgaagggaaagttaaagcagattcttttggtggagtgtggttgttgctgcacgtgtccctcttcattagttcatctcacctctgggtttaccagcaactgtaatgggcagttcctatgcagctcacctctttgcacctccagcactctcatctttctgcatctctgatgcagagtcttttccagaatcataggagtttgttcagcccatgtgacagacattgaacaccagctaggagcagccctcaaccaatgagcaaggatgctgatgtataaataccctcactttcccattgttcagtgagaaaactcagaggtttgttctacagcctcttaaagagtcttagcaggattgaattccagttgctcacattgaaacctattcattggtacacatgttaccaactgtttgcttcactctcttgtaattccatggcctcccaaaagtccttgtcttggatctcctttcagggaatctcaaatcaacgcaaggagtaatagccagacacccaatgggttagagatttcagcacccaggacagcgcccagcacacttgcttgtctaaaagcgtcctcctttatcgctctgcccccacctggggtggggcaggattgagagaaggccagatggccaggtgatgttgttctgtgctgagcttcttggccattttccctgtgtggctggagaagaccttgccatctatctgtctgcaggtttgggggctgatagaggtcttgtcctcttgaattgctgtgacaaatgccagccggcctctgaagaggcatctggtcactgcttctatagttttcagggctgatgactgctctcttctcaccaaggcagggagacagctgtcctgcgggcagaggagatctcaatggaacgggaagcaattgggtgcctggggccaaggtggaggctgccagctgaaaagacactgtgctttgatttatgccggaaggaactatgagacctaacgatgctgtgttgtgacagaggttgtagaagctggacagcctctcctctctccaaaaacctgggcctgatccagatacaaaaggctgtcac

SEQ ID NO: 56444 - DNA, 1229 bp, Bovine  19866880946857
  misc_feature (1)..(1): n is a, c, g, or t
ntgtgtgggtctccatagctgcagacactgggctcggtatttgcggctcccggggctctagagcacaggttcagtagttgtggcacatgggcttagtggctccgctgcatgtggagtcttcccagaccagggatcgaacaggtgtccccccacattcaagggcagattcatatccgctgggccaccagggaagtccctccacagcacttttcaactcccaggctccacatgaggtatttattttctccacaggctgcctccccctctagaacctccattccagcataagggtgacatttgtttgtctcatccacactgtgtccccggcagccagcgcaagacctggatgcagcggcggctcactcggcgtttgttgagtgaataagtgaatgacatggagacaaagctttttcccggctctcagaccctctggggtttaaccacctgatgcattcataaaggacaagaactctgtcccttttctcttttattaaaattttttaaatttatttttttggctatgcctcacagcatgtgggatctgagttcccagaccagggatcgaacccacatcccctgcagtggaagtgtccaccccagggaagtccccattttctctttttaaaaaaccagccaaggtggcaaagggcagggctcactcacagatggccatatcctgtgtgggttttaaagccaacccataaagtcccccttttagttttctaagtgactctctggagctcagaggatccagggaccagaggagagtgaacaagtaggctcctggcggcccattttgcagagaacgctgagatgctgagaaatcaccagaaccgccctcggtggccggcacctgggaagtggagcgagtgtcctgcgacacagcctccgcggtcttttgcgccacggtgctgccttggttgccgggcagctcctaagaactggcttcccaggcctgagttgccaaggaaatactaattcccgttgggccggtcctggggtgttttttgacttcctgtgaaggaggctggtcgcctgtgcggtcctggtcccctgagcgcccttctctctgcatctccctcacctttcctctttcttgctctctcctgtctcctcctctagtttcctcccgggctggaggcagaagaccctgggatttctgagtgaggcccatggatgtcgaagtcctcccgggtcctggaccccatgttctcgccccgcagttacta

SEQ ID NO: 56445 - DNA, 1530 bp, Bovine  19866880959348
  misc_feature (1)..(1): n is a, c, g, or t
ntgtgacctaaaatcaaaagaggaagagttaggaaccagctgaaagtcaagccccagccccgtggctcaccccagactcttggtctcatggaggacttgtctggggctgtaagaatggcaaggattgatccttccctgctttcctcatgaggcctcccctccagtgctcaggctgctgagggcctctatttaacgctttcttagcccccaagctcagcctgaactagaatcttcagtctgtggttgctgggctctgagcatcagcgtggcacatctgagtgtccagcaagggcttggtgctgagaaggtactcaatacacttgagcagggtggagatctctcttgggaaccatcacctgccaactaggagggggcactcccttgctcatggagatgggagagcttactcccttcatgatcacgaacatacaaggaccaccgaggctctgtgtcctctcccctggcctcgtgtgacctcatgttccagggtcctggaatcccaatgggagctaggttctgccactctgatcttgtagctaattctgtctcccaagggaactaaaccagcccttctccccatactccctggagaactgaggctaagaggcctctggcttcctccctggggcctggttaacttgttctcaccatctggaggcctcacagtcagggacaggagagactcacaggagatgaactcatggtggagtctctccctcatttcccagaaggccttgggtatgggcagcagtggtacccaaatcatttaacccaggatgtgcaagggtactgattctcatctcttttctgactgatcctactgaaatccctgctagcttcccagggagacaacagcctaaggtctggagcctgacctagactatgctccagtaccagagaaaggtgggtgacgtggttggaggatttggggtgactgcttaccacgctgcagggtcatactcggcccagacacgcacgtactcatccaggtggtggggacccaggatggaggaatctcgggtgaggtactcaaagttgtccatgatgacggcaacaaaaagattcagcatctgtggggaccccaggggccaagacggcgtcggggagagcaagacacatccaacacatatacacagaggcccagagggagagagggagggagataaacatgggaaaaggaagtcagagaaagagatggcgggagatagaggaaagacacatgctcacagaaggagcccagaaacagagatatggagaaatggagatgggggagagacacgaagacagaaaccagagaccaagattgatacagttggagagagaggtggagaggttatgtgacataggagccaacaccaaggggaccaccatgaccccagatcctcccacacctgacccccaacaagaccaaaatgcacactccatggaccagaaccttatcagtttccatccccagcataaagtaattactcagcaaatatttgttggatggatggatggatgcatgcatgcatcttcctgccttgtcta

SEQ ID NO: 56446 - DNA, 1795 bp, Bovine  19866880985876
  misc_feature (1)..(1): n is a, c, g, or t
nggccgccgctttatcctacaccgttgtcccgcccccgccgcccatccctattggcccccccttcggcctccgaggccctcctccgccgttggctgcaccaccagatccgtatccaagtcgacgctgttcattcgttacgtgcactgcccgtcttttcgggactactcaatcaggacgctcagcgagctgggctgtcaatcacgaagagccgaagaccaatcacagtgggaggagaccccgcagcgccggccttaagcggagtttcggggcgggtcttgggttcattcacaacattcctcccccgcccccctcgggctggacagcgctcccagggctgctggggctgtgcccacacacagctttgtttactgagggtcgcttccgggcgccgcgaggggacaatcaacactgctcggcccgggagcgagacagagcggcgggatccccgggcaacctctcagcccatcctccctctgggctgtgtggcgtgagaaacagcctctctgggctccaggtcaagttttgatgctttgcggaatggagggatcacaggtcgcttggtagagcttatgggggctgcgggcaccctctctagaaatagagccaaattcaaatccatccttgagccccaagataagtacccccaatccattctatgcctcatatattgttgttgtcttttagttactaagtagtgtccgactctttgtgaccccatggactgtagcccgccaggctcctctgtccatgggatttctcagacaggaatactggagtgggttgtcatttccttctccatatattatgttgagtcatatgaaattattgattttcaatcatttttgatacactaaatgacagtctcataaagttcaatgtaatagatgttaaatctgaccacttctgaattattttttctgattcaacttatctgggccacatctctgaccttgaagctgtcggtggtgttcattgcagttccccagcccaacccacacccccggcttctgcccaccgtggcccctgccagctccatgtcctcagagaaccctgcatttcccctttgccacacttctctccgtcagcattacgtttctttatcatttcagcagttgttcaccttctgtctctccctgctccatggcgagctccaagaggcagtagtttgtccagctgatgcactgctttaaggccagcacctgaacacctcaggacatacagcagtggctcaatctatatataacttgttgactaaaccaactcatgcctgttcccattccactgaaatgatgtacagagcaggaaaaactcaagctggctcttaattggtctaatggctgccccctgcccctcctcatatggaaactctggctttttccttccaggaatttccagtttcacagctgcacgttctggccagtccccaacccaccattcagcaaactctctctgacctgcactgtccaatatggtcaccactggccacaagtgggctttggagtccttgaaatggggtcagcctgaattagcctgtgctgtggacttacctcgtggctcagacagtaaagaatctgcctacaatgcaggagacatagttttgattgttgggtcaagaagatcccctggagaagagaatggctactcactccagtattcttgcctggagaatcccatgggcagaggagcctggtgggctacagtccatggggctacaaagagttgaacatgaccgagtgactaagcatgtcaatgtaagcacactggatttcagagacttagtaagaaaaaaggcaa

SEQ ID NO: 56447 - DNA, 1916 bp, Bovine  19866881001946
  misc_feature (1)..(1): n is a, c, g, or t
ncactgtattcatttatttatttttggcccactgtgaggcttgaggggtcttagttcccccaccagggatttgaatccacaccccctgcagtggaatcgaggagtcccaaccactggactgccagggaagtccccaaaaccagcccttttggcatgatcactggcacccagccctgtgttaagtgctccatgtgtgttaactagcttctgcagcttgcacagcagccctgtgtggtggccgtcaaagtcatctctgtccagtccgggcagctggactaaggtcttgcagctggtagggcagagccaggatttgaacccaggccctctggccacaacccaccaccctctgtggcttgagcacccatcccgaagccccgacggctcttttccgcttgaatctctggaggtgtctcccctgcaggcccgtggaatgccaccactcctgtctgccccctaccaccccaggaaacaacgctgagggtgcgccctagcctcattctctccctctcctcccaggtgttcgttacaatgcagagaagaagaaggttggcaattactacacaacccccgatctacaggtagaggcaatctggtgggcagaggggtgaggggctacacagaactcggagtgggagggaggcttgtaccgtctgcctgagggtcaccccctgctggtctctcctggaaaccagcatggtgttgtcagtctgggtgcatcctgcctagacccctccatggctccctccttcctcggactaaaattctcaggtctccccatggcccacagagacccctccctgccttcacttcctcccaccctccccgtcactcactctcctccaaccacacagcctcctcgctgcccctcataaaaactctctctggtgccctctgcctggaacgtcttccccagacatctgcaaggcccccttttcctccttggatttctgctccaaagtcgcctttcagagaggccttttctaaagcagtgctttcctcccagcgctgtggttgtttgagcattccctgcccactcagctgccactagaacatcagccccgctgagagcaagttggcttccttcaccgctgtgtccccagcagctggcaccaagcctgccccagagcagcctggctttggagggtttgttgaatgaatgagtgaacagatgaacaaacgaatgaatgcagggatgaatacataaactccagacagatggtcagtaccagggtgatgggcccctgcgtgtcacccatggctgtgcctcagacacggagagcagcatgcagcaggttctctgcaaatgctagttgatgacgtaacgcacacagatggagggaagcaggcaggggtcgcaaggtgtcccagggtggccacagtgtccagattcccgcctgccaccctccacccgcccaggttcaggatgaaatgccacctctgtgtcaactacatcgagatgcagacggaccccgccaactgtgactacgtgattgtgagcggcgcccagcgcaaggaggagcgctgggacatggaggacaacgaacaggtgctgaccacaggtgagcgctgtgggtgggtttggaccccaaccctgatcctgagccggggccccgaaagtccaaccccattctcacccttgcagagcatgagaagaagcagaagctggagatggacgccatgttccgcctggagcatggcgaggttgaccggagcacgctcaagaaggccctccccaccctgagccacatccaggaggcccagagcgcctggaaggacgacttcgccctcaacagcatgcttcggaaaaggttccgggtgagtggggctcccagcctagggtcgggtccacaggcagtgaggcatcagcaacagtggagcaaagaaaatgaaagttagtcactcagtcatgtcttact

SEQ ID NO: 56448 - DNA, 1672 bp, Bovine  19866881004759
  misc_feature (1)..(1): n is a, c, g, or t
nctttcaaaactgaaaaaatggcagcccagaaagggaaagagatttaatcaggaaacccacccacgggttgtgacaaagcctgaatttgactgatatctttaatgccactccctgagctctgtctatcataccatgaagtctactttcaggaaaattccacttctgtctttgtcttttgcattacctggatctaaatagttttgctctgtgttggttggcttttgttgctgttgttttagagaaacatgattccagtctacaatcaaaattcttgtagagcaagaatcccatttgacagccaccattgctaatttctctttaaaaaaattatttggctgcactgggtcttagttgcagcactcagggatcttctctcttcattgcagcctgcaggatctttagttgcggcattcaaactctttgttgcaacatgtgggatccaatttctcaaccagggatcgaacctgggccccctgcaaggggagcttggagtcttagccaccggaacaccagggaagtcctgctaatttctcttaaatgacaccctcatcaattgcccatgagatagccactttcatgcattacatcccatggaaacaagagggacctttaagaatggggtgggtaatctttactttattttcaagttacacaaaaaagcctcagtactcctgctgctgctgctagtaagtcacttcagtcgtgtccgactctgtgcgaccccatagatggcagcccaccagaccccccgcccccgggattctccaggcaagaacactggagtgggttgccatttccttctccaatgcatgaagataaaaaatgaaagtgaagtcgctcagtcgtgtccgactctttgagaccccatggacttcagcctaccaggctcctctgtccatgggattttccaggcaagagtactggagtgggttgccattttgatactatctcatgttaattcctgaaatttggggacaggcccaaaagggcaaagtcttggaaatcctggttttcactgcaggagcaagatgttctcacagttgttggaggctattgtctaggaatgaatccgagacataaggaagtcaaaaagaacaagagaggaaaggggaaagaagcagaagatttgaaagaaaagagacgaagcaaagagaaatgagaagaaaagatgagtacaacatacaggttacttttttgtctctaatgcaccttcatctctcaaccataaatttgattcccagggatgcacctagaaatcatatgtatgtttctgtatctggctgtcttgcagtctgaccctctctgtctttatttcaatgcacctctatgtgcctttcttagaaagtgatcatgtgtctgatggcccaaattccagcttccagctctcaggcgccccctcccccaaattgggctctgtcattgaggcagcaggaacttcagccctatctccagttataaacggggcccaagtaaaaggggaaagagggaacacatactgccaaagaaagagaactagagaaagggtgtgaggaagggatcagggagccggtggggatggggccaggcggtactcacagaggaagtcggagagccactcaggctggttgtagtgaacgatagcgacacacagcgtgttgagggctaccagactgagcacagtccagtagaagg

SEQ ID NO: 56449 - DNA, 874 bp, Bovine  19866881031063
  misc_feature (1)..(1): n is a, c, g, or t
nggccccctgggctggacatgggggctagccctggagccctgcgttggcatgtctgtcttgtgggtccccattctagaattattttcgcgatgcctggaacatcttccgactttgtgactgttctgggcagcatcaccgacatccttcgtgaccgagtttggggtaagtgtcccgccagtttctctccgggcagttcctggctgggctgggagaggtgaggaggaggtcccagaggagcagagggtcccgacagccacagctgggcaagccagcacttgaccttgaccaaagaggggtaagcgggggcccccgggaacaaggcagcccttcagggggctatgtggggagacgggggtgtccaaagcccccagcgctgcagtgtgaattccctgcatcttggctactgatgtatgaatagatactgtggataagctcattgagaaaacagagacacttaaaggatctcaaggctgagccctgccctccaaacagcacacagtgttgagggtccaaagggaaccagcttcaagtctatcctgcttgaactaaccatcttctggctcatgggcaggagggagccacggctctcaggttaatggggggacacccttcccaggactttaggagggtccccaggacatgtgtcttcctgtatccccaggcctggcaggttcccagtgtgggggtctctggatgtaagtgtggtgggctgtgggccacatcgtctttcccccttgtctggaagattcagggtcccagagctgctgtctcagaccccttccttggccgtttgccagtgagcccaggcttgagggcccttgggaggctggggggagggtaggagatcctcgcagaggaagcaaaagggcaaag

SEQ ID NO: 56450 - DNA, 1209 bp, Bovine  19866881072901
  misc_feature (1)..(1): n is a, c, g, or t
nagtttgccaggaagctgcctttggtttccagcaaaaggggtgcccattgacatgtgtctctttccttgtgacattttcacaatctgcctcttgctctctggggagaaagcttagctcctgtgcctaaggtggagcactgcgtgtactggcctccctcgcccccagaacggctcccatgagcccagtacatctcaagaaaaaaaaaaaaaatcagtcaggctatagaagaataatacaacacagttgacgaatttgtgctaatggaagtctggaaaacactgcccccaaccacttcaaaatgcacacagcagatttaccaaagttgactgttgtagggaccttaaagtctatctcaacagatttcaaaggacagaatgatacaaaacatatcttctgaccacagtgcaattaggctagaaattggtaacaaatagataacactaaaagtgtttggaaattaagagacatgcttcttatttgttgatgaaatgctaagatgtctgagatttgcttttaaaatattttagtgtggggaggggatgtggatgaaacaaaattagccctgagttgataaatgttgaaattggtgatgggtacatgggaattcattacattactctatttttgtatatatctgacaaaattttgatgcttcttggttatccacaaatcagagaataaataataatggaaactgctgaatattttacttgaacaataatgataataatgcatgacagaatttgtgaggtgcagttaaagctgcacttaaagggcaatttatagccttaaataacattaatctatctcaaaagtctaggaaaagaacaaaaaagggaacacaacttagagaagaaattaatgaaatagaaaacaatgaatatatcaaccaagccaagcattggactttttagaaaaagactgataagtccatcctaagagccattttcctgcagattcaacagcattgaatgttcactggcctgtttcccagagctggttttgctggccctttcccctgactttgctcctcttccgtttcctagatgacattcagggtgagtctccagcaccgtgtgggacagaggaacctgcccgcacctgccccaatgggaccaaatgtcagccctactgggaaggacccaacaatgggatcactcagttcgacaacatcctgtttgcagtgctgactgttttccagtgcatca

SEQ ID NO: 56451 - DNA, 1761 bp, Bovine  19866881107544
  misc_feature (1)..(1): n is a, c, g, or t
natctggagtcctctactctctccacccccttctgtgcctctccctcttctggccccagttctgctcatctgaaccaatgcagtccccatccccctggtcccccagctcctccccatcatgagctgttccctggacagcagccagagggcacctgtgagcacaagtcagatcccggccctcctctcctcagaaccctctatggctcccacctgacccagtggaaacagttctgtctgcaggccctgtactgtcttcccatcacttgcctgctctcatttggccctcctacctccgctcctgcaccctggcctcctcactcaaacttggcaggcgcaacctctgcatggcagttccttctgcctagagtgctgtccttaggttcccccacggctcttcccaaattttcttcctgtgtccctgttgccctgttctcaccgcactccttcccagactccccgttgctctaccctgctcccttatgtcctcacacaatataatttgctagtttcttcctttattatttttggctgtgtggggtcttcattgctgtgcatgggcattttctagttggagtgagtgggggctactccctagtcgcgctgctcgggcttcttctcgtggtggcctttcctgttgcggctctaggcgcacaggcttcgtacttgtagcgtgtgggctcagcagttgcagcatacaggcttagttgcttcatggcatgtgggatcttcccagaccagggattgaaccctgtcccctgcatgggcaggcgagttcttaacccctggagcaccaaggaaggccagctgtctgatttctgacttgcctccttgctcgtctgtcttaggcattagaatgtcagctttactggcagcagatttgaggcccactgtaggcactcaataaatgtttattaaataaatgatagaagccctgcacctgcagacacagttttcccaaggtccatcgagctgcaccgacgtgggcaggcagcctaggtggtgtgtgcccagccgcctggcagatgcctttcaacccccactcccatttccccaggctgcaggccaacttcaccatccgggatgatgccaaccccagctcccgccagcgaggactcaagcgcttccaggccaaccctgaggccaactggggtccccggccccgtgcccggccagggtgagcgagagttgggtgaatgaaggtggggcttagctgggggggagtgggcacaaaggccgatggagcctcccctcgttctccctacacagaggcaaggcagcaggagaaactgtggaagagagacgtaggctgctccaaaataagcgaaaagagccggtggaggacccagctgagcgggctgcctggctcaaaacatttccctgcaagaggttcaaggaggtgaaccaaacccaccccccaactgaagtacccatgggttctcccagctacaggactgggccaatgggccagcagggctgggggaggtgggaccagtcaagtgggtgggagtgagctccctatccagggaaggaacccagaggaggctgctgtgctccagaatggggttcattcacacccattgtcttccaaccagggcacctgtcaacaggggggccagtgctgctactcgcatagccccccctcacctaaggccactgctgaagccacccccactgactgtccagaggcccccagtcagaaccccgctgagcctggggctgctactggtccaggcacagagtgagctaataaagaccttttca

SEQ ID NO: 56452 - DNA, 779 bp, Bovine  19866881144986
  misc_feature (1)..(1): n is a, c, g, or t
nattggagaagaaaatggcaacccactccagtgttcttgcctggagaatcccagggacggaggagcctggtggactgccgtctatggggtcgcacagagtcaaacatgactgaagcgacttagcagcagcagcaacagagactagattctgtgtgcttccactgcctggagtaggggtttgatccctggccggggaactaagatctcacatgtcatccagcatggccaaaaaattaaaaaattaaagttaattgtaaagaaagtacgcaggacagtgcctgcaggcactctcaggagaactgtataatttgtttctgggcaaaagtcggaggtctcccagcccaggggtcccccaggcgctggagcctgcgaaagaagacggcaggaatcctgggtcagggtgagtggaagaggtgcagaccagccctggtccatcctcagttgctgtgcagcagcgggttggttagatcttgccaccagcctcggaatgtaattaagttgctgatgaacccaaacgtgtctctggggagccaggagctgtccctggtttcctctgcctgtagattaattcttgtttttccttctttttctccttcctcttctctctcccccctccctccttcttcccaagcaagcaaaaaaaaaaaaaaaagccttatttattatcattttccccactgttggcatggcaacacaggcgtacgttactgagttacaggcggccccgcaaccatcccagccaccacaggctccgccgcaagcccagccgccaccgccgc

SEQ ID NO: 56453 - DNA, 1047 bp, Bovine  19866881169310
  misc_feature (1)..(1): n is a, c, g, or t
nttcatctcattccaacatcactcttgatccatgaaggtcttgggtttccccttgagtggaggcagaagactggtccaggcctcctgaattctccttctctggggtcagaacatggaggagaaggcttggagcagaaaggcgagcccccacttctttctggatgactcaaagccacagtaaccggggctcctcctcccccctgaaatagatctaaggcagcactttccaaacttcagtgtgcacagagcccctagagatcttgctgaagtgtatgttctgactcagcaggtcagcatggggcctgatgctctgctttttttgctgggtgttggcctctgctgtttggttcctggaccacgtgttaagtagcaagggtgtggaccacaccttaagtaacaagggtgtaaggtcagtgttgcaggttcccatttggggtgtgtctttggacactggcagggtgcatggagagagagagggaggtgacatttgatagctagtgtatctatgcatgcatgcctgctaagtggcttcagtcatgtctgactctttgctaccccatggactgtagcccaccaggcttctctgttcatggcattctccagtcaagaatactggaatgagttgccatgccctcctctaggggatcttctcaacctagggattgaacccatgtcttctgcattgcagacagattctttactgctaagccatcagggaagccagtgtatccatacctgaccaaaaagaaaaagaaaaagaaataagatgggcatgggcagcctctttctgttggtttgcatgctgactaagacttcattgtcatactggagagctctgggtctgaaacccaggtgaccacggcaattgaaagcccgataatgcagcccatgaaagtgcagcttgctgctggtcttgtgggactcttcctggaacctcagctcgaatcagatacaaaggaagtcacatcccagccatttaggggcaggaggccagggggccccaagagtgaggcagcagccttggtgcagaagcacacagggagctag

SEQ ID NO: 56454 - DNA, 1431 bp, Bovine  19866881251911
  misc_feature (1)..(1): n is a, c, g, or t
nttggatggaggggctgggggcggggtccctgaggacgggcttggatgaagggggccttagaggccgctggaggagtgaagagaaagggggcgacgcagggtcagactcgtttttcaaaaccctgctcccctggcccttccgttatggagccttaccgcccccttggcacagactctgctaccggctttgggattcctccgcctggagttcctctctctgtccagctctgaccacaggagagctgggagttcctgtaactgcctcccacattgaatgggagggagctccctggagagggcctgatcttgagctacctgagcaaggctctgtctccccatgaaactaaactctcagcgtgctggaatctttttccccatcgggttgccagctctgggagggcaagcgtgtaaatctgctgtcaggtcagcagcaagtggggcaggtctgtgtctccgtggatcaggagtcgtgcggtcttctccatcagtctgggaactctgtgagggcagggctgtgtcttctccttttgactagaactcctggagcagagacagtccccaccctcagcctgatttgctccctgggttgggctgtggctccgcccttagcttggaagctccatggcgggggactgtgtctcccagtcagcctgggcctcgctgacagggttattccactctgggatctcctcgagggctgggctgcatctcccccattagactgggtagcaggatccgaggtgctctgatttcctcaatgctcaacttgggcctgctccccacccaaaaccttccttgaagttttgggatgcgggagtcagttggagggcagctgttaattgagaagggggagttgggcaggagttggacagtcactagtcaggtttacccttctgtctgcctcaacagacagccccccagggacctaagcgccctgtgtataggctggtgggttgggaacaggtgagtggagttggtcaagcccccatctcagcctccttagtgatcctcgatgtcagcagcttactgtgccttcaagtagccttcaggaagacagacaggtggcccagtgtgggccaggggtgactgggggaagcaatgccagtgatagtcctcatagccttggaagaggaacgtgtgaaaatgtcagtcactgagtcgtgtccaactctttgtgactccatggactgtagcctgccagcctcctctgtccatggaattctccaggcaagaatactggaatgggttgccgttcccttctccaagggatcttcctgacccagggatcgaaccatgtctcttacgtctcctgcatttgcaggcaggttctttatcatctgagccaccagggaaacctcaggcaagaggagcccttaggctgtggagttgggagggggcatggggcccggggagagacaggcgcaagccatt

SEQ ID NO: 56455 - DNA, 1178 bp, Bovine  19866881260319
  misc_feature (1)..(1): n is a, c, g, or t
nctgtgcctggcctgtagccctgccctggtagggggagtggcaggaccagatggattcttggcagtgaggcggggagggtgtggcaggggtggggtcttagagcctacctattccatccctaggaccatcacataaaggtgctccccgggttgtcagcccttctaaaaccccaagaacatccctaacactcgtcaggatcctactggcaaaactacacaccccagttcctgcaagacatataagttcactgagactcacagggatgacctgaaatccctttccagaccctttcctcaaataggaatttaaaaaacaatttgaaacagggattttcaagggcacggactggctggctttatgcctgtagcaacttcataaaaccagtttcaaaggttgactctgcaaacatgctgccagatttctgtgagctgtaggctcattttgaatgcccttgtataactttatatttaaagggaaaactcaaaaaattaaaaacacaaaatcagctccctgtggcagattcttttgcaaacacaaagaatccttttgctgattgattctgggtggaaaaataattttgttttttgcagattaggcttgcttcaaattgagtctaattgtagcttcagggaaactaggcccattatggcaaaagttctatgactgagaggcttgtttcccaaactgcaaggtcaaatgggggatggaggtgggacagggcaatggtgggggccccctctttggcaatgaaacttgttggctcccacagaggtctggaaggaaagttccaaggatgaactgatgggcagcagacactacttctattgtcctacacctaggggtgtaaaacagagggcgaaacccactacccaggccaggccacagcgggcaaagtaggggggctgtgtgtggagatggacgtggcctcttcctgagccctgggggacttgggagctgctggccagatgtcatcctggagggctggaggaagtgtgggaaggggggtgcctccctgcacttgccttccctggtcctggagaccacgccaggttggaacatggtggggactgggtctttgatgccagagtgaatggtggagtgcccgccttctccaggccatatggcccaggttagacagaaggtcaaggcaaggggagaggatggaagggagaaaaaa

SEQ ID NO: 56456 - DNA, 1421 bp, Bovine  19866881279133
  misc_feature (1)..(1): n is a, c, g, or t
ngcctggagaattccgtggactgtatagtccatgaggtcacaaagagtcagactctgaacgactgagcgactttgatttcttcttctcagagacctgacacctagtagggcagacagagaggagaaaatcccacaagcccattaggccaggggtcaacacacattttccatagggccagacagttaatagttttggcttttcaggctatttgggttttgtcccaactattcaattttatctgttgtagcaaaaaagcaaccacaaacacataacaaagtaggcatggtagcattccaataaactgtatttatgggcactatttatttatttgaatttcatatcattttcacaaatcacaaaatatttttatttattcttcaccccctccaccatttaaaaatgtaaaaatgactcttagctcaaaggccattcaaaaacaggtggtgggggactttcctggtggtccagtgcttccaaggcaggggtgcaggtttgatctctggttggggaactaagatcccacatgcagtgcagcttccaaacaacaacaaaaaaaaggcaggttttattttctccacaggtggtagttcgctgacccctgtgattgatagtgataagtggtatagagaaaaaaaaaattgcaagaggagtctggtagccagggtttgagtcctgacttctgtcttcccagctgtgtgactttgagcaagtgactttacctctctgagccataaagtgaagagaggatgaattgcagcctcagaggcccaaggtgagagttaagcagtgcccagcacacagcaggcactccataagtgtgtgctgcccctgctggcatgagtgctgagcctcctccatgcccacattggctaccctccctccccaggggccctgtgggtgtgcgtcatcttgagtccccactgcagaccagaggagcggacgagctggctccagctgcttagcaagtgggacaagctggacgtgtgcccactggaggagggcaattactcttttgatgggcccagcctgcagcccactgcagccctcatcccaggtaggagaggggtccctgccattccccgcaacaacccatccctattgcctgtggcctagtctccccatcatggtgctctgggggaaaatggaggcagggcggaggggacgagcccttacctgcctcctagccaggagacagtgagtgtccagggcaggggcagcaggcagcctgagggacagtgatgtgaaatatttaagatacctgtagttctgggctgactcagtctcctcctggccatggaggcagaaatcgggtggggggaaggggaaacagaaagaaaaggaaacaggtattaagaagagaaagacaagtaaagacaggcagagaggaagaaattgagtatggagggagaaagatggacag

SEQ ID NO: 56457 - DNA, 1283 bp, Bovine  19866881318058
  misc_feature (1)..(1): n is a, c, g, or t
ngaaagctggacttttgccagtgccctctcctctcagggcagctccccgcgcatggctttcactcacccacccgctgcctgtgcttgctggagtcagaccaggtgagaaatggagggcccggaggggggcagtgggggtggcagaggagccctgcctgaggggtagctggccagggaaccctgagtgacagcccagctctctgaactggccttggtgtggcattgggtgggcgtggggacgggcccctcccttccacagcagcaggctggcctttgggccttctcactgtgttcccccacactctcccacttgcctctcacaccccatgtgccagggtgcacacctgcttgtgcgctgtgtatgcatgtgaggatgtgtgtctgcttatgtttgtgtgaggatgctatgtgcacacattcgatgtatatgtgttcgtgtgtttgcgtggacgtgtgcacacgtgtgtgctgtgcatgtgtgcacgcgtgtgtgctgtgtgcacgtgtgtgccatgtgcacacatgtgccgagtgtgcacacgtgtgctgtgcgtgcacacgcgacatgtgcacatgtatgtgctgtgtgtgctcacgtgccatgtgcacatttgtgtgctgtgtggcacaggcctgtcctgaggccttgggcccactcctcccagctctccttgcctcccgccagctgtggatgggagagcacaggcttctgtgtctgccctccttccagttcctctctctcagtgccccaaagtgcccagggtctgttttccctggcaccagcccaggttactccaagggaccctcacaagggcccaagctccctgctcgaggcctcgcgctcttttccagaagtgaaggactaggccaaggggaaaggaaaggagccggcggctgcctgccgggggcggggggggggcggggcactctctgctccagtctggcagagagagagcttgaggggagggtgccgcccagttctgcaggggatggaaccaggtggggaactgtgggagcctcttccctcttaagagaggtctggactctttctgaacactgccctgtgtctgcccgccacctcccgggcccttgcgtaggacacggagaacatggagggttaccctcctggcttcctcctcagggcctcctggctgggagccagcagaggggcagggcgtggtggctgtggggtgggggtggggagcccaggccctccgcacaggcaggggagggcggcaggccccgctccactcagcttttatgaactccagagagaagccaag

SEQ ID NO: 56458 - DNA, 1174 bp, Bovine  19866881366891
  misc_feature (1)..(1): n is a, c, g, or t
nggaagacccaagaatgttcccaagactgaaaagaagataaagccgcctctgacccaagagagacgacaaaacttgatccgtatttaactctggaatttcgcgcttcagagctgggatctctctcgcattagctgccttaaataagtagcttccaaaagcacaattcattccaagataaagtctcagcttttcagaggaaaaaaagttacttatcttcatctttcctgggcactggcaccatctctggctccctacatccctggggtgttaagaattcactagtagatcgatagcgagccggaagcagctgaatagcacagggagctcagcttggtgctcttcgatgacctagagggctgggatgcgagggtgggtgggaggctcaggaaggaggggatatatgtatacctatagctgattcacattgttgtccagcagaaaccagcgcaacactgcaatgcaattatcctccagttaaaaagaaaaactcaacagtagggccaccaaagtccttgttagccccaaactgctgggcttttcaagatgttaaaaccaggacagggccaggcaaacagggacatctggtcaccctacccagacaaggactaacgcccggtggtttttgaacacctggattcctctcctggaatgttccttgtcttcctctatgctcccaggaagtgagggagaagggagaaagaagaaagacagaaactgttggggaagggaaggggatgtaatctaacagcaaagctgagcaggggtctactgctcaactctcaggagtcgcccaggacggccacagcaactgtcctaggcctgcggtctccatcctgcgtcggaccctttggctcagaagaaggagaaggggcggggcagggaagctaattatacactttgaaactccctcaccttgtcacccacaaaggaaggaaccaagggagaggaagacaattttacctcagaccaaagagaatagaaaaataggtcaagtggccatgtatttctcctccccgcccacaacttaaagcttccagagagaaaggagaacgcaaatgggcttccaaaggggaaagggggaggggagggataaattaaggctttgggattgagataaacagaccactatataaaaaataggcaaacagcaaggacctgctgtacagcccaggg

SEQ ID NO: 56459 - DNA, 1482 bp, Bovine  19866881390717
  misc_feature (1)..(1): n is a, c, g, or t
nacagcaacaggacctagggagggaaggggatctgagaggggggcacccccaggcttttcagaattgaaactttctcagaagctagcatgattcctaactgattcctccttgtaggagtcgctcaaataactgatggatggagggagaagcatatttaattacattctcatatccacagtgtattgccttttaaaatctttttttgggggaagaaatttgtgctcacttgataagaaaccaattgtaccttgattttttttttttttttttgggcatttttattaatcagcattctgtgaaacttctatgttaaatcctgtattcacttaactattgaggttcagtgtttcttcctgacttgtagctgctttttatatatgaaggccatggatgccctgttttatttgtggcaatctttctcctctaatttgctgtgcacttcactttgattattattactattaaatctacaggacatcttaataataatgtagccaaatactcaaatacttaaaaaagtgggagagaagaaagaagggggagaggagggagggaggaataaaagagaaagaaaaggagagagggtagagggagagtggaccgaaagaggaggagaaagtagacgataaagagaaggaggcggaaagtctggctggagtcagaactacattccgcctcctgactttcatggtacatctctaccagctcagaggtgttcagaaactctggagagttctagctcttctgacacaacctgacctcattgtgttcccaggagtggcccactttagcccttaaattggaaatgggccaccacgctggcctcctgacaaaccaagtcctcgctgtgtggtcggggggccgttcaaggactcctccaggtctgctgagagggggccaggaggcaggggcacagaggaagaccctgacttctcattatgtgggtgaggtgggtctgagtccttctgagactcctttttaggaatgatccactgtgattgggcacagacaaggtctgtaaaaagaattgtttctggattaggagctgattagtttttttgaccccaaacatctacgacttaaggaatgtactgctaagtttgctaccagggccctaagagctaatggctactcagtccttagatgccatcttggaattgccacccagaatgtgggcaccatcttggaatggctactaagcctttgggtgccatcttggaatgactgcccagaactcaactgccactttgacatggttgcccagaatctaggcaccatcttggaatggcttctcagcccctggggtgctattttagaatggctgcccacaactcgggtgccatcttggagtggcctgatgagacatgacctttcagagtgtcctaggactgccaggagaagttcaagacacatgaggggagtcatcaggtctagagttacagggcctgcaggcatagggtgggggtccaaattctcatgca

SEQ ID NO: 56460 - DNA, 1246 bp, Bovine  19866881398454
  misc_feature (1)..(1): n is a, c, g, or t
ncttctcttgttgcggagcatgaactctagagcgtgcgggcttcagtagttgtggtgcacgggcttggttgcctcatggcacatgggatcttcccagaacagggatcggacccgtgtcccctgcattggcaggtggatccttaaccattggactccagggaagtcgctgagttgttttttagaaaaaatgatcttgaaagaattatggtcacagaagctgcagagatccctgtggaccccccacctaagttaccccactcgttacaatttatgtatctgtagtacagtatctaactcgaaaactgacaattggtcttatatgggggtatctacttctgtgtctttttataacatgggtagatttgggaaaccaccatcaaactcagaatgcagaactgtcctgtccccgcaaagatctccctggtgctacccttttaaagtctcccttaccctcctcccttccagcgttcctgacccctggccatcatgaatctgttccccatttccctaacactgtcatttcgagaatgttctgtggatggactcatacttgacgtgaccttttgacactggcattttccattccgcctacattcatttaacagctctccgcagctagtggtgatggcctgggacagcgcagttctagagagttctgctggatttagttcccatgggcaagggtgacatgacaccctcgccagcatggttgtcaagatcacaatgggaaataaatagagcgcttagcgacgagcacttgagaaatggaagccattcttagcattcttctgattcttccgtggccctcgggccccaggtccagtggctcctggaaaactatgagacggccgagggcgtgagcctgccgcggagcaccctgtactgccactacctgctgcactgccaggaacagaagctggagcccgtcaacgccgcgtccttcggcaagctcatccgctctgtcttcatgggccctgcgtacccgcaggctgggcaccaggtggggccacctgcccctgacagcccccagtggctgtaaggcccgccctcaccctaagtttcaaggtcctctgctccccttgtcccttcactcctctccagccccaatggcctcgtctcagttcctctgacgctcacatgctcctgccccagggccttggcactctgtgcctttctccgtctgctgactcaaatatcccctggccctcctaactaaaacttcagctttcccctacctccttggcat

SEQ ID NO: 56461 - DNA, 1258 bp, Bovine  19866881416201
  misc_feature (1)..(1): n is a, c, g, or t
nccccaccctcctccctgagctgcctcctggcctttttcagcccctattgctcctccgctcccaggtgtccccgcagagagcctcctctgtcccccgccccaggaggtggtccctgtgccactctcctccattttctgttctgcatctttgttatgtcttgagcacgtggaacaatggacagcagttgctccacgaacaagtgtttgttgaatgaaggaaggaaggaacattttgcgtctcagtgaatctttctgaccattcaaagcaccgtctccatacaacacgtgcttgccttccgggttagctgattcataacagcctcttcgaacttcacagctccttgaattgtcagcaactgatagcaattcaaaaccactgttacctgctccttccggctcatccagccgaggtcccattgacaagcctcctcccctgtggaaaaaccaattggcctccattcggacatgtatttactcgaatagtctgaatagtctgatatgtccttaagagggcctgtttttctggactcttgaacctcgtggaacatctgcctggttcccataggagttcaatagaaaaaaaaaaatcttaatacgtgtcctttatttgtcagtgagagccatgattacacccgcttttgaaaattatcttttaaactttctatgtggaatctcaaaagggcgagggctgggactctctgggctctgggtgccatctggcgcgtccctcagccacaagggggcgcctcagaccctgggccaagcccatgaggcagggcaggtggaggactcttgtaaactggctccctttgtccctctgatgccagccccttggagggggaccccaggggtgaggaagggcattcaggtgtgacagatatggaatctggactgtcaacccatctgttttgtcttccccgaccctccaccctgtcactgtcccgagtgactcctctccttcctagcacgtgggtcctgcccgcaaatccccttttagtgtcgcagccgagaaccccaaacttgggcaaatccccatacctcctgttcttttcagtccctctctgagcctgtttccgcacctgttaaatggagaccctaacacctcgtcctgagtgtggagaattcgctgaaccttaaggctgtgacagctgcctttgtgtcctgggtggggtgggaagcccagttccagccactcagcctgtcttctttccctgcttcccccaccctcgccactctgcccaccccctacccctccccg

SEQ ID NO: 56462 - DNA, 786 bp, Bovine  19866881459960
  misc_feature (1)..(1): n is a, c, g, or t
ngcctcgctgctccttgaacgtcatggggattgctggccttggtggggtctcagaggagaaagctgcacaggtccctatggtctcccttgctctccaggagctgagacggaggggctggagcccagcctgtggctcagctcaagggctcccccagctgctgagcacgtagggtggaaacagaccgcggggaccctggcccgtccttgacggtggcctctgctcctgccaggcagccccctgcccctgagctgagaggccgcacgctagcgcggaccaggcggggaggccggctgctcacccccgtcgggctttggccagctcggcttcttggcgccccgtcctggggaaggtagactgtgcaggaggtccaggtgtgcggccaggcaggcttggctggatcttgggaatccctgatccttgctcggtcacgccctttttcctgggagtctttggaattgcagcttgaaataaaagtgaatataattatcctaattaaccagatgatcgctggaagttttgcaataatctgctgtctattgccttttatgctgctgaatttacgtagactctccctcttacccttttttgaaagtttgaaaacttcagggttatgtatataaaaactcttccaacatgctgaagggggctgggtgtgagagaggatagctcactgctgaagattttcctgtttccctggcaaagaagatagagacttcacctcttaaccattgaaatcaggtcccatagaacagggtttcctaatcatgatgctgttgactttgggg

SEQ ID NO: 56463 - DNA, 1655 bp, Bovine  19866881893905
  misc_feature (1)..(1): n is a, c, g, or t
ngagctgctactgaacaggtggccctaagccctgggcggggcgccaggagctggggagcccgggccaacaggccttactgtgggggtcgaacctaacctagggggcagggacgtgggctcacctgggagtggagagccggttcccccggggggtggggccctccctcgaacgtgtgacaagggtgggatgggatacctcggcggggccatgggatacagactcacctggcgggcggtggcggcgcctcgacccgggggtcccgggggtcccttcttcttgtgcatcttccaggctggctactcggaccactggacccctggcctggccttgccctgcctcctaccccggggcctatggcagcgcacacgcccttcctgagtcccacgccccttgtcggtgcccggagaccgccgaccccacgccctcggcccccaggtggctgccccacttccgccttggccctcgggcgccgcggtaccaggagctcagcccctggacttgccgggcccacaacacagaaactacaattcccggcaggcagtgcgcgagtgcgcaggcgcgttgccggcgatgggcaggtgccggcaggttgcgcgggaaagaggcggagcgtgcgcaagtggagaagtgaggttccgccatagcgcgtgcgcggcagggcctcgtagtgcgcgggaaagaggcggagcgattgcaggtgtgaggggtggtggcggcctctgggttcacggtgtggccggttcacctgcgagctctggtctttcctggtttaggcagttctcactttcggcgcccagagtagggttaggatgggcctggtcaccagaagccaggtccgcagcactcgggcctcagaactcgaggtgcccggcctccgtgagggacaactttgcctttaattgtttaaaaaaaaaacaaaaccttacagaaataaccgaattatcccccagcaggtccaggtagaccttcccagttcctggtaacgacagagggacctcaacaccttctctggcccaggtcagtttgggcttgcctggctcctaggctggaaggaatggacctgtggtggcgactccggcctcccccaaggccccaggcatcctccaaagggccttcccatcccttgaaaggtccccaagtgtcccctctaaagccttcagattaccttgcaggccccatgtgtcacctcgaaaatcctggggtgtccctggaagggtcccaagtaccccagcctggaggaagggagcttcacataggctgccccatcttagagactagaggggccataccccggcccaggtgctctcagatcctgggcagaaaataggcagttccctctctgcagcgtggagaagtttaaattctcaccccgagatagcctaaggtagctatgattcccatcctctgccctactggagctctgttgacccctggggcagccagataggtctaggtggaggagaggtggcctcagccaaggccactgggtcctgtaacccagagataggaactgcttgtaatgatgaggtttgctccttgttttcagatttctctagggagagagaaaatgagtaagaggaagaagcttcggacctcaggtatttggatgatcaaattgacacatttttattgctgcttctgctgttaggaggaa

SEQ ID NO: 56464 - DNA, 1360 bp, Bovine  19866880285006
  misc_feature (1)..(1): n is a, c, g, or t
ntattttataccttaagaaaaaaaaaattagtccccaaaataacctaatgtgatgttattatccgcatttttatagaaaagaaaggcaggatcagtaagaataagtaatttattatggtcatatatctaatgcatagcatatatgagaaatgtagactctaaagtcagaagacctggatttgaatcctgactccacctgtttttactcaggcaaattagttactaatctgtgctcaactttctcattgataggataggaatgttggtcctatcaacctcaaaaagtgttctgaagattaaataaattaataaatattaaagtttctcaaacaattactggcatatagtacacgcttaatgctgctgccactgctaaatcgctttagtcgtgtctgactgtgtgcgaccgcatagacggcagcccatcaggctcccccatccctgggattctccaggcaagaacactggagtgggttgccatttcctcctccaatgcatgaaagtgaaaagtgaaagggaagccgctcagtcgtgtccaactcttagcgaccccatggactgcagcccaccaggctcctcccacccatgggattttccaggcaagagtactggagtggggtgccattgccttctccaacactctcaataacaactagctattattattggtcacatggattcagtattgtttttaattactttgaaaacacaaaacaagttacagtgattgctcctggggcttatggtacaatttgtaaactttgaaaaaaattcatttgaaaataaacatttataaatgtatggcatgacatttgtaatgaataaacaataatttctaacctggctaaaatctaggcctctactactgattatcagaaaagtttagaaaagcattattgatttcttttatagaataggcaagaattccacagtgacccaaggcaccaaataatcacaaaccattgccctgcaatggccagagctgactcgctttttattagacattgatctttggctttttctgaatgcaccagtgagttcaaggtctggatatgtatgactcatgcaagctctgtgccattaaactgctttataggagaaaatgattcttcatgcattgagtctgacacttgacattctttttataatttgaaaattggcagctcagagtatatttaaatggaaaacactaccatttgtaaccatcatccagttgatagaaacaatgtttttgccattgaaatgactgtacaaaacccactgtgacctgaaactatcattgacctagacaaatattaatcttttatatataatgttgttagcacatattgtttttataacattttttatactcagcata

SEQ ID NO: 56465 - DNA, 1646 bp, Bovine  19866880436365
  misc_feature (1)..(1): n is a, c, g, or t
nttcagataatagatgccttattctttaggcactttggtattatttaaagatgaatttaatggtcaaggcaaacaaaatatgcatttatctagcatatgatttcctctcacagattaatgctatttaggcattcatctatcttaacccctgtattactataagtcagatttataactcatagtacctttaaacccataaacctctcttattactgccacttcattgtcttatcccttgtcctatgccctatttcacaaagggccaaaaattgttaggaatgaagtacttcaaatcaatgtttccaatttcataaaggcacctgcttcaagtcttttacattccctttttttgttaagtcaaccatgatattttatttaattgacacttttgtacagtcagtgacattcttaaaaatacttttattgtttgatgcatatttttgacttttttttttttttttttttgcattttaagtcgtaactcttgacttcttttcttttcatggagtcattggaacaggaacgaaactcacagtatttgatatattggttcactggagatttaattttctatgggtctctgcttttacatttggttaaggtttgagagctcaaagtattattcctgacaacatgctaaatgtttgaggtgtggatgtataatgaaataaagcaataaatgtcttgtgcccatatttattttgtagatgaatctgctttgaaaaatctggcacccagtagtccaaaatcatttaactggtaaccttttattttttaaaagagtgtggcatctctatagccaggtataagccccagcagaatcttggtgacagaaggagaattgttccttatcctctcatgctataaggtcatttcaaggaatctggctctcaagagccacacttctaagaaagctaggcagtaccaatgagcagaaacaggatctgatattttctacaatatctgtttttattttcaagaagaagtgttcctcaagaattaaggaaatactgtggcatgtggctttaagatgtgatgaataggaagcaagagttcatgccctggccttagacttattcatatgcagtttttgatgatatcctgacatcccggagagatgtgggtaaacttgatgtaaccaatgaaaggaatctctgttcaatgaaggttaacttaagaaccacggaaatgtggagaatcaaggaatgtattcaccttgcaccataggtacttcagaattactgtaaaagtgtaataggagagccatattgtgaagggaatgagcaaatcaaggaaggtaggggaatttcagagttctctttatttccaaaaccctatactttcctggcccaaatctttagcatctgttaaagtggatagatttccaaaaagtgatttaagcctgtccaactctcaaagcaggtgtttgaatattttataagacttctgtttgcctggcattcaatagggaggaaggaaagaaagaataaaggaagaaagagagggagggaaggaggaaggaaggagggaatgaagaaagggtaaactaaggaataaaaacggtcttcagtgagatcctctaatgaaagaattaactccagacaccatgtttcgctgtgttttgctgtggacccaccatcttttat

SEQ ID NO: 56466 - DNA, 2308 bp, Bovine  19866880458540
  misc_feature (1)..(1): n is a, c, g, or t
nacaccatgtttcgctatagttttgctgtggacccaccatctttttatctctgtcttctcttgatcatttttcctatcaaggtaaagttttccaaaaaagaaaaataacaaaaaacaatggtggtttcctttaagcatttccttttatctgctcctacattgaggatacataagggatattaagttcatctttagagcacttttattttttttacttgctcttccctacagaactgatgttagaaattaggggaattataacatcttctagttatgttatatgatcagtttggcaaaactcgactttaatcgttctgaactcaattattcatatctataccatttttatccattcatacctactcagactgcttcatattcagaatcatatcttgctttcctgtgttcattttctcattaggagttttatctatatattcaacaaaaatgtcttgagggtttaaagttttattgtgtgaccacacttgtccagctcctgggactacagcaatgagccagatacccctgctgtgggatactgaatagattgatccagtggaacagagtgattcaagacgtaaatattcaattgctatgaaatcttttcaataactcacctaaatcattatacagttaatcacatgtgctgtgctttctttagagcaccataagtaggcaattcagagaaataatcctaagccattttcctgaaatagaaaaaaaaaaaaagatttttataaacttctaaactttgcttctaatacaaatgaattttagtctgtttgcgtttcatttttcaactaagtaaaatgtctgcaatgttaaatgggccatttttcagttgtcagcctgttagttttttcaaatttgaattctgttctcagcattcatttttcatatcatttaatattacagagtgcacccttttaaactgtgtgccctacatacaaaagcacctagcataaataatacctgaaaccaggagtgatgctaaattctttaactaacaggactgaaccctatgaaagcaatatgtaagccaatgaaaacaagtttgttttggctactactgaattaaagaaacaactttttaaagtataaacattatccatatcatcagcagtagaaacagataacaatttttaaattaatgtgtccccttggcctgaattttactggattaagtggcatttaagaaaaaaaagatacatttagtatccctttaacactatttcacaatggctaacagattttaaactatcaagcaacccaaagaaaaagcattacaactatgaaggactcaaaagcaatttggtgaaatgttatttgaagtctctgaggctgctaaaggccaaacattggaagtttattttccatttttactgactgtagttttatccagaccaatggtcctttcatttcatgatattttctcaatccattgctctaagttctcagctctcaccacaatcaggatgagatggggaaaagcagagctacagctatcaccatgagatcctatcagccgtggcctcgattgacaccactactttccaagctgctataaatgtgttaagctccctttgacctttttcctcatctcagtgagctacaaaggagaaactttcactaaactgttatttttctcctaagatccataacttgtaaagccttgaaactgagatacccttatcataagagaatacagtcacagcctagtgcctccagaagcttccaggagattccaagttgctgcttctacatgtttttggagtaacactgctctccttagcaattatttcttaccagaaattacattctggctagtgaattttatctaacataaattcatggctccactgcctttatctctctgaatacggagtatattgaaagtaattggggtgaggagagtttctttcttttcttcttttatgttcagttttttttttactatactttgttgtactttgtggatatactacctcatattgtttcatttatgttgtctctctaggtgaactatacattcctcaaaccagtcaagaggtttcttagtttgtaaaacctccttccatgctcaatactgaacaaaatgtggtaaatgtcagctacctaaaataggcagttaattaattaatgaccacttgcttcaaaggaagtccaatttataatcattatctataaatttaatttcccaaatactaagataatttttaataaatccattaatactttcaaggtaaaaatttagtttacatccttctgtggtatataatctacttatggtgtcatacataacatacgt

SEQ ID NO: 56467 - DNA, 1384 bp, Bovine  19866880554408
  misc_feature (1)..(1): n is a, c, g, or t
ntgattgtgataattaagatagagtaatgataaaaatgtattaatagacactgtcagaaacaatgtgctaaacatctaatatcacgtgtaatctgccagtatttctgttgtagtgtctaaccgtatgatggtggtcacaggtttctttaatcttgtaatgagtactggagtaatcctctggctattttttgtgtttgatgaagcattttttatctttttggttttgctgcattttgttttcagcctttgatgttcattctctctcatgaaattttatgtctttttattaaaattggcttgtaaaaagaagacccttaagatacactctgtacctgtccatcagtggactcagaaagtttctaaatgataattgttgattcggcatattagcttgttggcattatctgtatggcagagatgtcagtatattgtttccaagctcgacttctacatgcagggagtaacagagcatgtccctgcttcttttatattccacaggagagcaaccaagtggcataatcaattcttccagcctttgtattttacctgatgtttactttgcacattgctttaagatgtgcccttatttcacctcttaaaaatctatttgcctttttttttttttatcttgtgggaaaataagattatcttaccgcaaggtcatggtgcatttcattagacactcataatattttttcttttctcagaatccacagagcagtgaaaaactgccctaattactaaaagattgtcaggttctggatatacaaagaataaccttctcttatcaggtactgagggaattggaactgtgcagatggctttgacacagtagctttactggtcagtgacatatattattgtaaataagagagatcaagcataagcttgacatcttttgtgccatgaatattgaaataaagaaagcatagatttggtctttaatgcatgaaaataactctgtgttccttaagagaattcaaaggcaaaaaattctcagtttttcacaaatgaccaagctggttttttcctttgcgttctctgtgtatgttttcaagttacttaattaagaagatcaggataccatttctggatgttaaaggtgacattaagaaactctaagcctttgctttacattgctgtgttttagcagccaataccagtcacctggaggaatggccactgttgggccatggcttctttggtagtgacatttgctcaataaattttttcatggtaataatttaaaaaagtaaaaatggtgtgaagaagtaaatgtcatgttcccacaatgcaatataaatgaaattcataaaggctcagtgactcacaagacaggttaattaaagcttccatgtggcacatggaagttagcacaaaattt

SEQ ID NO: 56468 - DNA, 1374 bp, Bovine  19866880624475
  misc_feature (1)..(1): n is a, c, g, or t
naggaatttcaagatgcatgtaaggcaattacttctttcaagcaaagtcaagccccagaccttactgaactgaaattcacaaatgcatcttaaattcacagaccccagttcctattgttttgcttaagggacacagctgagttcttccaatccattgtattcaggtttccagtttatattcagactgagaaaacctgagataagaaggggtgacaattcactcatgtaaatcatagccctgaaagtaacattttcaacaaagtattaagacactgctttaagacattattgaaaaggcaaaacacttggggttttaaggttaacagtaccatctaaatagagtttggtactgaatatgagagcttttgcttgaaaggaattaatggctctgaaatatgatctacatgaaggctaagtgacaacttaaacaaagaaggctgctgtgcttaatttgagtgaattccatgaatgtgttgtggtattaggaacttgtttacaataataacccgaatgcatctgctccatccctgtgcagttacctagactacattgtttgacaccacctttctgcattaacctccatctgctgggctatgtctgtcatttctctcactataacataatgtgacagagtcttcatttacctaaacttatcttggcaacttgtacttcattaaaaagaatcctgaaagcatcagttaaagctttcttagctggccatgcatagccaggcttcataaatcattctttcactttccattttgcagcttctggaaaggtaacattattgaattcagatcactgggaaagagcagtactaaaatgtttattgaccggcttttaggcaccaagctctgctctaaaccagacattaaccaaagcttttgaagttaaaaaaaaaacttaactcactgatatggtttatactgtgctataaatacctcttataacagtcgctttagcaagctagtattaacttgtttgaagaaaaaatatttttggtccttggttccccattccttaccacctaaacttcttaactagatttgtgctaatttaaggagatattgatattatcatttacctatcaccaccaactctaaacaatctcagtgggtagtaaaaacacaccaagtctcccttgggttccttccttagtaaattttgcactctacagaagtttgtgcatcaggtttctttgactgagaatcagctaccagaacctcctcaacaacacagtctaggtcaaattggccttttgctaaaaggcaccaagaacacgttccttatccaataggcttgcatgcatggtttgtgggaagcattatcgtatttatgctggcaaatttacggtctttctttgacagcattgga

SEQ ID NO: 56469 - DNA, 1730 bp, Bovine  19866880747293
  misc_feature (1)..(1): n is a, c, g, or t
nttctacacttgtttccttggttatgtttctatggattacttttgatttgcccagaaataataaaatgaatacccttgatcctaggttcctcagctggataaacaacaagttgctcttattttgattaaggagagccattatatgtttttcctcaagctattagtctgctaggaacatgtaatttataagccctatcaaaactttccctttaatgaaatgaataggaaattaatgcagtcaggcagaaagttcttttcactaatagtatttagcactttctgctttgaaatatcagagagtagttttcatgtattggttatttaaggatggaaaattcagtcccactgatatcaccttgaatgggtttacatacaagtatggtatattcttttccttgggcaagctaagtgctgtaacatgcaaacataaattttccagctgtttaatattaatagctattacaaatagaactgaatgactattagcaaataaactcccaggataatggtgtttcctatatgttaatgattacttgtagaatttgggtaatttgtgttagagatgaaacaccttattcatggacattaaaagagatgtgattttaattctgcttgacacagagggacaaattaacctacttagtttagttcttggaaagtgctttgtgtttgaaatactgaaatagatgacagtacaattaaattttacttcttaaaggtatacatgtagctagttctctattctatatgtgcctgtgtcctttaaaagaactagcttgaggcaaatttcattggttcaggattgttagaaccagatcattatatagggcttttattgtcagcaaccattctataaatacagtgtttacatataattttactattttagacaagtcgaaaggagtttgctttctatctatctatctatctagtctaactatccccagttgcaacatactttttgttcctggttatcttaatgaactctttcatagctgaatggttatttccagccaatcaaatattaatatcaatacatactaaagattatagaaatctcaatcactgttgttaaattaataacttctttgactcttgttaatacatacatatatatctgaaataaaataattttgaggagcaatagcttctaaaacaccaacctataacttgtacaaatattaaaaaggaaaatcagaatcctaggaacatgattaaaaccaaggactcttttgtctattacaattcccttttcaggattcagctttgaggcagttttgaatttcacatctgataccgcctttgaaaatattctcacagtgatgaatgacctcttccacataaaacagtttttgaaatatatgtatgtttaacaaagctcctttcctcttatgttggaaatgttgaaatgtttatttcttgattggaagcctgtggtgatgcagccatagataaacgttacagtaagaggaaataggaaatctatttccttcagttaaaaaaaaaagtaaaaaaaaaaaaaaaaaaaaaaaacctacaaatgaatcctactcctctgttgacaaattagggttcctaaaaactggtcttttttttttttttttaattcaaaaactggggttcattaggttgaagtataatcatattttcaaattcttaccatgggggggtattcaaacttcatcactaattttgacacaagttaatgagcatttatgcttgatcttcta

SEQ ID NO: 56470 - DNA, 1387 bp, Bovine  19866880777158
  misc_feature (1)..(1): n is a, c, g, or t
nccaaaaagaaaatctaatatattatcccttccctctagggtcactataatcaaattcctcaggtaaatcagacttgcattttgactgagtcattcagactactttgattttgaatgtcaaagctttctgggtcaaaccagaatacagctcatatttccaagctctgtattagaaatcatgctgtgaggggtaaatatgttgtcttaactacatgaaaatatagggcaacattgttcaaaaagtctcacagggaatcctaggaagagataataaatattcagagtcaaagggaaaaggattttatatcatacacacacatgcattatataagaagtttttctatcaccttaaaatgatggtaaatctatttatttatctatcaatctattgatagattacctttctttctctgtctccctgactttaaaaatcccatttacattcagaacacatacacaatgcttattttttaatgaatatcagatatttgtgcaaaatccttactgcacaaatatttctaaaaattttatattgttttatattcaatggtttgcattgaatcaagtcacatcaggctcctgtaattaagatattttgcaatgaagcaaaataactttttacactcaaattttaaattaaagagggtacttccatttctaggtgaacaatttaattttgtgacacagtttcagagtatgtaataattattcactgaaatcaatatcttgagacatttctgattcattaagcattcttgaaataatgtacataataggaatcccagtagctaaaagaagagtaaatggaaagacactgatactatttgacagtagtgtatagctaaagaaagagcagaatgctcagtttcagggggcacatacagaaaagcccaaatgagtgattaccacataatatatgccaaaccttttgtagagaaactacagcatgtcaaaagctaatcgaatatattaaaagtaactaaaatacaattcacaaagtagtagcaattatatttctaagaaacaagcgcaacaatattttcaaatactaagacaaaaagcaatctacaactctatgtctactctctcttcactccccatataacctcactaaaggaactcctcaagaatgtgcttcaagaggaagaaaattattacaggaggagagtatgatatttttaaaggactagtaagtaaagaaattgctctttgaaaatgttctgtttcacaaaatgagtttgtcttctttcctcatttgcttataatgctataaagacctcaaggaatggaacatcacttattaaataacttatatatgctaaaattaatttttccagccctgctctatgtctttatctattctatgggcttacttaccacagtaatt

SEQ ID NO: 56471 - DNA, 1548 bp, Bovine  19866880792563
  misc_feature (1)..(1): n is a, c, g, or t
ntctccacagttatcatgtttcattaattcactgtacattttcccttcaaggcatttatcacaattgcaattaaacaattttctgtatcattctttactgtttatcccttacattaccatgaggcagaaaccacaggatcagcattatttacacagaaaccttagataagagaaaagggccagacaacagcagattcagtaaatacttaccaaatgagtaactatatgaacacacaattagttttttatatttctccaattctaataacatgctcttttaaatgtatcccatttcttgtttctgaagcaaataattcttacatatagacaatattgctcaaacaacttcttgaggcatttctcaatttgtatggaaagactaagaggactatttctatacagatgaaagaaagaagtcaactactctaagaagtaacatgggaaattaagaatagttcaagcatcaagaatatctctcttatgcaatatatatttaccggtatacatggaattactttactgattgtaatccaattcctgattatagtacattcgtggaacatgctcctttaataaatgtcttctcaataagttatcacaagggtcttagcgtattacggtttctattttacagatggacaaacaatatcagaatattaaggatctgcccaaatttaaatagctggtaagtgacaatgacacaatgaaaccgcatagcctatattctgattgaaatcccaatgacagaatttgaagaggattccatagtttgcccttagaataaggtatttgtgcttagcctcttaggttttcctccgtgagccaaagttttagttagctgaataaaatggataattaaaaacatcaaaaattttcctttatgatagagaaagaaataaatgtgaaccatgaataatgcagttaagtaactctaatcatctactatgcataaccaatagtcaacagatgttcaacatagatctaagggaaaaaacaccttacatgtctaacaggattttacaaaaacagtgcatctccaaaaacagcaatttttaccaaaaaatagtaaatttcaccaaattttatacttttggaggtcacattttcctattctagggccatatggtggcttcaggcaagtaaaactgggcagtttgagtgtatatagatgcaaaatgtaaccaaacaatttttaaatgatgtggcactatgcatgtatacatatattaattctagaagtgtatacatgtgtgcacaaattaaatgtttattataacttataaactgtgcctacacaggatgacttaaataacaaattaagtaactctaactgtgattttggtctggatcacctatgcagaaaaatcttcattatttttttctcaataccatagtaataatgtttatctattcaatcctagcccttaaaaattattgctatagtcaatcactgtatttggattagaataaaatgtaattcaaataagaaatatttgatacttgaataaagtgtgatatctcaaactgaccccaaaatctagctcctca

SEQ ID NO: 56472 - DNA, 1407 bp, Bovine  19866880818631
  misc_feature (1)..(1): n is a, c, g, or t
nacacaactgagcaattaagcacagcacagcacacatatgagaaaagaattttaaaaagaatgaatatgtgtgtttgtataactgaatcattttgctgtacatttgaaactaacacaacattgtaaatcaactagtcaattatactccaaagaaaaaaaagttgtagaactgaagatctttaatgttgtcatatgtctaagatcacatattaaatggtggaaatgatatgtgaaaaatatagttggttaatattaaataatgcatattatagcaataagaattttcccatacttaaaaaaaaatcaccgtaaccctctgatgtgtatactactcttatccctagtttacaggaaagaaatcaagtctggaagcaatgaagtaactctacagagtcacacagagtctctttatcctcttctacctgcctccagagactgtgctcgtttctgtagcctgtatgagaaaaagcaatctaacatcaaattcatttatttggatacatccagacagcaaggagatcacaccagtcaatcctaaaggaaatcaactctgaatattcattggaaggactgatgctgaaactgaagctccaaaactctggccacctgatgcaaagagtcaactcattagaaaagaccttgatgctgggaaagatctcaggtaggagaagggggcgacagaggatgagatgattgggtgctattactgactcaatggacatgagtttgagcaaactctggaagatagtcaaggacagagaagtctggcgtgatgcaatccatggagttgcaaagagtcggacacagctgctgaacagcaacaacaacaaagaccgaattacaacagtctgtgagattactagtttgtgaccctgtgtgtcagtgtgcctgtgcacacataaggtataagagagaaagcaagtaaaaaggaatatgaattttaacttgcataaaaatgtctaaagctaaccattaggatgattaaatcagactgctcatagatttggggaaggaacagatgtatatataaggatacagagagccatatttctaagacattggagaacaattttgccaactggctgtgatatagattaggcaccctctggagaagcctttttagcccagtgagtttgttatcctttttatgttacctacacaggcagactactaatttggaaataagattgcactgtgagagttaaaactatcatgatcaatacaaaatagatcacaagaaagaaaattgcaaaattaaagagactcctgatccccaggtcaaagacttaagtggtgatattaacataacccagaaaagaatatgtcagtgtaaggagggattaatgtggaatgaaaaaaggcaaaatgtctgagaaactgaagctggtggagccaagctaagagcat

SEQ ID NO: 56473 - DNA, 1032 bp, Bovine  19866880834480
  misc_feature (1)..(1): n is a, c, g, or t
nctaaagttatagcgaaataagcttcacccattttattccttatctgaattgctgatcccattgtgaacttttaatacatagatggagcccctaccttaatttattctaatccttataaagtaattaacattctagctatgactcagattctgcatgtctatatgtatgaaataaagcataattaacactattattagattcatcatctgcattttactgagtgaccttattgcttcaataaaaccttactgaaatgtcagcataaccacaaatataaatggaaaagaaaattaccattcagtagttatctctcaataatcttctgctaaagggaaaattttgtttctgaatacatgtatccattagtcatattgattaaaagaacagctgagaggcagtctcagatgtttttaatttgtgctaaaggataaacaacaaaacactttaaaagataaaatattctataaatataaaatgctttaaatcatacaactattgaattattatatacccagacaggtatcatttcacatgctagatcaattatagaatatactttatttttgtaattattatttatttcctgtttttcccactaaataaaaggatccttatggcagtgactaggtttatctaaatccccaatgcttagttaatgggatagtgtaggaacttaatacatagctgccaaatgaacaaataaataggcaggtagtaacacaaaaataagagtgaatgcacacattgctacctttctaaggttataatattggcaaataaaagttttcaatgactacccaaaacagtgtgtgtgtgtattttttttttttttgcatgaaacaaggaaaaacatgactttagtaatatttaactggtgccgtgctaagtagcttcaggagtgtctgtctctttgtgaccctttggaccatgccctgcccggggtcctctgtccatggtattctccaggcaagaatactggagtgggttgctgtgccctcctccaggggatcttcccgacccagggatagaac

SEQ ID NO: 56474 - DNA, 2273 bp, Bovine  19866880837642
  misc_feature (1)..(1): n is a, c, g, or t
ncaaagctatgctaatggagtgattaattgcttttataacacagacttttgtattcgtcagtatcatgtttctgcatttgcagttttcatattactttcgttgcagtttcatatttatttctataaacacatatttcgagtagtgggtggaaaataaggcagccagatggctcaatgaactaaatgaaagaactgaaattcaaagaaacaatttccttgttttgtctctcttctgtataacctgagatataggacagtgaccttacttttgttggttcctatcaagtagctcttgtaagtacagggtttctccatgaaatcaatatagctacttaataaatactacagataaaaaattgtgtccaatctacatgttttcaagagagtaagtatgagtcataggtctacatgtaggtgacacagcaccattactaacatcagttaaacgcctctatttatgtgattccaaattttccattcagcttagagaaaaaattatgtaaacctgcacaggtgcagaagcagttggtagcaccaggttgcaaattagcaggccagaaaggccaggaccaagaaagtataaacatggatttctcagaagcagtttccctccaggagtaatgagaacagacaaagaaagaggcagtttccatggcagattgcatggaaagttataaaggactatcgttacccttgagacaatagaacacctttaaagttcaaggctagaactttaatcctacttcagtgcacaattgtaggcaaatctgttatattttctggggttctgtttcttctgcaaaatatttaaaagaatacataatttagaagactggtgtgaggttttaatgagataacatacttgatgcaactgggacataaattcacagaatatcaactcaatgagtatatttaagtgccagatactctgttggataatggaacacagtactggacatctccctccccttattctttagtagaataattcctgggttatagctgggcttatagcctccaggaagaaagacagtctttctttgtctcttgctcttcctgctaataagagtatgaacgtgacagctggagctcatgtagccatataggacctttaggtgtattatatgtaccaagaattgcaaagcagcgagatgaaaagagccttgtttccttatgtctagaacccacactcctgtatggtctggagacttgtataagagcctgagctgatggctaataaggcattttccacaacccagtagaagaccctttgaatacaatcatttcagaatgggacctctgagattttgaaatttttacaagaggccaatctcaggcaccacaaaacctaactctctgctgcctcccttcggtctctgagtgaatggactttagcagctcatcccacaaaatgcaattgaagattgtctatccaatgtgatactagtatagagtatgcaaggactggtggcatttgaagctgtgaaaagtagttttgggtccaactgtgaaattctgtgtattcttttaagaggttaaataaataggcagaaattagtatgttggtaggtggtatagtcagaatgtcttattaactgagcacagatgctgtgaaatgggatgggactagagtagcaggaagcaaattaaaaggtggttatggtgcctccttggtgccactcttaatggttctctttcccttgatgttataagggtcacccatcaaaagcaacttctagaaaaataaataatatgaaaagcaataatcgactttgtagatagttattatagctaattccaggaaggaaaacagtacctaaaaaatcctagacaggttgttccactgaaacataaaaacataccaacaaacacaaaccagtaatatttcactatggaaagagtaatgataaaagtaactagaatactacagattaaaggagaaagcaatcaccaaacatttatctaatagcttgtattgaaagtttcaaaagagacacagtaggacatggttgagatactgatttgctcaaatcttaggcaatcaacttcatgattcagttgacagattcctgagcccaatcatcaaaggaatccatgatttcattcagaaaagaacaaattgctcacacacacacaaaatctttctgaaccttcattttatattctaaggatctagaaagagaaagaatattatcactaattttctcaaagatttctaaaatgatgttggaggtaggtacctatatattataaataaaacagcaacaacaaaa

SEQ ID NO: 56475 - DNA, 1519 bp, Bovine  19866880844287
  misc_feature (1)..(1): n is a, c, g, or t
nattccacaacaattcatcaggttgctcacttcaacttgcaaacgccccctctaagtaccctcagctgccgtcctgagaacttcttccaatttcaagaaacctacaataagtttatgattctcaatggggattcctttgtaaaatagacagacagacgagctttagaaatatgaataagaaaaccagagcaaaacctcggggatggtaggcatctggctagaagagaaggatttatgagcgtggctacttagctaggcagcaggaaaatttactccccgaagtagctatggctaattcacaaagcctaactaatcacttagcgccccacccgggccacaccagcctgcgccgggcgcccgcctccacctcccacgccctcgcccccagctcctccgcagatctgcgggaatgctgtcgctaacctccggagtgtctgagcatctcccagggagttgaggctctcgccgcacctcctctgctttccaaatttggaaagagtgtaaccgagatgataggatgcctggattacctctgaacgctgcggaagcttcctccacccccaccctcatcccagagaaaagctgagctgccagcgcggagccaccgaccaccacaaaactgggcggcaagacccaggggggcgctcggctaggccaggaggtggagggggggtcagaggacccgagagagaccccggagaggggagtcttggctttctcctttcagtctcttccactccgcttggaagggctcggaaggcagggatttgcctccatcacctcaaactccgagcgcaagaagaaaacggcggtcagcctctgtgcctcccctccgcccttacccacccttaactcctggctgagctcctctagatcccgggtgtgcccaggaccccggcacttattttttaaagctcagacgcattaaaatgtcagttataaagtggccgggttacccccggggagtttcggatttagtttgaacgaccagtccgtttcctcagagctgagaggttttaagtttctccgtcgccgacaagcagggcgacccggagagggtacgagagcggggaggcgtgcacaccccgggcctgtcgggggctgggacgccgtcctggtgccccgcgaatctctactgcgcccagggcagccgccgaggggcaccggcgtcggagggtccccggccgcaagggacatgttatcttagctgagtgcccttggatctggcgtcttcagagactcactgaagatcccgcaaacccagacgtggcacagcgcggggagcctctgcgcatcagagagcatccgcggcaggccacgccgccgcccgcaccgcacccagagttcctccaaacctcggtgtgcgcaatgtacgacgacgtgtgagtgtaggacagaaagtgcaaaagacaccccaggctcccacatgcccaggggtagatgcgtgtccacactccgtgcgtccctggccccgctgtgcccatctcggatgacagattaaaaataatcatgaccaaag

SEQ ID NO: 56476 - DNA, 849 bp, Bovine  19866880878850
  misc_feature (1)..(1): n is a, c, g, or t
naatattaatagaattgaataaaatagcccctgttagggttattacaatgcatcactgcatccatagagtctttaatcagaagtatttgtttatctgactgggaatcttggcctatcctcagtagtgtgcaggggaacagagtatgtgcttggcataattacatgaacttaaaaaactactttattcctctgagaaatttagtggggaccttcttgttatcattagtgatcatggtgtctattcaaggaatgaataagctggtaatagtttttattcagggtcaagcagggggagaattaaaacaattaatgaaaattaatcatatgaaaaattaatgctcgtcatagaggtttcctaggagcaagttgtacttgctgcttttgtttttgaatattctgaatgtgatagaaagaaagtgaagagaaagggcccagcatgtaagttttcatacagccataggatttttaatatatgccatcgttttgttctctctgcagctctccaaattaagtgtcattattacttcctctgtatagactgggagatggagcaaagaaggaatggctaaagcaagcacccagaatgggtctctgattcatattccatgttctcacatattctcttcaattatggatttttcacagggtccctggagtttcttaagtcagttttcagagcacagagtataaagacacctcctaatttaaaattagattttgcctttatcttcaggaaagcagagacatttgacctcagctacgagtgaacagagcaggaggtagaaccctaggatgactcccagatggagctgcttattagagtacagagcaggctgggtaagacaaaga

SEQ ID NO: 56477 - DNA, 808 bp, Bovine  19866880949023
  misc_feature (1)..(1): n is a, c, g, or t
ntgcagttttgtttcctcaaacttccgagcgctactcctattgggatgctcatgtgatattcggctcaggaagttctcttccagcagaagatgtaatcctttcatatagaaagtatcatcattacaatagggtttattgaaggatttctctgaattagtaaaggtattccctggaggcagcaggagacatctcactattgaccccagaccaccactttatgtatatctaaatatgatgtttctgagatttaaaaatcaacaaatgtatagttctgaaacagtggattgatatttttatcttacatgcatgatgcctatagtcatccttgggattccatttttaagaatcctattctcagccacttccctcatagttattgttgttgtttcgttttatatcttgaagaggaaatactcctaagcatgcatgtgagtacaaacacacatataagtatagcagagtcatccgctggcagccattatctgtaaaacgaattaaagaaaatagcgtattaacatgcacatcatgaagcaaactccattctctctagagtattctctcattgagatacaaggactttatctttggcacagtgggtctgaactaattgagatgtcattaaaaaaagaaatcagttaaaaaggttagaggagaggggatggttggttgtgaaattgtcaatttgcaagaatacatttttttagtaaaaatacagccctcagttgcagatctaatcagtggcagaaacgggggagggatgaggggagagataacagagaaaaataatgtcttaaagagaaaaaaaaa

SEQ ID NO: 56478 - DNA, 1531 bp, Bovine  19866880952559
  misc_feature (1)..(1): n is a, c, g, or t
ncattaacaggttggcattcacttagattctcattataatgcattgtctgttagagtcacttgacataactcttctctcaatgcaataaattcagtttatttttctaatattggttggctgccatcaggacacaaaccttctgaaagttactgaaaaacaaaagtgaaatgaaataaaaacttcagaaaatgtattaagaaacactaatagaatagaaaccatattatttacatgtttttattttatttctgctctttttacttgaagaatatgcaaaaccacctagctgactctttaaaaaagcataaaatagcatgcctgcccctggagaaggaaatggcaacccactccagtattcttgcccagagaatcccagggacgggggagcctggtgggctgccgtctatggggtcgcagagtcggacacgactgaagtgacttagcagcagcagcagcccctactcctctaaattctttattatagtttgacactgaacactgcttccatcctatccaatttcattttgcttatattcagtggaaatttttcactagtatccttagtgggcaggaggagaaggggatgacagaggatgagatggctggatggcatcactgactcaatggatgtgaatctgagtgaactccgagagttggtgatggacagggaggcctggcgtgctgcgattcatggggtggcaaagaatcggacacgaatgagcgactgaactgaactgaactgatccttaacataacaaagcaatttgaattccaaacctatggcattttcttctctttcacctcagcccctaattatcacttcatatcaacctaacaggaacttcaaattaatgtcattaatcaatcaccactatctaatatcactaagaatcctgaaattttatttcctacaggttttataatatacaattttatcttaaatccattcgcaagattaatggtaaagccaagacttctgttcttgaaatcccactgaaaatttctatacaataataaacattcagtgtatgataatataagaagccactccccagttgtcagatcctggaaaaggttcaccattctttcttctacagtagggtctacactgtgcctttctacactagggcttcttcccctttcttactgcaaacacaattcctctctgagcacatttccccactattcagttctaaatatagcacaaaataaactgaaaactttaagcatttctttaaccttctgtctttaaattcccagttgttccttttgggcacctctcacttcctcctgaccccatgtctgtggcaaatatatataaaggacgtatacatatgttccatgaatcacatctttgtggacctaacttctttaatagtaccctcaaaaaaaataacaggaatcataatcatgaccagagtgctgaataatttaggagtatttcattactgatttcatctattatttgaagatgagtagaaaaaagtttttaatgggagaaaaacgcacattaattcatgtctacacaca

SEQ ID NO: 56479 - DNA, 2378 bp, Bovine  19866880981346
  misc_feature (1)..(1): n is a, c, g, or t
ncctacacgcatcgcatctaggtgtcctttagcatattgtttaatctctttttctccccttgtagagaattcctaaaacagtcaactttctcctattcgtctttgtagcccagagtacagcatagcccatagtgggtggaaggagattagttaaggaatatttgaggttagaagaataaggctaaaattagtctagtcactaccacattaattagaagtctaaattaaatgtgaatataatttttatattttaattttaagataatttatatgttgtagtgatgtaggattaggatctactaacttgtttacagggatgtttgaaatgctttaaaaaaaaagggtaagcatggagccaatattataatacatgatatcattgaatctttaaataagtgagattaaagttctgtttaaaaaagcatgaatttccctccttgtcaaataacaagagactggatttctaaaagggaattgaatgcctggaacagttgaattaatttctccaggatgctctcttcacctaaaacagtggttaagacttcctttgatctattccataggatatttaaaataaagaacgttatacatatgaaaagctttgagctttttttagaaaggtcttctaattttcaattctatgctctttccacatctgtgacatttgagttatcattttaatttgtatttccttgagggcactggcccatgggtggtcttgacaggaaatctgttttctgcatggtttctccttggttttggtgaagttgctgagctgggggccatccccatactgctgggcgccatccccatactgctgggcatctgtctcagtgaaggaggacttttacttctcttggaggtgggggcggtgtgccagctgtctttcagtgaagaatgactttctctgttgaaccacttccccagatgctggcttgccctctgcctctctcagtgccatagtggcggccattgctggtgtctaagcatggcggctactcccaatggttctcatagactaatttccctagacaagagctgttcacctccttgaggaccggttcaccatcctgctcctccaggttgactgaggccttaatccttgccttcctgctactgccaggaggaggagttgggaactatgcaagagaactttgcttctgcagtctgtctgcctgttttccacttatttcagcagcttgttaacattgcctgagtcctgtctaatcaaaaaccaaaggaatttcaaaaggctctcatcctgcaggtcttgttgatattgttcttgttctttttctgttgatttccaccccttgatcctccaaactcagtgtattcctggaatccagagttatccccagtacttctgctgaggactggccattccttcccagaaagcactggatcactcagactgggtgttggtctatgcttgaattggaactagcagataacccacaaaattactggcacttcaatggctcttggaacttgtttccatatagaattgatgagaagtgctgatggcaggctatcaagagtttgtcctcaagcctccatctcttctccataaataaatattggcattaaaaaaatggaaaactcctgcttacatctcatttcttttcagtgtgtctggagagattgcctttgatagcatcccactgtcatgctgcatcactaactactttagaaactgtccacttgctccatatgtcccttaataatctaactgaaacctcactggtgtttgcaacaatgataactcaccaggaacttcacattcccataaacatgatccacttcttttctgcagttttttttccctttcttacactagcttgaacaagtcctacaagactctgtcacatgttctttattttactcaatataagcaaggctatttcaaattcttgttactttaaagaatatgtcagaaggaaatttttttatttttaattataatcatgaataaaaagcaagcttaaagattatcattggaggaatctctgctttcttaacaaaaggagttatggtcacatatacagagacggtacacatggatggaagatatgtttccttttacataggaaaactattttctaacttctcttgaccttctcccctggcagtgcttttagaaaaattagtgagatatggtctggaaaccacggtgtgctccttagagaggtactgtgcaaatttaagaaaacaatataaggagtccctatattgagtcaggaaattatttgaaggactgggaaacttaactttaacttatagtgattgaagtatttattgaaattttgaaagaagtgaagtccaattctaaatgagaatcatcactggtgtcagtagccttggcaagcatcatcaaa

SEQ ID NO: 56480 - DNA, 2785 bp, Bovine  19866881001938
  misc_feature (1)..(1): n is a, c, g, or t
nttttggaacgttggtctgaagagaagttgtggtggtggtttagtcgctcagttgtgtctgactctttgtgacaccatggactatagaatgccaggcttccctgttcttcaccatctcccagagcttgctcaagctcctgtccattgattcagtgatgccatccaaccatctcgttgtctgtcatccccttctcctgccttccatctttccaagcatcagggtcttttctaatgagttggctcttcacatcaggtggctaaagtattggagcttcagcttcagcatcaatcctttcaatgaatattcaaggttaatttccttgtagagaagttagggcaagccatgtgagttgatgggaagagagattagagaaagaagagcagccagaaatgtctgatgattactttagttcaggacttaagcaactacaaaaggatttgcaacaggagaagcattgataataagaaaaatgctcacttaacaaatgtttattgaacatgggataaagagtaaaaaataggaaaaaatggcttctatcaaaaatcttacattctagagaagttcaagaaacaggcttaatgactttttaacactcattactaaagggactgttttgaatatcaaatgcttatgatcatatgtttatatgtggtcacaggaagggatctgtaccttcacattagtgtaacgaagttgcttttcttatttgtgctattacactaaattcaacttatagacatgaaaccactgttgtgttcttgaatggaaaacatgaaagcaatttacctttgctaagtttatgtataatacagctactggttatctatattcttataaatgctcatagctttgggggtttaaaaatatatctagctcttagaatatgtgaaaattccaggtgtatctttgataactagtcattctaaagcagactttcttaatagaatataatggatatgacagttatatctcatagaataatatttcttggacttgtgtttctatgttcttactttctatcttactcaggcatattgtcagataaagctagagattagaaaaattatttaaatcatcttcataattaactacccttacttataagaaacaatttatttagaagttcatccagacattctgtcttcccctcttctttaatttttttttgaatgagtagaaattgtggtacattctctaaatttccatgaatcagacttaagaaaatataatttttagaactactaagcttctacattgttggtatttgtgatttcaaatataaaatgcatacatttgtgaaacacacccacatatatataatcacacacatatatatgtgctgtgcatatagctgaattcttattccacaatagagctgagtttgcaaacagtattttctgtaattaaaataaacacacacatgcacagacacacttatgaaccaatctgaaattagagcttcaaattgtaaaatgctataaaatccttaattgcagaggcattaatgggaacttctatggtataatgctaggaaactatccactgaataatgcctttccagagagagttgctgactacacacctgcttcaggaaatgaatgcagaaatcgtgcttcacctcatatcttcaaccttaaaactgctgagaatcctcactcttctcattttgatatatctttcatatgagtgacaagtatatacatgagataataaaatgtgttaaaactgtctgcttggcagtgtttttgctgatgtattaattcatttcatttcatgtgctatatcaccatcatgtctaaccagattttatgagagggctcactgaagtgaaaatcaagccaacgaatcgtttaatatgagctaatgaaaaccagatataaaaagctttagtaactgttttggagccttaattgtcaagtgaatgtaaattctgagcactactaagtaaaggaaaggactgtaatgaagaaattgggatcactttgtgataattggtttaattgaagagtcatgtagcaatgatgtccgggatgaagccacggaaataggaaggagtaaatattctctccaaagtaggaaatgccttttttgtttattttctaagaattgagagaaaattattgttctcatatcatggtcatttaaacaaattcaatttcttcagaaaaatttgtgagaatatacattttttgatatataaagcaacaaaatatttcaaaacttctgtagcatgtttatagtattgctataataaaatttgtgggttcccatgtgatcaactattagaaagtacagcgaggcactatgagtaaggtggctataaacacaactcatttgttattccaggatgttgaaaaaatattttattatattaagccaggcattatctataataattgattcaaagaagggcaaaaagtagatgataaaaccacggggtagaagagttttagggaatagaaattggtcagatgccaaagtatcatccaatagaaaatttactaaatacaaataaaaaattacaactttatgatgaacatatatgtagataagacccttaagtagatcatcaagtttagcatcattgctaataattgtgcttcttgatatggtacagtaaagaaatatgtaacatcacttcagtaatatttgtccggaaatatataagatcacttagataatgtttgtactgaatttaatcacaaggaagcaagcagaaaattccagaaagtagagcactctacaaacaacggtcagaatgctaaaacaaaacccacctcccgc

SEQ ID NO: 56481 - DNA, 866 bp, Bovine  19866881043827
  misc_feature (1)..(1): n is a, c, g, or t
nccagtactcttgcttggaaaatcccatggatagaggagcctggtaggctgaagtccatggggttgctaagagtcagacacgactgagtgacttccctttcacttttcactttcatgcattggaaaaagaaatggcaacccactccagtgttcttgcctggagaatcccagggatgggggagcctggtgggctgccgtctatgtggtcacacagagtcggatatgactgaagtgacttagcaacagcaacagcaattttcttcatatctgtattttcaaataaaatttatatttatcttgctcttttcatttgaagtctgttaggactcttttctccctattcttggtaaaatatgtatttgtgaagggataagagatatattacatattttattatttttatgcttgacttttacatattttatgagattttattaagttctattatttttatatttaattaatataacttttctcaatgtaattaactttcaaatgctacttgcttccatatttagctttacaaaaaagaattgaattccatggaattatacccttgctcatctctgtgattatgaattacagatgtaataagagctacacctattaattttataaagtttatttatatgtttccttaaacaagatatgattattgaattttattggagtaaatttactgcagtaagtttacattacattctttatttacattatatcttttgcaaacaattagtgggtgaatcatggcctaagaacacttctacaattaattatgcagcaataaaatcctcaatatgtattatcatttaaaattgtaatttgctagatgatacaaatgagatgtagcaatgagtaacataatt

SEQ ID NO: 56482 - DNA, 1511 bp, Bovine  19866881043896
  misc_feature (1)..(1): n is a, c, g, or t
ntcttggctcctttggcagtccttcaatgtcatcctaatctttgcagtgaaagtttcatgtagtggccaaattttcaattaaatacaattttactcaaatttaaatcacacacaccatttatcacagctgctcaatctgatgactaaataatttttatgttccactccagagctgcctcattttggtgataaattaagagatccttataaagtagcctatctacctgttactagctgttgtgaggtgtgcgtatgatcctcaggggctggtgttgagagtgagagaagaagcaagggaatggagggaaaccaatccactgcttaggcaggtcagcaaaagaataaatggcccattatctaattctcagattttcaggttaaaggattcaattttgtcagaatggctcaaattcaagatggagaaagacagtgattcaacaacaacaaaacaattataatacaaacagcaaggtatgcattttgtcacttattttcatttcaaaactagtacataaggtgggtaataacattacatgtatttgccaaaaataaacaaaaactaggttaaccaaatgcctaagaaactggtgagtaaaccagaatgcaaatctatgaatttaccatgagagctataactagcaaagtgaccctagagtattttctttgtactgaaaaatctacaagggaaataaaattaattagagcaaggagagttagttgaatgaacctaatagttaatgacatcaagctatgatagcttgaggcattgtgaaaagtactggggaaatgctgacaaattatccttctcagagtccattttcttcacactttgagtaactatgctatcttcaggaatgttaatgtcattgatccatatatttttctttcataataattctattacagttatgcagtcctgagcctacttcccaatcaccttgattgggtagacctttctcaaatctcctcaagataaactgagagaccatttcacccaatgagctacttcattggatgactaacctactatattatttattgattcttattaatatggtttggggggattaatacttccctatttttttaaaggcctctcgcttatacccatctacttattaaataagaaaccagaataaagtagtaagtattcaagaccttaatccaggatgaaaaataatttgcaattctattcaatctactgataaatatttgagggtttactttatacaaggcaatgtgttgagtggtgtttcacttactgcattctataaacattcttttctaatactagatgtgctgaacaatggaaactaggattacattaaaaaaagtaaaataaaaaatttgattaggacagcagagacctctagtaaactctgatttttttaataaactttaaattttagatggtttcatctttacagaaatgtttcagagatagtacagagagatcctatatgctcttcattcagatacccctattattaatatcttatactactacaaaa

SEQ ID NO: 56483 - DNA, 2244 bp, Bovine  19866881062278
  misc_feature (1)..(1): n is a, c, g, or t
ntcgcgaagagtcggacaggactgagtgactgaactgaactgaactgaactgacggctaactttcctttgctttttttgttaaaaccttaaatactttataaaatgttgccaatctcaagaatttacataattcagtaaactgaattgcatttatatgcaccatgttagtaaatttcctcaaatgaacatgattaacatttttcacacagccaagacagacccaccatttttaaagagactgtttctgaataattcgaaacatctctccacatttctgaaggaaatgtcaaatgagtttgctctggagttcatcgataattacagcatatgatcagataggtgtaatgagaaatctagggacacttttttgatattgacctattttaaaaatgatttccctctattctcatttaagaacttaaaagaaatcctccatccagaagctggcttccttggggatatttaaaaaggaggaaattacctagcttatatttagctttattcctgtagaagcaagtttttcctccctcagtctctcttttgtttttattctttcagatcaaaacttcaaagaaaaggactgatggatcagccattcatttattggagttgaatttttgcttgcctctagattttctactctgatgtttctttgatttccattctatctgcatcttttatgtctttagtttatgcgtgtgaagaaaattatagtgtaggctttgctcaaaaaattatatttcatcatattccaaaatcttagaaaatttaaaacacttttccaagtctgaaaatgactttagacagaagcctctagcacagaacttaataaatatgtccttattgtattctaaataattgaactttacagaagctaggcttcagaacagacaggaatcaatttcaccagagatatctcaaactaaacatcaaggtaatgcacagttccatgtatctcttgcctgacttagacaaatactcattaaaaaataacaaagtaaagacaggttgggcaggaggcaatgcagtagtaaccaaattctttggatttgttagtagatagacctgaccctgtttctgccacttctacctacaaaacttttgtcaagttaataataatatctttttttcttctgtaaaatgagaataataggcctatgttttgtatgtttatactgatattatatatgataatttgtatagtgtagcagtccttaactcataaaaattaacaaaatattagatgttatttttgttactagaagttgtttgctgaaactgtgtgtgaccttgttggccccccttcaggaccactgtaaagtcagtagctgctgccatggtcctcaaaaatgtccaccaggcaggcactagatcccaacacatgaattaaaaaggactgagaaaaaatgatattacttttatcatatcttcactgagccagtagatcacaaagtacccaacactgttattctccaaactatgattcaaagggcaatgtcatatcttatgtacatctatggtatacatgatatacatcattgattggttttagaaaaggcagaggaaccagagatcaaattgccaacatccaatggatcatcaaaaaagcaagagagttccagaaaaaacatctatttctgctttattgactatgccaaagcctttgactgtgtggatcacaataaattgtggaaaattctgaaaaagatgggaataccaaaccacctgtcctgcttcttgagaaacctatatgcaggtcaggaagcaacagtcagaattggacatggaacaacaaactggttccaaataggaaaaggagaatgtcaaggctgtatactgtcaccctgcttatttatattatatgcagagtacatcatgagaaacgctgggctggaagaagcacaagctggaatcaagattgccgggagaaatatcaataacctcagatatgcagatgataccacgattatggcagaaagcgaagaggaataaaaagcctcttgatgatagtgaaagagaagagtgaaaaagttggcttaaagctcaacattcagaaaactaagatcatggcaactggtcccatcacttcatggcaaatagatgaggaaacagtggaaacagtgtcagactttatttttttgggctcccaaatcactgcagatggtgattgtagccatgaaattaaaagatgcttatccttggaaggaaagttatgaccaacctagatagcatattaaaaagca

SEQ ID NO: 56484 - DNA, 1701 bp, Bovine  19866881105751
  misc_feature (1)..(1): n is a, c, g, or t
ngggtcgcaaagagtcggacacgactgagcaacttcttttcactttccctttctgcattggagaaggaaatggcaacccactccagtgttcttgcctggagaatcccatggacggagaagcctggtgggctgccgtctatggggtcccacagagtcggacacgactgaagtgacttagtagtagtatgacacacaggacacaattagtcagcattcagtaaaaatgtacagccaaggtctgacaagaggctaaatcaagtttgctttagtctcaaggaatttagataagaagacaaaatatctgcctaagaaacagcattaatttcagtgttttactagttaaatgcaaagtacatcaagataggttcacaacatacttgtcagaggtgcctgattcaagcagtgattagagaactagacacatcaaggtgagaaaagggagctttgttctgaatgactcactaaaatctgaatccagggcctgagctagtaaagttccaagttattacttttaattattttcaatcaagcttgggagggcaccaagcaaaataagtttaagaagtacctctgcctctaagaacactatttttcactatcagaaactgagcacatgatatctagtcacctccctgcaggacaagccagctgtggtttgggacacattctctaatgtgtaaactttgttcaaaaatgctggtaaatatcttgtaaaaggctagctacacaggcagtgctattggggctgaaattctccctaaaattcaaagatgattcattctcattgtctacagactatcaataacatatttgtaaaaacaacaacaacaataaaaactttaaaataacatgaaaatacaaagaagtaatagtgcctgagtgatacttattttttttaataagttaagagttttgcctctcttttttcctgattacaaactcaggaagagagggagaaaaaggagtaaaaagatacctgcaagttgttttgttcaaaaatgagagaatataacaaaaatcagccaatataactattaagagcagaaataatagatctaacaagttcctatgtatccagaacaccaataaaatgaagatacttgttttcacaagtgcctccaaaataatgcatgaaaaaatgaaacatccttttatactttaaaacgtatgacaaatggtgattaaattcaccctgagagcatgtcagtttgaaaagaggattataaatgcatatgccacagggtgctctcttttgcaaggtaggtgtgtgggtgggttgtgggggggaagactatccatttaaatactgtgttaactctggcacatttagaatgagaacaaaactagatgaaaattggaataacattggccttctggaaggttagggaggctgtccctgcagcaggttggcaatttgtcacatcagctctttcatgaactatcaacctcattaccgtggttcactgcacagttggcccttgggattccaatactaatagcatgtagagggtgatgagacttgtggtctcaactacttcattattgattcacttaaaaacataccacctacatattcgaataaaataggtaatacattaggagagggagaaacatgaaaaaaaatccaaaatcaatggaagtaaggggaacaaaaaccaagaaagggatgtaggcagtaatagcaccatgaaagcaagtctt

SEQ ID NO: 56485 - DNA, 1357 bp, Bovine  19866881116154
  misc_feature (1)..(1): n is a, c, g, or t
naaaatgagttgaccagtaaattaataatatttgtaaaatgcccatcacatatcagctaaacaaaaaatagtaggtaaaaggaaaaagaaataagctctgaaaatagtagaacacagatgggaggaggctgcatcttctggggctttgctttgtagacataatacaaaactcttcattctgagaactgggcatccagactctttgtgagtactggaactattacattataaaagagaagaggaaaagaatagagtctcattttgtgacacagctagaactcatagtaattttgtgacttttgaattgtaaagtgagtaagaatgttatttacttcaagaaacattcccactgtaccatggttgaatgaatctagaattcttaataaaagtactgtgctgtgagaagtatctcttgatgctgctgactgtacatttcctgtgttactttttattctttaacttcacatttcctgtctcccactttatacataatgaataaaaatttttctatattttatattattgtgcacattatcatttcttattaacatttttattttcacaaaaaaagaacaaaatgccattttccatgaagaaggggaagattaagaatttttaagccttcaaaatctttatggctattagaattattactctaccctataaaaaaaaaaaaggcattttaagggaaagagtagtttacccttctcctgattacacagtgaaaacagttacctaaagaaatatgttaatataattagactgatgactttgagctgatgcagttttcacagtattttttcaaaaatctgtattaccaaccgccccccccccaccgccacccccacgccttgactcagatttgagactctaatggagtctagtctatagagtctagtctaatagactagaaatgccacttttaaaaggtatgcagtgtttgaaaagaggtttagtatatcagaaataggaagaaggacattgatttgataattagtaaaaatatacactaaaatgcaagttattttcaataaagaaatgcttgttaacccatattgaaatatggggcttccctgatgatttagtggtaaaaatttcacaagccaatggagaattcaatctgtcaaaatttaagagagattccaggttaagatactataactcttctatatgtctagaatcttaggaagtaaggagaggactagaaatgtaaattatacaggatttcacagatcaagaaaaataattttcattgctattaggaaaaggaaaacactgctgtttttgagtgacatcaaaaaagcaatgaaggtttagaaatcacggaagacaattctacaacttaaaggcctagaga

SEQ ID NO: 56486 - DNA, 2100 bp, Bovine  19866881140818
  misc_feature (1)..(1): n is a, c, g, or t
naaagttagaaaaagaatggttaatggaagttagagagatttaagtcaatgtagggaagaaattttaagcacttatttcatggatgagccttatcaccagaggcaagggaacccactgtcagtgtttctatgggcactgggactaagggttttgaaagattactggctaaatatgagtttttagagtgagaaagcacctgaaatggtggtatgcactgtagcttccctagagaatcagtttaatttaagtgaagttcattcttcagtacatctttgaactgtattatctttaagaactaagtgaaacaccaagtagaacatagccagaccctgttctggtgacagtgatttaaacaaacaaaaagaggcaataaggatgtggatatgacacaaaatctctgatgtcatgtgtaagtgctaccttgattccctggctttagggataaaaagaaaactaatgtatgaaaattaagaagagatataatttgattcaagataaactggatttatcgggaaattggaacaattaggtccagttcacttaactatttttatcagtactacagaaataagctttcatttctaaaacttctatgagatcattatcaaaatgtctatacatcatctccaagtctcagggcagcaggacaaaacatatgacataattaaatggcttgtgcttcttggaaaaataagcatttatagcgtgtttaataaacagcttttaaagctctttgaaaagatccagcagaatgcctatcctgcacaaagtaaatactcccatgaagttgcacatagattagaactagatgagtgcttgtgatagctcaaactcctgttccaggaattcaagaggtgttaagtctattgtctcacttatttctttaaatagccctatgaggaagagtctgaaattttctcactggtgagaaacggaggtcaaggaactgtccgaggtaagttaagtgctagacacaagaattgaactcagctctgtctgatgaccccaaccacatgcttgctgctgctgctgctgctaagtcgcgtcagtcatgtccgactctgtgcgaccccacagacggcagcccaacaggctcctccgtccctgggattctccaggcaagaatactggagtgggttgccatttccttctccaatgcatgaaagtgaaaagtgaaagtgaagtcactcagtcgtgtccaactcttagcaaccccatggacgtagcctaccaggctcctccatccatgggattctccaggcaagaatactggagtgggttgccatttccttctccaatgcatgaaagtgaaaagtgaaagtgaagtcactcagtcatgtccaactcttagcaaccccatggactgtagcctaccaggctcctccatccatgggattctccaggcgagagtactggagtggggtgccattacccactcttaagctctgggctgatgaatctccaggctccacttgctccagaatattttatttttatatatttcagaatggggccccttaggacctttgtagtctaagaaactacagctctaatggcacacagaaaaatgaattgtatatgaaaacgattttgccaggtggagatttaatacatctttttgcataaattagcactgtaagtactgaatgtgcattaagttcaatcatttgttttaaatgtgcctccctctactacagagctctttgacctatattttcattattaataactccagtgtttgacatcatgcacttgttgcatcatgattttcacatttagtgagcaggaaaaatcatcctcatgatgaccattttgtaattctccttgaaaatgtttccttgggatgtagttcagattgattaaaactaatttagaggaaaaatgaggtaaacatcttcagttcctaagctaattagcatcatataaagtctgtgtaattgacataacatttcatagttgtatttcatcattcaaacgctgattattcatgaaggaatgccaaagcaggaaggaaatgggggtaggcacaaagggaatgagtaggtgaaggagcacacagggcctggagtgtatgtctctggcattatgccaaatccaaa

SEQ ID NO: 56487 - DNA, 982 bp, Bovine  19866881216915
  misc_feature (1)..(1): n is a, c, g, or t
natcactgacttgatggacatgagtctgggtgaactctgggagttggtgatggacagggaggcctggtgtgctgtgattcatggcgtcgcaaagagtcggacatgactgagcgactgaactgaactgaaagaggttgaagtactttcctaagtcctagagctaaagcctagcccaacctggttaagagggtaggcagtctgacctagaatcttcttaaacgcctctgagaacttagaatggaatgtcatgtagatgataataggtcatggcagttttttggaatttttaagactgatatggtattttgagaatgaagaacattcagacagaatccctctaatgggacagtggtgcaaagagttccagaacagtgattaaattagtctgactgaatagggtcttaataaaggagaatcaaatttacacaaagattgggaaaaaaaactcatcaatgttatcctacagactttattttttaccttgaaaataatggggaacaatagaggaaatggaacacaatgcaacagtaaccattcagagcagaccctccaggtttctttcagcaatgatgttagaaaaggagattaagatattccaacctaaggaattatcaaggaaaaaagaccccaagaaatcagaagcctcaaaaattaaggatgagaaaaaatgtgtgatatacagaaacaagctgctctggacgtggtgaatgctttctccttaagcccattgtagccccaaactgggcagtcagcaacaaagccactggttcaaaagttctgatgcaatttccatctacagaattctctcaaactgagctggaaatattttttatcagaatcctcataagatttcaggtagcctccagctagaaacacttttcataccgtttgaaaacttccatcccttttatgcctaaaatatggctttgccttatcttaaaacacacgtacatgcaagcttgcatacacactccacatgaca

SEQ ID NO: 56488 - DNA, 1843 bp, Bovine  19866881327409
  misc_feature (1)..(1): n is a, c, g, or t
ncagtttacatggacattgttattgcagcatttgtccctttcctgacaaattgcattatgcctctgccctctgaaccattagcaggtccagagggaatcaggtggtgaggaggaggggccactctcacacttgtcaaccccaaggcagagccaggctgaaccgatctccctttgattctttacgctggtgactggagtgggggctgtttgtgtgggacacatatttgaatgctgtcatttgcctctgagcagaaggccatcatgtcttcagtgttcagagtgaatgcagtacccccagatttgttcaataattgccctgatttctgcctggggcttgactttcttctgtctaaatgttgcgtcccctaacacgctcccccattactaacaaagtgcctctttcatttgctctgggcggtagatgcatcagctgcctgggcttcagttctgaggctgattcagcgtcacagacttccctttgtgagcatcttgcctctcttccctcctctctcccctccttcaggaactgaaaaaaataataggggatttcagttaacgctcaaacatctgttgacttctaaaggagtggagtttgtaatgaatgcacaaaagtaagagaagacaggtagccccttgaatgaaatctgttcctcttctcttttttgttttaagctgtgacctactgtgggaggccacgtatttgggagtggtacccaggacagtataacccagtggattacgatggtttttatgcacttgcagatgattgttgagaggtgcgttagtacctcttccagtgtggtctatggtatgatggtcccaacttctctgagaatctgtttgtcatctgcaaagtagaggcaataatacccatcttacagaccaggaacaaatacaacatgaatgtaaggtactaatatgatgtgctaagcaccccaaaattatcaacaggcaccatttccattgccatggttgtttttctacttatgctatgaccatgcactctctatgaggatagagttaggagtcagctgggagaactgggggcagggggaaacttctctatgaagtccacagagcttggtgaagcccatcctttgccccaggtcagttctggttgcacacaacaacctctgcccttgtgggccacaccctctagtggcaggtgagggatagatcatagtgggctccagaacaagtcagtaggtaaagggaatgcttgttaatgtgatgagtgctatgaagagtaaagggggctgaactagtgcatggagtgggtgcttgagttagtttggctggtcaaggagagcctctctgagagcatggtgtaaagctccccaacttgatacatatagaatccctttcaacatcaaaaaacttgacaacctccacaaaataagtagtggtactttcaattttcatcagtttgagagtacacagaaataaaaggctattgggaattcagttaaaaaaaaaaaaaaacccttatacacaaatgtgtattttatttattagtgcaagatccatgtatatttgaaaagtacatatatgtataggaaatgttattggttcttctgaagataatgccaggtttgcatttggacctgaggatttgaacactaaaattattctgagtcacttaggttacttgaggccagtatgttggaatcactgacagaatgaaaaaaagatttgggtggagaagataggagaactgagccctatttcctgctttttcaaaaactatgatgcatgtgtggtaagtcacttcagttgtgtccgactctttgcaaccctatggactgtagccctccaggctcctctgtccatgagattctccagg

SEQ ID NO: 56489 - DNA, 1823 bp, Bovine  19866881374728
  misc_feature (1)..(1): n is a, c, g, or t
nattcctgcccttacccgtaattttatttggccaaatattaaataaccaataaagttatttacttaaaattccagagagcaaatataaattttaataaagggcttgatctatttctccatcagtatttctcaatggggacaactatttgcattttgagagggacaatatttcaatgtgcaaaactgacctcacattgtggatcatttagcatcctggtccttgagcaccaaagacagcagtgcccaatgcatcattcactagtacaataaaaaatgtttctacatgttcttaaatattttctaagtggtgacatctcccccaccagcaccccacctgctacaggtgatgtataaaaattctcagagtataagactccactatgcattctgaaatatgagtacaaattgaattactggagaaaagtattttccaagcagaggaaacatgttggatgcccctgaggcccagagaagcacgggcataccaaagaactcaaagaacacctctgagcttggagttgagacagtgtgggaagtgctgcaaagaaggctggtgatacatgcagggacccatgactttactaggtcttcattagtgtaaaatacctgcagtggtttaataagggaatggcatgttgagatttttgttttaaagtcattttattatataattttcatttacaataagttcattttaaggtaatactcactgtttgcactaacttgaacacctttctaattcacaggacttttttcttttgtgtatatatatgactttttgtttatttgttgaagggattttcttttgcacaaagaataagagcattttatataaaatgaaaacaaagcatcttttaattacccatgccttcattcctcattgattttcacaccatgttctcgcacatgagatgtaaataaatccaattgttccataacacatactgcataagaacctcgttctcatactgcttagtttttaaagcttcaggagagaaagcttgatagatcggctgatgaatgtgttcagttaattaacaaacagagtgaagggaggtttccttttgttaaggacatctcttccttattgggagcttgaaatcggggtcagtggctttcctccggtgtccctgcttacttcctgcttaatgactttatttgatctagcctaacctcctctccctctcctggagaaggaaatggcaacccactccagtattcttgcctggagaatccccatgggcaggaggagcctggtaggctacagtccgtggggtcgcaaagtagtcagacacgactgagcgacttcacttcttcacttcttcaaagaaataaagacgtgtcttaatggtgcatttctacaatcccaccctacagacaggtcctttaaagtgctgacaacaagggaaaaaagaaatcatagaagacatgctgctgctgctgctaagtcacttcagtcgtgtctgactctgtgtgaccccatagacgacagcccaccaggctccaccgtccctgggattctccaggcaagaacaccggagtggattgccatttccttctccaatgcatgaaagtgaaaaatgataggtgaagtccgctcagtcgtgtctgactcttagtgaccccatggactgcagcccaccaggctcctgcatccatgggattttccaggcaagaatgctggagtagattgccattgccttttccatagaagacataattactcccaaaactatgatgaaatagactgaacattttacatttcttcatttaatggtgaaaaatccattttatttttaagacaagagaaggtgattaaccaa

SEQ ID NO: 56490 - DNA, 1123 bp, Bovine  19866881387103
  misc_feature (1)..(1): n is a, c, g, or t
natgcctcttcgcacaagacttagcagatgaagttaaaacagaagcccccatgtgcaatgagatatttcagacacataactggcaaggtatctaaatttggaatatatgaaatattactacaaataaataataaaagtaaaacaaaaaatgagtttagaatatgaacaagaaatgcactgaagagaaaatccaaattgccgataaacacagaaaaataagccccgtattactagaagcaaggaataatgtatttatataaagcaacaaagaaataatatgcatattcattaaatggtctaagttgtaaacttggacaaaacttaacaaaaccaagttttgctagagctactaaaagtgagaatctcataattgctttctgttagcctgcaatattacatagtgacaagtgagtataaataaacacaattaaaataaatattttaagaaatagtatttgatagtaactacatttgttacaatcatgtattcaatcataaaagactgagtacattctagagtccatagtagattgtcctaaatctaagatgattggggtttaacagtgagaaaatgagtatagaggaagctttaaaatgtagatcacacaacaggcactcaacgaagagtagatttaatactgtttcttgaggttttgagctagtagttacaagggttatatgccattgtacacaagtcagtttatgatcattcataaaaaatacagtaagtgtgtaaattctagagatagactgatttatatttccaatcctgtcctgtaggatgatttcttttaagaaatggagttcttgcagcttagaatataatttccaaagacagctcgaaatgtggattcacaatgtgttatatctcaaataacttttatagaaatgaaatgatgtgctctggggaaaagtatgttagccaactcaaaaagcatcttaagtgatccagatgatattaagggcacaaatattaaataagaactgtgaaatgatagagtgaaataaaataacaatactatgataatgtattacttaatataatgttatagtgtatgcgtgcatgcatggtttagtcgctcagtcatgtccgactctttgtgacctcatggacttcagcccg

SEQ ID NO: 56491 - DNA, 818 bp, Bovine  19866881401163
  misc_feature (1)..(1): n is a, c, g, or t
natattccactgtatgaatatatgaccttttaattatccaatctcctgttgataaatgtttgtgctatttccatatttttgtattatacacagtgatatcaggtcatttaagtcacagtctatacacaaaagtgttcttgtggattggtcagtgtcatctatcagtgttctttcaattaatgtgaaactgtaagttactgaatcatagttctctttgctctttaaatccttctgtatcgatcatctatttagcaacctttctctgtataaaacagtatttaagaaaaacttgaccaccactttgcaaagaattatggattttcaatttgtttcttattaaaagcagttttatttcaatgaaaatgactaatgaagacacagttatattgctattattgagttaaccagacacaaaatatactttctatgtattgaataactttaaccttcatgaaggaccatattttaatcaacaatagagatattcaaaggctcctaaatgtttgtctctgcatgactagagcttcaccaaaggatcacagtgtctaatgaataaatccattaagaacttgtcaataacatagagaaatgttttatttgctttactaacagcttatcggaaaaaaatatctttcaatatctttgactaagctaatgggctagcatctgatatataaaacaagttatataatcattacaacagataattctgagtttagagtcatatatttaaacccattttggactttgctgttagtcatatcatttgtatacatgattattctgatggctaatcgtttaattaggaaatagataac

SEQ ID NO: 56492 - DNA, 1812 bp, Bovine  19866881411616
  misc_feature (1)..(1): n is a, c, g, or t
ncactgagtttgaactagagttaagtccttaataacttgggttccccatttgaaagaaaaaaattaaatatgaaagaaatactaaaatacattaagcatgggatatatttcattttcagtcattgacattctctcaaaatactcatgtaacattttgtattacatcttttcagtttcttcagaaaaataaagtggtgaaaagagaggcaattatgttaaaacaaagcaagagtgtttaggggagagttctacattcgttatttaagaaactatatttttatagccatatttacatctagtagttttacatcttccaaactcacaaatttgttagctgcagctctattatccaacatgaaaagaccctcacacattcttgaaaagtgtgattatcatgatatctaaacatcatcgttctagacattacagtttatacaagatttgttataactcataaactcatagatttttttctttctccagaaggaaagtatgttaaaatacatgaaatttaaaatattttattactttattagtgtttcttccttaagtaaataatgtttttcttatctatgtaccctatcgacatatataataaaacagctgctctgtattgagtacatatgataagcactggctagatgggcattttgtatcatttcatcaaattccctaaaaaaatctattaggaaacattgtattttctcatttaagagataagaaaaccaaagctcagagagactaaactgcccaatgttatgtaactaacatagtaatataagaatttcaaatttagtatgtcagatgcaaattctttggaggaaaaaaaaaaaaaaaagactctctttgactaaaaagaatactgactgattgtccagaacaaaatctgacctaaaagggcctgataaacggataaactgacattgtttaatagactaaatctaaacatctatagcacaggggggcttccctgatggctcagtagtcaagaatccacctgcaatgcaggagacatgggtttgaccctagggtcgtgaagaccccctgtagaaggaaatggcaacccactccagtgtcttgcctaggagatcccatggacagaggagcctggtgggctatagtccatgggtttgcaaaagagctggacacgactcagggactaaaacaccaacaacacaggacaaggagtgaagatctttaatttagctatataggatgaaatatcctgatttagtcaccaatgagtttatgatactatgaattcatttctttacttattctacatactaaattgttcctttcctctcatttctgtgaaattttaatgtaatgtttactagttatgagcatgggccatggagcaagatttccaggcttgaatgccaattttgctagtttttaggttttgacttcaggcaaattagttcacctctctggggctcaatctccacattcatgtaaaacgaaataacatcacctatcttgtagtgttgttttaaggttaatttagtttttatagttaatgtgcttagaatattgtcatggaattagaaagaataaaaaaaaatctgttttttcctatccaaaataacagaatcctattttggattgtatataacaagtgtgggagaaggaaaggatggagagtgaaaaggaaagaaagcaacacaaaatatacagaaagcttcagcagaaggagaataattcagtgagaccacaaaggcatagtctcatttattggaagtttttatttcaaaatgtcctgtcccccagcagtggctctctaccaggagtctaatctccattcagttt

SEQ ID NO: 56493 - DNA, 1789 bp, Bovine  19866881435219
  misc_feature (1)..(1): n is a, c, g, or t
nctacaatgcagacgagtatggtcaaaagattgagtgttgaccattgtaaaataagctgatgtaatttgcaccactttctaggtctggcccatagtaaccttcttaacatttttgactctcttgtcatccacttactgcagatcaccaccatgtcctagaacatgcttgggacaatatatgaaatcagtgtgaatcttggaatagctgttctcacagattagaggcattcactttgaaatttaaatgtgcaagaaataaatttctattttgtgaaccacttagattttagagtttatgtgtttttcagctaacaaacaaaattattacaactcagataatataagttactcatcactctgggggttacttaaacctaagaacattatcaaggcatagataatcctaaataaaggccatctttcctctccacaagtttctataatgtgtaataatttgtcaagcaatatgaagtttctaagatttttgccttatttttgcaagctaacaagttagactgccaaaacttcatagatgctggcagaagacatagaattcctgggtgagagtaaaggaccttttaactcattcacagcaaggagcatcacactggatcctcttgtcttcaagtctcatgaggatgttgccaaaatagagccagatgaatcctgcaaatataatgcttttgtgccaaaactgaggaaccctgagcttaagacgctctgatcatctaaaaggggctgctagcaaactgcccaactttgccccagagggagacattgtctttattctgctcatgatataaatcttcccttgtcccagaaggtgatgttatcttagttccaaaaccgtttgttatacaaactacaaacatgcttaaaaggattgtctgggacaaaacctgatagaagatgtacaaaaatgccgtggagaattctctttctatacgttttagattccgggttgtataaccagagagtaagtcatagaaagatgcaataagagagcaattaggaaaatatgaaagccagtgattctgttccttcattttaaggatgaagaaaagcacgtgcagaggaaaactgactcggtcaaggtcacatggagaatcagtgagagccgtgagtctatttctcttatcttattccagattacacatgcatatgtatggctggtgttaattcatatacccaccaggtctacattttgttttaaaagtagttctctgggagcaatgcttacaactgtattgggaatcagacaatctgtgatctcattacagatgtgacagtaataattttttgaagtcattttgatctggccaccttcagggacaattaaccaacttttcttttagagtacattgttcatatctcttattttaaattgatatctttggttacgaatttgttaaagtcaagaactgtttctaaaaataactcagtaagttgaaaagtacatacgaaaaaaaaaataaaattgatgactgctcctatgtgattactgtattccaactctttatattctgttttccaatgtctgggccgtgaaatatgccattataagattttatttccatttgtgttctgttaccttgaatcgtaggctcaagctcccagagataatgactagctgctaggaagtctacctgatctttttcctatcaccttaatgatacaattggtataactgaccacaatgctatcattatattcctatagttgatttctactcctttgagtaatgagattgctaaattagaaaaacaagaaagaaagatttttcataaat

SEQ ID NO: 56494 - DNA, 1670 bp, Bovine  19866881448693
  misc_feature (1)..(1): n is a, c, g, or t
ntgtgaaattatttgccttttgatgtgtgttagtccttaatagtgtccaactttttgtgactcccatggatagtagcccaccaggctcccctgtccatggaattctccaagcaagaatattggagtggtttgtcatttctttctccaggggacctacatgacccagggactaaacccaggtctctggcattgcaggcaaattctctaccatctgagctaccagagacaacagtccatatttgaacatggactgtggactttgttaatattgctgctgctgctgctgagtcacatcagtcgtgtccgactctgtgcgaccccacagtcggcagcccactaggatgccccatccctgggaatattaagtagtaattattatactttagtgtgataacggtattgctattttttaaagattttatcttttagatacttactgaatagttatagataaaataatatgctggctgtgatttgcttcaagttaaaatgtagaaatgcatgtggctacagattaaacaaaactgaccttgagttgatatttgttgagtctggcttaacaggcatatgactggggcttttcataataaaaatttttaattaaaatgtaaatctatatgtttcacatattttcataaggccacttaaaatataacttagtattgatagttatgtcatcacatcatatacagtcccacattagtatgtattttctctctggcaatgcctatgattaaagtatactcaacttgatatgtttttccccctggcattttagataccaacaaccttacagatgagcacagggctttatgcccagattttaaaacataaggctagagctaacaataaaagtaatgactaagcactgtctattatttaccttcacttagttgctcaaagagatttgaattcaacaattaactaaatcatacttggctgcatatagtcacttaattttatagcctattgagtttgataatcataagagagcatgaattgcagagaggtaaggataaagtggttgggttagtgcctcattatccttgcatctccagttttttgtatactgtccagcacacagaaaatgatgaataaattttaatttatcactgaaggaaggaaaaaagaaagagatttcagggaaagacatagagaaaaagaggaaaggacagtagaaagaagctgcaccatttatctattgcaccataatgctatataaaagaaccacaaaacctcagtggcatataacagtaagttttcaaatgcccaagggactgggctgctttctagttgcattgtggaactttgctgcactcactcttactggcattgggcttacctaaggcagcctcaggtggaccaactgggataaattaactctactgcaagtctattacacttcaacacactctagaccaggcctggtgctggcaacaatgcaagaggttaagtccattctttgaagcacttttccagcttctacttggtcatgtttgctattacatgtttctggcccaaacaaagaccatggctaatcccagaaccctgaaaagctatcaatagattaaaaagatcatggatgcatgatgtagggaagaatctaggccattttttggatctacagcaaataaataaagatattactacacgacaagtgcaactggact

SEQ ID NO: 56495 - DNA, 884 bp, Bovine  19866881582623
  misc_feature (1)..(1): n is a, c, g, or t
ntttgatcaggtggggaagatcccctggaggaggaaatggcaacccattccagtattcttgcccggagaatcccctggactgaggagccacaggctacagtccatggagttgccaagagtcggacataactgaattacctagattgtgtgtatctctgcctgccctccccttagtgttgatgaacatctatcatgatagatattacattcattaaaaagcccaaaagataatctacattttttttttcatttttatgggagatgtgggttcacaccttaacaaaaattttcacttggagggctgctaaccccagtggtccagaatatgcctcaaaatgcctatgagcttcctgaaatttaatgcatttatttagggggactgtttatagacttcatcaaattcttataaggacctgtgatttctaaacacctaaaactccagaaaaaccaataaatattcatgaatgataaaaatgacaaactagtaagaaacatgttcatatattcatttgaaatatagcactgttatttttaagaaacttgagtgggtgagacctgttgaaatatatctactactttaaattactatgggagaaaggtcaagtcagtgttcactaaaagcctgctgctccattgggtggtactggagtgtgtggtaagaacacagaagtgtgagggctgaattctcctttgactcagacccttccttctccaactttggtacaagtttcttagtagttctttcctcagttgaaaaaaaaaattggatgatagtataaacctatctgaaagtaaaatgctagtcactcagttgtgtccaactctttgcgaccccatgggctgtagcccaccacactcctctgtccttggaatgctccagcaag

SEQ ID NO: 56496 - DNA, 952 bp, Bovine  19866881894060
  misc_feature (1)..(1): n is a, c, g, or t
ncaggaaaacaagcaacattctggtttgataaatattttaaggaggtgatagagaaaacccatttctagcaagaccaaataacccttatggtctacttgcttagctaagcagaaattactaattattctttttaaattgtaaaagctgccttgattttttaaaaaagaaaaaagtatgaaatatttcatctcccagcaagcatagattaatggtgctgaaaaagttcttgctatgtatggtgaatgtaagtaaacacttaaatttttttatccttgtcaaagaaagatataaagatggaaacaattatccaagcaaaatgaagtcaacttgggaaatttagatatagttttcatacaacttctcaaatttaaacataggaaaaatggctgaaacttaaaactctatttctgaaggccaagaatgagagagggacacagtaagccagaggtgaagaggctggaattaaaagcagaaaagggggatttttccttgagagtgttgattttggtttgaacttgaattgataaaaataatataaatatattatgttataaacataagtaagtaaaagcctcaagcatcactattaaatctaaacaaaatctagcccagcagataatggttattacagtcagagcatattttgtatagtttctgtttatttccttaataaggacacaacctatttacaaatctattcaaaatttacagcaattaaaagcattggtgtaaattaaaatacctgctgaaggaatatcaaacaaaactcattaagaagatggaaatggaaaatatttggtagcttccattttatggctttgctgtaatagtgtatcacagatgttatttaaagaagaatattttccattctaaaatattttaattaatccacagaagtgtaagttaaattccagtataaaggagtaagaggtgctcatttcacattttcat

SEQ ID NO: 56497 - DNA, 2504 bp, Bovine  19866880368190
  misc_feature (1)..(1): n is a, c, g, or t
natgtaactctgctctaaacttatcaggtattgtgatgggattagaaagaagataggaaagagcagagtcacttttcattgccaagacttacagactatgtttaatccactcattctgcctggtaaatatatgcagaagaatataaaacaatttgattggccaagctattagtgggtaggtatattctttaagaatcaggtacctggttaccctacagctttatattttgggtgtaagtcttctttgcttttcctaaaccatttattttccaatatgaaaaaaaaaaaaactaagtacactctatcctttgctaaatcttaatatgtgggacactttgtttcctgacctttgctaggctgattccttcttgctgtttggatgatagattaaatattatccagattcacttttccagtcaagcaccagcacattcaacttccctttatatcacttttcatcatttatttcctttatttttggtttattccccatcccctagaatgcagaaacagaaatgttgtctgctcagatagtcagtatgttctggcacatggtgagtgtctggcgaccactggatggagaatgagtgaatgaacgaacacttcaggtcacctctcatcccctagaagggtagccagatgctttgttggtgaaaaaggcaaagcagtttcgtgttgtagggcaaaggccacgcgaaaccaggaaatgatattttaaactgaataaagagtgaaggctaaggagccaaggagctttcttcctatggaaaagcacatcctaacagcctccttggaaggaaagttatgaccaacctagacagcatattaaaaagcagagacattactttgccaacaaaggtctgtctagtcaaggctatggtttttgcagtgtcatgtatggatgtgagagttggactgtgaagaaagctgagcgccgaagaatggatgcttttgaactgtggtgctggagaagactcttgtgagtcccttggactgcaaggagatccaaccagtccattctaaaggagatcagccctgggtgttcattggaaggactgatgctgaagctgaaactccaatactttggccacctcatgcgaagagttgactcattggaaaagaccctgatgctgggagggattgggggcaggaggagaaggggacgacagaggatgagatggctggatggcatcaccgactcgatggacatgagtttaggtaaactctgggagttggtgatggacagggaggcctggcatgctgcgattcatgggattgcaaagagttggacatgactgagcaactgaactgaactgaacagcctccaatgtcttcccataccttctcttcctcttggagttgggagactactcttgcaaacagaggagagttgatgtaaataagaggtatgccatggtctccagaagtacttctgggaagacacaccatgttcaaatctgtcgatgagcactgagtgctggagaactgaaataaagacagcaaatgccaaaatgtgggactccaatgttcttcccagactagactcatccaaataaaacctttacacaaatgtttacccatcatctactgcataatcaaagtttttcttttctttttaaatctgaaactgctcatgagaaagttagaggaaaattgacagtaatggaaacatgttgctgctgctgctgttgctgctgctaagtcacttcagtcgtgtccaactctgtgcaaccccagagatggcagcccaccaggctccgccatccctgggattctccaggcaagaacactgggggtgggttgccattttcttctccaatgcatgaaagtgaaaagtgaaagtgaagtcacccagttgtgtccggctctttgcgaccccgtgggactgaagcccaccaggctcctccatccatgggattttccaggcaagagtactggagcgggttgccattgccttctctggaaacatgttaacagtatagtaatatctaagaagatataattttattcaataatacatatgcatcttaatcttggtatttttcagatgaactgtttcccctgctaagtttttcttttctttctaagacattataaaggaacacttcactcagcctgttcataccctgttaggttaatgtatttcctttgaaagcttgtctttggcagtctagccctcgcttttacccaacatcacaacaagaaacttagtgtctgcagtaggtcgatgtcttccccgaaccaaggctgaacaggtgataatgaccttgaccaagggtgcagcaaaggtgaccgaggtagaggcaatttcacttggtgtccctgacaactgaaccgtttttttttttttttcctttttaagccaagggtcttgaggagtgtctacctgttctgaggctgtctttctttttgcacaagcgggctcatgtcacaaggaccacctaatcactgtgcctgcacagtcattcttgcacagctcccctcgagctggacacacagccaag

SEQ ID NO: 56498 - DNA, 1329 bp, Bovine  19866880416777
  misc_feature (1)..(1): n is a, c, g, or t
nggggtgggactcacatcctccaacttcagaacgtttctgtccgaaaatcattttgaaaacaggacgatcagactttttaatcatggagggacattatatctgtgaaatgaagtgttgaaacaagtgtgaacttgggacagaaacttgggacgctgtttctcttgaggaaacagcgttctctccttggtctcaccactaaaaagacacctgtcttcattaatcgcattcatcggctcaaagcaaccctttgtttcccagtatcagaggaagaaggatgggaggggataccctgactgtgatagttaatgttctgcgacggcagactggtgtgagtgcgcagtcccactgcaggaagggcaaattccagactgagcggtgtgcgtggatttatggagcaatttagggagccaccctccagagaactgctgccgccgagaagacacttaaagcagggccccgctcggccggaacacaggggctgagcgggcgaatcttgggttgctattttcagggacacatttgtttccaaacaaagggctctctgccagctattttagaagtccttgtatatttactcagccaacgctctgcgctggggattgtctttgggcactgaggttttatcatccgtgtctatttaaagcaggatgaaaaacagctccagatgaaaacagagcatatttccagcctcgaatgtgagacgctttcttttcttacaggactgagatctggcttccctccctctctctctctgaaactgccacctgtcttaaccatcttcgctgtgtcttagtttaattggtgctgttttctttttagcagtacataaaattatagtgcgccttaacaagttatagattggatggaatgtggtgtctatgtgtgcgcggttctgagagagagcaaatctccattaggacccacttacaatctctatctggttacacccaccacggcacacatcacatcaagatgtcatgtcatgaaagggccaacaggctagtgttcacagggtgcgaattagcggagggagcgaaacggaagggagaacaacaggctcaatacagcaatatgttgattccaatctcttgggaagatcaaaggtcctgactcggaatccgcacttctgaagcaccctctgcctgcaacgcattccagaactcgctgctcagtacaaggcgctggggacccaaacaggaaagagattgcacctgccctcagggtgctcacagcccgtgcagggaacacctgctgcctgtctctctcacacccccctaccttctgaactcagaacaagtctgactttgaaagtcactgaactcaagtgt

SEQ ID NO: 56499 - DNA, 2584 bp, Bovine  19866880549911
  misc_feature (1)..(1): n is a, c, g, or t
naacgggtgaagcgcagggagattctgccccctcatttctattccagctttcacttctgaatgctttctttcacctaacccaagttacgctgacatgatctttgacttcccaccgagaagcgttcattttaactggcaggcaaatgatattacactctaaaggcccatcatgctaaatgaccattaaaccactccacttaagaactgcctctcaagacggacgccaagcgcttcacacagtatcactacttaacgctcagcattttatagacagggaaatgtcatcaaagatctcaatgagttcctctggttgtaaacaaaacatctgtggctggttagctgagtcagttcatccgtgaagtgaaatgaccaaagccttaggtgggaaccctgtaaagctctcttcatatggctctattgaggtatttactgcagcccccctgaaatgagacgccccacgaaggaggctcagattcggagagggtgtggtggccaccgccccatccaccagcctcctctctccttattcagcgtggcccttcctgtgtgggaggctcttctccttcccagacacgctgcctctgttcctttccccaacttcctcctcccaccagggttattctgttgccatgcgatccctctccgctgtgtcctttgaactccagtctcacctagtagctttctcagctcattccagcctttatgagtctccctagagctcaatgcacaccctcagaaactctgttccatggtttgccctcacccacccagtcgtgtccgtgctctttgctcatatgtgtgtaccctgcagtgtccagagcctgtcatgacctgtggtatcacagcttcgaggcagaagtagacaagcaaatcaagatgcctttattaagccagatgctaaggagacttgcaaaaatgtaggaaaatgctatacttcttactagtcattttgcctgtcatttttcatacaaaattttatttgtggtaccatataataggcttatattctaaataaagcaacaatcacatgtctctaacatgtgcctttggtttctaatatggtaaatctcagtagcttaacgctcatgcaaaagagggattctctgatagctcagttggtaaagaatccgcctgcaatgcagatttgattcctggggtgggaagatacgctggagaagagataggctacccactccagtattctggcctggagaattccatggactgtatagtccgtggggtcgcaaagactcggacatgactgagcgactttcacttcttcttcatgcaaaagaactctgtaataacttttaagagttcttggatgaaaatatttgggaatcactgtgctgtgctgtgcttagtcactcagtcgtgtctgaccccttgtgaccctatgaactgtagcccaccaggctcctctgtccatggaattctccaggcaagagtactggagtgggttgccatttccttccgcatggaaatcacttctctgtatcaataaggatatgagataaacacttgtcaaaagtaagaaataaatttaactgtgaaatctggataagacatgaaaagtacatccacagcagagtatgactctgtcttttattgacatctggaacactgagcatttcccaaaggatggcaataaggtccagagaacccaacccctttctcatccacccccaccacctgttcctcccccaggttaggggcggcagggaccaggaaggggaccggggtcacgtggtgacctctgctccagcagctcacttcaggggtggagactctacacagctcccttataatctcacgcagattactttctaaggctgtaataacaaaataatagagaagacttggaacaattttaaggaaacattatttaagtgttgcttgaaattatttctttcataaagaattatttttccaataatcatgcccccgacttatttgtgtattcatataggtgtgtgtagagaataaggggtggagaggcacatgggatttgttcgtatcttacacttgggtttgccgacaccagggcatatccatgttcaaacggtcctcgccaaatgtttgcaatgaaatcctttaatcaaagaaaagtggtagaggcagaatataaagaacctcctgccacgtaatttgctgaagagcagacaccaagtttacaacttcctcctgtgtgtgtgttagttgctcagtcctgtccgactctttgcgaccccatggactgtaggccaccaggctcctctgtccatgggattctccaggcgagaacactgcagtgggttgccatgccctcctccaggggatcttcccaatccagggatcgaacccacatctcttacctctcctgcactgacagccgggtttttttaccattagtgccacctgagaagcccacaactccctcaagtcctgctaactagttaacgagctcaaaaagactgcaaaagggtggaaaccggtaaaaagccactggctgcaaaggagatggcccaggtgtgcacaatgggtcctggacacagaacgagcaggcaggggcacatgctgggcatcggcgtatcgacaccccttc

SEQ ID NO: 56500 - DNA, 939 bp, Bovine  19866880599995
  misc_feature (1)..(1): n is a, c, g, or t
nggcatagtgtgtgtacgtgaagcataaaattatttacattagtagtataaggtcacttcttttaattaccaacatcaagacaaaagaaggaagccagggctcacatttcgaatctcctttccagctttcaaacgtgaagagttgtgtgttgaaactatttgctccctgaagttcttacgcgtccataaattctgtaatcgagtttgttttgtttttaaaaaaggttaaggctttattttggaaactaactcttagatggtctaatcttggagttggcagactccttccataaagggccagatgtaaaccttttgggctgcgaaccacagtatctgttgtaaaggctcaagctggccgtggctgagtggaagccatgcagacaattcataaatgagggagcatggctgtgtttcgagaaaacttacccatgcacaccgcatctgaatttcctatcattttcacgtgtcatgaagtattcttttataacttttttttttccaagcttttcaaatgcaaaaactattcttatctctgggctgtacgaaaaaaggcagccaaccagatttagcctgtgggctgtagcttgacaacctctggtctgaaacggtctatttttaagtcatcagtgaggctggagaaaacatgatctctgtctcacacacagacacacatgaacacagagtcgcacacaaatccacctaactatcaacatcagggttttttaaaccactgacgtggtacatggaaaatgtgatttcaagcacgtgtctttagtgccctgaaccagacgccaaaacaaaaatctcagccttgaagaaatattacgagggtggtaggaaaaagagacctccttcctcctatcctttctcatgaagaaaatcaccactctcaactacgaaccatgccctctactcctgtaaggagttaaacgcagccca

SEQ ID NO: 56501 - DNA, 610 bp, Bovine  19866880622540
  misc_feature (1)..(1): n is a, c, g, or t
nctccggcatcttgagctgggataagcctggttccagaagacgcagaagggcggtggcaactatgctggttggccatgttccatctgggaaggtcagggcaacgtgaccatgctgtcaaggttaggggaagctggggaagggggacgagcaggaaggaagggataatttaactgaacccagtctgaaccttcaagcagttcagttcagggacagcactgacgtcaaagctgtttcttattttaaaaaagccaggctgtctgattcaagtagcccctcttaccttctgccagtccaaagtgccaggtcatgaccctttggaaaatcgttctttataactttagcccaggtagaggtttccctttcttcctcttgttagatagggttctgatgctaagggccgaaggacggaggggctaaagaaaacttcaagtctcacacatctgatggattttacattcttgcttcatcagactctggatctcagcctctcctacagtgatttcctaaacttaaacatttctttgtctgtcctgtttaaactggcacaaataataagaatttttgattacttaaatgtgattttaaagaattgctgtgacagtcaatttt

SEQ ID NO: 56502 - DNA, 1035 bp, Bovine  19866880636667
  misc_feature (1)..(1): n is a, c, g, or t
ngcggggtattgttcctcgagttgggaaatgctaaccgaggtcaactccagttcagcttcctacctacagaattatggcaggacgttacgtttggccctcgtgagatgaataggtcagcaaaaacgtactcttgtcttcctaatagcagacatctctatttttaagccttaggtcagaacatatttttcccctgtttgagatccaataattcatattctcaaatgaggaggaattttaaaatcaaaggcacggacagcaaaaccaagaaaaatctaaaaccgtcgccccgccacaaattctccaaccaaaattgtgcttcagatgttaccatgttaggatctgaaactggaagtcagtgttccggttaactgttgctgaataacgaacccaccctcaaagttcagtggcttaaagcatcagctgttttatttctttgcccctaattctacaccgagcacagctttgggtggaactgatatgggtgaaaaggagaggttctgaagcaggatcttaggctcctgcctagggattgggcggcctggatgaaaaccaggagtcctagcctccagaccaccaggggctagaggctagaagcagaatgggctcttacctccgttcaaaattaagaatgttccaagaggcagacactcctactgctgtaaaaacaggtacaaaggttattagtagagacacagcacacgtgggagagcacgcagaaggaagcctgtcatttatttcagaccagaagggaggcagagatgcccacctggtgagaaacggtgtgggcgtcttccctaatggagaggaaggtggtaaagagatgacttaaatctcttacataggacagttcttctagtctttgcttacctttggccagttgtctcacttctttttccacctgttctaggtccctctccaactggcatgtgcgtattttagccgagatggggtccagtgcagagggctatgggaaggttgacagcaccctttatgggatggtgccccctcccttttacccccaaggagcctttctg

SEQ ID NO: 56503 - DNA, 1074 bp, Bovine  19866880694116
  misc_feature (1)..(1): n is a, c, g, or t
ncttgcctggagaatcccatggacagaggagcctggcgggctacagtccatgaggtcacagagttggacatgactgaggatgaaaacaaccttccactgtatttcagctgatacacacgtcatgaagcagtcagcgggcctgctaaagaggtgtccgaaatgcttaggaaacaaagccatagattaaaaaaaaaaaaaaaaatcccccaataaaacaactgtgaactataattagttacagggccctgattttggacagaagagctttgcaaaagaggcccgccgtttgacagactcccccgagagcaccgggtggcgagtctctgcttggcttcttcccgccttctgcacatcaggccaggcttggcattgcattaccttctcttggccccactggttccgtctgtgccatcacctcttgaggtctctgttccaggggaactgctgaccacaggcacccatcttccagctgtcgagcaaaaggccactgagagtttacttcctgaggggagccctgctggacagcagagaactcggccagccagccaggagcacgcgcgggcacttcttgcaagggcaaacaggcgcatctggccttctgcctctgggggcgccccctctgcgctctctgctgtgtcctctccttgagctggcgctttgtcacctgtcagaccagagaacagacccaagcagggcacgacagacaccgggaagcatccaagtatggaaatcttgttgcagtgtgtagggatacgctacacataatcagtctaattaataagccatttgcttgattattatttagccaatcaccaaaggcttttaaaacatgcaaagcatgctttgatcttaagaggaaaataggaaataaaattacacattccatatgatcttatctatgtaagaagaaaaaaaaaagaaaaaagacaactggaaggaaataagccgaaatgttaacagaggtctttctgggttcaaggattatgaatagttttcatttccttccttagtccttctctcttctttgtatttttttttttttaggaagtctattattttatcatagaaaaagta

SEQ ID NO: 56504 - DNA, 1650 bp, Bovine  19866880712393
  misc_feature (1)..(1): n is a, c, g, or t
ntgaaacattcttcaagtgaggcagtttgacacatttgtacagtttttactaagatgtatgcagagggaaatttcactttgttgttctttggattgactgtggctatatatatatatatccccccttgcgtgtttcaacaatccaaagtaattaaaatatgacatcttcctcgcaaggaatttggcctaattgaggtggctgctgctcctgaagttcacaaaccaccagttaaagctgctgcctccagtgttttccttgtggaggaaaggcaatatttcttagcattgaccctgctgccacctttccaagtcactttgttgctctaagaagttgctgttttgctagaaaaccactggcaatgaacaccccttgggctgagccatccattatttccatatcttgcaattcagccgggaacctggacgctggttaaaggaagggaaacataagtggggtagcccagttttttaaaaaaatattgactatttggttatctgatgctgacggggtgccgaggcccgcactggtcaacagtagcctggctgcaggcttgagaaatgagcagcagtcccagaaaaccccaccttcgggtgtctgcagtgggagcctgcgggatgcattgctgccctgacagtgatttagataaatggctccgctatctatcaaaatgtttttagtactttatttgacaattcattggagcattagcctgaaaatgacattttaaatctttgttttcaaagaggtcaaagtttaactgaagaaattgagttttcctaataacatgacggcttatctaaagaaagggaagaaaaaggagaggaagagaggacaatgacaagatttaaactgccctcttctgaaactttttcttaagaataaagtcttgcttccagggccaggaaatcaacaggtttctagctgaaaaatcaataaccatttggatgccaacagtctggctgtctgacttaatatttcgtagagccataaacagggtaaaataaataaatatatatatatatatatatatctttttccgaaggtgccctcagttagctgctcttgaaatggctttactttcctggttcctgttttctttctgaagagctcaaagaaattgttacaaaataaatttccaacctactaagggatcttttagatccctctgtagcaattaaaacagtatgaacagtttcatttggaatctcagggaactagagctgtctcaaactttttcttgtgagagaaagttttaatgaaacgttttttaaggaaggaaaaaagaatgctgggatcctggcgtcaagctattagacctaatagacgttttacaagtagacattcttccttttgtaattaaccctccaaaagtgcctattaagttgcaggagttgggggaaaagctttgtttgttcttgaacaagttaaacaagggatttgccttatctggggagagcgagtggtgaatgtgccattcacgtaggggcagccgataagcaagaagtgttgataacagcaaagttcagctaatcaaagaaacttgccttcaaaaaagtaaataaaggcatctgacaaagggatttcaaaaatttcagtgtctttatttttgtaagcagggcaattaggctgctgggtcagtttcacaaggg

SEQ ID NO: 56505 - DNA, 1371 bp, Bovine  19866880758066
  misc_feature (1)..(1): n is a, c, g, or t
naatttaacaattttaacaatttttttagcaggatttagtatcacatgatggcattttcccccatcatgtgatatttaaatacacagtttcctccccaaacagaaaaacagctaagaaacgttacagttcatgcattaccagccaaactagcaagataatactgctatattttcgtacaaactccccttctcctaactctgtcctgaggagtgggctaccataacttcacctgggagatcacaccaccactttgtattatatgtaaaaccaagtcatgcttcataattagaatgatgtgattattaaaatggcaattgtttaaaaatatccttttataacaatgccatggctcaattcttactatatcagaatcccttataaactctgttatatattaaaatgtgttactggtttcaaagatgcttctttgagaagatgtagactttactctaacagtgctactcatgatcaaagtgtctttggattcttgttgtaactgcctagtttatttattgaagtatagttaatttagtgttgtgttaatttctgctgcacaccaaagtgattcagttatgcatatatatatatgtatatatattgattttttggtaatccttccattatgctttttttgtgggatactgaatacagatctctgtgctctatgctaggaccttgctgtgtatccgctctgcatccagtagctgacacctgctgaccccagcgcccagtccctgacccctccagctctgccccccttggtgacccccagtctgttctctgtgaccacaactctgtttctgtttgatagacaggttcatttgtgtcctattttagattctacacagaagtgatatcatgtggtgcttgtcttctctgtctgacttacttcactcagtatgatcatctccaagtctgtgcatttgctgcagatggcattctttcactctatatatggctaagtacccatcagatcagagatcagatcagatcagttcagtcgctcagtcttgtctgactctttgtgaccccatgaatcgcagcacgccaggcctccctgtccatcaccaactcccggagttcactcagactcaagtccatcgagtcagtgatgccatccagccatctcatcctctgtcgtccccttctcctcctgccccccaatccctcccagcatcagtcttttccaatgagtcaactcttcgcatgaggtggctaaagtactggagtttcagctttagcatcattccttccaaagaaatcccagggctgatctccttcagaatggactggtaggatctccttgcagtccaagggactctcaagagtcttctccaacaccacagttcaaaaccagcaattcttcagca

SEQ ID NO: 56506 - DNA, 4250 bp, Bovine  19866880780234
  misc_feature (1)..(1): n is a, c, g, or t
ntttatctttttcttacgattttagaagggagagaggccgagggggagactcgacctgaaacctggaccacaagtgcaagatggtgaccttcctatactcagagcagagccagccatcctggaaacgtccagaactcgaggagcggtcacgctgccctcaccagccaccgagacaaggatgtccaccacctcctctccgcgtcccttccaaccagagcgagcagcattcccagctcagcatgccccgtgtcttgagatgcacacagcagaactctgcaggcagttaagggtggctggaccttaagctggagaggaatgctggactctatagtgatattcttctaattccactgggccccctgtccggcctgttcccccacttaccctggaatcttctgactaaatttgggaaactgcacaatggtagggccactccagcaagtgccatttttaatcacacagatgttccattaccaggcatcctgaccgcagaggggcctgtggtcaaccctgagggtcaacctgaccctcctacgccagggctcttggtgatagccgtcttatttccaaactgggaaaggccagtaagttgtgggacttccttacgatgcatctggacttttaaaaaaatagcaagaattatgaaacattaaaaagtgccttgagctaacttcaaaaagagcaatgctgggacgtccctgggggtccagcgggtgagactccgagctccaatgcaggggactcaggttccatccctggtcagggaactagatcccacgtgtctcagctcagagttcacacgccacagctaaagagcccacgtgctgcaatgaagaacgaagattaaatatcccgtgtgcagcagcaaagacccagtgcagccaaatacatacatttatatgtgaaaagaagtaagagatttataatataagtaatagacttccctgctggctcagacggtaaagcgtctgcctgccatgcaggagacccgggttcgatccctgggttgggaagatcccctggagaagggaatggcaactcacttaagtgacttagcagcagcaacagcagcagccagtattctaagcctggagaattccatggacagaggagcctggtgggctacagtccatggggtcgcaaagagttggacaagactgagtggacttcacgtcacttcatgtcaatagatttatatataaatatatatatttaaatattataattttaaaaatatatatttatataatttaatatatatacttatatataatttaaatatataatttaaaaaatatatacttatacttaaatatatacatatatatttaaagaggaatgcttaagaatgtggactggacttctcctctccgagaactcttgctgattcccatatttataatgaggcgatggagggcccctttgagaaagctagtaagaaacactgcacctgagacagccgtatgctgggacccccacaaggcctccctgcagcacatttaaagggctctctaccccgggagcatcccgagccctcctctcccccttcatgagtcctgagatcctgcccaagccatctaagcacgtgcacccggaaggcacgagccccacctctgcccctgacttcccaccccgcgtaagacgtgcgcctaccgcccccggacgtcgctcagccccacccaccgaccccctcctaaggggatccctgatgccctcacccgaccccgccctgtgctgctgtcagctgagtgactccggaccctccgcctggcccgggccccagtgggtccccctaatcccgtggacctgctgaagtcggctctgtctgcctgcatcctctctgtgagtaacatttgcagacaatagcccagctgtgaacgctaggcaaaaataataataaaatagcaataaaagtgttagagctaaaacaagccgtgtccacagaggtgtcctgactcattctctctcgtggggccccataaagcatccaggggagcgctcaggtgaccaaggtcctcactacggcacttcattggagggagcaacttgctgctcccagcactctgctaagatcctgtccctgcaggcttcatgacgatcttattttgcaggtcatgaccttctcaaccccttaagacagacaaacacacatacacacgctcacactcacttattccctttccagaggctccagaaaagtagagatggtgaactggccattgtcaaccatgcagactgctttgactccccaggaccttaactgcaaaggggcccctggtctcaacccactgtgtttaagcggcacatgttctcagactaacctcaccttgtttgggtactgtgacagaggactccctccctgtgcctggaatgtttcaaacatgaggaggggactttgaacgtgtgtcctgaatggagacctggggggtggttagagctgccagggatccccttactgatccctggagtccctctctggtgctctccgtcatgacacggcggcaagcgctgggtgcgggagctggtttacgtctcgaccctggcccgggagctgagcgaatcccagcaaggcacctggcttctctccgtggtagctgctccgaccaggagggcaaggtactaatccaacacaggtgctgaaaagatccagagcgtgacgaaccgtcgccaactttgcggctctccttttcgtgcgtggcccctcataacagttcagagcaagcatctcctccctgcggctgaatctcccagtccctgaatttccagtgtgctccgtcgtgtctcccagcggacagctgagtcccaggatgtcctgctccagatgccatgggtgatgttctgagaatgaggtgcgtagagcaaaacccaacagcgctccaaaacgtgctctgcccagccgcagacagagagccccgcgggcctccagagtctgatccgcccaagatcataggagcagacaggctggcccgcggggagcctgtgccctcggtctctcgggccggccgcccagcgcatcccgtggcgctgcatccggacacctcgtctccgcgaaaggcgtctccgctggacccgcccgtcgtcggtctctctcgagatctgcaggaagctccagctcttgcaacgttctcagtcttccatgctcttctccgggaccagatgtaggttggaggcctctcctttgagtctgtctgtctgtctgtgggcctgagagccccacgcggcctcctctcccctgtcctggactccttggcgcctcaagggggcccagcaggcagggggaccctcagaggggccgctgctcgcggggggcccaggtgactgcgcagcacacagcggacggattcgccactcccaatctggacgccagtgagacttcaaccaggagaggccacagacgggaagagcccagcctccctcctaaagaggcgagcaggccttaccaccagagtaaacagttagatgactacgaggctccaaatgcagagtcaaacctcctcgaaatgagatcccccggggctcgccctgaaatacccgtaatgtcagctgccgcttcagtgggtattggaaaaatatttagaactaaaatatggtatttctccagggggcgtatatcaaaaacggggggagagcagcaattactagaggaactcgataaatctcctggctacctgtcagttctctccaggtgcgccaataacatgtactagaaggactcacatcttgctgtttcctctccccattttttttttgtttgtttgttcaagcctagtgaagctccattcagatcatgggcaggaaaaaaaaaataccctataaaatgcagtcagtgacttagagcgtacaccacatttaaaggaatgggcttcagaaatgtagaaaacaaactaaggttaccaggtggaaagggggcaggataagtgaggagattgagactgagatacactcactactatatataaaacagataaccaatgaggacctactgtacagcacagggaactctactcaatgccctagaatgacctatatgaaaagaatcttaaaaaaagtgaatatatgcatacatataatagatgcactttgctatagacctgaaactaacacagcattgtaaatccactatattccaataaaaattaatttttaaaaagtccatttacaattaagaaatgttgtcctactaaattaaaaaaattaacaccaaaagaaggacttagctaagactttccctcagtgctgcttacaatcca

SEQ ID NO: 56507 - DNA, 1652 bp, Bovine  19866880812852
  misc_feature (1)..(1): n is a, c, g, or t
nacccagcaatggctggttgatttctcctcccatcacgtgtctttgacctactctgcagcttccctctcccatgctttaaggaccttctgttcactttggactcaaaataatccccttattttaaggtcagctgtttagcaactttacttcctcctctatatatacataaagcctatttataggttctgagggttagaacctggacttctttggacaggctgtcattctgcctaccacaatgcccatttccatgttcctgcagaactctgtgcttacctcaatcattccgtgcaggaaataccatcatagcattttggttttggttttgtgtttctgagatgtcattgacacgtaacattgtgtaaatttcaggtgtacaatgtgttgatttgatacatttataccttgttgttgtatttgtatatttgtcattcttcctgactttgaccttctttaagatctgttcatttttgatccctatattaagaaaaaataacagatcctcagtaaacattttggaagactcaagcacctagtgataacctagattccctttaaaggatcagcacagaagagggattaacctgtgtccagtaattagagttattcatgttaataattccatttctatgaaaactggtcaaccaatatgcaatgttaataaaaattacattcctcttactgctataccaacatttactgtttattatatatcggacattgttcttagtgcttttcatctgttgattcatttaatttttacaatgatcctctgatgcaggtacaatttctattgcccatttcatgaatgtggaaactgaggcatgagacattaagtaacttgcctgttatcggccagcttggtatacagtaactctgggctactcactctattctgccaacccagacaatcccttctgtggtcagtctacatgaatgggaggtcgctattgttaacgtgaaattttgtttatttctcatgaaactcaacagcctttagcctcacgggtttcagaaatacactgaatgaatcagctggctgcatccgagatttttcaggcgggcaacttctcagacctctgcactgtgggcctcaagtgtaaaaagccagccgtgtattatctttcagagtcaccttggtccttggggaaatccttgggcctaaccgtgagtccacgcgtgatcgttttgtcccaggagaaggccagagagccagggaggacagacgggagaaggcgcacactgaatctgcggttgttcacagcgtccgctcttgatgtggcctctgggggacacgccgtcgcctcctctcgtcagcacattctgtgtgttctccgcacttctgaagggggagccctggaaggcgtttcgctctgacacgctcatttctctataagccctcagaggcgaggggtatcgggagcgtgttttaagacagaagagaatcggcgcgtttcccggcagctcctgcttacccctgcagtcgggtagcggcagcgacgccagcgacgtggatctggtggtttgcgtacgattgtattagacggtgggtctgtaccgtggcaaacaactttgtttagaaagctaacgatttactgcactaactcaaagctcatgttgaacaggaacctcgtgtgctcggaggaagggg

SEQ ID NO: 56508 - DNA, 2205 bp, Bovine  19866880836686
  misc_feature (1)..(1): n is a, c, g, or t
nactcagggaaagcttaaaaagatttttccatgtggccaagctacagattggagcaaataagtatttgttgctcaagaggtgattatgtgtgaaatgaagtacagttgacgtttgggcaacgccaggggttaggggtgccaagccctgaatagttgaaaatccacatataactttacagccagcgctctctgcagccatccatctgcatcttgggattcaaccagctgcagacctgcagccctggagtacgtgttcattgaaagaaatctgcgtacgtggacccgtgtagctcagacctgtgctgttcaagaggcaagatgtatcggttagcgtttggtgtgtaacgaacttctccagagctaaccaccattcagctagcttgtgactctatgcgcctgccctttgggatgggctctgaggagtgtttcctctgatgtcagtggaatttccccatcccttggtggtcagctgctaggtcagttggggacagtctggtctcccggcggccaaagcaagggcacccgaggcctcgctccaccaggcctctcagcctgatcccctgcttgggtgaaacttccataccatttccatttattttttaatatggccttgtcgctaaactccttttgtaatttctttaatgtgtgccacactagactgttcctaagggcagcatcctctccgggttgcctggatgctcttgagacagggagcggagagaaagccaacatttcttctgactgatttttaataactcttaggattatttgcgtcttttgttgtcgtcagccccaaatgctttcaggaaggagccacagtccaaacaaaactaattgattcattaatgagatggtcaaatgattaaaaattgatggctaaatgaattagcatttttattgaatttactgcctttaatctctacttgccgtttcctgtatgtctcagagaagctcaccagtctctggcagtttcgccctggagacttcatcccgtggccagtgtggacaccgctccccacctccacagccactgcagactctcccccgttgtcccccaccagcctggcaggaaactcgaagtgactggctgcagctccagcaacaggaagttttggcacagctgtttggacaaggctgttggaggacccctacagggcttccctggtggctcagctggtaaagactccgcctgcaatgcgggagacctgggttcagtccctgggttgggaagatcccctggagaagggaacagctacccactccagtattctggcctggagaatcccatagactgtagagtccatggggtcgcaaacagacatgacccagcgactttcacttcacttcacaaggctcactggcatctgggagaaggctaaggtgatactcctgtgtcaccactcccaaactgtttctgttctacttgatgttttctgcttaccttggataaaaaacataacttggctagactatatccagaatttgtggtgcatacctgtgcacttgctggacttcccggagggcacagtggtaaagaatctgcctgccagcacaggagatacaggagacccagcttcaacccctcgtttgggaagatcccctggagaaggaaatggcaacccactccagtattcttccctggaaagtcccatggacagaggaactggcaggctacagtccatagcattgcaagagtcggacatggctgagcaaataagcacacacgtatatgtgtgtgtgtatatgtgtgtatatgcttttttctattcttctccattatggtttatcacaggttatgagcatagctcctgtgtgcagtagggccttgtttatccatcctgtctatcgtagtttacacctgctaatcccacactcccactccctccctcccgtcccctcacccgatttgcccagtgttgcgtctcccagcgtgcccggccagccctgcctgtgctctgcggcacagagggtctggaggtccacgtgtgtcttgctcggccttgggcacccttgcttcctacagaggcagaaagtggcaatttccttgccctttttaggtgtctagcacttaaagctctgagccaagtcgcagacctactctctcggcttttctcaaaggcggacgacgggagatgctggtgacacaggtgtgtgtggtcccttggcttctagcatctttcctcctcagtggtggggagaggggtg

SEQ ID NO: 56509 - DNA, 1628 bp, Bovine  19866880883278
  misc_feature (1)..(1): n is a, c, g, or t
ntaaggaaaccataaaaatccgtggacacactgagttccgcttccagcctttgccatcaggagactgtgcacgctcaagagctcaggaagcatccagaaggcacccatgtgccttcagtgctgtatgtctagcaaaaaacggcctctcgctcactcccacagtgctctttattgcggttggcatggacttgcccaggggaccgacttgttgttccacgaaggtccttaaatggcattactgatgaagcatgtcatccaagcctcaggatcaaatggcagctactgccagggacggtggtagaaaagcccatcccccagttaaacactgcacgctgggctacgactggtcattacgtcctttaccccgcttcagcttttccggaacacagccgataggcttcatattttattttaataatatgtatgtagtattcttgagatcgtggattattttagacattttttgaaggaaatcgtctctttcccctacgtgaaaaatggagtgtgagtttgaacaagagatgcgtgctctgatacaccatagagcaattactcctttaagttcatattggctgtttctgaaattcttctctgctgatggctacaatgttacactctatttgggggccatttctgtttcctcagtaccatgaatattttatttcggcctaatttaacctgttcatacaccaagcgagatgagattcattaactctgtattaaggagctatgcttccaaagtctaaaaaatcttatcgcccagggacagaacatcctcactctatgacaacgttagacaacaggaaggtgggcgaatggaaacgtccagaatgatatgctgtcttaaaattagaacacttgtaaagacaaatgaacttatttacaaaagagaaagggagtcacagatgtagaaaaccaactgtggttacccagggagaggagggctagggatgagctgggagactgggctgacatacgtacgcactgctgcgcacaaagtagcttgttaacaggacctactgtacggcacacgcaactctacggagtgctctgtgatggcctctgcgggaaggtagtctaaaaaggagtgcacatatgtatatgcataactgattcactttgttgtacactagaaataaatacaacattttaaatcaactatatttcatttaaaataaaaaaaaaatattgaaaaaaaaccacttgtacaaaacaagtaaattttggttttgaaatgcagagttgttaaaactaagatcaaatatcagaagtttggagaggtttaacatcccctattggagtctttcttcagatattttttccaagaaagaactaaaaacgctgcagtgcaggcttcttatctgtatacgggttttatctccaagttctttctgtgataagcaaaggtcccaagttgtttccgatgataacctattgcataatttgtctcccatccccgtcaaggaaatagatttttaattcttcacagttgtcccatgtctgtgttattttgtgctttcattcagattaactatggatttaaattacagctgtcattttgttaatgaatatttttctgataagccgtatcagaatgatatggattgaagtcactgatacagctcacg

SEQ ID NO: 56510 - DNA, 1791 bp, Bovine  19866880901262
  misc_feature (1)..(1): n is a, c, g, or t
ncaataggtgcatgaaaaaacacgctgtgacatgcttgcttcggaccattttcaacgccacttcaaatgtaagagctgtttacttagtaaacatagtaattgatattaagcaatattaatatttcaacacagctcttgtcatagttcgggatgtttttgtaggatatgatccagttctcctcagcttacaattctctttgattttctttgttacttcctttatttttccttgatggattaacattctcaatcatgaaaacactttgtgtaaataaatcacctaaaatttactgcatctagtgatgtgctactctaatattagaagtataattcgttggtaaaagtgtgtatgtcatttttttctcagtaggctattgaaatatcctgatatatccttagctggaaaggtaatttttatggagaaaaaccaaaataaactgaaaataaattacagagtctgatattttcacaacgaatatgaaacaataatggcttactctcaaggattggttctttccaatccttgagaagaatctcaaattactttcagaaacttggtatcaatttttgcattctgaagaaatgtgcagtttagaaagtttcactgaccctttttgaatcagtaaacctaaagggtgaggaaggaacacagccttaaattcagcaagttctagaatgacaggtcctgcaagctatgaggctgtcaaaaacagaacagaacaaaaacatctgtattttttttccttttccattgttagaaaaaagactgtgccacttaaaagagcttccaaaaactctgcagtcaatgactaagcaacttgtcaggggctctgaagaggcttctcaatattaataatctaagtactaatatcaaatttcacttttggagtagcaagtatatctggttcacgagatagcttggttttctttataaatgccccacaatgaatacatcagctttaacatttaggcttttgataagccatcttgaggtggtctgacttttgttttctttcctttcacaaacacactcctcaccatgatgaatggcctcccattgggtatatggaaaatttcccagccctgttcccttgagaatgtgccactacatggatttctgggcaaaggaagattaaaagaggaggagcatgagctatggtccccttaccccacagccatcaattatttccagttataaatcaaagttttcagcccaaacaaagacctgtgtggcaagcaaacaagggcgttcacggcaaattgttttgaagccgaataaaactcttgacggaaaacaatggggtcagcaaagccactgtcaatatcactctaaagtttagctgatttatgaagaattagatatggtgcatcaagtctcaggaggactgattgagagaacaggaaggagaagtgtgaatacacttctgtacactgatataaaacgaaacagagctcttccttcgtcacaaaaagtttaacccaatgtgtttatcctcatgaatgtgaccccttgcctgagagccctactctgaaacctctaattatcaaacatgccctccctgcttatttttggtttctgcagaagcaaaactattggcatttccaccactcatatgaaccatggcagcaggctcataccttcctttctattttgatcttacacttggaagaatgtaatttaaatagtttcacatactgtttatatgccccacataaaaatctattgtacatggtgaaacaggaaaatattgacttttgtgagaacaaatagaaataccatcgggaggcaaa

SEQ ID NO: 56511 - DNA, 1001 bp, Bovine  19866880928357
  misc_feature (1)..(1): n is a, c, g, or t
ngtaagtgtgcgcgatgcatagttttcacgttacgccatgagtgccacttaacaactgtgctagccaagcagcacggggtgggtacccggcaggctttttaaaggcctggatgccagtgcgcattccagcccgcgcacagaaaggagacagcagccgcccttccctgggaggggcgcggaagccggccccctgcccgcccactcgccctccctgctttgtgagcgaacccgcaggccggagtggagggccactggatcaccaagggtgttttaatccctcctggagctgcttttctttgatgtccccttgcatcctttaagcaagttgtgcaaaatggctgcagggtggactggctctccctttaacagctctctgcttgggtgtatttgtaaacaccgtgtctgtccttctcagtgatggctgaaaagcttttccttcctccagtcggtgtgggagatgtcaaaaaaaaaaaaaaaaaaatcctttttcttaaaatgactgtcttctaataaatagccaagttcggaggggctaggagaggtgaaaggtggcccttggaaatagaaaactttgacacaatcagttctcaaaatctgcattgagttacgcagtggtgggagtgggggaaggggtatagcagtggcgggtgtggtgagaggggtcacccaaccccgctattccagaacagaaaagtgattttcattcaggcctggggttccggggagctggttctagtcctgattctgagcagtgggcctcaggcagccctgagcctccctgagaagagtcacagctgactgtcctgggatgtgtgctgtgggccgcgcaagcgccgtttctcttcggcctcacagcaacccactgggatcggcagtcctatattcccattttacagatgagcaagctgaggccccgggaggtgagatctttgtcccaggtcacacagctgctcagaggttgagcggggttggaaccttgttcagtctgactcccgcatgca

SEQ ID NO: 56512 - DNA, 1156 bp, Bovine  19866881004519
  misc_feature (1)..(1): n is a, c, g, or t
naaatgagtaaggcagctgtggactcagggtaaatcggtacttttgcctttattttgtgtgggctcgagacccatttcctgcttacattacttaaaacccatatcctgctgctctgtaaaaactggcaggtcagttgccaatttaaaaaaaaaaaaaataataatgttcacacccacaggaaaactctagtttcaaccctcaaggaacttatcactctaattagtttgaaaaatataggaatgggaagaaaatgggatcgttatgcccgagtatacaaaaataaatgtattttctttagaaggaaattgaaggcgaagacaataaacacttggagtatagtgactgagagtctaatagaaaattttaaaagttgaaacagaaggaagcaggaaaataagggaatcggtaaccagttagaccacagtatccgcaactgaaataaacccagaaatcgtagagactcttgggatggtcgagctgaaaatggatctcatagattggttttcactcacccctctcccttgacacacaagtataccaggacccagaaagatgaaacggtcctcccagccatcccctactggctgcagacagagccaggcccagagttcacggctgccacctctccttgccacgctttcttcgcagcaccaagatgagccaggccttcgggtctagttgtaggtcttgtcagttcaccaggatgttgcagaactctttggatgcaagggacagaaaacccggctgaaacttgccataagctcaaaaatcagcacatgtaacgggactttccggataccatgactggatccaaaggctcctgtttgttttaggggcattttcattgtccccttcatctctcccagctggtttttgttttgtttttgttattttactgggttggttttgtttctgggaagcttttccaagtgactaataaagatggccaaccaacagctccagccaatagcctacccagcagaaacacagggatccagatcctgggtgaaggcaggacttgggggtggggcaggggcagagtactgtgattggctagttctggatccgtgtccatccctggatcccgccccccgagccagaaagatgggggcagaaacgatttcatgttcagcatgaagtatcaagtcttcggca

SEQ ID NO: 56513 - DNA, 1800 bp, Bovine  19866881039361
  misc_feature (1)..(1): n is a, c, g, or t
ncctccctcctccctccccagagttttctttctcatatgcagtgctttcttcaaaaagaatcacaatagtgatcaaaagacttttgataactgttacacattggttagaaatacagtggctcagcactgcaaaatgaattcttctatacagagaaattgctctgtttctctaaatggaagacaactgtctattagttggtgtctgctgaaccatgcagttagggaaacacagctgtcaggctgacgggtcgaaccagagttactgtgcaggaatccgaaggcagtttaattacaatatttaatcaatgactgtacattgagggttttatgaaacatgctaagtggtggatttcttgttatgtaaggtgatatagatgcctttttaaagaaaatcctatatccctattcaaaattgttcatagaaaaacaaaatgaattcaaatcaatattttttcaaaagtcttaactctaagcatagtaactatagtcttaagatgaggtctatgtgctacattatatagatttacttgtattttgatcctagattatttttttccatttcaaggctcacactcgactctctttgtatgaatgtaaaagccttggatgagcaggtcggagtctgcatttcagaatcactcaggagtacagcttttgacaagacttcttgaatccttgaagttgtgggttatcatccaactcaactgtccagataatactgttttcaagaacaaaaacatgctttatttaaagattctgataagagggattttgggtgtgtgtgaggcgagggcaacatgccactgatgggcaagtgcgatccagcaaccaagcagcaagccgctgtagatccctgtctgggcaccaagggatgcattaggtgttgcagagcaaattgttgattttatatcccaagcaacacagcagtgttactttgttaagacaaagtgcaaggacaaaatggctcaggcccaacagccccgaactgttaaatgcttcattctccaactctgcctggaccctttcttcttcttataacagaaggtgaatgtgagaaggcggcttgagccctccccagtctttactacaacgcgatgcatggagacacactgattttttaacctagaggccattgttttcccatctcctttcaggagagaggatcgtcagaagtcgatcttaacagtaaacatgagacgtaaacatcacatgtacacgtgtgcgcgcgcgcatagatgtataaattgttcttccgcgtgactacaagcaccttgagggcgttttgtttcctgcagccggggcgcagtgcttaacgcacggtggatgctgacaaagcgctgagacccatgagtagggtacacgatgggctggctggaagggaaaagggacaggatgcaagtgcctgcgtcagctggggcctccacaagggcagcgaggtgcatgtgaaggcagggactcatcgtccccgggcatgagtggaggccaggctggggtggcaggaggatcactgggtgaggggtgaggccagctgagtggtagttctgccccagcagctccgagaacctgcgtcacctctctgagctcaggtgtgtgttttatcaaatgcgagtggaagtgtgtccccagtcctccttcaggtcagaggcaagcgtgcacttgaccgtctctgcacagatgcagtcaaaccgaccgcgacgtcaggactttgcggacgacttcccgcatctcctatgatcaaacatctaagtgttgatggagttttgcgtctctgtggagaacgtcccagaattctcctttcct

SEQ ID NO: 56514 - DNA, 1453 bp, Bovine  19866881041827
  misc_feature (1)..(1): n is a, c, g, or t
ncgctaagaaaatgcttgggaatttagcaaagttgaagagaatagtaatagaaatgaaatttgatggatttatttgggataaattcagaaactgcatatgatatcaagacttaccaagctaataccacaagtattctcttaaatgttttgaatcatattaagaaatattactttagcatgttactactaaaacccacataaccaaacccaatgacattaatatctgttctcttagttcatgataactataagaaagctttttaaattgagcatataagacgctatatatttttaagtgatctgatttcaataataaagcctctgttggtgaggaatcagtataattcaaagaaataaatatctgcaagtaaaactatggaaaaaattcacattatcaagacctatcgggagaatagtcaaaagtttgtatgatataatttccttggagccatacagactttgtatcaagaaatacctcctgtcttccaaatactgactgatacccaaaatactcttttagagtcacattttaatctcttttatttaaaactttttctgttaaaataaaatatccacaggaagtataagatagtaagttcattaagagatagtaattaatgattaatcatattagtatccttttccaccctacatttccaaacacaccttaatgagaagaagagagtcaggagaaaagaccgtactaagtgttcaaagaggcccagaccagcgaccatgggaactatttgatgctgttggtccgcagcatcctgtagtctcatcttaacacacaaatgctttcatttcagctgcacaggcaaacgatcattttatgaattggttaatcatagggcttcccggtggctcagctggtaaagaacctgcctgccaacgcaggagatgtaagagacgcaggttcgatccctgggttgggaagatacccacgaaaggaaatggtaatcctctccagtatttttgcctggaaaattccatggacagaggagtctcgtgggttaccatctgcggggctgcaaagagttagacacgactgagtgtgcattgggctgcatgcatccacatacacacacacacacatagatactttaaaatacttttccatacatattttaatactgagtacactttcatagtgggtaaacatgtcatatataaaatgtacactctgaacatgtttatatagtctcctcctttcccccttttcctttcccatctgatcattttctttcttactctgaaaagcgataatatacatatataactgaaagaaaattagaaaggaaactctcaaaatatctccctataaaacatatcacaacagctgttagcaaaagaatatattccaaagtagcagaaacagataagaggaacaaacactaaaatgatgaacaatgaaatttgattatttctactcttttttatgacaaatttattg

SEQ ID NO: 56515 - DNA, 777 bp, Bovine  19866881076434
  misc_feature (1)..(1): n is a, c, g, or t
nataactgcttttgtatatactgctgagtgttggatttatgagcttgttaatttaactgactaaacaactaaaaaatttaactgaggtttaaatccttcaatagactgttgcatcctaacaaaatttgttaagaaaacaaagcaaaaaactatatctgaattaaattttaaaaaccgagcttgatgaccagatgctgactctgactcttctagcaccatctttcacacatctaaaggcaccatctactttggtttgtcggtctacacactgaagtgtcgagaggtaatttatcaatttgttgattgttcatggttatcagtcagcagatgggcctgaaattatcgttttacagaccaattcttcaataggaagttttcatatccatactttctcacccctgccaaatcattccaaaacagtacatggatatatcaggggactcataacaaatgtcaaagtcgtttgtttttccagtttttatctgaggacaattccatcactaaatgatcttcaccctctgttcccatcctctctatggataataagagcgttcttaacaattagcagagttccagtaaaaatattttcccctagctaaactgtagtaatggccaagagaaatcgggacaaacatttttttacctgctttactaagtgcacatccaagtacggacatgcaggatgcctgctcaggcatgccccgggctcagcatccatcttcctgttcctttaccacttccagactgacagctaaattactgcacagaaatcgtttt

SEQ ID NO: 56516 - DNA, 893 bp, Bovine  19866881091855
  misc_feature (1)..(1): n is a, c, g, or t
nttatatgtgggatttaaaatatgccacaaatgaacccatctgtgagacagaaacagactcgcagacatagaggacagaccggcagttgccagagggaagggggtcggggaggaatggagtgggagattggggcttgcagatgtgagtctttgtataaagaacggagaaacaacaaggtcctcctgtgtagtacaggaaactatattcaatatcctgtgataaatgacaatgaaaacaatagagaagaagaatgtatatatatgcgtgtgtgtatatatacgtatgtatatctgaatcacatcgtacagtactagttaacacaacattgtaaatcaattatacttcaattaaaaaaattaaaaatacgaaactacatatctatgtattacttattctacacaaaataatcctgcagctttcttctctgtgaaacaaggcttgaaaagccctggtgttcgtgcatttgctgttttccatccaggccggaaagaacgcagttggggtcccctatctcagggaactctgaccacggagtatcagaggctgatctcagtcagtacaaacaacaaacaaaaccacagctcagctgggccttgagcccaagaaaaccagccacacacgaactcgcaccatgggggaaggagaaagggggaaaacgttctaaaaacaaacccaggagagaaaaaggcaggctgagaagctggctccacacggactggctcccacatggggtgtgtgggagacaaagcctgagaaagaaaagcttcccttgacttgccaggaaaggagccccaatctcctgacttgactggaaaacactgacaaaggccaagagctctgagtctcctgagaagggagatggctttaattcatgcagcaacacagggttttg

SEQ ID NO: 56517 - DNA, 1011 bp, Bovine  19866881127937
  misc_feature (1)..(1): n is a, c, g, or t
nacacagttctacaagtaaagaatcaaagacccttgcgaggttggagccttgcacagggtttccagataagagaagcagtggccactctgttcaatccacccaactaagaggcctcgagagcgtgctccgggtgagcgggaccgcagtgagtgacgcctctgtgacttacaagacccagttagcgaaaaatgtgatgagcaagtgctcagctgcagttgggtgttcttgaacttttgttgtcaagggcacccttgagctagagggtggggattgtgaaaagggagtagggaagaggagacctatcttgcctttttgtaactgccaaagctaatttcagtgattgctttagcaatataacgataaccaagattaaagcaagcaggcatccactttaggatatgagagctggaattttagatttcattataagattgccatttcaacacaatagtaatataatggcaatggatttccattttttctccatttctgttgaaatattatctcataaatatactttgatacaaaagagatctctcaatttcacgagagctccacagctctattttattcttacactgacttatccccaaaatatctttttgatgtacagcttcaatattcttgccaatgtctatgacatcagcaatcaaaaatggcattatttttagttttttttttcccacatacagttgcaggctatccgaaaaaaggggtcctgcttttagtgttcactgaaatgtacttacagtatatttgtgactcatggagctggttgttccaagagggtggaaaatgtagcatctatcaaagaaggtaactttacccagtgcaaacctaaaatgggggctttcctttaagaagggaactaacaccgttaaatattaggatttcttgtactggaagaaagcattgttttcccaaattgtatttcaggaaactgagtttctgagaccacaagctagagagtgtcagagctctgcatgtttcttccccaaggaaggtccaca

SEQ ID NO: 56518 - DNA, 972 bp, Bovine  19866881143636
  misc_feature (1)..(1): n is a, c, g, or t
ntgaaagatgttgcctgccgtatgtctcctgaaattaaagggacagcatgattggtgcctaactccccttgcaggagagcaggctggaaaggctgcggtgagagcctgccgcatcccactgggggctgaacaagccttgtgcttcccgtggtcgcacgtggaaacgatggaaaggaccggaaatggcatcatcctggaagggaccccagacggacaagatgtccccagttgtctcctgagacaattgtctaatgagactatttttaatacctggaagtggtccaagtttctttcaaggggaggaagaaaatattcaagataatatggttgacagactatggtattaaaaaaaatgatttcctgacttcagcctgacaagtccaactatttttcaacagactagcttcatttgtgagcttaatcttctttcagtatctccttagtagatctgtaacttacgttgccaacccctgagcctctcctgatactctgagacaatctgaaaagtggcaatcaatatctttttatagaaatgaaaatatttaataggtaactaaatgagaatatcaaaaaacttgcccaaaatgtagaataaaaaggcaaagggattgtaaaatgagaggaagaaaaaaaaagatttagatcaacacagaaggtttaacatctgactatccataattctggaaagagagaaaagacaaagtggatgggaggaacttttgaaaattccaaaaaagaagtttccaggatctgcaggacccaaagttccagaatgaaagggcacaacacacgcttaaatacggttactgaaaaatcagtaagtaaaagatccacatcaaggaacagtactgggatatttcaaaataacagactcagagagcgttccaaaaaggaaagcaagtcatacctcaagtaactggaatcaaagccgatgtcagagtttttaatactcacagttagaagagagagaaa

SEQ ID NO: 56519 - DNA, 782 bp, Bovine  19866881180702
  misc_feature (1)..(1): n is a, c, g, or t
nttcagtttggaggtagagagatatgtattgggtgagttagtttgggttgacatcattaatgatattcaataccaagcagatttgtcaagagcacaaaaagagccagaaatttcattgcacccaaggtgttgaaaaagggaaaaagtgttaaccaggaaagagcagatggacgtcaaactctgtaatcactgaggtgctcagacgttgctttcgcatgaacatatattagtctcaggccttttaatatagactgaaagccctatttagcccagacactaaatatttctattatttaaaagaatacttcattgtaactgagtagtgtttaaaagagtgggctatacagccaaagaaaacaagctttaagaacttaaaattcaaggaattttgaatgcaactggaatgcttataatttctcatttctcacataggataaagtttgatattttaagatacgttttctgtttcaacagtgaaataggatttcaataaagaagtatgacttctgtccccttctccatgcctttaaaaagcttggtaatgctgaaattcagaaatacgggtgacacataccgtaaggcttgagttttggttccatctatattttgttgtgacagccaaaaagaagcaaagtcagtttggtcagatatgaaggaaacaaagacatttggtagaaatctttttttttcttttgcatgtggatgttgaagtttgaagagctttataggttgtaaacatattccttgttgaattttactggggattgcatgtttccagcaga

SEQ ID NO: 56520 - DNA, 1391 bp, Bovine  19866881183934
  misc_feature (1)..(1): n is a, c, g, or t
ntacaactgctatctcctacctcttagcttctgaaagctttgatgagtgtggggggtcttcactttatttttttaagatttagtctccctgccctgaactggatttagggtaattgtgtatctacttgagggctgaatgcaatctctagcctttttcataaagtttatggccctggtgcccctttaaaagtctcctgtggctgactgatgggctcatttctgatactaactataaaggattggccatcttgaagatcagccgctcctccccggagcatctcagcggggaagggcagccgccttacggacaaggcccgtgttatggatggtgcttccagcctcgagcaggttcatccttcagcagtccaggctctgccctgcaccgaaggactgctccacggggcacgtgagctcagccacgtcctttagctaacaggcgtcagaggaccgagacatcatcagcggtgggagggataacgtgacagctaacaccccaattcccaacttgtgttcattttctcttggcgtcgttagtctaaagagaggtcggcacacccacagagccttcatcgttcaagaattcgagccttttgatttaatctaatttttctcagattttacccattaagaacgtgttctcagttttcatgtcaatctgccttttctcctcaagctgtctttcaaaaatatcttcgtgggacaaacagtgtgatgagtgagtctcccctactcctaccacttgtatgttctgggtcaaaatggcacttgaattcccagggaagcataaaaatgggagaggagatggctggaggtggggagagaaggtggaaaggagagtgagtgagacagagagacagggaggcagagagaaggaggcagggagaggagaggggagagagagagcgcggactggaggctgaggaaggcaggagaggagggattttaggagggttaccatttaagttttaactgaagatttaattccctgcaggaaggggagttaatttgcccttgttaaaaaccaagatatgaaagatgccacccaagagtggttggtgaccaccgggcagcctagcaggtatgatgagcagccgaagggaggagtcagagaccagtgcacacacagggggtgggggggatcacacgtgtggggagaaagggtgatcctccattcaaatattcactgaaggttttacatggcgggcatgacactgagactcggattatcagagctcaaagacaagctttggctgtgagatagccaacgcgcataaggaacccacactttaagcaatggaaacaccagcagtataaccaaaccattacacccaaacactaaaagtcacaaaaggcatttagagacgctggcagcatcgcgcacccacccctgc

SEQ ID NO: 56521 - DNA, 1721 bp, Bovine  19866881233185
  misc_feature (1)..(1): n is a, c, g, or t
naataagtctttaaaaaaaatgtatcccagggctcccgtggcggctcagtgtaaagaatccatctgctaacacgggaagacacggatttgatccctgctccgggaaaaatgccacatgctgcagagcaactaagcctggagccccagctactgagcctgtgctctagagcccggagccccagctactgagcctgcgagccgtaacacgcaagcctgcaggccctagagcccctgctctgcagcaacagaggccacagcactgagaaactctcgcaccgtaacaaggagtagcccccactggccacacctagagagaagcccaggcagcaaagccccagcacagcctaaaataaataaagaagtaagtaaataaaaatactttgaaaagtatccactttacaattatgtaaggcgtgaatcacatagaaactcagaagttttgacatcagccatggaactaaaggttgttgaggggttcctcttcaggaaagaaccaagtgggccaattatacagtcaaaggaatgaaagtcagatatctgtgggcaggtaaaggactctgagtgagtcagagaggaaaaatcagaacagcctggggacagatgggcattggtttggataacttaaatgcagctcaacttcaaagggggggaaaaaaaggtagggagatcccattccagagaactttttggagcctggaccgcagtcagcctccatctgccccgggatggcttcctgcatgggcaggcctgcctgaggagtaaggacacactagtgggattcaccctggtgatgaatggcactaatgcatcatcaggatgacaggccacactggcgatgtcttgccaaggagcttaatgagagcaatagctcattctgattattctcccatgaaaggagggctctgtcttcagaagaactcatctacaagttgactctgtttaattacaggatacaacacacactaatagtaatgttaagatgttctttggcaccaaggttttggcactgataaaactaaaatttatgactctactctgtacacttggaaacattcacacagtgtgcatagtcttgaaatgagaagcgaggtaccctggaatccacttggtttctagctaggctggaaaaatgaatttctactgtagatctctcaatagatgcttcaaagatacagatttatgtacttgtgtcaatcaagctgtcctggaagttgcatttgattcacaagagatgaaggagggaggagaagtactgtgacttcccttggtgacaggcagaaactgtttattatacaaattgaatcttcacaatgacatcactttcacgcagactgcacctaacaataagcccaccaatgtcttaagcttgagtggaatttcgatagtaccagtgtcagcctaagaaagcaataaagcacgacgataaagaagaggaggattatttattaaacttctaataacaaccactaccatcttcaacctgcctgttttgtgtcaggtaagctattgggtgtttctcaggtgttccctctaatctttacagcaaggaaggtcacaggatcacttccactttacagataaagagactgagggtctgcgagtttacatatctcccctaaggtctagtaaagagatggctcagaatctgactgggtctgaaccatccactgtacaaaagctcagtccctgagaagatactgtttggggccagaaaagaggag

SEQ ID NO: 56522 - DNA, 1362 bp, Bovine  19866881260330
  misc_feature (1)..(1): n is a, c, g, or t
ntaacaggtaagctattttcttatttccgaaagttcagtaagggatccatgaacatgtgatcagaattctgttccgatgttctacatgttcatggtggtgtctggaaagttctcacgttcaccagatctcatccctaagacaaggaaatgtttcagttgctgacagtgttcccagcatgtaacacacgggtactgatgacggtttctggtaggttctgcagacctgtcagagcgttgcctctttcataggagaagttgaggggatgtctgcctcaggacacgatttccgcccttgtttctactgggtttctggcctcctgcagaataagtcgagtccctctacgtaagaagactttttttccagatacagagtggggtgatcacagtgtccatggggtgttaggtaagttttttgtaaagtgaatgacccctgtataacgtgagcagtccccttcagggagttgggtcttggcaagtttcatgtgaaacagtaggggagagaccaaaagcgcctgtttaaagactgaggaattgaagattcctggaactgaaatgacttgtccagtgtcggtggctaatcagggttgtgtcagaaatagcactcaggcatcctggttctgagcagagggcccttgtttccttagagagcattctcaccagctgagctgaacaaacgacagattaggagcttctagaagtcagggtctaccccagcatattgtccagttccctcaaaacacgcttaacaagcgctttttgaaaatgatgagaaaatagcttacctatcacttccctgtttgaatggagcgtcagccctcacacacgctttcagaattaaaagggggaagaacaaccatcaaacttctgcagcaatttttgtaaactcttcctttcttccttgggacctgttggtgacattgcctaatttttaaaatgggtcatttgtagcaatagaagttagcggggaaatctctcaatctctcgttcccattcccgtataaagtacagtttgaaaactgcctcttaaaaagttctagcagtccgtcctaggggcaatgcctgaggctgatgcccatttagttttctgtggggttccgctgctgtgccctcgatacaggagaggttgctcactgaagctaggagggaaagtgcttagagtcgagggaagtgttttgaggcatctgagcagcatcttgccgtcacagctaagccggccgctgcctttcccgccacactctgtgcagctgacccgcacgtggctttcagaggcgcatgagccagggtgctcgcctgacggtgctcctggagccagatgcatggccaaggcagggtgacctacttccgttaccacagcacccagca

SEQ ID NO: 56523 - DNA, 1787 bp, Bovine  19866881277922
  misc_feature (1)..(1): n is a, c, g, or t
nacgcttactccttggaagaaaagcttgaccacctagacagcatattaaaaagcagagacagtactttgctgacaaaggtccgtctagtcaaagctatggtttttccagtggaccataaagaatgctgagcacagaagaattgatgcttttgaactgtggtgttggagaagacttttgagagtcccttggactgaaagaaggtcaaactagccaatcctaaaggaagtcaaccctgaatattcattgtaaagactgatgctgaagctgaagctgcaatactttgagagtcgactcattggaaaaaaccctgatgctgggaatgattgaaggcagaaggagaaggggaaggcagaggatgagatggttggatggcatcaccaactcgatggacatgagtttgagtaatctcctgtagttggtgatggacaaggaggcctagtgtgctgcagtccatggggtcacaaagagtcggacacaactgagcgactgaactaaactgagtgcagtgataaggcagagtcctcgttcctcctcaagggatgtacactgaacagtctcacacagatctctgagttcttctggaggaataaggcccccacccagatgaaggatggtgacttgggactgaacacagtatgtgaactcagaactggctggacccagaaggctgatgattgagatcctggaacctcaccctgttacctccctcaccaaccagtcagaggaaggtcagacactcggcagccctcccctccaaatttgcccttccttgataaccgttggggagtttgggtcttttcagcgtgagccgccagcattctttgctctgcccaacaataaacctttctctgctccacactcagacgtgtccgtttgtttggcctcaccgtgcatcaggcacatgaatacagcctgtaaatgacaactcagtaatgctatttttcagaacagtgaactgtgttcatttaaaaatatttttattttttctatgttgattctcatcactgtaagataaagacaatcaatgaaatactgtttcttttctgatatatgttggattctcttagccgtcatggatgtttccgctttctcaattcagtgggcaagcttcaccctgaaactaacagcctgcaggcattggctgaggatactaacatccaaaaacaatagaaagctcagttggtaaatgcaaatcaatagcactggctgatgagtccacgtgagtgaaaagagatttgtaagatggagtgtcttcacgttagccattaaacctcccattcaccaggtcttcatcaaatgcctgtcttcagtggggcaattgaacctaagacatcagacatgtttgaattatggagatcgataactccactgctagtcctgggcacaggttaaaaggagctgagcgtaatatcccccagaaaatgatgtaaggagagatagcagccagtgcctggagatactctcttagagctactgccacagatgaggttgtagacgctaaagtatattcgaaaagacaccccaaaccccatatgttaaaatgctgggaaactcactcaagcatcagatttgagaactaagtggatgtgtgggatttttaaaaagttacttgtttaggctgcacctactcttcactgcagcacgcaggcccgttaggtgcggcatgtgggatctagttacttatccagggccctgtgttgggagtgcggagccacagccgctgaaccaccggggaagaagtccctgtgtgtttacacaggccctgtgtgtgtgtgtgtgggtgggt

SEQ ID NO: 56524 - DNA, 1059 bp, Bovine  19866881310097
  misc_feature (1)..(1): n is a, c, g, or t
ntcttgaggtttcctatacttttctgacctgtgggcgaacctctttgcatcttatgaagcaggctgagtggtcataaaaacattcaaggctgccttagttataaagtctaatatgttatgcagagagaaatcatattgatgcaattataagtagttttttttttctttttttttttagaaaaggaaagatcagcagtgcctacttttccttccctctctctgaacttcatggtaggaacaaactttctttctgggcaaaggcattccttctgaatctattaatacatcactaaaaagtttcttatttttcctcctttctccctttgcttctctgtttctccctccttccttccttcctgtcttctttctctcccttctctctttcttcctttccacttccaagttctgatggaagtttttttttttttcctagttatttgaaaaaaaaaaaaaaactcattgcattttacatctactctgacaattctcaagttacaagcctctgaagtgtgcttggcctgctgctgggtgtatttattaccgataataaatgagttgctggtgtgagaatgcaaattttatgtggtccatgtataaatgagcccgttatgaatgagcagatacacgtcttatgtgactgctaaataacaatgccgtagaaatacagcttgtgaattcaacattaaagaaagaaatggttccggataatgttagaacaagtattagtcaaaacgtggttttagtgagttaaggtcataaaaagaggacaaagaaaacgtctggtgtctgggtcttagaaagagaccgggaagcttaggctgaccaggaccgctctaccctcatctcactacagtaggaagacacatctcattcacaaaattgctcttatgttttcaacatctccatctttgcggatggtattcgatgaaggacgtctgaagttgtgtctatagatagccacaaaacatgacgtcagagctgcgaaagtggcgtcaggggacagcggcgtgccagaggaggagcctgacgtaaccgtggggctcacgtctggtgggggaa

SEQ ID NO: 56525 - DNA, 1055 bp, Bovine  19866881323936
  misc_feature (1)..(1): n is a, c, g, or t
ntgtcggcaatcagtgagctcactatttatcctcattaacccaaagtctgcatattagagcccgcctgtccacaccttccgcttacctgaggcaagagtgggaaaacaaagacagtaaaagctaatgtccctgtgggctaagataattagctgcaatcctttttccccccttgaagccagttctagtcatcagttgaagtgctacataaatgctaaggctcccttattgctttataaagttaatccatcccagggtgagactggtttattgattgattatgtggcagtgaagggaagcagaggtgtgaactccaggcactactgtgcgttcactagagccatgtcgactttaaacaacattgagatgctgttattccccaatcagatgggcagaggtagaaaagcttgatcagtatcgcacgggtcaggatgtacgggaaacaggcacttttatacactctggatgggagcataaattgttaagagatcagtggagggtgtttccgcaggggggcgccaggcaggtgcggttcccgggggcagggattgctaccgaatcctccctttgttctagcaactcagcttctgtgaattcatcctacaaatctctcacaaaatttaacaaagataaaagggcaaagttatgttgtggttaacaacgcaattatcagtcataggagaacgcattacgtcatgcagtgaatacagctagatgtgtacatctgtcccctctttttcagatttccttcccatttaggtcaccacagaacgctgagcagagttctctgtgctacatggtaggtcctcattagttacccattttatacttggtagtgggtatacatcagccccaatccgtttatgcattcttctgtggatggacatttaggttgcttacatgtcctgactattgtaaatagtgctccagtgaacagtgggatgcacatatcttttggaattatggttttctctgggtatatgccccagagtaggattgctgtaaatgtaaggctagatgctataaaactcttagaggaaaacataggcagaacgtt

SEQ ID NO: 56526 - DNA, 1062 bp, Bovine  19866881375665
  misc_feature (1)..(1): n is a, c, g, or t
ncaagcctctgtcgcaactgcccagcttcgctgttctgctgaaaaagcaggcacagacattacgtgaacacatgtgtgtgactttgttccaatagaacttcatttataaagacaagaagcaagaaacgtttgtgctacaggttatagttttgtaactcctacactacagaaagaaaaaagttattttagaaaactgtgatggttgagaaggaagcgtgatgaatatcctgcgtgtagagaggagggaactactctgagtgttcaccattagatgtgatctcggacgagccaggtgggctccttgacctcttgagtaaagcaggtttactaatgccgagattgtagggttattttgaaaactaaatgaatttatgtaactcagtggttagtacatgagaaagttctcttccccccagggaggggattaatgcaggacttttgtactcatgtaggtgaagcacttgggcaaggaaaaattgcccaaatttactggtgtctcagcctgtccaagtcttgtcccatgtagatccctttagaaaccgtgttctcagactgttggcgaagtttgggtaaacatgactataccagaatgatcctgagatttcctgaggaaggattaacatgcttcgcatggaattttgcaataaaggaaacactatagtttaattcatagtgatttaaggagatggaagattttttagaggggaaatctaattatagtgaaaataaaatttcatttgcccatcatttccttcattattcattattttttattgggaagataagtatgtacaaagaataggaaagaaaaacatattagagtgtactaggaaaaataaggaattaatgtaatgctacttaactataaatttctcatattataatcatattttaatttatcttcaagggaacctattgggtaagttgaattggttattttaagacagaatttctagtagcagttccaaagtaactagtattgcttgttctaattcattttgaattaaggtattttttaggacttgataaatttgtttttttctctgcggtatgtttcattca

SEQ ID NO: 56527 - DNA, 652 bp, Bovine  19866881500646
  misc_feature (1)..(1): n is a, c, g, or t
ntatgttttcttggaaaaatgtgtgtatctgggatgtgacaggagttgcaaccttaaacaagatttctaggcatttatggtttaaccatgccagtgaaaatatgttatgtagacattaaaatcctagggtgcccacgtacatatcctaaataatgtgtgttacatgagctttcttggccactgtgctttagcttggaaggtttttagttctggctcctggagtgctgttagtgtactgcagggaaaggtgaactcaaatggtgagtcttatttgcggttcagcacgttgggtggcgtgtttcttaggttcaggagaattgtgtctgatgtaggtaaaagttgcatcacaattgataaggtaaaactccttgcttttattgcccctagcagcagagaggttactgatgggcgattggaagaggaaaaagacagcaggtttcctcgtcagtcactattcattcatctgcgtgttaacaagcatcactcaatttcccattctctgcagagctgtgtgggaagatgggtaagcagagaggggaaggcggggaccctgtgctcctggagcctaaagtttgatttttttcatctgagtgtcaaaaaatcaagataaatttcttcttcggtcaaattgtaacacccaaaagttaataaa

SEQ ID NO: 56528 - DNA, 1421 bp, Bovine  19866881887664
  misc_feature (1)..(1): n is a, c, g, or t
ncaaatggaggtacttttttaactaacagatttatgtatgtcctacgtcattgaggaaaataaattttactaacttacaaaaaattcataattcaactttttagaattgtaaaggaggacatctggggaagggcttcctaggtggctcagtggtaagtattctatctgccaattctggagatgtggatttgatctctgggtcaggaagatcccctggagaaggaaatggcaacccacgccagtattcttgcctgggaaaccccatggacagaggagcctggcgggctacagtccacaaaagagtcagacaagttagcaactaaaacaacagcaaaacaacaacaagaacgctggggaaagagaaaataagtgcggggaagtgggttgaaaccagtatgaggccagggcaaggaagggcatcccccaaggtaggtcctcagtgtcgctcggatgatgtgaagtcctgtcccaagaagagggtccacagagtcacgtggacgacaggcttcataacacagaaccatctagccccccagagaacacgtacaactgtatcgccaagggcaggccgacaacacggtaaatctgactctgttcatgagtttgtgtttttaataacatctctcaatgcaggccaaattaatcattccagggttcagtccgtgaaggcgggtccctgtggggatcccaagcaaagtctccaggtacatatagctctcttgcaatctgaacttaatccaaaaataaatatgagtgtgtcaagaccaaaaaaaaaaaggccttcatagccttcaggcaattctccataaaaactgttttctttagccaaagacttttgtcagccgtgagaagccatgaatctgaggttatactctcctgacaaggacctacggagtcaaaggagcaggactttccctcacagaacaattctgagtcggttccaacagtcaccaagttacggaaaagtgtagaacagcgtatttaaaagtgtgggttttggagccagaaaaaaacctccatggggacccagccagtgaccccgggctaaaaccacctcctctcatcttctcttggtgaggctctgcccatcttacctgcctggaagcatggccagcatgtggactgaatcgaagcccacgtggaaggtcctttgcccagatcctggatcagactcagtttttcccaaagcttcagtcagttgactgataagggggcaaggggtttgaggaagaggaggaatatgaagaaggtgaagaaaaagcggaaatgataaataatacgtgtgctgtgcttagctgctcagttgtggccgactctttgcgaccccgtgcagcgtagccctccaggctcctctgtccatggggattctccaggcaagaatactggagtgggctgcatacataggacatacataattcctc

SEQ ID NO: 56529 - DNA, 1509 bp, Bovine  19866880828525
  misc_feature (1)..(1): n is a, c, g, or t
nattatacagtctctgaacatattcacgtcttattaaatttcaaataagatcttcatctctaattccattttacaagaaaggatgtaaaatttctattcaattaattatgtcaacttaatctcaataagcctttattcagctcaaggagccaaactgtgtctgaagtctttttcttacaaatgagcacatttactatttcctcttttccccctgctgtttcttttcaataaagttaaatgtccccagtcaatcacagttaaataatttcctcctaaactagtcagtatcaatcaattatgataaattaagactgacaagggataaaccaaggattgatgtacgggcaaattgaaacaaaagaaggcttcagtggaaaggaagtaattacaaatagtggaaagttaccctttataaattaaaaagcaaaatattttattataaaaaatcattttaattatatatacacatgtgtgtgtatatatatacacacatgcacacataagcaaatagttatttttcaatcttcaaaatatttccagcctgctacactagtataagttgaaaatcaataggatataagcttcgctttttttttccatttcctataaaatatatccacttactgcaattactttcacctgttcttttgtagatgaaaaattaatcagctactctaagaaagcagtggaaaattttatttgagccaaattgtggattataacctaggaacagcctgagaactgttatagccattagaagttgaagcatagctatacaagttttttaagggggctgtacattaaatgacattttactggcagtttgagcctggcatgctgcagttcatggggctgcagagttggacacaacttagcaactgaacaacaacaacacaacccagatctaagcctacaaagccagtagtgggccatgggtcatcatggacccttccaagattaagaaggaacattatcttcaaggagtggtcttgttggtgctgaagaaaggttgaacaggtatttctatgagtaagtttggttgatgcaaaatgaagatacacaatatacagtaaagtctggagaggaagctaaagggaagggaattttttatgtttaaatttttcttgtcttgccattaaaataagaattttatttcacactctggtcatcttcttacatactttacaaataaccttactacttagactaatttcttgtcttttttcatatggtttcttctcaacaagaaatcagttttcaaaagatattgtagttttatgtaaagaatcttaacttcagcagtcaaataaaagctatcaccttttctttctccaacatgagagaaaaattatcaaatgaggtcaaaattagttgcatatatggtgtgttttcaaagatgcattttatgaattatgttaattccttgtacaaataatggaagacgtttcattgaattatataaaagtagaatataatcataacatggattttacattatgaatagtgata

SEQ ID NO: 56530 - DNA, 1226 bp, Bovine  19866880900809
  misc_feature (1)..(1): n is a, c, g, or t
ngtacattaattatgatcgtatgtttgtaagattgtaaaaaaaatatttaattttgaattacttgatttatgatccaaaagataaattattaaatcttgattatagcaaggggttgaatagccagaagagaggaaataaacataggcagaggaagtagagacaaaatgaacattgtttctacacatagttcatcacatccttatgttcaagtgctttatttatactatcaccagaaaattcactttgttctttcatgtgttaatcttccaaagctcttcctattgcttgaagcacatggagattggcaccttcatatttttcctaaattacacttttttccctcagaatgcttattcattctagtatttctgcaagcaagactatgttaatatcctgtaagcagagaaaatgcagccatgtcaaatattgtagggatactattagaccactgagttagttcataatacatttaacctggttctatataagttatgaatacaatcacacaccagcatggcaggattatatattggcatatacagtgaaaagaatcacacaaaccaatgttaacattaaataaggaaataaattaagagtagaaagtattaggactgaaagtaatgacagttttgcattcatgagcaatcctgatttgctttcccagtatcattactcagcagagtctgtaaatgtgacattttgatgaaggttgtctttatgtgattggttgctttcattttttaggtgttagaaacagtccaagaaacaaaataatatatcaagcagtgcaagagaaaatgaattcagggaactttatgcatagtgttttgagtgatgaaggcaaacttgctggaaaaaaaattatactagctaatatatagtcagctaataaaaagaataaataattctccaaatcagtgatatttagaaacagaaaatagtattaatatattcatccatttggtcaatgaatattattttttattacctagtctcctaaaatagaatcttattcaccaaagcacatgtctttctctccatgttgtacatacttgacaaaatctttgataaacagaaaacagtgctaaatattgttaaatctggcataacaatcaagatggctatttgttaaaattgtgtgcaaatgtttagtaacaggatttgaacaagcttacatattttggttcttaatgtaaatcaaatgaataacagttattttaatgca

SEQ ID NO: 56531 - DNA, 4745 bp, Bovine  19866880986575
  misc_feature (1)..(1): n is a, c, g, or t
nacttcactttcacttttcactttcatgcatggagaaggaaatggcaacccactccagtgttcttgccttgagaatcccagggacaggggagtctggtgggctgccgtctatggggtcgcatagagtcagacacgactgaagcgacttaccagttaccagtgaatcagtggcaaagaatctgcctgcaatgcaggagacacaggatacatgagttcagttcctggtccggaagatcccctggaggaggaaattaatttgctgattgtctagtgtttatgtgtgtgtgtgtgtgtgtgtgtgtgtgtgtgtgtgtgtgtgttggtttgcttttgttgttattaagagtaagaataatgctgtttcaagctttttatgttctacactgaagtcaaaagtcacatagtcatttagctagattttgaagaattttcagcattgaaggcacttgtttccaaaattcagattagtttccctccttctggtttagtggaatggtaaaaatctccacccaacacatcttatttgagctgagcttttccccgactccttgcaagactagtaatgacattgctattcagatacaagggactagaaatagatttgcgatgatcctggataagaaaaagttcagactcttaatgaggaaagtgggaatatagatgaaaagaaatggtggattcaaaaagcagaagagaattaatttaatgacatttatttatgaggtacttaagaagtaaatgatgaaaataatacccatttttttttctttgtgtgactatggagagtgtgaaagtcttacttatagcaagttatacaagtgaagtaaaaaattgggggaagaagacaaatagtagacattgagctctttttttgtgtatatgaattaagctgctgtttttcagaggtattgtttaatctttgcaattaccctttattctttaactttttatttatttacttttggctgtgctgggtctttgtctagttgtggcaagcaagggccactttctagttgttacacccaggcttctcattgcagtggcttctcttactgcagagcacagactcgggtgcatgggcttcaatagttgtggcacatggactcagtagttgcagctcccaggctctagagtgcaagctcaatagttgtgacgcacagacttagttgctccacagcatttgggaatgtttgtggatgggggattaaacccctgtcttctgcattggtaggtagattctttaccactgagtcaccaggaaagacctaagtatttattactttgatcacatttcacagattgggaaactcagttttaagggaattgagtagctatgatactacatggcagaatagagaatacacagtaacacttgccaaggtttgtaatccttgacagtaatgaagttttgaaagtgaaagtgttagtcactcagtcatgaccgaatctttgtgatcccatgaactgtaactcaccaggctcctctgtccatgaaattcttcaggcaagattactggagtgggcagccattcgcttccctagggtttcttcccaacctagggatcaaacctgggtctcccgcattgcaggcagattctttaccattggagacaccaggagggcaagacaattcctggggggaattgtgctatgcattacaggatccctgagcactacttaatagatgccagtagcaactaccttcccactcaattgtgacaaccaaaaatatctccagatattgcaaaagccccccaggggaaaatatttgccccattttgagactcttgagagttggtgatggacagggaggcctggcatgctgcagttcatggagtcgcaaagagtcagacacgactgagcaactgaactgaactgggctgagaaccatcaatctaatctcccttactccaaactttcagctgttaatgagtcttatctattgcctcctgaagttcagtgtgtatctttgaatttgacattaatagattataagtattgtagctaattctaaatggaagcaatggtataaaatagcatataagcattatcagaaatttgagaaaatgaatgaaattgtcttggtctgatggcaattttaatatctctagcatatgcataattagtgatactaaagaatttcacctaacccattttgtttcatattagattttattagcacaattaagctgctctttaaaatccataaaagtccatctgtctgtagtctagagtcaggcacatctttttcaaggtcattttataaattgataattaaccttctaaatatagatacttcatactaaagttcttttgccatatctaattaaagcaaagcaattgcatttatatctcccaaaagatatgtggtttgcatttattttagcattacaattaaaatgatgatttattggttttcctaaaaataaaatggtgcatgtaaacaacatctgttaagatactcacagtagtatttgtgtataattattaatagtccattattaagcacctacttgttggaatcatagatttatagatttcaaaagagatcatccagaaaaatactaaatgggaaaaacagagtcaaacagctgttaaaaattcaaacatgaaaagaaagtcatggcctactgaattccatgtagaattccaacttggtatggaattccaagttggtgtaagattgagaaagaagatgactaaaaagtactattgaggaaaaagccagctaagcacaagttaaaggaagattagttgaacaacaaagtaaagtaagttactatgtaaggatgaaattaagatattaagaaatacatttattgttgtttagctcttaagtaataaaggaagtccctgctctctggtggctcagtgataaagaatccagctgccaagcaggagatgtgggttcatcccagggctgagaagatcctttggagaaggaaatggcaacccactcccatattcttgcctgggaaatcccagggacagaggaacctggcgggctacagtccatagggttgcaaagagtcagatgcaactcagcatgtgtgcattagttactggagaattgaaggaatgcagttaaaatataagaggccacaatacaaagagccacaatgttattttgaagttgaactgcttttgtagtcagttgtctgcatattttaattaaagatccaatacacattgataactgcagaaacttgggaggcctttaaactgcagttccttcactggtaaatagtgatgtccatatttaccttgcaaaatatctatgaggacaaggatttgttgtgcttaagtaaggctagtactggccttcaattcaacagaagagtatcaagggtcataagtctaactgtagtgatcagaagtattcaaaacaaaggatataaatagtgagctatattttctcaactattaacacttgttgaatgtaggatggtttaatataaagtattaagtttatacttacaatataattaatattctaaactgggaaacatttttaatttttgagataaagcttaagtaaatacaatgtagaaaggatattataatcgtctataaacaattttcaatgcatgatcagcctacttttacacatatccccacccaatttcccttctctacatagtgtaaattaatatgaaacagatacaaattagagaatcattttagtttaaatataccagcatatgttctataaaacagtttctttaaaaaacatgaaatataccctcaataaaattaccacatcaaaaaaaaccccttttaaatatcagaaaatatagagacattgttcacaagtacacattataaatctgtttttaatttcttttttatcagtttgacggcaaaattaagtgatacctgtgtatataattgaatgatacggccctcaagtctcttttttcttttactttctcattttttaaaatttgtaatacaatttacatttagtaaatttcacagatcttatgtgtacatttgaagagttttacatatatataatttctaagtctgcttatctatcaactaaaacttacaagattttatttactccagagaatttctttttcttttcaatagtatattaactggttttaagtaattttttgcttgtttgttttggacagataaacctggcttgctgcagtccacggggtctcaaagagtcagacacaacaactgagtgactgaaccgaatttagatataattgacacataaaattgtgtaagcctaagttgtatactatattgatttaatgtatttctatattgcagtatgattaccacttcagcagtagctaaaagcatttctttatgtaccttttagggggcaattttttccccccagaagcaatcacaaaccacatttctgatttctctaaatacagaacagttttcactgttccaaaattcctttgtgcttcacttagctcttccacttactcaaaccctggaaatcatggtatttttatcatcctcatagttttgtcttctcatatatgtggcatagttaaaagtatacagtaagtgatctttttaaattgcttccttcatttagcaaagtataatagcttctttcacttagatatgtacttcatatcttgtcatggctggctagttcatttctttttattactgactaatattccattgtatggatataaaaacagcattttgtttatccattcatcagttgagagacttgttgactgctatcatttggcaactcg

SEQ ID NO: 56532 - DNA, 1599 bp, Bovine  19866881016890
  misc_feature (1)..(1): n is a, c, g, or t
naaatttggttacattggacacatttcctaggtcaggcccctcagctcaccatttgaaacaattctcctctgaggcacctatttcatgagatctggtaacatgcattttgaaagtgtacagctctagttatttctaccaagtttatagagaacatctgggtggatacaagccactcatttttctgatacataaggttatgaagcaggaattctctgttccttgtttcctcattcccaccaggtatccacacaccactggggtgtattctccaaatattcatataagagatggaggtgagagaagatattattttacttcattatggaatttttttaatgtagttttcatccttacttaggaaacaagttctccagtctagcaatagcaaaaaaaaaaagaaaagaaaaaaaaatgatatttttattcccatttgaagaatatgactataaatgaaactctaattaattagaatttgttagtgaggagtgataattaatgaggttctcctggacctcctatagtgtagaaattaattaaataacaaattaaaaaacgattttccacattttcaaatggggttaccaccttcactaaattactttctatattgttgattttttgcctttaccattgtactggtggtagaactgaaaatctggacactaaatgcctcaatctattcttcattaaatacaaaaaattatccccccataagatatgttactttcccctcaaatgtatatttttgagtatttaaagttattgctctaattttgctaaatccacatttgtgttttttctcattttggaagctagtattgaaaatgtatagctgtcaaccattttgcatagtagctaacatagtactcatttagacaactgatgatgtcatactgaaacactgagttgctgaaacactcatcatgtctaagtagagaaatgggctatggagtcagaactacatgtatcccggttctgtcactgactacacctgtgcaggtagatcagttattgggtctttttacacttacttgtacttaggttcagttcagttcagttcagtcgctcagcgtgtccgtacttaggttacctaaagttaataatcattacacaatggtctgctggaacaatatgtatctatctttaaataatattgtatcctgtcattgaattccaatatttaaattgtcaaaggttaatatttgcttttagataactaaaatgaaggcccatttatgtgaacagtatctgctgctgctgctgctgctaagttgcttcagtcgtgtccgactctgtgtgaccccagagactacaggccaccagactcccctgtccctgggattctccaggcaaggacactggagtgggttgccattataacttaggactgtttaaaccactgggtttagggttttgtttgtatggtgattcatttgtaattggtttgaagagaaccagtttttttctctatataaattacttgaagacacagaatacataaattataaaagaataatagattcaagacaagatcttctcataagataccacttaccatatgcatatggagaaacattacaaattaattacgagacaaa

SEQ ID NO: 56533 - DNA, 811 bp, Bovine  19866881158256
  misc_feature (1)..(1): n is a, c, g, or t
ntcgctcagtcatgtctgactctttgcaaccccatggactatacagtacatagaattatccaagccagaatactggagtgggtagcctttcccttctccaggggatcttttagctcctaattataaacgtgtgttttgtttcaaattcttacccgaatataaggacttcctaggtggctcagaccataaagaatctacacacaatgcaggagacctgggttcgatcctggcttgggaagatcccctagatcttcaaattcttatgttttatctctctcttttttttttttttgtattttttattattgaatagtacaggtcatgaactagagaacagtagttataatgaaaattcctgcttcctttctgaaattatatattattgaactatccactgaaggtgttacctttggggtacaagtatctgtgcaatgatatgtaatccaaccttccattttgttgcctccatattattgattcttccatccccaattcatgcctaattaaaattcaaaagtatagaccacagggataaacaagaaacatggagggaattgatcctttcaatgctacttaaatctcaaaactagtcattttctttatagcactttttggctttatagcacagcctaattttaaattatttatcttctatctttcagattttttaaaatataatccataggcaggaacgcaatttttaattatattctccaagcctttgactttttttttcattttcttactagtgctttttgaagaacaaactatggtaatatcaataaattctaatttgctatgagtttttaaa

SEQ ID NO: 56534 - DNA, 4309 bp, Bovine  19866880348415
  misc_feature (1)..(1): n is a, c, g, or t
ntgggagctgtttccggcactatgacataagcaggaatccctgggagggagaaacaacgtttagttagtacaaatttactacttgttagtacaagtttaggatagaaatctctgttcagttcgcttgtaatcgggctgggaaatttatttccatggctatcaccaatctcactgaaagttaaggatacttttccactcctctctgatgaccctactcaggaccctgagaaattagtcaagtaccttccaatctggcagcaaaggagagagcctggccatggtttccgctgctgtgagcaacaacagctctgggcttctcttctggatgggcagaaatcaggcctctgattgcattaagggcaccacgaatctagaaaagagggatggtgaattaatccatttgttctaaatgtttctttaaaaaaaaacaaaaacccaccagctttagatttttctctcccaacactgcacacccagtaaattgtattggttgtacctcctaaatatctcatgttcatcttggccactaccctcggtgaggcttaatttctcaactgggagtttctgatctcagctggtcctgcctcaaggatcattctcatctaatagttccgctagattatgaaaattaccttttaaaaacatgttacctttttcattgattgcctatctgtaagaaaagtacaaattctttaaaagctgcagcctttctaacatacctaatacattactttctaacatgtcagtgtcatagccatcttaagttgctgctagtttcctgccaggttagctcacacctctatttcttgacatgccaatgcctctacctgtagttttttctctccctgatctggctagaagtatcatcctataaaacttggatcaaacatcacctggttcaaccttcttgctctcgcaggcaaaattaggtactccattggcttccatgttccttgtttgtatctttatatctttttatttggactgtgctgcatggcttgcaggatcttagttcctcaaccagggatccaccctgggcctttggcagggaaagcacagggtcctaaccactggatggctagggagttctctctatctctgtaagacacttgtcatcaacctacttttgtcttcccctgaaagtatggctatagggcaaggcctccagtacatacacctggtatagttagtgaaaatatgtgcttgatgtgtgacaagtgaagaacaaaccatgacagaagcaaagggcataaggaaataaagaagtttttgtattgtttaaaagttctcagttaatgggtgccaaaaaaaggtaaatacatgatatcctaaagctaccacttaacaggtactaatacttctcagcacagtccaaaatgtagttttcagatttttacttgaatgaatcttgaagttcattctaatgaatgaagttcaactaatggtcagaaaattctgataatgaagaaacacagaaacctatttttatgcaaaggagaggccctgacatatattacagaaaaaggttttgttatatgagggctgagctaggtgtagaccttttttattcataatgtataaacacatagcaagtgaatgcgtaaacttggctacatccagcgtgatcacacgtgttgcagtcatgtcgcaaggcactggacacgactgaacaacacaggtgtccaagctgacaattgtgctctctgttctgtcattagaagttccccttttcatccccaaacatgtcctaatatggatagtaagctgtgtgtgatcaccttaattataagggattttgagatagtgtaaaagtggctctctggaacaccatgatgctaagtaactaggacttaagcaaaggaaaaatttgacaaccctttctttagctataagaagacatttaattctacctacctcactgggtggtcaggaggatcatatacatttatatgtgaaagtggtttgaaaagaaacatgatacactatcaaaaaggattgttaccttaaaagatccagttttctggaagagttcacatttgaagaaaagattacgtcctgttatttgattcaaaatggaacttgttagtactggtgtgaggtgaataaaatctcgaatgttgatatgagctttttcaacatcagcaaaggagatgcagtactgatcacacatggttctgtaacccaagaataagaagggggtcaaagcaagcctagacgtatgtttaatgaaaaggttttgaaaatgcacaacagacccatggaatgtacatccccaagagtgaaccataatgtaaactatggactttggtggtaatggtctatcaatgcaggttcaactgtaacaaatacaccactctggtgggggatgtcaataacgagggaggctatacatgtgtgtcggagaaggcagtggtaccccactccagtactcttgcctggaaaatcccatggatggaggagcctggtaggctgcagtccatggggtcactaagagtcagacatgactgagcaacttcactttcacttttcactttcatgcactggagaaggaaatggcaacccactccagtgttcttgcctggagaatcccagggacgggggagcctggtgggctgccgtctatggggtcacacagagttggaagtgactgaagcgacttagcagcatatatatatatatatatatatatatatatatatatatacacacacacttagatatacatatatatatttagatatacatgtgtgtgtgtatatatatacttagatatacatatatacttatatatatatatatatatatatttatttagatatacttagatatatatatagctcagtcggtaaagaacctgcctataatgcaggagacccaggtttgattcctgggtttggaagatcccctggaaaagaaaatggcaacccactccagtattcttgcctgaagaatcccatggacagggatgctatagcttttcttccaaggagcaagcgtcttttaatttcatggctgcagtcaccatctgcagtgattttggagccccccaaattaaagtctctcactgtttcccttgtttcctcatgtatttgccatgaagtgatgggactggatgccatgatctttgttttctgaatgttgagctttaagccacctttttcactctcctctttcatcaagaggctgtttagttcttctttgctttctgccataaggggtggtgtcatctgcatatctgaggttattgatatttctcccagcaatcttgactccagcttgtgcttcttccagcctagtgtttctcatgatgtactctgcatataagttaaataagcagggtgacaatatgcagcattgatgtactcctttcccaatgtggaaccagtctgttgctccatgtctagttctaaatgttgcttcctgacctgtatacagatgtctcaagaggcaggtcaggtgatctggtattcccatctcgaagaattttccagtttcttgtgatgcacacagtcaaaggctttggcatagttaataaagcagaagtagatgtttttctggaactccctcgctttttggatgatccaacggatgttagtaatttgatctctggttcctctgccttttataaatccagcttgaacacctggaagttcatggttcacatactgttgaagattagcttggagaattttgagcattactttgctagcatgtgagatgagtgcaaatgtgcagtaatttgagcattctttggcattgcctttcttacatgaagtttaagagcactgttaacaatgttgaataaatttatttcattgtggaaaaaaagatatatgccctctatacccagttttctgagagtttttatcaaaaatggtgactggattttgtcaaaatcttttcttcatcttttgaatagtcatatgatttttatccttcattttgagttaatgtggtacattacagttattgatttgcagaagttgaaccatctttgccctcttggaataaattccattcagtcattatatataactcttttacatactgttgaatttgttaatatttttaaatacttttttgcatctagctcaagaaagcctgtacttttcttcttttgatgtatccttggttagttatggtgtcagggcaatagtagcttcataaaatgcatttgggagtgtttccttctttctaaattttataagagtttgagaagaacaggtaaggaatcttctttgaatgtttggcagattcaccagtgatgccatctgtcttaggactttacttgggggaagatttttttatt

SEQ ID NO: 56535 - DNA, 1729 bp, Bovine  19866880485513
  misc_feature (1)..(1): n is a, c, g, or t
nattcactgagtggatgctgtagttgagggattggcagggtctgggtttttttttaggttacaaaatgacatctcccatccactgatcttccatactgtggagcctttttcttttaaggctgtgaggaataacatactccagatagttctgtagatgtcagaacagaaatccctctgacacactaggtccctatgctgctcttcactttggaacgtctgggaatgatctcaagaaagtaggaaggaaatcgcttccacctaacacctctccttcgcgtgttttcattagtctatgcccgcatttgttttctgcaaagtcagattcctcattgatcctaaactaaggtggccagaaagcctgtgcttcagttttcttctcctccagaaatgcctactcccacgttgtctccttgacacatttggacccttgtttaatcgttcttcattccctgtctgcctttcattgtgttaccatgtttccttgcacagtcagtcacttggaagcatcctccacctcctcagggcagttctaaaccacatcatgaggtctccctggttttctcctcttggcccgtattcctcttctttctggtcacattgactgttccttgcaggagccacttaggcacgtatggagcacttgttctgatggtgacaggacttccctgacactgcagagtgacaggggcagggcttcagagccatttgtgcctctgcacacagtggcacttagtaggctggcattggcacgtgggcacgttgacctcccattcgtgtctgttaggagttgtaatggaatggctttgtatccgagatttgggtatggaggtttgtatcagggtgtggaaagttgccttgagccactgtaaaaggcagtgtagagtgctttggtctgtttagaacagatcacagtctttggaggggccatgcacatgttgggggttggaggaggagtggggagcacagattctgtggctttcgtgagaggggaggggcagccactcctgactctgcccagggagcatgaggccgttgtgaacatcaggtggtggagaagagcagagcaacgggcttccgcgagcccacgcgtagcccccttgcatcccaggacctttggcaaggcgaggtcagtgggacaacctacctcatttcagaggctccaccaaagccaaatcttccctcatcttgatctctagttctcagtaagtgaaagagtcaggggactttgagaacatccaaacctagcccagctgtggcagttggtttattgctttcagctggtacttgaacccaggtcctggtcttggaggctttcccaggtttaatccccggagctttctctgcagctgtatgacactgcgctgaccccgaatgaggataggaaaatagaaccggtgccaagccagagtctctttttcatttggagtctggctgtctgcccatgaccagggttacataatgggaaacatagctggggctctggagagcccgcgcttcaccaggctgcccagaccttcgcattctgatgctatatatcttcctaattgtagctcggatgcatttatcacactgttggattggagtactgttaaaaaaaaaaaaccctccagaaattcctggacttgctgcttttccatggtttgccttgtgtagtctacggagcatgctggaaatgacctggagggagccccctgaggtgccgccaccttgggagacgtggggacatgga

SEQ ID NO: 56536 - DNA, 1299 bp, Bovine  19866880505573
  misc_feature (1)..(1): n is a, c, g, or t
ntctgagcccgagctccagagcacatgctccacaaaagaaaccaccgcaatgagaaacccacacactgcaagtagagtagcccgtttgctgcaacaagggaaggcccaagggcaacaatgaagacccagtgcagccaaaaaacaaatttaaaaaagtgtgaatgggaaaaccaagaggaagccatccccagaaaggccttctctggactctaaagatgatgccactctgtgtccatcacctccctaaagggacctgtcgactctactcctccctcacctgtaagcttccttgagccgctccaaagccaagatcagcaacttggtgtcatgcttgtaggagagcggggggaaggggatgggtgagaatctacggctttccagccaatgcacagtagtggtatacaccgccaccgcttcctccgctgtgatgtaaggaccgtcctgcaaggtggatatgagaatcagcttcccactgcagcctcatcccaccagggccaggcatggttccaaccctgcagtctgccctcctgctcgcgcccacgcccctagcccagcctactccgtccaacctttaggtagttgtgctgccgctcctgctctgccttcaggtagagccgagtcaggcggcccaggttctttttgcacacagtcttgtctacggtggccccgcggcggatgcgctctcggttgtagtgggcggtgttggtccaccagtcagccttggccttcacgtaccgaagaatcatattctctatcggtgttggcagcccagggacctgaaagtgcaaaaggcacaatgaaaaagtgacagggggctaaagcaatccaggaccggtaatacccaggcccctctatgagccggggagacctccccaccttccagggaatgttggccttccagcagcgccaggcctcactgaggtgctgcaggatcgtccgggccttgttctgcttgatcccctcaggcatcatgtccaggatgtcatgcatcacagcggcccgaagctcaaggtcaaaatgtgactccactcgctgctttgttaccgtcttggccaccccctttgagtgtcggcctagaagtgaaagtggttaaaagccagatttgttgttcctactaaagtctctactttcatatccgttgacaaccatggttacagtgaaatcaggaagtatgaataaagcccagcacatgcaagacacaatacgtctgaaaagattcacaacgatgcttctgaggcatttccatcctacagatgctcgcggccttaaggccccacaataagcccaagaaaagagaat

SEQ ID NO: 56537 - DNA, 1250 bp, Bovine  19866880509111
  misc_feature (1)..(1): n is a, c, g, or t
ngtacttgagaaatcctggaatgaggttaccgtgacctgctgttggccatagggctccagctgcactgctgagaacatgaagtttatgttctcagagaagtgcagggtgactgggctgcagattgattttgccctattgggcagaattaatttcagcaggcactcttccaggggcccaggttgacttgtttgtgtgaattagaaaggcagaaaggatcttctttaactgagtctcgtagttctcaatggtcacctaataaacagtgatgttcttggaggatggtatctggccacccatgtcttaactcctagagcagtgagccctgataacgtcgtctcctgtttatatcatggtggcatctggaaaatacactgtggttcccgagtctcagagagagatgcatagatctccctcaccccgactcaggctctgccccatcctgccgagctgcctagcctgagaccagaaccagagcctcagcccactgagaacagagttggctttccaaggggcttaccgagctcttcaagcccaggtactgttcttttgactctaccagacttgttgcattcaggtccgtttctgctgttgcctgctcatttcctccagtttcctccagttgggtgggtggggggagggggtcctgcagggctcccatgggggttggaaccccgagtgaagggtggtggactagaatacgatggtccgtcggcagacaagtttgaaaaagaggatataacgtatcttaagagcaatttctcttgctgtggccttcagcctttcccctttgtggctgtagtccacagaccatctctttttcagttttcttatgcctggcttctgtgccatcttagctgtttccagagctcctcactccaggaaccaaagacccaacttgtttcccatctgtaccgcttctctgatcttccatagctccgaaacacaatgcagggcttcttctcactcaactctttccgggtttgttctgcagctgtggcgtttgaatgttagtgtttaaacaagctggtattacacaggaaatggccacctccacaggcccctgcaggcttgtaacatggggtcattgtacttgatattaatcaccagtcagcctgttcccccagtaaaaatatgaaggggtgtgtgagggctcagtcctcctcagacttgccagaaggatggcctgagccccagtggggccctcgtcctcattctctgaactgtcgtcgcggccccgggggagttagca

SEQ ID NO: 56538 - DNA, 1332 bp, Bovine  19866880521369
  misc_feature (1)..(1): n is a, c, g, or t
ntttacagtacatttcatttcttctgctgagatattttccccactgccttgtctgatcttcagaaatcagagcatttcagtgctgaaaaagcacacagaacatcccagtcccattcagtcatttttcagtcaagggtagggaggagccatgaatgatgtcttgccccaaatctcagtaccagaaccaaggaccagcaaaaacccgagtcccagttctcgaccagtgtttcctctattttggcttcctcctgagcctcctcctgccagactcttcctcagccctgctcccacccaggctgacgaggctgccctccggggatggggggcactgtcagggctccaaagaaaggtttggtgctgcagtctgatgcgtgaactgggggtgtgtggcagaaggccagcagtgggttaaagttaacaccaaacaatgatgcaatcacagatgcaatcacagactccaaattgagtgcagatcgctttaagaaaggagtagctgtaatctgaagcctgctggacgctggcttgggaggcagcagaaaaggctctggtgctcacaggagcccctcagtgtgcagacccaggctgggcgcagagcggcggtgcacccacaggtaaagcagctccctgtctagtccgctagtgtatcaggggaagttgggaggctcccctgggctggggtgaccagggtgaggcaggtataactccaggaagcagaaaagaggggtgccagggagaagaggcaggaagaccatagttcctccagcttggggaccagggtgaataggtgagggacggcagagggagttggaggtcagaaggtcagaacccaattatccctaaaccactaggagaagaagctggagaaactgcaccactggaagaagccgggaaaactcttgaatggaatgggttggaaagcagtggaggaaggcagtggaggggaagaagtgagaacgtggctagctgctgggtcaggtctgagcagcagtttggggtggggtgctctgcaaccctcgggaaaagaggctgttgggtgctgtgcctccagtggggagcccattgggcaacctggccatggcttaggcttagctccctgttgccttttcaacatcactggcgctgattttaaaggtaacttctcaacactgcccagcagctggcctgaggggagccctcctggggtgggttggtgtgctgggatggagggcagcggggtccttctctccagggcccaccatttttctttggccaagtcagctgccactacaagctgggagatcaacggggtcttggcctcttgcaaacaatgaccactattgagttcagcctagg

SEQ ID NO: 56539 - DNA, 2645 bp, Bovine  19866880560381
  misc_feature (1)..(1): n is a, c, g, or t
nttcaaaatattttattatttatttggctgcaccaggccttagttgtggcatgcgggatctagttctctggtcagggatcacacctgtgtcccttgcattggaagtgcaaagtcttatccactggagaagtctctccagtgtgtttttaaattcttttttttgagctgtaattcactacacacaattcacccatttaaagtgtatgattcggtggttttagtttattcacagagctgtgtaaccatcaccacagttattaggacattctcgtttcctcagagagaaaccctgcacccatggtagtcactgtctatttctcttgaattttccatgtctaggcagttgctaatctgctttctgtctctatagatttgcctgttttggacatgtcatataaatagtgttgtacagtatgtagtcttttgtggctggcttcttatacttggcacagtgtttttggtattgattcatgttccgtcatgttcttaacataaacagatctccttccccaggcccagtttttggagcttggacaggaggtggttgcacgtttacctctccctgtgttgggggctcctgtgggaggcctttggtggagagccagttggggtgagaggagtggtgctcactcgcccagttggccctgccctgttctctgctcccttggcctcctttgccctcgttcttcagggcttctcttgtcaggcagcccagtttccatagcagatgtagccactgtgtttggccccagagagtttctctctcatcccaggtctctgcccagttcagcaggagctaaacccatgggggttcttctttcagagccaggaaccattgccagatgacgatgaggagtttgagctcccagaatttgtggagccctttctgaaggacacacccctctacacagacaatacagccaatggcatcgccctgctctgggccccccggcccttcaacctacgctctggtcgcactcgccgggccctagacatcccccttgtcaagaactggtaaggcttctacctggggagagtagcggatgtataggattaaagactccagctgggtgggcatatagcctttagcagggcagctggagggagaggtgggccaagctctaatgggtgtgttttttcaggtatcgggagcattgtcctgctgggcagcctgtgaaagtgagggtctcctaccagaagctgcttaagtactatgtgctcaatgccctgaagcaccggcccccgaaagcccaaaagaagaggtgaggtgccctggggcccctgctcagccttcttctgttccagagatgatcaggagattcactctcactccttattcccatcccaggtatctattccgatccttcaaagccaccaaattcttccagtctaccaagctggattgggtggaggtggggctacaggtttgccgccagggctacaacatgctcaaccttctcattcaccgaaagaacctcaactatctgcacctggattacaacttcaaccttaaacctgttaagacgctcaccaccaaggtacttggattggaccttaagggggtcctgggctgagagacgggctggttttgccctggcctcttgggatggtgtgtatccagtccagagcattgctgactaatgttgtttctgtccttggcattttttccaggaaaggaagaaatctcgttttggaaatgctttccatctgtgtcgagaagttctgcgtctaactaagctggtggtggacagtcatgtgcagtatcggttgggcaatgtggatgccttccaggtgaggctaggagtccccagtccctgccccttgtagggaagctgggtgaagcttgggctgatcatggagctggctctagcttgaagcctactggggccactgtgttgcagctggcagatgggttgcagtatatcttcgcccacgtggggcagctgacgggcatgtaccgctacaaatacaagctgatgcggcagattcgtatgtgcaaggacttgaagcaccttatctattatcgctttaacacggtaggaccctgcccttgtgcattcatattctcagatccatcttaattttacatcgatcagggctctttccaagggcctatttggagagaggctctgagtgttattactgctgtcctgtagatctcaacacttctccccagagcccacctttagttctaaatagaaaatctcagttgctggtttcctcatttactccattttaaatattgagatcttaaaagagtttctctttttcccccctttattgccatacctgtgccctttgctccacctctgcccagtgttctgttgttgtctgaatgaattactaacttgtgttcttgactttggcttgggatcctagggtcctgtagggaagggccctggctgtggtttctgggctgctggctggcgggtctggctgtttttcatgcgtggaatcacccctttgctggagcgatggctgggcaacctcctggcccggcagtttgaaggtgagtggttttctccatgtctgacttctcccattcaagaataggccacgtgtgctcctgatccttcccttgtccttgtttgagattgagcatcccttacctgttggatcacctctaaggcccagtacctaaggag

SEQ ID NO: 56540 - DNA, 1786 bp, Bovine  19866880606957
  misc_feature (1)..(1): n is a, c, g, or t
nccttacccctttaagaaccagcataaactctggttttactgagactcacctttagagcagacaagatcaccttcacccctaactcttttgttcttgctgttttacccaaacttccccaaatcttcaaatgttatatagtttaattgagtcttagctccaaaggaagcatttgctaattaaccacaattatatttctgtaacattattagcatgtactacacagtgtagaatgtgaatatatatgactgttttcctgtacgtctgttcccttcctgtgtaaggttaggctttgggaggaagaacaatgtgttttttcttcttttatatcacactgacatagttctgagccatgcaggttttaaataaaaatgtgttgattggttttggacttgttgactcaccgaattctagcagccacatcacggggggtatctacttcatctgggaacatctcttccagtctttgttgtttatatttctccagcattttttcctcagcctcttcatccactttctcatcatacagatcatcacgtacagactctcctatagtcatagtttcacattcctcctcttcttcctcttcactaccctcatcctatagaatgaaggatcacagtttctgaagaaacccacatctttacacaaaaggccactatgctgaaatttactagatacacagtccaaaccaatattaactctaatagagaatgagttataaaacagagactcagtccggcaactacaaagctattcctaagaaacagaccacacataccccttagggtcaggaacgcaccttgccttgcactgggggctatacacagagggtgcccaagggcccatttccttacctgagattcctcttccataaaatcctcgtgttctatatcatcgtactcatctccttccccaccactttcaccatcctcatccagaatccattcagcttgataactggatgttcctttgggaaccttcttcactaccttggaactttccttcagtaagtctgtaaaagcccacatgatgaagttacagacctcctcctctcctctatgacacaggatatattgctaccaataccaggaactctggcaggcacttataagtttatttcagctgcctcagaactagcaatactgacacggtcaagcaagtcttacaatgaattggaagtttatttaccctttcattagaaaacagtaagtaattcttagagatagaacaaagctgtgtccagtgtttgctcagtgcaaactacagcctttggaggtaagagaagacagacttctagtactgcctcatctaccttttaaggtcctcactgtgagcagttagacaaaacccacaattctaggccagatgaatttcaagtttgccaacaccaaccatgtgcctcgctcagctcctcctctgtgggccaggtctgttccccctccattggatctgggataacctctgtttgcaaagattcttgtctatcagggtctgccttcattagaaccttcaggtcttcctccatacgagctacagcatctgcagcacaaatctgaaaacccgaacagtcgacagtcaattaagtgttagccaaaaatctactaaatctaacataattagaagatctagaagagcacagtcctcaaatagaatagaaagccaaaacttgtcaggatttttcaaatagttctatttcctagcattctaaatctataagtctgctgagctcttgaagcctttcataatctgatcccatgcctacctgtttattactcccagccactg

SEQ ID NO: 56541 - DNA, 1114 bp, Bovine  19866880613394
  misc_feature (1)..(1): n is a, c, g, or t
nccctgggttgggaagatctcctgaaggagggcatggctgctgctgctgctgctgtaagtcacttcagtcatgtctgactctgtgcaaccccacagatggcagctcaccaggctccgccatccctgggattctccaagcaagaacaccggagtgggttggcatttctttctccaatgcatgaaagtgaaaagtgaaagtgaagtcactcagtcgtgtctgactcttcgtgaccccatggactgcagcctaccaggctcctccacccatggaattttccaggcaagagtactggagtgggagggcatggcaacccacttcaatattcctgcctggagaatcccatggagagaggagcctggcgggctaccgtccatggggtcacaaaagagtgggacatgacttagccactataacacaacaacaacagcagataactatgatgctaaaatttgagcactactgtctttagggactagacatataaagcagattcttgggccctggagatcctaattcagtaggtctgggatgggacccaacaagatttcataagcttctgagttgattctgacttacaacccgatttaaaaactactgaccctgaggactcttcctgtggccccagggcagtatcctcagtttttaaacccctctctcattacgctccagtcactcactcaccacacagagcaaggatgtggctgctatcttcatgcacaaacttcctggtgacagcctcctccatgatttgcttcacctgtaaataaatgggcggcaccattattgattgattgattgatcaaaggcctgtgagcaagtaaatagcttggcttgcctgcttggtctgagttcagccacttgcagagtagaggaggaatgggaggggtggggaagcaaagtttcttcaatacagacattgccaaatgtcttggaaagtcaaccaggaaaaggtagcctgcctggctcttctgtccatgggatttcccaggctggaatactgaagtgggtagccatttccttctccaggggatcttcccaacccaggtctcctgcaccacaggcagattctttaccaactgagccatcagggaagccaaaaaaggtgctataaac

SEQ ID NO: 56542 - DNA, 950 bp, Bovine  19866880658427
  misc_feature (1)..(1): n is a, c, g, or t
nagattaaggagcctgtccccatctacaggaagtttatctcttacatctaaatagtcatgttttaaaatcaacaagtttgctagtttcagctgccactgaccggaacccccagtggctctggcccacagtgtagacagactgtgcccagccggactagttgaagacatgcagccggaagtcagccagccagcctgatccctcccagcttcgggaggagtttgagcaaaatgctacccagctacagtgaggagtagacaagaaggtttaaccctgacagcacaggaccatctgtggaggacagcctttccatcagcagattcagagagtaagtggtctaggacccaaggggaatccaggaatgagaacagaaatctaccagcaagtttagcaggacctttggtcccttcctgtccactgcagttgcttattcacgttcacagtcacatattttaaaattttgatataattatctcctagaaattactgtatgtagcctcttgggatctaaagcaattaagtgaagataaatttctttcatggagcaagctgtcaaaggatgaagcaatttcattccccatttgaagtggaagctttgggtcatgcatggtttatttgaaacaatgccatcacctaaagctgctgatcttatctctaactccgttctccatttcaaactgctggagatatgtagcgtggcactgcctaaagttatgacatctggctcaaggccagcaacaaaacaagccagctcctcttctagattgcaagcttaagaggacaaaaataatattaaagcaagataattttataggtgaagtatgttaaaccctaaaaaggggagatctttccagggtatccggtgtgactatgctgctgctgctgctaagtcactttagtcgtgtccgactactgtggaccccacagacggcagcccaccaggctctcccgt

SEQ ID NO: 56543 - DNA, 779 bp, Bovine  19866880668780
  misc_feature (1)..(1): n is a, c, g, or t
ntaatcctagtccttaatgaccctctccaaagtccacccaaccccaagacagcaaaagagggaaggaaaaaatgctgcagcagcgaggggcgggagggtggggacggggcctgcacgcagtggggaacgcgctctgctcctctcgggactgctagttaagagatgctgactaatcctgcagagagaggagcagcctctgattagatgcgaggaggtcatgccaggagactcaaggaaatacctctcagcagataagtgctgtctcctgcatgcggccctccggcgccagggccgtaaagctgaggtcggcaaggcctgcctggccctctcctgggggggtgagccaaggtcatggaagaagatgcacgctgggtgaatcacgttctgtgccaacctcggaccaacaggtcctggtggggggcacactgagggtgcgggtgctgggatctgggttccaattctggttcctctacttgctattttatcacccaggagaagcgacttcatctctcactatctcagtttctttatctgtaaaatgggcataaggtaataaatatatctgtctctccagggacgggggagcctggtgggctgccgtctatggggtcacacagagttggacacaactgaagtgacttagcagcagcagcagcagcagcagaatttggggtaacataaaagagaaaatccagataatatttgagagctcacaaaggcataggaagtgctcataaccaatagctaaaagttattactattattagaagcttactagg

SEQ ID NO: 56544 - DNA, 2503 bp, Bovine  19866880682076
  misc_feature (1)..(1): n is a, c, g, or t
nccctggggacctcccgagctaatcgcttcagggagcttgattgaaatgtgcacctcacccttggctgctcataaacgctttattctgggcaaaggctgccctggaatggatgctggcatctaccaagtcaggaggccagagatgcgggtgaggcaggatccaggctcacagaaagaactccattgcagctgttgtattagaaagggtggggggaagctgcaacttcatctccttgtaagcacacctctctttatgggttggggcctacccagtggctatttgtacataagccgtcatgggcaaaacaccagcaagatgcaatttttttcaaagttagaagaaaaaaaaaaagactctaaagtctgctcctgctgcgtttataaagagctgttttcttccccggctctagagtgtggtggctctaatctgaaatttctttttaatcatagcaggagtcccaattagcatgttgggtatctttcaagtagaactgggagttccatgaccacagagagcagaggaaatattacgtgtgatgcctccgaggaagagggcagaagaggccaaggcaacgggcctatgtacacatgtgtgaataaacatgtggattttcaggctgccttcccactcacaagaccagctgtgcacacccccggggtccctgaaccccaacattataccaggatcggagcatggctctcagtgccagagccccaactttgccttgtcagcgagctagtgtgcaaacacacggaatatgtgcctggacttacccttcccagagaatatggggcaggggtgggaacccagccccacttacaaagcagcaggcgcagagtttggggtgtctccctgctctgcatgggaggagtcataccccctgactcagctggcactggggcccagctccgacctgaaaccgccagtgacctactttcctttgttgttgtttttggaagtgctgatgtcaatgcagaattcagaggctgagtgagagaaaaaaagagatggagaagcgaggcagggaggggaagaagggaatgaaggcaagcaatggaaggtggggggcgccagactgtgtcagacggctataatggtggcaggtccctgcaatggtgctaaacacatactattacgtccccgcagggcctgcccagtatagcagggatcggtgtgggccctgccgcttcaggataagggaacagggcccaggctgcctagagcttcctctccgcatggtgtacatgtggggggcggaggagatggcgggcaggcatgcccaggtgtgcctttcctcgtagaaggagccatgcatctccccaggggggcctgaagatgcggagtttgcatccatctgctgagccgtccgtgaggctccagccggggccaccctgacgtgtgggacccggtggaggctctgcacacttgctggtgctggaagaaattggtctttggggacagaaggcagtttcctctgctcacctgctccttggtaacacacaagacagagctccactggcagctcgcctgctccccgctacccccgcccgttctcaggaacctggggacagctgcagggtttggggtgagaagagctccggatggtcttgttatagcagtagcactgcggagaactattccaaagaacttttccttctggcatctgagatctgagtctcatcccttcctaactgcctggctttccatcctccagccggggttgaactccaggcctgggatgactgaggcttatgcactttccacccatttgcaaaccccagcagccagctgcaccgccacagcaccactgctgagcaaaaacccacagccaaagcgtctaacttcttctcccgcactgagccctcccccaggacacttggtcaacagattcttaatgagaaaatcatttcagatccacattttcaggaaacccaaggccagaagccccgtgattccaccgatgcaggcgtttccccgtccacatttcacctgggtgccaaaggtactccattccggtggggtggggcgggaaatgccatcctctgctctctgtctctcggacctttggtccccagatgagctcgggcacatgattaaaattcttctttcctgctccataagctcatacatttttcaggcaaagaaatatacgggggagacaaaaccctcatacgctgaaattagcccccgaaaaataggttacctgacaattacttgcttctaagtggagcatgatctagtggaggaaatgctggaagggctgcggggaccccgccttcgactcccaacttactgcctcttaacctctctcagtctctggatttagaggaaggataataactctctccacctcccgccctcggtgggctggtgaaggcgtcatgaatcaacgtcgggaacgcgatgaagaggccgggtccaggacgccgtgtaagtacacagcatcgccagccacctctcgaatctacacggagctattattacttcccgagaaagagacaa

SEQ ID NO: 56545 - DNA, 1616 bp, Bovine  19866880768439
  misc_feature (1)..(1): n is a, c, g, or t
ngaaccgccatcggggaagtcgagggaaactatggccaacatagtcaagggtcaccaggtcaggcgagatgaggaaaatgtccagtagggtcagtgtcaggccagaggggtggcaatggagtgaccgctgaatctcttctcttggaggggtgagcggtaggtaagggtaagcggattccaagtgtagacagcttctcccagcgagctaaatggtcacaaggagtccaagtcccgctgcacgagagcgagctccaacccaggcctgggcagtgtggtgtcctctgggtcagcacacagcacacgacacagccagtggccttcctgcctgcactgcttgctagtgggggaccacaggggactccccagcccccaaactggaggagcttccagggcagcagtaaggccagaggaggaggccccttgagccaggtgtgaccagggccacctgagctatctgctttgtattctgggctctgacactggacatcatttgaagaaactctcctactgccaaaacatttgccaaatcatcaatctgattatgtgacacatggggaaactgaggcccagcgtccggggtcctagtgagtcagtcacagagacggaagcaaatccagccccggggcttcaagtttgggattctgtccacagccccagagtccatagtgagaaaagggccttggccaggccagagccaggattgtgaaaggctgctgctgccggtggagccgggcggccagagaaaacagggacagacagcagagtaaacactgcgtggcccggccgcctgcagctcaggccgcggaggtggctggcgtgctggccggcgggctgccagtccgtgaccacagctctcgccccgtgcccagcctgccccggccgccccaagctggccactgagtgaccgaccccggcctgtctcccccaaagccccccgcaccgcctactcctacctcctcccagcctgctcagacaaggccatgaatagaacattaaaggtaaaaccttctaaaagaaaaagcagctccctggtaggagtcgcctcttgaaatgtcaaaggcagagcaaggcttcctgccttgtgcgcttctcactaatggaggcaccttagcctccgtatccccatcatccaatcgccctataaataaatcatcgtaagaagaatgccaattttccccctagggcctcatgaatctctgcataaaagcccccttcatgatgcatgcattggctcaggtgcccggagagagagatggcgaaccctgcttccaacaatttcagaggcagtagcaactctcatgccacctctgtgggctgagagttgggaactctgctttcctcctgacttggggaagaattttttgctccatttcctgcaaatccaccccgaccacagagccactgccctgtggaatcagcccagggagctaccaggaggcttcatctcctagggctgaggtcctgtgtcccttggcagacatatgatgacaagtcgtgcccacccccctgtgtgggtgggcgagccacgtacccactggagctctgttcccaacatgtggcacgcacagtgctggcccgcccgcccactcccagggggcccccacgagggctcacca

SEQ ID NO: 56546 - DNA, 1804 bp, Bovine  19866880831407
  misc_feature (1)..(1): n is a, c, g, or t
ncgactgaagtgaactgaactgaagatgtacacatcaccattgtttgcaactacaaaaatttggacctaaaattaacatctagtaattgaggactagctgactgaatcgctcctggagaagattaccgtctgatcaggaagaggggataagagacaaggttcacgctgcactcttagaacctactgtgaaggcacgctttcatcccagctatgactgaaaactgacgatttctaattcatccagtttatactttctgggactgtccaagcattcccttttgtactagtcaaattctctaggggcctgactcagcttaggttcaagtgagacataaaacaggaggaaaaggagaaacagccaaaagccaaagcaacataaatacacgacagtctatcattcagggcagcgcaggcttcagaagcgcccaactaacaacactgacattcggtaaaagaaaacaggtccctgcccactgtatgttctctttcagaaagcacgagggggatatcatgcagtatacctaccaaaagcataaactgacgtagttcagagtcatgcctatggaggataatatggctacatttttcctactagaaactattaggatgattttatcaaaggaagaaaattttaaaggctgattatctgaaggaaggagaattggcttctcttccactcatacatatattctagggatgaatctagaaacttctcatcttaagccccataagttccattgagtataaaagatgttttaggccacttatctagttgcagggacggagatcacttactttcatccagccttgaaatatttgcttacagatgacgtaacacaacagacgtcatggaatagcaactcacactgaatccagcagtgtggtaagaaagtaagaaggtggggttaaggaggggagagggaaagagagtgggatatcagctgtgccctaggtagcacctcatcaggaattttaacaagttttagaattcagaagagtcaagaagccttgggaattgcctggtggcccagtagtaaggcttcccttgtagctcagtcggtaaagaatctgcttgcagatctccctgcagtgcaggagacctgggctcaatccctggatccagaagagcccctgcagaaggaaatggcaacccactccagcactcttgcctgggaaatcccatggacagaggagcctggcaggctgcagtccagggggtcgcaagagtcggacacgacttagcaactaaaccaccacttgtgggtaaggttagtgaagaaagggggacggggatccaccttttgcaagagccaaaactccataaaataggcaagaggaggatgaggcagaggctgggccagctccccaggtgtccagcactaatgcctgatgacttgtcatcactagcagcattcgctcaaagcaagctcctcgtcagcagtggaccaggccccagcctccctgaagctcagtcgtggttcccctcttagcagccttctgcttccttccagccctgtctgtgctcatcttcatcgccctggctctgaatggctttggtgggatgtgcatgacttttacctcattaacagtaagtaccattttaaaaaaatatatttatttggctctgctgggtcttagttgtggcatgtgggatctagttccctgaccaggaatggaaaccgggccccctgcactgggagcatggagtctcagccactgcactatcagagaaggcccagtaccagtttttttgagaacatccctattgacattggagaaggcaatggcaccccactccagtact

SEQ ID NO: 56547 - DNA, 1836 bp, Bovine  19866880870837
  misc_feature (1)..(1): n is a, c, g, or t
ncctcctcccggaagccctccctgacagcccccaccttgcctgagtttctcatggtggtaatggggtgcacttacagagacaccagtcccactcagatttcacccatcccatacttgtttccacatctaggctctgaggtccttttggcaaagccacatcttcacacttttaggtccccagagcctgggccaatagttggcataagtagatccttgtttaaagcttgttgaatgaagggtagggagctggccaagctctggggtctggggaggaacttgtggagaaaaacgctgagaccactggtggcagatgagcagatggctccctcctggggcctggggacagcaatgagcgaagacggcagaggggctggccccaccaggaacaaaggggtgggggatggccctagcctctgggaggaggatggaactctccgggcaggaacccacccctctttgccctgaaccacccagaagagacgccgggtctggtgaattgaggggccttggcttagctcccaacgtgtcagcttgctccaatgctctgcacaacggtgtcattgtgcctgagtagcgtatgagccactgagtgacaagtgatgtcatccaccacagagctgcttttattccttctactcttagaggagcaagctgctgaaacacacctggcatcctgggcccctctgcctcagctctaataacagtcggcaaccagagactgcgctgtgcttgacagaagtggatcatttataaaacattagcatttcttgtcctgacatttcactcccatattacaggacttacaaagtctttttaaaaaaaaatgtaataaagtgcttggacccttgattttcccgccgagggctgtgctgtctaaagttggaaatgaaatcaacaacataacagcatcctcaggttctaaaggggacagctagacctggcactggcctgggtaagagcaggcagaccactgggagcaaacgcagataatttgttctgccgccaccagactccctttagggcacatttccagccctgtaattaggaggatttgtccaggcctggaaacacagcctctttcttctatttggggaaactcactcctttcttcaaagccagggaggtgggtgcagcctccagaccccacacacatccactattccataagtcagtctctggcttcctggaacaccctctgggtcctgggaactggcagttcccttccaactaccccccagagcccacttaagaatcgacagctcagctgctgcgggtgaagctcttaggaacaggccaggagtgatccagggccagcctgctctggggacagccacagaaatggtgccgacccagtgcagccagagcatgggaagtaagtcgcatcctgtgtcagtgagcgaagaaccgagaacatgtgcgtgcatgcatgtgtgtgtgtgtgtgcaggcacacgtgtcccagtgagtcagtgtgcccctgcttcaaacagcacctcccaccgacaaacgtgctttgtgttttcagagctgagcctaaccaggctcgcccacccccacgaaagcctgggatctgccactcctttaggaatgcggggttaagaattgagaaacagggttctttccaagagaatttttttattattattatttttctctcttaattggattcaatgtttcttgcacctgacacacagcttctctggtggggaattcggggtttgtgcaaagccaaaaacaattgctcccgctcggaccccagccagcagcatggctgaccttgacttgagcccccctcccctgtctctgggctttcctgctcccttcctgcacatcccca

SEQ ID NO: 56548 - DNA, 2870 bp, Bovine  19866880877802
  misc_feature (1)..(1): n is a, c, g, or t
naggaaacgaaggaggaggagctaaggaagggactagaaggagggaggctgggagcctaggagcccgcaaaggggatcagcccccaggcttctcaacctgtggccagcaacttccgggccccaggaacaggctgcaggcagggctcgcccttcacctctactctctactctcggccgtgcaaaggaggggtatttgctgtgggtgcctgccaggccctcaggctggtctcccagcctcggtaggccgcatggagagagtgagctgtgtccatgccacaggatgagctaatttccttggctcaagtccatcccaccaatcccttgccagtgagccgaggtacaaggaggcctccagtcttgggaagggagtgggtggtaagagacaagtgattttgccctctgagaggggccagctccaagtctgcaggaagaggccctagttcaatctggagggagccaagggcttggggactggcatcttttagcctcagcagcaggatcacatctgatgtgacctcctggctctgcccgcctccagaggactcacagctcttgcctcagcacctctgggcagattagggtaacggagtgaattctgaagcaatccaatcacccagggaaaggaaaaaggaattctggtatttctgagaagcaatgcttcttggaggtatttttagtgggactgtgtttcatctcttagctgtgcagggcagacaagtaagattcagcaatctagagcattcctgcagattctcctatggtctaaacatttctcaaagaaaaaaaaagatttcccaaagaatactggccttatagactgagaacccttctcctccacatgtgtctcttctaacctctgagtctctgaggatttgaggtgcatgtctcttaagatcagaggacaccctctgataccagcaggagagtcataggatacctgtcaaccttcgagatcaccagtacagtaataaagtacagtagttaaggacacaggttatgaagtttgaaagatctggatccaaatctgtcatgatctctgagtcttggttttatccatacaacacctatatttcagaatagttaagatttttaaataatgtatataaagagtttgtttataatgctgatgctttcaaactgtggttctggagaagactcttgagagtcccttggacagcaaggagatcaaaccagttgatcctaaaggaaatcaactctgaatatttattgaaaggactgatgctgaagctgaagcatcaatactttggccacctgatgccaagagctgactcactggaaaagaccctgatgctgggaaagattgaaagtgggaagagaagggggcaagacaggatgagatgggttaatggcatcaccgactcaatggacacagggttgcaaagagttaaacacgactgagtgaacaataaaacacccaccaccaataagcaagccatggacagtggcaattattattatactctgagatttcaggctgggtctttgagtagagactggaggctgggggtggggtaggcaatcaggtgttactaagccctgctgcatctccccaaggaattctcccaacctgaaaaatatcaaggtgttaaactagcccctggggtcccagctcagccccagctacttcagaaagacacaaggcaggcaggagccccagggaaccaggtgcaactggggtttgggtctttaaataaaagggtaacagcatgaaagctggactgggagacaaaggactagggattagtaataagaggtgagacacatttcccaattgcccacgaacttgcaagttaccttgacgaagctcagaggggaaagcacgtccatgaagtaactgctccatgggtcttcaaaggcagtgtcggaaaggaggctcatgatcccacagttcagttcctgcaaactgcccatcccagatcagaggcctgccccctggcctgtagggccctgcctctgctccaacatccagcactgtcctcagccgactgtccagcgctgggttctgcctcccctgtggctactgctcgccagccccttgccactgctgacccaggacaacagatgtggcctggctctgatgcaggctgaaagttcttggctttcacactccagggcgagggcgaacaggttatagtggttccctgtggggacaacttgggactggtcaggcttacctgatcctgatctcagatataggcatgcgtgacaggtcctgtggacacctacccaatgacatatatgtccaggtccaggtccaggttgttcagctgaagcagatcactgaggtctggagggggtgctgcagaggccacgttccacgtcacaacatgtatgctgagaagggaagccatggaggaaggaagatgagacctcgtccaggtaatagactgggggctgctcctgctaagggctggaccataatctgttgtagtcagaatggggaaatgtgtgtttttctgcatccactggaaggaactggggcactgaactacaagcccttcatcttcaagccctctgtcccttgaagcaggaaatgcccaccctggatcggctcctccgtgcaggtatacagctgcccacggctggcggcacctgtgctgctgacaccagcagagctgccaacgagcggtgccgaaggttttggagtcaggcaagggaaggggtgtgaatggggtggacagtgaggactttattaattccaatagtccttcatctgtggctcggtcagaaacttcccaccccccactcttcaatccatggggtcccaggaccaccagaaagatcctagaggttcagttttcaccttgtgagaggcctgagtacagcaagacaggggaatttcagagagg

SEQ ID NO: 56549 - DNA, 2473 bp, Bovine  19866880906245
  misc_feature (1)..(1): n is a, c, g, or t
nttcattctgttttactattacctctagtcttaaggttttttaagtctactgtagatattgggttggttagggttttcccctgaacatcttaaggaaaaactctaacgaactttttggccaggtggcacggtggtaaaagaatccacctgccaatgcaggaggtgcaagagacgcgagttcgatccctggatcgggtagatcccccggaagacaaaatggcaacccactccagtattcttgcctgggagattccatggacagaagagcctggagggctatagtccatggggtcgcgaaagagtaggatacgacttagcaaccgagcatgcataatatatatatgacggtgtgttatcgtgtgacaatggacaatgtattgtttgatactagccatgatgaacacatttacaccatggaaattgccaaacatgagaaaccaaggctcccgctaccccactcccatctaaagtctgccatcaggtgtatgtatggacacggcactaggtaggaggtcaccgatcatcactcccgccttttgggacccgagggctgtgccccggtctcccagcctggtcctccaggccctactggcagatggctgtccccctctcctctcactcgctttcctaaggaaaggccactgctggcaggctgagcaggcccttgttaacgattcctgagagccacgagctgtctactttgctgccgggaccctttgtttgttctctgcacacagccctgtcatcaggcgcagcagccaagccctgtttccgggaatgtgggcggcggaggcagggggactgctctctgcggcgctgtgagagggctgtgcccgaaagcacacgcatcccttacaggctccccctttgcaccccaaaggctgtgctgcctcttcacaacttgtctttcagtaagaactggttaaaacaaaaagcagatcgcggtcctcactgaccactgccccgtgactggacaaggtggtcagggcaagggtctaccggtcttgcagagagggccaccaccaccaggaggctgggaaggcaccagggatgtgccagtactcccgtctggaaccggcatcagtctctgggggtttattccagctgcacgcggagtcggcacaagcacacgccaatacccgtggggtggtgcacacctggtgttcccctgtatttctacatgtggccacttgtagaaaggaagggcctcctgctttcctcctggacttggtccaagataccacctggactcgggtcacacccatctgggagcaatgccatcacttgtatcccttccttcaaagttcaacttgaggactggaactagaacccttctgtggacctaagggtggagccaggaaggtaacgcaatctacctttcttgagctctctgccaaaagtcaggttccaaaagcactggaaatcttgtgcaaggcaattaaacttttgaacccagataccaagagctcatcatcagaggctttctcctgtgaccatcctgaaccagaagagcaaatgctcccatcaatgccacagactggccagacctcttaggatgtcagatcccagctgtctgagcaaaggcaaaacaattagctacacaaatacaccatgtgactccagaaatggtaagatgatggtattcatggtgtgtaagatgccccaagaccaagaagaataataccctttcatagggaagggtctactgtgaaaggaaatctcagttccatttacagcttgctcttagaactgtggtgctggaaaagattctggagagtctcttggactgcaaggagatcaaaccagtcaatcctaaaggaaatcaaccctgaatattcattggaaggactgatgctgaagctgaagctccaataccttggccacctgatgccaagaaccgactcattagaaaagaccctgatgctgagaaagattgagggcaggagaagggggcgacagaggatgagatggttgcatgatatcaccaactcaacggacatgagtttaagcaaactctgggagataatgaaggacagggaagcctggtgtgctgcaatccatggggtcacagagagtcggacatgacttagcaactgaacaactcagcgttgcacacagagcctgggagatagaaggcccttggtaaaccagggtgggctggttgattggtttggctggttggattaaatgaataaaaagtcactgttctctttgctaatggctcccccatgagacatcaggccctctctcactcatcatcccatcccccacacccacctggagcggcaggttgggaatgaggcaggtcaccccgaaacccacgagcagcaggttggtgaaggcgaaggcccgcgtggcattggtgatcttctggatctgccggtcccgcttcttcttcttctcacctctgtggggacacagggcgtggaacacaggagctggggtgggggggggcatgggggcatggggccct

SEQ ID NO: 56550 - DNA, 4540 bp, Bovine  19866880912946
  misc_feature (1)..(1): n is a, c, g, or t
nttagagagacaccgatatataacacagtaaaacaaagtggctttgacggaagtaagagaggtgacccagagcgctgcatctgcagctaccttctgggaaatactaggagtttggacccttactatacctggggctctgcccacttctaaaatgcaatgatttcaacatcaatttcaagttaactgtaaaacttctccgaaatgtgcctagcttgtctacagatctcaatctataatgggtcaactacagcaatgaatttttttctcatcagaatgcgaaggtcagaaagtcagagcttcctaatcttatctcctggcttcatctccacagggactaggcatcagctcctatggaaaaccagagatgggaaaggaaactgcctccctgcacagagagtacacatgaggacacgctgccagttacaccacacaaaactgacaggagggcagtatcaccaccacaaaacaaaaagtaccacagatgcaatctgggcatggttgaaaaggccccactgtagatctggactcctcatctctccaactagtttaaacaacccattcaatccatcccttacttttttcaataaatgaataggggtatctaaggtcttttctagctttagatttctgtgatgctaaactaacatgatgttttcttaagtacatgaggtgtttttaaagttattatttggggtatttgttctaacgtgaaagaggctattgtcatcagtcaacacatgtggctcaaaactaatacccaaccaaaaaaggaaacttactgacatcacaaaccactcttctactttagtctttatttcacaaggtttaggtttcacagtaggggagcagctcgaccattctggagcactaaagcttctaattaaggcaagcatcgttggggcaaacaattctgggaattccctgatggtccagtggttaggactcggcattttcactgccatgggcccaggttcaatccctggttagggaactgctgctgctgctaagtcacttcagtcgtgtccgaccctgtgtgaccccatagacggcagccccaccaggctctcctgtccttgggattctcaaggcaagaacactggagtgggttaccatttccttctccaatgcataaaagtgaagtcgctcagtcgtgtccgactcttaaatcctacaaattgctcagtgaggtcaaaaccaaaccaaaccaaaccaattctccttaagaaaggaattgcaagtggaagtaaaattaatgtggtaactattctctcctgggtattagctagctatttccacactccagcccagtgctaacagggcctgcaataaatgtcgagtcacagctgtcatgggcacagcaccatcttggctgttgccatcatatgaacttaaatgaaaacatgaagctagaaacttgttttccttatcctccaaattctaagtgggaaaaagtagtgtaacctagacaacaaataattcctttctcatcaaaagcaggacacaatacttttcagtcacaacatgatctcaaaatatacacattttaaaagcacacattttttttcagtcaaacctgtagacctaaccctcctttgcacccactcttcagaatgcaaaagaaaaactttaaatccagtaatatcagactatttcaaataaatttcagctcactgtacagccttttacttaggcaactcccactcctcagtgtataagcatgatccaaaggattttagagatttccatttacaaaaatatagtaatactttagccccttctctgctaacctgcccccccacctgagtaacttcagcctatgttcatgaaatttagctacttgcttaaagtgatcatatctgaaaggctctgaaagacaggaaagcatgccacttctacactagcttttatgctgaaccactacctctgcataactcagaaagggagggagggaaggagggaagaagaaagagaagaggtaagagacaaagctgtgagtgctaaggataagaataaatacaatgcaatggttggccggaggagatgggctaccaaggataactattcaccagtaaaaggtaaaaatttattcctcaggaggaaatggtttcttgagtataaaacgcatcaaacaacaaagaccaagtaaacctgctgcttcttggaattaatacttttgggtatctatctcattatacctttacaagtaatcaatggtaagaaatcccaagccccctaaagtaaaaacacatttctgtaagaaaattcatttaagtcttttgatagagaccacttatactcaaatttgtggagcccacttatttcagataatgataaacagaaagaaacagattagaatgtagatgaaaaaaaatattttaggttaattcctgtgaattcaggtggtgttattaaagaagtcaaagtatggtttagtaaatcaatcagaacattcatgttacacagttttaagcttactcattccaaaataggttttctataaaaaagagaaaagcccacattaagtgccaagatcagtacttaatggtaaaagtaccattcaacatctataacaatgttacaacgctgctgcttgtattcagcattcctacaaagctctaagaggtctgaaagggagaccctgtagcagatctcttctttctacattttgcacattatgtacctccaaagccaaggctgtcttgtcgtaggcattagggactcgcttctggattaccctggcataaatgggcccattctggaggttagggagcggagtgttgacgctgggttgggcatagggcccaggctccggcccacccagtggctgtgggtgggaaccctcctggttacctccaatcagagccgatactgaggcggaggcaggtctatacttctccacgtaagggactggaatcatccctctcttgccttcgctgtcctccgcattccaccactgctcttcaggcttatcccggattctcaggatgtctcctttcttaaagggaagatcttcttcatcattcccattaaagtcaaagagggctcgtacatactctgcctcttcctgcctgagaatcactccactaccctgcctggatctggaaactggttctatcaacgttgtagtgtccaaatagtgtattttgtagaattccagtaaagcaggcaatgaatcaaattcttgatctcctattcggagtctggagggactcacccctaaaaaaaaaacagagcagggtattattgaaagatatactggagatgaaatgcagattttaagcatctccccgcacatatttactcaatatttaaccaaaaagaaagagaaggaaaaaaataatctaaataaccccttctcctaacagtaaactaaaatcatactttgtacctcaaatgttccctgggaataaagtaagcgatcaccacctgcagcagagaagagacagaggctgtgatagagcaaccacgcctgtcaggacaagctcacatactggaccaaagacagagcaccatggagacttcttgttcattctaccaaaacgttctgtggctattcgatttacagagtacaagggttcaaggctgtgttagtcttctttttcttttcaacctcaggaaatgtagcaagctctccgttttcacaggtcccagcagctatcccaacaaaaggcgggatattttattctcaatttttcactactgcaaaccatgctcttacgagtgcttttattaatgaacattttttattacctccttaggataaacttcttaaaatgcaactgctggatcaaagggtaggaacactaaggtttacgttgcctgtcgtccaaaaagttttgattttacactcgcaccagtggattatgagttcccatttcccccatgtccttgccagaacagcaaggatgtctcttgttaaatatcatctttgattgtttgatgtttttcacatttattcaatatctgtacttcttttgtgaaaattacttgttcgagttctttgttaaagagagggcctaaactaccctcaccactcctattaaaaccagtcagtcaaaacaaaaacctaaccaatccatctaaaaaccctttgctgttaatgctgtgaaacaggaacactgcagtagcccagatgtctaaattgcttcgccactctaaaaaaatgagaccaaattattttgttccgtgttagaaaacactctgtccagatagaccagaaaaagtacatttcaaattctctcctggggagaggtgaagtgataaactttggaggttaaccagaagtcctcagtatagaacatatattgatgagtgacttctctttgcacccatatgaaacaaaggccgagcctcaatttagaggacagatgcacatttcttacattgcaaaagtccatctgtggaattcatggctataaactaaaacaagttaatagcccacagccagtaatgctggctgtctctctgactcaagatgttgaaatacatgctcatacccaggattgtccatctatggcaaacactcctcagacactagcag

SEQ ID NO: 56551 - DNA, 1565 bp, Bovine  19866880936088
  misc_feature (1)..(1): n is a, c, g, or t
natgcctcccagctcccagtcagcagagtagagcggatgcccataacccggcgccccccaaaccttcttacccacagagggtctccctggaggggacccatcatagccagaaacaggggctgctgcaggagagcgaagagggcgctgatcagggactgcaggcccgtgaggctcccaaactgtgtggaggggtacctgccaggacaggagagggcctgtcaccgcggggcccactgtccggcttcccggatgctcctcggcctcagcctggccccacttgccggtgcccccaggctgcaacttgaggtatcaaaggagatgtgggaacagcttcagaggacagtccggtgtccatctttggactgctttgtgatgagcagttccatgcagagaatttccctcttggaccagcatgaaggccctggggcccacgggtgcctggccgagccgagtggacaacatgattccggcaggagtctgtggctcgggagctaggcccagggagcaggtgggaggctgggccgggcttggctgcaccttcatccagaggagcattgtataatcacggaaacatagcatcacagccctcagccgactccctcagactctgccagggtggcctcaacttcctctaggtcttggggcggggagggtggcgtggggtggagcatgcagacctgggatgacccccatgggatgctcttgggagcggggagaaagttctggcataatctcaggacattaggcatcgtggcttagcaaggaatggctgcaggaatgagcctgtctttggtcagagagagacagcggatggtgtttgggttctggtgtttgagccaagccccagcctgaggaagacgaacaactatggttccttaggtgtgtgtggcctcttggaaaaggaggcaggtttcactttagccaagggctgagaaaactgcgggcagaccagccctttgaggccctgtgtgggctctgtcaggtacattcagggctcagttatttatgtcgctgctgccactgaaggccatttgaaggtcaacattcagatgcatgtagccagaactcacccctgcgcttcccatgagcagtcagcagcagccccaggactcagatgagcagcagcccctgaggccgtaacgataccgagctgcaccctagctgggggaactgacttcgtgttaaatgccaaggcttgtgggcacccaactgtctgcccactgacctgttcccaccgagtacggccttctcctgacacaccccacagaaaccctaatatctaagacaagaggaggaacctcaggtagacaagatggtccccttcaggccctcagccccacctggaagccccctcaggtcatccatccccttaccctcagccaccaggccacccgcagcccccaggacttacacggcagcatataagcccccgacggccgagtggatgaatcctcgcacgattgtgtgcaggatgaaggagaggatctgagatggggagagcagagtgtgagcaggagacatgggagggtctccctttgtccccctgccccaaagctcccagggtc

SEQ ID NO: 56552 - DNA, 1796 bp, Bovine  19866880947296
  misc_feature (1)..(1): n is a, c, g, or t
ncctgagctgtcttagtcttctcatcttgataaatggcagctttgactttggggctgctcatgtcaaaattcttggggttattcttggctcctctcttctcacacctccatatctaatctgtcagcgatccaagtcttctttaccttcaaaataaacacatacagtgctttcttaccactgcaccctagttcgattcagtgaaatgccttctgattagtttctctagctcctccctcctcctgctctccagtctatttccaacacagccactggaaggatctctgtttctatttatttattttatatttggtcgtgccgggtcttcgttgccacacgccagctctctccagttgcggtgcacaggcttctcattgcagtggcttctcttgttgtggagcacgggctctaggtgcgtgggcttcagtaattgcagttcctgggctctagagccctggctcagtagttgtagtgcacgggctttgttgctccatggcatgtgggatcctcctggaccaggggttgaacccatgtaccctgtattggcaggcaaattcttggtgtttttttttttttaatttattttttttatttggaggacagttgctttacaatattgtgttaatttggaagagaggttcaagagagagggggcataacatatacctatggctgactcatgttgctatatagcaggtgaattcttaaccactagaccacctggaaagcccagaatgatctctttaaagcatcagtaagatcgtgtcccttctctatgaactctctggtccagctcttgctactttgcttgtgcccggtatgccctagtcacgttggcatccttgctgttcctcagaccagccgcacactcaagggtctttgcacttggtttcctcgtaacctggaacaccctgtccccagagcactgtgttgccctctcacgcccttcgcaatgccaccttggttggagaggtcttccctggctaccctatgtaagatgctacatgccttcctgtgcccttttctctctttctttccatggcagagaaaaataacatctctttaatatctagcatgtgtcagtccctggacaagctacttctgtccagtatttaagtccacacaaagtgcctgccaagtaggtattagtaccttcattttataaaagagaaaactgaggctcaagaaaggagcgaagagtgatgatcagctcttatgaagtatctccaccaccgacctggaagatcagtatcgatgtgggggactctttagggactctcaaccttttggatatctgaagaagacagacatcttctccagcttctggtgttcacgactaagaaatgtaaagtatctcaaggactttgtagtggcaacatgagaatttcatcgtggtcgagcgtggtcacgtttggcccagcctggatgtgcactagacaggcgctcactgagcagacctacaccactcctgtgtgcacagcaagagaggttcagacgtgtaaggcagacacccacctagtttggaagataacttgtggcatacacaaagatgtgacaagcaaacaagttcatttgcatctgtagttaaggaggaactcttgaaattttattgaattggtagtttcccaccgaaggcattgctcaaggagcactgacttggcattaaccgatcactgtatttcccaagtaaattccaagaaactctagttttataggttcttaatagttaggtgaaaaaaagttccacaatcatgtaaattagagtaacacagtattagacagaagccattactgcagg

SEQ ID NO: 56553 - DNA, 984 bp, Bovine  19866880951270
  misc_feature (1)..(1): n is a, c, g, or t
nccatgagtctccgctgatcaaagtccctgaaggacctctgagccccagtcctggtccacagacctcatccctctgagggttctagacctggtggccagtggctgaggaggagcggtgcaccctgcctgggcaggtgcccctgctgccagcctagcagcgggcgagttctccatccctgcccagcctgattgccctcggttcagtggcctcctgcaaacacataggtgagctggcaggaagggaaaagctcccacacagttccgccacccagaagaacgtgctgcagaagacagctccttggacatgtttccgccaccgcagaccaagcctcctcagccggcccagctagtctgaatcagaactcaagatctttgagagcttcaagggcccacgtggggcaggcactgctcgttgaagggtggtggggggggactctggcaggtccggtgagccacaaagatgaagcagagtcatgagggcagaaagggaaaggaccaggaaaagacgccagcggggagggaaaggaccgagaagcctgaagaagataaggagagagagagggagagtgctgtgtgtgtgtgtgataaagagacttcatttaagcagtcgtttctttctgcgcattacagcctgggtcctaggctgctgtgagtctggggcagactccagctctgggcgtgcctctggcaggcaggactaagctgaccccctccagtcccctcagaggcggccctgtctgggccccaggggctctctttccagatccatagctgggattttttgatatctggcccttcagctccacccggaggcaaattaagggaacactctgggtgtggggtgggggggctgcggctctgggagtgaggggtgcaagccatgctagattctgggaagaaggaggaggggacaaatgcaggtgggatggggcaggagcccagatcaggcccctgcagcaggcaggcaggagagaggcccgtggt

SEQ ID NO: 56554 - DNA, 1061 bp, Bovine  19866880958928
  misc_feature (1)..(1): n is a, c, g, or t
nccttacactacagcacccgcctacagtcgcccccaccccctggctggactccagaacagcacccagccctccagaggcctgaaataactctgcttctcacactcacgcccagccccagccaactttgcctaagatactggagattgcagggcagggggtcatggggaggcggcttggggaggtggaaggaggtttatcataccctgatgcaggctcatacttcagcactgatctgctgtgagatgctgagcgagttgctcaacctccctgacctgggttttactggcggagggcctctgcagctctgtgtcctcggagttcagctagtgtctgcctggcagggctcagacaggattgctcagtccagtcctgcagctagtagaggctaagagaatgccttacctggggtttctattgcaagatggaccaatcttcttaatcttcagcacaagctcactttctcacctccaagccatctacacattccttcctgcctgtcctagtctttccccttctcagcctgatgaattcagccctcaagaccaatggcacctcttccgtgaaacctttttggatggtctttcagccccttacagagctagcagagtccccacccacactgcctcttcctagcacattctaagatagctatgggtcttcccctacagaagcttgccataagcttctgaaaatccaaggctttgttgttgttgttcagtcattaagccacatctgactgtttgcaacctcatggactgcagaataccaagcctatgtagttagcacaaacctcagtgttgctgaatgcatgtatgagtgaatgaatgatactggccttctttttgagcttcctaacatggcaagtttatctccaaggaatcacacgactctctcacttcaattagatctctgcttagatgtcacctgctcagagtgctttccctgatcccctcttatcagctccagaacaaaacctgacttattttttcttcttccaagcaagatctcatctggactttcctaaattggtccctaataacggtaaatttcacaaggacag

SEQ ID NO: 56555 - DNA, 1286 bp, Bovine  19866880963159
  misc_feature (1)..(1): n is a, c, g, or t
ncaggtaaacacaggaagtttcggggagcctgattcccactgaggagttagggggttaacatgttcctcctttaagtagttccagtttttaaaaccactaagggaagaagatgataattagtatgaaggcttaaaaggctgagaacttcagcctcagctgaaggctggctagtggcgggggaagtgggcaacacgctcggatggctcgggagtctccctgtgctcttccctcgctgccagtcagcctgtacaccctgcacacgaggagaatggcagagatacaaggattaagtacgtgaattttgaagtcagacaaaactgagtttgaggcccaggtctgttgttatctctgtggacttgggaagtcccctctgaacttcactttcctcaactgtgaggtgagggtcgtgttgccacagccctcacaggctggggtgaagactgagtgaggtaccgtgcgcctggcgtactgtgggcccccggtacagtgagctgtcggtaccaggcagaggctgggggctcctgcctgcccagagtgggtggtgagggggcagttactctgcagcttcgagccgagtgactgcaaggtgtcctttcccctcccgcagaatgagtacatgaaagaagacttcctgattaaaattgaaacctggcacaaacctgatcttgggaccctggagaacgtaagtagcacttcccaagccccccgaggccttccaaggcctcaggacagggtaccgaggactatccctgccaagggctcttcactgtggtcccctttttcttggccaggaagctcgcatcctgtgcctagatctgtcctaccagcatgggattgctctgtctctaatcttagaagtatgatctccaagatgctttcaaggaccttctgctagtgctgggattggtctaaaatacaactcctggcacagaagagctaaagttttataacatcaaaatgagcgaatcccctgaccacccagtggttaggactcggcactttcactgcctgggcctgggttcagtccctgctcagggaactaagatcccagagccacatgtgcgatgcgcccccacacccctgaaaaaagcccatcaaaattacagcctctgtagagcatagtttgccagtaactcctcgggtttaaaatatacgtgtcccttactccagcagttccacacctaggaatttatactatagttatgttttcgtatgtgtgaaatcattcaatatacagggagagtcattgctgtattgttggtgtggttagtcactacatcatatc

SEQ ID NO: 56556 - DNA, 1227 bp, Bovine  19866881005742
  misc_feature (1)..(1): n is a, c, g, or t
nggaaggctgtaccccagtcgatggacaggcgtggacatgccacctgcacccacctataagaagggaaatcaggtcagatcctgggggagggggtagcctccctgttcctgccagcatgctgaagaacatgactgtgtccccaacacactcaacggggcttactattaattcgaaagtaaagactgtcacccactgctgtttagaatagcactatgacattgttttcttgtttcctccaatgtgagcttttttaaggtttttattgaatttgttacaatattgcatatcttatgtgggatcttagctccccaactagggaattgaaacctgcagcccccgacactggaaggtgaagtctcaaccactggacggtcaggaagtccctgactatgacctttctgaagagagggcttgggcagcatgtttgcaatcagaccccaggataaaatttagcgcctggtccaatgcaagtgccaaccacccctcaaactcatctcacacagaacgactatgacgtagccgttgcctgtgagcccccaagccaaagttgggttgacccatagccaaaagtagcccctgcgagatgagtgctctctaaacattaaaatttcatggtcatgggagcacgactccagcctgcaataggtgatgggcagaacccagattctaagcttccttagccagtcatcgctagatagattaaggtggggaaacgtacacatccacctcgggaaggaggctgagcttgctggggaagatctcagagagcagcagcctcacgaagggaagtcccaaggcttggagccgagattccaggtgctgttgggagagggaggcagagctggggtgatcaagcggccaaagtaaatccctgggcctcctgattttctcagctgggttcccagctagtcccctttcccaaagccctctaacctccaggatcttgggactgccttggcggcccaaagtgcccaggatgagaccccaggatttagctgaccgggcagtggctatggcttccttggcggttggcctgcatgcgcttggtggtcatagtgctctctggacaggaccttgctgtaagggtcgtatctggaaaagaagctgtcagggtcactgggacagccactcacagaacttgtgctgtacacacagctccctcatgcagcaccttggtcttcggaaccttcaggctccatgcaggcaattaggaacagaggcaagag

SEQ ID NO: 56557 - DNA, 1102 bp, Bovine  19866881019760
  misc_feature (1)..(1): n is a, c, g, or t
nggcttctaaagaagttagttccgcatttgccttgtgctttcgaacaggtttgtggttactattcagtgtcatatatgattttttttttactggcttaattttttacttaatttttgttggagtataattgcttcacagtgttgtgttagtttctgctgtacagcagagtgaatcggctgtatgtacatatatcccctcttttttagatttccttctagcttaattttttttactgaattttttattttgagatgattgtgagattcacatgcaggggtaagaaataatacagagaggagatctgcttctcccagtgactacgtcttacaaaatgataatatgatatcacacccaggaaattgacactgatacttttacaagttcctttaagtcaaaggtgtatttcatacttataggaaaagcagttttcaaaagatgcagaaaaatattttttaaaaaagaagaagacgaccaaataaataaataaaaataagtagaggaatgaaagtccctttcttccagcccctggcctcattgcctagagcaaagccctgctaaaaagaaatcattcaggaccggagcttctgtttttgtgttccttgactgtatgtgcatagatagccggtgatggcttgatccgaggaacactataaatgttagataaaatctctcattttaggcccctgaaaacaggaaataagcattcttagaacatttcattgtaagaatgaaatattgcatttttatttcggtgcaccctctgtggggggaccttgtctttgagagtaaaggaagctattgtgtttcctgataggaagttgcatcttatttcaagcaataggagaacaggacctggctttgcgttagtaaatgcaagccaggcagtgagctctcagggtctataggtatctgcttgagacccaaaagctttgctcccataatactaaatcttagcctctttgattattgaaaatgtacatgaatggtcattagtgagcagccatgtaatgagtgcatttctgtcttctttcacatttatttatttggctggctgcgctgggtcttaagttgtgggcactccagatctttagttgtggcatg

SEQ ID NO: 56558 - DNA, 1369 bp, Bovine  19866881146808
  misc_feature (1)..(1): n is a, c, g, or t
naataatgtaaaaatcttttaatcgcataaatgtccattttattctgtttcaaatacccacctaaagatttctttattaattcgaaataatcccttttaaaaattttaccctgttggaaatagtagctagacttcgtctttttgttgttgctgacattaattattctaatactcttattagcatctctaagacccattgagggaaacaaagaccacaaatgaagcttcccaaaccagattttcttaacttgttttaaacaacagaagttcttaggttagttatttttttacacttttaatttgatttttgttttatagatatctataaaacagctgtttataatgagaaaaaaaatacagtaattagctttttgaattggcttcagtcacatagcataaagcatttgagagtcatccatgttgtctcctgtgtcactaattcatttttgttgctgttgcagagtaggattccatggtatggatataccacaatttgtttatttatttaccaactgatgagcatttgtcttgtctgcagcttttggtagctgtggatagaatgactgcaaacattcatatataggtttttatgtgaacttgggttttcatttctcttgagtaaatacttcggaatgaatggacgggtcatttgttaagtgtaggtttaaatttattagaaattaccagactgtttgcagagtggctgcaccgttttgtgttcccaccagccacgtacaagaagtccagtttccccacatccgtgccagcacccgggtactgctgttctgttttgtttttaaagtcattccaacaggtatcccattgcagttttaacttgcatttctcaaatagctaatgatgttgagcatcttttcttgtgcttggcagagtgtcttcaaatcttttgcctatatttaagttggaatgtttgttttcttactgcgtttcgagaggtttttatgtattctcattgcaggtcctttgtcagatatatatgttgcccgtatgttctctcagcctgtggcttgtctcttcacttcagagacttaaggttttgactgattaaatgctgagtgttagaggtttcaggctctcttggtagaagaaagtaaggaaattgagaccttcgtcagcagaaagatgtgaggaccaccccttttgaagctgtttatttaaaatacaagaagggggaaaggagtgccccaggactgagttgtgcagacagatgtctgaagctttcattaattccttctcctctctcctgtccccacctatggtgtggattctgggctcttggcttcaatggggttcttcagttcctcccatcacttcagccccactgaggcccctccagccccgcaaacaccaa

SEQ ID NO: 56559 - DNA, 649 bp, Bovine  19866881169954
  misc_feature (1)..(1): n is a, c, g, or t
ntgattgacatcagcctgtcagaggcgcccaggtgcatcccttccaagtatttacaaatgaaacggcaagcccaaacagccagtctttgcctctggtctccattcttctggtttgtgctttgctagcagtaaaagcagggactaaaagggcgtctgtgtgagtctaagcatgcttctcccactgtctgcgctgagacccttccctccggtcaggctctccctaaaaggggtctccaagccaatacgtgggcttaagggccttcgaagccattagtcaccacccttgcagtctcactcccaactgcgaatggggccacccgtgacacaaaactctggcaagattaggggactaggcaagagcagaagaaaccacaatacgccggagactcccaggagaacaatgactagtcctggtagggaacagactgacagagcagacagactctaaccaggcctcgttctgttttcgatgcaacacaaatgttttccattagaagttccttgccccacaaacactcatacatgcggctatgaaatccacatacttaacttctgcttttctggcactctgaccccactacctctcctgttcctctggaacggagcaaagggagagtgaggagattccaaaattcccaggacaaaggta

SEQ ID NO: 56560 - DNA, 1312 bp, Bovine  19866881243407
  misc_feature (1)..(1): n is a, c, g, or t
nataggtaccaggccgcatacacggccgtgtgctcctcagacatgagtgacagcacgaaaggcagcaagatctccaagccctcaggggtgatgtcactcagaacggcacccagctgctgccacagggcaaagaccagctcccgcccctgggcctcgtcctccacgcgcctcacctggtacaggaggatgaatttgtgcagcgcggggaagtatggggggaaggggaccacagagctgaaggggctgaggagctgggcggggcagggtgggggcaatccctgggagacgggcctatatgtaaacagtgggtccagcttgcccctccctgcaaccacggggccttgagggccactcagctgcagaagtgtgtccagcacgggctgcagagacaccgggacctccttgggatggcgtgcacagagcccctgcacagccttgaagcgtacccacaaaggtgcatcaggctgcagcgtccggaccctggtggcaaacaccatctcagccaacaggacccccagagcctgcatgtcccgatgaaagaggtcccgcagctgcacggggggctgaacccagggttgctcaggcacctccaagcggccccctaggcctttggtcaagaagttgcctagtttctccagctcctccagagcctgcagaggactgaagccctccggaagaagaatcttgccctcctcaccttccctggggtctgtcccagcagctctgttccgacggcccggtcgagaggctgaggcccctgagaaaggcaagaggcctggcgggacttgactggaggacgaagtagaggagggagacggtcccagctggtcacctgtcttcccagcgagagagatggaatccagagcttctgtggcctgctccaactcatcttcccctaccccgggcctgtccctggcccagccagcctcacagggagtagcctccaaaactgtcctgcccatcccattcgtaagctgtgcagggaagtcctcccggcctgtgctctcctggatggtgtggaaccatagcctggggacgaggggaggttcaggggcgagggcaggggcccctgccaggcgctggggatgtggctgatcgaagagctgtaccacgccatagctggtcaggtgtgtgtgggcgtccaccaggtgcagacacacgttcttctccttcacagcctccttgccctgtagtttgtagccaaaggtgaggtcaatccagtggtgtaggtcctgggacacctctcggctctccagcagcgcccggtgggcagccacgaactccggtggagcagcaccaggccggcacatcc

SEQ ID NO: 56561 - DNA, 824 bp, Bovine  19866881281364
  misc_feature (1)..(1): n is a, c, g, or t
ntggcctggccagtgcaccccgaaggaaagggccgcttccggcattctgcatggaggtcctgccttctgctgtccctggaggctctgttcctgtttgccagctattttgcttcctcggccatctgttccctccctgtcatctcctctctgctttaaccttaaccactacttcgctgcagatggcaccaaacagatccgttcttgacatccttcagcaggcctgccccctccttctcatctccagagagtgaacttctgctctgtcctttctcaggccctgacttcaaagcttggagttggactcacccccccacaagcctccctcctagatcccatctgctgtcaactctgccacaggtcagggggcaaacagtcctaccagcctcccctgtcttttccatttcctaatgagacttcctcgcttcagacttggctaagaacctctccccgtgtcaagtccactgtctgctctggttatccacctggtctcctaaaacagagccactgtaccctccagggcagtgggggtcgagcttagcagcctgagtccgagatcagaaactcggtttcattcctgcagtagaggagtcagtgcgtccacgctgggagtttgggtcttgaacagttcctctgcagcacctagacctggaaactgcggtgaagagttggcctcgtgctggcatgacaggggcggaaccaaaacacattttctacatcgtcttaactcacaaacggggagcactgcatttctttccttgcttttattctggctactggtgagaaatgcattcaaggactttatttagccactctgcctcttctct

SEQ ID NO: 56562 - DNA, 1344 bp, Bovine  19866881318803
  misc_feature (1)..(1): n is a, c, g, or t
ngaaggagaggccggcgggcggtggcgcggcctagaggaggcggggttcccgggctcagtcgagccacgtgcggttgtttccgtaccggggcgatcacgtgagcagcgtcagctgacccgtcacggtggagcctggcgctggcgcccctcagcccccgcccggccgcgcccggagcgcaggaccctgcggaggggtaagagcgcccccgcggccccactctgtccccggcccatccccgcctcctccgccccagccccagtccctcgctcacccctacccacctggcatcccggaagccgaggcgagggggggctgtggccgggctcagccccgcgctgcccccaggcggccaagaggggatggccctgaggagcagggggcggggaagtcgcgcttaccgcgaaggcggaggactggtcaccgcccccgagccccgacatggaggagctgctccggagcgtggagagggacctgaacatcgatgcccgacagctggctccggccccggggggcgcacacgtggtggctctagtgcccgcgcgctggctggccagcctccgcgagcgcaggctgcccccgggaccctgtccgcgcgccgaaggcctgagcgaagcggaagtcaggactttcttgcaacgctccgtgcagaggctgcctgccggctggactcgagtcgaggtgcacgggctgcggaaacgaaggctctcctacgcgctgggcggcctgccttttgaggaggggtccagcaccccggagaccctcactcgcttcatgcaggatgtggctgcccagaattatcgcaacctgtggcgccacgcgtatcatacttacgggcagccctacagtcatagccctgcccccgcggctgtccctgccctggattcagtgcgacaggctctgcagagggtctatggttgccctttcctgccactgggtgaagctgcacagtgcccctcatatgccagagaaggcccctgtgcccctcggggctgccctgcctctcccagtcttctgagagccgaggctctgttggagtcaccggagatgctctacgtggtctacccgtatgtgcagttctccctgcacgatgtggtcaccttcagccccgccaagctgaccaacagccaagccaaggtgctcttcattctcttccgtgtgctgagggccatggatgcctgtcaccaccagggactggcctgcggggccctgtctttgcaccacatcgccgtggatgagaaactttgcagcgagctccgcctggacctgagtgcttatgagaggcccgaggaggcaggggatgaggagaccccggaagcaagaaacggggcaggtgtcgagcctgg

SEQ ID NO: 56563 - DNA, 788 bp, Bovine  19866881320960
  misc_feature (1)..(1): n is a, c, g, or t
nctctattgaggcagagttttaacaccctaaatagctagacacagcaaggagattttagtaggttctcctcatcccgagtgctttgtgaataacaacatactgcccacaaaagcccattgtgcccactgcactcgatcagagtctggtgaatacacactagaagatgcgatcggcaccggagtctagacggaacaagacgcctagccaccacccccctccacccgcagagacccacggctttgagccgtgaaatgaaagacacctcctctcacggagctccagcacaaagctgctacagcccgtcttcacctgcttcgcaggatcaaggttggcgggcagcgttcctgtcctaattgctccctgcgactctccaggtttgtcatgggattacaggtttgtcagtttaagggctttagagccatcctctcagaaggcataatgcctccaagaaatataggaactgcttcatttagtaacagagccctctgcttggcagacagatcacacgctgattacaggaaccaaaagaaccagttcttctccaagcccaagttcaaatagcccctgtgttgagccccaaaaaacctaccatccacgaagcttataggcctctgggatgtcagggttcacaatgatggtgcttgaagataggacagagaggctccgtccaccaaaatcagaaactctggctcctttgatggccatcacggggttgtctagagccatcaaatttatcagcctgcgtaacaacagaaacaacaaacaaacaagtgtcaatggcaggaag

SEQ ID NO: 56564 - DNA, 901 bp, Bovine  19866881386492
  misc_feature (1)..(1): n is a, c, g, or t
nttagttagttccagccttttcccctgaatggatcccattggaaaatgcatttgaaaggaaaccagttatacacttccccttcctttgaaactctgttggcaccttttccagtgcagtaaaccatacaacatgtattttcaaagtttccaaacacagacacactggcgttaaatttatgaaaaaatattttattcagctgtatggtaactgtgactttcagagatgctgatcagatttgaaattggtgctgactttcggaattcccgacaggtttgaaatctctgcaggaagtagagccacaccagctcttgggcatctgtgatgccttggccttggattgcaggactcgggtaagggacataggtgtgagaatccctcagccacaccaaaggaaaacagggaaggccagtgtgccattgaatatcacgcctagttacgtcgggcacaggagcagaaataaaattgtttactctggtctaggactggaggtcacgtaacacctgtttgtgtgggatgtcatttactttagggtgccatggctaagaagagcttgtttgtttgtattcaaagcaatgatgatgtcactgatgtctgtaagtgattacctcccccctccgtccttatacctgtggccttctgtccccacccctcaaaaaaaagtgtgctagaatcagtctatttaaatatctgtggatttgactgaggtttgaatttggtccatagggacagtgagccttctcaaggatcccagctgttaattcagaggatccctgggaatactcttgaaagaaacctttcagaagaaggtttcttccaaattgcttaagcagctgaactctgtcttggctcacttatattcatgtacggaccgtttcagcttttcttgctaccaatccaacg

SEQ ID NO: 56565 - DNA, 1025 bp, Bovine  19866881398549
  misc_feature (1)..(1): n is a, c, g, or t
nttaaaaggcgagaatttaaaagttatgtaattcacatagtcaagaggatgttaagtgagaaactacccagataaattattaacagagaatagtgtatcattttgatttttttttttaaagaaaagcatattaagtatctttcaaagactgtctttaatcatttttttcaatcacacacttgacaatgaaaattggaattattctttgcaagaagcaactgtcatgtgcagcattgtgaaaactccctttagtcccagattaaatttcaaatcatcactcaaaagcctgccgcacacaatcagcacgtgtccttgggtggcagccttacccattcctgggctcccattctgttgctggggcctgctggttggtggactggctgctgagacaggaggaggaactactggctgctgtccgtgtcctgatgatcaaaagggaaagaccattttagtgccaataatttggattaagagatttaaacttaagcagaagaaatattctgagaaagtgtaaatttgtgatttttgtcaaagactctcctgggtcagaattcatgctggggcactttactgcatgcagcgaaagtgctgggggttcacttttgttttcattacctaaaaggttggctccatttacctttcacctgcttataattgatggctttcagttttaatgaggttctcccctaaagccttgcccatttctcctgcgtgaacctgaagtaaagtcactgggctgaatcggtgacattaccactatttccatagcaacaaatcgatgttatcaacagaactgtgttcacggcaggatctatcagaagaaaaagctgggtggtaacaaaaacctaaaagcagttcaattgtctctgaagtgctcctgcttcaaagggaaagaagacattcagaaaggattctaccctttcccttccaaacaaagcaaccttattttgcaactgacagttggtggaaaataagagttgaaagtgccttaggtaccgtgaagcgcgagtgaactgtcacagcag

SEQ ID NO: 56566 - DNA, 1339 bp, Bovine  19866881412124
  misc_feature (1)..(1): n is a, c, g, or t
ngtatgtgaggcctgcgccctgtgcatgcacggcctgctcagcagccctccctgcctcacctgccctggttgatgttgatgttgttcactcggtcagcgctgagggctgtcttggtcagggtctcgatcacgtggtcactctgcagcaccacgtccccctgggggcccacatagggacaggggtcaggccctgcccagcgcttagaggacccgtcccctccccgcctccccaggccccaaggggcaccttctgcttattgtcctcacgctgcacgtggagcacaaagaggctgtcgctcaggctgctgacggagattcctggggggaaagggcagaggtcagggatcaaggggcagagcagggccccctctatggacccaacctggactcaggctcaccggtcaggttggtgtactcaatcctctgcttgaccttggcgtcctccacaatgaccacggcgttgggcgtcagcagcagctgccgggagcgcggcttgtagcccttgcggtcgtacttcacgacgggcacggcgtactggggacagagggtgggttgaggggcctcctcaccccctgcccaggccccgacccccgcccacgcagcccttgggcagctgaactgtgtggggctgagggctgcccacagggtctcacctggatgggctccgagcccagggcctgcagcactctggggttgatctcatctgcacctgcaacccagataggggagcgaagggggcgtgagcgaaggagagaggggaccgggctgctgatggagggtttgcacactggaggggcgggggctcaccgagccgcgtgctgatgaaaagtctggggacactctgggggtaattgtccttcttgcccttgaagatctcactcgcaacggccttttgctgcagctgaggagacaacagcagggagggcgggggatgtcagagaggtggggccgtcacagcagagcaggagtctgctgagacaggagctgagaccaccttccctcaccctctctctggacccaaaagcaggaggctaagccctgccaccaatactccccttcagccccttctctctcttacccccgtccccaccaaccgaggcagtggcctctccacaagggtcatgacagtgctgtcagggtccaggccccacttcggggattattcccatcatcacaggccctggagcccctgagattcagctctggcctgagatcttaaagttggctgatactaatactcagaactactgtggggcttccctggcggtcctgcgattaagaatctgccttgtaatgcaagggacatcagtttaatccctatctgagaagatcctacata

SEQ ID NO: 56567 - DNA, 835 bp, Bovine  19866881457449
  misc_feature (1)..(1): n is a, c, g, or t
natgtgcatcgagtcggtggtgccatccagccatctcatcctctgtcgtccccttctcctcctgcccccaatccctcccagcatcagggtcttttccaatgagtcaactcttcacatgaggtggccaaagtattggagtttcagcctcagcatcagcccttccaatgaactaacactaaataaatgcttactaagtgaatgaataaatttaagataaagaagctggcttactgtctttcgtaatggcttgctgcgaatggcaagaccgtccatgtagtcctccagtttgaacttataagtgacctgcagcttctgaagcaaactatcaaagaagtcactaccctataaagagaaaaaataagaatcagccaaatcagcctgttcggattcattctacccagaaactggggcaagtaaccctttcacagttctgctattgttcagccagcagatgttaagggaggtatgtgcagtatttagtggccaccaactaaacccaagacaaattgatagcataagcctttctgtggttttaaagatatgaaaacatacacagggacttgcctggcagtccagtggttaagactgagcttccactgcagggggcatgggtttgatccctggtcagggaactaagagcccacatgctgcaaggtgcagtcaaaaacacacacacacatgaacacacattccaggtaagacattcagaaagcttccaagctcaaaactaactcctcctgtcggttaaattatagtgtcaaggaagcaacagaggtagggtaggcctaaactcaagaaaagagcataacgtttgtcgtcaatgttctattataaa

SEQ ID NO: 56568 - DNA, 1213 bp, Bovine  19866881488835
  misc_feature (1)..(1): n is a, c, g, or t
ntgagccttagtttttttggtctgtaaaatggaaacagcagcacctatctcatagagttgttatgaagattaatcatggtaagatgttgaatgtgcttgatacaacatcttacatgtagtaagcacccaagttacaatgattactgggtcgatgatgctttaatatactcatatgagctgatgctaatataatgtgggagggtgtaatgtaggagggtggcagcctgtccctgactcgggacaacacgtcttcctgggaggagatgtaggagagaacaggacgactccggcccccactgaggctctcccctctccctggcaggcagtggagggcagcatcctggtcagctcctcctctgaccactccttgactgtctggaaggagctggagccgaagcccacgcaccactacaagtctgcctctgaccccatccacaccttcgacttgtacggcagcgaggtggtgaccggcactgtggccaacaagattggcgtctgctccctgctcgagcccccttcccaggccaccaccaagctcagctctgagaacttccgcggcacgctcaccagcctggccttgctgcccaccaaacgccacctcctgctgggctctgacaacggggtggtccgcctcttggcgtaggctgaggcgagatctggtcaggcagaggtggcacacatcgtccaggaagccgtccctcatctgtgtttccccagtagctccttcctggcaagcctcaggccccacgccctgggtgcccacgtggcctgccagctagggtggtgtgggagcctgggctcctgaatccccagagtcactgaggcccccggaggggatctcattcatgacttggggcgatgttgctcggagccagcgggaagcagatgggagagcctggcaggggcttccctggtggcccagtgattaagactctgtgcttccactgcaaggggcgtgggttcagtgcctggtcggggaactaagatcccacataccgaatggtgcggccaagaaataaaaattaaaaaaagagggagagcctgggaaagcatcgctgccctcccttctctccagctccgccctctgcatccgcatggggacaggatgctctggggaagagggaaggagaccccctgccaagctgtctctaccacagcccccctccagcggctctctctgacactgtcctccaaggatagggaagctgcccca

SEQ ID NO: 56569 - DNA, 1153 bp, Bovine  19866881593041
  misc_feature (1)..(1): n is a, c, g, or t
nggcgctgagccccacttatagaggtgagggcgtggagcttaccggccctggaaggtctcaggggccagcgtccgcagctgccggttgtcgccaaggtctagctcctccaggtgcacgaagccctggaaggtgttggggtcgatgaaggtgatgttgttggagtagatccacagggtgaccatggcggggctgaagtggccctgccggaggagggtgatgtggttgttctgcaggaagatgcgctcgctgtcctccgggatgccctcggggatggcggcgaagttgtgcgcctggcagctgactgtcatgggtgcggggtagcacacgcagtcccgcgggcagccgctgcccagaggcagctccccggccagcagcagcagcagcagttccacacagcaccctggaggggagagagagagcacagccaggtcacagggggctgcccgggacgtgggagacggtcagagaagccgagctccacgggtatgtgagcctccttggtcaccggggctctgtcctcgtcttagccacacagcgatctggggtctggggtcatagccccctgactcctgatggcttcccatgccctggcgccccatctcttctgggggtttctattccagcctgggttgtgaggtgcgttggtgtagaggctgcggtccccctacatctggcggacttctttagccccaccctgcaaagccctagccccgcccacagcttctgagccccgcccccttaggccctgtcatcctggctaggattggggtcacagcccgtggactcagcagccagcctcgggggtcctgtccccctggggtctcagctctgccacttacttgcctttatctgcatgagcagatagtggggcaggctcctgttctaacaaagtaaatatctcatatgggctcctgaagagtctttttatttcaattattcccaataacaaacaaagcgagcagacatgtcaccaaagttttatcttgaaagatttctcatttacagtgccttccacgtcctcaagcatgcatcatccctcatgacttaagattcctcatttctaagtaataatagtttttctctgcaaaggacacgtgtgtgtatgcgagtgtgagagagagagagagaggtagagacagagagagaggagga

SEQ ID NO: 56570 - DNA, 888 bp, Bovine  19866881789713
  misc_feature (1)..(1): n is a, c, g, or t
nttgctcccctgtccccttcccgcccacccaccctcctgaagatgcggtcactcctttgtgacggccccaggagtttcatgctaaatatagctgcagcccattcacactgccacccagctgcggggggcggcgctgtggaacaatggggcatacacagagcccccacacctgtatggaatccagcggaaggcggacactcagccctggctcctaactgtcggagacggggcgggagccagcgcactacccggccaagggcacgttcacgccccgacaggaaggcacagcagcccatggagctgggcaaacgcccatcccagagtttgcttcagccactcgcaactctctggttcctgcagcatccacagggggctgagagacctcctgagagaggtcaggcttttcggccgaaatacccttgggctgctgcttggagcaagcccagggttggcatgcttggccctgccactccctgtccatcctgaaagggcagcaagaagtagcgggcaagtcatcataattataaccttgaaaaagacagcaagtatatgttaagctctgtggtactgactctggatatccagagaagggaccctaagcagaaatgttcccatgagcaacccccccgcaatgaagatgctaagggaagccagtgacccaagctgctttgtggagcagatgcagaatctgcacccgtgggtttctgcagctcaagaaggaatgcctgggagttccctggtggtccattggattagactggaagcttccactgcagggggcttgggttcaatccctggttggggggctaagaccccacatgctgcacagtgtgtcccccccaaaaaaagaatgtctgcctgcaatgccggtgtatctcaccagctttt

SEQ ID NO: 56571 - DNA, 481 bp, Bovine  19866882049118
  misc_feature (1)..(1): n is a, c, g, or t
nctcttttctgctcaccttcgacggcagctgccccggaatattctggacacttcttggcccacgcccccacctgccctgcgtgaggtccgtgggctctccctgctgactgggggactaccaacttacgcagcagagggacctaataaccgtgtgacccgaggatccatgggaagggaagggacttggagctgggccatggagagcgagttctttgcagagaaacaattcaggaatggaagggtgtccaggttgagggggtgtcacttaggccaagacccgatggtgggcacgtgcctgttgtctgcagagggaaggagccaggctgcctgggtgccctgacctccctctcacccacaggcctcagagctgctgcgggagctgtgccggaagaacatggtgtggaaatactgccggagcatcagccctgaatggaagcagcaggtatggggctgggaggcaggtacggggtgggggtgggtt

SEQ ID NO: 56572 - DNA, 1292 bp, Bovine  19866880410531
  misc_feature (1)..(1): n is a, c, g, or t
nttactcacttacagtcaacaagattttctccaggtggtaaaacatccaaacactctttgaccatctacagagtttggacagcaacctctaaagtgctctcagaaccaattgatagagatcagaaacaagtgtctcactaaatattacattctaattgcatacatgactaggaaagatgggcaaaaatgtttattcacattgaactttttaaatagattcagctgatttatacagtttctcctgccatcaccaattttaagtagctctttatttcatgtcctttgctcacataaacaaattctgtacacaacagacacccggctgcattcaggaatgaaggcaatctttactcaatgaatttttaaataacctatgaaaactgctattttttccaccctagttcaggttatgcaatgactcagtcacacatctgctctctcaaggctacaaggatacattatgttcttcatttaagcttgttcttgagatgaatgtttgacttttgaattgttggaagtgaatttgtacaaggcttccatggctcaactactgaagagacaaacatccattctgcagccaaaatgttttctcaactcatttcagggaaattctgactcagtgtagaagctgtaaattatctctcacctggcaagaaataacggcttcccaaatgccgtgtaatctcagctcaggtaaaaatagacactagtactcatgaaattgtctccttgttggggacaataagtttgctaaaccactcagaacttaatgcaataaaaaattaatttctccatgtattgatcactcttaaaagtcatacatctttcaaagaattctaaacctaaaaagaaaacataacactaacttacatttatttctttacagtttcaaagcatgtagtattttattgtagctattcaaatatttctcattttccagaacctaaggctttgaagaattaaatatgctttgtacaagtaaataaatttagtgcaacaagtcttctaatttctggtgataaaaaccaaaattaaatttagtaaaattcattgtgtgatttttcactatacttgaattttatagctacatctttagtaagtaattgattgattcattacacaaatgtttactaaaaacttagacctgtgatagttggtgggggaaatgtagagaaatataaaactgtcccaattctcaaaaaggtagctaatccatagtgtgtttaacagaaaagagaggtatgtgtgtgtttgcatgtgtgtacatgtgcaatgtgtttatcttactaaaa

SEQ ID NO: 56573 - DNA, 1294 bp, Bovine  19866880599163
  misc_feature (1)..(1): n is a, c, g, or t
ntttattgtgatccacaaagtcaaaggctgtggcatagtcaataaagcagaaatcaatgtttttctgggactctcttataaatatgaatgtatatatatatatggatgtatgtatatacgcgtgtgtttgtgtgaagagctttatgcaaatatatgtatacatttgtatatgtatatttgttaaaaaaatgttatttgcttagtcatgtccaactctttgcaaccccatggactgtaaccccaggctccttgtccatgggattctccaggcaagtatgctggagtgggtagacatttccttctccatgagatcgtcccaacccagggatcaaacctcagtctcttgtactgcaagcagattctttactgtctgagccaccaggccaaccatatgtatatatacatacatatagtatgtaacattgattggtattttatttgcaactaagagctactccatttttgctctttaggaactcctacagagtacctatttcatgtatatctgaagcaatttcacacgaatgttacattaggtgctctttaagggaatgcctatttaaagatcaaataaaataagtgtgtgctaattgatatgaaccagatggcccacagaaagaagacttagtctcaacagattgttccacttatttatttatatgcagtacactgaaacacactcccactcttgtatgtacctcaggtccattctgtcccaactcataaaatgcactgtccattcccctaccccatcattctagacatcaagagcagctcttcttttctacctgccaaaaggttctggcaggaaaaatgcctagttgcatccatactcactttgtcttgttcttttggactcatgtgctctttagggtgaatctaactccttccacatacaccaggtcctccaggacattttgacacttgcagaatgtcccattttgttgggatgtatatcttgataccccactcttctatcttatttcctttgtgcctgctagagtgtccgtgccattataaataaaacccacacatcctgaagctttctgtgttttacttctatctctgccatgcatgcacctgaccagaactgtccagagaattgtttaagttagatatcaaaccatgaaatagatctcaatagatctctctgtgtgttacaagtagcccctgcttattttccttcaccatctagggatatgggagttgaattagcatttttcttgctctttaatgctctctaataatctctcctagattatttatctgcctatgtatagagacagagaaggca

SEQ ID NO: 56574 - DNA, 1697 bp, Bovine  19866880641379
  misc_feature (1)..(1): n is a, c, g, or t
nctatgccttaaacatatcaaaataataaaggcatattataaaatgaaatcacaagaaaaattgcatggctcttgcattatattcatgatggagcatttacatgattgctatatgagtcactctttttaatatgtctgctattataactagtacattaaaaaatctatataaatgtaattccactacatcataaacctaggttctaaatcacacaaaaatgaatgtcaaatgctaacactattaataagaaaaacctagaaagtgaatatactatgtttaattaaagacaaaaatcatttgtatcagacagtgattaataagtataactgaaggaaaatttatgaaccagatggactaattttttttaaagtttcctcatcacaccttttaccctttcctacccctctttctgttggaaagcctatcctatttcactaaataggaaacttaatgttcaacatattctagatatttttacatttgttaaagttgattattttgtagatttttaaaaaagacttttattttgtattgtggtatagctgattaacaatgttgtgatagttttaggacaacagccatacatataaagggaagtcgctcagtcgtgtccgactctttgcgaccccatggactatagcctactaggctcctcagtccatggaattttccaggcaagagtactggagtgggttgccgtttccttctccaggggatcttcccaacccagggattgaacccgtctgtctcccgcacagcaggcagacgctttaccgtctgagccaccagggaagccctaggcataaatatacatatatccatttttcaccaaactcccctcccatccaggctgccacataacattgagcagagttaaaccattataaaagcattctagttgagttatgtaagcattatggcttgttatagaaacagaaatttctctaagttcattgcctaaaagaatgtccttgccctattgatgtcactttataattcttatttcaagtgttcagtcacgggaactttattgttggcataaattttcttcttttaaaacagattggctcatctccaaatctgcagctctttgtagagaatgtttgaaaggttgaatgaaagtcagaatgtcaatatatttattggcaaaacgacaatcacctattaccttttctgcagcactttcattttctataaggaatttagtgtgattgtgtttgtttttttagtttgttttataagaaccatttaaagaaaaaaaaattatacaaaatttcaaatgctcaaagcttcctgagaacattggacctttatatcttttccaccagctaagtgaaattgctgatttactcttaggagttactcaactgagtaacccagattacaggcctcatttaaaccccaggcacttctgttatacttcctggtaacctaagtttttagggagataattgaagacatatgaatttgcttttgcctgtatttacccaaaaggtactctaaaccttcatttttagaaagaattaaataaacaggcttcataatggcagtggtaggcagtgagaaagagaatcttgactcctgacctcgtttatactgactattggagaaaataaagaagtaatcgcaattcattttcagattgttttcctgtatagattattacagaatgttgaatagagttccctgagctata

SEQ ID NO: 56575 - DNA, 1738 bp, Bovine  19866880663690
  misc_feature (1)..(1): n is a, c, g, or t
ncttgctcttgctctctctctcacacacacaaccacacacaaccacacacacacacacatcttttacaagttaaattgaaacccaaaccttaaataatgatgcaccctaccacctgctcccaagccaaccaaattacatctatgatattgtagagatggctttctctttttgtttagctcttttttcttttgtttagctctttgcttattaaaaaacaaacaaaacaaacaaaaaaagcagtcacctggattaggtactttttcaatggggtcagctgtactttaagactggattgagatcatatcattctccataggataccaaaaatgcaaatagctacaaacatctatcactgtgaaaaataaccatattttaaatggttaaagctgtgagagcttgaaacaattgttttgtgcttataccattttgaaaatatttttacaaattagaaataaaggcttgcattactttactataaaatatatgtgtaattttcacattatcagatcataaatgtatacgtttttctgtgaaatttgggctgtggtatcttttgactcttctttttatattccacctgggagtgtctaattcctcatttgtgctttaaagagcaacatgtgaaagagaacagcagtgaatttagaaaaacctaagtcagaaacagcatcctgttttaaaagataccttttttcagtctcttccccaatttttggtttatgaatatgtcttttctggacagcttgcctttaaaatgaattagaaacatgggacttacaaagtgtattagtaataataaaattatatgttaaatgctaatttttaactttaatacatgcataaatgtttactacaggctttagagaccgaataataaatttagccaggcataactccagccaagcatttcccaaaaatgtaaatgtaaaaaagaaaaagttctgaaaaaataacccagacaaatgtaccgctttaacataaactatccaaaaatgtccttttaatcttaagaaagtaaaggtaatatcattaaagtgagaaataaaaccagagtgaaagaaaatactttccagaactttaccctacccagatcattttaattacattataccaaggagctgcagtcatagcatcatctttaagtagtattgcctccttcttttgttcactgagaattattgtctaggtgccccaaaagctttagttacactactgggtcttgaggtcggagagaaaaagaagactgaacagggtctccatcttccagaagcccaaattctagagttagaaaaaagccgttaaacaactacgacattggaggtgatgtgctcagttgctcagttgtgtccgactcacctgtcaagtggtctctgcagcgcacatatgccttgggctctagggacttggactccacaagactgttaaatctgtgccttttgactctcctatattgttggtgggaaagtaaattgatgcagccatttacagagaacagtatcccttcagttcagttcagtcactcagtggtgtccgactgtttgcgaccccatgaatcgcagcactccaggcctccctgtccatcaccaactcccagagttcactcagactcacgtccgtcgagtcagtgatgccatccagtcatctcatcctctgtcgtcccgtgctcctcctgcccccaatccctcccagcatcacagtcttttccaatgagtcaacccttcgcatgaggggccaaag

SEQ ID NO: 56576 - DNA, 1913 bp, Bovine  19866880699056
  misc_feature (1)..(1): n is a, c, g, or t
ntgttttgtttttttacaaaaaaaaaacattttactgggcagtttagaatgaaagtggggctcaaacactttctggtcaatggaagcccaagagtggctgtgtatctttacccaggaccacagccaagggcgcaccatcagtagcagcaccgagcccatgaaaaacaaaatccctagactcttagtccaagacttttggatacacaaaaatagactctgtcttttaatgatattgtcttcttattttttctttttattcctatttcatagttttgtctgctcaagtcagggtggaatctgaaaagtataaagagtgttgaagagttcttttttttcttcagatactgctaaaacaaagtgaaatgtacggattaactcgatcacactaacaggcctgaaatatcctgtttaccccaggttttgatacaatgggtctttcataattttctagaggtatgtggaaattgtcaagagtgatgccggcctttaaggaggaatgttttttcttagacagataaggatcaggtttgtacttgtggtgccagaaataagaatgaagtttcacttcagagcctgagctatgttgatctacctattctcattacacagagccatttatagccatcaggagccgcagactgacctgtgacaattgctttcctgggaacttaaaaaatgcactagaccttcagctgcagggacaagcaacagcaccttggatgaactggccacgcgaatagcaccaccaagtacctgctggcacaatgccgtatatttttcaaaggaaataaggcaattataaggcttctttcataaagtcagtaaatggtatttgacctaaggtgaaatccctatgtttaattggagtctggaaactcttcatttttttttccctttgccctacttatatttatttttttagagagttcatggcaaaatttttgtatcctaagcaacaaaaacacacttgcttttgacctccttcttttcttgctgttcactttgataataattattccagctcttgaaaagtactgtatttggtcctcagccaaagctgacatttatttatggaaataaaattgtccagcatatgcatccactttaatattcattttgttaaaacttgccatgaagacaattttcctaagatgagacttcatactaacatcctagagatcatgtacattaattttgccaaattcaaaatgagaaactggattttcagatgaaggctttcatagtaagtcagtcttctgttcgtgtaataagatagaagttcttgggttgcacggcattcagcagtcttgttaaacagatctgaaacctgaagcccaagtaaggtatgaacttcaggaagactttggcaaaaagagaccacacctgttccagcttctagtaaaataaatcatggttgtggaaagacctgaccattagcagtaagagaacaccctccagtgcagcttctactattcaaagtgaaaactatgacaccaaattctgttctgcccttcactactatacaagcagttttttgctattatgaaagccacttcttaaatataacacataattgtagtcattttccatctcttattgtcctagcagtgtcaaccaaaatcctttaaaatattcaaagtgcttagatattctgagaccaaatgtcttagaaatgtaaggtattatattgtcatttggggtccagacttcatcagtgtaagtctgtcactcaacttttcagtgtttatgatgacaaattgggatgtaacaacaggatgagaaatagataaatatttttattttagcaatgccattttagcattgttttgatagtgatcaccagtggggttatacagtttgttttcccttcaccctttctttatgagagatggtaacagatgccagaaataatt

SEQ ID NO: 56577 - DNA, 1807 bp, Bovine  19866880775906
  misc_feature (1)..(1): n is a, c, g, or t
naattaagagaaaaatgtgttcttagaattttttttgtagcaaagaatgcaagaagtattttaagtataatatgtctacactagagtctgaaaccacattggaatgatttgatttttattaaaatatacaacttacttgtatatttatgcagggagtcttgaggtgacagtgtttttttgcatcaaagaaagtatacaattgctgcagagactaaactcttacttggctaagagctgttaaatatatttttacacccaccctccaacccttggacacagagcgccctttcacgtgaagagtatgggctgtcttccatttctgctgatgttttttgttccagttaattccgagctatctaagaaacaatctcacagatagaatgatttgtagttggaaagaaaaggcagttgctaaaactgcagaaacggtaaaaggcagacagatcattttaagttaatatacccaagtgggttataaattagaatttagactaattgaaagtttggaatttgattcatattttcacatcaaaagccacaaagatttaaaagcttagggtcaacacagcaatctaaatccaatggagagaactgctctctagaagtaagtttgtcaccatttaaaatgacaaaatagatatgttttcttcaatatccccatccatgttcctgataattcttttcttttagcatttattgaagaatatgtgatgagatattttgttatgagaaaattcatagatatatatggtattgccctgtgtctcttaagagcctctcttgctttggagaagaaatatatactgtacaatatttgtacaatacgtgtacaaaatatacctgtacaagtatttgtgtgtgtcagtatgtcctacaagtagctggaaagattttgagaaggaagagaggccactgttgagagcagaggatatcacaactcttaaagaaaaccaaacaaactagcaaacaaataaacacctgggaattatctagcataaatttgatagcaactatataataaatatctctcaagaatttattaaaaatgtatattatcagatgtcagagtttatgattctctttttctggagaaaaataaaattatctgcattttcatcaaatgtgcttagagattctgatccgagacgatctcacactgaattagagggaggagtatgctctaaaccacaaactgagcaggatacagagagttttactacaagatgttggggaaatacttttttatattcaaacaagcatgaatattttatgggtagactggagactctgcttgcatattttatagctaacatgcccatgtgttctctatttttccagatttcaaaaaagagtgagattttcccttagaattagatggatatatttcaatttttttccaattattccagtgagattttttttttcatgatttcagtttgtagtacttgcttttattgtaccaactttttctgagcttccgattaaaacccatcaagtttgtcaactgtcagtgtctgttatgcctggagctacgatgcatgaccacctgccatcttttctgggttaacactagcttgtctgataatttgcagatggcgaaggcccagcaccaaggcaccgttccaggatacatgtttttttctcgggtgtgatgagggtgatgagacactgccagttaaacaagactgtcccgaccatcaagaaacattctttcattcttcctgtacgctttgacatgcaatcttaattttgtcagagttacagttgcttgtctttaaaaagcaactcttcttgggctagttacaca

SEQ ID NO: 56578 - DNA, 1741 bp, Bovine  19866880857549
  misc_feature (1)..(1): n is a, c, g, or t
nttaaaaaagtatggattacaagtaatattatcaagaagaatagctctctatataaataaaaccattaaaaatattcagatctggatttatacattttgtttcaaaaacaggtatggttttgtgatgtaactgcccgacaaatacatattttaaaaataaatactgtttcttggttaacaaaaaatatgatacatattttacatgaaggccaagattttttaaaaaataaaacttttcacaaagtttttgatatgaaaaaagatgttatttttcagcctttgtaggtttaacattttaaaataatggtgcttatactacagtacacaaagtaaaacatacatactctattataaattactccgaaattaaacaagaaattttcttttctttctaagagatctgaaatgtgcactggctctcaatgtgtgtggcctccaaacagaaacaagcttgcactgttttatttcagttttgcttcatttcttcccaaacaatctctcactgctaatctacagggccttttttcccctctcttctagcataaaggaaacaaaaatcaaagacattattaactccttatgcaccattggaaagctgaatatatatcctttgccctggttttcttttccttacttattaatggagcatgactggagaatatacatttccacaaataattcttgaaaactgcatgaaaattctaaaatttttaatgtgtgtagtcaatctgttagtactttttaagctcttaacaactagccatatagtttcaggtatatatcttatgctaagtttttccctaaactaacacttagtctataataactacttgaaagagcaaaatgggaagatgaattttatttatgtcttagtctaaggtacctgggaatcaagaaaaagtattagaagtttaatatctcaaaggaaagaatatctatatacaatatatgtaaaatatactaaggactcctctcgtggctcagatggtaaaaaatctgcctacaaggtgggagacccagaccagcatcactttgttcacaatagtaagggatcccttgtttcactgtatgctctcattcactagtggagtgaaagatagtgggtgaatcatcttacaaaggtaagcacaattgttaatggaaacacgtgtgacaaaaactgcttctgagaattttaactaatgcattaaaactctcctgctaagatgtatggtgatcagagccatggaattttaaaggctgactagaatcaaatattcattcaagctcccaaaaaaggactgcagagttcagtcttatttgttaaatacaaaagatattaaaataaactttctttataattatcccagaaaagtgctattatactccacagttttctatgtatgaaaagatgcaaaatattcattcagataattattaaaaagcaggaacgatgactatgtacatcaatgcacatgacatcataagtaggcactatttaactacttgggtgtctagtctccaaccaaaaaagatgccaattccattctttaaagagggtaagcatcatggtccttggcaatagaacataacacaccaggccaaggagaatatttggtgtcattactctattgttcagttttctggtttatgagtcattactactgtgcaacatacagtaaatgaggaagcttcatggggttcacagaccctccaggagcaatggaggatgaggtaccactgagcagctgcacagcgacaa

SEQ ID NO: 56579 - DNA, 3494 bp, Bovine  19866880937875
  misc_feature (1)..(1): n is a, c, g, or t
naagtggttattttggatgatgatttacagttaattatatgtgttttatttttttcctattttttgatttttcagtgtttttacaaggatttcctttggagggttaatttttgtgaaataaaattttgtcgtgtttttagaatgcaaaaatttagttataaatatatatgatagtaaaaagggaaaataggggtagcaaagtcagtcaattcatatatcaatttagaggagaaattagcatattttgaagtattctataactgctagaatggacctattttgaagctgagagttcctgatgaacaagtaaacacaaactgacataattggcagcatcagtaacttaaaatcaaatgagatctcaggtaaagacaattaccccttataatggggcataagagatttttgttggcctttacaagaggatactgaattatgttgtcaaatgaagtagacaagaagtctttgttgaatgggcaagatttcaactaaatatttaggtttggatatttgaataggtagagaggacactggatggacacatttctaacagaaaaaatggtgagaacaaagctctaaagtgatgaatgaactcaacttgctccaggtcatttgaaatggcaagagcagggaattcatgttagagggatgtagacaaaggatagtgtgaaaatgtcacatgtgaggttctcagggtgcagataaagatgaggatagaaagagaaagagggagaaggagggcattacattctattggagagaaaatatgtgtcattatcttaaaaaacaattgatcattgttaaaagaaggaaaatactcaaatttcaattttgcatgcttagaaagaaaacacaataacatcatataataatcagtttagttcagtcgctcagtggtgtccgactgtttgcgaccccatgaatcacagcacaccaggcctccctgtccatcaccaactcccagagttcacccaaactcatgtccattgagtcagtgatgacatccagccattttgtcctctgtcgtccccttcttctcctgctcccaatccctcccagcatcagggtcttttccaacgagtcaactcttcaactgaggtggccaaagtattggagtttcagctttagcatcagtccttccaatgaacacccaggactgatctcctataggatggactggttggacctccttgcagtccaagggactctcaagagtcttctccaacatcacagttcaaaagcatcagttcttcggcactcagctttcttcacagtccaactctcacatccatacatgaccactggaaaaaccatagccttgactagatggagctttgttggcaaagtaatgtctctgctttttaatatggtatctaggttggtcataactttccttccaaggagtaagcgtcctttaatttcatgactgcagtcaccatctgcagtgattttggagcccaaaaagataaagtctgacactgtttccactgtttcccccatctatttcccatgaagtgatgggaccatagctactctttattaaccttttaggaactgctggaaatttcctagaccacaaaacttcagaaagctcttcacaattttatttttcccatataaatgatttcttatgagagttacagacactctggtattcctagaaaagtatctggaacaatcagacacgatgcaaaaatctgaggacaaatgtagaattacatttacttgtactgaagttgttatttttatgtgacaaacttcagaatgtacaccatgttatcatcaatggaaatactcataatactgctataattatgatatttcttacaaactaattaccagtgtggactggttatttatttacttaatcatggactttataaaatggggtaaaagctttaatcatcttctaagtttatagtgagacttttctgcaaggagaattttatttctttttctttctttgcttcctacatgtaacttgcactttctattcaaacaatatagtttacttattccttcattttgcccttcaaccattcaagtatgagcaattcaaagaaactttaaaaccaagttttcctgttctgatttacatgacaaatctttatgtttcaggaaaaagtctcatattcagaatcttatatgttctatttagtttctgggatggaggatgtaaggcttgaaaaaattactcctgcctataaatattatattgcaggatatttttctgctcttctgtgaaggtagaaaagtgctgaggataaaatgaaaacctaagttctgacatgacaggctgattgctgtgaagtaagaaaattaaatgacttttcaacaaatatataagaaaacttattatgtatgtggttgctgttcagtcactcagatgtgtacaactctttgcaaccccatggactgcagaacaccaggcttccccattcttcaccatctcccagaaattgctcaaactcatgtccactggagtcagtgatgccatccatccatttcctcctctgttgtccctttctcctcctgccttcaaccttcccccagcatcagagccttttccagtgagtcagctcttctcatcaggtggccaaagtattggagtttcagcttcaacatcaatccttccaatgaatattcaggataggtttcctttaggattgactggattgatctccttgcagtccaagggactctccagaatcttctccaacaccacagttcaaaagcatcaattcttcagccctcagatttctttattgtccagctctcacatccatacatgactactggaaaaaccatagctttgactaaacagacctttgttggcattgtaatgtctctgcattttaatatgctgtcgtggtttttcttccaaggagcaaacttcttttactttcaagcctgaagtcatcatctgcagtgattttggagccccaaaaaataaagtttgtcattgtttccactttttccccatctatttgccatgaagtgataggaccagatgccatgatattagttttttgaatgttgagttttaagccagttttttgaccctcttctttcactttcatcaagaggcactttagttcttcctcactttctgccgtaagagtggtgtcatctgcatctctgaggttattgatatttctccaagcaatcttgattccagcttgtgcttcatccagcccaacttttctcatgatgtactctgcatagaagttaaataagaagggtgacaatatacagtcttgatgtcctcctttcccaatttggaaccagtccgttatgccatatctgattctgttgtttcttgacatgcatataggttttgcaggaggtaggtcaggtagtttggtattcccatctctttaagaattttccacagtttgttttgatccacatagtcaaaggctttagtgtcgtcaatgaagcataagtagatgtttttctggaattctctttctttttccatagatattactaat

SEQ ID NO: 56580 - DNA, 1771 bp, Bovine  19866880956279
  misc_feature (1)..(1): n is a, c, g, or t
natgttctaggttagaaaaaaggcaaatattttatccttatgaaattcagtgtatgattgatctggaagttttccaaactccattgacagagatttatattaaatagctaggaattctgaccatgttgtgtcatatattatttctccagtacttaggaagataaaatctttagctcataaatctagtggaagagattccccaggagtgctctgcattcaacctgttcttcctctttctgttcttcttctttgaatactcccagtgcgatcctgtctactgcatgcacatactcttattctgtgcatcaggcttccagaggctcagcaagcagctgtgctcatggcagcacaggtggaatttccttgagtaacactgatttgtgttagaacaactattttttacccagtattttaaaaaattgaagtatagttgatttatagtgttgtattactatcaagtatacaacaaaagtgattcaattctatacatatatgtatattttttcagattattttcctttatgccagtgtgatttttatttataaagaaattttaggtgcaaaagtacctaacaaataccattgagacagagccagtcaattgtggatagtaattggttggcgatcatgttctgcacagaatttgttaatggaaagatttacatgaacaaataccataaataatttcttaggtctgtcttactgctatgttaataaagttacctaaaagaatatagcataaaactgaaataacgatggtgtgttattttggaatcacaatgttactttgaaagagatgtattctcagtgcaaattcattacagtgtttgcttaatctgttttaaaaacattcaatattttatagcaattcaaaatcaatatgttcttttgctaatcatacttcttaaatgcaagtctggacttttaatctcccacttaaagttcttcagtaggtctcatagtcttcagaataaagtgaaaataaacccttaggcatgctgttaaatggtcttcattacctggttttactctcctcttggcttcatcctcattttacattcccccatcatgctccagccatggtgtagttctgaatacctttgggactcacattcaattcatatgctcatgtacatcctctttaggaaaaaaatacctgtactcgaggaacttctatcctgttagcttctaattattccacaatgctcatctcctttgggaaacactcataactcttgcagtctgtgttgtgccctctcagagttctgttttccttactttggatggcttcagtgttagtaaaatttcttactagtttttatatttcagttgtctccacagtgtttggcccagagtagatacttaaaatatatttttattaaaacaaaaatagaataaaatagatacatgtcatttcatcagccttcatgagtcattttcttactaaaaataaataacatctgatgttattgttctaaccctctatcatttccaccttcaccagctttcaataactggatcttaggtttcaataattcacaaataaagtataagaaacagttgaatttatcacagtctataaataaaaaaaattgtcaaaataataacacaaaaatctttatcaaaagtacagctaattatttaaccttgggattaacagtatttacttggtattatcaatttcacctaatgagatctcctgttattggcacttggtgacttatatgtgagggtgaaaaatgtccagaaagtctcaagagaaggctcttta

SEQ ID NO: 56581 - DNA, 3188 bp, Bovine  19866881084059
  misc_feature (1)..(1): n is a, c, g, or t
ntggtgatggtgatcatatttgagtagtatactaggggacatcacatttgtacttctgaattgctattataagtagaatgggataaaaatagccaaaatgatttcaatacttttgttatagtgcaataaatagatacaaatgtttacaataatacataaagggtacaagaaattgtgacacaaatgaaaatagagtaacaattataatcagagaaaatagatttcttaaattcctgtaagaattttgaaacttccctattggggcacaaaggacataaatattatttaaccaggataaacattaagataagtaggaaaattgagattactgcttttaaaatatatattttactaaaacattgatttgaaaagaatatttaacacattttgttgttgttcagttgctaaattgtgtgtgactcttttgtgtgcccatgggctgtagcccaccaggctcctctgtgtatggggatttcccaggcaagaacactggagtggtttcctatttccctcttcaggagatctttcgaacccagggattgaacccgcatctcctgggttggcaggtgggttctttactattgagccattagggagtttgctgctgctgctgctgctaagtcgcttcagtcatgtccgactctatgcaaccccatagacggtagcccaccaggctctgccatccctgggattctccaggcaagaacactggagtgggttgccatttccttctccaatagggagtttcagttcagttcagttcagttcagtcgctcagtcgtgtccgactctttgcgaccccatgaatcacagcacgccaggccattttccaaaaaaaaaaaaaaaaagatgaaaaatgtcatggatgtatttgtaagggacccacctaaaaaaatcaacttttggtgggtatggaaagaaatagaaagaacaatgtcaccttaatgggggagaaaaaaataaaacatcatataaaagcactaactcttaaggcaatacagacactaaagacttaaagtgacaacacgcacgttatttgtgataactatagtgacacttatgaaaaaacatcaagccagagaaagtttttggttcttggttttccttaatctcgtgtttaagaggggaaaaataaataaccaagtctgaaatgcatacataggggcatctctaagtggtacttactggcatgacaatgttgtagtggatgcagaacccgggctccgagggaaaatactcatcagatacaaatctgatcctgatttgatttcctttagaaatctgctttcctggcacactgccagacccacaccagcgccctaaaatggttccatcacttggttcttcaacctctacaaaatcatacctgcaagagaccaggagaaaagagacataaaaccatgacctgttattttaagaattcaagggagtgagttcatctcaaatttaactgtgtaaatagaataaaatatgccaaagatgagacacaactgaaaaagcattctcaattaaagaaagatgagtcttctattctaagccctccattcttgttggtaaggaactccaaattcactaaacagccacgtcaaacttagacattttgtatgtagcaaccatatctgacaatttatgaattattcagtttaatttccatttggatatggcagttttgctctactcttaatttccatgattattgtccaacactttccggcagtaactccttcacctggtcagattccttgctccctatcctcatctgtgtccaagcttttctagagcctcttcattatatacatattctccaaatcccactccgtactacattgcctctgtgagaccttcgtgtgtcctcagctcacagacgtctttctctttctgtcaaacacatattttcaacatttaactacatatatgcacgtgatacatctagttggctaggctgtaaaactcttgaagaaacgattcaattctcttgtggttctagtttacactgcattacacatggcatcttaaacctaagcagtgaatgactaatacttctctaaccactgttaccttgggtttgaaggtttcgatcagtggtactcatggagagcagagttgccttatagaatgttccagaaatgtgtagaggcattttaggttgtctcagtgatggtggatgaggagggcaaggtccctggacacccaacacaggagagtccagaaaacgggtattcactccacaccctccaggcctttcaaacagttcactggacattcacataagcaacattcttgctattgtccatctgagtttgcaacataatactgtctcacatataaaagcaaatatgtttcaaaggtttagtttaaacccaattttctagacattcaactatcaaataagttgaacgaagtgtctatgctttggaaaaagaattactattctagagaatcaaaccactaacaggagcatgacttatactctgcatcatgatgaaaacaattagacatacccatttagtctattaccatagctatcgtatacacaatgagtctgttacttaaaaagatacaaacatctgactacttcatttttgtgcaattaggcatgtgtatctatgtacttaaatgcattattttaatataaattactgctgttatgtcaactttacatagcatgtaggcctttatatctatttttaaacaactgcatatataaatagaggatcactgttatgaactgcatttcagaattcttaggacattgccaaatttttcttaagggaggtctggcgtggatgaaaactattggtagattttttttagaaagtctaaaaccagtatataccagacaacgaaaattaatatattttgcatagtatagaatttacagaagaaaaaaatgttgaaaaaggacaaagtgcataacaaaccaattatacttataaatcctattctaaataattagccagaactctctaatggaaactatacctgttccaacctaatttttcttgtccttaaataggatagtgcaacctgactcacagggatattttgagaaaagggaaatggaacagttcctgagcagtgctgaaagcgttgtgctatacagctgccagttaacagtttgccccacatccctacccagcacatattgcccctactccatacctataaccctgagagttgaaagcata

SEQ ID NO: 56582 - DNA, 1620 bp, Bovine  19866881161073
  misc_feature (1)..(1): n is a, c, g, or t
nagagctggattcagagtatgttattgattttctgctccatacattccctcccctgtgatttcatacaggtagccaaggaaagcatatattttcacaggaaggcaaattttagtacttcttataaaaagtctaattattaaaaaagtacaattttttttacatcataagcttgtcaaaaaacagataaattataagttgccattgtgagtccatttgacgtaggagatgacagaagctggttagacatgaaataattgtagcttgaaagtgaggtcaaggttagagaaatgttgatgctgtttgcttggtgggaaataattgtctcaatgaacagggtagggaacagcagaaaagctgataatagaactttggttatggggccatttttatactaaaaaatgaacatcaaatctatacacaacaaaatactaatcaaaagttgtacaagtatttgatgttttagtcaacattcaacattttaggtgacattcaagtcatatgagtgcatttcctccatcatcagatattttattacagggaagaaaagagttggtctaaattatctagatatttattttacccctattatattaatgttgcattcctaaagcctcaatggtatttcacttgtttaagataatatgactatagtttcctttagtaaagggcatgtagacttgacttctagttattaattaaaaattctagtaacccagggtctcagagcttccatgaggacacagctgtacatgagtagccatgtccagggctgatgcttggattgctgggcactcagctgtctatatgctcaaactccatccaagggtcaaatgctaattggtccaaatctgtgttgctcatatacttaggcaaaagctgtttcttaaagatctctatttctataattgcccagttcctaggactgttcttttgccttggttttctggtttgaactctttgctgaggctgcagacctgtcctgatccccaacccccaaacaactcttgtcaatacctgggtgggaaggagcccttggagaaggaaatggcaacccactccattacttttgcctggggaattccatgaacagaagagcacatggggtcccacagtcagacatgactgagggactgagcacacactcatgctgttctccgaaggggccaatggagaagagtgagatatctgcagtgaatgacagaagtgaattcaagtgctccaagtgacagagtgagtgaaaacacaacatagaaaaagaaaaaaagaaaaaaaattggtaaatttgtccctgagtcttgatcccaaacagtcttttctagatcataagagaacaaggcagctttcatcattttgatcctgcatataaaaaacagacatgaaatatttacagtgatgcaagctggctttgaaatcagcaagtcctggctgacaccagccaccaaattggcacagtcattggaaatgatgttcaaagcagctcacaggaggaatgggaaaagcagctttggcttctctgatagaatacagagcagcatttcctttggaatccacattcatgcttgatgctgtaagcatggatggagatatgcagaaagatgaaagtgtcctacattcaaatt

SEQ ID NO: 56583 - DNA, 1574 bp, Bovine  19866881180869
  misc_feature (1)..(1): n is a, c, g, or t
ntattactaattatactgaatgtactgagtgattcttgagggaatcatggcttctatggttttgtaattccctatactcatgtagcaataaatacataataccccagggcactcttcacctgccagcttttctacatcagtttcagtctctggatgcccacgggtactatagtagtagcagctttgctcaacatttccatacgaagagcatttgctcttcagaaattctcttaggagaaaggattttttttttttttctcagaagcttcccagcattggccactcctgaaccaatcactagtaaagaggaaaaagcaatcatgattggctcagatctatagtctggtaaagaacaaatactggagaaccaatcactatgtccattacacgatttcacttgatcatcacactcactcacttggttacataggagagacataaaccacacagagaatagtttctcacagagaaagaggaaaaaacatataggcagagagttagcaacagacaagtaaatggggccataaggcatgtatatatgaaaaccaggacacagcaaggttcagagattttccgaggtgggagagtgaagaatgaaccctggtaatccctactactagccatcatttcacaaacttgccataataaaagtggaatattatctatcttttattactgtccatccatatactcctttatgtgatagaggatattaatcttaccaattttcaaaatcattcatcctgacaatttgaagttacacgtttctacaacttgccagggtctccctttcctgtagtcatcttcagatgcttggacttctctccacagtaaaactttaaaatatcttaacttgttagtaagcacaaaaacacagtttgggttgacaaaaaaatctcttgaaatgaaaacaagagtatatcaaatatgttatagacctttttctttattcttatttgtgtcagtacatattttcatgtctttgctgtaagcaactggatacgaatctttaattaactcttcacctttctttatattagaaattcaaagacatttaaaaatttaagtgaaatctaatgtagtttattttcacatacatgaatccagggcattttccctacctaaaaaagcagaaattttttttttttcagcttcaccaatcctaaaacaacattaaagtcatctttaccgattaagtatatatatataagccactttattttctttcaaccaatctgtcaacagttctgatattattacacaaccagattgatttcatggaaatatgatattaatttaagacaataattgagtccattcagggaaagtgatcaaatgactagagaaaataatgtcttagaccaaaagcctttttacaatctgtcctcttttgttcacttgcctaaacttgaactgatgtcatgactaatatgtaaagatatgcatggaatggaccaggctgtatagctggatgatgtaacgttttccagaactaaaggaaaaatccagaaatgtctttccaaagggggaagctcagttttccattaactgcagaatgttcttattttccgtga

SEQ ID NO: 56584 - DNA, 723 bp, Bovine  19866881267963
  misc_feature (1)..(1): n is a, c, g, or t
naaatcctgcccctctgtttgcttttcttcagtgcctttggttcaaataatttttatgctgaagaggtatagattgtggggtgttgtattcttcctcccttcacagctgggaagaaaatcaggctgaacagttctctaccacaaaaattattatgagacttggctggtatttaggactccacacttccaatgcagggggcacggatttgatccctggttgggggactaatcctccatggcatggccaaaaaaataaatagataagttattattaattggttttatgatgtctggttcttgcattacttagaagaaacagacttttgaaggattttacattgagagataataataacagttcttaattgatcctattcaagtgtagtttgtaatccatcaattctatcttccttccttgaatgagaaaacctgtaaatgagtttggacactaatttgcatcctaatatccaattttctgaaataggctcattttctttgaagttttctacattttgcttaggaatgacagtcggctctaagaaggttacaatttcccttgcaatgaaatggaaaaatctcattactagtccccaaaacctgcaactaggtaggatatgagagctgcataaggtcaagagatacaacttaaatctacttaatcttctgcactttggggagatttgactaattggttttcactttatttctccaatgttttggatt

SEQ ID NO: 56585 - DNA, 1859 bp, Bovine  19866881342677
  misc_feature (1)..(1): n is a, c, g, or t
ntaaaaacagagtggtactcttcatcagaaaggtaatcttaaagcaaatatagggcatgagagaattagccagagagagcagcttcagacagaggaaaccacccaggtgaaaatgccccaaaacaggagcatgcgtcaggattccaaggagaccagggtggctaggatggagagtggtggttgagtcaggagtcaaatggggagacaggtggtgagcctgctgtcaatgctctggttttattctgagtcagatgaggggccactgcagagtatgaaccagaagctatgatgttccatcatcttcctaagatgcaatgaatcaggacctaaaatagtgtcaccgtataagaaatggataccctacagaacttctcatagttataaagatctgaatttttgaattggaaagttttattttaattgggctcttttattgcatttttcagcaaaaagaactttaatagcaacatttcagaatcaaaactcttacttacagaacgaaaaatatggatttaatgggggaaaggcaaggatagattgaaagtaatattagagttaaatttgtttgtcaccagtggctctgtggtaaagaattcacctgccaaagcaggagactcatgtttgatccctaggtaggaaagataccctggaggaggaaatgacaaaccacttcagtattcttgcctgggaaatcccatggacagaggaatctggagggcaaaaaagttggacacgacttagtagctgaacaacaaaaatagttcaaaataaaaatgaatagtttgatcttttaaacaactgaattaaggcagtgatttgaaatactgaatatgtaactaatttgcatttgattttcctctttccatttttatgtcttattaaataatctgatttataaatatattgtcatggtcaacctggattaaatcaccagtaagaaggtcctgacttgctgccacacaggtatttttctggtttgcatggacaccatggcttggacaacagcaaaaataggtatgcagagtataatttggaaaaagcaagcagaatgtggagaatcttctaggaatatagcacatttcccagaatagttgtcttcttttgtcccttaatctttttgtcttcttttgtcccttaatcttttcctcataactcgatggctactctagaattacatgtgctctaagttcacactagattttaaagtacaaatagccctcattttcaacttcacgaggcaaaagtctcaccgcttccattagccttttgtcttggcttacagtgatgctgggtgtgttatggccttcgtggccctgccttccatttaaaatagaggcacatcttgagagtcactaaagggcatgcctgcaggctcacagccctgagacacagcaagcactcggagaaagccttctacttgctcaagtgtcagagaacaattttcattttaggctggagtggcctgctacagtcattgagagtatagcttagatttttgttataaagccgaggggacatgattgcagaggaatatctgaagaatgagagaggggaaagtaaaaacctaaatgattcatacaagagtacccttggaagtggttagatctggtaaccaaactggaaattcctgatgactcagggccactgctcatctattcttgcaaattagtggagagttgaaggcttgtctcatgcaggaaactgggagtagttaagtagtaaagcacagctttgcaagaggaagaataaaaagtgttatgttaggaaactgacatagagcttttagtctccaaagaaaaggtcatctgctttgaaagtgatgttgctacggacgaaactgagacacttgcccagaaaag

SEQ ID NO: 56586 - DNA, 1240 bp, Bovine  19866881351049
  misc_feature (1)..(1): n is a, c, g, or t
nctgcttaaaatatgacattggtgaaagctatgaagaaaacagctattgttcagactggaaatgtctgcagccaagaatagcaatgatttctctggtgccacttctgtcatcaggatttttattcctggcaatttaacattagcatgtggggaatttattgaacaaagaaacattgaattaatgagccaacaaaaatgatcaacatcaaagactccatgtagatggggaaaagtgagcaaaagaaagaacgcgttcaaagatgttagcgagttcatgactatcctaaaggatgtcacctatcaaccttttgaataaacaaagcattagttaacaattggcactgaaattgcctcttccggagatttggatgagatcccggtgaatatatcacccaggcagaatggaggatttcccctaatctctaacactttaaacccaaagccattctgttgaatcttcagagccttctaatacccatttaactaatccatttacaccagttgttgtgattctgcatgtaacatacacaataggccctaccagccctagcagaaaggaaaaggttaaaaatgtataagtgtacattagtctatctgcatggactgtaactctgatattgattgtgctttacagtgaagtaaggacccaaagacatggtacttctcaagattctagcagggacttccctggtgggttcagtggctaagactctgtgctcccaaggcaggggactcggattcagttcctggtcagggaactagattccacatgctacagctaaagatcccacataccacaatgatgattgaagatctgtatgccacaaataagacccagagcaaccaaataaataattaaatattaaaaaaaaattctaacaataagataaaaataggactccaggaaatgggatcttgggccagaatagtacagcaaaagacagacttgttagaaagttttgagtttatactaatatataatacaatataatatgatatgatatgatatgatagtatatatgcatgttttcaagccaggtattatatagtgcacatttgagtgtttagttcatcctacagttgacctgagacactaaaatgtcattctgggaaataaatcatatcttcttaaaattttacagcgggctagttgtcacagtcaaattaagtagagcattgaaagattttgtggtaatagcctgagaggtccaatatatacttgctccaattctgttcttca

SEQ ID NO: 56587 - DNA, 1617 bp, Bovine  19866881369477
  misc_feature (1)..(1): n is a, c, g, or t
ncgcctggaaccaaggggattaggcaggatgcccagggcctggtgccatctgagtttccagaaagtgtccaccatctgagctgtagacatgtggcattaagggtttcctcatgagggtggcccgcagagcaagtcctagtataaataccaagtgaaatgacagtaatccttgttgacaagcaaagtgtgtcaatcttacatctggacatcaggagcacagcataaattctcatatctcagaaggggattaatctgcctttccagttcataaagaggtttttagtagatattttggctctcagaaaagctttagcctcaaaaacttaaacaaccagtctcagatagaaaatgcctcagttagaatagatcatgatattttacttctaaacacaattttgtataaaatattcttataaccatcatccaaataaactgtcatccaattttactgaagcaccttcagctccatcaacagcatgtcgataattctgtagtaagatgtgctgtgctatgcttagttgcttagtcgtgtccaactctttgccacctgtggactgtatccccccagactcctctctccatgggattctccaggcaagaatattggagtgggttgccatgctctcatccaggggatcttcccaacccagggatagaacccaggtctcctgcattgcaggcagattctttaccatctgagccaccaggcaagcccttgtagtaggatacgtgagtttaattctggaaagaaaaaaggggatacagagaaacttttcctatccactgctgtctggaacattctcctttggcagttcagtagcttttgcaaatttaacatttccaacatttaaaaatctcctacagggacttccctggtgatccagtgattaagaatctgcttccagtgcaggggacatggatttgatccctggccaagagactaagctcttacatgctgtggggcagctagctaccccttggagctgcaactactgagcctatgagctctggagcctgtgatccacaagagaagctgatcaaccacagcaaagcccagtgcagccaaaataaaaaataataataataattaattacttaattaataaatattaaaaattcctacaaatagtttctttccataatttctgaagttcatgtctccattttctcagtccataaaccttggctcatctctttctattgaatccatatcttcttcatcaattcctttcagctctgactttttcccccactctggttttgcatgtgaatgtagaatcactctcttctaggctaaactcttgcaacttatttggcacctgaagcccggggttatttagatcaaattatgtcactgtttgtccagtatagcccagcggcattctttctcattcagattcaagttccagttctcaccgtgggtcctgggggcccagtgggactttaccactgccttttccatagatatccccctctgttctcctcttcctcagctccccctgctccctccatcccattgcctccacccctagtttccgtggatgacccaggtcccctcaggtttttggccttctcagtcatccagcccctcatccaggtctgcacagactttacctc

SEQ ID NO: 56588 - DNA, 1656 bp, Bovine  19866881374412
  misc_feature (1)..(1): n is a, c, g, or t
nacgactgagtgactgaactgaactgaattttcttgtatatatgtatctcacagcttctttatccactcttctgctgatgaagtgtcagtgtagtctatttttagtttcctttattaatttacaaacatcattgttgctgttttacagtttaaaaaattttgctctctgctcattttttgaagtgttttcttgtattatttgaaggatccatttttatttccttacttagacgacctgaggaatgtgtcacccaggttgtgagaagttaaaaatgaatgctattaccagttggcaaggaagcatgggctggaaaactaaccacagattgagtgactttgtttggatgtttccaggcttgtcagctcttacagagggaacagtgagagacattcttctcctggtttcctggtcccctggccagttctccttagggcaataggatgggtaacaactttatccttttcctagaaccatgatcataaagcagacagggatgtttctccatgaaagccacagcttgggatgtcatcacctgagtttccccagggggctgtcctttcagactgcaaagccttgtgatggatgctgctcctcgaagggccccttggaaagagcagcttgtacaagagactgtgtgacctcctgcttctccctgagctgtagcccttggccccaacttcttagaacacataaacactcagatgactagaggaaatttttcttgttttaaataaggattcattagtagtataggaagccatctttatagaatcttttgctggttgttaactttttccatcttcttgaataaaaaagttagacaagcaacactttcatatattgaagtctgcaaaattgcagcattgtgtgcctgatgaaaactaaagaatgttcaatatttcatcttttgtaggtaaaaagagttcctcacatttgaattaactaaagtaaaaaactgtatctgtatgtattagacaaacttttcgactcttatttttcatctggccaagtgaaatctctcaaatcaaggctgccctatttattcacaaaaaatgttatcctgataaattgtgaaaatgaagaggcctatttcttgaaatacattttgtcctacttgtcaatgtggagaatgtaaaatatattgcttcagaaacaacagaaatagcgttaaatttgctgagcttcattcacatgttaacatttgagctttttcgacctccttaaatcttggcacacttcctgcttcctggcttttctcatcttccagatcaattcccatttggagacacaaatttgttaaaagcagcatttaagtgttcataatgaaatcattggaactgtgctaaatgccctctattataaaatctgaaatatattcttccactagtcaaataaagcctcttttgcttttagctattccatcagtaacactgtacctggtttggcatttggagaagccattgtttgtcttggttttcaaatggaaacaattaatcaactgcacatatttttttcttgcaattataccaaccaaatggaataaaggaagaactatttctggaattcttttatttctttgagaaaacaaactcagacaaaaacacaaacaaatacacaaacaaaaccccataatcttccaaggggtgtagacttat

SEQ ID NO: 56589 - DNA, 1190 bp, Bovine  19866881377029
  misc_feature (1)..(1): n is a, c, g, or t
ntgtgtgtgatattgagtaattagtcagtcatgacacgttctcacttccctactcaatctccagctgcaaaaattaagatgaaaaactctccacaaatgtaatcgttacaaagtgttgaagcagatttggatgaaagacagtttagaaacaagtcattcagatttattgccatgccagtcgactgcagcaagacacatgtcttgttacagcagtttgtttgcctttattccatgatgatgacacaatgcattgtcaaagtagatacacgttatgcaatacaggaagaatttgatttagcaagtcgcatacattaaaccacccagatatatgatgtcagtcaaaactcattggttgaatgatcaagtgtttcagaagagttctcaagatattcaccatagaattggtcaatatacatctcttcatcttatgctttttgtttctggtaagtttcttctcaaggtggtcaagtccagtagcctctcaatctccagggattccaggagctaagctggaagcaataccagctccctccctcctgcttctgctgaaatgctggcaaatcatgttttcagatcacagctttaagacagaaagcaaggcatatcaaatacggccaatgaattattcatgtacttcctgctttccttgtaatagattttttttccagatatgtatgacatgtacttgttgatctctgaatattctgaaattaagactaccagtctagaaatttggaaggtaaaccctaccatacatactatcattaaaaaaaaatagcatctccattaggatatattaattttattcctgctgctgctgctgctaagtcgcttcagttgtgtccaactctgtgtgaccccatagacggcagcccaccaggctctgccatccctgggattctccaggcaagaactctggagtgggttgccatttccttctctagtgcatgaaagtgaaaagtgaaacgtgaagtcgctcagtcgtgtccaactctagtgcaggttaaatatagaaaaccaggaatacatcttattctctaaattgtagaggggattgtgcctcaaaatttgtctattgtttactattattattaaatagacattttagttataccagaaactaggttatttcatataaatgatattttatttacatctctgctgtggtgtcattggaagggaaaggtaag

SEQ ID NO: 56590 - DNA, 1112 bp, Bovine  19866881398772
  misc_feature (1)..(1): n is a, c, g, or t
ntgtgtgcacttgaaatttgggaaaacactagggattatagcccacctggaacaatctaatagcagtttccatggtaaaaagaatgacctaaataacctcgttggtttctactttctgtgatgccccagttgcatggcccaagaaaaatgccacatttcatttcattcacacgctgtgatgcttggtggcattattgttctttgcatatatgtatttatttcaggactatcttatctctcaccataaaatcttgtttcttgccttaatgcagattccggcagcttactaaatttccagtgcatctgagaattttaagaaattcagtgggaggaaatggttatctggtgaagttccgcggcagtttcagcaatggaaatatacctgcatttcacttaattagggttggaagataatgtggctgtgaactctcagatattgagcaatgagttttttctccaaaggttatattattctgcttcaaactagaagtatcattggcaccaagactccttgggtacactttttaacaaataaatctgctgcagaatgacatcagcatcattagaagttcagctggccagtagtagaatgtgctggcatacaacctttccatcaaaactaataataagcttccaaatgatcataaagttcaggcagtggtgcaaggtatgtgtgatgatcacaatccattgcaaagttgaggggacagtcaagggggatcaaatttcagacaggtatacggtcagtcctcctagagacaagagtgaaaggcagccaacaagggtacttctgaatttatacaatgaaaaataatcaacgatggatcagcaggaaaccgaaggtggtgcctcagtaaaaagtcacggttccttacccagttcctggacctgcgccagtcctcagacctggaactggtcactgagggagaaacaagattctcgggagaatagaccctgcatctcagcagcaagggtactcagtggtaattcctagtccttctctgaagtgaattgtgaaaattaactaatgcaagtgtatgatgggaagacagagatgctcagaccttcagagatctttccccaagggtctagattgatatcaccagccagag

SEQ ID NO: 56591 - DNA, 1226 bp, Bovine  19866881450769
  misc_feature (1)..(1): n is a, c, g, or t
nattatgagtgtgtatttttagatgtacccagcctcctcttaagaactctgtaccttgttgcattattgtctgtaagtgtatttgatttgagtcagatgggaggggcaggaagcatttaactatctttggatagcaacaacgaaactgccccaatgtgaagctgaagattattcgggttactctccatcatgagcagtgtgctccaggcaggacctaaacctacacctggggttacctgccctccttccttcagttcctagtccccaagtcccttgagacactgttctcctggtacaactgtttgattgacaactacagaaaacagtacagttttgtggtggtttgtctgcaaacactgtgttcttacagtctcaaacagttctacaacatggaggcattttgtttcatttagagatgcttttgtatgcagagatcttttaatacccttttcacaatttgcctccttcctcaaggagaattttgaggtcattttatagtagcaaaacactttttttcttttttgttttgaactgaatgtttattctctgatgatatttcctggctcccaaagcctaaagaaaatcacagggaataaaatagagctctctttctttgatgtctatccaagagcatggaaaaactatcacttcgttcacctaaaatgcccttaatttggtcccttgactgctaagagatgacaattaaagtattcaggccctaaaatggaatcaaaaggtataataaaaaaccacaagaagcactctttaagatttcaccatggttacaaatgtaagattaagtttatgtctgaaaaaaatagtatgataaagaacagatataatttttgatacctaaggccaaaaaactttagcctattattttaagttttctaaatgattgctgattatagttttaattctatgttataaaattaggtatactaaaattttgaacttgcttcagttaaaacttccatttcttttatagaacaaaacattattttcctatttttaatgtttaatttaaataataatcaatatgatacagtagcagtgtatgatcgtgtaggggaagagagattatataatacaagaggtgctctgtgaataagagctctacctccatacataccactcttcccctttctcttgcaacaagcaatttgcttgtggataaaaataatagtttcaggtgattatgtataataatccgttaatcccttatt

SEQ ID NO: 56592 - DNA, 1070 bp, Bovine  19866881497495
  misc_feature (1)..(1): n is a, c, g, or t
ntttctaaactcctttgctcttgatgctaccattatgaagtctttttgagactactttgtaaatagaaattttatactgcacatgaaaccacaatgttaatgcaggctgtctaaaattagaatattaaacaccctgtttacaagtagtggctcttagttttatttgaaaagaaatgtacatgtttttactgctttgtgtgccatctatttagaatgcaagaatgctgtctcttcattaaccaagcgacatgaacataagcagcatacttaggagactggaatggtgtacgctgtgtttttaagtctgagcaccattttctcgatgttttgggggcgtttccaagctttagttttgtactgaaactctccaaagtgttcacctttaagaaagcacagaaagttctaaagtacagaaggagagaaaataaggattcctgggacctttgtagccattatgtgtatttattgtactggcagcaagacaagctatcacattcatcagctagacttaatgtggctgcttcttacaacttgttgatgtgatggcacatggcacctgcaggctgcttgagctgctgatcaaaaggcagcctagggatccatctctaatcacggggactgcagaggactggggagagggggtgatcaaagaagtcacagcaccagctgtaccctggcaggaaacggatcagaccaacctttgttctttctcatgtaaaataaatgtcaagctcaaaatattgcctcttactggacagactttcttaaaatgagtatgcatgctattcctggcttctggcttctgttttttacttttcctgccccaggtcccttcttctgctctcacatatcaggcctggcctgacatctcttatgttccctagtccctttaggacttgtacccgtcattgtcctttccttgtcattttgtcgtgtggtccatgtgccaccatcccttttaaccagactccagaactttcacaggatcttaggccacttcctggagtaggtgcacaccctcctgagggatgggttcatgaagtcaggccacacacattctgttgccgtca

SEQ ID NO: 56593 - DNA, 834 bp, Bovine  19866881846460
  misc_feature (1)..(1): n is a, c, g, or t
ngatttgataacctcaaaagcctgtcaggagacccctaaagcccagattaaaagagtgtaggccctgcacacactctaatcttatcagcaactccatccttaaaccattgctataatcctcttcaccaaatctgccaggttgggacagacagttttggagggtgccagcccactatgtccccctttgcctgtcaaagtaataaacctattcttttctactttatcccaaactctctttaagatttgattcagcaccagtgcatgaaggccgagttttcaacatcaatttcagaattgaattagatcctggttgtgtatgtgtattgaatctcttgtgccaccttaagtgccctcttgtagggttgctgcaaagcatactggtgtaacaggatattaaggtgaggctttcctcttggaggaggctttggctcaggtcccaaagctgagaacaaagtatgatagagggtgtaatatgggtgatccgaaatagtcttttgtgaatggagagcatgccagctttttagaaacaagaaaatatgtttctgtacccagttgggtgctcaggaagctgcaggaactcaggcttccaaacacagtgacagcatccttgggagtttgtgattcctgggatttgggggtggtcggctggctgctatgattcttccctgggagagtcaaagtctaggattggagttgcttgagaatctgagcaaagcttgcagctgccaggggaggggctggtcctaaagaattcggtgggcaaaagaagtataacatttcccaaagccagaggcagcagcctggaaggcagccagggtgactcatcaggaaaga

SEQ ID NO: 56594 - DNA, 1883 bp, Bovine  19866880376169
  misc_feature (1)..(1): n is a, c, g, or t
nataaataaatctttaaatacacacacacacacacatatagacagaaaaataaaaaagaaaacctcagtgtcctcatgtgtgacatgttgatgacaaatgcagagtggactgcgtgaagtagtatgcgcctaaggcggtgtctggtacacagcagcagtcaataaatgtaagctgaatgagacgtgaggagacaaccgctccccggccacatgaatggataaaaggagaacacagtcttactgataaaaagaacctgggagggggagacaaatgaagcactggtgcatgctgcagtatggataaacctcaaaaaacatacactgaggagaagcaaccagtcacaaaagatcacaaagcttatgaccccattcatatcaaagtcctgaatagggctatttacagaaagtaagttagtggttactgagggaggggagggagggtgctaaggaaggcgggtgatggctgataacggctttctttctggggtgataaaagtgctctgaaattaacatggtaatgattgcatgttctctgtgaatacattaaaaccattcaacggtacactttaaaatgaatgaatgtatgatatgtggattatatctcaagaaaattgttttcgtaaaaaggaacctaagggttaactctgggtttctacctgatggaataaacctacagtggcagataaatgattctccaaaataacctgcagatgatattaaggaacttaagggtcacattaaggaactcctttttctaaccctttcatattaaattctaactcagaaaaataaaatctttaaagttagaaagcaaagttcaagttcagcccttccattttacagatgaaaaaggaaaccttttgctcaaattaacagagttgtcagacttttcttaacctcttcaaaaaaaaaaaaaattctaactctatctataattaacaagagacttaaagatcacagtgttactttcaccaggcaagcactgggatcaacagagcaacagaaaggtattaaagtaaacttggcttctatttcttctgacaggatcccataaatgggaatgaatcatggccttttttctgtcctgttttcactcatttaacttattttactgaggacttactctataatgaaaatacataatgaataagacacgatctctgtcgttacggatattaatgttacggaataataacagctaatatctactaagctcctattatgtgcccagcatcatgttaagaatttcatatgcataattccatttaatcccgacagcaatctcagtacggtgttacctttccctttttacagaggagaaaactggatcagaaagggtaacttgcctgagaacacataacaaaaacacagatctagggcttccctggtgactcagtggaaagaatctgcctgccagtgcaggagacatggatttgatccctgatctgggaagatccctcctgcctcggagcaactagcccgcgccacagctactgaagcctgtgctccagacccaggagccacggccactgaagcccacacaccctagagcctgtgctccgcaacaggagaagccaccgtgatgagaagccggcacagcgcaactagagagcagcccactcaccgcaactagagaagagcccgagcaacagtgaagagccagcccagccaaaatagataaattaaaaaaaaaaaaaaaagacccaaatgtggccctggcatttacgtactacctgcccatgctacctcccgtcaaccactgctcaaaaacaacgcttaaagagaaagtctgcttgctgtgagtctacatctggactataacacactcagagactcaggagccacagataggaacaggggttccaactgctgagataacaagg

SEQ ID NO: 56595 - DNA, 1433 bp, Bovine  19866880576936
  misc_feature (1)..(1): n is a, c, g, or t
ntccgtagtagtactatttaattatgaagagagaactcaacggcactacctgggtcatacagactgtgtaaaatggttggtatcattttatacatatatatatatatttcatgctctttttttgtattttattaagctaggtttttattggaaatgatttcttgtggaaaaatgagaatttaaggatattatggacatcctgtaggtagatttcaaaaataaaaaagacttacaggcctccaaaatagttggtgtgatacctgcatcaataggtacctgcaatagatacctgcaacatatcatctataaattttgatgggggcttctttggctttcccagagcttttatactttttcctctggcctgaaacatcagatatatgtggcagactagacttttacatacttctgagagtgattattggttacttaatatttattgagaatttgttttatgtaagtaagttttgaacttgagactttgaggagaaaagggaaatgatagctgaataaggatcaaactgtaaaacagaatgagaaccataaaaatgtgagaactccttttctatgcttggcgtattttttgaagtactcaattttactaatttgaagttaactttaattacctattgcttaaattcattattttccaatatttaaaatgtattctggcaactatatctatacctagaaaaaaattaatatatattagacttaaaatatagatattgttaaacttttagagatgattaaaattttgtctttttcactagaagaatacatgtacaagattacttattacaacatcatttttgatggtaaaggttggaaagaacctgaatatcttttagctggtgactagtaacatgtggtttccatgcagccatgcagccataaagaaagaatgaggttagatggacttagagattaccctacttaagtgaagtaagtcagaaagaaaaagacaattaaaatatgctttcacatatttagaatctaaaatctcagtaagaaatagacttactgagtagagaatagatttattgagattggggagaaaagaattgggagtttggaattagcagatgcaatctattatatataggatggatatacaacacagtcctattgtatagcacagggaattatattcagtaccctgtgataaaccataatggaaatgaatgtaaaaaagaaaaaaaatatatatatatatatgtaactgaatcactttgctgtgcaacataaattaacacaacattgtaaatcaactctgcttcaataaaattagaatgaggaggagtttttgtgtattagaaattagaaagaatgaggagagtgtttgtgtattaagtggaaaaattcctaagatacatttgtaagtataaaagaacaagaaaatgtgtagtattttaccattgtataaaaaagga

SEQ ID NO: 56596 - DNA, 3340 bp, Bovine  19866880664703
  misc_feature (1)..(1): n is a, c, g, or t
ntccgattgcacattcccaccacaatgcagcagggtccagtttctccacattcacattctgctgtcttttttttccttttaaagcaggtatgaagaggtatctccttgcgattttgatttttatttccctaatgacttatgatgttgaaagcatatctttccaaatgcttattggcctctatttttgacacaggacacgactgagcgacttcactttcacttttgacacaggacacagagaagtagggaaaatgcttttcactcaaccactggaaaataccctcccaatcacttgccatcaggctgacttataaatctacctgtacttttgctacagaactagcttttccattaataggttactcaatgcatattagagtattcactttacataatactgacaattacaaacatcaacattttacatttacaaaattttacaccttaagtgtttccaagaaaggaaaaattgaagtactcctaataaccaaagtcagaatacttggtttggggatatcagtaacaatcacgctgaagtctacaattcatataaagcctagacaatattgtttctttcaacataacttaaatcctgaactaactaagaagttcaaattctcaagagaaacaccaattcaagtaatcctagaactctgaagtccttatctgtaccaaatgcatcttgtggtaatatctgctcaaagtgttaatttaatttcaggattgtcagttttagtttaaaatttcactttttcttactaggtaagagagttccgtggacagcaaggaaatcaaacctgtcaatcctaaaggaaaccaaccctgaatagtcattggaaggactggtggtgaagctgaagctccaatactctggccacctgatgcaaagaaccgactcattggaaaagaccctggtgctaggaaacactgagggcaggagaagagggcgagaggatgagatggttggatggcatcactcaatggacatgagtttaagcaaactctgagagacagtaaaggacagagaagtctggtgtgctgcagttcacaaggtcgcagagagtcagacacgacttagcgactaaaaaacaacaaaaaaatctaaattatgctaaaactctattaaaagaaattctacaaccaatggaaaagatcgactgtgatatattcatacaatgaagttctgtactgcaataaaaggaatacatgtaacatgaatgaaccccaaaaatactgataaattagaggtttatacaaaacagcactgtgtggttccatttatatgaaattcaaaaacaggcaaaactatctctatctagtgataaaaaaaagaacaggaagatgaacagggactgacagggcaagaataaaaagtaacttcctaggggtgaggtaatgttatatatgtttgtaagtgtgggttacacagtgtgtttgtcaaaactcaaattgcaacattttaagatccatgtgctgaaaaatacacatctctatagaagagtatttgctttacagcagaagccaatatgaatagaaatggttatttcttataatctgcaaagccagtcactgttgtcaattccttctaatcctcaaattttttttgataaattttcctccttcactctcctttctcttgagagtcccttggactgcaaggagatccaaccagtccattctaaaggagataagccctgggtgttctttggaaggactgatgctaaagctgaaactccaatactttggcctcctcatgcaaagagttgactcaatggaaaagactctgatgttgggagggattgggggcaggagaaggggacgacagaggatgagatggctggatggcatcactcactcgatggatgtgttggagtgaactccggtagttggtgatggcaaggggaggcctggcatgctgcaattcatggggtcgcaaagagtgggacacgactgagcgactgaactgaactgaactctcctttcatgtttctgcaatctgatcaaaactccatcattctttcctaatgtggtccctggatgatcttctcccaccacagcttctactaccacctatgggctgaagacacctagatctattaaacttcatattcataaacccagctgcaaccagacaagacatattaccatgaactcaatccggacccttactccccaaccccacacccccaaaaaacttgcactttttcttgccctctttatcctgtggtggtttagtcgctaattggtgtcggactcttgcactgcaaggactgcaggccgcctggctcctctgtggaatttcccaggcaagaatactggagtgggttgccatttcgtcctccaggggatcttcctgacccagggatccaaccagggcctcctatattgcagacagattctttaggtctgagccaccagagaagccccattaacagcatatctattcttagactgaaatcattcttaaacatctcccccttgagcatgctgcagtgtttcacagaatgaggaggaggtaacaatggagcattctttacatcccacctggggcccttactattctatccagttctccaactgcattatctcatcacccctttcctacctactctgaggatgaggaatgaaaatgatggtatctcagacctagtttttagagaacagcttatccagtaacagccacctgccaacgattgctggtcacctgacacacacctcatttaatctgtattacagctgctctagagaaaactgagctcacaatgaattaacttggtcaaggtcataaaatgaaagcagctaaaccaagatctgagcctaaattaagaatctgggactctaaaagcccttcacctctacattctcagctggagactgatccttcaattcgctcaggcaaaatctgaacgaactcgcaatacttatcaaaccattcaaaagcaaccgtcaaccactttacagctgggaaaatgtcagctctttgcacgttaactacgaagactcacccaaacatttgaattaactcattgctgctgctgctgctgctaagtagcttcagtcgtgtccgactctgtgcgaccccagagacggcagcccaccaggctcccccgtccctgggattctccaggcaagaacactggagtgggttgccatttccttctccaatgcgtgaaagtgaaaagtgaaagtgaagtcgctcagtcgtgtccgaccctcagcgaccccatggaatgcagctttccaggctcctccgtccatgggattttccaggcaagagtactggagtggggtgccattgccttctccggaattaactcattaagtctcctaattctgatca

SEQ ID NO: 56597 - DNA, 724 bp, Bovine  19866880714460
  misc_feature (1)..(1): n is a, c, g, or t
ntttcagtcaatcatttgcagatgctcctttttttttttctttcctgcttgcattcttcaagcctctgtcctcctggcaattccacaagtaatccagaaaaggaggaacgagcatgcagagaatttgaccacagctgggaagtgagccaagagaactctgaagaacttgagtattagctccttcactttgttaggtggggtggatgtggggctgtgggatgttcctcttatgttgttcttctcatctctaatttggttatacagtgattccctatggcacttacagagtccatgagggcatggactgagtcgccttgttttccccagtatccaggccatacaggatgctcagtaaatagtagtaaattgtgacagagaaagtttgagaaagaattcaggggaaagaaggtacatacatccttagtgtctctgtaaaaaaagaactgtctcaactctgtgggctcgtgagtcgagccaacactgcaggaatttggtggtgttgattgaagagcaggaacctggagctttagccatcagactgtcaaagatggagacacactcccaggcaggcagagcctaacctgggtctagtccagggagaatgtcagtccattctttcttggaagggaaccccaacagtgcctgcaagttcaactgagatggctttccagaaagcattttgaatcaatttcaaatgcattgacagtacttggttgaaacccca

SEQ ID NO: 56598 - DNA, 508 bp, Bovine  19866880726975
  misc_feature (1)..(1): n is a, c, g, or t
naggcgccagcgctgcgccccactggccgagaaagaggctgccagcgccgccgcccctcgcgcctgggggatgctccctccgaggccggggtgccctttcaaggcggcggcgctgttccccccctccccgggggcgtgcgcgccgagaggaagcgagggcgctggatggctccgggtccctggcgctccctctggccgcggctccggcaagggccccaccgccgtccagaagcaagaggcaaagtgagcgggttcggaggcggcagagagccggccccgcgaggcgggggcggggcctcctcgcggttacccctccttgcctcctggctccgctccgctcacctccctccgcgcgccgccctcctcttcccacccgagtccgcacctcgctcaggctgggattccccggcgccccgccctggacctcgggctccccgcctcgtgacgctgtcctccccctccgctctcgcctgcagggccgggaggggtccgcagagcagggatgcgc

SEQ ID NO: 56599 - DNA, 1137 bp, Bovine  19866880752203
  misc_feature (1)..(1): n is a, c, g, or t
ntgggtggaatgagaacatgaaattgctgtgtgcactcatgttttgtttatggagcaatcatctctagacgtgttttctttttttatggagaatcttttctatgtttgattttgaattccccaccttcctcccggtccccagctctcccacactcactaaaaagaaacgtagagagtattacgaaaatctccacaaatttaaagaataggttccattcaatgtctctctcaaacaattccatttactcagtcaaaataagtgacttagcattatgaataacacagataacaactgaatttgaatattgcatgttatttcccaagctcataacaactgtcccaaatcataaaaatcacttttcatttctccatcattgtgcaaggaggatctccttagcccagtgaactgcaagtcctgtgatgctaattatcagcagggtttaattgaaggtttattcccctgccacaagattcttcactcaacttcactgtgcctctgtctgtctataaaatgggcattgtatctaacttgtgaggactgcatgcctagaacacaggggtggtggtggtttatttgctcagtcgtgtccgactctttgcaaccccatggctcctctgtccatgggattctccaggcaggaacactggagtgggttgccatttccttctccaagaacacagtaagcactcattaaactgtagcagttatggttgttactgggcagacaggatggagcaagcttttgccagatcctatgaatctttttctctgacacaccccttccccaatcctggcacccagcacacaacaaagggtacctctcagacttagcatggtgataacaatcccagtcagtgccctgtcttcctagcccccctgaagtttctatccatctctagagagacctgccagcagctcccccctacacccccaccctcaagggagtgcgtgtgtttgctgaactctggtgctgtgtttaccatctgggtggatctcatttcattgcctcttctcttgtagtttttggcgtctcggccattgtcctgcctggggcctgccccagtcccgtgctctgtggcccatcactgtgaggtcccttgtttcggcagcaggcttgctgctagaggcagagaacg

SEQ ID NO: 56600 - DNA, 1988 bp, Bovine  19866880805827
  misc_feature (1)..(1): n is a, c, g, or t
ncatgaggcgcctgaaaggctggttctcctctaaaagggcagggccaaacttcggactctgtcgggtcccattctggcgccacgagccacccccacgacctataagcaacgacctcgggagtcaccttgactcctagagtgccaggcacaacgtccacaccagacaccagctagccaggggagcagctacagaattaggagctccatggctgcagcaagtgggtgagaagacatgaggggccaagaaaaccgaagcgcgggcagaagcctcgcctggctcgggtgccgagactgccaggcgcaccgtgagacccgggccgctacttcccctgtccgaacccgcgccgcacgacccttacctgagggctataggcgtcggaagcccatgctccggccaacttctgcgtgaagccactgaacttataatacatgacgccccgtgtggacttcccgcagccactgcccgcgcgactgccccagagaaggaccccgccttcccgggtgtgggccgaagtctcagcctaaggaccctgcgtcaaaaggcgggctgcccgggaaccgcctaacttaaaacatgccctcttaagccacgtaagggaacaaaaagccgggttctcagggccaaaaaggcaaagcccagctctacggcggaaagccgccgttgcacggtgtgcagaaaatatgagcatccttctttccctcacgtttaaacagagtctggcagtgccaggacgccctaagaattgcgcaagcgcccagcagatctagccggaggctgagggacttgtcagggttgagaggacgggctcggggcggggagtggggcggggcctagggcggcaggggcggggcgggaagagtaccctccttccctccccgagagcccgtgcttccgggcagcctcctggtagttttttgaaagctccacctttaccaatcttaactcctcccctacttaaggtcacctcgtgaagcgtccagctctcactcggttggcccaggagtatgcacccgcagctaggcttctctagcaatctaggagcggtgtggaacaaataagaaaagttggaaacacctcctgcaagctgttggggtttcaccccaataatatcaatgtataaagatagtctcctgagctttatgtagaggaaatacatctacatttcctacgaacttaaggcacagggacataaattttgcacagttctcagaactgatttttactcttgcctaagctttatgggaactgattattcatcctttttgtgggctctgcgcttggagataaatgaggtggggagtgtaggggaggtggcccaaatatttgaaaaatctggagcttgagcctgaaagaacaggactacccctttcagttctggtagtatccttcagttcagttttaaaatgtctttagaatctccactacatacaatgtactgtataaaagaagtatacaattcatagtttcctgcctcctggaataaaacaaagcctgtctttgctttatcatctaaccagaggttttcacaagtgtgttataagtgcatttataatgcattcatgaaagcatgtggcaaactgatgggtgatactaacctgtatatagcattttccataaataaactcattttatctttacaacaatcaaatgttatataggtgctattattgttaggggaagcacactgactgaagccacccaccctggccaggcaccatagtaacaatttgcatgagttgttttaggacaggaagtcctggtaaggaataagccaccaccaactggaagagttcaggaaaggtcaaaaggagacaccgcatgtccgaccacctcccagaatccttctctctggcatccatcttggctgaataaggcgtgcaccaccaggaaggactctgagtcagaatgattggctaaagacagcccggaaactaatcccatcaccataaaacctgagactgcaagccatggtggcagagctgttctc

SEQ ID NO: 56601 - DNA, 1095 bp, Bovine  19866881399051
  misc_feature (1)..(1): n is a, c, g, or t
ntattttcctttatttaacaacatgtatatatttactacctgtctacaatgtcctaatcacctttaaaactttattattaactcattaatactcataatgatgcttttgaaataggagcagtgtaatctccatattacacattgggaaactgaggcacagagaggttaaataacttacctgagatcacatggctgggaaaaggaggaccgaaaaagccaggccaggcagtctggctcccaaattcacacatttgacctccctgtccacattcttcacctctctttattctaaaccctgtggcatcacttcaataagaccctgagactcattttgtcacatttcacacccctattgtggatgggaattcagcctttttggaatatacttagggacatataggtgatttaaaagagaacatgatcgggactttgctggtggtccaatgattagaactgtgctcgccaacgcaaggggcacgagttcaatctctggtcagggaactaagatcccacgtactatgtggtggggccaaaaggaaaaaaataagacaaaacgtgtttgctgaatcagtctgactcaaattaccaagagccagcttttctaaggattgtcccgactatacccagccagcatggagaaagcttttcaagtgatgataccagcatttgccttcagaggtcccaggtctgggttctcaactctgccacagtggcccgctgagcaaactcacaatacaggtcagcagacagccttaaaataaacaaacatgtttgtgctgtgcccagttatgaaacagtgcatatccaatttggtagtgcaaaactcatgcaaataatctgctttttccgattcctgctgtgtatgagtctttgacttggccaactcaaattcctaaaatactaaggttcagaaagtctggtcaaagtttactagttaaatatgaaaccctgcctcctctatccatcatcactgcccccatccctaccctcaagccactttagcttttagacatatgtacactaaatgcctttttctttcaagatatgagtgaggtatttcttttggagtatatccagataatcggcaaatccaca

SEQ ID NO: 56602 - DNA, 1706 bp, Bovine  19866881495519
  misc_feature (1)..(1): n is a, c, g, or t
nttggggggcgggttgcggcttggggggaccttgctggaagtggagggtcctagggcaggggtcctggcccaggccgaggcctgccgccccagccagcgtacccaggcacctgcccaccccgagactgggcttcctctccccgcctctgtccctggagacctccaggctgtgtgacctccagcacgtgagcaccagtctggatgcaaacacttggatgcaaataagtgctcgcagcagggcgccttccttctggtgaggttaaggcaaccggcctggagccggaaggccctggagccaaggggatgccaagtgcttgcagcttctcagggcagagacctagaggatggcggaactaggaaaactgacccccttccaactccaccctaactgcactggcgtgtcaatccgcgttcaccccaaaaccaggatgaacagaacccacttccccacacctggaggccttgcctctagacaggccctatatgcagtgcagccaggctgggagaagagaccattagaggaggggggcttcctttgccgttaggggaacagggctcacagttcattgtcaccacaactcctcaaaggacgagatggtgccagtcagcttgctgttgatggactgttaactggttatgtgcctaatgcttttaaagttattattttcccaggcaaattctctagacaaccccctgttttctcagccttcagaccctcacagaaacaaagagccaaattgagttgaatctgagctggttgtcccctaaatgaacacaaacagctttctttagggaagccaatccattccgaactactcccagatattgttgggtaataaacatgaagaggatccctaactgttgtgggttgtttggagtttctggtggctttacaaccttgtgttgactctggtttggcgtctgtggatgagaagtgtccccagaaaagaaggctgtgttctgctttgtctggtgatggcatttgtgattgtcattatcacaaattgaggtgaaaatagttctctggctagctaatggaaagcaagaaataaaatataaagcactttaatcaaaaaatataaagcatctttggctgaattaccttgattgactgtgtaactcaagtttcttcaagtataaaatggggacacactaattgcacctcacaggtggggtaaggaacagttgtgattatatcttaaaatgctttgtaaaccattcagcaaagagcactatgcaaataacaggtgtctgctgctttttttttaaactcaagcaagtttcagattcccaaaggttttacgctgtgagtcaaattgtgatctcacgtcaactcttttgacctagagaaaaaataaagctgttctgttatgcacactgcatagctgttatttatcgtaatccctttactggagattccacagaaaacatattgtgacatcactgacatcactctctccatttctgagctgacacgtaaataggctgcataatttagctggagttaaactataaactggcagcagtgttgggataattcagccctttcctttgccctagaattctctaaaccaggaagattgtctccaagtggaaaggccacctggaaaccataaactgcaagggaacaataggtcgcaagctctattaaaaggttttctcattatttttaaataagtaagcagtttctccccttcaaaatatct

SEQ ID NO: 56603 - DNA, 1423 bp, Bovine  19866880647642
  misc_feature (1)..(1): n is a, c, g, or t
naacaaagagaagatgagccaggcggaggagaggtctgttcatcttcaaaactgtgtaaaaaagagccataaacttagtggctgaataagcactcagggtgcctatgggtcagaagttggtagctagctctctgctcagagtctgacaaagctgcagccgtggagtgggctgagctgggttctcattgggaggcttacccaccgaaagtctatcttcagaattggtgcttttgaattgtggtgctggagaagactctcaagagtctcttggactgcaaggagatcaaaccagtcaatcctaaagaaaatcaacactgaatattcattggaaggactgatgctaaagctgaagcaccagtactttggccatgtgatacgaagagccgacacattggaaaagaccctggtactgagaaagagggaaggaggagaagggggtgacagaggattagatggttggatggcatcaccgactcaatggacatgagtcagagtaaactccaggagatagtgaaggacagagaagcctggcatcctgcagtccatgggattgcagagagtcagacacagctgagcgactgagcaataagctacctcaagttgtcaaagactcagaactaagatgcctttgtcctgtagctgttggctggaaactactctcagcttcttcaggctacttgaagacccttaccatgtgaccctctctctcagtcctcacggtttcaaactctgatttcaggagagccttgtctcttttaatacctcaccctgattaaaccaggcccatccccaggtaatctccccttggagaaactccaagtcaactgattagtgacttctttcttaggactgatattccatcttcttcacagtcctgcccaaattcaagggaaagatatgccaggtgtctgcaccagaagacagggttctgcctcccacgaggattggaggctctctgtgctacatgagggggacaagagcactcttgggaagaactcctggtcaaattgccttagaaagaaaagtcagtgagaggcacaggctccattccagagcctccttgggccagctttgggaatttctccaagttctgggcactgtgtttgagagccaagtgtggaatctgctcctgtgtgactgtatccttcacaaaagaaagagacagaaaactgcgcagggctctgtcatgagtgacaccaactctgacagaatagacttatgaaaaacgatttttatgtaactgaaatggtctggttctggctccaggagatcaaatcctgtcaccaggacttgatttctctccatcactggctctgtcttcctttcgagtgaactcctggaaggtcaaaatttacatcctcccacctcctcttccaatagaaactcaggttatttctttccaacagtttcacagaattaacag

SEQ ID NO: 56604 - DNA, 1651 bp, Bovine  19866880824405
  misc_feature (1)..(1): n is a, c, g, or t
ncgcacacacccactggggcaggagatcagagccgggcagccagactcgggccccttagagcctctgggccctggaaccctctgtggccccctcctccttcacatcttgcacttagggctgaaatgctggtgaatggatgacgccaaactcaccaccctcctctctggggatttgcccccaggatggagagaagagttaaaatccaagtcccatcctggctagccattctagtgcctcatctatataatggggacaatattaactccccagcctcagcactgagcaaaggaaccaaagaggcagtgcttggcatgctgtgagcacgctatagaagctactgttgctggaccatgaatgctcagtaaatgtttactaactagatgggtgggtgggcggaggatggatggatggatgggcggaggatggatggatgaatttataagcaagtagacctctagataagtaagtggaggtagatggatgggagagtggatatgcattcattcgctacccatccctgcatccatccatccatgcgttcttccatccaactctcggttgtaggggcagaaagtggatggataggtagacagatagacggatgggtagatgaataaatgcatgggtggatatctggtttggtgggtggatagaggaagggtagatggacattccaatgaacaattagatgaatgaacagatggagagagagatgaatgggcagataacttgctggatgactgggaccacaagcaaacacctaaattgcctccccctggaaggtggagataacaattgcttcagctaatgcctggcaccacagccatgaacaaggccgcaggggccggaacaccgcagcctgaacaatctgctcgttaattggctcacaaagcttttcacctattccaagccaacggggtagcagcgtgacatttaaggtttcctttcagcaatcacttgtgtgcctttcacagaacgcgctgtgcagctgttctctggcttgcattctcctccacaggtgccttcaagcccccagggtgctaataggtccagcttccccagggccaaggtggggggtcccctgaaatgttgggccccccttgccatctcctctatctggagctgtgccaccaatcaccttaatcacccttcagttagggggattaatttataacagggtggcaaggaagtatcagagaaagggtttccttggcaaccaagtttttaaacccaagatcctctgggttttaaaagccgcttggcatctaatttcccccctcaaaattagcttgaaacttttcagatgctgagatttttagcataacagcaggctagcacttatgtcagaaaccacaaaagatagatttctcccctgccagaggcaagaccctggcaagttgttcggtttcctctgccactttgttcttggtggaaaaccaggccattatgaaatgaccacagagatgtcgttttctgaactgcaggcagccaagctcccaacagcaacttgttttttggctcaagttgcttcaaatcctgttgagttctgctgtgagggctgaatggagagaccctcgcccccggcccctctttaggcatggccaaatggtctcgggctgtactcgctgacaacctgggcccatcttccca

SEQ ID NO: 56605 - DNA, 1745 bp, Bovine  19866881012642
  misc_feature (1)..(1): n is a, c, g, or t
nagagaggcagaggttaggctgaagaccccacagagaggcaggttttattgtcaagggaccagaactttctgccaggctggtgagcgggcactcagacacctcagtcacctattggtcaccatgttcttacaaggtatataatagaaatagttcaaatggtcagaacttcaaaactgttctcaagtttttcaagcaataaaaaaggttgtttaaaacaatagttattgcctcttatccttttcttttctgttaaccggctagttgggattctgtcgaaaatgaagagacagttctgcaggatgggcggggtgggggggtgctacctctttgccaggggtgtcaccccatggaatattagcccgtccttggtggcaggaaggactctcatttgctcaactctctcccggtcatctccatctgcacacacgcacgccaccagcgaggggtcccaccaatatctaagcagtaaaatcctggtaaacaagagttgtgtctgacaaagacgcttgtgaaaacacagacacacaaagacactaaaaacgatggtttccacggggaagggaatgaaaatgcgaaaagagagaaggggaagaattctgcttctacgtcctaaagcttgagtttgtgttggtttgacagtttttctcattttcaccctttcgcagtgtcctgggagaaacctgggcataccgctctttcgtctctggtcttctggttatgggcctgttacgtgagaaccaatgtaaagacaggggtgaggtcatgcggctagtcctttgggcctttcctacatgccagcaggctgcaccactcagctggtgcagtgtggagccggctgaactgccgaagcatcctgcaagcctgagccacctaactgcctctggcagggctctggcaatgcaggcagggagcaccttggcgagccccttcctatggggaccttcatggttcaaaaaagaagagaaaaaaaaaaaaacacccaaaaactaagattccttcagtaacagttagtcttcatttcgggaagagcaaagcccaccttcctggaacttggggcctggagttaacttttcctatttcatttgcgatccaaaggctgtcctggcccagaggagggctaaacaggtctccttcaggagggaatgtagaccgaggtaattacctatcactagatgaaggcttccactctgcaggaggtcagccctggggagcctctctccagccccagcgtggagcccacgctctgcctgaagtcgaccgggatattccgacatttctcccttaaaagtcttgacacacgtggatagaagtttccatcaaacaagcactgacatatttatattaaaaaatagtgcaaaagctcaacatttatataaataactctaaacccctgctttgtagtttttttttctttacaaggtaatacacacttcctcagttggcactcaaaaattgccattttttttttctcttctagttcagaaaacaactttttttttgtaataggcctcttctaatacaaaaatactcctgccctcgcacatacagtttctcttattttatatatatttatatatataatattgcagatctttaaacaaaggttttgtgcaaatatgtctttaaagttaagtgaaatcatcataaacaaacaaaagaaagtaagcattcacgcacgcagctcaactagaaacagaaaagactagtgtagaagatttttttttctctttgccttcaagacaca

SEQ ID NO: 56606 - DNA, 1097 bp, Bovine  19866881082591
  misc_feature (1)..(1): n is a, c, g, or t
ncaaaaataaagagttttcataaatgtgcagctgggttccaccaagctattttaaattcacaagcgtagaaattagtctataaaacaagaactgagatgtacgttttcaacatgtggccagttctcatgtggaatttataactctctgagcaatgggagttcctgggacaattaccagtaggacagagatgataataaaaggtttgctgatattgtacccagtcaaataaatgtttcactcacccttcatgcaccccggaaatcggatgttgaatgctttttcaaaatcctcctcggacatccagcggcccagctggctgaggccgtttttggggatgggcaccgtatctctttgctctcgagtgatgatgaccgtcttgctttcaattctggccacatccctggggtcagtgagagccaaccagctgcaaagaaaaaaaaattaaaatacacagattaggggcttccctagtggcgcagtggtaaagaatccaccttgcaatgcaagggacacaggttcgatttctgatccaggaagatcctacatgccatggagcaactaagccctttcaccacaactgttgagcctgagcctgtgtgtaagatcccgggagcctcaactactgacgcccccacgctctagagcccgtgctctgcaacaagagaagccaccacaatgagaagccctggcactgcaaccagagagtagcccctgctttctgcaagcaaagaaaagccatcgcagcaatgaagaacctgcacagcgaaaaataaataagtaaataaaatttttaaatacacaggtggggattagagaagtgctggtattctgcatggcatctgctccctaggttccctcagccatggaccattcaggaagggaccagtgttctcatcatcatgttcttcccacacatggcaggtaccaagggcattaaggatgctgcatcaatgtggacacagccacgtccactgcgaatagtcggagggacactcactagaccaggagttcatgttttaggacagggcgtgtctgaccttcccttgaatcggggacctgtttgcaaagacagtttgcatgtgccccttcattagac

SEQ ID NO: 56607 - DNA, 769 bp, Bovine  19866881399144
  misc_feature (1)..(1): n is a, c, g, or t
nctgcctctgtgttttaccccccccccaaagtggagtgtttatgatttggggggatattagcagtgcatgaagcttgacacttacttatgtgaaactcagagtagcatgtgcgatgctgtcctttcaacatttgtgtcgggaggcattgctgggagccgagaaaagccttagctgatccaagtggagtggattgaattaatgacaactctgagagcaccagttttagggtaattgctttattgttttggagccagggtgcttataatatggttcctgtacaaacatgtttaacgtgtgttaatgcatttgcaaaccagagcctctcagcacaaccctgcttttcattaattgatgtcggtagcatggtacagtatttcaaagagctggccaagtataaactgtgtttccaatttccttcctttcctgtgtttggaatgccaatgttaatttgttcccatgcaggagcaggggctgccaactgcggctttctataaagggcttcacggtgaaggcttccagccctcactgatgcttggggctgcctggccaagtttcctgacactttgcagctaattctgggtgatatatggagtggggggttggggggcttcactgccgtgtagcggaagttcctggtgacagcagagggtgtgacttggcgggagagaacggctcggcatccacactgattctctttagacacggcttaaacccctgtgtctgtttccactatggttgcattttagctgtgtgaccttgagcaagtta

SEQ ID NO: 56608 - DNA, 2154 bp, Bovine  19866881812688
  misc_feature (1)..(1): n is a, c, g, or t
ntgtgctgaagctggaatgtggatgtgatggctggagctccgcatctacattggatctcaggtgatgtagtgtagttgtcacaactgaggattaggggagtgctgctggcatctggcagagaaggcaatggcgccccactccagtactcttgcctggaaaatcccatggacggaggagcctggtaggctgcagtccatggggtcacaaagagtccgacacgactgagcaacttcactttcacttttcactttcatgcattggagaaggaaatggcaacccattccagtgttcttgcctggagaatcccaggaaccggggagcccgttgggctgccgtctgtggggtcgcagagtcggacacgactgaaacgacttagcagcagcagcagtagcagctggcatctggtgggtagaagtcaggaatacctctaaacatctataatgtgcaagacagccctcacgataaggaagtacccagagtcagaagtcaatagtgccaaggttgaaaaaccccgagggggacaagtgaaagcataaacacaataaagtgatatgtctataatcagaaaaccccagaatacttggggagcacagaggagaggctcttagcccagtgatgtctatgttgaaaccaaaagaatacacagtattggtgggcaaaaacggaacaaaaagcattcatcaggcagatgggatgctgcatgcaagaccgagagacagaagagggttggtctccttgaaggaacaagaaatgagtcagtgctgctagagcagagagtgcaagggcaatggtgagccatcgaaggttttgaagcaaggaggtgatgcagtcagatttcccttctagagaaacaggtaaggagacccctggggagacagctgtggtcattcagcagtatttaaagatctcaaagtaagatgtggggatcacaaacccacagtctccgacccacttctgtctgttccgctactgctcttgttttgggtctaggcaccgttccgtttttgtgttttgatgtctgtttgatacatctgacaaggcattaggcctcacttccccaagcctcctagcactgatcatggcccctgaggcttcttgattgccctcaggaggcaggtttgcctcctggacgcaggaacacagcctgccccctgccctctgtgcccctctgcagtctggctggtcttgccactaagcccatccctcacgaggccccagcctcaagaacaaaagccccaaaccatttccagtaatgtaatttcatgctcagaagtctttcaccaccctcagagccttttgattccaaaaagagcatgttcttgggaaagacaaaacaaagttcagcatttctgtttagttccagtaagcgctttgaaaagtcccagccctccttttgacaactccgcttcctttgtaagtgctgccaccagacctaattgggtttttttccctcttaaaaatgagtttctgttgctgaaaaacttaagaaaaaaaaactgttaattctctgtccctctctttttctttatcacttctattcttatgtgaccctgctcttgctactttctgaagccgaataactggggttgggaaggacaggagggacaaagagaataccagcttgggtgtgacatggcctgtaaaactgaaagtgggcacactcttggcttaaagggcatttgccctggaaacaagccaagggtccatcaacagatgcctacgcaaaacacggtatatatgtacaaaggaatattactcaggctttgttgttcgatccctaagtcgtgtctgactctttgcgaccccacggactgcagcacgccagtcttccctgtcctttactatctcccgtagtttgctcaaactcatgtccattgagtcagcgatgccatctaaccatctcatcctctgtggcccccttctcctcctgccctcagtttttccagaatcagggtcttttccagtgagttgacttttcgcatcaggtggccaaagtattcagccttaaaaggaatgaaattccttttaaatgaaatttggacttccctgatggtgccagtgccgaggacataggtttgatccctggtccgagaagatctcaagtgccatggagcaacaaaagcccgtgtaccacaactactgaagcccatgtg

SEQ ID NO: 56609 - DNA, 1059 bp, Bovine  19866881822648
  misc_feature (1)..(1): n is a, c, g, or t
nctttgtccccaaaagctgaatctaccatcagatcccccagtggcaagggagccatggacaggatggaatgcaattccattaactgcatagatgtccaatgcagctgaagagctaaaacccaggaataagaagtagtggctggagacctgtgggttgtccggagttttctctcccattctgcctcgtgtctgtacgaatttgggtcccagctttcagtaggttgtcagccctggatgtggatttcaacctctggagaaaacgatgtcattcttcagcaggcaggagcccagcggtcgcagtgactgtccgtctccattccactgccggttacaggtttcgtctatacctctgctgctgctgctaagtcacttcagttgtgtccgactctgtgcgaccccatagatggcagcccactaggcacccccgtccctgggattctctagacaagaacactggagtgggttgccatttccttctccaatgcatgaaagtgaaaagtgaaagtgaagtcgctcagttgtgtccgactcttagcgaccccatggactgcagcccaccaggctcctctgtccatgggattttccaggcaagagtactggagtggggtgccatcaccttctccgtctgtacctctaaggagattcaaatcattacagacgtccttagattcacatgggcgcctgccaggtatctgcagtgcttcatcccgcagtattagagaacattgggcaacatttggcgagcctgtactgtattttgtaataaacattttgaagattgtctcctaaaaaaaaaaagagagagagaaagatgaagatttagaaccataagagaaacaactcaattgaaagggtttaattcaacaagttctactgtttttactcaagataatattaaataataataaccaaagtttacctgtattactttatcagaactttattggtgtgtgtgtgtgtgtattcattttccaagtttgagatgtaggaaccacctctgagccccagtctcatcatctctagagacatgactgagtgattgctctttgtaatactcta

SEQ ID NO: 56610 - DNA, 774 bp, Bovine  19866881922998
  misc_feature (1)..(1): n is a, c, g, or t
naattataacttctgggttccaagtttcagattcatgagcattttgaatgctgtgggcacctgtgaaaaatgcaacgagccacaaacaagcaagcttggattctctgtgagctggcctgtggtggtaaattaaaatttcacatgctgaatacaattatgtaaagtttaaaaataaaataaaatttaaaaaataaataaataaataaaatttcacatgctggagggcacgtcatgtttgcaaaatacctgtatttaaagatgcacgtcaagcacttctgtgtttagaacatttttgcatacattttgaacacgcaaaacacagctgagcaaatgtaatgctttgttttttcctttcaagtgaaaatttcaggtgttgcttctgttaaaatgagtcttcagagcctccatttgcagagagaaagaaagagagagaaattaaatcacattcagtaggcgtccacctataaagtagctcatgtgaattattaatgatagattttggggtggggggaacttcttggactttttttgtcgtacttttaacaattgaatgcgatgctcatcagacgtctccttgtgagatgtcacattatttaaatgagagcacatctgacatttccagaagagcatgctaaattctgaaaagagaatgttcttctcactgatttgatgggcaccacttgggcttttcaaaataaaggttttgagcactttaattttggagtgacttgccttagttcaacacagagatttaaaatactctcaactacttta

SEQ ID NO: 56611 - DNA, 915 bp, Bovine  19866882256360
  misc_feature (1)..(1): n is a, c, g, or t
ncatctcagctgtgtgacgtgggcagatgacttaacctctctgagacttggtttacttttcggcaaaatggggataatacttcctactgttgagtcttacaaatacgctgtgtcactgcatggcccataggaagtactcgtccatgttgactactattattaatcttgatggcctctccccagtccttggcccactaatgcccatagccaccggtgaccttgaggatttataaagaggagatcagcccttggccatctcccaggcggtctccatgaagtcatctgcagacactgttagtcaatgacctaactctccaaacgaggcccaccccaatgaaatgcctgcctgctcagccaggttttaagaatataaataccaccatcggcaagattcaaaggccagggccgggtaatgactaccccttatgggcccttagtctaaggcatgttccagcttgctaggcggggcctggagcttctcttaggtgaggctgtagcagagagcctcgccttgatggagcatttcacctccacttaaggaataagaagcgcgcgggaactctgatgccggttctctcggccctcaggctctgcagaagtggaacagtcaatgaatggacattggccagaaatgcaaagaaacccataactgaatttagcttatgagagaattggaacagcacacccaccctaaaccatcactggggctgctccttggctgtgagcatcctgggctgtgatatgtattactggagctttttccactcacactgcactcttcaaacatcctgctgcttgtatgagatgctcaccaccacatgacactgaggtcacatccaaatgtccttgcataactgagattctcttgaaatgacatggatcagtccaaggcgtactagaagtcatggaatacag

SEQ ID NO: 56612 - DNA, 2876 bp, Bovine  19866880434026
  misc_feature (1)..(1): n is a, c, g, or t
naaagcatgctgcagtctgcaacaagggctcggcagcctcctgtgagtggaatgtaaaacagtttccaagctggggctgggcctgggtgtacccgtcagaggaggaatttctggtagggaggcccaggatgggtgatcctgggatggaagctgtgcaaggggggctggagtggactagtgagaagtcctcctaaggcaggatccactggatgatccatggtcagtataggcatgccactcagtgaggtcatgtttactactggggggtcccttgatagctccaggaggttctgggaactgttctagtgcttcagaggcaacgagggctccaaatttaatactctgatggggagctaacttcgaaggtgaaaactcaggcctccaataggatgaaagatactaattttgcacagagatttcatagctcccaggctaaaatcattactatagtcctccctccacaactggagtctgaggagcaaaatcagggtttccttgtatttctggtagcccttaagcaaccagcaaggtcttgttgccgtaataccttgatcacagttctttttggcaatagctggccagctccaatcagagctgtgtggacacatcttatatcagtgaccttaatgacacaatcatttatgggaaagaacttcataggaaggaaactcaagctttaatgacaaaggcacagcatgcatgcattatattattcttctatcagaacattaagacctatagaatctgaattctttatatacctccaaaaagacccagaaaaagaaacatagggaatggcacttaaaaaaacagagatacccagattacagaaatgtttcactcttaggaccggtggaaacaagtcccagaagactctgaggtctacttgccacttctaggggctgtaaaggatggagagaagcaaaccactcagccctggacatgtgcttcatccagaataagaataagcccgtgagctctccagcaggttaactaccttgccgtgagggcaggtatagggggttaattaccaatgaggcatgggctggtggctgcacacaatatccttactctgacactaaactctctgggtctttaaaacatgtcagactgagtatctccaggaagacaacaacaaaggtaggaggagtaaagtcactatccagaactaagaaatgccaaatgtctgctgtgtgaggaaggacactctgcttgacttgacctgtttgaatggctgctctctgggtctttatccaatgagaaggtcctcattcgtgccacctgaagcacgtgccccccagggtcatggagcccttcttctgcctcacacatggctcagagggagtggtcagcagttctctcttctcccagggcgtctatggaccttcttctgcaagtttagctagaacttgccaacaagaacctgccatcaagccagtaaaggccttttccaaaatccttggccaagtccttttgtttcgcctttatagtgtactggtttggtaaagggcacgacacttagaggaaatgcacaatcttacttctgaggaaactctcctagtgatgagctcacaggaagtacatttacgctgttagtctgtagaatatttactgggaccatctcttgacccataaacacacaagctctgggaatctgtcacatccccctctctgctgaagcagcctcccatgcccccttcaggagttctcttgacaaaccccctggacatctgcctgccacatccttacctgcagaaggccccaatgttctccactaggtagcactggccgccattgtgacagtagcttgggaagaggtcgcacactgactggcaggagccgttatgtctcacaaagccactgccacacacggtgccattctcgcttggggccaggtccctgcctggctctcctgggcggggcctgagggcaatgctgctgccggggaccatccccagagtatgctgcagagggacagcgtgccaccgactggtgggctggcctgtcccaggccccagaccaggcttctcagtgggcactagaaggtcattttcatcttccaggtctccgcctcccactgcatccttgtcctcctcttcttcctcctcttcatccaagtcatcatagaaggatgtggtagggtagaaatcagattcatcaaagggagtgaagtcatcgtataagtcaagcaggctccaggaaggggtctctcccccgggatcagggtggtgctctgaggtacctggcgacccagggaagctccccaggtcggcgccacggccctcaccatccaatccttcgaagtagtcgatgtcaattatatctgacgctgggtggggctccagtgtgccctgaaaggggtacgtgggtgctggcccgtgagggtcaggtgtgctgcctcccaggttcagccaaacctccgtggggctctccttggggagttcagggcctgggctcggcttgtcgccaggggtggggagggtggttcactggcctccgtagcctcgaaggtggctgcggacgtcgaggacggcccgagggccccgtcgggagtcgggagcgtggctggaagggcctgggtgtcgccgctgcccgcctctgcggtcactccgcccaggcctgggctctcggcctccagccaagctgtgcctgtcaccgccaccgacgcctccagcgcctcctcagccccgaccccagggcccagcaaggcctactcaccgccaggcgcaatccgagaagtctcatctttcccagctgctggtgggccggccttctccctcgtgtcgttagcacgcggctcccacgccgggacgctcttcaccggcgtgtctgcctcgacggcgctgcccgcctcaggcactgtgggagggagggag

SEQ ID NO: 56613 - DNA, 1880 bp, Bovine  19866880468557
  misc_feature (1)..(1): n is a, c, g, or t
ncaggcaagaatactgcagtgggttgccatttccttctccaggggatcttcccaatccaggaatcgaacccagggtctcctgcattgcaggcagactctttactgactgagctatgaaggaacccctgttttcagactgggatataaccttttatgtataattccatttaagcctcacaacacactaaaggtagttaatcctctattttccatttttatttaacaaatcaggaaaccaatgcttaagggaggttaccaagattacaccgctcactcgtttgactgcaaagtccaagcttttctgcccattatactctccctaggagaaaccattcctggagtcaaaatagagtatatctcattaggcaatcctatcttgttttttcagtaaaactcccattataaaatgatttacagggcttccctggtgtttcagtggtaaagaattcacctgccaatgcaggagacacaggttcaatccctgatccaggaagatcccacatgccttggagcaactaagcccatatgccacaactagtgagcctgtgctttagagcctgggaactgcgactactgagcccacataccaattactgaagcccgtgtgactgacagacacgatctctgtctacaagaaaagaagccaccacaatgacaagcccgcacactgccatgaagaaccaccctcactctccgaaactagagaaaagcctgaccagcagcaaatacccagcacagtcaaaagtaaatacataaaattataaaaatcttaaaatatgtatttaatatagaaaatttataaaatccattcaaaaatctaccatctagagacaaacactgttaataatgaattcttttctaggtacttttcaaagatagtaaaaaagtccagagataggttttttccctcttctataacagtaaatctctttggggtggggtgtgaatgcattaatcctcaagtgaccctcaagtttactgagtagcctcttttctggctgaacccgaacctcaggccctaagccagaatggaaagctgtattttcagatacaagttcctgggaaaatgtggaaaccaaacacggtcattttgctcaagttgggcctctctagtccaccaccgtcagatcaccagtaggaaatcgggaagtaatgaccatctctgacaaacaatcctgggacaaatacagtcaaatagagccttgtaggcaatgggttcaccggaatacctaatagttcttaataaaccgagtttggtagaaatcatgcgctcgctccaaaaaaatcactctgggaagtacctctcagcactcagaaagcaagttttcagtaggacagataatcccaccatacacaaattcagaagaatgacccaggattgacaaggtcaaatatgctttgctcgagtccagtatttcaaacacaccacctctcaccctgcttctgcctgtctgctctccagacacagcagaaacaccgaacatgtgagtctcaaaacatgtgagtttcaaaagacaaagtcaaggtaaagacagctagagctgttgcagggtctttaactccagattgcggaggcttttatcttcccatcaggaactcccaggagtacaaaagcacataccatccgagctggggcggagttctgcctctgtgtgaagacatctttaccctcctccagtccgtgaacatgtaggcagcctcgagatgcaggtcttattggcttcttaaactcaaagacttgctgcaagacagtatgcatgagacatcatccactgtctgtgaaaaccagccctagggtctcagctatagctctggaaggcaggcaagagagcgggtactaatcacctgtctccacacccatgtctcatctaattcaatgg

SEQ ID NO: 56614 - DNA, 5892 bp, Bovine  19866880558423
  misc_feature (1)..(1): n is a, c, g, or t
ntacactaaggagcctaaaatacttgctaacttgaaagttgaattattcagtgagcttcacacggttttgatgctaagccagaagcctgtacacgtgattatcaactttatcaacttagtgattctttgtctactgttctgtgactgtggttagaacatgcacttgggggcagggaccaagacttagttcacttggaatctctactgctttgaacactggctagcaccaagtaaataaatatatgacttttaaaatgttgttttagtgatttagcataccattaaggatttctcaagtccttgtgcacatgtcatgctaagacataagttcccaggcatgaactctgcaatcaaagatgtatataacaattgaattaaatagtataagagagagcaccaaatagctgtggattaatagccaagttaaatgatgctgtgaattgctaaagcctagcagttttcaagaaaaacaataattggcctgaggtatattaagtaaatggtaggatttggaggacattggagggataaagacaagaacaaaagtcactgttttaagtattttcatattctttgaagtcattcattgcatcagacttggcaagagctgtcctagtctgctctcactgagtctctttccaggatcttggatccatacttcattcattaactaagaggccagaggtggtactagctgacttcctgaaacttttccaaggatgctcaccctaattgttctaattcatcactctattttcattatgtatatatctctgtcttttgggaagtacctttagcaacagaacattgaaatttaacacatttgtctttcaaagtaggaggctctggttctgaaatagtgtggctgtttctctggtcaaaagactaattcagtaacttttgtttttcttctttttttccctttcttttttttttcttaaagtagtatagttctgttcttctggtctgtttcccaagtaattggtataatattgataagtagtataattttggtgacagactattagaattgtaaaatcatatgtatttcattcagttaatcaatgggagcaaaagaggagcttaccattgttattatcttgggaattatgtacctgttaacaataattacaaataaggatcagttgagatttataggtatttgggtgtatattatacagttcagaagatctctgtttgaatttcttttctcaagtttcaaatattttgtaaatctgttttgcaggaaaaaaaagtcttcacctgagatgatgatcttgggtctttgttaaatatgtgttgatcccagttaagaatgagaaatgttttggaaaaaacttttcctaaatgaatcagtttgtgggttggtgaaaatgtcactatttaaatgtcagtaaatggatttttaaaaaaagaaacagtaacgagggattttctgtttggaattttagccagcttcatgtattgcaggtacccctcccacacaagccaaaccagcgtgcagacccagtgaccgcaggtccgcccggcccacccggcccaggccttccagggtccctcctgagctgctgggaggctcttctccatggaagactcttgatcctgggctgggcccttgccctttgtctgagctgggttgggtttctggttcgtcttcctgtggtgagcctgggaaccagaggaaaactattcatggtgacttccttgaacctcagagggatcttggcagggaggcctgggatatagaaagctcaccaatgatgatgaagaaaaaaaagaagaaaccaaagcagaagaggtattctcaaccccgggctgggggaccttgggatgatgacaatggagatgagactaaaggttattcctttgccactgactcacaaaagtcagctgtgccccccagccagcccaccactgtgggcacagaacatggactagtgtccagagacgacttgaaaggggtatgtgaaactgattccagagaagccaaactggtggctgagagctttgtctcagacagtctaagtattccttcacgtcctttggaagaagccccgaaaactacggtaaattttcagcccaaacagagagttgaggcacaggtgaaaggtaacaagtcagcaccacagggccaggagaagaaattgctgcaagatgagtgcatactgcaggctgcaccccacctccagacgcctgcagatgaaagccagacagtccgctccctcagtctgaaaggacccctgacagaggtttcttcacacaaagtagaaattcctttggaggtcagacccaaagagagttgcactcccatcatgaaccaagaggctgtgggtggagtttcaaaacccagtgcagcaaaagaactgcctgcttccatatccactgtgacagcaggtgatccattaggaaatagtctaaaagaagggaatgatgaaagtaaaatgactgaactgcagaatgacaaacagaaagagttttctgaaggagctgaagaggttaaagaactaaaaaaggaaagtgttcccaagcaaagacatgagaacagcatcttggcttctgagcagctgcaggacacagtgttagctcaggcccctggactagggaatgaaccatttaagaggatggcaggtgatggcaaaagcaggaaggggaagacaagttctgggaaggtgagagcaagttctgggaaggtgagagcaaagtctgagccaccgttccttgcagatagccaggacagcagagctgtctttgtgccaagtgggaggatggctactggggataaaagtgaggagttggggctggattcttcaaagcagccagggactgtggctgtgctcactgaagcaatagtgatgggggaacctaaggagatgatggaccctagggtggcgagcaccttgcaggcattgattcctttgggaaatgggtcaggcatgattcaggcttccagtgctagagcagaaagaggcgctgtagccacagacatgggggtcagcaaccagagcaaggaggaaaagtgtccttggatgggtcatgaggcagctccttggatttttgaaaagcctaaaaaaagaggcagtgaaggcaaaaccaaaaagtataaaaataattattccacacagcctgctagaatggagaggaaggaagaaatccttaacccgcctttcgtaaggaaggatggggttaccgatagtactccccatcaaaacaaggagtcggagcctactgtccctttgtgctcacatacctcagatacacccacagtggaagcagatgaccaaaagggtagaaatgtggaggctaattcttttgaatttggggctcttggcggaaataaaacaaacacaggcagggattctcctattactgaaatggctaccaagatgacagacgtgagttgccaagaccaaatcccgggggcaggatttgttccttcagtcctggctgaggagaataagacagatgtggccaaaggacacactgcagtggctgacaaaccaagtaaaaggagtaatgatggaaaaagcacaaagactaaaaatagtttccctgagaagcacactctggagaataagatagatgcaacaaaaatacatgttcccatggaaaccataggggaccacagaattgaaggaatgggctatgtggacgaaaatagcaatattacatttacctgccccagaactccaccagggttgatgaaaaagtcagtccccctagaggctcaggaaccagcagcctgtgaaaaaccacccacttctacttctcaagtagtaaaggaaagtgattcatttccaggcaccttgacagaaagtaagcaagagacagctccagcccagattcccaaattattagaggtagatagttacaacaaagaaggagtcccaaaggaacaaagacccgagggtccctctgctgttatgccctctatgagcacaggaggagttgcctcaactctgacaacagccatagaaacagttaacaatcattctaactgtcttcaggataaaggtgagcttgctggtgccatgaaaaatgaagcagggagagatggagagcatgtgataggagactctgagtccacgccctgtggtgcctcaaagcactcagtagaggaaaccacagagccagcagggggacaccttctttctggagtgctggcaaacgaacccagcctggcaggtgaggtcagacgcctagaagtatgtgcagataggagtaatttcccaacatgtccagtaaacaaagagtctgagcaaggttctgctccagtttcaattcctcacctactgggagacaaagcacaaaagcccagtttctgtgaggaccaaagtactgaaggtagagattccaagggcccagataatttgaataaggaggtagatatgactctctcgcttccagaaagtgaaaaggataaaaaggataaattggaagaaatcagtctggattctgacatcagagaaatggcgtatgtttccttggcaccaccagaactccagtcagatgtcttagatggcaaaattgaagtgacatcttcaacaatgatagatgagttagtagtaactgcttccgaagctcctcaactcccagaatccaaaggcaagatcttggaggcacctaagaaaatgacagaaaaatctgaatcaaaggctctgggagaagggaagaaggaagataaaagcagagtggccgaacccatgaaaggctacatgagacctaccaagtcccgaggactgactccacttttaccaaaatctaccatccaggagcgagagcgatccaagcaactcaagtccagtggtatgcacctgccgtggggaaatgtgtgtgcttgtggcttttggtcagcatcaaaaaggcaaagagcttgtgctttggtttcattgactctaatcatccttgttaaccgttaatttgttggcatgaagacctgtaactgctaattacatgttttctgcagccaaggcatgccttgtgtccagcttgggaggctggtgacctggttgcatgcctttttacccagcactgaaccttgactttcaggggaagttgaatttcaaacgatgaattgtttagcaggaagcctgtcaccatccacaatattctcaattaaacaacaaaaataatgtacctcctatgtgtacagccaaattttaaccattattttgtataaggattcacaggaggaaagaaaacatttcatgtccagctgtgttggggatttttttttccagtatacgtatgtagcttatgccggtgggattcaatatccaaattgcttttggagtaaatggaaatggaaggccctttatggtagcctccaaccagattggtaggcacagactttatatatttgtgtttctcatactgggaaatgatctctcaatgatggagctgtatctgtttttgttatttttttccctgaaaagtatacatctcatcatggcctttgaagttgttcacagcctacaaacgatgctgtttcttaatcactgtttcctagcttgcatgaggtagctactaactccagaaatgaaaacacgctggttggccttggggtagccagttaggtttttggaggggcttcatcatgggatggtgttctgcatggtatggacttgttattttgggtagagcttgtgctttgcatgaatttgtacccagtaaggaatgtgtgttctgtgagtagagaatgcttaaacattgctatttgcctaagacattctgatcttttccatttttgtatcttctttctattagctaccctattgtcaaggccagaaatgagaatgtatgtaaagtgcttccagctttcattaagattcccagccctctatctggttcattagttgtagcttctagaccctttcttttgtttcagcagtaatt

SEQ ID NO: 56615 - DNA, 1263 bp, Bovine  19866880607914
  misc_feature (1)..(1): n is a, c, g, or t
nctatttcttttgaagtaaaaccactctttatggacacgggtttgagcagactccaagcagacagtggaggacacggaagcctggcgtgctgcagtccatggggtcacaaacagtcggacacgactgagtgactgaacaacaacgacaaaagaggtctttacacagcttgcaggcacgtatgaccgctgaggctaaagcgaatttctcctgctcctccccagaaccaggctggaaatggcaacagacagctcagcaacatcttaactgtcctgagcaataaactccaacccccgctgtggaatatattaattttccacccccaggtgcctccccacgcactaaggacaacagctgtactatgacgaactgatggaatttccaggcttggcgaggttctgttcatcaccaccatttgtcctgttcatcataggattagcaacaggagagcgtccttgattactagaatagctgagggcatcacccagtgacattcctgtatgaaagaacacactgattcatattacttccatgcagtccccacagcaaagaattcctttttgcactgctattttggggagccttgtcctgtaaatataaaacccctgcacacacatgcacacacatattcacataactaagacctcgcagcatgaggctgaaggtaagaaagcctcgcttgcttacttacaggaactatccaggcagcttatattccgtcctgattgaatgcattttgggtctctaaacaagcaccagcaggtgctttacatttctatccaagtaaatttaaatctatttccccaagaagaatctacaccagatacctcccactgttagccacgtgatacagacagcatgatgcctgctgaagactagttatgtgcgccaaaacaagagaggacaatgacacagcacttaccatttctgttgtaaccatcctcaagagcaaatgtttctctcaatttgtctaaaagaagggtgaaccttaacatgattctcaatacctaatgcccccaaatttttgaaaaagagaaagcattttttaaacctttactattcgtcccaattaacttaacctcagcctagcagcacaaaaacatccagagtctccttatacttatccaaaaactatctctaaacatttaagatctctcaaggcttttttaaaaaacaactagttggaaaaaaaaaaacagttcaactaacctaggattcaagttcctcactttaacagatgacaaagaaccagagaaaacaaatcc

SEQ ID NO: 56616 - DNA, 1173 bp, Bovine  19866880611287
  misc_feature (1)..(1): n is a, c, g, or t
ncagcagcagctccctccctccccatgaggggcagcagagacccctggcactgatgccccaacagcctgcagtactccaaaagccctccctaactgaggccccagccctgctcatgtaccagagaccaacacctaccaagagcccaggcctggcctggtttggaggctctcagaaattccttattcctggccaatgactacactggaccaatgaaaggagaggaagagcacggggagaatgaattctacccagcaactgaaaaggggagtctctttcctccccaggctctgtggatagatggagttttctcgggtttaggttttcctcctctgcccttgttgagacctctgatgcatcaccatggcttctactcaaatgtgaggaaaatgaagaatggagtgcacagtggcacgtcagccctcatgtcccaagaccgtccgcgtcctgcagatgccctctggtggggtagggtggggagcctgggagccctgggttccttcccaaacctcagctggcctgccagtcgtggggaaaggacaggaggcaacaactccttactcccttcacaaaacttccaggcagcaacagtgggcttcctgctcgcagccccagggctcagcaatggctgctggctctcccagggtcgggccacgggtctcgagggtgcaggggcgggtcagggctcaggccctgaaaggcaggggggcctcaccactttctgcctgagaactgggaaacggggcctgactggactgtgctgcgggcagccagcttcctctcctgccacttgagtgagggacggcagtgagtggtcatgggtgaggggtcatgggtctgagactgccaggctgtagctcagcttactgagtcctcctcctgggccagttccaccagggcctctctgtgcacagtgacagccagcctgccagtagaggggccacctcacaggagagggcagcagcaaggcagggtgtgccctgcacagctgggaggctcagtaatgggctccacgcggcccaagctgcagacccggaggcctcacctggatggcaggcactagggtgaagtagccaatgaggacgatgcccagctctgtggccatgttcttcatgatggaccagctctcgctgctcaggcctgcaagggacaacggggccatacggcaacacata

SEQ ID NO: 56617 - DNA, 1517 bp, Bovine  19866880656663
  misc_feature (1)..(1): n is a, c, g, or t
ntttttgaaggctgcaataattctgtgaagaaagtcaccagcaggtcattaactatttactatttgtaactctgtgatgtaatatcaaccacactaaaatgagcatttatactttagaataagtgtctggagctatattccaccttaaaaatctgtgctcctttttcatgaagaaagacttcaaaatgatttctgaataattctgtaattccctttattggtgttgttaaaggaagcagaagtatctacagaacaaatattcaagataatagggtcaaaagcagagatttaagggtttgagttaggccatcatgataaaatgggaatataaaatattttctaagcatgtttgaacttgaagaaggagaacacattattagctcagaaaaaagtaatttcacttgcataatccaaacaataatagcagaaggtagttttaaaaaatcacagcagaagacaacccaccattcttgcacttacctttgttttcttctctgggcttggtggaagctccttgtttggaggggcggtgatgtcatttccagacacgcttccggtaggtggtccttcttctggtttggctactcctaaaggggggaaagttatgctaaacaaatgtttttaacactcattgtgaagacgcaagtctttgcagcgagtgacacaccactaactagcacttcatcctgacaaaatccacagaactctgcagctgaaagtggacaagacttccgccgtttccctcattgtgacgaaggacagttttagattccagcctgtccctgtggagaagcaacctaactatgatttgcacaaatgatcaatggaaggaaatagcccttgaagtttcgtttcccttccctggagactggcaaaggcgttctgtcaccctaccactaactcccagagcaacagggacaaaaaccacttctactggagtttatctcttggaataaagggtgctgagagatgggataagagccagatgattatccaatggtctccctttacttcctttccctgcaaagcaccactttatggaggatgtgagatgaacctgatctggttctagcggtgacccagatttccaacaaggccgaggagacccatgcaatcagatccagggccagaaataaagtctatggcctaaggctatgcccagcagcaccactgtggggagatgattccagatttcaataggctacaccagaaagcatttaaataccacgaaacttgtaacttgggtgtggggagaccgttctaactagcacaatctctagatgccacaaaagataagttggagtatagaagaataaaaaggctcaatgtgccccaaacaacaagaagagtcaaaaggcaaatgataaacaggaaaaaagtattgaactttgcatcaaatacacagagcttattaggtttactcctacagatcgataactgctataaaggccaacaacctactagaaaaaggccaaaagaatatgaacgcaatttacagaaaaagaaatacagatcac

SEQ ID NO: 56618 - DNA, 967 bp, Bovine  19866880682112
  misc_feature (1)..(1): n is a, c, g, or t
naaaaaaaaaaaaaataaacccaattaagatttgcctttcaaccctcaggtgttacctctaagcaggtggccctggtcaccatcagagtactggaaccaaggagaccttgttcctttagtgagtttattccaggcgcttggagtgaaaatgagcttgctcctactggagtttaattccattgcttttgactccagaaagatcccagtgccttttgacaatggccagggttttctgtattttcccgccagtttttcccaaaggaaactcattccaaataccttttccactgaggtctttaaaggaaaatggaattctggttcatactgtggtctcttgcaacctcaggtctttaatgtgatcactttcaaatttaaaagatccaggtggaaatattttaactatgctggtaataattctacagaatacctgaattcttaacactgttgtgtttcagtataagtggtgactttttctttttatgtctttgatctggttttgttcctgtaatacagccacccgattttgtgagggggggaataatacgtggtttttgtacaaaaatgtttctcagtgtgttatttcggaaaagtgaagggagggagttggggagactggaagaaattgatcaagaaggcctaatctccctctttttcagtgaataaatggaacatcatttctggaaaaaaaaaaaaaaaaaagaaaaacaccaatcagtatattaacccatatatatggaatttagaaagatggtaacaataaccctgtatgcgagaccgcaaaagagacagttgtatagaacagtcttttggacgtgggagagggcaagggtgggatgatttgggagaatggcattgaaacatgtatattatcctatgtgaaactatcaccagtccaggttcaatgcatgatacaggatgcttggggctggtgcaatgggatgacctagagggatgggatgggagggag

SEQ ID NO: 56619 - DNA, 1208 bp, Bovine  19866880752919
  misc_feature (1)..(1): n is a, c, g, or t
ngctggtcatcttatcattattaggcagggcaataaaaatagctctctgcttttagaaaagcacaacgtgatgcaatgtggcaaaaacaaattgttttctgttcaagagatcagctaccaccatcatgttaacatcactatataaaaattaaaacttctaataatcggtaaaatgttaaatctctatagcaacagctcacctgtctctgtcagggagtaataaatatactacagaattttaagctacttcagttagggatattggatggaataatcataactgatcagttcttagctttagagaactgttttatttaagaaaaacccttccattaagtgaagtttctctctgaagttcagagccacggtatttcctactttactgtataaaacgtcagtgaaagtaaagggaaatcgaagacagaaccaagaggaaacagggatttgtgctcatagttctgtaattatttatccacagtgtgcctctcttcccgagttcaccttgaaactccgagtttcaagatggaaaagaaagcaccttttatcctaggcatctagtataaaaagggactgctcttggcgtcattatcacacgggcattctgctggctgtgctttgttccggatcatccgaagcctgctcctggtggggtcgacaccgacccagctcaaggagcctgctggctcttctactgctggtcctagacgcggactcagtgctggagcacagaagttcccgtcttctgggcaggaaagaagacggcatcaactctatgggagtacttagtaggcattttgtagagtacccttagtggtggtaaatgtcttacctttaacataaagtgaaaaccaaacaagtaaaatgaaaagtcaaaggaacccttttagttatttaacagaaccctttaacattttacctgaaatagaggaaaagatctgatttaaagtgaaaagccactggcacaggatcagagacagtccaacaatttcaaaatgagttaattctgaaggacgcccacagttgagagctaccgaaacaaaaatctacccaattaaaaaaaaaaaaaaacctacccaatatattaaagatgaagttcaccaaaatgaagcaaaaaacaggatttgtacaacttaacactagaaagagagatcaagttctcccttgttgagatggtagacgctttagattccgtttaataaaagcaaagc

SEQ ID NO: 56620 - DNA, 1962 bp, Bovine  19866881260244
  misc_feature (1)..(1): n is a, c, g, or t
nacagaggagaaaataaaagttgagaaatcaggagagtaactccgagcaggctagttctgcagttcgctgaggccaaaagcagcctgaagaatgtcatgtctttcagagatttctatcccttgtaacctttttctaaattattttatcattgttactgttactagtaaaatataagaccccattcaattattctgactgactgtattgaaaattgaaaagagctgccagagaggtcctggtttagtccttaacattttacagcaaatagagcaggagtgcccctccacggaacccatgactttctctagacagagctggtagttggaccatttccctgattccaaccttaggttctttacatgatgcttgggcccttcatttgtagcaatggtcattagggttagattttctctaaatcggtgccaacccttaatttctaagaacctccttagctgatttttcatttaagcaatgtccttgtctccgcccacatcctaccctctgaatggccatttctctggagtataagagacagatccgctgtgcctttggcttggcttactctcttgagtaacatggtaggtctgtccatcttgtgttcctgcagacgccagcctgtattgattccttccctttcttggtggtgatagtgtgcccagcctccatggaagaggagctgtgtctgtgccacatgcctgtgtctgtgcctgaggggcttttccctttggcattcagtcagagctctggcatcagcctcctcttgccctctgctcgtcaggcccacaccctccacccgccctttcccatttgtccctgtgctcttacagaattctcatcctccagtccctaatggagctgatccttagtgatcctctgttctgccctcctttgtccagacgagggaatcaagcccagaaaggctcagtgatttgcccaagagcacacgtgagtcgaggggctgcctggagctggagcttaggcttctgacccgattgatttggccaatgcagtctccatctgctgccccatcctgttcagaattcacggggtgcgtcttagcccacagaatagctggattggactaagcatttgtaattttttataatttcgtttactctctggtcaagtattactacattaaatgcatcagtatttaatgcagtgaatccggaggcagacatagtttgtagtgtggtgtatttctagggctgttcatcctcaccggttcaggttggactgaggtggtttgactccctgtttcctgatcccgatcacaaggcaccctacatggccatttcccacgttgtctggaggactttgatcttagagccacatatttcctattagtagctgccaagcccactgctctcgttttctgacatctgcttatatggaagcatcctttggcgtgacttcctggggcagttcctgacctaccgctctcattgccactttcccatttttgacagcctgttgcagaggcaaagattcctgagaagcgggtctctccatccaagccggcttctgccccagctgtcaaacctggctccaagagcacccaggctgttcccaaagccccagcaactgcaactcttgcttcacctgggtcaaccagtaggaacctgtccacacccctgcccaagaggcccactggtgagtactgaatgtccctcccacgggaaccagtggctttaccccagacagctccagacagctgtgtagatagatagaaggacttgtgaaccagtccttcacgggcccattgaaaagtggagcctcaatctccacgtgaggttagcagctatgtgtatccagaataatcctgagtgaagggaactctcatgaattcccaggtagaatgtactgttcctttcttcgtaattccacagcacccagcactttgtgttcatgatctttgtaataagaaaggccatgtggaagccttgtcaagaccgtagaaa

SEQ ID NO: 56621 - DNA, 1373 bp, Bovine  19866881332475
  misc_feature (1)..(1): n is a, c, g, or t
nttcgctcaccgtggggatgtcacctccatcacctgcaccacctcgtgcgtcatcagcagtggcctggacgacctcatcagcatctgggaccgcagcacgggcatcaagctctactccatccagcaggtaggcgtgggggccacggggcctctggctgtcgggaagggctccagaccccgagcccgtcttgtccttgtctccaggacctgggctgtggcgcgagcctgggtgtcatctcagacaacctgctggtgaccggcggccagggctgtgtttccttttgggacctgaactacggggacctgttacagacagtctacctgggcaagaacagcgaggcccagccggcccgccagatcctggtgctggacaacgctgccattgtctgcaactttggcagcgagctcagcctggtgtacgtgccctctgtgctggagaagctggactgagggtgggccgtccccacccctttggctggggcgcttggttggcaacgcatgggacctggacggggggagtgctgagtcttgggaaagctgcttctgactgtcctgtcctgcctcatgactgtaatattaaatctgtttttttaaatgacatcagccaggggccttttgagccacttgtgtcttcccttggacgggctctgccatcactcacaccctcctggtgcctgaagtgcagcactgggttagaccttgctcagctcagagcggctcctgccaggagccacatgaagtcaaagttggggcggggggcaacctggcgccagctctagacactccttgcataagcaggtcggagtggcctcccaggagcagcaacgggcagacaccggccacagaacaggtttgtttattcgatagcaaagagctgaaaaacaggtcccacagaggagcggagcctgacccaagacccgctaccccacaatagtgcaggccaaggcaggcagggctaaaggcagcaggaatgagagacgggcccaggagacggtgtagtgaggaccaggcgggcacgcccggtcaggtcttgttgagcgtccagagcgggtccaggaggctgagggggtcgtcggtgggcctcgcagcccgcagcccctgcccgttgtgggcctgcaggaagtcctgcttgctcatgcgctgcttaccccgcagggagccgtccagggagaaggcctcaggcgtgagggaggccagcagctctaaggaggaggagggcggccccaggctgggggcctcagggaccggctgctcctcctcaggctggggggcctcgggcaagggggaagaaggggggggtggggaagaggaggggagttgggtggactctgggaggctgggaggaggcaggcctggggggctccacagggccg

SEQ ID NO: 56622 - DNA, 1175 bp, Bovine  19866881400018
  misc_feature (1)..(1): n is a, c, g, or t
naaaatgtccgctccaaggtcggctccaccgaaaacatcaagcaccagcctggaggaggccgggtgagtccagggagcttggatccctggcatgctggcccctgcttcatcctctgccacatctaagcactgttccccaggcatgtccttgcataagcccaaggggcccaccatgcaggggacagtcaggacagtgggttcagtgtcagggagtttcagcctgggctccacctcccagcaacaggatgcaagtgggcttagctcaggctttctcttctcctctcctagtctgcatattggggtctgggcttacatttttgtttggaggcaaagggttgtgctttatttacgaaacagagaatgcctctgagccttgcataggtgagagacattgggcaggaacctggtccattttgttccttctccttgcgcaggctaggcagaagatgggctgcctctagttccctgagctgtgtgtcttggctgaagagcctgtctggacgaggactagtgtcctcttatggccagggtgactttcttctatccctggctttcctaaataaaaggactgtggtagagtgtcatggtggagaaccatgctcttcacttgaaggactttctgagtacatccaccctagaattatttaactgctagcaaccatggggcttctgtgtgtgaaaaggtggtggcaagagtccaggttcagtgtctggagcagtgacctcctcatcccctgcatcgttctctaggcttaaaccgctgccaccgcctcccctgactcagagtaggacatttacattgtttcaatccagagctgctgaaaacattgaagggggtccaaaatgagacagaatccttgttctgttggaaggcgtttatggaaaactgggatgagggcctgagggttgcttgtgccgagagagtgtagctggcgtaggcagccaagtgctgcgctgggtcttgatggccttccccacttctgtgctcttatgcgtacgtggtgcaaaacttgctacaggtcttggtggggagttgaataactcagcctggtgatgaaagtattttctgttccaacatacctgagggtgtgacacttcccgtcatcaacactggcttcctgtgaccatggcagcttgacttggagcgtatcagaacatggggcccggggaggggg

SEQ ID NO: 56623 - DNA, 612 bp, Bovine  19866882039139
  misc_feature (1)..(1): n is a, c, g, or t
ngtcagcgaacctgggcaggccaaggggcctcacctagtgggtggagcgcgggggccgctgcaggtgtcttctccgaggcccctcacctggcctgttgtccccaggggccccggggcggggcagttcccctgcctcccccgcgtgcagcagcagtgacagggtggcttgccacctgacccacaccgtgccctgtgcacaccagaagcccatcacagccctgaaggccgctgccgggcgcctcgtgactggcagccaggaccacacactgagagtaagtgtcggcaccatctcttgggcacgcggtggcccagcataggggtcgggggagggcatctggggtcagtcagagagaggctggaggtgtcttggatgaactgtggaagggaattcctgaccgaagtgtgatttggaaaaacccagagaagtcagagaaaaatgaaaatgacataatcacacgtatttgtggaatccagaaaaatagtactgctaaacccatttgcagggaaggaatagagacgcagacatagaggacagaactgtggacacaccggggaaggaggtgggatgagctgggagagtggcactggcacccagcgccgtgtgtggagcag

SEQ ID NO: 56624 - DNA, 1714 bp, Bovine  19866880155391
  misc_feature (1)..(1): n is a, c, g, or t
ngcttttatttccatattctgggaggtgggtcatagaggatcctgctgtgatgtatgtcagagagtgttttgcctttgttctcctctaggagttttatagtttctggtcttacgttgagatctttcatccattttgagtttatttttgtatatggtgttagaaagtgttctagtttcattcttttacaagtggttgaccagatttcccagcaccacttgttaaagagattgtctttaatccattgtatattcttgcctcctttgtcaaagataaggtgtcaaaatctgatttctttattgctgttgtgcttgtaaagttcttccccagtttcaaggtctggtaaatattcacttacattttcttctacatttttattcttttaattattacttctattaaatctattggaaattgttgggtatgatgtgagaatttaaatggttgtttttgaaggtgcagttaaccaattacccaagcactatttacaggatattcatttcctcttcttatgaattaatggcatcatttttcaatcacagagtagattaggagagagtccttgggtccgtttttttggcttttgctctctgccactcacacatatgtctatgggttctcgtactgctcaaatctatacggtcaagaggtggaaggaactcagagttggggtgagattatcatcagtatctcggcacattaagtacatactgtctcagcccttttgaagaccagggttcaaaagctctgaaagttcaggagggaaatgggggatcaatccagacctctcggaggggcagaagtctttgagcagaggaagggcacttatgaagatgaatgtcctaagctagcatttgttgtaaaagcagaagaaagacacataaatacagtcttgattagaagagaaacccttggcttttcccccgtatctgaagtacccaagatgctcctgcaagaccagagtccggcagagccgtgtgaccgacgcatgcgcaggaagtaactgcgcagtttggaacgttggtctccagcctttcacctgcggcagaatctgtgatatttaccaattttcctttgaataacaagtttagtgtagattgtcaagtttctgggggggatcaacgcaaaattatacccccctcaagtctatcagttatgttttgtggaacttccttttcccactgggtagctggctccattagctatgtgtattatcagtctgattctaaaacatttcatcatttgagttatcaaaacagattctcttcagttattaagattaagctctgctcaatttaaaatttcaatcttatatttgatccgaagctttcctcgttgcctctaatgcaaacaaggccctaagctttagacgatctggggggaggggaggggagggtagacttggtcttctctttctctctcctctccctccctatgcttatgcttctggttgtggaggaagaagaagaaaagccaaaggtgaatatgcctctttgtgattgctggtggcaggtccgttgctccctgtggctgaccaagtgctcctgagtctgctctgggacagtgccaggcagcttcaggtggtccaagaaggaccgtgtggcttccttttccagtcaagccctatgtgactccttgtgcagcatttctccaatgcacaggtctctctgcccaacacgtggccatcttcctgcaagtctacacccccaaactcca

SEQ ID NO: 56625 - DNA, 1243 bp, Bovine  19866880354106
  misc_feature (1)..(1): n is a, c, g, or t
ncaggagtcttgagttgaatacaatgtgatataatatagttccaaatcagaggggtcagaaaggaagcaagataagaacagtaaccccgttcctgcctgcccaggtcccatgcatccctgaacagccgcctccctatgtgtggttacctgtcagaaagtcaacttaggtttctgtctgttttgtttaatcctgtttcccagtacttggcacattaatggtactcagtatctattgaatggatgactaaaggagtgaataaatctcacatggctaaccatcttagctttctagacagccgcatggcagtttatatcctgtcgtatatcctgtggaaatggcaatgacagaaagacacaaatgctgtaatgctggtttagaagaaagcttttagaactaactgcattattactctgtttactgaaataaaaatgcccagtgtgagagctgtgagtctcatttggggacttccagggaactgcagctgaggagacaacctctcagatagctctgaggaactgctcggtgcatatgtgggtggtcactataaatgtgatttcggtgaagggctacataaagcacgtatcttgttacaaggttgttgataggaggaggaacagacatcttagtttatggttttagtacttttctaagtatgggaaggtgaaagaatccaggtttataaaaagtttctcctgaaaatacctaacggtttaaaggtctcttctttcagttttcccagagcacagagtgcttcgttgctgatctctgccctgaactcctttcagggtgtgttaaaggtcagccactgcagtggctagtgacttgatccttgtagagctgatggcgggtggaagacttttttttttttttttaaataagcactaccaaaatattgataggctttcagtcagctcactcactcagttgtgtctgactctttacacttgttctgaatcttagatctaagaattatctgcatctgaaaggaaatggattgattgattagactgtgaaataaggtaaagaattttacattttatttattgctacagttgtagaacttgctggaacctctcaggggatttttagatgattgtatgattgtaagaagaaataatatttgttaggctttacctatattccagagtctcttctaagtgctttatgtgtattaacatttattcctcacaacaacctcatgaagtaggtactattattattcccattttacagataaagaaa

SEQ ID NO: 56626 - DNA, 761 bp, Bovine  19866880358249
  misc_feature (1)..(1): n is a, c, g, or t
naccccattgactatagcctaccaggctcctccatccatgggattttccaggcaagagtactggaatggggtgccattgccttctccaataatacaacctagatgattttaactttctttttctgattaaaaaaatgtgattaattagaagtaggttatttgaagtttttctgatgtttaggtgtggtttaataatcttgcacaatgtcattcatctccttcagcaaggcatcctgttaaaagtggctgaaaccatcaagagttggattttggctcagtccaataagaatgatgacttacttcacaagttggtaagtgttcactttactttttggtcacttttcaggactccagtttcttttccaatgagaaaaatcaatgaatccaaatttgttttgccattgatttgggcagtgactaattttaattagaaattctgggctgttctctaaaaggagagtatccacttcgtgaagtgttaaaaaagtttgtatcacctaaggaaaaagaaaaaggagattcttcagtaactgggtatctttgcatatggactcagtagtatttcatagatcttctaagaggttgttagctactgagaataatatattctgatagttattgaagacctatttgttacattattcatgtcctgctgccatcttcctccaatgacaggtattcctctcagtgagttagaaaatagatccattagtgggatcttccctcttttcattaggaacttattatctctattccacagc

SEQ ID NO: 56627 - DNA, 1633 bp, Bovine  19866880417942
  misc_feature (1)..(1): n is a, c, g, or t
ntaaagccaagataaccttccaaccattaaatcaaggccaattctagaaagaaaaatgttttaatttccccaatttatctgtccaaaacaaatttttgaaggatgaccccggggatattctcactgcctattcctatagcccccataaaattttttcttgtaaagtacaaataaagcatttctgattttttcatgtaaattaactttggtaaaatgttccataaagactagtttccatgatacatttgtggactatatcaaattacagccacaattatttaaatgtgacttttctctgagtcaattctactaagccaaattttgtaggaataaattttatcatacgcagctttgatcagtgttagatttttttttttggctgcaccacacagcatgtgggatcttagttcctggaagggatggaacccacgtgaccaacctgtagtggaagctcagagtcttaaccactggaccaccagggaagtccctggccagggttagatttatcttgtgttcattatttctgccagtagcacacatatctatttgataactgtatatattttcataagaaacccatggaaatttatattcgccagtaaagttatgagcaactaccctcaggtagtccaggactgctatgctatgcactgctaactaagagttcttaagcactttcaatcacttgcatatgatctgctaacagtcctcagggtgggaggagcaaagataaacagagggatcaaaacagcagagtcttaatgaagggtctcaatgtctcattggtcagcctatatagctgtagtttgaatattatctgaatgacaaatcaaatgccagatgttattttctaatattctacatgtattgtttctagtattctacatgtattgtttccatcataaatatatttaaggaagcaaaaaagaaattacagatgtaccttctccaaatggttaaagtgtaaaaagttaaaaaccaaaaattaaataattttaaccttcttaaaatgaggctgagagctagctaactgaggcattatataattaattctgttctttgtagttaacttggtaaaagcagaaaatctgggtcttagatactgatttacactaaagcagtagtagctaggcattgaataaaaccagtggattccacacatgatgaacaccaatacttaagaatacccccaccaaccatgtctaacagtgtctaaacgaaacaaatcatgtccaaatgtcctaaaagctaacttttataatcttaaacacattaattgatattgtgagtactatataaacaggatgttttagtgagctgttattttatgttttagctggtgtttcgaatcctatttggggtatctctgagtttaaaagcacaacaaatatattttgatttctgaaaggacaattaaaatggtcacacaacataaaaattatgaaatgtatatatatatagaaataccctgaaagctacatgtgaatcgctgagaagtggcccctctttttcgatgtaatttatgcttgagtctccagcaattaggtgtacgtttccttccatgccctctcctgagctctgacaggctgtgctttctccaggattcaaagctttgcaagagtgtcaaatgccc

SEQ ID NO: 56628 - DNA, 1030 bp, Bovine  19866880431613
  misc_feature (1)..(1): n is a, c, g, or t
ntttttaaagtcagccatgggcactatataaaatccccaacattatggaaatatcttacattaaggaaacaaaaaagatgtttgtttgtgttagatagtccatttataaacctgtgtttctcattagcactgatagcatgtaccatactaactgattcttgcaactgtctcacttgcaagcctgaattctctgaggggaaggggccatatgttttcatttttgtgccccagcactcaatgtggtacatagtgcatctcagtaaaagtttgtcacctgaaaggattggttgaggggagggtgtaaggtaagcctcagaaaacatgccaagttacttagtgtttttgcttcagttcagttcagtcgctcagtcatgtctgactccttgcaaccccatggactgcagcactccatgcctccctgtccattgccaactcccggagtttactcaaaatcatgtccactgaatcagtgatgccatccaaccatctcatcctctgttgtccccttctcctcctgccttcaatctttcccagcatcggggtcttttcagatgagtcagttctttgcatcaggtggccaaagtattggagtttcagcttcagtatcagtccttccaatgaatattcaggactgatttcctttaggatggactgctttttgcttagccttctttaataaggatggctttgaatgggttcctcccatagtactaggcccttaacagaatctttaattctgatgtaactcacccttttctagaagatttggtttcatagccctcaggacctattgagttctttaacaaagcaaatgcagaagcctgggaagcagttattagcggagggagattggtttaccactgtgatttgttgctatgtgtgtttattagccactggctctgtgattgtgaagtcagtattccctacactctgctgaaccaggcaatctggtgaaataagaagtgaggccaggccttgttcaagttccagaatctaattgcaaccacaataatagctaccatatattgga

SEQ ID NO: 56629 - DNA, 1221 bp, Bovine  19866880463592
  misc_feature (1)..(1): n is a, c, g, or t
ncagtataaatgggaatgaagctggataaatttataaacatcatgttgggaaaaaatagccagttacaaaaggaggtgccatttatataaatatttaatccaccaaccagtattataaattgctgacggattctttttttgtttgtttggttggttttaattttccagaaggagaactgggcctctgacagtccttacggatcctccccatgtgtaaaaccattaaaagaatgaaacacaacaaattcaggttacggaaacctctgagaaggtagaaagggagaagatgtcaaggtactgtgtctggaaccacttatttcttaataaaaaaaaaaaaaaaatctggtacaagcatggcaaaatattaacatctgttaaatctacgtggtaggtctatgagtgccacactttaaaaaaatgtcttttccatatctgaagtatttagtaaccaaaaataaatttactatttatccagaactatttggttaatgatttgatatgggttttcctcatgtgcagaacattctcccctccgtgaatttggtttaattttaaaaaatggtgtaagttgctgtttctgatgggccatttcgttaccttatcattttggaatctgatgtcactgcatttacttccataggacattaactgcaaccttaaattaaaatcaacaaccacagtaagcttaagaaaattaaaatccactgagggtttaataagctagctgccctagaaaaacatccagcctcattttaacttactgtttaaataaactaaggaacaattatccaatggtaaagaacccacttgccaacgctggagatgtaagagatgtgggttcaatccctgggtcaggaagatctcttggaagagggcgcagcaaccactcttggtattcttgcctggagaatcccatggacagaggagcctggagggctacatacagtccataggatcacaaagagtgggacacgactgaaacaacttagcacagaccagcacagggaactagctcccacacgccgccactaagagtttgcatgtcacaactaaagaccctgcatgctgcacctgagacccagggcagccaaaagggggggaatcatgtaccaactaagcaactgtgatttctgaaatgtccaaagtatcagaaaacataaagtaatctttgtgtgcagatttaatctttctctcaactgtatacgtattattcttagtaaa

SEQ ID NO: 56630 - DNA, 735 bp, Bovine  19866880469425
  misc_feature (1)..(1): n is a, c, g, or t
nccttccttatagtgagtcccttttaaatttttggagaaatctgttacactttgataaacctatcattttcacaaaccattaacaaactgaacatactctgggaaaagctccagtacaagttttgtaatgaagctatgggaaagataaaaaagatgaaggaaaacaagctgggcccttaaacttatctcactggtacttgtgaatatatacgaataaatatgggtatgtatttctgggcatgaaggaacaatggccagaactaaaacagcgcaaacctgagtactaaaatcaggcttggagaaatgtctgctcaactatgcagagcatttcatcagggttcaccagagcttttccacctcagtaatctattactctgtattcctagaatgagaacagggctcaacaggtagattagtaatctaatgttacatgttattaaggatcacaacgaatttttaagcaatacctttgataaaactggtttcacattcagaaaaatttccacatgttcagtttactttcaaaaaattgaaactgcctttcataattctttgaaatatgcattttatgtcactgcaagatcacattaaactgcagtgaaataaaaaacctttaggtgaataaaaagctctgggggaaaatcagttaaatttcataggctacaaatatgaaccataaaaacaacatgctcctttatttttactttttactgtcagtagaagaaatgcagcagt

SEQ ID NO: 56631 - DNA, 1010 bp, Bovine  19866880481915
  misc_feature (1)..(1): n is a, c, g, or t
ntaaagtgcagaattgaagtttctttttcgtagggaagagtgacgatagtctgtcttgagtctgtttctatgccatgagtaaagttgattgttgaagtatttagagtacctcctgtgtgccaagtactatggtaaggtgaaaaaggaagagagaaaacaggttttcttctccaagagtttatttaaattataaatctacagatggtactctttattaacgttagtagatactcgctcatttccgtgttcctttttaagggcaccctgaaatggcgtgtgagagcccacgctgtactgtggcacctgtgctgcagcctcctctacacatcgcagacaaagatccaatccctgaggagcaggtaaggatgaaaacggcttttcttccctctaaagagtttaatgtacaaaccttacctccctttctctgtaattgacatggataattgttgaattagaattttccagggttcgatcccaatttgggaagatcccctgaaggagggcatggcaccccattttgagggcttctcaggtggtgctagtggtaaagaacctgcctacaaagtctggagatgtaagagacaacaggttcaatccctaggtcaggaagatcccctgagaaggaaatggcaacccactccagtattcttgcctagaaaatcccatggacagaggagcctggcaggctacagtccatagggtcacaaagagtctgacacaactgaagcaacttagcacagaacagttgttgaataattgtgaacagttgttgaatttatatttctaatcttcaaagatcacaacacagtgtattgaatttatatcatatctaactaatttatatcatatcatataactaagaacattagttcttagtgtcttgaattttaatccattgaatctaccagaagattttcctgtttatatctaattgtccatttcttaaatactcgaaagtgatgaaatgcattaaaaattagtacattggtaaaggtccttctgggatgcta

SEQ ID NO: 56632 - DNA, 855 bp, Bovine  19866880583809
  misc_feature (1)..(1): n is a, c, g, or t
ncacactgttttagaataggatgctaagaacccatgtaagcctctcttcaacaagtgcccacattcgtgtccatagaaaacagtgcccacaatgtccataagttcatgggttccctaaagcccatgttctgtgggctgagcccttgttcaaggcagagaaatgaattctgcagaaaagttcaaagatttacacacctcgcagttctgggtggttatgagaataaaacctgtgtcagcaagaattcgagagcctgggaacaggttataaatcctgaggtctcaccagacattgttgccttggcaatttaagtcatcggatgactgaagactcttggcccaagagccacctggcatgaacactgcactctgataaatcaggtgccgggagaagctgatggtaccagctgtcaaactccagccactagcagcaacagacacttcagggtataaatagtttctgaagacactcatggcttgatggagcccacaaactggaaaagcatttgctaaacagaatgtaagcggccacaaggaaccagagcgggagcagaaacaagagtgtgtcgaaccatctggctttggcctctcctaatctcagaaaagctttagaaactgcgaggcatcaccatgggtgtaagaagtgcgtgtggctcacaccgagaagggtgagagacagcagcctggccaccaggcatggtgaaacccatccctctgcagaaaaatccctgggcctgtgccacaagccaaaataagcaattaaaacatgaaagcaatctcgtgggccacgctgcatttttcagcatggcaccgcatgggcaaagcctcagagaccacttgggaatggactgagatgag

SEQ ID NO: 56633 - DNA, 1280 bp, Bovine  19866880676863
  misc_feature (1)..(1): n is a, c, g, or t
ntataaataagagtccaaaatgaatcgggaaggatgggacatggacctcacagaagagatcttgaaagagtggtagaattggggtaagacagagactttcgaaatggtgtatccactgggaataagtattaaggttaaaaaaaaaaagtacaaaaatgtgttcagtgtactatggcatcaggatctgtctggtgggtggttggtagaaaggaggaacacattgaagagttcaaatgggaaaaaacactcagattaagtaccaagaggaggaagaacctaatttctttattaaaggaagaaccactgtacatcttgggtatcttgttataacgtgatgaaagtggaagcttagaaaattagcgtgatgactctctatggactggatagaaaaagtaaaattttgaaagcggtaaaaccgattagaccattgccctttgtgtagggtaaggtagggaatgggattggattcaggaagacagacccagaaatagcaagaaagtgtcaatctagagagaaattgctgcacaaagaaataacaatttggtggcaatttgaataagggttgaaggagagaaaacctacacaaaattagagaatgttgtcattgatagataaggtcatagaattaactgtaacctggctgaaaaaaaaaattccacacttcatctataaagacaggcttccatgacataatactctcaagaagtaatttgggaggctctttagaaaaagtagcaaattatcatcattagataagctcatctaatacaatttcctcttgtttggcttaaagacttagagatgggaaatgttagatgtctgtctttaggtcttaatttagagttctggttttaccgaaaatagcaacatagaaaagtaatgaatttatttaaaaattaaggaccagatattgagctttaaaattttaatcttttaagataccgtaactttttaaaagttagattaaatcactcatatactaggtcatctgcttttgatgggcattttttaaaaatttatttatttttaattgaaggataattgctttacatattgtattggtttctgccgtatagcaacatggattagccatcagtcagttcagttaagttcagtcgcttagtcgtgtccaactttttgcgaccccatgaatcgcagcacgccaggcctccctttccatcaccaactcccggagttcactcagactcacgtctatcaggtcggtgatgccatccagccatctcatccttctgtcgtccccttctcctcctgccccggat

SEQ ID NO: 56634 - DNA, 1736 bp, Bovine  19866880726497
  misc_feature (1)..(1): n is a, c, g, or t
nttaactaaatcaaagtgagagaacagagggtcaggcttgggattccccagagtttcctttcctgctgtaattggggccgtgtttattcattcactcgtttatatatgcatgcatgcatttcttcccctgcctcatgccacagaggacctgtggctgcttaccaagaatgccacacttttaaaagaataagatggaagtacaaataaagagttacagatgtaacgggtatagttttttagttcaaaatatctctgctgtatttttataacaaaagccatagataaacattatagaaaatttagagaatattaaaaagatccacaaagaatattcatgattgcctagaaagatggtactgatgaacgtatttgcggggcagcaatggagacgcagacacagcaaacgtgtggacacagctgggcagcggggggaaggacagggcgggatgaattgagagcgtagaagggaaacaaatccattaccatatgtaaaatagatagcccgcaggaatttactgtgtgacacaggagctcaaccctgtactctgactacctagaggagtgggatggcgagggaggtggggggaggttcaggagggaagggaccgtttgtgtacctgtggctgattcatgttgatgtatggcaaaaaccaacacaatattgtaaagtaattatcctccggtttaaaaaaaaaaagaatattcatgattccatcatgcagaggaaactactggaaacactttaaaatatattttgtcactgtttctgtgccgaaatattttcatatttttgaaaagtacggttgtaacctccatgtggttttttaatttgcttttttacccaataatatattttgaacatcattttaagttaatacacttttggacttccctggcttttggtccactggctaaagttaatacacttttggtccactggctaagactccatgctcccgatgcagggggcctgggtttgatccctggcctgagaactagatcccatgtaccacaactaaggcccagcacagccagacgaataaatatttaaaaaacaaagtcaatacattttcatctacagcatcattttaagtgaaagaatagaattccattgtagggatataacataatttgtttaaagaatcatctcattaccacgcaagactttggaatctgctgctacagtctgacatagtggttggagaattctgtttcagatggatgttttggctctctcagctccataggcccatgccacgaaccaaggacaacaagcccaggaagaaaaaaagatctactgaacagttatcatgctactgactctatttcactcttctcttctgggcaccgaagaatgttctcattattctctgtcttccgtggcatataagagtttctagctgagttgctccaccattaattgtatgtcttcttaacttgggaaattcttcagtgagtgaacagtcatccatcttcctatggcttacttgaatcagagggacttgcaggatgctaatacagtgctgggtttcaggaaaaaaccatctttgcgaataaataaagcaagaacttaacagaacattaactccctctttgcgatgtgcccatgagtccctctaagaatgtgaggttaagtatgtatatcaagatccctctttagaggtgatccatgcgagttgttaccgcgagcctcatttcatttggtggagcagctgccagccagccgagcaaggcca

SEQ ID NO: 56635 - DNA, 1776 bp, Bovine  19866880748349
  misc_feature (1)..(1): n is a, c, g, or t
ncattagtaattaagtcaacttaatctttttccttctctaaggacaatttttctcatttctcagacaaagctagactagaaagcataccattacatatatagattcaatgtaatacacataacatacacaccatttaatctagcaatcctacttccacgacatcctaccctacagaaataaacaaatgtgtagataaagctacaatagtaagagcacttggacttcactattttgattccttcccttctcctccttcctaccttccatatacataaacatatactgagtgtattctatttgccaatcgctgtttgttctgggtccctggatacaacaataaagaaaacaaaatttttattctctaaaagcttttactttagtgaggaaaggccaataaaaaacaagtaagcaaataatattgtcaggtggttatgtgttacaaagtaaaataaagcagggtaagctgggggttattgatggaatgagagtgttgaggaggtaacatttcagcacagacctgagtgaaggaacagaccaaggcttaggactagctaggggaagtgcgtccctagtagaggaagcagcctgtggggcaggaagagcgtgtttgagatagctgaggcaagaggcacagcaagagagctgtatgagtgaaaatggatgggagagagatttacggtaggaagtgggatgtgagaaacaaaaagggccaaactgaaaagggtcttgtaggccatacaacatctgatttcctactggatgacatggagatccactgaagggctcgtggagcagagacgcggcaggatcttttgcaaacagcatctttctagattcagtgtaaagatcagactatgaattaagaacagaattaagggagaccagaaaggatgccagtgcacaaacactggcagcacttgggtactgtatataggcagagacacaggccaagatcagggtagtaggcatgctaggggtgaaaaacaattggggatattttataaagggagaggtgacaagatacactgatggattggatatggaatatgagaagagaagagtcgaggatgattatgaaattttggcccgaccaattaggacagaattgtcatttactgagacagagtagtctggagaagaaaaagttcatgaataaaaagaacagcctagcattgagggttttcaatgtagctgagcaaatattttacggaaaaaaactcattaagccaattaaattccctgaattcaattttaaaatggcaaagctgatttgttcccaagttttttctatttctctgaaattattttcaagactattttctcctttttctggctctcttagcagcccccatggtggtcgtcaagaacaagcaccttatgaaaggaggcaaaaagagagccaagaaggaagtggttgacccagtttctaaaaaagattggtatgatgtgaaagcaccagctatgttcagtataaggaatactgggaaaacgttgttcacaagaactcaaggaaccaaaatcacatctgatggcctcaacgaatatgtttttaagtgagtctcactaatctgcagaatgatgaagtagcatttaaaaaattcaggctaattattgagaatgttcagggcaaaaactgcctaatttccatggcatggatcttatccgtaacgtattccatggtcaaaaagtggcaaaccatgattgaagctcatgttgaggtcaagactacggatggttacttgcttcatctgatctgtgtgggtaactaaaaaacg

SEQ ID NO: 56636 - DNA, 1555 bp, Bovine  19866880764703
  misc_feature (1)..(1): n is a, c, g, or t
nattgaaaaaatattactgtccccagtttgttcctatctagaggaaaaaacacgggacacctgcagtgatttgtatagaaattaatgagcattttcagaggcccaggatttttcatgcaagataagtttgtgaattggaaagcttttatgggaataggtgtttcggtggttaaaaatggaaataatcatgccatgtttgcatttggtcaagttaatggtggttgctattcagaacgagttaaaatagttcctgtcatttactggttgcatgtggacatcagtgatacagaaggagttatgcatgcctcatatttccccactgatttacatgacacttgcttttttatctattattccagttcctcatttcattttctgtcaagtactttccgagctctaagcactgtagttttttttattttgttttttctttttcttttttttttttggccacgctgggcagcattcaagatcttagttccccaaccagggattggacctctgcccctggcagtggaagcatagagtcttaaccactggaccactggggaagcccccctaaagccctgtagtttaaaattagttactatttatagattctccaaaggaaataattttgtagggtggcagtaccttttataatacataatagccttattatcttgatgaaaaattagatttaagagaatggtgaattttttttccccaaagaggcaggtgataaactctctagttgaagattagaggaagtaggatttctggagcctttgaattatgagaggataagacctggaaactaggagaggaaaacattcagttggattgtaggtcaaaagaaattttcttagctaaagcatttctagcatcattgctgggactacggacatgtgtcacaattgttgaccctctctacctaggggctggtgaaacctacctccaagggcaaactaattgaaatgccgctttaaattcagcaccagtgttcatcctgcctaacctgaactaaacctggctagtcttcattttaagcaaataatgctataaatcatattatcaattcagttcagtcactcagtcatatccaactctttgcgacgctacggactgtaacacaccaggcttccctgtcgaccaactcctagagcttactcaaactcatgtccatcaagtcggtgatgccatccaacgatctcatcccctgtcatccctttctcctccctccttcaatctttcccagcatcagggtcttttccagtgagtcagttcttcgcatcaggtggccaaaggattggagcttcaggttcagcatcagtccttccaatgaatattcaggactgattgcctttaggatggactggttggatctccttgcagtccaaggaactctcaagaatcttctccaacaccacagttcaaaagcatcagcttgtcagcactcagctttctttattgtccaactctcacatccatgtatgaccactggaaaaaccatagctttgactagatggacctttgtcggcaaagtaatgtctctgctttttaatatgctgtctag

SEQ ID NO: 56637 - DNA, 1598 bp, Bovine  19866880837241
  misc_feature (1)..(1): n is a, c, g, or t
nctctctctcttgtgaggaatctttcaaaagtcatagtaagactagataccaagttgtatactaatatttttcaggcctgggcctcaaatatatatatattcatatataatactccagtgtgaacagcaatttcatgaaatgtaaaatgtattttttaaaatcacacacaagtatttataagcacagggttcaccagaagtctaaagcaaggagacagtagtatagaagtgtaggattaggggacggagttactcttccatagacagttctgattgaagttcttcaaaacaagcgatttttttttttttacaatagcctacacgtctactattgaatacatttaatatggaaaaataaaatgaagaaaagataggtactttaaagtgtttgggtaagatgctgtcacgaagcctactccctctccttgctttagagctctctagtgaaatggaggtgagtttgatggagtacagtcggtgaccactgaaaaacacgagccctttcaacaatgttgcaacaccgttagtttttggtttaaaaacacacacacacacacacacacacactcacaaatgctaaatgtacacactaccaaattctgcggtcagcttttccaggaactactggggaaaagtctcaatgctgcagatccccgagggtgcccgcacacccaaccttgtttccagatgactcatttcacagtttgttttgatcattagcaatgtcccttgtctgcagaggtgcagtgtagttacaagtgctacatagctgtagttttcaaacaaaaccacttataccattgtgcttaagtggagagtgtagttaaacaatactgacccttgcttactggccctgtattctctgtaaacaaggaggctgtttgaaacaaccgcttcagctctatttacagaagggttcccacagtacacacacaggcacagtggttgataggctttctaaaagctgtgcgtgtgccttggtctcttaaaaaagacagtgctcaaagtggaacctatgtgcaaacttaaactcacaacacagagtagctcaagcagccattttgctcccaagtcatctgaagaactttaccagattaagccagtccccagagtgcttacatccacttgcatttcttcttttcctcaaataagacttttacatgcaagagttgtttctgagcttcttccagccctcgttctctttctagtttatttagaatctgttgacaattagaacagttcttttagagtattgtggttttagcattacaattctattttttttttgcattcctgatgctgtgagtggtaaatctgtatgaaacagatgccaagattttctccgatcatttacatactcactttgcaagttgttttgctaagtcattatcacaggatcaacaacacttcagcttaaaatagaaactcgaaagaaataccgaattacttgcttacaaatatggggccagaattccaaggccctgttttatgcattatgtcacagccattccaagcacagcaagcattcctgggcagccaacatgcaggcaagtatttcttcttaatgcagcaggcagggggcatcctggtcagagatg

SEQ ID NO: 56638 - DNA, 1655 bp, Bovine  19866880939005
  misc_feature (1)..(1): n is a, c, g, or t
nactttatctgaaggctccttgtaaatctttttttttttaatctttccaagcacttttagctttccagtttttcatttcaaaatgcaaaatgagaactcaattttcagatcactgtggaagggatggctaaatttcctaccagtatttagaagtactcaccatcctagctgacactgttgaaaggtattctacagttctattatttctcattgcttcttgccagatcagctgtggctgatgcactcccagtcagtatttctgacattccattgagagaatgtctttcacaaaagaaaaaaaactgctaccctaggcacaagatttaaaatagctaacaaagcatcatgcagggtacccagctggtagccacccctgcttatgagcatgaacatgcatttaacatgtgcacacacacacatgaattatcagaagttaccaaaaatgcaacagggtttggtcatttggagttaaaaacaataataaccctttcaactgcgaaaagggactcttggaggtaataagaggaaaaacaaacaaacatatgataaaagacgaaattgtttataaagcttgatttggaatatctgttcccaaagaagaagaaaatccataaatattactgtggcctcccgactctgataattgtaaaactattctctagacacagctctatggagatgaagtttttcccaagcttgattagttccatctgatccttttacaaacggaattacattttgtcaattcaaaaatagcataatgtcttagatatagacggcagcccaccaggccccgccgtccctgggattctccaggcaagaacactggagtgggttgccatttccttctccaatgcgtgaaagtgaaaagtgaaagtgaagtcgctcagtcgtgtctgactcttagcgaccccatggactgcagcctaccaggctcctccgtccatgggattttccaggcaagagcactggagtggggtgccactgccttctcccaaaccattagaatacaggttatcaattagaatgtatattattcataaaattccagtgcacaagcacctacttaaattattgtgtttaaaatattttccctcactgagataaagattagctgcatgataaatgattgtctaatgctgcagtgtccaacacaacagacactagccacacgtggcccatgagcacttgcaatgtgcctactgggactgaggaactgaattttttattttattttaattaaattacattttgaagatttagtacccccaaatgcaaaatattcattaatatttttggtactgactacatgttaacataaacaacaaaggccatttttatttagttgccaaaatgtgaaaacacagaggttgaccagtattctgtaaatctcattacagaaaatatgagacaaatataaacatactattatttatgcatacctctttctcctcaaatgatctctcaggtcaaaattaatcttccttccctgctagcatgttatgtataattttaataccgtacttatgacagtctaatatttttattgaccacatcaggtggctggcaggatttaagttcccccatcagggactgaactcaggcccaaagtggtgaaagtatgaagccttaaccactggactgccagggaattc

SEQ ID NO: 56639 - DNA, 1276 bp, Bovine  19866880974267
  misc_feature (1)..(1): n is a, c, g, or t
naaaatattagcagatacttacaatatgcaaaagttttaacacatccacaaacctgtaaaaaacagcaatgggagacatgttttaaacgaaccaatgaggaaacaaatagtcttttgaattggaaactggatacctacactttttctgagctcatgatctctttggcaatatgatggactttacatttcattccagtatcttcaccctgtggataagagtgcattaagaaagcatgaactcataaaaggataaggaagatcagctttgagttattcagatgtacattcaagctctgatacttacaggtttcaattagaacacatttcatactatataatgtctcaaatggcaaacatgaaggattagatgtggttattaaaccatgatacaggagaagctgaaagcaatcataatcctcactgttatcaatgccggattcatggagtaccctgaggaaccccagagccccagtggggcacactgttagtggcacaaaactgaagttacattctgcaggggaaatagacaccacatgaacttgtgttcttggggtgcaggcaagtaattttagttagtaactatttagtaggcctgtcggagaaggcaatggcaacccactccagtactcttgcctggaaaatcccatggacggagaggcctggagggctgcagtccatggggtcactaagagcgacttcactttcacttttcactttcatgctttggagaaggaaatggcaacccactccagtgttcttgcctggagaatcccaggggatgggggagcctggtgggctgccgtctgtggggtcgcacacagtcggacacgactgaagcgacatagtagtagtagtagtagtaggcctgtatcagagaaggcaatggcatcccactccaatactcttgcctggaaaatcccatggacagaggagccttggagggctgcagtccatggggtcgctgagggttggacacgactgagcaacttcactttcacttttcactttcatgcactggagaaggaaatggcaacccacttcagtgttcttgcctagagcatcccagggacggggaagcctggtgggcctgccgtctatggggtcgcacagagtcggacacgactcaagtgacttagcagcaggcctgtataagagtacttcaccttcagtaaagccattttaagtcagacaacttgagtgcagactggcaagtgctcttcagtagtctataaccccacatatcacagccataagcttttacaacttactgaaaata

SEQ ID NO: 56640 - DNA, 713 bp, Bovine  19866881140613
  misc_feature (1)..(1): n is a, c, g, or t
naaataaaagttaaaaaaataactaaaaatgtttcatatttggagatattatgcggtcttttttcccaaaatcagactctagttatttgtgcgaaaacatataatatgtcaaaaaactattagcatttttccaattagaaataatatatactttgagtaattgctttgaataaagtcatctaattttaagttatcattacaattctggaatatacatatttaccgcagaccataatatggacaagctttgtacttttatactgctttaagtgaaatcaaaagacgtatgatatttttaaatttagtccaattacaaacctataaatttctttcaagcagtgaaggctttgatgaaaatgtttaaatataagaaggcaaatacaggggagttatatctaaggatatccaagaaacatcatcattaacacttgaagatagttacagtcaaattataaagaaaataacacataagaatatttaataaatatttgcctgccaaaatctcccttggaattctttgctgttaggcaatattggtaatatcatagcaaaatctgatcatatacttttatatatttatagcaaacctataaaggatttataggcctcagacttgcttaatcacctttgtggtcaaaggaatacaaagttgtaaaattctgaaacctatgattccttagcagctccttaagttcttaaatttttaaatggta

SEQ ID NO: 56641 - DNA, 1998 bp, Bovine  19866881142516
  misc_feature (1)..(1): n is a, c, g, or t
ntatgattattcaatattgtgattagtcttatatggctattaaattaattgtaaaatattccaaaagagcaatatacacaatatttcggcaatgatagtaacagttaacctaaatatttagtatcagtagtatcagtgtaactgcattttaagagaaacctccctttgaatgtaaatgttgtagttttccttttttttaattacttggtagtcttatataagatgttatttctgtatacagatttacttgcacttaatagacattctaatttaacattagatataaattttccacttgggactttgctggcagtccagtgggtaagactctgagctcccaatgcagggagcaggggtttgatccctgtccagggaactaagattcctacaagctgcatgatcccctccccccaaaaatagaatttcctgtttacttatctgttgatataatttgtagaaatccagagttatcacagaaacaaagttaaaggtttaagtaattttccctaacacccctaaaagagagcaataaacaacatataccgtccccaaaacacggctttaaaaaggcatttttgtcatttgaaattattattcatctcctggcaacccagaaaacctagtggaacccactaagaaacctatacatgcaagcacaggtaaaccaggtaaaattctggaattgcttctaaaaggaaaaattttgtgctcatggtaatggaagtattcaatctgtacagcagcagattttgaatataaacagcttcattcttaaacacgatattatcatggttattgctttcagcatcaatgatcaaaaacaattttgttattttaaattttggttttgtctaaaaactgttaaactgtgtatggggtttgcttatttaggtatcagcaaacacagaagattcctctatgagtggctacttgtacagatcaaagggcaataaaaaaccttggaaacacttgtggtttgtcctaaaaaataaagtactgtatacactactgctgcaagtgaggtaagaatctgaaatgtaaacatgaataatttggagttttattttatagtgccacctagaaatgattagtgtttgcctggtctatttgtctacacttttgctttactttcagagggggagatattactgttgtttttgacatgaacagtgtccttgttttgtacctaaagatactcaaagatattaggaattttccatagtgttaaaatgttaagtttgggggatatcatgtgactactgactacttcactaaaggcagaagtttggtaagactgggctatgtcacctttctgagctgtattttttgcatccataaaatgaaagtaatgtaattactcacttcccatggttgtagggaaataacatgaaatcagtgaatatgaacacattgaaaactgtctgctgccatgtctgtctgatgagtggggagagggtggcccaataaatattgttgaataaatgaaaagtgaattagttgctagaattaccattgttttatatacgtgtgtttgtttgaaattaagttagagcttttcagataaaaagttgcaggtctgaattctgtatcattttagaagtccatcttccttttttttctttgtaaatttaggatgtggcagctttggagagtcaacctttactaggattcacagttactcaagtcaaagatgagaattcagagtctagagtggtttcagttactgcacaaaaacatgctattttatgtattcaaagcagatgacgctcactcagctcagaagtaagtaatttaggcttttttttttcatacatgagatttcaaattgttactttaaatgattgattttaaaaataacctacttccaggcatgtgatcaacaaagaatataaatcagagatcccatttagaaagatttaacgtattattcaaactctttagaattattttaaagataggcaagagtatctggaatattttcaggaagcagagaggaaa

SEQ ID NO: 56642 - DNA, 983 bp, Bovine  19866881223706
  misc_feature (1)..(1): n is a, c, g, or t
ncttgctgcatattatttttaactgctttttgcttgattttcattttggtgagtaaaattcattatccagaagtataaatattcaacgtatgttaattggtatgtgctgagagcagccagctttacagacctagtggtaatagaattgtggaggagaagagctgcaaaggcatggaggttgcagagttcagccacttcattttctcaagtgagggacctaagactggaggggtaactagaccccaggtcccacacggatctagaccaggtttcttcctgaggtcaagatgctgtgtcacagttcagacttgctcatatagatgatctcagtcaacaggaaagcagtcatgggaagttagtaatttagaaatccgcaatcagcaagacttaatatgaagtgaagtgaagtcactcagtcgtgtccgactctttgcaaccccatggactgtagcccaccaggctcctccgcccatgggattctccaggcaagaatactggagtgggttgccatttccttctccaggggatcttcccgacccagggatcaaacccaggtctcccacattgcaggcagatgctttaacctctgagccaccagggaagcccgacttaatatattggcctataaatggtaagaattctagttacctggaaatttctttcactcatctaaatacttccctcttccagtcagttaaatcgaggtgttactgactgtttgtgaaacttactcttttactagacccagtgcttaaaggaaaaggaagaggactgtcttaaccaatgtgtgtgtttattagaatgtttcagtttcagtgcatcgtttttaacattcccagatgttactctttaaagccttgatgaaaaccacaaagattattcttaggatgagaagtcttaaggtaaattctgattctgtgatctctgcaagtaaaaaatcagtccttaatcttataccttcctgctaagatagtcatgtttca

SEQ ID NO: 56643 - DNA, 1784 bp, Bovine  19866881319216
  misc_feature (1)..(1): n is a, c, g, or t
natccctggagagcctgggcttgtataatcctgtagcaagggtgatgggatagggcttgttggttttgaaggaagagaatatatgtgctgggaaagaggatagttcggtaaaggcaggacttggcaggacatcttagatagagccttttctcctctcagttgcaagtgtatataatgactgcttcggagaaaagtaaacagacgcacattaacaccctcatggtggttgtagcagggtgatggaattatggactgtgttcctctctttttcactgtttaccccttgaagcccatacaaaggtctcactactcagtttaaatattttaccacctcttgcttatagcttaaataaaacatccagtactctttttacagggttcaactaattttgtctagattcacagaggagaaaaacacgcactaaaaacaatgatgatcacaaatactatccctgctggtgatatttccttgggtgttctaattgtgttttcccaggatagctcagataaagcaaattcctctctgaccttgaatatggctaagtaccatgcatcctgccccagtctggattaccttttgttggccagatccagactctcaggttcttccaggaagtgtgtttccaaaaatttcaaaagcctacatatagagttcttttgtgcccagatagacagatttgagattaataacagctagagttctttatgcctttcatctaaagtctcacgagatgttataagtgaaattattctaaattctcagtttggttatcaaatctttttatttttgttgttaatagatgaagaatgcagttattcccttaaccatcagtcttatttatccccagcaggactttgtaatgaaacctcctgattctgcaaaccaagattattgtacaaacatgtgtagaaacttgccagcctgttatctaagctaacatattaaatactatagaatatttttgcaattaactatcatattttgctttaaagaaagtatattaattttcctctataggtagaataatatctgaagagagacacaccgagactgaacataagtttggggaatagcattaatcacaatgtatttctagaatgaatggatgactatttgattagtatttcaaagactttctaacctccaagcatttcaagagataagaactggatcttgagtatgaaatcctgcagaaaaagtaagaactacttgaaactagcaagagaaaactgaactgtgtccatgaatgtgtctaacagtaaatacctctgtcgactttgggcagttggcttaccctctttggttttcatttttgtcatgaacctgacaggatttaactaaaagcatagaattatgtagaggatgaagggatcatagggattttataatttccctcaaaagaaactgggagttctagagaatttcctggtggtctggtggttgggactttgcctaccaatgcagggggtatggatttaattcctggttgagaagctaagatcccacatgccttgagcccaaaaagcccccaaatagaaaacaagcaatactgtgctgtgcttagtggttcagtcgtgtctgattctttatgattcccatggacggtaacctgccaggctcctctgtccatgggtttttccaggcaagaatactggagtgggttgccatgccctcctccaggggatcttcccaacccagggatcgaacccaggtcccccgcattgctggtggattctttactgtctgagccaccagggtagcccaagcaatactgtaacacatt

SEQ ID NO: 56644 - DNA, 884 bp, Bovine  19866881326986
  misc_feature (1)..(1): n is a, c, g, or t
ncgggctaatgggaggcaggggtgtcggggtgacaagcctcttctgttaagtctccgggaggaaaaaactaacaaaggagatgctaggttgctggtgtgcgcgtgtgcgaatgaacactagggggcagagtctgtccaggaatgggagcacctgtgccattttcctctgcgtttaaggatgatttttaaaagggcgagctggtagcaggaaggagggtcattgcctttagtagggccttagtcaatatgtttctaattgggctattaatctggaaataagtataaaataaggaacccagtgggtaggttgagagtgaatgcaatgtgaataatgaacataccactgaatgacttttttaaagcatcagttgtctcataatctttgtgcttctttaatatgaattgacttctgaccactactgggcaatttgtcataagggagtaggtctcagtattgagaaacaccaaataatattttaaaagttttctagtacattgtgtggggtgtatctgcatctggaaaatattaaagaaatatatatgcaaattaatgtgatggtacacatatactgacccagagatgcttctcctcacactcacttccactctgtctcaccaccggaatgcagcatgcactgcagagatggaaggaacacagctacacgctgctttcttgattgggagttaaccccggtaacaggactcagccatcatcaaggcagtgacatttggacatatttcaatttacagtggcctgaggagattcacttggttagaacaccacttactaccatatgactatatgttaataacactgtgttgcatatttgtaaattgctaagagagaaaattttcaaagtcctcatcacaagggaaaacaattt

SEQ ID NO: 56645 - DNA, 1102 bp, Bovine  19866881400544
  misc_feature (1)..(1): n is a, c, g, or t
ngctgttctgcagggcaagagagagggattaaaaggcgatgaatttcagagatcgtaactcatgtggttgttcacagtagactggtctgggatggtgctcagatggtcctcaggatggtgcactgtggtttcccaaatgttaacaaaacaattcattggctacctccaaggagctccttgctgtggggcaggaaggaagcctgaggttcatagtgtgatcatacagtgtgttggcttcttgagctaaatcttcattctccccttctcgcctccttgaacctttgacccatcagtcttggttccaatctctaggttctagtagagcaagggtaatccctcttccacgtgataggtattccaagaaagctatcctgttgactggtcctcctcaaggtacacatccccttccctccaaccattcttcacggatcttgctgttgaagccctttgccaacttggcagtcaccttccttctgacgctttccattgtgtggtggggtccttcctaaaacatgatgaattgcaactggctgtcaccttgacgtcagagataaaggcctgtggagaaggagacacaaactctgtgtttcatgtttataaacagtaacatgtactcatagaagaatattgaaaaaacagaaaaagtataaggaagaaaaacgtaaatccctgtagtatgatcttctcaagattattagcttaaactttggtttaatttcttttacttttttcttctctgtatatttgttaatattttttgatgggtaacatataggtctcttcttttcatatttagctttttcatgtcattaaaacttctcaccacccttattttatttacctatttcctgagataataaattgtttccagttttccacttttataaataaaatgcattgcagcacatacaaatcttgtttgcatgtctcatttccttaggatactgggatggaattgcagggtggaaacatttttgagggactcttggtacgtgtggccagattgtccactggaagagacttatccattcctctcaatagcccccttgactggggtaaatgaacttgtccatttcggtgtgtcttcactctatccagagta

SEQ ID NO: 56646 - DNA, 992 bp, Bovine  19866881858802
  misc_feature (1)..(1): n is a, c, g, or t
ncttgttccttatttgaccctaatgacaccaaggaggccatgttaaggcaggtgctcttgatgggattaatgactgtgattggagtaagatgaccagatgttcctttttttgcctttaaaatgctgggcctccacagcataaatcatagaggccaactaattacggtcaggggagtctgcaagttcaggataacttcctcatctcataggttttttaaaaagtccatacaacatgaatccaccaaaaacaaagaccagatgatacactgcacctcataagatataagagcatttaagtaactttccaaaggtcaatagattaaaagtgatggattcaaagccctgtgtaactaactgcaaagcccactttgatgcttttttcccataactttctctgtgcacagccctgtggatgggaggatgagtagtagcagggaggagtgggccgactaggagaaatacccagtgctcagatccatagccagccccagaaaatcgccagccttgcttccccactcccttcttcctcaatgaacccttcattccttagctctcccctccctcccccacagctcttatgttcctccaggctgctgcttaagaaggtttttgaacagtgcccttgagatctcaggaaaagagaaacaatctaaatcgaaaaagcaaataaacattgaaccatcttccagctgttctgtttgaacagacagaggaacccgaagcaaggcccaggagtgttaagagttccttttcaaagcacagctcagagagtgctcatgcttaataaaccaatggagtgagacagaatgtagagactggggaaagggtcattgcttgacagatcaatgccacaaacataaacagccaagtccacacacatgcaaatacagattgaggtgctgctcggggccaggaagcatcaactgtgtctctggaactttgtggttccaagcacgaagcctggctttcccacttggctagtcacagcatct

SEQ ID NO: 56647 - DNA, 2358 bp, Bovine  19866880340787
  misc_feature (1)..(1): n is a, c, g, or t
ncttttatttttgtagcttttcagtaagtttgaaaccttccttttattttaaaatttagtattttagatagggagggcctttcagtgtatctcatctgcataccacaacaaatctaaatcaatcactgtttatattcattcgtttattcacaatagaatgttattagtgaaaactccaaataacttaacttagctttcatttcatatctaagaatctatttcagatatataaaaaggcatcaaaaacaacagtcatgtaattttccttggaaaataacataatttgagtcccttgggtgtaccttctcaatcacatttctctataatccctcaaagatgactaacatgttgaatgtatgtttttcattcccatgcatgtccttatacttgtatttaccatcatttccaaccacctgtttcccttgctatcccctactacagtgcctacaactctaaatccttaatacccagcctctcttaaagatctgaaaggccatagacacagtcatagctaatgaggtgtggtagaagtctctgaggaagagtgacctttcccaaatgaaaaggtaaagattttctgtaacatttttgcccttcataattttgcctttcatgtttccagcttggtacacagacttgaggctaaggtaactatcttgtcatcacaaggtgacaagaatgaggaagaggacttctatgcttcctcatgcaatagggaagaacaaacctgactctatagtagctctgttccttttactttaaaccttgtgctctgaagaaagtgaaagtgttggtcactcgtcgtgtctgaccctttgctcgtctcaggatgccctcatcgtcccattcagcttctcagctcatccgtcacccatggaaccaatccttagcaccaattccttgcatcagagtttctctgacacttgaactatttgaagtggctcttatttccttgactataagccggtgatactttttgacaagttgaactctcagtcctaaactaaaattcctgcacattcatcagacgagcattgtagcaggagatatgattgggacctgagataagtctgatcccctgggccccaccccagcacctactgtaatatacttcctgaggaaaggggcgattattcccattgtaaaatgcagctggcatgcatcctgaggaaagaggggagttcttaatgcttctcctccccagaccattgatttgaaggctccaaggcagaacagtcttgattcttcttggtcggaaggatgtgatgtttacatgtcagtttctcttccaaatagaactccttattacctccattctattctttctccaactgcatacactgggaggggataaacatcttttgagcttagattgctggttcatcttgacctggcagaagagagtgtatctcacttgggtgtgtgggactaggaggtggatgcagtaagtaggtttgatttggaagcagttgagtatgcttgagttgttcatgagattttgacactgacgatgtgagaaaaacagtgtgtgtggaaataccgcagtcaataaatgacactacatatttggggttttattttcgacgtctttatctccctcccttgccctctgccctccttccctcccttcttccttctctcttcttgccgcaagaagtcaattctgactccatgttggaattatttctttgacttgctttccattgcttttgctattataatcacatgtaaaggcctgcttcagagagttctgcccctctgcctgaccgttaaagtgccctagctcaggaccctgtccacctgtggatgtcaggaagaaaaaaattaacacatccccccgcctgaggcttgccattctagggggtatttgcaagattaatggcctttttactttgtttcctcacctccccccatccctgatctctgatggataaaagaacctggcatccagacccagataagagttatttgcagatattactctgcaatcttctcagtcagccagctctccaaataaagcaattccttgcctcaacacctcttggattcattggcctgacatgcggcaagcagagcgagcttggactcagtaaccttcttttttctgacaagagcaatcagattttcttttgagaaatcacctctgtcccactcttggttcatatagtttggtagtattaacactcggagaaggcaatgggaacccactccagtactcttgcctggaaaatcccatggacgcaggagcctggtaggctgcagtccatggggtcgatagagttggacacaactgagcgacttcactttcactttcactttcatgcattggagaaggaaatggcaacccactccagtgtt

SEQ ID NO: 56648 - DNA, 1890 bp, Bovine  19866880403518
  misc_feature (1)..(1): n is a, c, g, or t
nacctatatacagtaaagtgtgtgtgtgtgtgtgtgcacgtgccatgcatgtgtaggcataacgcctgcagacagtaaatgctcaataaatgtatatatatatttactgtaatttggtttcttttgattctttttctgtttattgtcagaggtaataaaattaaaaataaatgtattttcttaattctaagcacttactgtaatggctttattttctatactaatggaggatggaaattttaaagtgtcttattaagtaattgtatatgtgaagtggtatattagttataaatataacaaacctttaaggaccaaagtttaacagttgatgtgtattaaaaaataatgttttgtttctcttgcttctttttttgggggggggggtggctttgccttctgttactttcttgtttttctcatatgttttacattagcgacattagtactgtaagattcacttaatgtatataagtgataaatatgtgcatagcattctagtggatgcttagtgcctgccctcagacatttctttgtatagatgaacagcagcacagtcagtcatccagtcaaactatatgagactgttctttttaaagacaagaacatttttatttttagtcttactgtttcctttgtttgatatgtttaggacagacccagcactcagtcagtatttaatgacataataaatctgttaacataaaactgagtgccaaatgaatacagattttctttgttataaggtctcatcctaaaagcctgatcaccataggcagacaataactattcaaacaacttaaaagatagtggagtttaagagaagttgagtaggagccttctgttgtaatgttttcagatatttctcttaggcagtgatttgtcttatgtttatttaacatgtagggaattccgaatgaaagctggagaataacaaaggtaaatgaacgatatgaactctgtgatacctaccctgccctcttggttgttccggcaaatatccctgatgaagagttgaagagagtggcttccttcagatcgcggggccgtatcccagtaagtgtgaagctgtgctgaagcttccccattgcttttgtgctgcacatagtgcagaggataatgaataggggagtgggtgcgggataaaaatagctacagcagcgggtcctctgtggggctattagggaatgagttattgagtaaaattaaaaccagaggaaagacttacactaaagaggtttctggagagtttgaaatgggtataagagagctgctcagaattgcatggctcttaacttgaagtcaaacttggctctggtattattcactatttctttatcttatacagttggtcatagtgataaatgctctcttcctttaaatcttggaatgaagaaaactgtacaaatttgtgatgaatttctgtattctggaaagatgagttctaataattttaggtacaaaaatgtgtagactctgaacactatagttgggcatttttgctgaactttaaaaatggagtttacctaagctcccttttaatgtattttttccctagagacaacacttttaattaatgactcttctaaatcaatatctgattaactaataagaccaagttttccacatgccagagttgacttgaaagaaaaatgatgattttttatagcagcttcatatttcttttcatggttcggctttgaatccagttagaatgtaaaaagaaagagttttattgagtaatgttttgggaagaactctagagaagcatgtcaaagggtgtgttgccacttttccccccattaaggttttgtcatggattcatcctgaaagtcaagccacaatcactcggtgtagccagcccatggtaggggtgagtgggaagcgaagcaa

SEQ ID NO: 56649 - DNA, 1099 bp, Bovine  19866880404532
  misc_feature (1)..(1): n is a, c, g, or t
naagatgaaaaataccttcaagccattatggactcccaatgcccaatctcataaaatctttatattcgacgcccggccaagtgttaatgcagttgccaataaggtgagatcctcttatagtaattaagattatagttacagtttcatgagtttgtcaggaggtagttcagtggtaaagaatccacctgcaatgcaggagaccctggtttaatccctggattgggaagatcccctggagtaggaagtggcaccctgctccaatattcatgccttgaaaattctgtggacaaaggagcctggaggggttacaatccatgaggtcacagcgagttggatgtgactgagcacgcgcacacgtacacagtgcagtaggatgagtttaggcttttcattcgctaaagatacagattctaatcctggctctttacttgatagtataacttaaaaaattttatttttaattttatattgaagtatggttgattaacaatgttgttttaggtgtacagcaaagtgactcagttatacatgtatcttttctttttcaaattcttattcctatataggttattacagaatattgatcagaattccctgtgcttattgatccttattggttttctgttttcaaaacagcagtgtgtacatgtcaatccaatttaattttaatctttttagtaactttaattggcttatttgtaaaatgagaatcataaaaactaacagaagtgttttaggggcaaaactcacctgataaactgttgttttaggagcaaaactctcccttctccaaactgggcaccaaactgagtttgtgagactgtagtctgcacagcacccttgtaggaatcatgcagagttctcagtgaccagtgctgccctcttctggcaggtctctgcctgtacgaactagtcacactgaagactggcagttagttgaagcagtggtcctgatttctgctatagaataaatactagcattgtggaagcagaaattctggtccacttggaaaaatctactactggagaagaaaagagaagagagacagtttagctttaaaaaattgcctctcagataagacaaagaaaaaaacccaca

SEQ ID NO: 56650 - DNA, 1834 bp, Bovine  19866880444444
  misc_feature (1)..(1): n is a, c, g, or t
nctggctcagggcaacttaaccacaacccaccgctgtcccacacgttcttcataaaacaagaatacacatgctcacctgacttcctcttgttgctgttattaaaattatatatgataacatataggaaggtacttaaagcactgtaatttcactatccatatctcaagtcctaccaaaacacaatttcatacagaagactgaagttccatgtgcagggacatctgtctagtttacacctgacccatgcttttcttcacttcatcttaatatttgcaaagtgctttgtaatcacggtgactgacttctagggtaactgcacaattattattaaataaaaagacaaaacaaatataaaagcacagagtactacagaatattaccactattttcaaagagataaatctacatctacagaatagaatgagaaatagttggtgttcacagtaagctacagctggaaagaagaaccaaatttttctgggttgaatctttctctgttttatgaataaaatattcttttgccttttggataaaatatgcctcttatctcaggtataaaatcacacctctttgaacactaatggaaaaaaaattaggaagatactggaacagtcactgtagttatataaaattaagagatcacatttttgaaaacaataaaacttacctcttaactaacaacaaattagtgaagaatagacgttcaagtttcctttctgacactgacagcttgggaaatggtttagagtcaagatgggcacaagtacaaaattaacagcgtttcattaggtccctgttaacaaggattattctggagagtagggacagctcacatcaggggcagagggacattcaaatgtgttgcaacaaatcctagaaacatggtcatactgcaactacacagagcctgtcacgaaaacacaggacgaaaatgctctggaatcaagactcgtagaacttgatgagtacgtcaaatgttgtcatgtaactctgaaaatatactaaaaacactgaaatacatactttaagaatccatttcatgtgaattatatttcaatacaactggtattatttaaaaacagagcaactagatagtaaaaccgaagacacacaaaaaaatcactgaagacagaactagaggacagagcattccagcaaaccccaaagccgccaacagtcacaagatctcgatgctatcgtaaggatgcgtaaggaaatgcagaaggaagcaacgcatataagatggactagagaacaagggaatcacaagagagtcttacagtttttattgttctgcttcctggttttagctctcttcctccagaactacaggaaagaacaggtcaatctaagaagtgcagctgaaaccgagaagggttctgtccattctaacagacaagttattagagaaactcacagattaagtgaaagaactaggaaacaaatagaaataaaagagaaaaaattagaaatgaagaccaaattagaagaaactcaagagcaaacgaatacagtggatattaaattaaaagaaacagtgaaaagtgaaatatataaaaaaaaggaattagacataaaaaagattcaagagaaagagacaaatgatgaacagaggcaaagaagagacaacccaggggtaatagcagtcctgaagaagaaagccaaaacaaagaaatgaaataaatactaagaactatgattaaagaaaacagtcatgatgcttttaaattgaaattcccaatgaaaacagcacacatgcatacctgataatataaacccaaaatatacagcatgaagacatattctggcaaaataactggacttgaaagaaaa

SEQ ID NO: 56651 - DNA, 1127 bp, Bovine  19866880447831
  misc_feature (1)..(1): n is a, c, g, or t
ntcttagttattgcaggttgtctgtctgttgttgttaagtcactaagttgtctccaacttttttgcgaccctatggactgaagcccgccaggctcctccgtccatgggaattcccaggcaagaatcctgggatgggttgccatttccttctccaggggatcttctcgacccagagattgaacttgtatctcctgtattggcagatggattccttaccactgtgccgccagggaagccctgcaggttgtctgacagacatggaaatctaaatgcaatgatacagtacagtgactattgccattgttctcaaatgtgtccatctactctaacgtggcatgattagctatttttgaatgtattattaaaatgaccacaaaggacattaaaaaaggggccatctgctctctgttaaatgtagccctgaagtctcccctggattagtgaagcaagccactaaatacttcagtgggacttcaaaaagctgagttctccctaataatcactatgggatgaacttcaaaagcttagaggtttcacttggctcaattcccagaaaatcaagttatttaccaaatcttatttatgcaaactatacaaacacattttgatctgcagagtactaaaataatgttttaggaaaatgataaccttaaatgaaaagtctaccacataagaatgggaaaggtcaactttctctggtctgattatcttgtctgtctacattggtcaaatcagatacacacctattaccagatctgctattactttatgactatgaatctagaaaaacatacctaaaatttgactaattatgttgagtaataatacaaagggtatctcacacacacacacacagtattttagcttctctgtttctgttgtttggaattacaaggtggagtagactaaattatttttagctgtcaaccactttttaagacattttttcatctacaaaagtttctagtacagtttgggctcacaagctgactcttcatattaattcatttgaatagagaattcagacaaaggtattagagaattcagacaaagtcacataggtaactgcggtaactggtgttgcttgagtctcaaatatattttgtgtttattttatagactatata

SEQ ID NO: 56652 - DNA, 919 bp, Bovine  19866880472568
  misc_feature (1)..(1): n is a, c, g, or t
nccatagacagcagcccaccaggctcctccgtccctgggattctccaggcaagaacactggagtggattgccatttccttctccaatgcatgaaagtgaagttgctcagtcgtgtctgactcttggagaccgcatggaccgccacctaccaggctcctccatccctgggattctccaggcaaagtactggaatggttgccatttccttctccaagaaatatggcagttttacatattatcctacttcttcaacagtatatacattgtgatttaacacttctgtaatgattggggacaacatcatgaaacttcactagagcactgggttccagaaagcagaactgcttatgccatctggctttggggaaggtttgggtatgattctttgttaaaagaatattttgaagtttgaaatgagaaaaagagactaagtggctggaagaatatgagcactgtttttgcagcatagcctcaggagagataaagtgaattgattcagagtacagttaggctttggggactgcatttctgcttctgagaaggaggaaacaaagatgaaagagaagaggctgacatgggtgctgctctcctatgaatggcattttcctgtaagagaacaaatccaaatgtgaggtcagaaaaactcaagtgagcaccctaccctgctccaagctaaggcatgtgcttatagattcccaagctcacttttcataaacatccagagttcttcatgccctcaatgcttttaagtcttccaagtaacctcttattttgaactagaaatcatatttttaagtcaatttttaaaatataatcatggtacacttcactgctgtaataggtagaattcgggatagttcccaaaatattcccatccctctccttgtatgcaaactttctcccaggactcaatcagaca

SEQ ID NO: 56653 - DNA, 1124 bp, Bovine  19866880487468
  misc_feature (1)..(1): n is a, c, g, or t
ntgggaaacattaatgcaagaacagagggcctggatctaaatgagaaaaagacctaatgagaagaaaatgggaatttaagtgaaaattacagggtgttgtggttttttcatgagtataaatgtgctgcagttctttaaagctgaggccctccttttaaagactgaagtgccaggtttaatgttactactccttgggagaaaattagggccccttgaaaattaaatcatcacttttacagtcactgccaagtttcagtttactgatagtagtcttgtggctgggatctaaaagagttactcctttcaaaactgtgcaaggcagtagctcaaagagtggataatccaaacctgtgtcttgaatatcataatctgtttctcatgataccagtggtactaagtagcattcttcagtgtcatggaaagggaaaccaagaaagcaagagtctgggtctcatgaggacttggacctggaatcagcagctttgactcccatgttattctgaaattgaaatctatgcatatgcatagatgaaagaaactcaaggaacagacagctatgccctgtatatctggtgatttggggacaatcattatttgcttgatcatttctccttgagggactttgttgtcaaattcccaagaaaatgctcccatagagatgcatttagaaatcctctaaattaaatttgtcttaagcacagggacagctattcttttgatgacaagaagttgtctgcccgcactgttctttccctcaggtttttctggatgaagttgttcagttgctgagtcatgtctgattcttcgtgaccctgtggatcccagcacgccaggctcccctgtgcttcactgtctcctggagtttgctcagatttatgtcctttgagtcggtgatactatctaaccatctcatcctctgctgccctcttcttcttttgccttcaatctttcccaccgtcagggtcttttccaatgagtctgctctttgcatcaggtggtcaaagtactggcatttcagcttcagcatcagtccttccaatgaatattcagggttgatttccttgaggattggctggtttgacctccttgcagtccaagggactcttaagagtcttctctagcac

SEQ ID NO: 56654 - DNA, 1878 bp, Bovine  19866880565941
  misc_feature (1)..(1): n is a, c, g, or t
ntttagaagctaaaatggagaagggaatttccataaccaaaggggggtggtggatcaccccttgtcatggcacaggtctgcagtgaaaagccaccatcagaaatacactggtcttttcactccttacatgcacagcacatctcatcaatcctcgcggcgcttgcagagggagcccctctaagggggtgtttcaggagatgactgatagtgaggagagagagagaaagtagattcccctttagaaaaggagagacagagcagctacctctggcttcttagggcactaagcctccagccgggagaggccagacacctcccagcacggacactgttgacataaagttacaatcaccactgaagttggtttcatttcgcatccccaaaaccccaagaaaaagaggcagcctcagcttccttccaagtaggaggagagcaaaaaaaaaaaaaaaatgaaagaacaaggccataagcagacaccttccttgcagccgctgggatgtgaaggccacatccagtcttggcactcaggacagagatctgtcttctctggggctgggcgcctagttccctgtatcacccccagaaacacttaccaggagactgtgaagcatacaaggctgtattattgggagacttgcagacagattataaatttactgaggacaatcaaggcatttagatgcttttggccgcaaatgccagtgacacacacacatacaaacctcattcttctttccattcgagtgattctttacccactactccccacccccagcatctttctttcatgaaacaaactcccattgctgtcctagggaattccagagagaggtgaggatatagcaggtggaaaggaatggaaattaggcctgaaagcatgaaataaccccacaggctaactgtatccaaggataaaacaacaaacattgagcagtttaactgttagctgttatctctcatctggaattggcaccaggaagttgcagttctaggcatcccaggcaaaatgtgtgtgtgtggtggaacagaacagaaccaattcagcccccagactttctagaaacttcaccaccagagacccaggccagggatacggaggaaccacagagaagcttccaggggcctggctagaggatgctctctccccagagctccttctcaagctccctccaagaaagagttcgacccagtgccttcctctcctttgggctttttgaggacatttcagcttggatggccatttcctgttgctgactttcattagggctggcttgggcacatggaagctgttccgcgagtggacacgggacttctgaagccccaaggaactcagaaacggaggaagcttgcagggccacagggctgcggggctccaccttctacccagaggccatggccccagcagctttggggggaaagcccgcacaggccaggcgatcacctgaccaggactggcatcagaaaccaatgagtcaaggactactccctttggggtggggtgtgtctgcgcctctgaggaagaacttccagccagaagcctaatcacaactctcaggtcgggtactctgtcgccaggagtggcagaggacaaggcactttctaggacgaaaaactggaaacagccccttggtgcctgcacactttactgaaggctgcaagtcagcactctctgattgcagtgcctgcggaaagaagctaggtggggacagtgggggagtctgtagggaaaccagggagcaggcctctcaaaaacattccctcacccgtcttggggagaattccccaagtttttgagtgagggggctctcagggaacttgctctgttagggatgaccacttgtgttctcttgacccaaggagaaggggccacttcaaaga

SEQ ID NO: 56655 - DNA, 2238 bp, Bovine  19866880584206
  misc_feature (1)..(1): n is a, c, g, or t
ncaatccgagtccatcaccggtagacggatgcaatgcgacaacggtacaacggggtgtcattcagtaataaaaaggaactgaaacaatgatgataaaaacaaactgaacctggaaaacagtatgctaattgaaagaagccagacacaaaggccacatcccaagcgattccacttctatgaaacgtccggaagaggcaaaccaacagagattacggagtctgctagggtctgagaggagacgggaatgggcaggtagtaactactaacaggcatggggtttcttcccaatgttctgaaattaatggtggtgatgactatacaactctagatatgctgaaaatcactaaattatatgctttgaaagtgaatgttatggaatgcaaattatagctcagttttaaaaacattttttttttaagatatagtaaatcctacttgaggctctcaaaacctaaaagtatctttggaagttatccactgattatctaacattcaataaattcttgattggcttgtgtgcatagaaatatttactgaagatgtaagggtgattttaaaaatttagcatctatcttcaaggaacttctagtccaggaagcacttactaatggccattatcgcagtgttttgtatggtttattttatttaatcctcacaacagtaagcactagtaagtacataagttaagtactattatccctactttacagaagctgaaattaacttgctcaacttcacacagtaagtgaaagatctaagatttgaacccaggcagcctagctccagaccaagcattctttgccactaggctttacagaaaagcatgaaaaacctatttgagagtcacattttttaagaatggaaattgaagcagcgggagacactaatcaagataatttagaacttcatacataaggcagatgtgttctgaggaacacagaagtaaaacttgaaacgtaatcgttctacatttcttataaataccaaccactgaaaagtggtatccctcggcaagtggggtaagaaatttaactttctccttaatatcttctcagtgtttgaatgttttatgctattattttacaatttaaaaaaaaactaaaatggttcatatgtatgagaatgtatttgggaattgagctgtgcgttcattcaaatgtgtattttttgctaattatatcttgctgcccctgcttttgatggacttccatcctgcaggaagtgtggtaacaggtacacgagggctcctaagacaccacatacttgagttccattcagcagacgctgcctccgacccatcctcatgacagaggtgctttaagatggatcaagctcagacgtgtggaaagaagtgagcatactacagtatataaaagaacacatggccaaaggcatcatgcaaaagaacaactgttccgctgaacgccatcccaggctgcactcactggagaaagcatgtatagagacaggcgggacaggcaggggtcgtgtgttacctctttgcctctctgctgttcactgttacagaggaatgttccgaataaacagctatacaggtggtccaaaatggtaatgagaaaatactcattgaattcaaatgctgtaggaaactgcaaatcaaacagcaaaacacagaaataattaggacagcttcccaagcatgttcatccctgtacattggggggtgctttgtaaaacttcttaaaattaggctaaacagtattcaaaaactatatatttctaagctattacagtattattaatattaatatttgcttggttttcagcaaatatcactttgctgagataatttctcctaatatctccttttcttgtacagtaagaatctgaatgctgtgatcttgctgttcttctgtccatttatatcagttaaccctcaacttgaggctgatctgacttgtctttctctgccaagaatgaccataagcaacatagtaagatttttctttaaattttcaacagcatagtttttaggaattacacaaaaaatatcaatgtctcgagaaaaggagatgtgtggctcgtttaaaagccaaccttactcatcttttcaaggaacatgcactcaaaccatatcttataatccagtactttggcagcctttcttaaaagagaaaattcactctctttaactaggacaggtgtttgactggatgtcttacacaaacaacacaatttgggggtaatttatcaaggaccaattacagatcccaggaa

SEQ ID NO: 56656 - DNA, 1699 bp, Bovine  19866880612383
  misc_feature (1)..(1): n is a, c, g, or t
ntattttcgaagcaatgactcgcctagaaagaatggcagtcatgaatggcatgaggatgtcagacaccctgggcacatccaatctagaataagagaaactggaaaaagagagtcttgctttgttttattttttaattcattaatttgtcagaatacaagttgaagtgagaaaactgttttaattcatgaaagcctagattttatttcttgtgagtctggtaagtcaacccgcaggtctggggaaaaagaactccaaggttgctatgaagagaaacttgatcttgaatcaaagaagcagattcatgtctaaaaccaagattggtctaaatttttctccttgctgttgcttattttggattcagatcttagatggagcttaaaggaaagaccagcagctctctgccgaaaagtgattttgaatgtactcagatccaggttgaaggtgttttccaggctgatgggtgtcttcttagtacctggagaaaatataggtgttcataattgttagaatttttgtttcaagatggcaaagtgcctaattttctatgtagttccactattacagtagtgtcaaacctcttgtaaacaagtgtttggtaaatgttgttgaactaaactggtgagcatgcattattgaagggacccaatcctttatatttctgtgattaaatgtacagtgcaccaactgtgaaacattggtctttaagatattcttttggttcaacattttaaaattacacttactaagtgtttaacatgtcaggcactcttctaagtgtttttttgagtaataactcatgtttcctcataatccatgatgaagtagataggtatgaccttatctagattggacagatgaggaagttgaggcataagatggagatattggccaggtcattcagtcatgcatgtggagtccgggtatgaacagagtgaatgaagccaccgcccatgtatatagtcatggtaaatgactacatctaggagaaggtaattatacaatgtcagactccagctcacacatgacccaggcttgagtttggaagccacgttcaatgagacatttgaaagtcaataatgattaggatcatcgtctgaagtgcagatagaattcagaatgaatgcctacgggccacaggttattctttgagacagttgccattttcccatttttttaaagatagaaagtgcttgaacatataggatctgtgagtaacaaatatgtttcaacttgcatgccaggggagattgatagtagttacccagaggactgcctaaaggattctaaggcaatattcaaactgggtgggaaagagggccatggtggttcattactgatatccttaaaattaaggaatccaaacctggaggatctggaatatagattcctggtgaaatgttgacttttcccatggaaaatgtatcaagaactgattacactgtgagtgggccctttatagaagaaatttaggtttacataagttcattggaacttaaaagcctcttgatgaaagtgaaagaggtgagtgaaaaagttggcttaaagctcaacattcagaaaactaagatcatggcatctggtcccatcacttcatgggaaatagatggggaaacagtggaaacagtgtcagactttatttttttgggctccaaaatcactgcagatggtgactgcagccatgaaattaaaagacactta

SEQ ID NO: 56657 - DNA, 2432 bp, Bovine  19866880692041
  misc_feature (1)..(1): n is a, c, g, or t
naattaccttatacctatttgtaacattactgcagtttttatgcacaatagaagtagtcccagtttttcttccattaaaagagatcagaatggtaaatataaatcatgctcatttacctcctctgtgacagaggcagcttcaacaacacagcttgctgagatttattgcaccagacaactgtttaggatccatggaagctgttcggggcgcagataagcacagcctaacctgagaaatgctaagtctacttcggtgtggtctggatgaataggcattcttcctggactatttcctgaatggaagtaatctgttttgcagtgggtctgagtgccttttgttacagacactctatgttctgaaccataagcaggaacttcaggcttcgatgccatcaagcctcccctgaaaggccagttaacagctgtgaaagagttagtgaaagcgtttgtcattcagtcgtattcaattctttgcgaccccatagactgtagcccaccaggctcctctgtccacgggattttccaggcaagaatattggagtggatagccattcctactccagggggatcttcctgacctagggatccaacccgagtctcttgtgtctcctgcattggcaggcagattctttaccactagccccacctgggaagcccttgatgacggtataacaaacagatctattcacagataacaaagtgttagtcattcagtcgtgtctgattctttgcaaccccatggactatagcccaccaggctcctctctccatggactttttcaagcaagaatgctggagtggactgccatttctttctccaggggatcttcctgacccagggatcgaatccaggtctcctactttgcaggcagtttctctaccatctgggtcactggggcatatacttttaatttacgactgtgaaaagatgcatcatataagttaggaatttgttagcatatataaactctagagaaaagttctaagaaatatatttgttcatatcagttagccttggatcatacacagagtggcgagatagtcattctgcttttgatacgtgtctatggactgaaattgattggtttggccccacggtctgtaagtggaatggttctgccctggagtttgattactaccaacctagtctaaagagagttactcacagacagggccaagactagaatgaggaaatcaagacacatagggcataaactttaagagtgaactcgttctcaagtcctacatttacccagtgtgagtatcttcataaattctacacttcactgtagtcccagtcctactgacaggaaagctgacatttacacagattcagaattgctaatttctaggaaaaagtaatctgtttttaccaatcagtcagtctctctgtttaatttttgtgtgatagagtccaaacaatatctgagacccttggtcagttggtattaaaatcctttgtaccaaaggactcattcaaaatcatgtggctagctataataaaaaatatttaacatttatcaagtgcttactgggagctagaagtggagctaagcattttacattttatcctccacatattcctattcccatggtggagatcacccacactgaggcatagccatttagataatgtgaccaggatcccaaagtcaccaaggtcccagagtcaataacagattcaggacctaacttcagagtctgactccaaagtccccattcttgaccctgctgttatggcaccaccatcctggccttttaccgggttatttctagtccctccctccatcctactcacctccataagctctggggtcatgaatcctcccttatgatgtcatctggtccagggagcctccctttctcccaacagcttattgtcctttcactgacttcccttccagttctttccaccgtgcatgctgaaaactcttttcctttgtacaaaaaacctctccccatcctgtttccacgtggcaagccactgcctttgcctccaacccttcagtgaaacctggttctctcctaagaacctttccttccttcttttcctctcaggtaaaagacggataagcttgatgtacctcaaagccctgatgtaccacgatgtaccacttcgtgtaccttatgtgtcagcgttatcttagttccacaccgcctctttcagcttctccctcctcctctgaaattcacaccattcagttttattgcctttaatacgttttgtcatagctgtctgccgctattcaggtcacttccacgctttgacagctgccaaggttatctcttcctcccatctactgtcatcaccccagcagatttcacattcctgaaggaaatgcttcaaacacgccagctcttagtttcatgacttctgatttcattagcgttcacctcagctcctctgagaactggattcccatggtctcacc

SEQ ID NO: 56658 - DNA, 2479 bp, Bovine  19866880734812
  misc_feature (1)..(1): n is a, c, g, or t
ntcatgttctggaggtctaggaattcagcctagtatctaattcatgttacagggaagcctaacatccctttcactcgttaattccagagtcaactaaagttgacttttactcaggtcttttacttagtcttagcatcagcctttctaggtcctatatttgtggaattgatttttttacacagaatttttaattaaatgaagcacactataggaattgattcaccctttgccaacaaaggtccatctagtcaagtactttggccacctcatgcgaagagttgactcattggaaaagactctgatgctgggagggattgggggcaggaggagaaggggacgacagaggatgagatggctggatggcatcactgacccgatggacgtgagtctgagtgaactccgggagttggtgatggacagggaggcctggcgtgctgcgattcacggggtcgcaaagagtcagacacgactgagcgactgaactgaactgaagcatttccaagtaaagccttatagaaacgtgaagggctgtctgaggtataatgaggtttcatcagtagtgtgtttggacagagtctaggaccattatgctgaatgtttacataatgaaaacattggacggggaactgttattaaatgggttccaaatataactgaacatcagactgagactgggcaccaattaaatatactttctaggccccacacctaaacaattctgatttagtagaattgtggtgaggcttcataatctgctttttcaaatgcacagtcaatgattctgatacagctggtcatcctttaagaaactgtttccagcccaactcagagattctatagcaaagcagaaccatggttaggagcaacagatgacaagaaaaaacgtaggttaaaaggtatctgcaatccaagaagaggttaataaatttagggtaaaggacagccaatggcaaaatttttaaggaatgatttgtgccacgcacatctataaaggacaagtggaaacgctaggaaattgttccttccccaagctttcactgagaatttactgtgggttaaagtaaataaataaaatgtattcctcaagcctctgaaactcactatctagagttcggtattcaaggtattgaaacagccagcaacacaaacattaatgaaaaaagtggtataaactaatacaatgttaagcacttcttagaaatcatccagtacttgctgatatttgacaaaattaccatctccacatttttaagcactaaaggaacttaagattcaagtctatgtgtggctgcttctccgagaatcaatccttaagcaataagcatgtgaagacaaagaggacgtgacttcttttcacttaaatgtcttcaatctatacctaaatacaaatcaacagagctgatatgaaaattctggtgctacaaatatacagtttcccatttcctttcctatccataaccataccttcaccaaaccagggtctctgcttttgttcattacttccttccacatacactccacctgctttaaagtgtcccaccgagccttccccctgttccccagtcctataaaactttcttccatctccttcttacaacactaggatcccttggtaaaaaagcagagtaagttttcaccatttataggtatacaggcaaatgagtggatttaattcaaagatctaagttgtacaaaaaaattcagagttcaaccaactcacctttccagctacaaatggcatatcacccaagcataatcgataatgtggctgtacagcaaaatagttcctagaacccttctgcatggaagagaaaaaaggaaagaacttttactcatatgacggtaagagctgcctatataagactaacctgcaacttcacataactgttgggctcctgcttgttttatctctactggcattacggccagtgctcctcataatacttttcaacacacatcttaccccaaggaaaggctaagaaagaaaaaaaatagtacctgacaaaacagcagttagtgtcagtagagaaattctctgtgtgtctatatgcacgtacatacgtatacacacacacaaactttcaagagcaaagggtaattaatgcaatactgaataataactaatatttgtgcagtgctacgtagttctaaaatgttttcatattcatcatctcactgttagggttaaaatttagaaggtattacttatccccattttcccaatgaagaaacttagaatgaaacagattttactcatccaagattgacggaccacatggtttatgagtactttcacataaactatgcctagcaataaacagtaccttatggttcttttttcataccttttgtgggggttttgacttcttttttttaattctttttgtattgggaacacatgaagttgccttatcttcatagataagtctatttacttctagaccagtctgcaactaggaaaaacatgagagcctaaagt

SEQ ID NO: 56659 - DNA, 1736 bp, Bovine  19866880735379
  misc_feature (1)..(1): n is a, c, g, or t
natacctccccccagaagtgataatggtattgtcacatcatcctttatccccacctacctgaggttgttgtaagcctttgagtattgaacagctaatgagaaaaatataaatggtcaacagggtggtgaaatcaggcaggatgttgtatgagacatatactaaaaagtgacatctgatgtttacataaaatgcacatttaattgggtgtcctgtgtttttatttgctacaccaggcagtcttgcaacaaacagccatttgaaggacagggacagtaataatcccagtatgtccctgaaatgacagccccagggcagcccttgacagaacacatggaactgtcagccgtctctgatcccctgacccccaggctcaccccaatctagacggccttccaggttcttaagggaggacacagcaccaaatcagcaagttctagagtctggtatatcttacttgtatatcttgagtggtgaaaatcttcggggaacttccctggtggtccagtgattaagaatctgcacctcaatgcgagggatgtgggttcaatccctagttggggaactaagatcccacatgctgtggagcaactaagcccatgcaccataactatgagcccacatgtcacgactagagtccacatgccgatacgaaagagcccacatgacgcaacgaagacctgatgcaagtaaaagaatacagtttagagttggaccataaagaaggctgagagctgaaaatagatgctttcaaattgtggtgctggagaagacccttgagagtcccttggacagcatggagattaaatcagtgaatcttaaggaaatcagtcctacatattcacttgaaggactgatgctgatattgaagctccaatactttagccacctgatgtgacaagctgactcactggaaaagacactgatactgggaaagattgaaggcaggaggagaaggggatggcagaggatgaggtggttggatggcataatcaactcaatgaacatgagtttaagcaaactctggaagatagtgaaggacagggaggcttggcctgctgcagtctatgaggttgcaaagaatgggagacgactaaacaactgaacaacaattttaaaatatgtttttttaaaaaaggaaagtctttgggggatgagagaggtgggattttagaagctacctctaggtccactgcttcaggctgaatcttacggagtagctcctgagacgttattcagagaaaatccaagctccagtgtgtcctgtataacttctgctagccattctgccctggggactggcttcgattcatctcagcctgctcatgctctgcccaaaaatctaagtggctcagaagaggtgataatggcattttcttgtcttcctttattcctcatctacctgggctcatattaagcctttgaggattgaataactaacaagaaaaatataatttgtcaacagtatgatgaaatcaggccaaggcaagacatgtgaaaatgaattaacatgagcagggtagaatcttaattttcttccctcagtcctggcttttgtgcttgccacaagtctaatggaggccgagatgaaccatgccaatgcctgggatttgtgacaaaacaagaggagataaagagggatgaaatcatccatggaagaaggaagcaattaaccacataaagaaagtgaaacatcatcagtgataagcctcggcagcaatttactcaggtttgggaa

SEQ ID NO: 56660 - DNA, 1587 bp, Bovine  19866880771036
  misc_feature (1)..(1): n is a, c, g, or t
ntctaaattaatgttttaaaaggttattgctattttttcccatttagctggcatcatttataactcttatttagacaaggtcctacattattttactatttcttttttgcacaaaagctagtatttgattgcggttagatcatcggcttctggttttcattagacaaacctgaaataccctattattaagattaaacaaaaaaaaatagttgttttcttattctgaaacctattattttgaggctactctgaccagaggaaaagaagtcagctttgcagaacctgacagagagctccttcaagaggagcagtataatctcatcgatgctgcacttgggtcgcttgtgtatatgggtcctttcctagaactgacagtggggaagagggataagttaattccttgacatttgcaatactttctttattaagaaagaactttcaaggtgcagcatatgtggtaaaatatactgtttattgtaatgcctgcatccctgtgaggtgctcctgaaaatttacaattagatggcacttggacctaagggttgtaagggtcttccagctctgtgttatttatacttcttggtatttattcaacataaggatcagactgagccattaacagttgagtggcagccacagtagcctaacaggaaaacaaggtcaagataacatacgcaaatcaggactcccctaactctcccacccattcacgtgggaacttttgcctcctcaatatctctctaatagatcagaaattctctagaggcatctcttacggaggaagagatgtatagtatgtatgtatgttattatagtaagtatgtctcttcctcctgacttattctgactggtccatgggacctcagtgacaaaccatctctctaggatgcctgcctcagccaagtgaagaggaggtgggtgccctcccatgagtgtgcagacttctatagctctaatcatatcaccctgtgatcatctcaagtttgttggtttcctaaactgggttatgagcaatgtgatgtgagggaccatgtcttttcaattttagatttgttgcatctagcccactacatgccgcatagtaggtgtttgcatgctaagtctctagcccactacatgctgcatagtaggtaggtgttagcacgctaagttgcttcagtcatgtccaactctgtgtgacactgtgagctgcagcccactaggctcctctgtccatgggattgtccaggcaagaatattggagtgggttgccatttctttctccaatagtaggtgtttattaaaggttgactagtgtcttctcagactagctttcttgactgtgccctcaccttcaccagtctcctctagttttcccacagattcccctgacaatagctggccccactggtaacgtcaaccagagcatgggcacccactgacatcaggggtctgtgtgggtcatggcccctctgccaatgcatggacccggactcaaatgctgcatcattttgttcacttattatactacctgtgtctttacaccaccacccttctttctaggacattctaagcatggccttaagaggtgataaggaaagcagcctg

SEQ ID NO: 56661 - DNA, 1995 bp, Bovine  19866880794081
  misc_feature (1)..(1): n is a, c, g, or t
ntcagtgtttgcttgtttgtttttcttttttcttttagcattgtggagaataacttgtaatagaaaggaaaaatgtaaataaagtaaacaaagggatagagatgaaagctaccaaaaagctttccaaaattaacaacccatttgtataaacatgtgaaagtaaattactttcatttgcatgaaattactattttgggctagcgtaatttttcccaagccaaatattgatgaaacctagtaaattctgtcccttttaatctaagttgaactttttttttaacttctcaagaggtaaataaatgattcttccaaaacctttgcaattttatgggaaagtaagacagaccatgcaagagagacaagattattgccttaatttataaacagtgcagaattcagattgtttttcattgctatcgaaaacagtaccatactttcaatgcaacttgatgccagttctgattgtgactttcctccttgtttctatggtaacaaactttactggatcagcactatataaaaactttttgcgttgaaacaggctaggaaaacctgactctgtgtgcctgatatacatagtaggggctgaataaacatttactggatgaaagagtaaaaaaaaagtctcagccatacaattgcgtgctaatcagatgtggtgctaaaatttgcatatgcaaacatcttcatgggacagaacaaactttagcaaaacggtaaggtgtagggttgtttttgcttcactttagacccagattgtagcacaaagagagctaagttgaaggtttaaatggcttaattgtgcagcaagttagaagttaaagggtcagagtaatgttaagtaaatgaagctgttttggagaaaacctgtaatgctacattccaggtctccaaaggcacagtgccatttttgtgtgtgttaaatcagtttaaggccaaatactggtgtttgctgacttccagagcttccttatgtttccactctttgcaaagcaacatagccaagcacacgatatgtggtgcgctgcttctgagattttgcttggaaggtatttaaatacatgttgttttttgggttttgttttgcttttagctcataatttggtctgtttttttaaaacttttaagtttctggcatacatgcgtgctgagttgcttcagttgtgtccaactctttgctatcccatggactgaagcccaccaggatcctctgtccatgggattctccaggcaagaatactggagtgggttgccatctcctcctccaggagatcttcctgactcagggattgaacctgtgtctcctgcgtcacaggcggattctttacccaccaaactactttggaagcactaagtttctggcagttgaccatttacattttaaaagatgtatgaaaattatcatccaggtaaggtgggtatcttttgtgagatcaaggaaaccttttaacatggaagagtaaagtagtatgtgggtatgtggaccaaggtttttttttttttttaaacacattatcaattaacgcaacaaatatttacagagttcctgccatgtgccagatactgtagtaggcatacagtaaacagaagttcagctctcatgaagcttacattctagtggggaaaccaaaataaaagcaaaataaataaatgttagatggtggcaatgctgtggaataatatgaggcaaagaaaggggccagctttaaatagaatgatcgtgcaagcttcactatgagggtggcctttgagcagggacctgagtgaggtacaggagagtgctgtgcacatagcagatggaagatcatcagcagcctgatctaaaagagcaaagggtctgagacaggggcatccctggcatgttctaggaacagcaaggtggccagcgtggctggagcagtaagccagggagggagagatggaattgatgtcaaagaggtgttggattctggaagaggacgtgggaggcggattgtgaaggaccttgtagaccat

SEQ ID NO: 56662 - DNA, 958 bp, Bovine  19866880811965
  misc_feature (1)..(1): n is a, c, g, or t
ntatgagaatgagatttcataaaataagccagaaattgtttatagccaaatagaaaagtaatccagatgtaggtgcccattgactaaaaacaagtcctaaaaatcaaaagctggggtgtgatagtaattggtcattttcttgtgagatcatagaatttcataaaatatttgcctaccagggagaagaaattccatactttgagtagtgtacttcactggatatataataacggacttttgtgagttttaaatggcagtataatatcttttaaatacacttcctaagttcctataacagatgaagtacaggtaatgccctactattaacttcattgtcaataataacattactaaaacaccacaccatgagaattaagaaaacatattgacattagatttttaaaacgaaatgctgtcatctctgacctgcattttgccttttcatactgttcatggggttctcaaggcaagaatactgaagtggtttgccattcccttctccagtggaccacattctgtcagatctctccaccatgacccgcccgtcttgggttgccccacgggcatggcttagtttcattgagttagacaaggttgtggtcctagtgtgattagattgactagttttctgtgcgtatggtttcagtgtgtctgaacattacccaccagatattttacaagggaaaaacattgaaaattgcttcaacattttcacatctcttatacagcccaaaatgagaagtctgacccagagataatcatcgacaagaaccaagttcataatttccgtattcagggcactttgaagggtttagtgggaagcaatcaagatgactaaggatacctttattcaggataaaaattaaggataaaggaatttttggtttcttgaaagtaagtatctaaccgtaatcctcacttacaaaaatgtctacattcttgtctacactactctggg

SEQ ID NO: 56663 - DNA, 1430 bp, Bovine  19866880817895
  misc_feature (1)..(1): n is a, c, g, or t
nttgcatgccttattaagcatatttatgttcctgagttttcccagaagccccttgaaaggttcttagaagttttttgcttctaattgtgccttagtttcttggaacaatgaagatactcgtttatctgctgatttgctgcaatgatgacatagcaggggtttatgaatattttaaaatagaaaaacctttgtattggacatatgaacactaccatattaagtattactttgagctagtggtagtcaagttatcctgcttaattaatgcatgttctaaaaagaaataatactgtatagattcatcatttaacatttaattaaacaatgtgattatttctctacaaagtttgacatctgtttcttaatcaggtacataataccctcttattatgctattatatttttctaagaaatcatagttcatatacattttattttctctacagtattttccccataaatataatcaggtcagaagttactggtattatgttttaggtattgtgtgttcagaggaatgttgacaaactagactacggtcagaagaaaaccaggagactggggaagaagatctaggagctgtgattagatgatgggaggatagtgacttgagacgttgatggctgttcccaccattaccgcccctcctccactcactgctccaactgccatgcctgtctgtccatcagggagggtgtccgcctttgtttccctgtgtctgtccggagtaaagaatgtccctctgtttctttagtccttcccacttattctgctttccctccccagcttgtagtgcgtggttggaagcttggatttagttcccgaggtctcttggaatcactgatcctgtgattttcaagcataatttaaactggtggtcagaatgctattaaattttacttgtgaaagatcagagtgtagtttttaatagtgtacaatagagaataaattgtgggctctttttcttttcagccaaagatgtaacttatatatgtccattcactggtgctgtacgaggaactctgactgttacgaattacaggttatatttcaaaagcatggaacgggtaagacttgctggattagatttttttgtgtgtacatctgtgtattgtttgtacatctttaatcatttttagttaaaacatttctagttaaatatttttctcagctataattatacagtattaattgctcagttttaatgttttttttttcccttcttttaggatcccccatttgttttagatgcttctcttggtgttataagcagagtagaaaaaattggtggtgcttctagtcgtggtgaaaattcttatggactggaaactgtgtgcaaggtaaatgttgtaatatgtatgcatttttttttggtttggaaagctttctattaaatagagccagtgtttagaaattgttttccaaaatat

SEQ ID NO: 56664 - DNA, 1732 bp, Bovine  19866880903849
  misc_feature (1)..(1): n is a, c, g, or t
ntgaagtgtactgcttagtaacagtattttgggtatttgagcttctaattcttaaggacttcattgatgccagttttaagaggccctccaaccaatgtacgaagaatgaaggctaaaatgaaaaagaaatgtagtagaagaggaatgagagagagaagtcagtgagttaatttaggtgcagctaacgttgcttctaaaacatgtgcaccctctcaggcccaccttggcagggagtcaggaaacctgggtccttgctctcttgctctgctactaaatagattaagcagatttcttcctctgtaacatgaagacgttgaacaatttctgatatgaactgtggttttaaaaaagccaaaacacatttagggtttgccaagacctcttaatgcaattgctattatctttataaacactatcagtagaattataagcccataattcagcgacctctttattatcctgaacataattaacttgatattacaggttaggctgtgtcagccatttcttaataatgtcccctttccaaaggagagcgcttcttcaatgtgctttgtttcacaacactttctcctatttctgttacagaatctgcctgaagcaatgccttttacttagtctgtttggatgtctgtcatccacgctaggctcccttatttgagggcaaataccatgacttacttatcttttagactccttgcatagggcagggattgacatggggtagatgctcaaaacactgaaaaaagtgaaagtcgctcagtcgtgtctgactctttgcgaccccatggactatacagttcatggaattctctaggctggaataccggagtgggtagccattcacaatactgaaggaatatttaataaacttaattgggcaatagcatatggggcttcgcaagtgcactagtggtaaagaacctgcctgccaatacaagagacataagagaggtgggttccatccctgggtcaggaagatcccctggaggaggaaatggcaacccactccagtgttcttgcttgggaaatcccatggacagaggagcctagcgggctacagtccatggggtcgcaaagagtcggaacacgactgaagcgacttagtacaagcagaagcgtacgtgtcagacaccttttatttgccccatctgtttggatccatgtccacccgttttcaccctgttctagccagaaggttcttgcctttcaaggtagcctactgtgtaggactttctcttacttggcttcagaatcttgttcctcttccagcccttctagaaatgctgactgtctctgctattagccctgggttcctgctctagcccttgggatttccctgaatcttacctacacctgggtgattaacccttcacccactccacgaattatcctaattgaagcacaccacctatttcctgccaggaccctcactaatagtagataagagaaggaaatgatttcagtttaaaatgtgtcttgatactgacattattgagaataaccaccctgaattttttgataaatatttcaacaagtaaatccttgtaaaggctaagtgtttttgcatacgactgaccttcactgagtgacccatcctccaagtatgctgttacacattcatctcagtgtctacaccacaaatgcattttgcatttgactaaggaatataattacttatatttacatttggccattggtgtttaaatgtctttctcatgtcttataacct

SEQ ID NO: 56665 - DNA, 1334 bp, Bovine  19866880966858
  misc_feature (1)..(1): n is a, c, g, or t
nagaatcattttgttcaaaggagggggtgctgtcactcagagatgcgtgtcaatatcagggattaagaacacctcccttgagcagtgaaccaaaagaatctctcctccagaggtggaagagaacatgccattctcattcaggaataaaacagcataaattataagaaattataagaaaagtcagtctttactttgagtaagcactcagtcacttttctatctccagcacaaaagtcacataaaatcattaccaaaaattttttaaattaaaaagatctgggttaggaccttagttctgccacctagtagctgagtgagcttgaaaaaattgtttaacacatctcagtatcagtttcttcctctgtaaagctacagaaatagtaagatctaattcataggcctggtatgtggatgaaatgagataatgtatagaaagctttggtgcaatatctggcattgggcaaaggttcaataaatgtcccctgttatttacaatccctctttctgctatggctgggcagccggaggggcttcagacactgtggatcaaatgtgtggtacatgtctgaaactcacctcttagaaggaatccttgctgtttcttgtaataaatgatatggccaatgaggaaatagcagtcagtggtatttgtgtctttccatggtaaccatttctatttacccctcttagctgaggaaatgaaggcaactgcagctgaattagttggaacatgccattcactttaccacaatgtggtgagaatagagactatcatgataaaatttctatgtgtcaggtcatgggcaatgtcagaatttggcggagaaaggggatagattaatttacatacaatgaaacttcattggctcattcttttatttcagtatactatttggacaagagtgtggcaaattttaaatatataagaagtataatcctctaagcaaataagtaattccagaatcttaaagtatttggaaactttaacgtggtaggggaaaaagataataaacaagtaaataaataagcaaataccaagtatttctagtttgtaataagggctataaaggaaataaataggattctatctcctatacttactagcagtatggtcttgaataagtctcagatccatggaataatagaatctgaagccatcttagagatcattacaaaggctttatgaactataaggcactaaacacatacgaagaatgattatcagtaatttataattgtaagcctttcctacctagtaatgtaagcagacattaaagacttctattgagagcccatttttctcctcagaagtacagtatgtttcttaaagacat

SEQ ID NO: 56666 - DNA, 835 bp, Bovine  19866881040211
  misc_feature (1)..(1): n is a, c, g, or t
nttttccctaaagattttcctaaaccgtcagatttgcttcttttgatccggcgtattaaagacagtaaagagaaatttagtcttgggaattactattttaaacaaaggcccaaaacagtggtgtctatttttaaagactcctccttcctctccagtaaccaagcgcaaggtaatttgaattctgtttccagttaagacagttaacttgattctactctacaattcagtggtctctcctttatacttgatttctatgatattaagtatacacaacatttcctttccttttaacccggtttccagttacacttttctgtgtatctgagatctgtactgtgacctgcctgaactcatggaaagttgacgacactgaaagagaattgttgtagttaaacatcctgatggcactttttgaaaacagcaatggaagaaaaaaaaaataaataagtaacagggcactcatcagatgtgatttttggcagacatttcacttggactgctcagggtatccccagaaatcacaaaccctcaaaggtgttcagggtatagtaaatcgagcaagataaattattttaatgttcaacttattggattcagttcctttctctgcaagtttttagtgacatggatttcaatctaagtgaaaggtcagctttgaagtaagtgtaaagatatttacaggaaatgaagcagaaagtgagctttcatgcattttcaaatgtgtctattattcaggggaaaacgaactgtgtcatcagtcaaaagaacaacagaatgcctaccttcttatattaaagttaaatgaatacctacaataccagtagtatgctattaa

SEQ ID NO: 56667 - DNA, 2347 bp, Bovine  19866881138564
  misc_feature (1)..(1): n is a, c, g, or t
naatgtcaatcgatagcaacaccccccagatttttaatggtgaagagagagtgccagctcccctgggtggtctgcgccagtgctcagctgaaacaggacccaagaagtgcagctgaaacaaagagcttttctcttccctcctgccctgatgctccatccagcacgttctccaaaggcctcaccctcccatcctcaggctctagggatggccatcaggaggcaggtacttgagctactccttcctgaaggatctcgctggggccatctgtaggaaggcatctgctcacacccttgggagcaaatctgaatgcactagcaacagtgagtctgtgcctgtttttctggaaacccaactcccattcttgactttatttctgttagaccattgtggtattgtgatttataataagaactatatatttggtctctattccagtttatggcgccaagctcctagaactcttggagcttcctaagtgatgagagtaataaaagtgtctttagtcatgttaatgaggcaacttttggatcacatctaaggatgggggatggttgcccatggagccaaacctgaggttagagagttggaactttaagtcccactcccaaataccctgggaggggagagggattggagactgaatccccatcacctatagccaatgacttagtcaatcgtaccttggtaatgaagcctccttaaaacccccaaaggacagggtttgggcaacttccagactgatgaagacatggaaattttggcatgcctagaaaggagatgagggctttgtgtcctgtccccacagtgttcttagtcattcagtcatgtctgatcctttgtgactccaggcaagaatactggagcggcttgccattttcctcctctaggggaatcttctcaacccagggattgaccctatatctgctgggtctcctgcattgcaggcggattctttacctgtggagccataggggaagccctgccctgtccacatactctaggcatctcttccatctggctattcctgagttgtattctttcatattgaactgataatctactaagcaaaatgtttctctgagttctgtgagccactccagcaaatcaatctaatccaaggagggagtgcttggaactcccaatgagtagccactcagaagctcagctaacttgggtctgaagctgggaggggcagtcttgtagggcagagctgttaacccatggggcctgacaccatcaccaggtgatgacatcacgacaccattatcagaactgagctgaaggacaggacacccagacagtgctggagaattctgtattggtttgggaatcaccctcactggaactgctgtcagaattgtagccatcagtggagaaagaaaaaggaatgggagataaatctttattattgtgattggaaaagatgctgttgctgggaaaagattgaaggcaagaggagaaggggatgacagaggatgaaatggtgggatgacagaggatgaaatggttggatggttcaacggacatgagtttgagcaaactctgggagatggtgaaggacagggaagcctggagtgctgcagtccatggggttgcaaagagtcgaacacaactgagcaactgaacaacaacctaacatgtagtatggcctctgttgctgctgcttagccattcagtcatgtctggctcttcacaatcccatggactgtagccttcgaggctcctctgtccatggagtcttgaactattctgctgcacattatattaacactaagcatgctccacagtgaaagtgccttccagatgtgtgcttcaggaggacccaattgagacaatgtacatgcacgtttgcaccacatagtccctttctctggggtcagggcacagcagacaggtgggtgcatctctctactcttctgccaaacctgtgcagctgatgcccccttggctggtgtgctctaagcagttaacaaacaaggaaatcctaatctttcgtcaattctcccttcttggcccagattatgtgacaaaagattctacccattaattaagttatagtgtttttccatttaaaaattaatcagagacagaaaatgctttccatcttctcccaagtgccagtggaatcattattatccttccagtgaaaagcagaaaattggcctctcagtgagtttatttagtcttatcacagatagttcgctttcagatgaagctttttagaaaactaaggctagttccagaacctctaggatgtctgtgactctgcattttgacaggaaggtgagcaaaggctacctttcgtcacaatgagaggttccagggtggatgcatggattaccaggt

SEQ ID NO: 56668 - DNA, 810 bp, Bovine  19866881140673
  misc_feature (1)..(1): n is a, c, g, or t
ntaaaggctctacattcttttaatccaactgtgttattaaaggactaagaggaaatatccataatgtagtttctgactttatattgcagtaggatgagaagcatcagatatttggaaagatgatagagttaaatgaacttaaaaaaaaaaaatctgaattttctgaatggagcactccacgttttaactttaaaacaaaacagtttgaacatatttcctggaggtgaaatacgtcttgactgttttgaactttttttttttaaaaaaagtaaatacacacacacatgcagtgttttatttatttaataacttgcaaccagggtcggtgaaatttcgagatacaaatttttacccttttttttttttttgagatgatcagcttttctctccttgtcacaaagagagctcatgtcactgcccaagtgcaaataacttcttcaggaaagaaaaactactatgaaacgtgcccaagtttgatgttctaagacatctgtgggcacaatggacattcagaactccccagtacacattattttataagcctttgcatattttgttttcaagttctattattattgtatataaaagaagtgaaactttttctccctaatattatccacaacctttgaaatgctaacatgagagcctttgaaatgagttttgaaaaaatcttaataaccaatatcatgatagatatgtaacactaaatgaattcactcagtcactgccctttaacagctatgttttttccttataacctttcatgttaatatttacaactgtattatagtgtcttctttggaatatact

SEQ ID NO: 56669 - DNA, 1019 bp, Bovine  19866881154397
  misc_feature (1)..(1): n is a, c, g, or t
nttttttctagtgataaaaatattaaaagtggtaatagtgaagagagtttcaatgcgtttttgttaaattttaatataagcaacatagggaagtgtaaaattttagcatggtaaatataagcccgtgagttcaccctagtaatggctctgggcttgccagcatccatgactctgccttaagacttaacagaattacgagcgaaatccatggccaaagaacacagcctccgtatgaaggcctataggctacatggaagttggatctggaaccttacagtctcagtggtattaagtacttcccaaatcaatcaattaaaagtaaaattagttcagagaaaaacttaaagtgatacaagacttaaggatactgaagaacatttcatctgtcaatattttcaaaaagaactctttccttaggtacactactattgtgaaatgtgaactttctctccaaatttatgtttcttccttaaaaaaaaaaaaaaaaaaaaaaacctcctatgtgtttctttgctataaggtcacttttttcctataaaatatctagtatcataaaatgaccaattttacaaaagaaccaatattatgtactggtgaggaagaaattttcactgacttctgcaagggcctgcattgtggtaagcttgttatactcctgttccagaaggtctaatttttcaagctggttttgaacatgtgtttgatcatgttgtcgttctctttccagggagacctgggaaacaatattaaatataacatgaaaatatagcatgataatctgacaaaaaactgaaaaaaaccaatacagagtataataggctacttgtcttttcacagaactacttagatactgcagagaaattctaggaaaacagtattaagatgaaaccaaagaaatgttaacaaatacaagtgaaatcttcttatcatatactatcataacatgtggttctatacactgataatactcttgacagtattcacgacacacaggctgcacacaaatacttgtaatttgt

SEQ ID NO: 56670 - DNA, 834 bp, Bovine  19866881169281
  misc_feature (1)..(1): n is a, c, g, or t
ntggtaccccaagtcccgtgataggctgattctgcatcttctgcaggaggatctttttgctgcagtggtaacggagccctcagcaagggctggttcgagagaggctgggtgggttgggccgctggctgctgcgcttgtggctgctgctgctgctgctgctgtggctgcggctgctgctgctgttgtggttgctgctgttgttgtggctgctgctgctgctgttgtggttgaaccgtgatggagctctgctgcggctgctgctgggtgtaatgcaagagtgaaggcttgctctgggaaggcaacacggaaggcatctgctggttggcttgatccgagttaaaatggaacaaaggcttggtgttgccatgccggggctccatggccgggtgcgggttgttcagaaagctccggctgaggtcctgtggcttgggctgcaggagcacgtccagcggccctccctgggccgaggggctggccttgaacaggtagttcgccatgaccttcgactggttgccgccacccgtgacacccggcatgggggtgctctgggggctgaacggctgctggccgaaagaggggctagggattttctcctgcccgaaggggcctggggagggccctgccgaggaaggcaaggctggccagctagtgggctggtgctgctgctgttgctggtgcatccggacatgctgctgccggttggcagcaatctgtttgagctgctgggcgtgggatacttcctgccagctgggcagggcccgggccgctccggtggctggcgggggctgcgcctggctctgggggactgaagggatcggggatgaagcggagagg

SEQ ID NO: 56671 - DNA, 697 bp, Bovine  19866881173068
  misc_feature (1)..(1): n is a, c, g, or t
natgatgtatgtgtagttgtcaactcttagagagcacggacccatggtaggcaatcatggtcagcatcatcgtcatattattattattatcttctttgaatctacactccccaaagtgtccattgctcgtcagaacctataagaattgactgacgaatcagcgcctgagactctagtcagagactccaaattcccagtcacccagagagacaaaagcactgcctggggatggataagcaagcctcattcactctacaaggtaaagatttcatgttcttatttctctattccccttcactcccctaaacctacacatttaaaccactgcattgtgcatatgacaagcaggaaaactttaactgccttagagacttgtttccttagtggcaccagcatggggagccctctgggaccctggtcaccgcacacttcctgcctgactctttattgactattgctgcctctttatttttctctcagtcatcagtgaggaagttgcataatttaaaagctaagtgggactcactttcttgcaatccgaagtcatgcatgctattttttttttccccctgactgtaactcctttgtaaatgctgtggaaaattctctcctaaatacaaaatgattttgtttttttgcatcctggagtatgcatgagattggatttttgatattggatttccagttttactagaat

SEQ ID NO: 56672 - DNA, 2827 bp, Bovine  19866881202870
  misc_feature (1)..(1): n is a, c, g, or t
ncagaatggcccttctaatcatttatgtcactcctttgttagaagtctcactgtgtttccctactggatgaagtccaaacctttagtctaaaagttacagtccttcaccattgggtctcctcttacttatatctttaagtcaggtttgtgtctcatttatccaatgttaaagggcagaattgaaccctggctaatattatgctgattactagccaatgcttaacattctgtaacccaggtactgcctttaacttagggtgaggtccattggggaatgggcttcccagatggtgctagtggtaaagaacccacctgtcaatgcaggagacataagacatgtgggttcgattcctgggtcgggaagatcccctggaggagggtatggcaacccactccagtattcttgcctggagaatcccatggacagaggagcctggtgggctacagtccattaagtcacaaagagtcagacatgactgaagtgacttagcacacacacaagcaccgctggggaacatatgaaaaacaccgtcttctcttagctcagctaacttattcctctatttacatggcagcctagggagtgaaggagcaacaacaaacaccgatattgtttccaggcagaaacacaaaagatcagacacattagcaagtggatttgagttctaactagcaaaataggcttcctctcatagaatcagtgcaatgactagacagtaatggacagggaggtccaaacagaaggttcaaaccctctgtccaggaacagaaaagtacttgaaaagaaggagcaacataaagaagccttataaaaattctcaagtggaaatgagaagcaaactttgccatctgggttacagagaaagagctgcaagggctgccaaatgcacgttcatggtcattggtgggaaacctggtttccccatataaagggaaaggattccggaacgtatgctgcacacagatggcaaagcaatttgcatttaacataaaaattttcccaccagaggaagagcagaatcagtcagaaatccctgttaatttcctctggttaaaacaacaaccaaaactacacgggcaataaaatatctggttgaataattcaacaaagaaaaaatatcttaggggcaattattacagacaagccactgtgctcagcaaaaatggtgttacagaggtgactatggcagatggttttctttctaggaacttccagctgaaaggagcagaaagatacattatacgtaggaagaaagctgagaggcgacctccagcagaagctctcaaggaaaggattctgtaagtgattttagtcactatgggatgcccctttcatggccttaaaataggcagacagaggtgagtggctatgttggtcaggtgagtagggggccagggcctgccgttctgggagcaaagtatttggtgccagagagaaatcccagaaatcacaccttgctttgcaccagcctgaaggctaaaaaggttaaggtataatttctggactgtattgctagtctaggggcaagataagtaacagaaaccaagccgtgggccagaacagagtctaaaaaaaaaatctaggcgctcagaagtgctggggtatctggctgggcaagaaagaggcatatccggaagaatctggaggcaggatatgggtgtctgcagcagttttccatgtggttgcactgatgtcttaagattttggagaatatagaacagaacagaacagaaggcctctctgccaggacacgtaggggtggttataaaggtttcctgaccccaattttccccttccggggcactgcttgatgaaacctgaatctcaccattctttgagtatcagatgcctcccattctcttccctccatcctttctcatatatttactgaatggacattatataccaggcattgtgctgggcttgggagtctctattaaaacataaataccccagaaagggcaaaaccttaaacctgtcacagactgagttctcactaactacttttcgaaagaaggcatgaggccactgtcagtgaacagctgagaaaagactgtgactgcaagccaggaggagggacagggcaggtaggggacagggggtgcagcatctggctgctgaaaggaggcggatcgagaggaaaagaggtctttctggcatgtttctttgactgtgcaatgttgttcagagctgaatctggctcagttctttggaaataagagatgctaaggaaaaaaacaaacaaaaaaaaacctgtccacgtccttgaagatgagttcccccacccctttatccactataaggagagggctcttattccggatgaggacctcggaatgactctttgtgaatcaaggggctggctgcacctgtgattctcttgatccatgagcaccccctggtcaggaccccgacatacgtggtcacgtgagttttgcccacgttaagagtacccaggtgatggatcaagtggggactgaaatatatccagcctgcattttgctaggctttgtactcagggtagggtgagggctgggggtgtggataagccctgaggaaggggaacatttttctaattttctcagaggtagttctgtctctggaggttttctaattagtcctgggggtgtcatgggtcactaaatactgggcaaactcagtcctactcattgcatgctaagtcacctcattcctgtctctttgtgaccctatggtctgtagcccgccaggctcctgtatccatgggatgctccaggcaagaatactggaatgggttgccatgtcctcctccagaggatcttcctgacccagggattgaacctgcat

SEQ ID NO: 56673 - DNA, 758 bp, Bovine  19866881247813
  misc_feature (1)..(1): n is a, c, g, or t
ntttgcccaagttcatgtccattgcatcagtaatgaaatgcatgtatattatgtaactgtaaaaaaggggtatttatactttggccacctgatgtgaagagccaactcattggaaaagcccctaatgctgggaaagattgaaggcaggagaagaagggggtgacagagaatgagatgatggttggatggcatcacgaaatcggtggacatgagtttgagcaaactccaggagatggtgaaggacagggaagcctcgcatgctgcagtccatggggtcaaagtgtcagaagtgacttagcaactgaacaaatattctttctcttaataccataaacatattttcatggttctaagtagtttttcttaattattattattattatcaaatatttatttggctgcactgagtcttaactgtggcatgtgggatctagttccatgagcagggattgatctcgggccctttgcattgggagtgtggagtctctgccactgggccaccagggaagtccctcttaattattgcttgagtggctataatctattatttagatgtactgtaccttatttctcccctattcttggacacttctattgtttgtttctaaagatattgctgcactgaacagtttcattctctctccctccctccctccccctctctcatttaattggcaaatcctcagtagtagaattactgcataaattggtgtgaatatctttatggattgtgccacgtcttgccatattactaacag

SEQ ID NO: 56674 - DNA, 1381 bp, Bovine  19866881332286
  misc_feature (1)..(1): n is a, c, g, or t
ncattatataccacataggcacatcaataataccataagagctacaaataagggctaggggaaaaaaaaaaaaaaaaaactcaaagaaaatggtaataacttaaggattggagaaaagaagaaatacattcagctgaaccatttgaaactgagggaaaaaaaaaaaactcaaaagtaggggaagatagtttcatattccttctggagttactgaggattttttaatatatacaccatatatacagtattccatttctattaaaaaatttcttaggacatagagcaaacattttgtaaaagagactatgtcttagggcttccctggtggctcggtggtaaagaaggcacctgccaatacaggagacgtgggttcaatccccgatgtgggatgaccccatatgctgcagagcaactcagcctgcaggccactactattgagcttgtgctctaggaggctggtagctgcaactgctgagccaacgagccaccaattacggaaggccacgcgctctagagcctgtgctctgcaacagaagccatggcagtgagaagcccgcgcagagcagctaatccctgctctctgcactagtgaaaagcctatgcagcaacaaagaccaccacagccaaaaataataaataaataaataaatatttttttaagagagagaccatgtcttatgtgaatgacaaataatacacaactggtgggaatctttttttttttttgactgctatttcccaaatggttaaagaaaaagttgttgagaattaagaaaccaggattttagtccattctagctaacagtagtatctgcagccttaatccccactctccattatagctccattatccgtgaaaagtaccgatttgactattttagtggttagctttttgatggtcagatacttctttgaaaatctcatgaaaactattccctgaactgtttccaacgtcaggaactttaaggtcaagaatcatgtcttgatggcctcttttagttctaacatagtccagagcttcagaaatgagtattctaccttttgaaatattcacacaattatctatacaaatactgaaaaatgaaattgtccaaaaggcatatgtgcatgtatgtgtatatatacgttaagtgttttctaattaggtaatcagagacttgaataaattttatttaagactcacagcttaaatagaaatattccaatattgtatttcatacaaccgagtcaaaaggaaactaaatccaacagctacacttattttacaaactctgggctatcactttgtaaactcaacaccccaattacagataaacagaaataatactctatcaagaaatattttcattgttttaatatcaaggacttttatcagaaacta

SEQ ID NO: 56675 - DNA, 1494 bp, Bovine  19866881371788
  misc_feature (1)..(1): n is a, c, g, or t
nttgcctatagaccacctgagttttgataattatggagatgatagcaagtcaatcaaaatgtctattcaatacctaagatcaggcactcggtagagcactagattacttcttaaatatctacacatggctgaaaagactaatttagaaccaacagattcagatggtactttggttactgtaatcaaattttgcagcgatctgcctctttgattcatgctcttatttaaaattctgcattgctctttatgatataccagctgttaaactgccatcacatccatcttcctctatctttggcttcccagcacagcatccatttattctttaattcaaaatacatgattgaaccttgaacaacacaggtttgaactgtgtgggtccacttatacaaggactttatccaacagtgaatactacagtacttcatgaaatggggttggttaaatctgggttgcagaaccatggatactgaggaaccacagatataaagggccaactgaaagttacatgtggccttcccaggtggctccagtggtaaagaatgtgcctaccaatgcgggagatgtaagagatatgacttcgatccctgggtcaggaagatcccctggagggagggtatggcaacccactccagtattcctgcctggagaatcccatggacagaggagcctggtgggctacagcccatagggtcacagaattggatctgactaaagtgacttagcacacacacaggtaagttatatgtgaatttttgagtgcatggaggaccagcactcctaacccccaaacccccacatgttgttcaagtctcacctgtacttactgagcccctactagctgtcaggcatgtgggatacatgagagaacacaacagatagtatccctgccatcatgctaatatgctagcatatgggaacagaaactagtagccacactaaataagcaaaatatataatgtgtagaaattataacacagcctatggaaaaagaaagggcaacacaaggtaagggagatcaagagcatgagaggagagggtcatggtaaacctctctgagaaggaggcatggtcaaagatataaggagatggcgcatatctgaagaagagcatttcagacacagcaaacagtaaaaactttgagtgaaaacaggtctaggaatgactgaggaagagcaaagagaccagcatggcaggagcccagtgagcaggagaaaagtcagagagttaatggagcaccagataatgaagggcctctggccattgtaagggttttcattttttacactgaataaatcagaaaatgattgcaggattctgaaaggagcaacaatcatgaccaaactcatatttttaaaggataatcatcatcctggcttttatataaaggactgattttaggggagcaagaataaaagcaaggaggccagttaggaggtctttgcaattatgtcgggcaggtgggttgtggggggcatggtgatagtggtggtg

SEQ ID NO: 56676 - DNA, 1118 bp, Bovine  19866881401298
  misc_feature (1)..(1): n is a, c, g, or t
nattgcagccattctgactggtgtgaaatggtacctcatagtggttttgatttgcatttctctgataatgagtgatgttgagcatcttttcatgtgtttgttagccatctgtatgtcttctttggagaaatgtctatttatgttttggttttgaatatatattctaatctgccgcaggctcacagttagtactgaataagtggattaaaatgatcaagctccagatttgtagtatgtataacacgcctcctgaactggacagaaaccttgtttgtggatgctttcacagtaaaaatgtagatagatgagacaggacaaaggtaacgtcgtgtccattttcgcgagtgattctttttcaagaacacatagttgcacacggcttcatagctgttgcttcaaaaaaaatgtccatattgtaaggtatggataccattgtcaagcataatccaagcgatatatgtttactttccatttgaaagtcagtatgatatttgaaaaaagcaacataaagtagaaaatttacaagtaatgattaactcatatatcagatctactttcagtaacttgaatgcactcagggacttttggggccatcttatgtgacactttgctagactctgatccctatttcttcacttgtttttatagtccagtcctataaactcacactgtgctgttaaaagagcagacttattcacagatttccatgccatcacgatagccatatatcaatgcactggaaggaatagagaaatagaaaaagattaaattattactgcaaaaaattagaatagtattttttaattgaagttcagttaatttacaatgttgtgttagcttcaggtatatagcaaaatatatacatacagttatatgtatgtatgtatgtgtatatatataagaatatatgtttatatgtatgtgtatatatataagaatatatatatatatttatatataagaatatatatatttatatatatcagatcagatcagtcgctcagtcgtgtccgactctttgcgaccccatgaattgcagcacaccaggcctccctgtccatcaccaactcccggagttcactcagactcacgtccatcgagtcagtgatgccatccag

SEQ ID NO: 56677 - DNA, 1178 bp, Bovine  19866881451703
  misc_feature (1)..(1): n is a, c, g, or t
naaaaaggtagaccctaccctttacaattgagcttaagcgacccgaggaagggtgtctaggaagggctcttaggctgtcttggataccaaaaaacccccaaggtctggtgcagtttaattaaatgaccatccttcccaattagccatgaaaaacactgcttgtataactatgtcattatcacttcctgcctggattagtgtaatccatgatatgcaagccttctgtgctccagcatttcctctggggatttgcaacttttgcaaaactccagctttagaatgctggctagagccaaagcttcattactcacattactcctgtgccaagtgagcttcccgtgcttccttgacagtggagcgcacactgcgaacactctgcagttaggaggaggagcagagagcgcttccccaaacctggggctgtctcggcagtttaagcacatacttcctgcaccccaagcaaaagctggcaagtgccagccccagatgacatatgtgttcatctcctgttgcctgtcaaggaaaagctagatcccatagaaatgattcagatcctcacagggatcgacagggttctttcttccaactctacaattttgtttttctagaacagttatttcctgagggatttcctcagataggacaattgtctttatcctcataatatcatttttttttcaatcaaaaactcacatttttttcagaaatgaaagaatactacagatcaattagaaatatttcaaatgaggaaactgttgctgagaaaaaaagagagagaacatacttagacaaggtcacagcgaggattagaatccaagtctcttatctgaagaactactggtgggaaggaggggatgtatggctgattcatgctgatttacggcagaaacaaacacaatattgtaaagcaattattctccaattaaaaaaaaaaacaacaactgctgcgtcgtctctcataaatagttcagattccagtgacctgtgctatatggtccaccttctccctctacatttatagagagggccgtttctaactataagcactccagctcctcggtactgtaatggaaagggttatgaattccaaacaccatttctcattgataatattgctcaagtaaatatctcaaaatagattttcagcaccagagcaggaagacactcagaaaggaagt

SEQ ID NO: 56678 - DNA, 1557 bp, Bovine  19866881510997
  misc_feature (1)..(1): n is a, c, g, or t
nagaaaaacagaggctccaaacagaaagcattaaataagtgaatgaagatgatcagtactatcgcatctttgtgcttcatggttaaaatcacttaagatgcacatactatcttgtctgccaaagaatgtcagggcgataacccataagccttatgctctttctctaacacaggggtaactaaagggggtactttgatgctacctgaacttctcatcagaagaaatatcctttattctagattttgagattaatttatcaaaaaaagattcattctaagaatcacccacttgccctatgaacaatgtaggtgatagtttaaaaattaaaaatttgaagggcagtggaactcccaccattacctgaaattctaccagaagggatgcgccctatctgaaaaacatgacccctccttaaggtttccttttgtatgacagtttggacaggaaaccgtaacaaaccaaagcactgaatgcatatactatgtgctagcaccaattcggagctgtggcgtttctcaagaatttaacgacaccgtctctgctcccacggagctcacaatctgatgaaaggagcatctaaacaagccagagtaatacatgatttaaggactacagaacatgattcctttttttttttttttggcttttaccgtattgctgggaacaaatgtatcatagttcttccactaaaacagggcagcactacacgacagaagtaggaaaatagcaagaaatatatagaaaaagccaatgtcccccactgaggctcacagttcagtattccacaatttcgcatacagtgaatcctgccagctagcatcccggactactacagcattcaccgaagtctataaccctgaagacggttcgctaaatagagtggggctgaggggctgaggaaggaacagagcctctcggagttaacaccagagcacaacaccagatactctggttgtatctcgtgatacaaacctggctcctccgcggggcacagacgcctggcgcagcaagcccgcccgcccaccactcgccacctgatgggaagggcgccgcagctgggacgcgggaccctccgacacggcttggcgagaacccgcgcggaacgtcacagacacccagagcttacaggagctcgacccccagaaacgagaacctggaaacaccagagaagcgcgcgaagtcacccactgcgtcccgcccatccggccggcccacttccccttcgcggaaggagcgggcgaccagcccgccgcaatccccgcggcgcgcgcgaggagcgaagcgcagggcggggagcagtcccgcccaccccgagagcgcccgcgggaacgtttccctcctgcaggctgcgaggcgcggcttcccccgcccctcgaacaaaccgtcagcagcagaagcgaaagcgagtccccgccccaagggagcccgcgccgcccccgcgctctcacctttcaaacctccccaacctccgcctccgcctccgcctaggtacccaagtccgggacaggcgacgttccccctccttccgggagccaagggaagtcccgcctctgggcg

SEQ ID NO: 56679 - DNA, 1049 bp, Bovine  19866881869507
  misc_feature (1)..(1): n is a, c, g, or t
nttcaaggcaatatatttggagtgtcacttcagtgccccaaaccagtgtaaaaaagtgaagaatcactcctggagagcagtggaaaactgctttgggaggatgcaccatttttacctggccagcaactattgcaaactcaagacagttgtatctaaaatacttttagatacagaataaacagaataaaaggtatcttagcagatttaaatctttaagtgctaatctggcatcatgaaaaagttaataacaaagttaatatggcctggcacataacaggtgctctataaatgctaatatcctttggtagattttttttttttttaaccccaggaagtagttgtcaaactagggtaacctctagggtcacccggaggatttgtgtaaaacagagggctaaacactattcgtaaagagctgacctgccaatgcaggagacacaagagatgtgggttcagttcctgagtcaggaagatcccttggaggagggcatggcaacctactccagtagtcttgcctggagaatcccatggacagaggagcctggtgggctagagtccatggggttgcaaggagctggacacaactgaagcgactgagcatgcacagactccatccccagggtctccagttcatacagtctgggatggggtccagaaatctgcacatgtaacaagttcccaggtgatgttgctgctgctcttctggggaccacacttggagaagcacggccctagggaatagtttaggtgctgtgggaatatgcatctgtaatttttcacatcagaaataagttacataggtcccagcttttaaactgtgattttctttttagtattttactaaagaaaaggggggaaaaaagtaacaccactttatatagccctgatcttttggtaagtctgggcaacgacttcccatgtggagtaaattaatctttcatgcatgctttgtgctctggaaaaaataaacagattctgttcaacatttaccaaatgcttcatctgttgctggtcactgtgctaataagcccctcagaaccagtctctgc

SEQ ID NO: 56680 - DNA, 2358 bp, Bovine  19866880352383
  misc_feature (1)..(1): n is a, c, g, or t
nggagaagatgtggccagagctgggcagcgtctgtaggggtggggaggagggggaagaacacccctgatgacctgatggccgactggaacgtggggaggcaggggtcctgccggagcctgaggtctgcccgtcacccagcaccagcccttctcccccatctccgatcacacccttaacaaaacaggacatggtgaggtataaacaccatgccccgttgttgcactcagatgtgtgattttgacctcagctccacctctgggacctctgggaccctggttctctcccagtgggtttgcttgtttgtcaactaggagggtggtgcctgccagctgtggctgttgggagggttcaaggagagatagagttggtggcacacagctggcactcagagccccagggcccctgtgtcataacacctgctgtgcccacagggggtctgctgcacagccctgctggtggccgtggtggcccggaagctggagtttaataaggcagagaagcatgtgcacaacttcatgatggatattcagtatgccaaagaggtgaggggggcctccagcacccagaacacaccctctctcagacccagcagtccaagcccccagcccctcctcccagagccctagggggtccatgtcccctgacaatgtgccccccacacccagatgagggagtcagctgcccgagtgctgcaggagtcctggatgttgtacaaacatacacgcaggaaggagtctggagccgcccgcaagcaccagcgccggctgctggctgccatcaacaggtgaggacctctgtgtgtgcacatgccgtgtacagccctgtctgagtctacacctctctgcagggtgtgagtgtgtgtgtgtgtccgtgtgtgagtatgaatgcatacccaggtcaggatgcccgcgtgtggtcccactaaacagatgcccacctggacatcacagtgactctgtgtgtgtgtgatggtttcgtctgcatgtttcagagtgcctgtgtgtctggctacctggttctctatgtgggaggtgggctcatgggtgcagccacttactcccaccccttcagttctctggcaacttttcctcattatattcttatctttgtgagtctctcctcccctcatcccacccctgtgctagggccgctctgacccccaccccttgctgttctttttaacccccaggttccgccaggtgcggctgaaacacagaaagctccgggagcaagtgaactctatggtggacatctccaaggtactgggatcctgtgagagggggtctaggagaagagggaggtaggggtggctggtaaggcgctctaggcctggaatcagggacgctggcacacacgggcactcaagaaagctcttgtggttgaaggaacaaacaaatgaataagtgaatgatgcaatagagcttctcgtgaaaggtgcagcttcctttgaagcttaaggaacttacttgtgcaaagaactccagtgtttgatgtgaaattatttccattatcaagttccctacatgtgggtagatataaaattcctttcaactatgactcttatacaaccataaaaccaaagcaaattgacagacaaagttcaaacacaaagtgcaaagcaataaaatgtgaattaacagcaccaacatacagacgagtgacattgttccgggaaaactcaatctgtgctgctgctgtgaagaggaggaaggtggccaggagcgccgggcaggcttgcctggtcgagggcttgccctccttctgctgggtctccttgactctgaagtgctcagggtcagtgatgtcgcgccccactggcttggttagcagctcctcttgcttatccggtagcctttgcttttttctcattagcccgcgacaactcaaacagtggccctgggccctgatgccatggtaaacacagccgcaggtgccgggcccctaaactgcatggcagtggcctagatctgccggaattggcaggtcgtgatttctaagattagccacctggccccaaacgcggaagtcaagagttttcatagaaagctcccacgccctgaaggacgaagctgtgaatcctagtttgagaaggcagagaaagcgctctgtgggttttaaagtcaggcggccatcaaggccacaaagatctaagtgagcacccactacgttctcgggtcaccctgatccaggggctgccttgggcatgtcaacttatcttctccaggcctgtttcctcagctgttaaaaatggaaacaggactcccatttccacacttttaggaggattttaaactgcatatgaggatcacgggcctagtcgctgggcaggggttgataaaggtaactgttattattga

SEQ ID NO: 56681 - DNA, 616 bp, Bovine  19866880424774
  misc_feature (1)..(1): n is a, c, g, or t
nctggcggaccccttgctctgcgatatctcaggcccagacatcccatgctcgagtctggaccccgtgccctctccctctcaccgggtcttgagtcctctggccctggcagagccaggcagctggggcccagggcacaccaggaagccccagccctcagcccagctttcactgcgcaggcacctgcggcgccagcactgcctcggcgtccgagcacatctcgtccagcgcctgcagcaggacgccgtgcgccgcgcggtagcccaggcccccggtggccgcagcgccgcccgccggccacaggaaagagagtgcgcccagagccgcgcccccggcggtgccctcgcctgcccacgagcccagcctcgcctccacttcggctcgcgtcaccgggcccgggaagcgcgtccgcttggccaactccccgggagccaggcccagcgcgcgctcgcgtcgggccagcgccgcgggttcgagccccagcgcccgccgccactcagctagctgaccccgcaggagtgccacgtcgcacgcccagcccagccctgggactggggccgccgccgccgccaggctagccagcagggccgtgccgccacgccccggcccgcagcgcag

SEQ ID NO: 56682 - DNA, 935 bp, Bovine  19866880596109
  misc_feature (1)..(1): n is a, c, g, or t
nacattaagagtttctcgccaatgtgaaatctttgatgttgagtaagttgagagcaacgagtaaaggctttcccgcattccgtacatttatgtggcttcacgccagtatgaattctctgatgctgaataagtcgctcgctacgattaaaggccttaccacattccttacattcataaggttttttcaccagtatgaattctcttatgttgagaaagacctgatatagaacggaaggcctttttacattctttacatatatatggtttcaagccagtatggactgcctgatgataatttagtttagaattaagtctaaaggtttttccacattccttacattcataaggtttctccccagtatgaattgactcatgcattttaaggttcccgacacgattgaaggctttcccacagtgtttacattcatatggtttcaagtcactgtgaatgatctgatgtttaataaggtaagaatggagcttaaaagtcttcccacattctttacattcatggggcttctcaccagtatgaattctctgatgttgtgtaaattgataaactctacagaaggccttcccacattccttacaatcatagtgtttctcaccactacgaatccttttatgtctaagaaggcttgaggccctactaaaggcctttccacattccttacattcatgaggcttttcaccagtatgacttctctgatgttcagtaagtagatagctgtaaacaaaggcctttccacactgtttacatttatatggtttctcaccagaatgaattttcttgtgttgatagagacttgaatgatgaccaaaggcctttccacattccttacagatataaggtttcacaccatgatgaattttctgatggagacacatgtgtcggtagaaccctaaaagtttccccacattccttacatttgtag

SEQ ID NO: 56683 - DNA, 836 bp, Bovine  19866880780871
  misc_feature (1)..(1): n is a, c, g, or t
nccaagacgccagctcttctggtctggccagttggggttcctccctgaaactctcccacgcagctggggcctgcagggcctcctgctctggagcgcacaataataattgtattgtcaccctgcctcactccatccctcaggagatagagggtttcagacccaacttggcaaaggaggcagctgaaattcagagggggagatggtgtggctggaggtcacagagtgagaggatggcagaggcaggggtaaaattttagtctgtccgactccaaacttgaaattttgtccactgcctcaatccaccacgaaagattcttctctctttattataagacacctcagaggctcagagaggtgaagacgcttaggtagggtcacacagcacaccataagtggggctgagattccaaggctgggaggcaggaaggttaggggtcagtgctgaatgacttcacagtcactcactttctctctctgagctgcggcatgatgccaggtgacccagcctaggtgactgaggtactagtcattgttggcagtgtgtgtggggggaggtaccccatggggtccagggaacggataaaatttttacgaacacagccgctattttcctgccacaggtaaatctcatcatctattaggagaaacaaagtaagattacagctgtagctttaaataataatagaatataaataatatataatatacacagtcacttatattagtttatatacgggggatgtttagtcactctggtttgcccagagttcttatttgtttctatgttcagacatgggaggcagtggtcctgactggatctcactccatcacggtca

SEQ ID NO: 56684 - DNA, 1259 bp, Bovine  19866880793224
  misc_feature (1)..(1): n is a, c, g, or t
nctgtgtgatccaaaggaacccctcatcattaactcatcacaccacagacctgtcatgggaatgagaaaccctaataagggaaacggggcagccctggctgaacgaagaatggaagtaataacaaaaggcaagacttaagacagcctgatatggatctgtgccagttaaacaccaaaagctctaccagagaatacacaattgaaactcttccccatgggtgaccattcagctggctaagggcagagcaccctgacccgcttctttgatagctgtatattagcctgaaaaaggaaaactattgaggaaactttatccttttttttttctagatagaacatgaattaatcagcatcttggcttgcaaaaggaaaactggtgctttccaaaggtcttaagtcttcattctctcctctttcctcctcttatatgaatcctcttcatgcctttgaaagatgatgaactcaacctactgttggttttcctagtatataaataaaagcgaactgattgttcagtatatttctttgtgttattcttggacagatgctcaaatatttcccttagaggactccatcccttcactgctcttgatggaagactgagccacaggagatgttgagttaagtggttgatgaatacgatggtgctgattggaaatggcacagagggcagacgctgggatatttggcatcatcctttactggaacaggaagaactgagaaggaggttcaaggagggggttctgttaagtagaaagctttagggtaattcaggaaaagatccacatgacctaaacatcacaacatgtcaaggagaaagaccaacttacgtcagtcatggttctagaatcccaggaactaattagtgctccatagagttcctctattggtgaagcacagagtccagaaaagccagagctgcagaaggaaaaagaagctttagtccaggtgtgctgaagtgagcctgtcctgacttaaacaactgaataaaaagacatcaaaataataagaatgattaactctatgggatataattttaacttccttttctatacatttcccagattggtgaatgttttgcaacaaacctgtgttaactctgaaatcagaaaaataaaagtgaaagttgctcagtcgtgtccaattctttgcgatcccatggactgtagtctgccaggttcctctgtccgtggaattcttcaggcacaaatactggagtgggtagctgtgccattctccaagggatctttccaacccag

SEQ ID NO: 56685 - DNA, 1219 bp, Bovine  19866880824166
  misc_feature (1)..(1): n is a, c, g, or t
nccttttgtagaggttgaaagaggttgaaagggaggggcagcagctccaagcccaccacccttcttttttccttagccccacgcccttgctaaggccccactgttaaatgaggcttctcccctcattggactttacactcctgccaatgcctctgctcaagaaagagcgcccttggtgaccttgcccacctagagcatttagtccatgattttcatttagtccctcaatccattcgggattcttttgccataaggctcactctctgtgagttttgccccactcagcatggccttttcttaatcctgcaggtcctttggaaagcccagctcccaaagagtgtaacccccccggggaagacttagccggttccccattttcagctctgttggaagccagatttcaacccaacagtccctcccttactttaggcaatgatggagacctgggttcagtccctgggttggaaaatcccctggagaaggaaatggcaacccactccagtattcttgtctggaaaattccatggacgaaggagcctggtaggctacagtccatggaatcgcagagtcggacacgacttagccactttactccctttcttgcttcaaactccaccttgtcattttagcctggtcggaccccctcggctagctctccagcctcgagctcctcttctgcccttgaccctatccctccctgtccccgcaggctccttccaccagctcaggatggattcgaggtgttgggcgctgcggagttggaggctgtgcgggaggcctttgagactgggggcctggaggcggccctgtcatgggttcgggccggcctggagcgactgggcagcgcacgcctggacctggccgtggccggtagggctgacgtgggccttgtgttgaacgtgattctcgggttagatcctgaagatccgggtgcagtgcctgctgcagcacctgcagggcccacgccctacccgaccccagagcgccccaacgtggtgctctggagcgtgcctctgagctccgcggacaccaccgtcgccccgtacccgaccacccactacgacgctctcatcctcgtcacccctggggcacccactgagaaggactgggcccaggtccggcccttggtgctaccagatacaccattggtctgtgtgcgaacagacggcgagggcgaggacccagagtctctgaagaagaggaaaaggcagagaagtct

SEQ ID NO: 56686 - DNA, 935 bp, Bovine  19866880870834
  misc_feature (1)..(1): n is a, c, g, or t
nattgcattcatcatgatacccctacagcagagactggaggctaggaatacatttcccacgatgacttatagctgaaattgaggctaggactgcatttcccatgagaccctgtggcagagactggagggtaggattgcgtctcccatgatgccctacagtggggatcaaaggatggaaatacatgtcccatggtgcagctattgaggctagagataaatttctcataatgttctacatcagaccttgtgatcaggacctcatcattaatggctcccaagtttttgttcagggatctcaattgcaagaaataaaatctgtttgagctgactcaagcaaaaaacgacagcattattggaagtttagaatccaggcaagagctaggtctctgggctgcgccagggacaagaaacagaattgaaaagctgggcgaaatcaatgttgtctcccttttgcaaaatctgcctctctgtgtcactctctcttactctgagtgtgtggcttccttcatggactgggctttcaccttacttttgtctcctcacagactacctccggcctcaaacacagtagccaaacatgcccttgaaatgtcaagtaccaagaactaccgtgtctggttatactattttgatgaacagattcttctctctcttctctggtggagtccagtttgggtcaggacgctgccgacaacctcctctgctacagccagggaagtttgtatcaaagccatgacatacagttgtgcacattgaaacaagcatctgccactcaggcagttctcatggtaggcaacccactcaggcagagcggagaaaaccacctctatgagagagatctcatcacaaggatgggggagcaactgaaaaagaaaactaccacttaaaatgttttactctgtaagcagggatgcctccatgtattctatctgaat

SEQ ID NO: 56687 - DNA, 1349 bp, Bovine  19866880996025
  misc_feature (1)..(1): n is a, c, g, or t
ntgctggtgcccatgtggccgtcccagcaccgctcgtgactgaccgcggtctggttcctcagggagcgttagtgcagcagagttctggccgctgcacacatgggtgacgggagagtgggaacccttgcacaaatgtgggatgaggcctgcgtgctaggacccccggcacctagagacacagtgacatggctgtgggcggggctgggagctctgtggagcagaacagaagttaagatccaaataccactgtggtgtctggatccagttatagaaagtgagcccttgggaaaacctctttcttaaaggattccaccaagtgcaataagaaatagatagcccagccactaatttaggctcttgtttttctaaatggaatgttcctttaagaagaggtgatgagctcaccgcggattcttgcacacccactgataccgtttttaaaatcctcaccaatcttcacattaatcatggttatttgatctaagtaattgtcttagtgaaattttgaaggcatttgaaacaacaaaacaagggtgttgtagggacatgactcattcatgtagatgttagatttattagccctggaagtgttcttctagggcaggcgacacttgagagcagtgaggatttgcaaaagagctggggaaggtgaaactgctttgagacttttttctttcacttcctctggctgattagctgtgtactaattagaaggaagctgcctgtgtttccaaactttctttgtcctgagaggcagtgtacttgccatcaccaagtggaacttgggtgactgtgtaccctgggatccctgacagtcctctttcttcctaccccagcccatcctgagtccctccatcttggaccatctcatcaacaatgaccgcaagctgcctccagagtacaacctgccccacacctacgttgagatgcaggtgaggggaccgagccaggcctggggacccggggcagagagctcatgggtatgggtttgccacttctacttgcaaagagccctggtaccccgagagctggtgggagaagatggcatcaagagtcgggtctggctctgcccctcgggaaagtaacccccgcccttaagcctccacatccgcctgtatgactaggggctgatcattgccgtctggcctgatctagggacagcttggaagggaagtaccactgcaatctgggcacacagtaggtgcttataggctcagaggcctttgtcctacggccccctcagctgagtcctgagatcagggaccccattctggacctggggaccttcaaccctgttgtcccttcctgccccctcagtcactccagatcgctgccttcctcttcacggt

SEQ ID NO: 56688 - DNA, 795 bp, Bovine  19866881038791
  misc_feature (1)..(1): n is a, c, g, or t
ntactggtgctgccaggccccgagggcaatgaggagcccttggccccggcgctgggggaggcagcacgggccgccctggcccgagggaccccgctgctggctgtgcgtaatctccgacccgaggagtcacagaatgaagcccaggcccgggatcagaccgcggccctgctggacagcgccgggttgggcgccgcggctctcttcgtgccacggaccgactgcctcagcaccgacggctgcgaggagctagagcgcctgcgagcggcgctgcggagccaggccgaggcgctgcagaggtaagcgcggagcttctgggtgggtggaagaggctggagctttatttactctatgcctccaccctaagatgttctttgaagtcagcccgcagcttgggaccaaccttaaagcgatgtctgctgaaagccctgctccagatcctgcccttgagtgcaggtcatgagctccacgaggccccacctcaagctagcgctctgtgcttttgtcatctagtccccatccaaggatcagctggaagtcccagcctgtcatccagcctgctcctgctagcactctgagctcacaagtcccgctaccctgccagaattctaggaggggcccggacctaaagcccaaacactgcccccaagccaaggtgtgaaggggggctgcatccaaactcatgatccccgtgaaatttgtacccgaagactccactctccagtcttcactttcctcctcaccatctgcttggttctcaagggatcgaagtctccagagagccacaccctcagtgag

SEQ ID NO: 56689 - DNA, 1102 bp, Bovine  19866881112386
  misc_feature (1)..(1): n is a, c, g, or t
naatttttttccataaaacagccctcagccttgtgggcggagaaggcagtggcactccactccagtactcttgcctggaaaatcccatggacggtggagcctggtgggctgcagtccatggagtcgcacagagtcggacacgactgaagcaacttagcagcagcagccttgtagaagaacgtctggtttaccacatctcccccgatacagtgggcttaaaaacaacaacaacaaccagttttatgtagatctataattcacctaccctacaattcacccattaaaagtgtttttcagtggttttcagtgtagtcatagagttgtgcaaacattaccatcagcaattttagagaatattcaggagggaatgaccacccactccagtgttctcgcctggagaatccccatggacagaggagcctggcgggcagcagtccatgaggttgcaaggagtcagacacgactgaagtgacttagcacgcatgcacaaagaaaccctgtacccttgagccatcccccctcaattcccctctcctcgaagcccctggcaaccactgtctctggatttgcccattctgatcagtacactgtatggtcctttgtgactactgcattcactcagcattacgtttacagtggctttctgatccgtgccaatgagatggtggtttctttttttgaaaaaaacatatttatttatttggctgcgccggcttgctcggggatcttcgatcttcactggggcatgcaggatctttagttgccatctgcaaactcttagttgtggcatgtgggatctagttccctgaccagggatggaacccgggcccttgcgtggggagctcgaagtcttcacccttgggccacccaggaagtctcaagctggtggttttccttggcggttctccgatctaatggtggagactgagcatcttttcctgtgtgcctgggctgtgtgtgttttcagggctccattggcctccagaggactggaagcctgtcccggaagaggggagagagagccagtcagagaggatgcccccggcctctgtcgctccattgtagtggtgagtaccaacatcaccccacataccctcttctc

SEQ ID NO: 56690 - DNA, 983 bp, Bovine  19866881177690
  misc_feature (1)..(1): n is a, c, g, or t
ncgccttcccgaccccgtcggcgacccccggccccagcgcccgcaccgctgccctgactgtgacaaggcgttctcgtacccgtccaagctggccacccaccggttggcacacggcggcgcccgcccccacccgtgccccgactgccccaaagccttctcctacccctccaagctggccgcccaccgcctcacgcacagcggcgcccgcccgcacccgtgcccgcactgcccaaaggcctttggccaccgctccaagctggcagcccacctctggacccacgcgcccacccgcccctacccatgccccgactgccccaagtccttctgctacccctccaagctggcggcccaccgccacacgcaccatgccactgacgcccgcccctatccttgcccacactgccccaaggctttttcattcccctccaaattggcggcccatcgcctgtgccacgaccccccgaccgcgccaggcagccaggccaccgcgcggcaccgctgctccagctgcagtcaggcgtttggccagagacgcctcctactcgttcaccagcgcagccaccagccggagagccccggggagcgggagtgagcgctcctcttggctcactggctccttctgctgccagcccccgtcaataaagaggtggcatctctaagccaggctgtatggacttgcctcttccaggtagacgaaagggaagttgaccccgcattgggctcaaacttagaggcggaggaatcctttgtttgggggaaaggaaagtgtcatccataagagtttgcactgagtcccaaccatggacctggaggcgtggttagaaaggtcttggctctggtttccaccccacctattcatatggcaaaggttaaactgctagctttgtgtgctgctgaggagtgtggagacaagctctccttgtgagtttaaattagtgcctccactttggccattgactgtgtgtgtgtgtgtgttagtcagt

SEQ ID NO: 56691 - DNA, 1036 bp, Bovine  19866881218727
  misc_feature (1)..(1): n is a, c, g, or t
nacgtgagaatgagcgcctccttaagtgttgcgcccgaggcacctctcttgcctcaccctagttagtccttgccctggggctactggatgcaccttcttccgtcaaagattttaggaagccagggctgggtctctccctcaacggtgaccttggaattccagctcccagtcaaatattatgagactccaaggccaaaggagttgccacaaggttacagaaaactctttaagtgttgttgacttaaggggttcggtcaaagacacacctgccagagactcctggcccacttttccacctgggtttatggtgccctcctcccagagacagaacaggaactcaggcctggccgcccctcctacagcaggtctcagaagcccaggcctccatccccacttccctttagcccaagaagtccaggccaccaccctcttagacccagcatccaactcacgaagcgcccgaactggatggagtctccatcctcaatgtgccagtcagcctgggccccgctaaggcgggagatgacagactggcagccgggaagtagggaccggaggagcccggagccggtaatgtggtccgcatggcagtgggtattcactgggagagagaggagggccaggtccgggagggcacagagaggaccccgggatccccagccttcaagcccccgcccgccctgagacccaggagtccgggtctccggcttcccgctccaagctgcggccccacgccctcagaccccaggagctccacactgacccgcatacagcagccgcagccccagctccttgaccaactgggcatctcgttgcgctgtctccagaaccgggtcgatcagaaccgcctctcgggactctcggtcccccagaagataagtataggtgcagctcttgggctcaaacatctgggaagcggggcgggtacagctgagagcacagaatcggacttccactcattgcagacccaggagtccaggcctcaactcgattgtcttcctaagatcccggcccagaaactccagaccccttccag

SEQ ID NO: 56692 - DNA, 2905 bp, Bovine  19866881275254
  misc_feature (1)..(1): n is a, c, g, or t
ntgctgcgcctgtacctggtgccccgcgccctgctcctgcgcagcggcgtcctgctcaacgcctcctaccgcagcatcggcgcgctcaaccaggtccgcttccgccactggttcgtggccaagctgtacatgaacacgcaccccggccgcctgctgctctgcctcacgcttggcctctggctcaccaccgcctgggtgctgtcggtagccgagaggtgagggtgccagggcgggtggggatggagggtacctgaagcctctggaggagccgcttacaaccacgcttgccctgcacggtggtgcagatcaggactccccgggaccaagccgtggagaaagctatctgtccacactcttatgcagcggggtgggaagaaccgagacagaccagccccaaagcctttcgtccacttgcagcctccagtctcccccaccccaacctcccaacacacatataccctaggaagccccgcccttcctgcctcaaatctctcctgcctccggaatccaggtataatgcaggccctggggcctggctggccaagggttacacctgctttgaaggaaggagactttctgcctttccaaataagcacagatgcactggtaggtgctcctaaccaccccagggctgccctggaagaaattcccagctgcctgctggactctgacctgatgctggaactgtaccccatcagggcctccacttatctttgttgttgttttagtcaccaagtcctgtctgactctttgcgaccccatggactgtagactgtcagcttcctctgtccctgggatttcccaggcaagaatactagagtaggttgctatttccttctccagggatcttcccaatccagaaattgaacccacgtctcctgcattagcaggtggattctttaccactgagccaccagggaagccccatttatcttacagataaaaaaaattaggggtaatcttagccagtggttctgggaccagcagcatctcctggatttagttcagttgctcagttgtgtccgactctttgtgaccccatggactgcaaacacgccaggcctccctgtccatcaccaactcctggagtttactcaaacttatgtccattggagtcggtgatgccatccaaccatctcatcttctgtcgtctccttcaccttctgccctcaatctttcccagcatcggggtcttttccaatgagtcagttctttgcatcaggtggccaaaatattggagtttcagcttcagcatcagtccttccaatgaatattcaggacttatttatttaggatggactggttggatctccttgcagtccaagggactctcaagagtcttctccaacataacagttcaaagcctcgattcttcagcactcagccttctttatagtccagctctcacatccatacatgaccactggaaaaaccatagctttaactagacggacctttgctggcaaagtaatgtctctgctttttagtatgctctctatctcctgggaactggttgcaaatccaaattcgcaggccccacccatatctatggaatccaagactctaatgggcgggacccagcaatctgtttttaacagttgattctgatgctggcccaagtttgagaacctctagtttagtacatcgagcaaaggattcttgaggggaggtagagaatgggaccatctgccctgagatttctcctctctgagcctctgaaaggcggaagtccacaaacttgagtgtactttgggatgaagggggtggggcttaaccatacagattcagtccccacctcagggcactaacttagtggttttgaggtttctgggaccctggtgaatgatgctttctttgctctggcctaactatgggtcagagttagacacatcctgattttcagacctttctatgactagacctaaatatccccttccatgaagtgtggggaaagaagagaatcccctcgcccaagcctttttagagtcccatctttttagtcctgatagagccacctctaggccacatagactctttgtggaaatcagaaaacccactctttctctgggtggaggcagttccctgccagggactgacaagtgaacttcaggttgggtttcttccccctttcaacccctcaaccacattaaatgcagcagccctggtagcctagctgaaaccaaatgggctttggaattgacaggatccaggttcaaagcccatagcccacagtggttgagcattttgtctaggtcacacagcaaagaggaggccaggcaggcttgccaaagccaggcaagctttgagtgctttttttgagtgtgggtgtgtgctaagaaagagggtatcaaacaccacaggaacatcagaactaacccgctcttcccctataggcaggccgtgaatgccactgggcacctttcagacacactgtggctgatccccatcacattcctgaccattggctatggtgatgtggtgccaggcaccatgtggggcaagattgtctgcctctgcactggcgtcatggtgagtacatccattcagggactcctgtattgcacactgctcatcccctgggccccaggaaaccatggagccaactgaagcactcagggacaccccaggaaacatgggtgtctggacccctacagcctcactgcctgtccaggacacagtcgttgctgttgttcagatgctaagtcatgtccaactctttgcaaccccatggactgtagcatgccaggctcttctgtcctctactgtctcctagagtttgctcaaattcatgtccattgagttggtgatgctatctgaccatctcatcctctgttgtccccttttcctattgcctacagtctctcctagcatcagggtcttttccaatagtggctcttcccatcca

SEQ ID NO: 56693 - DNA, 2064 bp, Bovine  19866881296605
  misc_feature (1)..(1): n is a, c, g, or t
ntcctgtgcggagcgggaaggtgcaccgtcacgtaatggtgccaagcaagccaccctgggcctagcttcaggagctccagccaggaacgcgggggcccgggaaacgtggacactgccgccctccctgccccagggccttagcattggggtgcgaggggctgagaatcgcgaatcacccaacggcgaaaagtgtcgggcgctgtgcaaataacgtgacttgcactgggcatcggctccctctgagcccggagtcccgcttccgtcctctctcgaggaaatggctacccttcccttgccaatgcctttaaggggagaataggaagtgggttcttgaaactgattcgcgagacggaactcaagctcccagcggaattctcgaaaagaaggggaacataaaaagagaaggctgtctcagtgatctccgagttaggttaactcctgcacgtgcttgaccccagtcagccaccgtaggccccgcaagccgcaggacactttcctccggtccttcggcctgtagctgtgcgcctgctcgccaactcgctggcctagagaacccacccactccttcctttccatctcctccgcagcagcccccgcgagccgcgactgcgcatgcgaactgacgcccccaacgtctcggcgtgggaggaggggatggaaatgaggctgggcccagcagctcgcgcgcgctccctccttttccctcccgtcgttgggcgcgcgccgggtggtgcagctccccagcatccgaaggcagctctgcagtggccacggccgccgagggaggggcccggagccccgcccccagggaggggccgtcctcaggtgagggggcaggggttcggacccagacacctgggtctcgggaaatggagtggggcctgcacgccacagttcccggagaaggacccatttggggtcctgatgcataggttccggaggggctgcattgccccctgagccttgggaggttacattgatgcccgaatgccatgatcccaaggggtgcgtgaaggctcggacgcttgcgacctcgagggagaagtccattatgggtctctggatcgcaacacacgagccacgctctttctgtgtctttctccaggtctcccctctcctctccacgtctccagctccactccgtggttgaaaggcagtgaacgcggcgtcaatggactgagactgagccaagagccgggtaaagctacctattgggtgtgtattaccgcacactgagcttgtaggcccctcccctgggacagagttgctgagcaaccgactttgggtcttaattgtataactccacccatccgcggccggtcccgcccacctgggcttaagccccgcctgctccgcgcccggggcggctgggagttaaagttgtagaggccccacccactccgccggaaggctcaatctcggggtctaggttccagactgcttctgggtcgggtttgcgtaaccccgcccactgcgcccttaggctccacccaccctcgccttctaggacccgacgtgatagctcctgctcctgaacaaaccaacccctgaatatgggctctcagtcctatccccaacagcctgataacccccggcgtcgccccctctcccggctaggtcctccctctaggtttctgggccacaggatgctggagcgagagacggagtctgcggccgggggcgccgagcctagtcccactgacaaggagcctgtgatcaaaagagaaggtgagggcgtctccacccggggtagggggcgttctccaggaattggggccaagagagtcacgtattgtgggaaccttagggtgacagtttgagggcccagggtgataaccatttaggatccctaaaacgcaacgttctggggaatcctccaggttgtctttgggggacctcagtgatcctctgtagggatttcagggttatcacttgggaggatcctggaaacgaacactttagtggctttgggaaagcttaggtctggggttccagagatgtaactctttggagcctgccttaggaggatgcatggcagtgggtgaggagcaggatcaagccatt

SEQ ID NO: 56694 - DNA, 879 bp, Bovine  19866881387753
  misc_feature (1)..(1): n is a, c, g, or t
ncagggaatccagatgccccgatctctgttgggacccgctttgctattcatcaccccagacgtgggggcaggcggagcctcttctggtcaagaatgaaaggagagggactccctaggtggtccagtggttaacactccaggtttcctgtgcagggggctcaggtttgatccctggtcaaggaactaagatcccgtgtgtggcgtggcgcagccaaaagagaatgaaaggagagccggacagtcagaggctctgagtggaggtgagggtctgtggccaccggaaaaagccatttccacctggttcctcacaagtgatgggcaggaacatactctgatccttctccaaagccccaaacgtgaccttggcaagttaatagaaaatcatgttaaactggaatgaagagccaccccgaagggcagcgccagagaaggcactggttaaaaggagtgggccagcccgtcgaggaagtggcaggatgtgaaatttccaacccagaccaagttaaggaactgactgacctggtgtaagaaacacattgccactgatagtatcttttaccatcaatgtaaaacaaaaccccgttaggcctctctagaaccactgcttgtcagggatggcttctgagagtgtccacggacattcctcaccccatccagccgctgcgcctgccttcttgtccagtctgagtgtctcgtggctcctggccggcaccccgggactccaggggttcacgttggctctccccgccccatctctcccctgcagactttttccagggcaaacgcttcttcctttacggggagttcccaggggacgagcggcggacgctcagccgctatgtcacagccttcaacgggtcagtctccaggggcgggggg

SEQ ID NO: 56695 - DNA, 1314 bp, Bovine  19866881401543
  misc_feature (1)..(1): n is a, c, g, or t
nctgaactgaccctcagtatacctcagcacttgatctttttagccgaggaattcctgggaattgtagtccgagagccacaggaggattacagcagttcagtgctccctctcaaatgctaaattatgtaaatcccacacctcctccaggaagccctcaccgtggtaatcatgagcagggtagatcagacagtttcctggaagagtgaagatcttttcatgaactgaatggtacaaggtcttagcacagcctggggaaggaaaagtcagaggtcagtggaacaacaggttgagagaagctcccaaactgcttcccttcaggaagaagacaggaggataaaaatcactgtagctaaaccttctccctcattttctgtcagtagccaaccctttgtgtagaggagagcgaagggaattctaggtaagtggaacaacacacgcaaagacttggggaatggtaagaattcagcacgactgtaaaaaaggttgggataggaccctgaagcaccaagtcccgtcactctgggggtgctaagaaaggattctgggcagggaaagtggactagaaggtaagaaattgaagacatgaggcaaaggaggatagagccatagttttggcaagaagctccgagtcctaaactgggacaggagcaaacctctcagaatgttctgccatcttttctttgatctcatgactgtgttggggatgaataaatggaagattaggagcttcagagagaaaaagacagagaccaagatggaaagataaggaaagaggaagcaagaagcagtcctggggacgtggctacccacagccagctcactaggggctgtctcttttctctcatccagcgtcaccctgcaaggtggctgaatcctcccaatctagtgtcccccccattcacacacatactcaaagggcagctgaaccctgacactgtgaaactaaacatccttcccatagtgaaactccttaatgtaactgccccagcagctataccccaaatgtaacatcgtgcgtgcacgctcagtcactcagtggtgtccaactctttgaaaccccatggactgtagcttgtcaagttcctctgcctatgggatttttcaggcaagaatactggagtggattgcaatttcctcctccaggggatcttcctgatccagggatcaaaccagcatctcctgagtctcctgaattggcaggaagattctttactgctgagccaccagggaagcccaatgtaacatcaccccctagcaattaaaccactgaacctaacccctcctagcagctaaactccttgagtctaatgctaa

SEQ ID NO: 56696 - DNA, 1190 bp, Bovine  19866881422799
  misc_feature (1)..(1): n is a, c, g, or t
nccccccgagtcttgtgatgatcagaaatgtcttgtgttgtcatttagtctctaagctgtgtctgactcttgtgaccccatggactagactggcaggctcctctgtccatgggatttcccagccaagaatactggagtgggttgccatttccttctccaggggatcttcccggcccggggactgaacctgagtctccggcattgggaggtgtgttcttttccactgagccaccacggaagacccttaggaatgtccagcagcagcataaccctaccacctccccagttctcttctccccgctgggtcctggttcagaccaacaagaggagcagacctccgatcccccaggccgtgcacccgccaagtggcatcctgctatgcccacactccctgccccttctgcccacagccgactggacagacccagggaaccaagctaaagctacttctcaagttcttgtttcccttggaaatgaggcagtcctggatctgtggcagccctgctgtgggctctggccatagaaagtcacgtagagtcaggggtgggaggtggtgcagggctctatgagggcagatgaagaaagcctgagggcagaggtgggaaagtggaggggaccacgggacccgcgagccagtgggagctggagaacgcggcgcccatggttcctgacagctttctgctttcctctccggtgctactatgctttctgcactcagggtcttagaataaatcctttaacttgaccaggctcactgctcctactccttgcagtcaagtgacacctaattacaggtatgtgacctcactatacaacacttcctttctttgagcctagccttccccattagtaaaacgggtaacgagacccacacactaccagctcgtgaggattcaaaatcacacaggatagcagcaagatggcggcgaccaatgttctgggacaggtgctgaggtgtggagagatccccgagaccctcgacatggggccctcacactgaccccctccctctgccaagcactcttaccagttcttctcggtgaggatcgtgtgtgacagctgcggccgggccatggacatcacctggctccgaagcttgctcaccaaggactggaagctggggtggcctcggtacccagggagcagggagaagagggagctggaaccaggtcctggaaagttagaggtta

SEQ ID NO: 56697 - DNA, 1312 bp, Bovine  19866881574755
  misc_feature (1)..(1): n is a, c, g, or t
ncctggcggggtcctggttccgtcctgctctctcggcttaccccctaggtgtgccgcctcccaacccaggccctcttacctgagcccgggatgagtaacctccccccaggcaaccctggccttgcccaaccgggccaaatcagcgtccgctgtggggcgtgacacccgcccctgggtgcgtcgtcacccacagctgccaaggagggaaagggcgggagtcatggttccctggcagttcccaggagaaagtctgtgtttgggatctgagacgggggagagaggagagtactgaggctcacagaaggggtctactcaacgctcagcatccagtaaatattgaatgagtgcaggtttggggtcgggtgatgctggatactaaatagaaccagtgctggtcctccaagaggtcactttctggtgggggagaaagatatgaattaaataatcatccaaattgttatttccagccaagacaatgatggaagaaaaggagggagctaaaaggaggtgtggagtccagaagtagggggctgataagtgaagcatccctggagatgtaaatcactgagttgcctgataaagacttggaggtttaaacagtgaagcaggtcgggatgggggcagagcacatggtaaagccctcggtgggaagcaacatggaccattcaaacccagagaggagagcagtgaccctggagctcagaaggtgaggggagtgagagggaaactgaggcacaagagccaggcagggtcacactgttccaggcatgccaagccctgcagagagatctgaattaattttgagaaagatggagaatgtttctgggggacacaattagatttgctttttgattcagtctggcacatgatgcaaaaacttctcaagaaatgaattcactaaacccaaggaattacccagcaatgaaaatgggccaactactggcctgggcagcaacgtgaatctcaaaaactttatgttgagctcaagaagtcttaaacaaataaagataccatgtgactccatttctatgaaagttctagaacaggcaaagctaatcagtggtgatagaaatcggggtcattttaggaaggtattgccccaaaagagtaatagtaagtagcccctcctgtcttcatctgggtggtggttacacatataactacaaatacgtaaaaaaatcaccaaaccatatgctgtatatttatgcactttactgtatgtacactattcttacaaaaagaaaggaaagggtctttcttgacaatgcagtggttaagactttgccttcctatgcaaggagtgggattcgat

SEQ ID NO: 56698 - DNA, 1041 bp, Bovine  19866881852913
  misc_feature (1)..(1): n is a, c, g, or t
nacaggtgacaaatccagtcccagctcctcagcaacagtctaacctcctctgtccccacagagaatccaggcgatgagcgccacatcagaggctgtggcatccttcctggctgcccaggccccaccggattccacaacaaccacaccttccacttcctgcggtgctgcaacaccaccaaatgcaatgcaggctcaggtaagggggcaggggacctggcataagacctacctaggactgggggcagagaggtgcattcaggctgcttgcttatccctccactctgctttctcctctggaaaaaaaaaaaaaaaaggatctattaagccctttctcaagaaagattttgtgggaattcaaggagaccatcaaagcctcaccaagacctgtgctttatgcttctacatctggaatccttctgctgctcaccacgctggtccccgccatcatggcctctcacctagattgttgcaatgaccttgctggccctcctgctaccctacattcaacacagcagcaagagtgattttttttttaatataaatcaaagcacgtccctcttcctcaaacatttcaatgccttccgcttgcttttaaaatgctgtccgcaggttctcttatgctctctgtaacccaacatgtgtctgcctcatggcctttgcacatacagtaccctccaccaggaacacatctcccctaggagtttgcctgtctggctatttctccttcatcaggtctcagctttaaagcatcattctcaggaaagatgtccctaactctgccctcctaagtataatctagatcctttgtgtttctctgtctctgcaaacaatgattggccaacaggactttcgatggtgatggaaatttctgtatctgtattgcccaatagagtagcctctactacatatggctattgagcagttgaactgaattttggatttcattccatattcattttagtgtcagtgtaaataaccacaggtggctagtgcctatcatatgggacagtgtagctctattatctatttattatttctttt

SEQ ID NO: 56699 - DNA, 474 bp, Bovine  19866881926142
  misc_feature (1)..(1): n is a, c, g, or t
ntagacccaggggtccccgggccccacctccctctgatcctggagtctcagcccccagcgcctcctcctcccttagacccaggagtcctggcccccagcccctcctccttcaagactagaagtctctgcctctaccctccactcaccgggcaccccccgaaccacagcatctccgcatgcaggaccatgagtccaatgccagttcctgccagtgccagtgtccagccagccagactcttctcctgctccagcaggcgctttctccgccgcagggcccccaggcccgacaccagctccccgcccatggctcccggggtcttggggcccagccagcttcctgcccagggtcccctacctcgcagcacgcaaagggcagccacagtggcttgaggcccccggcccgctctgctcccttgctctgggcttgtgctttgaggcacagcagagtctgtgccctctgggaggtggtgactg

SEQ ID NO: 56700 - DNA, 4034 bp, Bovine  19866880399791
  misc_feature (1)..(1): n is a, c, g, or t
natatgcggatgtcactttgttgactattcccactcacttgattcttaaggtctttgctcagagtatttagaaagcctttggtggtcctgggtcttagggtccattatcttcagtgcccatttcgtcagtaagcaaacaccagaaaaattggtgccctctagtctcttgcagcaataactcaaacacacacacagagaaacttccactcaaaggaaaatataaaggacatgctgccaaagactcattaatgctggatgagcttggggcggtaggaggaaaataaatccaaccctgatttattagttttcatgacttgatttgttacttcttgttgaacagaccctattttctcaaacctagcagcttagaaatttccttggccaagaaattactggggcatatcttctgtttgttgtggaagataatcatatcaggcttttttcatgaatgggtgttttcagctctccatcttgatgggttaaaattaatttttcatacacatacctgaaaggatggaggattatgggaggtggcagaatgactgatagcaataatgctaatttttaacattggacactgtattcatcagggtgcttagttgtatgtaacagaattctccaagctaatttaaacaggacagtacttgttatgtggaaaaggcaatggcaacccactccagtactcttgcctggagaatcccatggatggaggagcctggtaggctatagtcctggagtactagaagtagacacgactgagcgactttgctttcacttttcactttcatgcactggagaaggaaatggcaacccactccagtgttcttgcctggagaatcccagggacagaggagcctgttgggctgccatttatggggtagcacagagtcggacacaattgacatgacttagcagcagcagcagcagcagcaacacccttgtaactgattccaaagcatccaactttgcccctagaaaatctattctccaccagcagtaaaagtgattctcatgaattatgtcattttcctgctcaaaacactcccgtggcttcctatctttcttaagtgtatatgcccatgctcatacaatggtatcctgtaaggccctacatgatttagtccgacttctaccccagccattttggcctccttactcctccctaccgatgcccaagcatcaggcttactcctttgcctctacttgtaaaattcttgtctcagatggttataccaaatttcctctgtatctctggatcatatgtgactttatcaggagcactcttgactatcctataaaaatttgtaatcctccatccagcattccataaaaacctttctcttatttttcttcatagtacttattaccatctaaaatcttacacactcatttatttgctgccccatgatctagagagttgctctttttcactcttatcctcaattgctagaacaggcctgccacattacaggccctcaaatatttatttattgaatggataaatgaccttagatctttttttaggcaataagctccttaaaaagagctaaagtcaatattatgtggcagcctggatgggaggggagttttggagaatggatacatatatgtatggctgaatccctttgctgttcacctaaaattatcacagcattgttaatcggctataccccaatacaaaataaaaagtttaataaaaaaaaagaagtgaagtctactttgcgtctcccaggtcactttgtagggtacctgcacagagtctgttaatttttctgtcatgaataaagacaatgcttaagcaaaagaatgagaataagattcaaaggaaaataaaaaataaaaacaaaccataaacgtggttatgcttacctgttctattgcactctttaatttgttcatgtggctttcaaacagaggaaaatgtgaaaaaaagaactcattaaatttgttactttcatcttcatctttggataatgaaaagattaccccaattgcaatcttctttttcctcacaattcctgggttagggccacagctttcatctgacagattaaagctttcttctatagaccttaaaaataaatgttttttttaattttaaaaatatgaaaatgattaaattcacaattcaatctccttggtaattaaatgtaggcaagctaaaggtcttgcagtgttttatcaagtaaatctaaaaattcgtatcaattatgtatatctttgagaaatatattggctattcctttatattcatatttttgtaagaaataatagagtcagattggaaacgtttttgttcaattatggaaacagtgacagacttaaattttggggggctccaaaatcgctgcagatggtgactgtagccatgaaattaaaagacgcttgctccttggaaagaaaaagttatgaccaacctagatagcatattcaaaagcagagacattactttgccaacaaaggtccatctagtcaaagctatggtttttccagtagtcgtgtatggatgtgagagttggactataaagaaagttgagtgctgaagaattgatgcttttgaactgtagtgttggagaagactcttcagagtccttggactgcagggagatcaaaccagtccatcctaaaggaaatcagtcctgaatattcattggtaggactgatgctgatgctgacactccaatactttggccagctgatgcaaagaactgactcattggaaaagaccctgatgctaggaaagactgaaggcgggaggagaagggggtgacaggatgatatagttggatggcatcaccaactcaatggatatgaatttgagtaaactctggcagttggtgatagagaggcctggcatgctgcagcccatggggtcccaaagagtcagacataactgagcgactgaactgaactgaactgaaaaaaagtaagtaaccccagtgtaaaaccaacctaaaagagcctgaatttcaaggtttatagacgagtctaatctcttcactgttctagaatctacttctcccttttgattccagaagtaaagtcaaagatgaaggaataaagggagtgaataaaaaaggaatcaagcttcatcatctttacttatacttaacacagatttaaaaaaaaaatttcaagaatgaatgaatttgcctgaatagaaacatgaaaaactagaatctcaaagcatgcaataaatggatcaatgaccaaaacagaagagttaaaactataaaacccttaaaagaaaatataggataaaatcttcatgacactggatttggcagtgatttcttgcctggaaaatcccatggatggaggagcctggaaggctacagtccatggggtcgctgagggttggacacgactgagcgacttcactttcacattcttggatgacaccaaaagtaaagcagcaaaggaaaaaaataaatccggcgacacagaaattaagaactgccatgtatctaaagtggtttcccaggtggctcagtgataaagaatctgcctgccagtgcaggagatgtagcttcaatccctgggtcaggaagatctcctggaggagggaatggcaatccactccagtattctcgcctgggaaatctcacggacagaggagcctggcgggctacagtccatagggtcacagagtccagggtcagatacgactgactgaacacaaacgcacgtgtaccaaaagacgtatcaacaaaataaaaaggcaaccaatagaatggtataaaatatttcaaaacatgtatctgataagggattgatattcagaagtatataaagaactgctacaacaatacatctgattaaaaaatgagtaaaacacctgaacagacatatctccaaagaaaacatacacatggccaataagcatatgaaaacatcatcactagctattcagttcagttcagttcagttgctcagttgtgtccgactctttgcgaccccatgaatcgcagcacgccaggcctccctgtccatcaccaactccccggagttcactcagactcacgtccatcgag

SEQ ID NO: 56701 - DNA, 1550 bp, Bovine  19866880417455
  misc_feature (1)..(1): n is a, c, g, or t
natgtaattctgggaactgaggtattaataatgtgttttcctcttttttagaacaaccaatttgtaatctttatacaatgccacgaattggagagcctgtctggcttacaatgatgtcgggggactccaagaaaagaaccagctttgccatcgtttcatgaaggagttcactttttctaatggaaaatgcttcaaaaaatcagtatggccctcgctctctcccatcctccctttcttccatctatccatccatctaggctatcttaactgtcttagctgttatttataataagtgaatatctagattgtgatcaagttcagttacaaaaatgaaagagttaatcattgcctttggaagttttcatattattaatgatcaagacagaattataaaaggtaattaatataattaaaagatatagaagaaggccaaagaacctgatgttgagaaacagtaaaaatgtatttgtgtattaaaactcctgacatcttacggaactgtgtgaggcttctcatttttcataattatatctatatatgcagtttcattctctagaaaacaacttaaaaaatatatagataagtgccagaattccaataataatgttttcagtatggtactttatcatattgctttcttctaatcattcatcaaattcttagactctagatgagtaatttaaatgtttatattctctaaacaaagttttgttaatactttctttcattttccttttcagtaattgggaaatgtatagacctactgattgattcataaacactgaaaagaatccatagtttttcaaataaaatggcatttttgttttttaattatgagtcaaaatagctccttatgaatgctatctttattttaaggagttttcttttaactagtacaacaaaaatttattaacttttgttttcatcttggtgatatacctatcctttcctctattctttctttttttttttatgacgatggccatataccctctctgctttattctgtcactgctttttgcttgaggttttatgaaagcaggttagaatctgataggatgcattttgttttcagattcttgccagcacttattactgcagttttgaccaatcatcttgcctgggttccaacagtcatgccaaatggacaaccacctataaaaatatttttagaaaaacattcctctcagagtgtggacatgttggcaaagactcatccatataatccactttgggcacaactgggtatgtattctgaaaacccttacctaatgcattatacttagacttttgtgtaactatctggagttatttcatagcaaaaataaatagagaaaaattaagtgctcttttttccctttcctttctaaagcacttcttccttgttgttacatgactgctaaattgtcttatcccaatcttatgtataatattgcttatggatagagacttgcaactgcaacaaaaggagcagaatttactactaactttggagtcttctggattttttgtatttagtactttgcctagaaagaatgaatgaacaaagt

SEQ ID NO: 56702 - DNA, 2951 bp, Bovine  19866880432556
  misc_feature (1)..(1): n is a, c, g, or t
nactgctataacagtgttcaaccacatacgacagatacaaggaagctgagcttaggcagataagtcacatgaatgaaaatcaagtttactaatgaaaagacaaatttcagtattcatctgacacgaagtcctgagcctgacaagatgctatgtgctaaggaatacaaagatgaaaagttacgggcctcagggagctgagtctcaggccaacaggccccaaaatctcataatgtgaaaatccaatgtcatacttacatcttttgttaaagataatactctaaggtttgttcttcagaagcatgaactaacagcagatgatgagccaacagaaaacatgatttcctaagatatgaaactgcctgctttaattctatcttttccataagcaagtgtataattatctccccaaaggctcagagaaaacaagtggcatttgtctatcacaaatggcaaaaacggtaatagcaatttttcactgttgtttagaaaccgatttggcttaggatttaaaacagtcttaaaaaaaaaaaaggactcattctatccacccagcactccaatatataagcgatagtcttggtcaagtgtgatagtttctctgaactctaagagctgtgatgaccaggtaaaaatcaaaatgagcaaacatcacatttacaaagaatggtaatatcaaaaacaatttttgctagaaactaacacaaacattgtaaatcagttatactccaattaaaaaattaatttaaaattaaaaaattcaaatgaaaactatcatttctaagttatatgagcaaagactaaaaggctcagatacctctggagctcatctgtagaatcttgagccccttcctcatcttttgtctgctactgatgaaatgatattaaggagctaccatttactgtgtacctactatgttccaggtataaccacaagaaatagccattattatcctccacttcactatcagagaacctgaggctcaaaggagtaacttgtccaagatgacaggctaggaagagcaaagcagggatgtttatctgtgcctgcctagctcgctttagttggctacccactaagaattcagatcacaaaggatctgggaagaagcactttccgaaagagcaatgaaagttgaacctagctctaggtcatctctagatcacaaaaggaggatgggtctactctgggtggacctgaatactaggtattagttctgtgagccctctcagtatgtttggtatagccattccataaagaattcttattctagactaatatgaaacagatctgatcatcttagaatctttccaactggaaagactccatcacaccaagtctgttttgaatcaaagcaaacctctctcctcaggcaaggcccaaaataaggggtgttcaaggagaaggggcaagaggcaacttttgctcttacaacggaaatccatttcgtgtcagcctgcaagacaggaattatgataactcacgctgccccagggaacatgcttttggttccaaaggaaagctaggaagaaccaaaaaatctaggataccaatggtatcatcagtggtcaagtgtatttcctggtcattgagagaatactctttaaatgcacttagatttcttccaacatgagatgactgctttatacaacttaataattgtaggtgcatcttccaattctgagtttgtaatgagaaagaaactatgttggaaataactacaaatgatcacaaaagattaaaatatgaccagctgatagactgttctgggacttcagttaggttctaaacctagtgttcttttcacatcacattgctttattaggagatattttgtgggataataaaatgggttgatatctagttctgtggctgcactatagaaaaaaacaacaacacaaagacaaaagaaatactccttttttgaaacaacgcatcagttagggtctaatcaggaaagagaaaccacttcaagtatttacacaggaggaatttaatacagggaattggttatacaagccatgaaattgctgagcaccaaagaggggattccctgggcttccctggtggctcagatggtaaagaatccgcctgcaatgcaggagaccctgggtttgacccctgggttgggaagatcccctggaggaggacatggcaacccagtccagtatccttgcctgatgagtcccatggacagaggagcctggcaggctacagtccacagggtggtagagtcagacacgactcagagactttcactttcaaataatcaaaacaaactaaccaaactaacaaattaccaaatgagctactattataataaatctcttaagaaaaacatcaaattttgaatatctgcttacagatattcaagtgaatttgtgaattacaagtcacaaaaacaagcaccagtttacaaaaacaagtaaacaaaattactttaatatggttgtggaaaaggaaagggagaaagtataatccctgtctccctcagctgaactattcaagagaactagtaagggctttttaccccaacaaaagtacttttcaaagacgcatcgaaattaaaaacaaaaaacaaatcagatatttcttcagcagttcccttttttcagatacaaaataaacactaagttcaaatataagaaaattatatttttcaaataatacaaatattataaatacttgcaatttaaatcccttttccacttctagtatttgaaatcctttggtgaaattttaacagatctacattggtaagaacatttttaaaacatacaaaaccattttacctatatttccaagtagtccattaatgactgtattattatcggcctttaatgtactgttgtcctgattaatgaattcaagactgtcttgaagcctaaggggaaggaggaaaaaaatgaataccaaatctatgtttatgctcttaatggcaattctttgtata

SEQ ID NO: 56703 - DNA, 723 bp, Bovine  19866880449564
  misc_feature (1)..(1): n is a, c, g, or t
ntatccattcatctgctgatggacatctaggttgcttccatgtcctggctattataaacagtgctgcgatgaacattggggtacacgtgtctctttcccttctggtttcctcagtgtgtatgcctagcagtgggattgctggatcataaggcagttctatttccagttttttaaggaatctccacactgttctccatagtggctgtactaggttgcattcccaccaacagtgtaagagggttcccttttctccacaccctctccagcatttataatttgtagacttttggatcgcagccattctgactggtgtgaaatggtacctcatagtggttttgatttgcatttctctgataatgagtgatgttgagcatcttttcatgtgttttttagacatctgtatgtcttctttggagaaatgtctatttagttctttggcccatttttaatcaccactttgaattggtcctgttgtgccttgtgtacagagaacagaaatgtttactataaaggcttctcaaatattttaaagtgatatgtggcattcttttgaagtgatggaggcctgagccagtcacaggatgacagcattgtgggaacgagacactgcaggcacagtctggccatcatgcctatccctggaacactctcgtccagcagccccgacctcctccagcctaccaccagcatgttggatttttctaatccctcaggtaattggtg

SEQ ID NO: 56704 - DNA, 1962 bp, Bovine  19866880460874
  misc_feature (1)..(1): n is a, c, g, or t
ncatttgataaaactcaccagctattcacagtaaaaagttggaaaattgaagaggaggaaacattaactttttaaataccatatgtgtgcgtgtgtgctcagtcgtgtctgactctgccactccatggactgtagcccaccagattcctctgtccatcggattttccaggcaagaatactggtgtgtgttgccacttcccccttcagggcatcttcccaacccagagagtaaacctgcttctaacacattgctggcgattctttaccactgagccactggggaagccctaaatgacatatactggaaaccaagagccaatattggactccaactctacagttcccattaccgtccaaacaacggacattatccaaacaatgtcccttcactactgccgtgaagtgctgcttggaggtccttactaggactataaggtggaaaaaaaagaaataatggattagtaaaagaagtaagtaatggagagtcagagggtcattgctggcagatgttatcatagttgtgtcttcataaaatccgggagaatcaattgaaaaactcccatgactagtagagggatctagtcagatggagcagaataaggtatattcgtatatgtgttcagatttttaataccttttaaaacggttaagtcacaactactgatacttaccgctggtgatagtgctttgaaacatttacattttctaggttacgtgttttgtcggggttttaattttatgtaaataaatttgtattgtatttataactagaaagaggaaggtaataaaatgaaaaataaagaaaagaagaaaaggataaactttcctttttatgtgaaaaccttacaataatatacttccacttggccctcccttcctttcgattgagttgtacatttactgctacaaacatgatgaactccataatgaagagttgttatttttgctttaaatactcagttgtctcttaaattgtttaggaaacaagaaaatatattttatatctacttattacagacctttgttcttttgtttagagccaagtttccatcaggtatcatttctcctcagcattaagaacttccttgaacatttctggtaatgcaggttcactggtgataaattctctcagcttttttaaaaattcaaaatatttttatttctcatttattttatagagatagtttttctggatatagaattcttggttgatttttaatagcatatttaatatgctatatattttttatgttttcatgttttctggcttacatgacttctgatgattgataagtgttcattcttatcattgttcctcttaatgtaacgtatttgtgcctttcattgtttttaagatgttttctttggttttaagagatttgattatgatgtgcctggatgtggtttcctttgtatttatcctggttgaggttttataatcctaagcttttggggatgatgagttaataatttttaaaataaaatttagaattttagtcactattttatttaaagtttcaccataatctctttcctttccttctgggactctaattttatgcatactagtctgcctgatattgtttccaggtcatttccctgaagctctgttcactttttttcagtctattttctttctgtgtttgcatttaaatggtttctattgacttgatttcaagtttattgaacttttcttttgcagaacccagtcttaacgactacctggtaaaactttcattttatagattatgtttttcagttctagaatttccatttagttcttttttacagtttccatttctctgctgagatggcatatctgttcatttattatgtccatcttatcactgaaaaattcttaaacatatttataataggtgttttaaagtccttatctgctatttccagtaactgtgttatctctgaatctggttctattctcctggctatatatcatatttt

SEQ ID NO: 56705 - DNA, 756 bp, Bovine  19866880619428
  misc_feature (1)..(1): n is a, c, g, or t
nctgctggaaatttttttctttgctttccataggagaatgcagccttttaatgtaaatacatttgaagtatattaatttataagagtgttatagttatcaaatttggaataaaaacttatttttcaaacttctggatatggatggtggtgataagttgcataaccttttgaatgtacttaatgcctctcagttgtataaagtagttaaaatggtaactcatatgtaaaatggttaacttgatattgtatgtaattcaccacattaaaaaatagctctgtagaatctaaatctttgatacaagctagtgagtttacactcctttagctaaaattgcatgctttaaaaatatgctccaaattttagattatgttggaatggctaagtagaattgtcaaagtataatgttttggaatttgccattactttgtgttgtgcattttctgacctcattcttggttccctcctaactgcagtgtgtaatgcatcttgaagatcggttacaggagctgtacttcaagagcaaaatgctgtctgagtacctgagggggcagatgcgtgttcatgtcaaggagctaggagtggttctagggtacgttcctgatttcttctctggctttgctttttcattgcactgtctttatttaggcaaggaacattcatcaaaattgcctttttctttttaaattgttgtgttgttagaacctgtacagtattatcatctggattgctctctacaatataaaaacagaaccttg

SEQ ID NO: 56706 - DNA, 1135 bp, Bovine  19866880631144
  misc_feature (1)..(1): n is a, c, g, or t
ntatgggtgcactagccgccatcctcgcctactggttcactcaccgaccgaaggccttaaagccaccgtgcaatctcctgatgcagtcagaagaggtggaggtgagcagcgtgtgagcagctgggctgtgggaagtagtgggcaggggacaggcatcttgaaggtagaacccaaacttgtggcttatttggcctcagatggcccagagaaccttggtttcttccctgggcagccagccaggaagctctgaagcggccctggacaggctctcctaccagatgcaccttctgcctctcccagtagctgaaacccggccagagactgaccttgcccttgccctgggcctctggtttacctgcttctcggggagggggccttggcttatggtggcctcagtaggaggcctaagcatgttctcaagggggtgctgggtaaatttcctccaagattctccctgtgcccgaccctggtctggagctgggacccagaggggcccgaccgcagggccctgcccttccagagcacacaactcacaggcagagccgctgagggaagaagggatggcagcccggcctggacaaggggttccaggctcagtctagaaggacctgtaagatttgtttcctacgtttatggaatttattttgccttttaaaaacctttgaaagtaaaagtattagtcactcagttgtatttgactcattgcgactatggactgtagccctccaggctcctttgtccatgggattctccaggcaagaatactggagtgggttgctaggctctcctccagagaatcttcttttagttattttgaatagttagtgtacagttcaaaagcagccaaaggacatagactgataagcttccacctttttccctttgcctcccagttctcttcacctgagcattgtgttagctgttttccacaagcaaacgtatagacatctgcccatgatttaaaatgataatacaccacgtacaccatgcaactccttgcttttgctcttggcggtgtatcttgtaggtaccgatcataagcatgacagagttttgtctggtgggagagggcacaggccgagataggagtgggacctttagagcatttttccagaaaatgctttggaaatgtgtg

SEQ ID NO: 56707 - DNA, 894 bp, Bovine  19866880676956
  misc_feature (1)..(1): n is a, c, g, or t
ngttttttaatcctgtaactttctatgtccccaaaatccctctgtgatttgcaatatggatgtaggtgcctgatcacatgttaaaacacaccacatcttggtcagacagaggtgatgccattattgacaaacaggtcaccaatagggtgagcctcacagattctaattatgagagcaactttgtttttgtttgcatctattcttttacaattgcttggtggggattgctctttgtctgcccctggataaaacttaggcacccatgccttttctggttcctctcaggtgagtcccatgggcattgtaagtcacaaactcaatcttaattcagaattacaagtgtaggtccaaaatatgaatgtgtccacttcgttgagatttccctacccaggccagggctggctgcaggctgggtgggaaaggtgtgagatcatgccttcctacctggtggtcctccccttcctccactggctggtaaaggtttctgccctctcccaccagatgaaagtagggagggagaatggtttggggcagatgtttacaattcagtctgttgtttcatggacacttttaggaggtttgttaaagcaggcagtgcctgcctttggttgtctgctccctgcttcacatgcgcttatgtctctggtatatactttactgccccctctgatttgagggcgggtactggcctttgggtaagattcctctttaagacaccattcccatcaccacctgatgtaccttctgtagactccgtgttcagtttctgggatttattatctgattttcagccacagccgtcttcacctttcttattgggaaccccgatctttaaggaacatgattgtgcttttcaaatagcctcattagggcctgagttagcttgggtttcag

SEQ ID NO: 56708 - DNA, 1774 bp, Bovine  19866880679829
  misc_feature (1)..(1): n is a, c, g, or t
nttaacaacgaaggggctccttcagttttcatctaagccagatctcagtttacaccagctgctaagtcaattcagttgtgtccgattctgtgcgaccccagagacggcagcccaccaggctccgccgtccctgggattctccaggcaagaacaccggagtgggttgccatttccttctccaatgcatgacagtgaaaagtgaaagtgatgtcactcagtcgtgtccaaccctcagcgaccccatggactgcagcctaccaaggctcctccatccatgggatcttccaggcaagagtactggagtggggtgccattgccttctctgacactagctgctgctgctgctaagtcacttcagtcgtgtccaactctgtgagaccccatagacggcagcccaccaggcttcccgtccctgggattctccaggcaagaacactggagtgggttgccatttccttctccagtgcatgaaagtgaaaagtgaaagtgaagtcgctcagtcgtgtccgactctagcgaccccatggactgcactagttcaaggtaaagccaaaaggcaactacaatgttacagagctcacaactgtacatccaagaacatgactttgtcatagagtcaagttcaccacacctggctgctactgctctgcagaattctctctcagagaagctccttatcactcaaaaccatgattttatggtgtcgaaactactgaatggccagagttgttattgtttttgcttttttctcaagttgggaatctccaatacatatatgaggtgtcttggaagagcaattatccaataaaggccccatctgggtctagtattccctttctatacagtttactttacaaatgaaggtcagagggccccagttgcataaataagttcttgctttccaaggagctctctaaatgtgcacctgctgtagaaaagcacaagagaatccttgttctgccacccttaagggtgcacacagtgactccctcaaaaattttgagtacaatggtgctcttttgctaattcagaaggaaaaaaaaaccctaaaatgtacatttaaagaccattattctaaattatgaaaaagatttaataaataatcacaagaacactaaattttatattctttcagtccaagccccctctttaaattttggtaacacaaacaagctagattttttataaaatgattttctggattgtaaataggcaattacattaacatctagctgagcatgaaatatttgcccaacaaaagtttaaagtcatatgcttaaaaacacatgaaaagttaaaactggcactgcaggtaaagctgcaaatgtgttttaaagccgtataaaaaagaagttcctctttcaaagtatgacttaagttcctctatctgaattgtctgtgaagaactgccaggtaaaacacatagtttctttatggtcactgtacattatttacatcttactaggagaagatttggagaaggaaatggcaacccactccagtgttcttgcctggagaatcccagggacgggggagcctggtgagctgccatctatagggtctcacagagttggacacaactgaagtgacttagcaggagaagattaacagcaaattttgctctgtgccaaattcaatcttttttccccagcacttcaaatatcagaccaacagaaattactactagaaaaacacgaaaacagtattggtcagattcttttcctttttagagtcattcactctacaaatattggttacctaccatgtaacaagt

SEQ ID NO: 56709 - DNA, 961 bp, Bovine  19866880689095
  misc_feature (1)..(1): n is a, c, g, or t
ngctcacgtattgctgaagcctggcttggagaattttgagcattactagcatgtgagataagtgcaatccctgactaaacaaagagaagccaactctttaaggtaaagataggcatgacaaccaccaagactggaagtcactatatgatgttgctgaagatgcagttcctaggaatgcagtttctttaataattaaataagattttttaaaaatgtagtatccacagtgtccagcatacaatataaaattattagacagatgaagacactagaaaatgtgaccataacctggagaaaaaccaatataaaaatatccaggaatgatgaaactaggagacatgaatttttgatatttaagtaaattcagggatttaaggtctggcctttgaactattttaatcccagcagctgggatacagcagatcctcagaaagattatgataaatagattaagctcagggggaaaaaagtatattggccaaaggactaaaaaatattacatgttttgtgtttttcttttctcatagtatgaatgtgtctctgtgtacacgtataaatataatttggtgaggtagacagtctgagatggttttatgttgacttggccttctccaaataaaccaccagaggatattctttttctgtctccatctacataaacgtgaagctactatgaggagaataaattagtatgagaagttacacaaattatagaagccacattttcaaatttagagcaaagattaagcagaacctgagatttttcagtgcttatctctactgaattcccactttcaatatttcattcaatctttttcatggatcatttactccttaagtttcctcttagtctttctagtcatggcaacatgaaattaatcctttcacagtaatgcattctaggctggcccagtccagtatctctacaacagggccggtagggaggcaaggtctcctttgt

SEQ ID NO: 56710 - DNA, 1299 bp, Bovine  19866880753534
  misc_feature (1)..(1): n is a, c, g, or t
ntggggctggagggcttgttcccgaacctgtcctccagtgtcccttctggggtctatgaggaagggggtctctccctaagtgtcaagagggcagcatgggcagcctttaccttgacgggtgggcctggggaagcttatttggggagggggagctcctgcctgggttttttctacaccctacttgcttgctctgctcaagccaccaactgtagacagcaccagtcctgggcaaagaccaggcagaaagggtcatgactttagatgcaattataaataaaaattcttacaccaaacctgaattttagcaaagacaagaatccacagagtatgatgtagtcatagaaaatgaaaaacacatcttgcccagagataacgtagatcctcgctgccttctacataaaccaatgataactgataagagatttagcatttcctcagactgaggtacatatagaggtacatctcctcacagaaatgctatcaagcccagggttcggatcagcttggaaccacctcaatcataccatgttcctgtacgtgctcctggcttgtgcgtcatgggtcttggaaagccattctgccccgatgaagataatcagtgggtctacccaggacaatcacacggcagtctgtgctgagattgagaaagaactcatggctgacaacgttacatacaaggtaagtctgggtcttcatcaaatatcactttactctcagtggccctctgtgtttctaaccaacttttcctgcttccagggctccttcgaaaggcctcagaacaccagtgaggtaaggagcagtcaacccatggtcatttctgaccccacttgaaagggaaatcccagggcagagacaagaacaaaagttgttgggtcaacaaatctggggagaaagttgggagtttgaagatgaagtctctggctcaggcagcagatgaaccagaagccaggttttgccgggctctttgatcactatcccagagcagccccatgcctagggaaagatcagaaacccactgcaaacctcaactatccctggttaccctggcctgaatttgagtccagggttccatctggccagggtaactagggatggatgaggctgagggtcagtggaccctcaattcaatgccctcaaccctgtttcaggaactctgctatgggaagtttatagagggcttcatctccaccctgaataacatctctacgaaacacaagaatgactgtcacatagaaaaagtctgtaagaacatgaggcaactcaccgaaatctgcccaaagctaaagtaagtgttcttag

SEQ ID NO: 56711 - DNA, 1216 bp, Bovine  19866880824999
  misc_feature (1)..(1): n is a, c, g, or t
ngaaatggattgaaaagtctttgtaaaatgttatgtaaatataacatttaagaatgtctgaatttgcattcatcataaataaaagtaaaaattggacagaaaacgttttcaaaccaataaggattattatgtttaaagaatctgaagttatgtagctataaagttatgtataagttatgtatcatgtctgtttcagcaagattctgtattagttttcatttaagtctaatttaattgtgattttgtccatcagttattgaataaggcagtccaccttgcctcagtatttgccatacctgtttactatttcaaaaataattaagtacaatgtatcagttatgtttttcttttatatttaatagaagttctgtgaacattgagaatatattacttttagtggtacacagttcttaagaaaagtcgatttttttacaatgccacttgtgatatttttagcagcttgctacaatatcattgtaataaaaataaagtgtactcagtgatgagagagaaaatattgttaaagatctctagagacaggaaaaggctcagtcataaggtcacatgcttttcattttcagctgcatcattctgacttgttactttcaagaacaactataatattgctacattgtccattataccgagaagaactttccttgaacttcacatggaggttgagtaaagctcttctatttgttttttgaagtactctctcagctcaggtctcttagcctttagggtcggtgtcagcaagccattttgaactgagaacatatcagagtggatgtgaatggctttaacctaaaaaccaaacgcagaatacatctttatcaggagtataacacaacattcatagcatacatggtagaagtagacaggcatgtgggaatagaaatactgacataaaaacaggcctatttaaaaagtcagagttactgtaacagcctgtcagcttatttgatatatctgaaagccacctcatccccttcttactccccaatttagccagtcaacagaaatgaatgaggtcctcactctgtgccaggcaccgagggcacaaagaggaatcacgagtgcccctacccttggggagtgcatgctggtatccagcagaggaggcacagtgggcaattattagagagaacggaatactcagggaggaagggcacctaactcaggggaagccttcccaaattagggggagtgttaaagg

SEQ ID NO: 56712 - DNA, 1262 bp, Bovine  19866880893635
  misc_feature (1)..(1): n is a, c, g, or t
ntcccacagtcccactgggggccctgagtcagtgtacccgctcgatgttatcacggccactttccacgcagtgcaatctaggaatgcctgcccgtgtcacagcctcagccctgatgtcatctttccagaaggaagacgcgtggctgcccatgaacctcattgtcaaacccctggacttctgtcctctgtgtgccgacttcaatgcccacaggccaccctgctggtgtggacctctcctgtggctcctgctcctcctttccttctctcccaggaccactggccagtctcttgcccagctatcatgcctctggcccctaaacactactgccctggccttcagcccttcttctcagataacagggccctcagatcctacagacctgcttttccatcccctgggtcctcaccttgggcacgtgggcagtagctctaaccctccttgcttacactcctcagcacactgtataagccgcctcctcttcaccatgttattgctgttgtttggtcactaactcgtgtcacctctttgaaaccccagagactgttcccatgggactccctagccaagaaaactggagtgtgttgccatttcctcctccaagggatcttcccaacccagggatcgaacctgtgcctcctgcattggcaggcggattctttacttctgagccaccagggaagccccttttcaccatgcctattcctaaacctgtttgcgcccaagacactctccccctaaactatcctcttcctccctccggcaacctgacttgccacctgactctacctgccctttcagcacgcactgggagcgtctcccaggaaaagtctctggtgccctgtgaccactgagctggaataagtggttccttgagattccttagctctgaatttcctccatcccagcccggatggtacaatgggagggtccactgcttgctcccctacaggactgaaaggcgtcagggttagatgaaaggaccagtgggagggtctcaacttcctcctcctcagcacagggcttggtgcagactggaagagtttgttgactaattgtctgagctgtgacaactcatttcgaggaggaaagtgaccttccatctcagagaggccacccagccctttgcctccctggccacaagcttagcgacagcctgtggcccctgcttcccaccacacagcctccagggcgctgcctgacacagactctcactcgctgtggcaccttcccctcttcccccttgagcgttccctgttagggc

SEQ ID NO: 56713 - DNA, 3653 bp, Bovine  19866880979040
  misc_feature (1)..(1): n is a, c, g, or t
nccgccctaccacgctgtcaccgccgggcctccgaggaagagtggcgttttctctcgactttggaggcgagtgttcttttctaaaatcttcctctctcatacacacaaacgcacacgcttattcacttactcactcactccgcgcgccctctggtgggcagaggggcgggggaaggagaaggaaaggaactaatacagcgacggggccgggaggtggtggcgcgggggtggggggcagacccggaagagagaatgctgagctggccgggaggcagataccgcccgcagccaaaccggtgatctcccggcatatccccgcggtgtagtcccttctgcggctgctaggggccgcccgcgctcctggtggtgcccacacggggcttttcctgcctgtgctcgcttttaacattcctttgcacacacagttcctcacccctgaagagctcttccctccctcatcccttagttcccagctgacaccttccttgactccatccagatcaaacctttttggagtgatgtccccttactaagcacctcagacctcccctccctattaatagacttgcgcctatgattcacgtctgccatccacccaggctgtggcttccttaaggacaggtatactaaggtgcttagtgacgtccgactctttgctaccccatggactgcagcccgccagcctcctctgtccatgggattctccaggcaactgtactggagtgggttgccatttccttctccaggggatctttccaacccagggatcgaacccacgtctcctgcattgcaggcagattctctaccatctgaaccagacagcacagtatatatcttgctcaccgttatacctagtgcctgagaaaatgcttggcatctgaaccagtgcagcactctggagccagagcctgtgttggaaggaggcaggccagggcaccgatacagcgcaggcgcagcggaggaagtttattagagagccagggcgcaaacacatatttacacggaccgcgcggggacgttaaaagcagcagaggcgggaatgcgacgttctgggagcggctcagacgagttccaccttgggcattagggtacaccgccaccacgtcgtagccctcgggaggcttgacgcgcgccttggcgtggctctcgcagtagagccgctcgtccagaaagaagtaaccgcgctgtttgaggttcaggccgcagtcgctgcacatgaagcactcggggtggtagagtttgtcccgcgccttgacgatagtgcccctagtgggtgatcggagaggacggcgtcaggggctgacagctccgtaaagcacggccttactcagggcctccgacggaggaccctgggggcaggtggggaaggcaggggaggtactcacacgatgccgtggccgcagcgcgtgcattcgggcagcccctgcaggccactcagcggagcgcctagcttgctggccgtgggcttgaggttccgaggaccgccaggcccgggccgttcccctgaaagacagagagcgatttgcaagagcccattgcggaggtcagaaaaagcgggaaacttcacttctgtggagtgcggggctgcgccctacttccggagccacccgcacagagattggggagggggttagaagggcgtgaaaggaggagctgcgatacaagtggagtggtaatcagaaagccccggtgcagcgaggggtgtgaggaggcgcagagaacacgtgttgttgttcagtcgctaagtcaggcgggacacgtgggaggggctaatggctgggaagcaagatgttgggtcgcgaaagcccggatgggacaggttcggagggtggagtttgctacttcaaggagtgggaaggcaggtggggtaaagaaaagagtcctaccgccctcgcccgcctccagcatgccctgcaaatagcggaaggagcctgactgcttgggctccgcagctgcaggctcggctggctcccgaagcatcctgtacacctctgagcccaggtcgactccgcagtcgcgacttctcggaaggcctctggctgggtcagtgctggacgaaagagatacacgaagggacagggttgcagtattagccttccccctgccagttcagggttctggtgaggtttcatgagtcagaatgcaaccagctgagacccaaggttaagggtcaagatgggacctggtgtgagattttgagggatcaggaattaagatgggaactgggtagggcatcaaaagtcctgcctctgtactacctgtggggtggagacacgtgcagggcacccatctgggccagtaaagtagcctcactgttgctgccattgtgagggactgggaggcgaggtgactgcccgtaaggagatcccaagcctggcctgccgtcttctggcccaaggccggtggctgagggccgcctgcttgtcagtggactgccatcctaggagagagagaaaacggaggcactgggagaccctctgtggtacacccacctatgcccagctatgccaagccttcttgggtgttggctggctactcttgctcaggcatctctgggctatggtgtctagtcagggaacaggtttgtggaggaaaggctgagccttgggcctggttcaacccctgaagaaatgagaaatgcttatggaaagtcagacacaaaagccctgaatccttgagactcaaccttggctcatgagccctgtggtggttctgactcccagtgcccatgtgggtggtgtttgggcaggaccatcccaagaagccttttaaggccagcgtgtctgttgcacagtgtgtggcttccttgcgaaggtggtcctggtgccaggtattttttacctgtcagaaccgcgctgggtactagatgggcccatggctgggaatgcaaaacaggaactcccgttctacagccaggaagggtcatcgatcattgtgtcccaggacccttcggcaggagcaggaggtttaaaggtaccattgtggtacttccctggtggtccagtggctaagactctggggtcccaatgcagggggcccagatttgatccctggtcagggaacgttaccccacataccacaaccaagggtttgattgctacaactaaaaatccagcaagcaatgataacaaagctcaaagatccctcatgctgcagttaagacccagtgcagccaaataaataaatttttttttctttaagaaaaggtaccattgtgaggtcagcctcctctaggcctgtattttcacccccacttcctgcttcccaggcaaaaaatgggtggccttccatagatagagcagatgaggggcagaaagcaggccagggctcaaagctccccatcccacgaccctacagccagcctgatgcccatgacagagtcatctaggggagggatgccctgaatatgcctcctcaacccaagagaagagggaagtttctttgcaggtgcaggtctgaatggggactggggacctttgtccctgcagtgctcagggctgtgttgcctctagtttgtaggcacacaggcctgtcctcagcagtatgacaacaggcatgcacactctcacaatacctttagagacatacccatgcaggaaggcaacatacatggatcagccagtccacctacatacacctatcacacagagtta

SEQ ID NO: 56714 - DNA, 2167 bp, Bovine  19866881009788
  misc_feature (1)..(1): n is a, c, g, or t
nttcgtggtttgtcctagtttcagccttttttttacattcagttcagttcagtcgctccgtcgtgtccgattcaacttaattcatttacattgcagattccaaacttttgttgattatctcttatcagctaaggtttcttctctttttgtctacattatggccttatgccgtttttatgcctttattgatattttagtgtttccagaaggaataactaaatctggtcaatcctccagattaaatatgaaatcctgagttaattttaatcatgttgcaaattttctagattccaagacagaattaaaacaattatatgttaaatagaattctgtgggttgctcaaaacctaaccatttatattttattgtagtataacgtattctaggtttcaaatatcaatcaaatatcaaacaaactcagatacagctagtttgttaattagagacagtctatcttctattttctcatacttttcacacatcaacttgataaagctactaaccaaggacattcatcatatatttaaactataatttcttaaaatattgattatgataaaattgtttattccctctaaatagagtagaaaactcattcaacaagcatttaaaattatattatgtctcaagcatggaataggaagataaaaggcagtgcttattcttaacagctttagggcctagatgaacaaatattatactgttgtttcgagtcctgtgacagtgccatggaactaccaggaaagaacaactcatctagaaagagagaagagcagtcaggagaggcttccaaaagagatggcacctgaatctgtatttgaagaagtagcggaagttactaggcaaataaggaagaaggagggaaaagtgtttgttaagcatcttccatgttcttttacactatattttaagaaaattcctgtattttctacctagctaatttgattttcagctgaatacattaggttgatttattgttttaaaattttatatttttagtttccagggactataattttttatagcagctgattacattatggattcaattacctcttgtctctaaagagttatttaaagtttactatcatcccttcaggttttgattcttttgtttggtgcatttgtgatctctcttccatggcattggtattcttcaaagatttgactgttttcgattgtctgttcatatgtgtatttgagaatttctgtttatatggcagagaatataaattctgaaaaaacaacctacctctggagattttagaagagtgatgagatattctggggacttatgttctgagtggggatgttctcctgtattttctggggattgtaggctacacgggagtgcatgcaagctcagttgctaagctgtgtctgattctttgtgaccctatagactgtagcccaccaggctcctctgttcattggattttctagacaagaatactggagtaggttgccatttcctcctccaagggatcttctctacccagggatcaaacccacatctcctgaattggctggcaggttctttaccactgagccacctaggaagccctaggttacatgggggcactgccctatttggttagtatccacactggaagtctcctatatcagaattcccatttcagagagccattatgtatcttttccctgggattaacaagtatagcataatctatattttttaacttttctgtccctttgctatccgtatggcaatctggagttacttcagactcttctgcttctctctccggctccaacattgatcctaaggagccaaaatgaagtcttagttcactttgctaggcagtaattcctagggttctgacctggcagcaagcactaagttgccagtgttccaatgtaagaaagggatgagtagggggccaggtcatacactgcctaaatgtagtgcttaatccatcgtcttgacaactccttcagggtcccatctattatagtatttcacatttattgaccaagtgttttgagttaagtgtatctccagagctactcttacctcttcagtggtttttctctgctcttcatatatttatcagtccgatctcatctgtctttaagaattcctcaggcttagtgtagtaatgacatccttctttgttttcaaaaataagttcaattacaccaaaat

SEQ ID NO: 56715 - DNA, 970 bp, Bovine  19866881082896
  misc_feature (1)..(1): n is a, c, g, or t
ntttttgtttttcagtttgtaagaatcttgaatattctcatgtacctctaagaggatttgaaaatactttcttaatgaatctgtagactcaaaatgtgtagtgcatttgaagtatactcttttcagactgaatgatcatttgtttatgcctatacatacacatacatatacatctctgtgatcatactctaactgtgaatatattgtatttcctcattttcttcaagggttgatgtatttagctatgttagtctaatctttagtctgtgttatacaacattttctagtaatatggtgctatcaaataaattgttgaattgtattattttacaaacactggataataattcatatgcagccaaatggtatgaagaatactcattatgaagagtaattatatgaaaatcttttaataatgatcttaattattttcaaaatagtagtaaatgaaccattagtagtttggaattgctcaggattgtcttttatgcttgtcattttaaagcaagcatgttaactcacagaaaagcaaaattgctacacagaaggatttgctaggttttagaaaactatacactataatttaataaattgtattcacagtggttattaatatagatccggaatttgatgccactcaaagtcatctttcctgttatataaatgtcaaaacaaaaacagtaaaatctaaatttttagttttgtataaaaccacatgttttagaaaacactttaattgtaacagtaactatgttaagattgctttatggttctgttggatagagacagacacaatggaagcatctcttaggatgatctgaaatcatgtctttgtttaaaggttgtcctattgatggtgactaaggaagaaatactatgatagcatcatggtgtactgtttcatctgaaagatagctcattgggtatgtctcttaaaggcagcttcggaaggacatttaaattcactgtc

SEQ ID NO: 56716 - DNA, 819 bp, Bovine  19866881120302
  misc_feature (1)..(1): n is a, c, g, or t
nttttccttttcgttgggtgccagatacggaccagaatttgttcaaaactcgggatgcagcttacataaaactcagtatgggttttctgttcaggcttggtgctactttattttcatgaaagggggctcagtgttgcccatttctaggcctattcagcgtggatttctgagggttggttcctggagagcttctggcagcactggcaggcatacaggccccacttactctgtcgtcagcaagctctgctatagggatgtgatgggaggggggatatgcagctggttggtttttcccacactgggacctgcagtccttcttggaggctgccgcctcccaccctgaccctgattagatgaccttttgtacacctaatacaaattagggttcaggagaaatgggatggggtggcagtttaggttgagtggtctgggggctgcatgggagtgcctagctgtctgggccagcagggtcgtcagcccccttctccatcagaagaggactttgtaagcccttggtcacccagaaaccgatctgtgattctttgggctctgcctccagattgggattcatggatagtctcagtctaagccagatagcacattccagagaaatgacagctggtattcatgtaatgaaggaacctggctgttttttcctgagtgctataaagcatgaaccatggccaatatcaccaatttgaaagaaaaagtgaggtttctcccttccctgagtttgttatctgatctctgaggaggcatgccactgcaactggtgatggagcagaggacaaacggtgacccttgccccccaacttccag

SEQ ID NO: 56717 - DNA, 957 bp, Bovine  19866881127649
  misc_feature (1)..(1): n is a, c, g, or t
nccccgccctggccacttcaggccaggaagtccaagctgtacccagaggcccctcagagggagggggaagccttggcaggtcagactgctggggagggctggagaatgctcaagaaagcaggcaggtgggctgccaattcttggaagggctcattagtgaaaacccccaagcctgaccacctgggggaaaggctcaccgttccatggtagctgataagggccaggagattccacagttcaggtagttcccccgcctccctggcgttctgtggtcaccattaatcatttcctctaactgtgtatataagagctcttttgccagtgagcccagtgctcagagagaaaggctaaagtcctcaagaggatgtggctgcagaacctgcttctcctgggcactgtggtctgcagcttctccgcacctactcgcccacccaacactgccacccggccctggcagcatgtggatgccatcaaggaggccctgagccttctgaaccacagcagtgacactgatgctgtgatggtgagtgagggagggagcacaggccatgcctgggccaccctgctggcctggactcgtcctgcctgtcagctcgataacagaatattttcctttcctacagaatgacacagaagtcgtctctgaaaagtttgactcccaggtaagatgcttctctctgacacaccttttcccaaaggcctctgccctggggactgactccattttagacggacccttacagggttgtccactttctctctagccagctggctgccagaaggagggttgcttagaaggccttgcccctgtggcagtcatgtggactcctttactaactgagcagccatggacagacctagtgttcaagggtatcgaggtcaccaggggactggcgggggttatgtcatgagacaggggctgtgggcttgggacactcactgtgccctgagaccaag

SEQ ID NO: 56718 - DNA, 2324 bp, Bovine  19866881300602
  misc_feature (1)..(1): n is a, c, g, or t
ntgtatctgggcagatttctagagctccttctcctgcagctccctccttactctttaatatcctgccccacaagttcagccacctcagtaacctctatctctgatctctatttcctttactcatctactttgctctgtttgggctccacttccttctgccttattttggaaaatgccctaggaaaagaactttagtgaaagtggaattcacctcttgtgtttcctttctctcaagaatgaaggttgtttgatgtccaatgcctgtaatcagttactgtaaatgttttatctagctttgtatttgtttacagtggagaagttagtttattaccagttactcacccatggttggaatctaataaaattttaaaagaagaaaggaaaatagggagccttaattcagaatgtggatgtgatgccacaggtgtctgagactctaagctggagctgaaaacagctgggccagtggggcctatccctttccagtattttctaatccggtgtcagaattgaaccgaataaaacttccagttctggccatggtggcaggtagtatcagaataatactcctgccaaaaacaattaagaaacttggatgaaatataaaggacaactctttgaggacattggagaacaactaatgcaggtaagaattgaaggattatgatccttgagaaaagggaataatgtgtagtgagtttcacatttaccctggtttttcccctgaagatttcccacattggtgtgtggaacaactggaactttcatacactgctgctgggagagtaattttgtacaaccatctagaaaaatggttggaagtaacaactatagctaaatatgtgtatatcctgtgacctagcaattccacttctgggtttatattctacataagtgaatgtttatttccactaggaaataagaatgtacgtgtgcaaatatatacaaagcagttttatttaaaataactaaaaactggaaacagtccaaatgtttgccaacaatacaatggataaattatgacatattcaaataatggaatacctacagcaatgaaacagaatgatagaccaccaaaaacagcaagatggggcactaccacaaccataatgttcaatttaagaagcagacataaaagtatatagtgtataagttcgcttttataaaattcaaaatctgaaaaaaataatcaaagaagaaagaatagtagtcaactttgggaaggtttattgactatcatcaggttacaagggacattatggaaatagtctatatcttgatctaagtgatggtaatatgaatttacatgaatttgaaacacattgggctatatgttaagcagttttctttttgttgattgtgtgtgtttgtgtgtgtgtgtgtgcactcggttgtgtctgattcaggcaagaatcctggagtgggttgccatttcctactccaggggatcttcccaatctagggatcaaacccacatctcttacgtagtaccacctgattatatcttaatacgtttttaaataaaagtttaaagtggccctggctgcacatgccattccacgcctgctggcaggagtctctgaagttcaagcagctttccagtgggcagaaggaggccctgcctggccagcacaggcttccatgtgaattagtcatccccctcccccagcctttttgtttttttatttttggccacacagcatggcttgtgggatcttagttccccaaccagggctgaacctggcctctcagcagtgagagtatggagtcctaaccactggttcagttcagttcagttcagtcgctcagtcgtgtctgacgctttgcgactccgtgaagtgcagcacgccaggcctccctgtccatcaccaactgccagagtctacccaaaccgccagggaattcccccaccccagcctttggaccttctgtctcccagacctccattactccccctggctgacttttcagaggcccaaaccccactcccttaactgaccactaggaggtgagatacccttctgcaggttctctcagcccctgtgactcatcatcagttttcttgtctgtgtcattgccccctcccctgccaaaaaagaaccccattagctctgtcaaaggctgttgtcagactcacctcagctctgtgtctgtccctgggcaccgaggacttggcaccgagaatgtgtcagcaattatttattgacctactgaaagtaagtgagggtgtagaaggcttctgaattagccttaggctgagtgatcctattgtaaagaaagcagataggcctggctgcccctcagtaagccagggcagtcccgaa

SEQ ID NO: 56719 - DNA, 1783 bp, Bovine  19866881401685
  misc_feature (1)..(1): n is a, c, g, or t
nctctagtgtgtctctgtgtagctgaccagtctttgcccagaacctggttcaggctgtggtgcagagtgagtggggcttgggtacttcccctttggggttgggaagtgccatgaagtcctctttgccctgatttttggcaagccagcatgtgtgtactcctcattccagctctactatcatctcagtggatttctgagcaggaaaggaagtttgtctcatgcacacaggaccctaggactgtgatgcccaggttgggcttaacttaatgctccccagggaaagagtctacccacacagatgttttatttcattacagattcctcccaggggcacaggtcctgacctgatgcccccttttttttttttccatcctagctgattatgtggagatccttcttgcagctttggttgtatagacattttcctgccagtttccagttagttttccatgagaattattccacatgtggatatattttttaatatgtttgctgtggggggtgaactccatcttctcctattctgccatcttgattcccctcccctgaattatattcctaatagatcttttttccccccttaggtacctcttcagaagactatcagaaatgccacagaaaagtgtaaggactaacattttttaaagttgttgtgtttttaatgctttttgttctcatggttatatagcaagtatgattattagcccagaaattcaggtgtttgtttattcggtatttgttgaggacttactatatgccaggactgttcttattaccagagtatattttctatctctccatctgtctgtctgtctatctgtctaactatataattgttataacaaaattgattaaaaacaaaattcctgccttaattgagtccacattctagttggaggatattaacaataaattaataagcaagtaaatttataccatgttatatggtaataaatgctatggagaaaaataaagcaagataggggactacagagtattagggtagagatttgctcttttaagtattgtggtcagagactcaccattgaaaaggtagtatttgaacagagacataagaagtagatagaccaagctgtgtgattcattggaaaaaaaaagaacattccaggtagagggactagctggagccatacccaagggaggaaggcttgggctcctggtgtgaagtgaggaggagtagtgagttaggagataagtgagagaatcaagatgccagatcatataaagcattttaggcaagtataagtgaattttaaggctgttgaatggtttagaaggatgatgtgatatggcttatgttttgaaagaatcatcctagctgctgtgttgagaacagactatgataaggcaaagaattagggaaattatagttaggagaatactgccctaactgggcaagaaatattggactatggaccagagtggcaagagaagagatagtgagaggtcagagtttggatgtattttcaaagcagggctaacagaatccattgaagggctgaataatgaagtatgaaactattcctgaggatggtcgtgcctcatgatttacctgagacagtcccagtatgtacctgctattgtgacataatctttaatatagctgacttttactctcagaaaggtcccagtttggacaaatcatcactgtaaatatagatgtataggccaaagaaggggagaagtgaagttgggtcttgagagtgtctgggacccatgagttgtctcgaatttttaccaatttgtgctgcaggtttcaaga

SEQ ID NO: 56720 - DNA, 756 bp, Bovine  19866881458987
  misc_feature (1)..(1): n is a, c, g, or t
ntgtctcctggctggaaaattcaacgtttataagtattctaagaggaattaaggttcttctacaacaataacaaaagacaaacctctggtttaggactcccaccacttataaaatgaacttggaaatttccctactggctcaaatttcacttgggctactgtttttgtgttctctcattacgcagtatgttagaaggtccggcaggaaacagcccccaggtacagaccttatttgtgcagagctctgcatacgtcccttcaattcctctcttctgggcccaagagggcatgacttctgcgtcgggcacgacaatgcccaccaaaaaggcctgtgatcccaccagaggaaaacatagttatgacaaaagtttttaaagtggttatttgtggtccaccattaaaacttatcttggtattctcagactctactcttttctaaaaatatgtaaatgcttatgaaacatttccactaacatatcacacattcttgacagaaatattcttgaatatttctgatatatttccctaactttgtaaaagattgattaataaaaaataagcttaaaggagattaaaaatcagtaaggttagtcctgtatgtacctttaattctcatgacaaatttaaatgagaccatctttaggatactaatcaaccaactctacaatcaaaaacacatacatttctaagtatttccagaccattttgaaactgattcattaatatgctcctcattcattgagaacacaattttaa

SEQ ID NO: 56721 - DNA, 1276 bp, Bovine  19866881817704
  misc_feature (1)..(1): n is a, c, g, or t
ncactcagacagacctggtggagacagaagggacagagagggtaactgactgggacacaggaaaggactaagggaggacttgctgaccactcagcagaaaacaaatcacacagtaaacctcgatctaggattattaggctggccaggtaatcacagattcctggcccacatctcagatggaggagcccaagggacagaagagagcccagctggccactcattactgaccactggtcctaatcatccagaaaggtaatgacgacagtcctggaggtgtatggcactctcccctcaccaagattagggattagaggatcatctgagcaggccaagtactgagatgggccgcccatgccctgttgtgcatgattccctcaccagaccacactgtccagctctgcttactaggataattcctgccactccaactcacattgagctcagggcatgagctccctgactgtggtgctcaagaccacagccgggagtctgggagagccctaaccacagaggcaaccaaggaagctattctgtgactccaagatctggctgtaaagcaagatatacatctcctgcaatctcaggactccaagtgggggccaggctctcccatgctgatttaggggcttcaactgtgctctggagctgagaattggaagggaaactccaaggccatttcttttccagcctcttcttcccacagcacccacaacctcaggcacaaacatccactctagccatgcctgaggacccaggagccaagatgctgcaaccctgtctccttcatggctgcatggtcagggacactaagggcttacaatccagagagaaaaaaatgctttccagaaaaagccacattgttagtgttatctccctgcctccccactccacatttcaggggcaagaactctgaaagaaagaggtaaaaacaacctactgctctctggggctgtcctatctccctctggctaattataaggttttccaaaggaaccagatgttgatggtgggggctgggtatagagaacaagactggagagcaggagatcatctgggcgggctcattctcctgtggtgcaggcacaacggccagttctgagctacaggcccaggctgggaggcagggtctgggaaagacagccacagcttctggaggcagtgagctcaccgggcacagctccagcccggctgagttcaccaatccctccctagaggccactctgctcccagccaagccaagcccagcccagtcggccacaggggctaaaacgcctcg

SEQ ID NO: 56722 - DNA, 1645 bp, Bovine  19866880575224
  misc_feature (1)..(1): n is a, c, g, or t
ntgttctgcctatattttcctctaagagatttatagtgtctggtcttgcatttaggtgctgaatgcatttgagtttgtttttgtgtgtggcgttaggtaatgctctgttagtaatttcattcttttacatgtatctgtgcagttttcactacaccacttactgaggagatcgtctctgctccactgtgtttttcacctcctttgtcacagattatatcatcaccctttctttctaacacacctaaacaaaaagaaagctttatacatttttcttttttaatcctatgatccttccatgaaagcttttattcacttggcatttcttgaaaactttagcctttagccacatatggtttagcagttttcccagggctcagtaaaagtgtatggaaagttgcatggccttcattttcgacgtgttgattactggttcatcagttgtgacagatgtaccatgtccatgagggtgtgagcagctggggagctaagagaagcagcgaaaagctacgcgtgagctcctttctttaaactccactctgtttttctgtaaaccaaaatgttccccaaaatagcctatgaactaacacatgaaagtaggaagcaaagacaaaaagtcagatgctgcagtttggatgttttcagcttgttttctattatttgaagttttaaatgagttgccttgtgaaaagtaggacgttggaaagatttctgcacccttatttttgcttcgtgagctcttaagttatcatcccttaatatgttcagataattgttacttgctttgtaattaaggtgaagggcagacagatgctgtgtcaggaaagaagcaaaggttttcgaagcttcaagctgtggccccagacaagtaacacccctcgagttcctaggagtgctgtctagacttttgtggcactttagaatccactgatggatttcccccgaacaattagagtccagggcccatgaaaatccatttccaaaccatctcattacactgctatggtcttctacggttgagtgtgaaaaattcaattttatacccacagcaagctgtgcaaagccatgattcagtgacaatgcagagcacattcaaaacacaggaacttggtccccagggtccggcctggtgacagacacccctgtgcttagagaccccccaggggcctccctctccagcccaggtcctccggccccttccctctccacccccaggcagccccctcgggaagcccccacctgctcgggagctggagttcttcccgcccgtgtcagcaccacatttccgccctgggctggagctggagatccgatttaaaaaagaaagtcatggacctggcccttgtgctcaactgcaggccacatattttcctttactttgcctacaggctggcagctagcctgttgctggttcggtggtgctggtcaaatgcaaggcttctgggttagaaaaccccgttactcccacacaggagatgtgtgggcactggggtacggccctgtcaccaccttccacggggccgtgcagggctgcaggtgggggctgtgtgtgctgcgctggctgcacagctggggacagtgaatgaggggcctgggctcatcaacagctcaggagggaagccctgggcccgtaggagaccctgcctca

SEQ ID NO: 56723 - DNA, 1294 bp, Bovine  19866880607392
  misc_feature (1)..(1): n is a, c, g, or t
nctgcccaggctcaccagtcgctgtgggctggacccagcagggtgtgggcgagggcaggaatgccagggcggtgggaccagcatgctcaggaaggtggactcagcttccccagggcagggccggcctagcggtctcagaggccctgagccctgggctgtgggcaggtgaggcggcctcagggcctgaggcaggacttggcctccgactcagccatggcttctccaccccgctatctccaggttctgagctgcacctgagagagaaaactctaccccagttggaacacagaccagagaactcgtggaataaaagcagggcatttaatggcgtgtctgcaaaggcttcattgcttcctgctcaccccctgcgacagagctcagagatgtgtgggcattttgagaaaaacctactttcctagaaataaacactcacctcagcaaatccctaccacccactacaacgcaagcccgtgtctgtgctgttggctcactcctagccttcaaacacttcaggatgagaggctccagcgtatctgaaaacatcaacatttcactgggagggacatcgtcctcggcccggggcggaatctgcggcagggtggacgctgttctttgaagagccaggctgccttcccagagggtgatatcctatgtagtctccactgacatgcgtcactggcgtggacagccggctggtgcggagccgtggcccctccccggtcagtgtcctgttgtttggaaacttcatggttctgtctttctcggagcagcctgtgaatggggccacctcctctctggcctccagccgagccccactgccaccgtgtgccttgtccgcccgcaccgcacgccctgctccctgcatctggctggctgtgcgtgcacacatccaaattccaagacacacaaaaactccaaagacaaaaatatcttaatgcattcgaatatccagtttctatggagacagaaatcaaagtgaactaatgagaggggtttaaaatgttttttttttaaatacttctagcctgatgctttacatttctggagtgtgttgaagtgcccaggagctggttattattccaaacacactttgctaaaaggcaaccccgcattctaatgagatttgttgatgacagctcattttcattgctgtgctcttgctgacccttacaaatgctttgattacacagtaaggtggcaattttgaaacttctgggctctgagaaactctctgatccttctcacacccagacccagggcggggcggtcagcatggggctgtgggcacagattc

SEQ ID NO: 56724 - DNA, 1882 bp, Bovine  19866880896656
  misc_feature (1)..(1): n is a, c, g, or t
nctgaaatcacaggtcaaacttaatgggcattttcagcctatctcagggccagctctataggaagtgtacattctttaagtgttcagtgaagtttacagtgtttctcatctcccccaagcatcactgtaagcaacctgaagcctgtgggaaccaccacagtgcagtccacacagagggtggtggcgatggtaataattcagaggacgggcccgacaggaaacgtgactgcgaattcacgtgtgggttctattggtgtcttctcggaattgtcagcaagaaagggacttactatacgtgctgatgactagcaccagtttggttgtgcagacatgggtttaggtgtgatatcagatcctgtcctgttaactgcagactgagacacgcatggtaacgtggtacttggagcacgtgcagggattgtgggcagggacgggggcggtgggctcagtgtggggatgcagcaggggcttaccttcctctccggagattcgaccactttccagtcggtgagcttcagctggtgcaactcatcgaacttcatgctgacatcctgaacggacagctgcagcatgtcccagtagccggccagatcttgggaggtgggcctgggcatggcgctggggtcctgccggacacatgcacagttagagctgtggagacctctgggcagggcgggggaaggggctgcttttcccaatgaagggggtctgggagaagcctctgtaattagaattgggtgcacatgctcctgagggcccatgaggatctagtgacagtttacatgagtgtttgctgacagttaaaaaaaatctgtgatggaattccacctgagctatttcaaatcctaaaagatgatgctgttaaagtgctgcactcaatatgtcagcaaatttggaaaactccagtactggaaaatgtgttttcattccaatccccaaaaagggcaatgtcaaagaatgttcatactacctcacaattgcacttatttcacatgctagcaaagtaatgctcaaaattctccaagctaggtttcaacagtatgtgaaccgagaacttctatatgttcaaggtggatttagaaaaggaagaggaaccagagatcaaactgacaacatctgttggatcatagagaaagcaagagaattccagaacatctggttcattgactacgccaaagtctttgactgtggatcacaacaaagtggaaaattcttcaagagatgggaataccacgacacctgacctgcctcctgagaaacctgtatgcaggttaagaagcaacagttagaactgggcatggaataacagtctggttcaaaagtcaggaaaggagtacagcaagggtgtatattgtcaccctgcttatttaacttaaatgcagaatacattaagagaaatgccgggctggatgaagtacaaactgaaatcaaggttgccaggggaaatatcaataacctcagatgtgtagatgacaccatccttatggcagaaagtgaagaagaactaaagagcctcttgatgaaagtgaaagacgagagtgaaaaagctggtttaaaactcaacattcaaaaaacgaagatcatggcatccggtcccatcacttcatagcaaatagatggggaaacaagggaaacagtgacagactttatttttgggggctccaaaatcactgcagatggtggctacagccttgaaattaaaagacccttgttccttgaaagaaaagctatgactaacctagacagcatattaaaaagcagagggattactttgccaacaaaggtccatctagtgaaagttatgatttttccagtagtcatgtatagatgtgagagttggaccataaagaaagctgagcatggaagaattgattattttgaa

SEQ ID NO: 56725 - DNA, 1686 bp, Bovine  19866881132891
  misc_feature (1)..(1): n is a, c, g, or t
ncaggtggggctagtggtacagatcccacctgccaatgcaggagacataagagacgcaggttcgatccctgagttgggaagatcccctggaggagggcatggctacccactccagtgttcttgcctggagaatcccacggtcctaggagcctggtggggtacagtccatggggtcacaaagagttggacacgactgaagctgcttagaacccaccccaacttatggtgcttcaacttatgattttttttgactttatgatggtgtgcaagcaatacatattccgtagaaactatactttgaattttgatctttttccagtagtcgataaggtatctctcgtgatgctgggcactggcagtgagctacacttcccgtcagccactcgtcatgagggtaaaccgtggaagctctcacagccattctttatccagacaaccgttctgtttttcattttcagtactgtagctagtaaattacatgagaccgccaacactgtcttataaaacaggcttggtattaggtgacttttgcccaactgtaggctaatgtaagtgttctgaccttgttagaggtaggctaggctgagttacagtgtttggtatgttaggtgtattaaatgtgtttttgacttacgatgtttttagtctatgatgggtttatcaggacttaaccccatcatagattgaggaaaatctgtaaatatttattctctctattgttcctggttttcaaaggggcctttctatcctttttttggccaaatagcatttattaatgacacattccggacctggactgactcttgacttttgaagccaggggacagaggcagtttttcacaattacttggatgaggtcaagaatactcaatgcttaggaaatttagagtagtgtagacatggaagttgcaaagttgtaggtgaaacgtctctatggggtcaaagataaagaggtgaaatttcgtgttgcaaaaacgaaagtgactaggcttggcactgatttggcctcttccccttgtaacatttcaagttctcagatgttgaggttgagtatttttgtgtgaagagctgtgctctctgatgagaacacaggcctgggagaagcgtgggaggacaggtgtgggaggatgggtgtaagaagtgctcttctctcaaaaacgacagcaggtctgctcagggatgctgctgggagcttaggatatgatccgtgcgtgtctgtcttatcaaatctgtcaggccacaggacgggagatttcagaaggtaaaggatagagcccttggtcagaaggcccacggctttccagtcctgcagcagcagaggatgaagccccagaggaggctttggaggcgtgcttaaggtcacccactagcatgacctgttctggagccttctttgttttgttaatcatttgtgttgaaccttggtggatttttcctcttggtggcgcaaatttgacatttataaggatgatctattataatttagttcctagagttctgtaaaactgtaggcctataaagtagtttcccttcattcagtcgatggaacaataaacactatcccttcttcttttagtctctgacaaagctcccttgagctcatttgaatgaaagggattgaggcactttccgtgaaaagggagatagctgagcccccctgcacccgcttccagcttcctttcacct

SEQ ID NO: 56726 - DNA, 854 bp, Bovine  19866881402437
  misc_feature (1)..(1): n is a, c, g, or t
naaaagccttcagggactagctggtgctccgtctccctgaccggtgctccgggtgctctccatcacctgcagacactcaccctctggacacctctgtgccctgttgtgcttcctctcagacttcctcacctccttcctcctctcggggttcctgctgcagctcagtgcgtgtcagactcggagctgagcgctggtctgtcagcgctttgagcacaggagccctgtcgcttcatctctgctccccacaagcccatgttcctgactgttagggtgtctggtcttactgtcgaccaaggcagttgttataaggtacgcttcaactcagaggtgaagccacagccattacgtgtaatagaacagagtgaaaatggatatgaattgcacacaccatctggtgtctgagactgtcacaattatgcatttatgcagaatgatataaaatgcacaaatgaaccctaatttgcaaatttcttttttttttagattatgcaatatctgagttttaggcattcagctggcactgaaacaattttacctcattacttttctcaaggaataaataaatattctttgtttctggtcactggacaatttaaatatcagatttcaagtttactatgtgtagataaagtactgtctattttctcgccagtaaacttaagcccgtttgttgccttctgaagcatgtatgagaggtgaaggtgcacatggaatacatgtacttgaatgctgagaagagtcaaatcagaggtgttcctagtaattcgtaataaaccaccctgcaatactgggaaggatggataaggagaaatttaacatgaggccaggctctgacattcgtcttccctgttaaa

SEQ ID NO: 56727 - DNA, 606 bp, Bovine  19866881540846
  misc_feature (1)..(1): n is a, c, g, or t
nttgtagaattcccagtgaggaaaatgggattctgttcaagagtgtggcaagaatggcattgatgtataattccaaatgggaaactttaaatgaattttctgtagtttagtgcctacagagaactgtttgactctgggcaactggctatatacttattaatatttctcctgattttgaaatcagttcaaaacctgagtcattctataaccatttttcattgacagtcttgtcaatctaaataacagccttatgataaaatcatttagaatgctatgatgtctcagcctaacctcattgtctgtttatcacttcttaatttgtatttgtcagatttttcttacatggaaaatgcattttaaaattatactgtaatgtatatgacataagattatttaaaatagtagtacttctctccccaaatgtcagtgtgctggaatgaacacacacacacacacgtgaatataaccacaggtcacttgcatagaaacataagatgagtgactttggattcactttcttaggtaattttttaaatttatctattttttgttttcatggggggtccagctcaattaaacctaagaattacatacctaacattcagg

SEQ ID NO: 56728 - DNA, 1575 bp, Bovine  19866881566289
  misc_feature (1)..(1): n is a, c, g, or t
ncagggccagccctgctcccggtccacatcccatggggccaaggaatttctgcccacatgaaaggtttccctctgagtgtttaagtcctgcaccagccccagggcttaggacaagtcggcgaagaaggcagagccggaggggcagagcatctgtggtgtgtagtttccgcttctagcacagtgatgatgctgagtagctgcgacagttgaatgaatagatgcatttttttaaagttattgttgccttttactggctcaaccctactgacatggaaaaatgattcctgaaaaaaaaaaaaacaacgccctccaggggttttacctggactgtccactcctggacagatggaggggtgtggctgtgagaaactgcccacaaaaccatctactgtctctattttttaaataggggaaggatatttctctaaatgtactgctcacatgaattctgtgtaagaaatttcttcctctcagagagtctggagagctggcacactctctgtggtcggggtcacaggggctcctcatttgtgccccgacggcctggacgctcagaatcaaatttatttcgggtcacagaaaatgtcttcacaaatacacacctgaaatgctgacgtaatgcattctgaccgggctcttttatgaactgatcatgctcaagtcagagtatatgcctgccatgcatctgaatgacctcctgaataatgagacccctcttctcctgacgtccatgcatttcatcactaaccgaggctctgagtctcagcacaggctgtgtgagtcctcctgcatgaacatattacatctaaaaacagaagagtgagagaaaatgaccttctgtctccagaacctcctgccaaaggcatccacagctaatgggccctgtcatccatgaagaataaatagatttattagtttactcagctggaaaatgcttgctgggaactgccagtggtcatctggccaggaatttaattcatatttcctgtcaccatgaagctaatatgggctgcgatatggccattcaaatactgagatattttcatgcccttaaagcaagagaacccaaaaacacaggggcacagggggcagaggtcttggggggagtgaaacagcagtgagagttagccattcattaaagagtggacgcagttcctaagaaatgagatacaagcaggacagcgagtctcctctgactgggagcttcccgactgctcttgtcactgggctgtttctctccttgagttggtcagtcaccctcagaatctgtggacgcaggctgtccacgttagacgccatcccgcatggctcttttgctggacaatctgagtctatttgagatcaatttgagtctaagatcatttttgatctttgactgttgctcttctttttatgttttatagcatccagcacaaaataggtagaggcagtactaacttttaaagcactttttccatatttgagaattttaaatactttattctctctactactcagaaagtacatcattattctttcaaaagataatacagtgaggataaaaagataagacacaaactctggttaattaaaatt

SEQ ID NO: 56729 - DNA, 1426 bp, Bovine  19866880293620
  misc_feature (1)..(1): n is a, c, g, or t
ntgagagatgaggaagctatccttgttgataatcttatcccaacaagtaaattttatctttctcacctctgaggttcaaaacaacccagattcagctttgttccttgaggattgggttgaaattgaggaaagttatgtccaacctagatagcatattcaaaagcagagacattactttgccaacaaaggtccgtctagtcaaggctatggtttttcctgtggtcatgtatggatgtgagagttggactgtgaagaaggctgagcgccaaagaattgatgcttttgaactgtggtgttggagaagactcttgagagtcccttggactgcaaggagatccaaccagtccattctgaaggagatcagccctgggatttctttggaaggaatgatgctaaatttgaaactccagtattttggccaccccatgcgaagagttgactcattggaaaagactctgatgctgggagggattgggggcaggaggagaagggaacgacagaggatgagatggctggatggcatcactgactcgatggacgtgagtctgagtgaactccgggagttggtgatggacagggaggcctggcgtgctgcgattcatggggtcgcaaagagtcagacatgactgagcgactgaactgaactgattaagttcacctttcggttgctaaagttgttgtgggatggttaaactggcttctgactgatttagaactttctttagtatgaaaatttctgactctgtttctctcccttgccataatgtctaagaatctacttaaactatgctgcttctaatttcatgagctggtgaacagatgaccatactttgtataagagtgattgagtgatatgatgaaagaaaccaatcaacaatctgatacatattcttgcaaatttgattagctatttatgcatgctcagtcacgcccaactcttgaactcttcagggtcctctatccatgggattttcctggcaataatactggagcaggttgccatttcctcctccaggggatcttcccaacctagggatcaaacccaagtctcctctggctcctgcattacagatagattctttacctctgagccaccagagaaacccttagttgtttatactagtgcctataggaaattctaccttgatatagctaagttaattctttttttatggttttctagttcttatgtatccataaggtgtttcactgacaatacaggttgccaagaccatgtactttcatattctctatcttccctgttttatttctcccttttcaagaatctgggctctcagaattaggttcttgatgtctagggtattaaaggaccaaagagagtcagaaacactgggaaatgaggctgggactgccagcctggtaacctaagccatttaaggaaacgagagtgagaaaccacttcagt

SEQ ID NO: 56730 - DNA, 1631 bp, Bovine  19866880621176
  misc_feature (1)..(1): n is a, c, g, or t
ntagaaagtatatcactttctgcatgggagaaggaaatggtcacccactctagtgctcttgcctggagaatcccagggacgggggagactagtgggctgccatctgtggggtcggatagagtcggacacgactgaagtgacttagcagcagcaacagcagtagctataacgggagaaggcaatggcaacccattccagtactcttgactggaaaatcccatagacggaggagcctggtaggctgcagcccatggggtcgctaagagtcggacatgactgaagtgacttagcagcagccacagtagctataatacccaatttcctttgaagcaaaaggttaagaataataataaatttaaaaaatgaactggctagaaaacaattcaaaaatcatggcagatatcaagaaaaatttcttctgactacctgaaggcacatttgagtctgccttgctgttccctagaacacactatagcatctaaattttttggccatgtgcatttacaaacgttttcaaaatgtctatgggatttatcctggcagctgggatttgagaccactttgaattttgtttttgttattttcctgataaaacttaattttttactgcatcaataactgtcaagtatgaaagagaaagatcaggtttagccatgacagagtttcttcactcaaaatgaagcataagcaaaactcatacctaactcacaatatatccacagtactgtgatcacgggatcacattctgtccccacctccagagtaagaatgctcgatgaagcactagtgtttaattaagcacaatttttaaaagctggatcaggctgtactagacttataaatgcaatatacttaacaccataaagtttgctcataatacatatccatgaggtaacaagcccttttatagtagagtattaggttagctagaatccaatttatgaaaaaacctcctgtatattctcagtattgtacatactgatatgcaataatgcatttcaattccatcctgacacaaaatctcttgggttcttttttgttctcttaaataagtatcataaaacattaataggagtgcccttctaggtctctattcaaatgttccttgatttgtagatttcattaacaaaatcaagaaaaaaattttagctagtgttaccaaataggacaaagctgttaacttctgctttgcgaaaatctgcataatggcatttaaaaacaactttatctaggagccttgtcaaaagcagaaatgatctcttttcaggactaggcctactgtctttttaataagcaataagatggatatttcagcgcacttggagacagaaaccagtcaaaggaatattctactcttccctttactccttcccctaaggcagtgcttttaaaaaattcaattacaatatatctcgcattgcatttcagtcctcttgttgaagaggaaaaattctgagtaatatacgatgctttttccagccccaaatctgagttggcatggcctttcggtcttacaaagcagatacagaaagaactgcctacaagctacaactacatttgaggatcaaatagggacttcttaaaaggcaggactattctgatcattttattacatactctgaagaagaatt

SEQ ID NO: 56731 - DNA, 2190 bp, Bovine  19866880630748
  misc_feature (1)..(1): n is a, c, g, or t
ncttcagtatcatccagagtttgctcaaattcatgtctatcgagtcagtgatgctatccaaccatctcatcctttgttgcctccttctctcctgccctaaatctttcccagcatcagagtcttttctaatgagtcagctctttgcatctaacataattattcaacagctgtcatgtgctggtttctgtgataaataccgatgttataagcattaacagaacacattctccatttggatttcaaagtttacagggaaaagtatatggaaaaaaccaagaaatgacaatatggtgttttccaatcaagacaacatctggagggaattggtaggattggacttttattccttataagaactgggtttgatgcatggcaggttctgtcatagcctagtatatttatctttacatttttagtaggtagagggtcacaattttggtaaattagaagcattcacattttagtagcccaaggctggtagagtgagctacaaagaagaagaatttaagaaacaaaaaaggcattaacaaaaaaaaactactggaaagaaatactgaggaaagtactggagtagggtataaaggcaaagattaaagaaaagataatcagaaaatgatcacataaaggaactagcagagatggtctggactggagaataaggacattaaaaaagacttttaagaggctacagggattttaaaaactaggacaagacagatgtcatgtataatttattacctagaaaactgttaagttagaatggatgtaaaattgcagggtaggagagtcaggtgtggaaaaagggtggcccagcaaaagttaatgtgctaaagcaatatgctttcaaagtcagttagtcaagattattgagaataataggaggtggactggacagttgtggttagaatttatgggcttgtaataaaaaagaagagaaaaaggaaagtcagaactttttctttcggaaaaaatattgaggtttataaatgttagaaaataaagaatagaggcaatctggcctgcaggttaaaacacatttttagaaaagaagaaaggaaataaggttaaaaagaaacaatgaccactggagactcttaacgtaatcaagcaggaacctatgggggtccccctcccagagccgtgtcctccacctgcctcttgtttgtagaaaggctttggtctccgactaggagagtgagctgaggcagaaacaaaggaaaagcaagtccaacacagtcttttttcatgattattaaatagagcaaactgatgccctggtttatgaccccaaactgttgagataaggttctatggcttcaaccagctggccccaagcagacttaaaatttatgatactaggaggatcatttaaaaacggaaacccctgaaccatcacaaaggctctaagtaaataacaaaatgcctcaacccttgcttttgctctcttagaaagaagggagggatcacaagaccatgatttactagcttgctttgcaggaacacatagatcagtcacaatccccagtgatgcatcgaagcacaagatggagatttgaaactgatgccttatcaggaagctgaaaccacaaaaacacactgccttcctttaccatttttgtttttaaaacccttgcacccggtcagccagcaagatggatttcaaatgagtctaggtctcccatctttggggttggtacctcctcaactaataaatctttctttggtgcaaactccaacatttcggttggttcatcctcctgtgcctcacattaacttctgtttgacgatggtaatttggagatttatttttactttaaaaattctattgtcataaactccctaagaaattaattttaaatgttttctttataaagtaatatactctcagttttaaatatccacgaaatgtaggaaaatcaaccatagttccaccatttaattttaaaacaatgtactttttccatttttcttcagtgcatgcttttctttattctgactttggcaaatcttgatgaaatcatctaattaggtttaatttgatcataggacaaagtttataaatataaatactttgtaaaatctttttttgttgtttttggttttttttaattttttttaaattttattttatttttaaactttacctaattgtattagttttgccaaatatcaaaatgaatccatcacagg

SEQ ID NO: 56732 - DNA, 1502 bp, Bovine  19866880649889
  misc_feature (1)..(1): n is a, c, g, or t
nccatttgcaccatccatataaactggatagccttggtacagtttcttaaatacgtcccagtgctcacatgggactcatgcattttattttgtaagcattctaaatctttgctgatactcttacgactgaatttgcttgtctggatgtacttcctccttgtgtttcacagcattttcacttacgttcctaacagacattttttacattgcatggcagcttattataggcttctagaggtagctaagtgctttatttaccattaaatgataagcttatatgggaagcccactggcatgaactgtagagagtcagcagttttgctggtaagtcaggctgtgtttgagagctctgaggaggctaaatattttattcacagagtaattcagtgtatgtctgaggtttattccaaaagtatgcctatcaggaaaatgctgaatatatggtattagcaaaaggaaagtaattttagctgcatgtatctctgccaaagtgacttagccagcaccttgtaagatgaacttttaaaaagggaacaatgtaactgttcacctaaagctaaagtctgaattctgtatcttgaagcacccactttttttcccaaattataggatgaggaatgtttcatcatctcagagattggatagactagttatctaagataattttgtgtgctttacaatcgctgtgacttccagggaaaatcgtattgagtttgaagtttaaaatctctctctttgcacccacgtgaaaactttgggttgaacagttaaatagtcttatctctgttattagctaaactgctaaaaaaaattgcctgtaatttctaagagtatattaaataagaaaataattattctgttctcaagttcatgttatacatttggagagaagtattcaatacctgtactttacagaggaggaaaaaaaggcataaaaaactttcctaaaataaatattaactcttaggttttattcatgggtagttaagtttttatctgtaggttaaaaacaaagctcggtctttacttggttataatttggaatcccttcgggagctttaaaatgtcctgccatctggatcctagacccagagtttctaaattaattattctgagttatgttcttgccattcagtgagtgtttagaaaaggaagctaagttgcagattctagatgaccccttcagtctcctgatatgctcctaccatttgtcatgacacgcacagttctaagttgtcaatagagaagggaatccaagaaaaaagttaactgttaaaatgggaaggagatatgttactcatgagcttttttccaaatagcttatataagctgtgctacagaatcattgccttatatccatgactaaacaggaagcatgacatcagtaaaatctctgaggagtctgtgtaccaaaaaaagattgattggcagtatacaaattaatgtaatattgggacataattctctatggatctttcactgtctgcttttaaggagaggca

SEQ ID NO: 56733 - DNA, 3893 bp, Bovine  19866880673704
  misc_feature (1)..(1): n is a, c, g, or t
naaaagggatcgccaaggaaaattttccacttaaagtgagcttacctaggagatatcagctgacttttgtgatttagcacaatagactgaaggtgatgagagtccataaacctcactggccctgggaaaccaaactcttctaactggacttaactgaagatgtttttctaacaaatgaacaataggatttttgttttattttaaccagttgtgtaccaacctatatattcattctgtcccatatccagagtaccagtttcccatccttaattagcacaaatcccacgaactccccctttccagcacttaaaaacttttgacttttctccatcagtgagtccattactgggaagttaatagatctaactgcaattttttttttttgctttaatgatttttatcttttgacaggtgagaagcaaccagaatagaatcctcagtcaccccacgctcaagccatatggactgaattacttcacttgtacacaggtgccaaacttcctcgggcattacctttgcttcttttgtactcgtgactgtcctccaatgtctaactgcttatgaagctcagttcctgggaccttttctaggaaaccttctctatatactctgctactttaggtgctgctttgtctgtcattctgtttttgtactctccacacatttaatggtatttactggctcagcagactccctgctagactgagattttttaaaacaaggaaagttacttacccaggtttttacacaccaagcctttggcatagtgtttagagaagtatttctcaaaacttaatgtgcatgagaattgtccagagagctaattaaaagacttctgagccccatttccagggtctgctttagtaagtaggggtagggttcaagggtttgcatgtacagttgatccttgaagaacacaggtttgaactgcgggttccactcacaagcagatttttttcaataaatacagactacggtcccacacaaactggtggatttaatccatggatatggaaccttggatacagagggttaactgtaatgttacccctgggttttcatccaagtcagggtcgatgtccctaaccccacactgtaccctaaccgcccccagcatccttaacccctgcactggaagcaaagtcttaaccactgttctgccagggaaggcccatggatccttctttagtatcgatttctaaaaactgttaagaacacaaaagacatttttatgacagcagaacccagaaggatgtggggttaaatggctaactaccgaaatggtaaattatttcacaaaaagataaattaatagtagagaaatgtatgagagatgacatacacagagaataaaaatacttcactctggtaacaattcagcagaatttaacatttctgttgaattacaaattataatttcttaaaagctgctgtagacttaaagattaactccaagttttaataattttttgaactatgcaccatttttaaaagtaacattgaaagctaaatatatttttaacttaaatgtaatattaggaaataaatcttcttcttctgattttttcttgatagttgtttgcaccctaattaacaatatttaggaaaattttaattattcactagcatgaattaagaatatttctaattaatattttagattatatatgaatctggtagtcaataacctagtgccaagtgttctaaatgttcacacaagtattatttctttctgagagtaatttattttaaacagaaaaattttatagcacatgggaagtgtgattatagttccctgtaggggaattatgtaacagaaaaaatacatacaagctgaaatttaagtctgttttcaaaaatctttcaagttgagtgctgtagaaacaaagcataaaaaagaaacaaaagtaattacctccttctaacagaatcattcaatttgatactaagtaataagtacatggaacataaaaacaaagtcaaccattgtttgggttgtcaaccattctaatgaagtgtactaataatccaaattgcaagtgatttttaaataggaagctgcaagagctattcatgtttagtggggcaacgaaataaatggtattaacttataaagagtgacttttatctgatcaaagcttcagccccatgacgtagttccagttcatagttccatgaactgaaaatgttcttgaacttttagaactaaaagctatttattgtgtttacatggtgggaggttatagtaaccccaggagagaactgtctttgttgtggagtaggactaatcggacaagcttattctagtgacgttaattacccaatttctgtaactaacttgacttgttctgattctatgaaccatgttttagtctttgaaggctgtgggaaccaatacagcaaactgagtggcttacgcaacagaaattttatttcttcacagtctggaagctagaagtccaagatcaaggtgtccaagattggtttcattctgaggcctttctccttggcttctccctttgtcatcacatggtcttccctctgtatctttgtctactcttactgttcttataatgacaccagtcatgttggattagggcccaccactatgacctcattttaccttaactacttctttaaagaccctttctccaaatgtagttattctgaggtactaggggttaggacttcaatgtgaattttagggggacataatttagcctgtaattgatcccgacatcctttggactataattagaattcttgtaaagaacagattgaagagtagaatgtgcttagttgaggcaatatcagtttctttgcctttaggacattgatatttctcaatggctcctctgtctatggagttctccagacaagaatactgcagtgcgtagacattcccttctccaggggatcttcccaacccagggatcaaacccacatctcttgcattgcaggcagattctttaccatctgagccaccagggaagtccaggtatttctcagatatttctgacttaacaatctatcactgtacatttatcaatgtgaatccatccctgggagatgtatccactcaaggttctcaaccaatctggattttgagtctgcagagccctatgcctgactttgtaaaaatcatcatttcctattttttttccacttgaagaatctactaccaaaattagggtgctagcctaggttccctagagtcttccacaaacaaacgagaaacattacccttctgccagttggttgggggcaggcactgtctctgctaagcagagggaggaaaagatggaagtgaggcaggcagtggaggaggatgtacaaatataggtgttactgaggtgccatagctttggaacaatggagttataagtgctcggtcttttaggatattttcatggaggccttgtgaattattgaactttggaacagtccatctggggaaatgaagggagaacttacctactagcaccctcttatgcttcaactctgatcaaagttcacccttgaagtagggttgccagatttaaaggtgaaaagccatgcagtatttgtaacagaattacacttatttgttgtttctctgcagttcaaatttgattgagtgtcctgtattttatctgaactctactctcaggatattaatacccacacatttccaggcagctgcagggggagccagaacctccacagatcctgtgcacaggcacgaatatcagtacgacagtgtggtgggggtgatggtggcactgacagcaatagcaatgactcctctctgggcccatagggcagctctaaccactggccaggaggcaaaataggaagctgagatggtgatggggagggtgtgggcaggagtatgcaggcaggctacatagaaa

SEQ ID NO: 56734 - DNA, 1831 bp, Bovine  19866880748868
  misc_feature (1)..(1): n is a, c, g, or t
ntggaatttctttggaaggaatgatgctaaagctgaaactccagtactttggccacctcatgcgaagagttgactcagtggaaaagactctgatgctgggagggattggggggcaggaggagaaggggacgacagaggatgagatggctggatggcatcactgactcgatggacgtgagtctgagtgaactccgggagttggtgatggacagggaggcctggcgtgctgcgattcatggggtcgcaaagagtcagacatgactgagcgactgatctgatctgtactcttgacactactattttcaaaacaaataatttgtttcagtaagatattttcctttggttaaggccattagtggtctagttaaacaagaaacttttctctgataatgacaaagagatattgtaaatagacacatgtattttatttttaagagctaaaatgcagttaaacctcagacccttagggaaaataaaactaagcctgttatcaggcactggagattttaaagcagtaagtcaggtcaaaggtgtttagtccacaatgaaaactagacagtccccaaatgacaatgttgctgaagacgttcagaatgaagcagatgagtttttgttgttactattcttggaatttttgtttgcatttgtttttgaaggtttaaatacatgatatctcacttctttaaaaatgcatttagttgtcatacatgataaaacttaaggcagaatcagatatcataatcccagaaagaagaaagaaacaacttctcccatttataaagttcaatttcaagagtgacatcaccaagatggagacatgggagacttcagtctctatttccctttctcccttacaaagtaacaactagacagctatccatgaatgaaaacagctctgggagagctctacagtccacataagaaatttcagcaacatgacagaactaaagacttgagaataacagcacaaacaagggaagaagtcagcttgttttgcctgcaacaccctattccctaagttagcactgcttggcatgaaactgaactccctagctacgaagagtgtatagatgttgaagtataagttctgtctttgctgatgacatattcctgtacgtaggaaatcctaaagactaccaaaaacctgtcagacataaaaaacgaattcagtaaagtttcaagatactaaattaatgtacaaaaatcaattacactgctatacactaataatgagctatttaaaagagaaataaagaaggcaatctagcttatatcatcagaaacaataaagttcttatgaataaatttaaacaaggaaacagaagatttatgtacaaaaaatacagaatgttgaagaaagaaatgaatacacaaataactggaaggataccttatgttcacattcagaagaattaacatcattaaaatgtctatactatccaaagtcatctatagattcaattgcaattcctataaaaattccaatgacatttttcacagtaacagaaaagcaatgaaatacatatatataactataacagactcaaaatagacaaagtattcatgagctagaatgaagttggaggtatcaaacttcctgatttcaaactatattacaaaatctatagtaatcaaaacgtggcattaaaacagacacatagaccaatggacactggtataaaaatagacataacgacccatggaacatattcaagacctcagaaataaattcacacacatatggtcaaccaatatttgataaggaagccaataattctctacgggaaataagattctctgataaatggtgttagagaaagtagatattcac

SEQ ID NO: 56735 - DNA, 1662 bp, Bovine  19866880782371
  misc_feature (1)..(1): n is a, c, g, or t
ncagcagcagcatcttttactttcatcagggaggctctttagttcttctctttctgcctaagtgtggtgtcatctgcatatctgaggttatttatatttctcccagtgatcttgattccagcttgtgcttcatccagcccagcatttctcatgatgtactctacatataagttaaataagcagggtgacaatatacagcctcctttcctgatttggaaccactctgttgttccatgtccagttctaagtgttgcttcttgatctccatatagatttctcagaaggcaggtcaggtggtctggtattcccatctctttcagaattttccacagtttattgtgatccacacagtcaaaggctttggcatagtcgataaagcagaagtgtatgtttttctggaactctctttcttttttcaatgatccaacggatgttggcaatttgatctctggttcctctgccttttctaaatccagcattaacagctggaagttcatggttcacatacttttgaagcctggcttggagaattttgagcattactttgctagcatgtgacatgagtagaattgtgcagtagtttgagtattctttggcattgcctttctttgcgattgggatgaaaatttgagttaacaagtcttgctcaatatcatgatgatcatccagaaacatttcaaacagactcaatacccaaagccatctcccaaaacctccacagaacatctagagtgacaatgtcattgcttgtcaagctaccacatatgttattgccatttaacatgtatgggatctgtgcaaatggaaatacagtctacaattaaaaatactatgtgccacatgaggctgtcaattggatatattctactctcaaatatagctccattgagctccacttagtgcaccataatgcttcccataaccatcctttgtgtacctccaaaagagacttgctggtaatattggatcatgggttccattccagctttctttacatgtgttccatgcacatttacatttgaaatatttaaagggacaaataaagttctaacatacttggcagaaggcagcaatctgctttccatcatatccaggcagctgcctcagcaatacatcctcatgacttacgcccacacagaatactgatgttctgctgtttggcatatgtactcaataagactctgtggtagaatttctctcaggtcaacccggaaataaccagaatggtaaacacagcctgtaaacaatgaactgagtgagagccatagttagctgcaataggatgattcacaagggcatccctgatggcttagctggttaaaaaaaaaaaaatctgcctgcaatccaggagaccagggttcaatccctgggttgggaatatcccctgtaaatccagtattcttgtctggaaaatcctgggacagaggggctggagcaggttgagaggagggcgctacagtccatgggatcgcaaagagttggacacaaggatgctgcatcaattctcctctcaaattattcacatagagtccagttctccttctttagaaaaaaaaagatgaagaagtttctcacagcatccaccattagtcagccttagaacttagagagctttagagtataattctcttgttcctactgcattcttccctaggatatgtt

SEQ ID NO: 56736 - DNA, 798 bp, Bovine  19866880796155
  misc_feature (1)..(1): n is a, c, g, or t
naataagaatagaaaattatgggaaaatagcagcttcctggatactacttacaggaaatggattaaaagcttcagtgaaagcaatacaagcaagcttgagtctttagagaagacaaaccataaaaagagaaattggccatcaggcttgagtaaaagcagcttgacctttgtataaaagaactaggatattacaatattttaaaataaggaaaagcatttcactgttcactaaacaacttttacccacatcactttcagcatccatctgggatatgtttcatagagaaggagagcactcagcaatttccccagtagccaagaaggtactctactttcatttagccactgcgccaaatccaattcaaaaagattgagaagatgggcacaaaaataagataacagtagtccttgttcgtttcaacttaatcttttaggtaaaaaataaatttttctaatgtaaaacatgaatcaataacagcgcttcagacacttggccttctctcccaattcccatctctctcagtccatcataatgatagcagaagacctaccacctaaagattaaaatttcaaaagaaatactacatccaagagtgtttatgaaataaaacggtgatattggcttgagaggcttgttcttgagtggagaaagttgtaagcgatagagagtggaaaacttgtctagtaaattagtgtttaacagttattaaagcattttcaatgaattacttcataacatcctgaaaactgtgctgagctagtaaaaaagggggttatcagcatttcaaaggcaaggga

SEQ ID NO: 56737 - DNA, 794 bp, Bovine  19866880798449
  misc_feature (1)..(1): n is a, c, g, or t
ntgagtgtcatggtacagtgattaaagagtcagtggaaatttggcatttttccttaatgtgtacattgatcagaaatttgaattcctaaactgggttaaagacattcaattcctaaactgggttaaagacattcacactgggttaaagacagaggtaagatcaataaacaaataaacaaatgtttattaatttgcaagccaagcctaccaggtggctcagtggtaaagaatccacctaccaatgcaggagctgcaagagattcgaatttgatccctggattgggaatatcctctggagaagggagtggctaccaactccattattcttgcctggaaaattccatggacagaggagcctggtgggctacagtccatgggattgcaaagagtcagacacaattgcgcggctttcacttttttactttaagccttacataggatgaaaagagccataatctttgccttttagaagtttgcaatctaaataaatagatataggtagataatatgtgttatttattaagatatgagttcacaattgaataaagcagtatatcatacttgccaaagaatgatacaacaaaaataccatgagagagagaaggtgttctatcatgctgggaagagtatagaaagctatatcaaagtaaactgaaagagttgtacttgaagaacgggtggactttgaatatggatgaagagaggtaaaaacattcttggagataaagaatgagaacagtgtgaacaaagccatggagtcaaagccattttcggaagagagagaaaatcagttt

SEQ ID NO: 56738 - DNA, 2559 bp, Bovine  19866880803902
  misc_feature (1)..(1): n is a, c, g, or t
ntggctgggcagaggcagatgagctgggaaactggctttggccccctgagggcaacttagcagggttggtggggggaggagaaaatcattgattccttctctgccactcaggtctgcccatgtgagcttgtcttcagggaggttctcacgcctctgtaccagtcttgagagccagcttcctcctggggctccagggtggccctgggtccttcatactataagcagaagtttgtatccatgtctgtaaagacatttctctggggaaaagggctaccatcacattgaaaagggggctgtctatcctcagaacagttaggaatgcctgctcctacacttgacaggtgaggaaaactaaccagagacccagtgagtagaagcagtttacataaggatgcaagggagtggcaaggtagatctaacagtcagatctcctggctccttctgggagttctcgatgcctctctggtcaatcacttcctgctccacaggtcaccatgttgtcttcactttactaataaatgaagttgtaacttctatttactgagtcctcatgtgtgcacagcacagtgccctttgctttacttagtctatttgttcgcaaaacagaatcatgattttaccgactaggcagccaaggctctcccagtggagagggaaaggttaatcgcttgcccgaggtcagagacagtaactggaggacagagagggcacactcaactgtctttctttctgggcccaaagcagggcttccccctctctgcagtgttctctgatgggcccagcccttgctggtcttcctgtctctgggaagacaggaccatggcaagttcttcataggtaaatgattttggttcagctcttggtcctgctacttccttggtgactgcccttgggcatatttacttctcttctagctctgcttgtgtgtgatgggaatagtactatccaaatcttggggattttaagaggattaaatgagataattaacatccattgagtcatttattcaacaaatattggagaacctaccatgtattgggtttccctggtggcgcagtggtagagaatccacctgccaatgcaggagatgcaagagctgtgggttcaatccctgagttgggaagacaccctggaagaagaaatggcaacccactccagtattcttgcctggaaaattcctacacagaggagcctggtgggctacagtccatgcggttgcaaagagatggatacgactcagcatgcatgagcatgatacttattagaacctaatcttaactaattaaacttgcaatgacctatttccaaataagatcatgttttgactgtactagggattaggatttcaatttacgtttttgagggatacaatttaacctttagcagtgggtaaatatcttgtccactgagtaaaagtgggcttcccatccttaccttgtacattgtcctccattcccagaagctctgctgggagtctctgattccagaactcccagtttcaagacctgtacctagtgactcatggtaaagaatctgcctgccagtgcaggaggctcaggtttgatccctgatctgggaagatcctctggagaagaaatggcaacccactccggtattcttgcctgggaaatcccatggacagaagagcctaatgggctacagtccacggagttgcaaagggtcgaacatgacttagcaactaaaacaatagcaacatgacagtttaccctggtggcaaatgctagaatcagaatattcttttatttcctccctctgctgtcactgtggaagtcttgctagtctctgcttctcaggccccagcaccgaaaccaggagcctttcccaaagccttttagctttgtttataaatgagatctgcagtcaactgcacagatctttcctcaaagggtcactggccagatcttctgactggtcctttaatgactcatctgatgatttctccaggactgatttggtttgattagttcagtgcctaaaactcatgcaggatttttcttaggaacttttgcttccttttgcagtagcttctatttggatcttgtgttgcagtttctcatttctctgtaaatctgctttctgcccctccccccacacactctttgtgtactggaaattcctcacattttctggtccactgatgctgtgctttcctgtttttctctctgttttggatccttctttaaccatatcttttctttaaaatagtggtatttagatgggaaggagatagatgtacctgtttgctctgccataaatatatggtgtatggtgttgatctaaactagagggtcacaaggcttttccttcagagggcctgagagcaaaatattataggctttgttggctataaggtctctcttgaaactactcaacactgctgttatggtgcaaaagcagcctacacaatatgtaaatgaatgaaagtggctgtgtttcaataaaatttgacttacaaaaaaataggctgtgggccaagtttgacatatccctgaaaccagtggttctcaagtttatcatgcgtcagcatctctggaaaga

SEQ ID NO: 56739 - DNA, 2964 bp, Bovine  19866880832918
  misc_feature (1)..(1): n is a, c, g, or t
ntttagtccagttgctttttgatgaccttcctgcccttggggctataatcagatgaaaggtgtttatgctgagttgtgtccaactctgtgaccccatggactgtagcctggcaggctcctatgtccataggattttccagacagaagtaatggagtgggttgccatttcctccctccaggggatcttcctgaccctaggattgaacccacacccctttgcagtggaagtataaaatcttaattactaaaataaagttaaaaatgacatattatactgtaaaatcataaacagaatttattaaccagtacttcagttctaagtgccatttttagctcattaattctcttagggcaccataggaaaagttgtaagagcccaccatgcatgtgcagttttccctggtcactctcatggtaccctttccaatgcatatgttttaacttgctcccctatcccaagactggcaaccttctttctctggcattttcagattagacttcagggtacagttgaagatgagaaatagcctggacctaccttaggaagcagcttataccacctcttctgtctcaaaggttcagttccaagtcttgccagaattatggtgttcaaagtcctaacaaaggatttgctatcagagatgttttcttggtgaatttgaagttgaatcagactcttggcatttacttgcaaaactctcttgatgccagaagcttctagtctgtgggaaagggataatgtggtctcagcctcataaactctgatatttaaatttaatacaatataaactcagcaagttatattagccatatttaaactgacaggtacaaatagaacttgtacacaaatactgaaaaataaaaagcagttacccagcaggacaacaaaacagtgattttggttttgtaaacactactagaaaagacaagcctgttaaaccacataactcatagatttttcagtagaacacctctttccttcaagaggggatgccctgatgaatattgggaatgcactgagacaggaggagttaaagatgaaagattccatgcatgttattatgtttgcatgatatgactcttgtaaaggaagtgagtagaataatacaaataggtatatcattgtgatattctaagtctctctgctatccaaaagtccacttccacacttttgctgctgctgctaagtcacttcagtcgagtccgactctgggtgaccccatggacagcagcccaccaggctcccccgtccctgggattctccaggcaagagtactggagtgggatgccattgccttctccgcccaccctaagtacaggtatataatcctaaagtgttttaaaattacatattttgaactcaatgctttgaatatatttttgtgcaaggagcagcttctgtctgtggaaagtaggatccgttatttttcattcatcaggggtcatgttttaattctagcctggctatccctgcacatctctagcacatgcaggttattgctttacatctttcttgttttctattctgagtgtaaagtagaaaatcgtgttctagtattgatgagattccaacatttccccctagatccagaccagaaaaataacacattccagagagctttaccataaactttagattttctgtgtttctaaattatctttggtagcacacccagcagatctttcctatattgctgacttcctaggtagcttttttttttttccccgccttcatttctgggagtagagaaacactaacagcaacaaatttaaaaactgttcttgccttctaaggccttctaacccaaagctgactttaaggtccatttctgaactttactcagcagagtctgtttgtaactcagatccaatcattggttgaatttacatgtgtgtgctgcagagctaaacagaaataattctttctttcatgctcagcagaagcaggaatatcttgagagtataaaaaggagaacttcttttcatttctactcctgctgccccacctaatttgaaagaattagttctgcaactacccccaggatatgggccgacctgtatattatatatacttttatagaaaaaataactgtacagcaattcttaaaaaaatctgatgttatcatcacttatattttggatacctgatgtcaaaagttttcccctcttgcctgctgcttgacagtactatctacatgcacacgtattttttaacaaatacatatttttataccatttgctcttttcctttttgtttttagcttaaccttagagcatacacattttcctgattgctatctgaatttcatgcagttttcagtggctgcatagtgaattgtccattttattgatatacaagtaaatggtttctggctgatttaaccttaagattaaatctaatttgctgttacagaggatgcccagaatgaagatacatgcctgcctaaaatacgtgtgataaatttatttttatatagtaacaggatgcgcttctacacattgctttagtatctctggtgtcctgacccactatagtgtatgacaaatcactctacctttagtgatataaagctgcaacaaatttatgatccttatggatttggtggtcaggaatttggaaaagaccctgtggagatagaattctattgggagcctctgctgggaagactagctgggggttacttaactgatgcttctctctagaagttttgccactcatatctctggcggcgggcctgtgataattcaaatgctgggctcagcgaagaactaactgctggagtgctctcacacaggctatccacatggcttggacatcttccaatgtggcatctcagctctgaaagggaacatcctgcgaggaaaccactggcgcatgggtgttccatgtgtccaagcagaccaagatgctacacaggaaactaaatcatgtcaggctttgtagggcacaggcttcttttggat

SEQ ID NO: 56740 - DNA, 2694 bp, Bovine  19866880848098
  misc_feature (1)..(1): n is a, c, g, or t
nagggttttgtgaataatcaaataggctaggggagaaattggtctccaggtatatcgggtcgggaatgtggcatatactcagatggctgagatgggttttgcctgcaatttggggcatctttctctaaatctctcatttgatgatgcaggcagatgagattatttcctcccaaccttgaaactctggatttcctgagagagctcacaatgtctaaagtggttttttcctcctcatcaaacttgactaggtacctagtaccaacttctttcagtttaacagctaccatggaaaattgttatccatttttatgagccaacaaactaaacctaagcctcatgtgtacacaaattcatttgaaagaaaaggaaaactgacaacttgttacctaccattttgaacaggttgtaatatgttttgatgataatctgttcaaaaaggaagttaataaattgtttatgataaaactaaagtgaaattctgaataaattgttgcaagtaatcacttttaggtcaataaggcatttgacttcagtatcctcttccttcccacgaactgattcttagtgaaaaggagaaagggaaaagagttaataattaatttgaggatcttattttggtaaatagaaaagagatgattcagactactattttcttttatggattgggagatagttcaatgcattttgggatgctgtagcttgtaaatacttatttgtataaaacatgctagaatgttttctgggaaatatagacacatggatttacaaactgatttcaatatttatgtttctcagactagcatatacaatttgaaattggttaatgttggaaaattcatatgtattatacttttgaattggatgtccatatctgatatctgtgccatttcaggctgacttcctgttagagttaagggtagagccatgacttggtcaaaatctttgattctggaaactacaatcttctggggagaaaagctttaatgtctgtgctaacatacatatatatgagtatttttggaactattactcgggaatggtaatgatttatgagggtagcacaaagttagataactttttcaatactatctttcctaaacatttcctaaaattgttgctgttatgtggtaattaaatattttaaattttatttttaaaaaacctttttattttatattgttttatagccgagtaacaatgttgtgacagtttcaggtgcacagcaagtaatttttagattaatccaagatttaagcaaatttttataggattatggaattaacaattccaaaatgtgctgctgagctggtaaatatgaggtggtcagggtctctccatccatgatgctactatcctccaatcttaactcaagtctcacaatggccatcagaggggtaagaatacgtatccatgtaaacctatgctcatttggggtttatacttgcttgtaggggcttcccaggtggcctatttgtaaaggatctgcctgtaatgcaggaaacacagttgacatggattctatccctggatcaggaagatcccctggagcaggaaatggcaacccactccagtattcttgcctgggaaatcccatgaacagaggagcctggcaagatatagtccatggggtcgcaaagagtcggacacaacagagtaattaaacaacaacagcagcaaacacaaacctgcttgtggggggtttgatattctctataacatataactttagagcatttttatcacactttacataacagctatatattcattagtttatgtgtttctcaatcaccttgcaaagtaaggaaggtattttcacccttcttttaaaagatgcagaatctaaagatcaaaacacatcaatatcttggctaagtttatctaggaagtttaaagggagaacagagggtggaatctgggtgcactgccctttcagttcagttctgtcgctcatagaccatcgttttttctactatcatctgagcagtagtaatgggtgtattttaacttcaggcactaagaatctcaagtgagagaatgacatagctctaacatatgatgttaataaaatcttatgactaatagaaagttattgcaggcattatgaaagatatgaagccaaatattccaaaatttctctcaaactttagtatcttattttttgttcagccaaggatgtgctattagtcattcattgttgccagaatgagcaacttcaaagaaactgtcagccgtctggcaaggctttcctcccaacatggatccagtgaatctatgccaggctatttgcaccatctgttgggtatgagtcagtggaaggatgaaggttggacagctggagctgtcagctttgaaatgccacttactagggaaataccagaattcactgcaaaaagcaccaaagcaaagtcccttactaatccaaaaagaagactagttaaatatggtggcatttctgaagaaggtcttctctttccagacactcatgtccctttttttatcctacctaacctcttttggcggagaaggcgaagggaccccactccagtactcttgcctggaaaatcccacggtcggatgagcctggttggctgcagcccatggggtcgtgaaaagtcggacacgactgagtgacttcctttttacttttcactttaatgtatggagaaggaaatggcaacccactccagtgtt

SEQ ID NO: 56741 - DNA, 1692 bp, Bovine  19866880905048
  misc_feature (1)..(1): n is a, c, g, or t
nggccctactgggcaagactctggggccagtagctggaaacagctactgaaacaatcttagcatgtttccaggacttgaacaggtctcttacctgctacatcctccagaaggtaagcaaagccaccattgcaaagccagaaagtggccagaagatgtgcaagaaagcagctatagatgaagcttgccttcagggtctagacaaggcacccggcaccttgtaatgcaagggagagaacttggtggatgagtaagcaccatgggccacatgtctagctctccctgagaagctccaagtattgtaagaatttcaagttctaactgatcttacaatttattgtgaaggcatattcaaagtaggaagatagcatatttttttataattctgtttgcttcatctgtaactttcaaatctttagatatatggtatatcaatctttatttttaattgcacctctagcccagcagaagttaagactaggaacagacttgtcttttaataaagactccaatatccctgagcatgattaccagtttttcatttcactgtagcatcatctctatcataagctctaaaagaataaatagaactaactacgtatacataatacatcataaaagccacaatatgcatgcaaagggcaaacatgctgcatacatatattatctgataaagaacagtaaagagcacaaatgtattattcatgacatgaaatgcaatgattaataacctgcaaagctacattgcttcctacctgtggacataaaatgattaattttttttaaagtatagaatgtgactccacaagctatattaactaaaatttaataacttcaacagaagccatgaaaaaagaacagcagactaaaaaatgaactgaattgtgttctctcagtttcaaaatatatatatttacaatcacatttttcttatttattaaaattgctaaatcaaaggatatgtagatacaaagaacacacaggtgtaacttgagaaagttcaaacactgaaagagggattttgccaaagtgtctttgccacaatatgcttctcttcaaaatgtttgcatgaattctttacagaacagtggatcaaatggaccacagtggaccaacaagagaggcagagactattttgtactaacatgtggtatgtgtccgaggacctgacttttaatttttaagcgtatctctgcctgattctagagctataagaaatttgcttgaattgaaaggattgagaaaactaatgttcatgaagtgaaacagtctttttagctggtgcccaaagtcttacacccaaatggtccactaaagtaatatacagatgatattttaaaaatgaaatatttaatgattcaaaagaatcactgagctgagcctaaatttaaaaaactaagatcatagtatctggtcccatcacttcatggcaaataaaaggggggaaaatggaagcagtgacagattttattttcttgggctccaaaatcactgcggatggtgcctgcagccataaaattaaaagacacttgctccttggaaggaaagctatgacaaaactaaacagtgtgttcaaaagcagagacatcactctgccaacataggtccatctaatcaaagctatgtttttttccagtagctgtgtttggatgtgagagttggaccataaagaaggctgagtgccacagaattga

SEQ ID NO: 56742 - DNA, 926 bp, Bovine  19866880936250
  misc_feature (1)..(1): n is a, c, g, or t
ngcattttttcacagaattagaattaaagaaattgacaatttgtatggaaaaacaaaagaccacaaatagccaaagcaatcttgagaaagaaaaacagagctggaggaataaggctccctgacttcagactatactacaaagttacagtgattatgttaaatttttaagaccttggtaaaaaaaaaaaaaaaaaaggagaatccacctcacttctactattctgaagcaaatagcagatctaattaaaaatttacccaggagaatgtcagtcagacaaaaacttatgaagaaaaactacaacataaaaagtgaaagcaagcataacaagcaaagtaagatgtaaaggtatgcctttgaagctacattacaggaagcaaaagaaagcttttaagcatatatataatggataagcaaaaagatcctactgcatagcacagggtactatattcaataccctaaaataaactataatggaaaagaatatgaaaaagtatctatatgtataactgagtcagttttctctataactgagtcactttagtgtatagcaaaaactaatacaacattgtaaaccaactatacttcaataacataaaattaaaaaaaagaaaactaagtaaaaactgctttgctctcccaagaaaattaaatagactcaatgagagataaactcacataaaatggaatatgacaggggttaagtcaaaaaaagaatatgagagttaagccaaaaaaaatctttttttaatctccaaggagttttaagtggtattagaagctatataagcttagaagctattgaaaagaaaagtagaatcaacatgtcaaaaatccaatcactgctttggatgagaggctttaaaattcacccagaatatggggtaagggaaaaatatgagagacattgagaacagacagaagaaat

SEQ ID NO: 56743 - DNA, 1676 bp, Bovine  19866880994100
  misc_feature (1)..(1): n is a, c, g, or t
nctaaaatggaaaaatcataggggatcaatagatatacccaatagccagctcttgaatgtctcaaaagatgattttcctttgaatgacttattatcctaacattggccaatagttgtgaggtttgcactgactcatccatacttcattcagtttcctatttggccagtgacatatatttgtaaatagtttgcaatcattagtactcaataactttactgttgatttgttgttgttgctacacacagttgccaacaaaggtctgtctagtcaaggctatggtttttccagtggtcatgtatggatgtgagagttggactataaagaaagctgagtgctgaagaattgattcttttgaactgtgattcaaaataagacttttgtggcgaagactcttgagagtcccttggactgcaaggaaatacaaccaatccatcttaaaggaaatcagtcctgaatattcattggaaggatgatgctgaagctgaaactctaagactttggccacctgatgcaaagaattgaatcatttgaaaagaccctgatgctgggaaagattgaaggcaggagcagaaagggatgacagaggatgagatggttggatggcatcaccgactcaatggacctaagtttgagtaaactctgggagttggtgatggacagggaggcctggcgtgctgcagtccatggggtcacaaagagtcggacatgactgagctgaactgaacacatggttgacagtaaaaatcatggagtcatgtaatagctgtgtatgtgtggttttgtttgtttgtttgtttgtttcctctgtgtgaagttaattggactatgtagaaattaaattctctccttggcctgaaaaaagtcctttttatcatctcagcaggaaactcattttaggctttttaaacatacttgcatgattttgatgagattatcatcataatcattattattatccctcattaagtgcctggaatacaaggacataccatctcaagctttcactatttttaaactgcaacaattacagcaaattctgaattccaagactctttgcatcatctgggttaaaatgcttagggtctttggttaatagttgtcttcatctttatagagacatgttgataactttaaccaaccaaatgagactttgttaaacacacagacacgcaactaacagctgctttgggaaatatgtataatgtatgatatttaacagatttaaataatagatttcctttagtttaaaacctgtttttagtctaaatagctactatactgtacaaagaaatataacttggagcagtattttccacaccgactagggaaagagcaatctgacacccttatttttcctggactccctgtgccagggtctctcttctttaatccagactgcatattgccaccaatataatttcagttcagttcagttgctcagtcatgtctgactctttgcgaccccatgaatcgcagcgaccccatgaatcgcagcacgccaggcctccctgtccatcaccaactcacagagtccacccagcctcacgtccatcgagtcagtgatgccatccagccatctcatcctctgttgtccccttttcctcctgcccccaatcccttccaacatcagagtcttttccaatgagtcaactcttcgcttgagggtgccaaagta

SEQ ID NO: 56744 - DNA, 1100 bp, Bovine  19866880996259
  misc_feature (1)..(1): n is a, c, g, or t
ngaatcaaaattctgtatattaagactactaggatttcttttttgttgtgtgactttaaagaacctacctaaagggtctgtctacagagagattcgccctgcttttataatttgactttttgtacttcataattaatcactcaggaattaacacattccctcaattatctcctgaatacgatcctaatgaccattagatctttccttctaagccctgctttgacaagatatactgtctgatatcttattggcaatgtgtttgatctctattgtgttgacaagtaataagttcagtaccagttatgtgtcctgtttctgtgatcgcatgtgccctaaaatcatgcatttttgtattaacctcacctctagacacatggtcttctaacctttattattttttttctttatactaaatttctcacttattttttcatattacctttttatatctttataagcaaattaaaatattctagtgacaaaaatacttgagaacttgcaaggtgaatgctaactgaaacaattcaaagttgatcttaaaaaatattttcttaaagtaaatatgaaatctaatattttatgctactataattgagtcattcactcccaagcttactgtatattgtttctcatttaaacaataggagtttaaattttggcacagaactacaaatgtcacaattcaccagcttgctgtcagctacattaattagctacattagtgttctacattatgattcatatgaacacaaatcacaatctgcaaatgtaattgagctccaggtaacaatcttcttactacaaaacattcaggagttccgagctcatgtaaaactgctatttttcagctacaagaatgtatcagtgtaatacttgttacaattatcaatttaaatggcaccatgtggtaaatttaactgcattaattacatcttgtttgtcatacagaggatagtgccatttattctagtttcaggtgtgtacagaggaatgtacagatttatttcctctcccagaagatgcattgttacttatgattttttaaaaattaacattataagacaaaataactgtgaagcaccatagagatacataagata

SEQ ID NO: 56745 - DNA, 694 bp, Bovine  19866881008001
  misc_feature (1)..(1): n is a, c, g, or t
nagactttgggggaaatacagatatgttctctttccaagatatgtcatagttattttttaataacataaatttttaatgtttgaaataggaaagtatattttttttgtgatatagttagcatcactatttttttctgtaacagatcatgtaggctttctcttatctttttggctttataagaatttcctttcccttaataaatctaagacagcaaacttattgcttgattttttccttgactgttctccaactgctgacatcatcatattccttttggaatgtgatctgattttctccataattgctaaatgaagcaattatcttgtgtatatgcctttttatttaaacagttatacctttaacaattgtgtcttgtggattttatacatgcttttaaagagctaaagcttggctctcctaggagacagtgttttgtttttcttgttgacatgtggggaaaatatactttaacatattctattttgagaaggagtcttttgcctgtagtcatcctgccaaatgatgtaggaattttctagttattgtcctcatttagttaaccaataaatatttattcatggcctattatgtgctcaacatgttacttgtagactattttagatgttttaaaggaaataattgtaaaatatgattgcagtctttatacacttgcacaagttagctattaaaata

SEQ ID NO: 56746 - DNA, 636 bp, Bovine  19866881018677
  misc_feature (1)..(1): n is a, c, g, or t
ntttttctttcttcttttttttcctttccccttcctttctctcctccttctctccttccatcattttttttttttcttttgatttaacatctcattagctgggtcagtcactgttctaggcactaaactttttatttaaatttaccaacagtgctggctgttatgaaaatatgagacactataaagcatcctcattgggtgggtagcactgcttaattgtgcagagcatggattcaatctccttgaaagcacttctgccctgactatgatatttgctattattgccaagtaaattatgtctgtgtctctagcacatgaaaatgtgcagaatacagtacatttgtttggtgctttattgctgaaatgctcatgaccttggctgaggacaaactgatagtttttacagataatattcttcctctgcctatgagtctctagagggaagagaaaatgtcctgtggaatccctgggaattatcaactcacttctgagatcttaagccatcccctcactggcttcaaagatgccattatctcttcagagatgatcagattctatgaatatagcaagttttctcgagactgtaatatcaattttggaacctgactacatttttagtattctgacctcaaagtg

SEQ ID NO: 56747 - DNA, 1048 bp, Bovine  19866881125311
  misc_feature (1)..(1): n is a, c, g, or t
ntgaccatttctgcgccaggtagttcttggtcctttagatagatgaataaaatacagtcccaacctccaagactatgtgagtctggtggggaagctcagagtttcttgtgtttacagggtcagtttaattgctagtttgaaaggactttgtaaaccatgtaatcttagcaggcagtgttgaaaatgaccacatgaggtgtactagtttagttctcaagagagaattttgtaggtaaaacgaacaacctccctccaagcctgatttatctctgatatgtgttaaaacctgagacatctgtgtagatcaaactagttgaataatcactaattcctgctctgttgcctttttgctctatattatagccaaagacagtttgtaggctgatcagagacttttgttaaaggcttgtgctaagatagttgtgctgcactgcatttcaaagttgcgtcagagtattcaataaattgatttttctgtcccttctatttctcattctagaactctgccataaccagttacacgcggtttccattctatagtggggaaagcctgtaccttgagtgacagaggcaggcttttgaagttttcatgaaatggtgtgttgacttcctctttgttcattggagagggtaggatgtgtctggctcatctaatttagacacgtgaaagtcagatcccagttctacttttgaaaaccatctgggctgctttttattctccaaacccaggagccctcagtgaaatcaatgggcttggcaggctatgtctgtgaagagatgaggttaccttgttgtgtgcaagacattttttctgaggcctggacacaagaaaaacaacttcctcgggtgataattttttacaggaaaagagacattttgagggcttctgtggagtggttgggatttattagaagataggacatgttaaatatgcttttaaaaatgatgtaaaagcaagtatgtgttcaagtattttttagttttaactgacctctaaaatgaaaagcttaggacttaagacaccatttcttttctttttttttttttt

SEQ ID NO: 56748 - DNA, 2894 bp, Bovine  19866881165084
  misc_feature (1)..(1): n is a, c, g, or t
naatgtccaataatcattcatcttccctctaccagttccgctttcaacgtcccccatttcagtttataatactgctttcataaccaagcacttcaccgtaaacttcaccattatttttctttcttcaagcctacattctctttcacttcaattacttgcaatgtcctgacgtatcaatcctgattgaaaataaaaaccctctttcttctaaaaaaaaaaaaatgcatcctcttcaccctggagcctcagaaggaaagtatatgtgctacagaaaaacagataagatattcacctaaccagttagatgaggcataatgaaccttggcaacaaaatagtaacagataatgcaggctgttcaacttcatatccaaatccaacatcatatctccaatgtgcaatccctcctcttctgactgccactgttctcattcatctgctctgatgtggatggtgtaccttcttacctggacagtggtagatgcctattaactacgccaacatctcacctctacccacagcactttattctgggtgaagattctagatgaatatttgtttcagtcatgactatagactgtaagccaccaaaacggacttgggctaaatgaagcaggaataaaattgtacacagaatgtaaggaagtcctcaaaaatcagttggaaggctaaagaaacaagctttaggaaactgggcagaaacaaagaaggccagaaagaggggaatacagtcaaggtcatgtttcaagaagagtcggggaagggcacagccattgatattatgccactggacactcctcattgccccagttggatacattgttagtatgatagtttgctgtaggttactacatcactctgctaatccctcaagttaaaaaatttcatgggagtttataattggcatatggctgagtcaaggccatgtgtctctggcttcaagtagggagaagaaatgtctgcctcctctttggttttcatagtggaagacagacctcagcctccaactagtatctcataatagggacttctcccaaaacaggaatggtgactggattctggatggccaaaagcatatgagtaatgttaaccatcacctttaaacgaaatcctcccctttgaatccacattcctaccatcttatttaaaggaaacttttacctttgaattcacattcctcaccagagagactggtagaaggaagatgaatgattactggccattatttagctcatttgctcctggtgttagttcattctgcatgctacctatccatgtattcttttccctcccccacctcctatcctcctcttcatacagtaataatatattttcatagtttaaaaaatcaaagcaataatcacttcatcccccaaatcctttccagccttttaactgattcttcactgaccattgttcagtcccattacaccttccagatacttcttcctgctagtagtgacccttccttactctacctgtacaaaaggtacaccaccttcaggacccctgcaatcaaattcaacctctctcaaaaatcttccttgttcccagataatctgtctctgatctcaacctaaaatacttacattcttcttaatttatattttaattatttgcatgcactctatctctctctctttagattgcaatccaagaacagaatatgatttatttttcatgtctttacaaatatctttaacataggtgccaaataaatgcagaactgacattgcaaatgtagcattcaaaagcagacctaatacataatacttcacaaaaggaagctgattaccgaactgctatggaacaaaaagacaaggatgatataataatagaaatgttctctactttaagaaagcttgatgtaatagaaaaatctgaatttaagaaactctctctctttaaacatttacctaacaaaagtgtacagtttaaaaaagatttacttctaacctttaaaacgtaaacttgcttggagtataactgtggtgttggaaaaaaaaataaaataaaatataatttgacttgcaaaaatatgttattttaaataactattgtataaagaaaggtgcacatacacataaatacaaaggataaaatccttttatcaaactcctactcttccaaaaataccctctctggctctgagatctacaagtaggcagcaagaaacaaaacaaaacaaaaaaatagagctggtttaccagaaagctataaatgatgattgaaggtttggaaaatgatctattaaaggaggtcaagaaaatggatattatccagtttgaagattaaagattgatttgggacaatttaacaacaatctataaatacatgaagggctctcacacagggaataatcaccagctactcttcaattccaatttgggccagaacaagagaaaaattatgttatctaaaaggaagaattcttgatagtaaaatcatttaataggaaagtggagtgctaaggagagttgtgaactcttgctccctgtgagatggctttaaagtgtggctcaaaacacacatcctgcctagaggtaaaagaatgcatgagataacctttcatagtcttttccaatgtctagagtcagaagttttaaatttatttcccttttataacattttactgttttataagattccctgttttgcctacgaaacactgtattgaaagaataattttaggacttggttatattccaattttctcccacattcatcttaaagttctgccattttaatgattactttctggcatctatttgagtgttaaacattgggagaaggtgagcaagaacaaatgcaatataaattttgaaatatactgtagttagcttctatattatagttctggataaaacaactatatactgaacttgataaaagaaca

SEQ ID NO: 56749 - DNA, 1505 bp, Bovine  19866881260836
  misc_feature (1)..(1): n is a, c, g, or t
naaatgctatcaaccaaaaacaaactgtccccaccccaagacccttccagaatgcatttcaagctgacacatatttactgagtgagtatttgaatggctgtcttagaatgttagaaatgactctcaagttgaaagtgacattgactatacccaaaatggaatattttttttccttagagaagttcatgccagctaagccttttattgtagaaaggttggcgttaaatcacagggttaagtcaactttacctcctccaattttggtgcttcatttttattttggacctcctgcatacttaatggtggtagtagagctaatattaaagatgggctggggttggatttcatttgctggcttgcttcagctctccttttattatctctggttacctagcaacagataatgttgaactagggccagatgatgccatctaggctcatccttctgctatgattctgagtgtttattcattaaccatatttctttaatgttcatgcaaaggtccatattagtgtgaaaaatgggaaagagtgatttggttaatgaaatagccacatgttatttgaatctctaatatagtgcaagcttgctttaaaaatatgcttagtaaacttctttgtgtgtgtgtgtgtgtgtatatatatatatatatataatttgcagaaaaaataatttggtggtgacttactataatttaaaaagaagtgaaagtgatttctctataggtggtttctttcaaatggcaggtttaaaggtggctgatcacagtaaggaactaattgcctggttttaactaggctcactgctgtaagagatcttgaaaatatttcttctcctggtgtttgtatcaccttgagcttcaatataatgataccatactctttttgtattgagccttatttcaacagaaaatgtgagctattttcactttttgaaaatcagaattagtgtaaaaagtttaaagcagctaaaaaaagcttttcatcttttaaaaattctgctcagagaagtcagcttgttttattttttaaagttaataatactgtgactttagcttctctcgactatttctgtgatattagtcacttttacttcataaatatgattaccagtgcaagtggagtataattgcatgaatggatttatggagaaccatgaggatctcaaaattatgtaatctaaattctaaaattaagattatctagttttatcactaactcttcaatctaaccaaaatttaaatttagaattaataaaatcaatgtaaaataaaatgttcatttaaaaaatgacttctaatttaatccaacaacctctatgtttattatgtttatatgactgatcaagacattttaggtctttaggtcttgcaaatatgagaaagcaaagtccttgttttcaggtaacttatgatttatgaaagagacaatggacctctaagagactagaaccaagatagaatggaacagaaatctatgcagatataaatacatgtacatactag

SEQ ID NO: 56750 - DNA, 742 bp, Bovine  19866881308587
  misc_feature (1)..(1): n is a, c, g, or t
nctcctgtggcttaaaatacaatggtttgaaattggtggattgtttttaaaggtttttttttttcccttctgtttgagatagaaaggcagaattttactcaccagccccaccctcatccttctccaaaataaaaggtcaaattgcttcttctctatttttaaagacattgctttaaaaaatcctgatgtaaatgcataaagactgttaatataatggcctaaatggcatcctcctccactccttctctacaatgaaaaccaaaagatctaaaacttcttaaaataaagtatattcagatgctaaagaaatgaactttaaaaaatctataattgaatatatatatctataattgaatatatataattgcaaaaattgtcactgtaatatcatatacctcatggaatagtcatttggattatgtgatcatttattttaactcccactcttcttggaatagatataattcaagaatttatatatccagaaatctctcaggatcactaattctaccaaagttagaacttatttaaatattgattataaattaaaattaaattattttaaaccttctaggctaaattagccctggtagcacctctgttcaaatatataatgttatttaagggatttttttccttagtatacatactagccatatgcaaagttttttttaatgaaaaactaaaagcatagactcagttctaaaaagggaccatagttaaacttcttaatgctatatat

SEQ ID NO: 56751 - DNA, 1032 bp, Bovine  19866881402726
  misc_feature (1)..(1): n is a, c, g, or t
nccttgcttgttgaaaagtggtttttatttttttaattcttatttcatttatataaattaataaagataaattacagaatttatggaaactatgaaaaggaaagctctgctcttgttacagccagttgtcttagatcaggtgagcagaattcaggtagcaaagattccttgaccaaacttcagtcaggcgtctctgaactcttcccaactagactgtgccttttgggcttatgttttcatctttgcattgcccagttttagcaagagttctgctaagtcactttagcatgacacccccacccttgataactgatacctaattcctcatctcctaaccctgttacctgatcactctgccctgcctgcagcaagaatcctgttaaggtggtttagctggatggaattcctcctcacctcagaggttttctcttaggaaatttatacccactgacccttgccctgctccttgtctgtaaatccccacttgtctatgctgtatttggaataaagcccagttctattcagaagtcttttcccccttagtgcaccagttcctgaataaaacttttgtttatttttttacaactttcactactgtccaactactctgattttctgggaataactcagtacatatttgtcaaacaatgttcattatgtccttaatccatggaattaagtagtattagtaaaccagtcccactcctgctgttgtcacgttgcacttacagggctgtatttgcctttgatgatgatcatgaccatgtgttaggtgtaagagaaggaagggacatgaaaatgagaaagaaggtcatcttcttattataataaatgccatttggaaatgggtaaataaaccaattggtattgcataaatcagcagatgtcaatgcagaatagttggggatgtgttctctgtccacctgcttctgtccgctgggcttgactcacatcaaaggcctggctcactccagagctgtcttggccttaagggagaacagaaaagctagagaggtcagtaagggtcaagaa

SEQ ID NO: 56752 - DNA, 1347 bp, Bovine  19866881415138
  misc_feature (1)..(1): n is a, c, g, or t
nacatgagtttgagtaactctggaagttggtgatggacaaggaaccctggtgtgctgcagtccatggggtctcaaagagtcagacacaactgagcgatttaactgaactgaatacatatgatgtttaaatttgcttgaaaatgttaaaactttatttattgttcaagaccctattatgtataggtgacaagactgaggtcaagagactttgcagttctcctaagcaacacctagttgaagaagtagaattcaaatctcagcctttatctctctggcttcattctgaataatgacaaaatcaaagttgaggatctatttcttcccaaatgtcctttgcaaatctctataatttcaaatgtcctttatttgataatgcctggcttttttctaccttgagttgcccaggagaaagcaattgtgataattatgaaatgactgtacaaattcactgcagtgaagaatgaaaatttcagatagaaagaatggaaatgaccagtcctaaaatcttatcacctcaacttcagaaggactgaagctgaaactccaatactttggccacctaattcgaagaactgactcattagaaaagacccagatgctgggaaagattgaaggcaggaggagaatgggatgacagaggatgagatggttggatgggatcactgactagatggacatgagtttgagcaagctccaggaattgggtgatggacagggaagcctagagtgctgcagtccatggggtcacaaagagtcagacatgactgagaaactgaactgaactacttcagaaagtgcttctaaggtctttactgttaaagtccagtactcaatgctggatgcaatatatgggattataaaaatgtgctaaaataatcattaataaataaatttcaggagtgccacatataaataggaaataacattggtagggtttagtcttgaaggcaaggattatgaatgtccacttgatgatacattaaaagaaatgagtgatgtcaaaaatctatatcatagcaatataaacattattttatttattatagatgttttattatttcttgtaaaacctttgaaaaatgttatattatagttttaactattaaataacagtagtactgagaatgctacttgaattttgactctatacttttctggtaagactttatattaaaatgttcctatttgaaactttaatagcttgttaatccaagagaagactaattcattggagggtgcagaacaggctactgccttttcaaagccccaaatcctttaaacctcttttctccttcattttagaaacatgaatagcatgactcaaatctggcaggcagtttttttgca

SEQ ID NO: 56753 - DNA, 1977 bp, Bovine  19866881618042
  misc_feature (1)..(1): n is a, c, g, or t
ntgaagagttgactcattggaaaagactctgatgctgggagggattgggggcaagaggagaaggggatgacagaagatgagatggctggatggcatcattgactcgatggatgtgagtctgagtgaactccgggagttggtgatggacagggaggcctggcgtgctgcggttcatggggtcgcaaagagtcggacatgactgagcgactgatctgatctgatctgattgatatggtaaagaatgccttaataagtgaaacatctgaactttgaagaaagaagtgatggctagtggctgcagtccagaggcagtaagaagtgttgctatataattaggtgccaactctcagtgggaaggatgagaatccagaatggcatagcttagggagcagaacttatctgtgagaaataagggaggcgtaattactgtactaggcaactgtttcttcctattgaggactaagataatagctaataaatcatgactttcttagggatttgactgatgtgtacctgacaaggctattcctccatttatataacaaaacaattaaatgctggcaaacagagtggaaattataataatctcagagtacatgaaattttaaaacgcactatgcattttgataatcattagtagaatcctccttggatgactcttaggggaaaagtgtgtcatttcatacagaaagatgatttttatggtcattaatgaataataaaaatttctcaaattttttttaatggtcaagtttaaggtctcaccaatctattgagtcaactgaaatcattttgaaagtgttcagtatattaagaacgatgggattaataagaaattattattgtttaatatatttaggacagccctactgtacagttagctctcatttgagaacaaatacagcccatcagtgctgtggacagtgatccacagaaatagcaataaaagtttcatttatcctggcatccgacaaagttcagggtttcagtctccaaggggaaaccaacacatttgactgttcacctcaactaaactgaaccagaaaagtaaatctgctttgaaaatacagtgttctcaagttgagtctatgtgacatagattattcttgctcttctggacaatctctgccgtcactgtactctattaacaaggggaagggagaatggcctgaaatcacatcttattcatagacagacttttaaatcatatttgtcaagggcttcactatgttacctttagaaattgtcaggcatattaatttatactcacatatgaggctgaattgaataacaatctaactagccattgctgacaggaacactgtttgtacacaaatgagaccaatgtacacaaaatagaccaattgtgggaaatccctaggtgcgggagtttgtgtccctactctcactgttctagttcacatttatggaaatggaatgttaatcgacttgggattatgtctcagtagaaatgttcatctctaatcaagagtataaactgtattgatactttgcttcattattttctttgtctcctctcagataggatttataactggttgatcattctaaaatgttgaagttagtatccagagaggaaatagaaatacgatatacactagaacacatgaaatcagcatgtgaaaatatgatcagaatactataaaatattctggtcaaaaagactctagccaaacagatgtcaaaagcaacagaatcctgtgcaattaaatgtaaaatgcatgaaaatctattaataaaaattaaattgttagctctgtagtaagttgagagattgactttagttactgtttctcttaattttgcaaattgaagcaaaatgaacaatttgtgctgggaaattcctttgttactatgcactgtgccactagatagagaaatgctataccatgcgaaaaatcccgaagtttatttattacttgctcagctgtagccgaagagggatgtaaggataag

SEQ ID NO: 56754 - DNA, 1904 bp, Bovine  19866880356909
  misc_feature (1)..(1): n is a, c, g, or t
naagggctgagcatcgaagaattgatgcttttgaactgtggtgttggagaagactcttgagagtcccttggactgcgaaggagatccagccagtccattctgaaggagatcagccctgggatttctttggaaggaatgatgctaaagctgaaactccagtactttggccacctcatgcgaagagttgactcattggaaaagactctgatgctgggagggattgggggcaggaggagaaggggaggacagaggatgagatggttggatggcatcactgactcaatgcatgtgagtctgagtgaactctgggagttggtgatggacagggaggcccagtgtgctgcgattcatggggttgcaaagagtcggacatgactgagcgactggtctgatctgatctgatgaagaactgtccaggctgtgtaacaaattctataaatttagcagtaaaaccaacacccactacaatcccacatttcccgcaggtcaggggtccagctggttctctgtttagtgtctccccacgctacagtctgctgttgtggtccctcaaagagttgactggggaaaaaccagtttcccatcccttttgagctgatggcagaattcatttcctgtctgcaggactgaagtttttagttccttgctgagggctgctttcaactctcagagccacatgcagttcttaggtcattttttcagacatgaccacttacatcatggcttctcgcttcttcagaggcagcaatgcagagagattgagtcttctgtggcatctcttatcgcaagggtggtattccatcccctttgtcatggaatgaaaaatagttgtggaagtcacactccatcatccttgccacactctgtggaagagcattaaagatatgactaccagatgtgaggctcattttaggccaataggatgtgacctctcaaatcactgggaataatgaatatttgataaaaggtgttaaaactggatagtcacttagaaaataaaaagggtgtatatttatcccacatcatgtaaccaaataatttccaatggattagaaattcaagtctaaaaatgaaactgtttgagtactagaaaaaaatatggatgggaatgaaaaagccttttaaatataacttaaatttgacaaattggttatttcactgcattaaaaaagacttggcaaaatatcataagcaaagtcaaaagacaaataatcttgggaaaaatatttgcaattcacatgacagacaaaggactcatttttttaatataaagaagaaaattctgttttttgttttctaaggaaagaatacaaaattagtaacacagccaatcaacaaagtatatgaacatgcaaatatacttacttatagtaaaataaatgcacattgaaactgttttaagatactcattccttacccatggggttggcacagatctaaaactaacatgctcggctattgacgaggttttggagaattgttaactgaatggaagggaatttagcaaaatccaacaaaattgcagatgcatttacctttctattcagctatatcacttttggaaacatcacttcaaaattcacatcaacaaacactaaccagtatatttctgtagttattcagaatacattaggataaaaataacccagaagtccagtgatagggttgaatagactgtggtaacaaatggctaaattaagtatgaaataaaattatgtgaactatggtgtgaataaaatgaaaaaagaactcttgtattttaagtacaaaatgcaaggtacaaatagtacatatgtcataaggtgtgcttttgtgtgtgtgtccagaaaaggacatttgcacatcgtttttacaaaacttacccattgtataatactttttgtttatattaaacctccttgaaa

SEQ ID NO: 56755 - DNA, 704 bp, Bovine  19866880655900
  misc_feature (1)..(1): n is a, c, g, or t
nttcctttatgaaatactaatgatcatcagccaaagatcttaaaatagaacccagcttcagcacttctatcatttcccctgaagtgtcatgcaaagaattctctgaataattgtttcagcacttggcaccatgtcaccagtggttatgaatatgcaactaaatctttgcaaagctgcagtgaaaaaaaaaagccatcaaaatcttacagtacattcagtacctttgtattgtataaaaaggaataataaaatataagaaaaaataagtcaattttattgcaatgaaatgtataacaggttaggatctgtatagaagtatctcaaaatgtagaattacatttgagtgcaatgtacataatcaatgacacattttctttttatgacatgtctactttttaaaacctattaaaatctggaagacattcttttataattaagcaaattaaattctctctgttcaaccaataatcacaattgaaggaaacaaaatgtactaaaaaggaagataagagttttacatgaaggaagaactaacaccaaggcttaattgaacactcgggggccctgcagcatccaggatgtttcatgctggtgtttctagggaaggctgtatctgctcatgactgcaaagctgaaagctgggcaaatggcctgctgccatttcgtctgtcctggatgacactttgccgagacactgggacaaa

SEQ ID NO: 56756 - DNA, 1297 bp, Bovine  19866881079847
  misc_feature (1)..(1): n is a, c, g, or t
ncccgatcccagtctccatggcactctggtggtacagggtttgctgcacacatttttcatgtgtcaagtctgagacttggacaggatagagagcttgccaaggtcaggtctggcaattatgtcttctgaatgggaggcccacactacatagctattccttgcaatttgtgtgtgtgtgtgtgtgtgtgtgtatactcctaagagatgcaaagccagcttcagcttttgcaaatagttaagagagaaagccaacagaggcaggtaaaacctgacttcttaaacacgatgtgagggtgcttatgctccaagcagtgtgcaaacttgagtccaagaatttccaagtcaaccacatcaagaatgctgctgacaaatccttcttgaatcttaattatttgttcagtaattggtggcatttgtctgttataatttgtcaactgaaaaagcaaacaacttgaactcatttgtagaaaactgcatctggaaagaccaacagagtaatcatgagggaaatgttgctggaaaccactaagcaagcgattacaggaagaggaaatatgagctgtgctttagtctgtgctgttgagcagtcctgggaaatgccagtggccaatgagaaatcaagttgaaatgcacactcagccaatcaagtagcttatcatatgtggaaatgtgggcgagagaaaagagagcaagagaagcagggaggggagatgcctggggactctaaatctctgaggcaagagaacatgctgcctaccagcaatgggcaggtggtgtctgttgctatttagctgctcagtcgtgtctgagtctttgtaactccatggattctagctcaccaggctcctctgtccatgggattctccaggcaagaatactggagtgggttgccatttccttactcagggaatcttcccgacccaggaattaaacccgcatctcttgcattggcaggcagattctttaccactgagccgccagggattttcacaaagaaataaccagcaaagagcaagtatattccattgaaaattaggaaagactacagagcaatccaattgtaaaacacttccttcttttttccttctgcaaagcacccttcacaataaaaggcgatggaccccagaccatgccacatgttttaagaaatagagcgttagagccttcctccctccatcctcccttccctctcttcaccctctgttcttccttccatgtgtgtctttggatagccctctcatttcttctctccttccctccctccatacttcaatttatttttccagccatccatcca

SEQ ID NO: 56757 - DNA, 865 bp, Bovine  19866881100059
  misc_feature (1)..(1): n is a, c, g, or t
naaccctgccttgaactgggagcccgtgcttgttgagaggcattgcctcctcctggacccaggatgcctagtgctctgaatttgtctcaactttcctcagcactctgagctcactgtacaagcagacatatccagtctcactgggcagggaaggagtaagcctggtagtcccagagttaacacattgtacagatcaaagacttacatccattgttagaatctgctctagaaggactgagaattagggtgtgggttttttgttttttgatgtccgaaactgataaagtttaacttaacaattaaaaaatgtagttatgttttacattcctaaagcatgattaaaaaattcacattgcccaaatggctttcagctatgactgcaagtggtgacattctgctcatggcattcagatttctatctttgaatgccatggtaatcacttgcttcctttcaaggctgtcgtgtctggcacgaaatggaagaatttaaaataccacctcagtgggctcacatccaacagagctggaacttttgaatgtgcagttaatgactccttgtgggatatatgtcaatgagacagtgagacaagtggtaactgacagtaaaacataataataagtaaatacttctaacagaactatagtgtaattcaaggctacagataagaaatttgagatccactcactcatgatgtagtcagattagataaatttggctccccttgatttatttagctccaaaccagtgcagatcctccagctggccctcggccctgaggatacacagggacaagcatcaggtgccagcactggggaaggagttctgcctcctgactgcccagccccagtgtgtgtaggcacagag

SEQ ID NO: 56758 - DNA, 1139 bp, Bovine  19866881224820
  misc_feature (1)..(1): n is a, c, g, or t
nttaaaatagtgttgtattaagttattttcataaattttagcaatgatgttggtaactcactcatggtgaatattttaaagaaatttcagcctgattaatatttgcttgcaaaacagtcacaagaacacgtctgtcaataaatactaactcaaaaaaagaactgaaacctttcatagaggggaaccatttaatcactcctcagacaagatcacatttatgaagctctttcaatccttcagtcaacatggggcaggtttactgagttgcagcagtaaaaatttgtttataaaaaaaaaaatgtgtagtaacctagaaactggaattctacacctcactgctggattttctgggttttaagattatttttaagcatgaggaaggaaaactgaaaacatcaagtattaatcgattgagaatgttgtcaattgtttgaacagagtcatctgctttctaattcaagctacagtaaatgaacacaaagatcattacagaaactagcattttgaaggcagtgtgcctaaatatgtaatttctgaaggcatttttgccctgagaatgtgtactttcattgtatttagaaaatgaacatttttaagtgaggaggaagctgatgaaataaaaaagaaatctctttttgtgactttattttaaaacctgatatacttgatatattaacttgcttcctcagggcccttcttcaaatagattaatgtagtagaaacccaactggttgtgccacaattcagtttgggcactaaccatcagggttagcacagaccccacaagttaaagggcgtgctcccaagcaagatgctctgtacttcagatgccaggcacacttcaggtatctccaggctacctgtgcttctagctgactggccataagtttgggagtcactgtgtagtcccctaaggcttaattatctcctataatgactcacaaaaatctggaaaatgctatccttatgattacagttttattataaaggatgcaaaccaggaggcccagtcaaatgaagagatgcatatgggagagatcaggcagggatgaagaatctccttaccttctcattaaatcaggccacgtcacactcctattatatcgggggtgctaacacattttgttcaaaagctgtta

SEQ ID NO: 56759 - DNA, 1497 bp, Bovine  19866881234074
  misc_feature (1)..(1): n is a, c, g, or t
naaaaatgttagtttagccagtgctttgctgctaatgttcaagaaaatctttaaatactgggcaggttaaaaattacagagttcccttgatttgaaattttacagattggtatgattcttaaagttttcggttgagaatttttttaattgaaagccaccattatgtcatctatttagaatagtcaagttgaagttcacaagtttgttcagccctagattatgctagtaccaccaatttcagtgtcctaacattaggtcgtgtttcctctattgtgcaagttaacatttggtgtgtagtggctatatatgagcagtagtatatttaataatttaaatgtatagaaacatttctttcagtgttctacttgatttgttattaatgtaaatttattatcaaatcaattacatagtcatccaggaatattttgaataagcattaaagagcccagactgaaattttgaaactgagatttgaatattgtcttcacttaatgttactactcagtgatttcaactctacagtggggaaagtgacagtctgtaggtttactgtgagaaagtttagttaaatgacctctcagggttaagaacctattaaaacagtatctggtatgtggtaataactttgtggatataatatgttatcatcaaccatcattattattagcactgagtaatttatgaggtaaagacaaattgctgtttggtatctgtatggcaaaatcaaagtttatctttatgacttgcattaatgtgtagtgtgctttgcaaaccatctcaacgtatataccatctaaagtaggatcatttagtactgagcatatctcccatgacttattgtcctgtttttcccctttctctctatataggttacctacatctcatacttgctttaatgtccttttacttccggaatattcaagcaaagaaaaacttaaagagagattgttgaaggccatcacttatgccaaaggatttggcatgctgtaaaaaaaaacaaaaaatgggaagaaaaagaaaataaatttaaaattttaataaatataacaagagggataaaattggtggtgatagtgtcccagtacaaaaaggctgttaaatagtgaaccacagtagtcacctatgtctgtgcctcccttctttattggggatatatgggctggaacagcagatttcagctacttatatgaacaaatcctttattattattatttttttttttttgcgtgaaagtgttacttattctttcacttgtatgtacagagaggtttttctgaatatttattttaagggttaaatcacttttgcttgtgtttattactgcttgaggttgagcctttttgcatatttaaaaatacacaccaacagactcccctcccaaggaaaatattaccaccatttgtaggccatgtaaccttcaagtctgtgctatttttttgtccctgtatctaactcaaatcaggagctgtattttttttaaacaatttgcttttgaaa

SEQ ID NO: 56760 - DNA, 4210 bp, Bovine  19866881273318
  misc_feature (1)..(1): n is a, c, g, or t
ngctgactgaatggatatgagcttgagcagctccaggagatgatggacagggaagcctggtgtgctgcatacagtccacggggttgcaaagagttggacacgactgagcagctgaacagccagatccttacttcccagcatttgacagtaaagaataaagactcttcaggagctaaattaaagcttggaagctattgttagatcttaggtattttatttatttattggagttttggaatttttttcccccaaactttaaacttattttgtatttgggtgtagccagttaacaatgtggtgggagtttcaggtgaatagcaaatagcatatatctgttctccccccagatcttacgtactttaaaattttgagtgtttggatcctaactttaggatactctttggtaaattatttagaatgttacagacagaatacaataagcagaatgactagaaatttatacaggcaggtactattacttattactcactataagataaaaagtgcttcttttagttcagtgtttattcataacctttttcttgattaaaaaacaatttccgttttgagtgaaaaacaaatgcactatgtttaagagtcttagggtagattgttttaaggtaataatcgtcaatttatattattcttttcttcttcttgaattggtttaaattacttggtttgactttaaagtggttttggtagttacattaatatatgttaatattaaatgatgctaatgtttacgtattctgttgtttagggaacagactttggaaattagaatgtagataccatttgatgtatttaatctctattccatttcagaatctcaaaactttacaataattacaaattgtacttctgagacttggagttatgttccctcttgcttgcatcttacctttttgcagtagtagtttaatttccctgtcaatgtgtcctcagtttttccccctctctctttccctgttaattttgaaaattttgccgcctacgtgtttaaaagcttctaatctgcctctcttcccttagagccagcaggtttattttttgttttgcaagcctgctctgcctccttacagtatgacatctgatgctggaggggtcggtcgcactttcaaaaatgagtcagctggtacatggggttatcatcactttttagctcttctgtctgagagatacaagtttggaagcaatcttggggtacttacccacaaggctggtggaaaccaggtgtgtcacaaaggtgatttgtttgctccctgggggagagggtggagtgaaatttttgcatttgtgtcactgccaagtcactgccacctccagcatgccccaggttttagttctgatatcattttgtgcataattgaaaatgtgaatatactgcaaagatctaaaataaatatttgagctgctggactcctacatttttttgcattctttcccttggaccactgcaatgagggataattttgaaagtgataaagaagtgagttttttaaaactgagaaatacgggaaacagattttttcttttctggtggctctgagtttaagattcttttgttaaaagttgtttggaatttgaagtctcaagtcagtgataaatttacaaatcaagtccttgtaatatcagtttgaaaatttagcttttgacctctaaaaaatattttacctattctgtgaatttaaagtgttgaaatcagtattatgctgattcaccttaatatatgttgactgatgctggttataaaagtgaatagagtaataggaatttattttttttaacatgttgggtagggtaggcagaattggttcatgccccagaatgaaaataaaagatttcttactgtcttagaattttgaatatttctacttaaaatagcagcagtatattgaaaaagtagaaaaaaactggcaactgtttatagctgaagtcattcattgttatccacagcaagatttttaatgccctggaatacaattgacaggtacacatgctgccagtgtattttcagggaaagctactttcgttgaaatgaggtaatcttgatcagaatggtaaatcagacttcagtgtctcaaaattcatgaggctattaggtttaaatttgtattatctacagcagagattggcagactttttttttaaagggccaggtaataaatattttaggctttgtgggccacgtgtctgtaagtttctcagctctgctcttgtgatataaaagcagccatagacagtatgtaaatgaatgagcatgcctctgtgccagaacaagcttataaaaataggcggctgacccaggccttagtttgtcatcccaggcagtagtttgctgatactttatctaaagtttgggatcacgaataccagtgcatacctttgatattgtgaataactgatacttggctgtagacggtttcatagttgtatgtttttattataaatatttgactttgtaaataattatgatttgttacattggtttgtatgttggtacctaaatagtgtttagtttcctttccttaaaaaaatgaactgagtttttattagtctagcccttatgataaatgtgttgtatggcaatctgatcggatcactttttcctcatgttgaacttttaaaattgttaacccattaaatcttggtttcaaatttgtcttccaaaataaaatgtttgctccttttttgaaatatggaatattttgcttaacttttctcaattgcattttacagatcatcaggagaacctcaatctgacgacattgaagctagccgaatgtaagtgtaacttggttgaggctgtggtgtctaagttgctctagattgctttaaatggtatcacattttttgaaaacaatttccagttaaagagagtaatactttagaaagtaaattggaagataggaatacacatgtctcattttccctaccaaataaatacctctaaatcttggtaacatattactagatttctacttctagacagataattgcatacccctggattcttacatatttttgctcccctagaagttttagtctgttagtgtgaaagacctggaagcacatcatttcatttatggtggtagaaggatcccaggatggaacatgaacataaagaagtaccagtgtactcaggtaccttgatgcaatagggacctaatccacatggcagaaaacaggggtgatcagggaaggctaagttaagtcttgaagtgagactgggagttagctagcacatgctaggcagaaacatgagcacttacaaagccacatagtaaacgtaagaagcagtaggcagttgaggatttttagattatagactaaccgaaaggtggaaagttaaaggagatgagactggataaaaaggactaggtgcttgcatgctttgggaacggccttggcctgtctctcataggtatttgggagtcagtaaagaatttgctaagtagggtaaccttgttagatatatatatttttagtaactttgctggcaaggaaacaggattgaagagaaatcatatggtaggaagaccaaaatttagtcaatgaaagcctaaataagggcagtagtatattaggaattcaagataaacttttctggtttaaagaaaagtatttagaaagtgaagtagttaagacttcagtgattagttgtgaaaatataagaagtttaaaataactagagatggtgattattgaagcagggctttaaggtaataaaggttggaattaaaaatataggtatagggatttctcttgaataagagcaaagacccgtatgaatgtagaagagggaggtaaggatgagtgctggtgctgctgctgctgctgagtcagttcagttgtgtctgactctgcgtgaccccatagacagcagcccaccaggctcctctatccctgggattctccaggcaagaacactggagtgggttgccattttcttctccaaggatgaatatgtaatattaaatgtattggtaggtaagaatggggaagtcaaagccactgtgcctaaagtgtcaattttcttagtaaattaggtcagctacaacactgtgtgcttctggaagaagtggtttcattgttgattaagcttgggacatatagacttaaacctgaaaattgtgaaaaatcctttagaatgatatacattgtgcatctccaagaagggattataaaatgatttttcaaacatatg

SEQ ID NO: 56761 - DNA, 1494 bp, Bovine  19866881300575
  misc_feature (1)..(1): n is a, c, g, or t
ntgaaaagtgaaagtgaagttgctcagtcgtgtccgactcctagcgaccccatggactgcagcctaccaggctcctccatccatgggattttccaggcaagcgtactggagtggggtgccattgccttctctgcgaataggtgttagagtttgtcaaatgctttttctgcatctattgatgtcacatgagtttttcttcttttatctcttggtgtgaggaattacattaactgattttctaatgttggaaccagccttgactacctgggataaatcccacctggtcatggtatatagttatctttatacgttgttatatctgaagaagcattattgttaatattgctgttattatgtttaacaaacattgtaccagtggatcaggagaacagtggctaggagagccaggagccctcagagactgagtcaggtatggtagtgaacagcagaaaacaacatagcagagtgaggagcttccctctgaatcaacagacaaacgtgtatatttaagaatgttagagcggagtactgagaagctgttttctatgggaaaagaattttgaaaagccttcaggatctgcactcaagctacaccaaaactctcatgcagggagagcaggctcccctggtctcgttctcagccttggggctagtggagcaggagtgctctcaggggtggacagaagctggccagggtgccttggacctatgaaaccagggtcccatacatgggacaggggactgggctattctggcacccctgcaccctgtggtctgaggaggatgccctggtgttcctggtgaaaccctgcttcgttcacagtgcagactcactgggggtgggggcagaggaggtcataggatttgaaaaagagaaatggaaaactcaattttccctaaaagttcattaaaatatgaaatggaatgacagaaaatatgagttggaaacaaacagttccatattattctagttttttcatagttccatgttcctgcatttgggctagaaggaaatattcttgattctcagaatcctgattctcagaatccccacacgcaatgtgagttccctttccccttttccttccttccttcttccctgtctctgataaaatcatgatttctagacatttttttaaactgacatccattttattatgatgtatttcatctttcagctccatgacaggatcaaagaaagaaaggtatattttgaaacaacctcccttctcttttgaagagctatatactgacagtttaaatcaaggtcattcttttcctttgaaatttatcaagatgaactctgacccatctgctctgatattcaaaatcagctttcttttctaaccactgaccttcatgttagagcaaaaaggaaaactttttccacttcattttaagtcacttgatttagcaccaattgaggtcttctcatctttcaaaggacagtaagatccgttctgtgtaggcttcgatttgactcagcattcagag

SEQ ID NO: 56762 - DNA, 830 bp, Bovine  19866881403229
  misc_feature (1)..(1): n is a, c, g, or t
naatgtagagtgttatgttctactgttgctacacaatcactttgaggaaacattactataaaaataaataagcttctttatccactcaaagggagggaaaataacaaggaagccctaagcacacccacaaaccttttccaagaacagttgtatttgtccccaggctggcaagaatgctttgctaatgatatcaaagccttttgatttatctacaagcaatctgacttgaacactgaggaaaaaatactcattctgttccacttcaaattaaaacaagctattttttgaatactgggctgtctttatttttctttgaacacaggggaatatgctgctctgagaccttgtactatttactctctggctgtggaacagcagcaaaacacactattaatctctgcactggaattttaggaaagacaaagtataatttcatttccaaaaatgatcatccatttctacttcttaccaagcggaataaaggtataggatttactctcctgtttgaaacaaagaagaagctgggacaaaatacaatttaaaaaactggtttccaggcactggacagaaagaagctgtgagaggggaacagtcaaggtgagccccatgcctgcccactttattgtctgaagggtggggctgcagacaggatggggaaccaggcagagacttcagtctccccagggcagtgggggacagaactgagggtcctgggagagaaaggctacggcagtgtgagggcagagcacagagagggctgcccagaggccagctgctcgggaggccaacggagtgtcccctgaggcttccgctaaggaaatgacccaggg

SEQ ID NO: 56763 - DNA, 1210 bp, Bovine  19866881530197
  misc_feature (1)..(1): n is a, c, g, or t
ncaacagtaccatgggctttgctttcttaggtggccagtcggggctcacaaagcccagtgtgcttatgttgagtgacagtcctaaagtgctgctgtgacttggactagcactactcttatttctctgttgggtggatgacgtttctctttgaattttgctacaggacatggactgtgggtgcagcgctatcaagagaagaaatcattgtttgatgtccctgagtctgatggcacctctttatccccagtcccagctgcagtttactcgtttttgaccatgataatagttttgcaggtaacaatactaagtttcgtatgccagatggtttacctttctggtgagaacttcaagtcaccatagtcttctaagaacttcctacagattctgcatctgggaggagcacagattcacctgatgaatgtgttgccttttgtgttccgcctgacttatctaaaggaccttttctggggtgtttttcaagttgaaattctcctttactgttcttaagattcttaggttctgaggggttggttttttgatcagtgttttttttcaatcagttacttctttggaaagcccatgttttattttagaataattttaacatcaacagactagttacaaaaaatagtacagagagttctcacgtgtctctcaccaaatgtgtcctaatgtaagtgtattacatttccatggtacacaatcaaaactgagaagccagctttaagactgccacgaacaaaattccagacattatttagcttctactggtctttccaccagagaaggcaatggcaccccactccagtactcttgcctggaaaatccaatggacggacgagcctggtaggctgcagtccatggggtcgctaggagtcggacacgactgagcaacttcactttcacttttcactttcatgcattggagaaggaaatggcagcccactccactgttcttgcctggagaatcccagggacaggggagcctggtgggctgccgtctctggggtcgcacagagtcggacacgactgaagcgacttagcagcagcagcagcagtctttccactgaggtgctttttcttttccaggagtcatttcaggatatcacattgcagtttgcagcactggttattattattgttgttgttgttatcgttagttcccctgcctcccgaacaagtcctcgtcattaactgagaaactatggc

SEQ ID NO: 56764 - DNA, 937 bp, Bovine  19866881579620
  misc_feature (1)..(1): n is a, c, g, or t
nttctctcgtggagcgcaggctctagggcgtgtgggcttcagtagctgtggtgcttggcctcagttgcccctcagcatgtggaatcttcccagaccaaggatcaagcccatggaccctgcactggcaggcagattcttaaccactggactacctgggaagtcccctcctttctttcttatgacaagtcaaatgcaaatcttattagggttcccttgtatgtgtcctatttgtcttattgttttcaaaaatttcccttggtgtttgattttaagtaatcttaccatgatttgtctgtgtgcaaaaatctttttgtttcttcttggaattaggctgctgaactgtgcagattaatgtttttaatcatatttggcaagttttcagtcattatttctgtcactatctttttttctgctcatttctctcttctccttctagtgttccctttatgcacgttagtctggttaacaatgttctgcatttctctaagaacatgttcatttttattcactcctttttttctgttttttggattacataatttctatttctctatcttcaaatttgctgattctttcttctgtctgttcaaagttactagagtaaggctctctagtgaattgtaaaatttcagctactgtttatttcaattacagaaacttcatttgattattttaatataactttcattttaaatcttaattggtattcaatatttgatgaggcattgtcattgtactttcttttactttctaagcatgaattcctttagttctttgaaaatacttataatgctgctttgaggtttttgttaaatctgacatctaggcccttttgggcaatttctgtttcctacttttttcctgagtgtgggtcatgttttcctggttctttgtatgtcttgtaatttttgattaaaaactggacatttcagaaaat

SEQ ID NO: 56765 - DNA, 1402 bp, Bovine  19866881596118
  misc_feature (1)..(1): n is a, c, g, or t
natacagtcaaaaaatgaaagttcatccaagttcacagaacttgtatctaaaaatcttttatttaatatatacagaactcatagcctaataagagaagacaaacatcccaattaaaagtgagcaaaatatttgagcaaatacttcaccaaggaagatacacaaatggccaacatgcacatggaaagatgctcagcattataaatcatagggaaaagcaaataaaaatcacacaaagatagtactacatactcactataagtgcaaaaatagagggaactgattacagcaagtgtaggcaggctgtgaagcaaccagaactcctcatacattgctgattagaatgaaaaatgaaataaccactttggaagagattctggctatttcttaaaaacttcaatatgcccaatccctatgacccaaaaattcaactcctgggcatttacccaagaagaatgaaagcaaatgctcacagaaagaaaatgcagaaacattcatagaagcttatttataatagacctaaacttgaaataacccaaatgcccatcaagaggtgaacagataaaataatggtgcatccatatgacaaaatggaggtgaagttgccttcatgggaaagagggaatttattgctagaagaggcaagaggaggtttaccaagaaacatgaagaaatttccgtggatggatatgctcataatataaatttagcttgttttatcagcctcatcaatttgtacaatttaaatttgtacagcttaatatcagtttattatacctcaataatgccaactataacatagtgagttgtctgtctgagctgaggattaaaatgtgacagcatgcaaagacactaaatgtttcatgcctcttttgattttcattctcctcttcctctgctcctcattccccctctctccatattggagactcagtaaagtacaagaagaatgtattttcctttcctttttgtgggatctgacagagtgttctgaatgccacagatactacatcaaagctgaaacaactatgtcagtgagagctcattcattatattggtttataataggagtcacagagtaagcaaaacatcactgttaggacttagtcttttattaaatcattttaatttaagaacttatgtttcctttttctcacttttaattcctttctgctgacttaacttccttaaatcctcatcttcatttttctttccatttctacatctatgctgctaggttctattggggcttggcttgaaatccttttaaattactcattcttcatctattttccacatgcttgtcaaagtatactttaaacaaataacatttaaccttacaaaatggtgctaatatcttattcactgacatacagccttttgtaccatacaattcattcttct

SEQ ID NO: 56766 - DNA, 980 bp, Bovine  19866882038000
  misc_feature (1)..(1): n is a, c, g, or t
natgcgattctcccatgcacgctgaccttcccctgtctggggggcagctcccccagcacagcacataatagtgaggactgaaacagaaggcaacacacacgtatgaacaggcagcactcaggatggaacatgccccacagcaccagcgggaccccaccctggtgcttgatcagtgatatcagaacaggataaagtatagctctggaagttgcagggaaaagtggaaaacagcactattggtcaatgtagactaaagattggtaaggaatgttaatactgtaacaatccactctgccagagtttcccccaaatgaagtgctctactcagcaaagactaagaatgtttaacatctttcactagcagagcagaccagcatgatgtgtactttctgtatctgatgtttaatgcagttgttcttgcatctgggtatcttttacttgacaaatactttttcttaaaaagcagtgtggggaggagaggagcaaggaaccatggctgctatggtagctctttgcagtgggctagggaagagaaagttgacacgttttacaacagctgttgtctgcctcataaatcctgggattcatgcagtgctgtggagaagttgttcacaatataaacaggtaaccagcaacagggacctgcctatcccaatggaaaatccttataaggagcctctgaaaaaatgtatcttgtatgaaaaatgtgtagatcataagaatctacagcttttatcccagtttatttctccatttactggatgcatttatggaaggcatataacaggtctttgtgggaacaaacaaaaagaaatcacaaaagcaattaagagagctcaaatttttggggtttatgccaattacatacaaggatcctgcctatctcaaagaccctaaagtttgtaacatcaaatatagggagtaaattatataaagttatcatcaataaatgtaatttgcaacaagaaaaaagttatgtg

SEQ ID NO: 56767 - DNA, 1627 bp, Bovine  19866880404394
  misc_feature (1)..(1): n is a, c, g, or t
nggaaagaagtacgtcaggctgtatattgtcccctgtttatttaacttatatgcagagtacatcatgtgaaatgccagactggatgaagcacaagctggaatcaagattgcaggagaaatatcgatgacctcagataggcagatgatgccaactttatggcagaaagcaaagaagaactaaagagcctcttgatgaaggtgagagaggagagtgaaaaagctgctttaaaactcaacattcagaaaatgaagatcatggcatctggtcccatcacttcatggcaaatagatggggaaacaatggaagcagtgacagactttttattttgggggagctccaaaatccctgcagatcatgactgcagccatgaaattaaaaaatgtttgctccttggaagaaaagctatgacaaacttagtatatttacaaaacagaggcattactttgctgacaaaggtccatctagtcaaagctatggtttttccagtagtcatgtatgggtgtgagagttggaccatggagtagggtgagcattgaagaattgatggttttgaactgtggtgttggagaagactcttgagagtcttttggactccaaggagatcaaaccagtcaatcctaaaggaaatcagtcctgaatattcattggaaggactgatgctgaagctgaagctccaatactttggccagctgatgcgaagagctgactcattggaaaagatgctgaagctaggaaagactgaaggcaggaggaaaaggggaccatagaggacaagatggttggatggcatcactgactcaacagacttgagattaagcgaactccgggagatggtgagggacagggaagcctgcctggtgtgctgcagtccacggggttgcgaagagtaagcataactgagcaacatgacaacaacaattaatgtggggtggggtgtgtgtatgtgtgtgttggtttcaggaaaagaaaagtttggggttttaaataaatcaagaatttgcggcaaaactcaagaagaactttaatcatttgtgctgtttctgttgttggttagtggctaagttgtgtctgacgcttttgtgacaccctggactgtaacccaccagctcctctgtccatggggttccctaggcaagaatactggagtgggttgccaagcccttctccaggggaatcttcccaacccagggactgaacccacatcttctggtccatttaccaatgaaccaactatgcttgtgctcaagagagtaattagcacccaagtggagtttgatacctaagagtaagaaaaagaagtacagagagaggagttctgatcaagagaaagttgttgtctttaattttggataaagaacaagatggaaaggtggaaacataggaaagatgtttatttgatttttacggagtaggcactagacctcataatgtggtacaagctgggaaattatttcacctgcaggacaggtgtaacagagcagggcacaagaggagtttctacctgttctatgggtttcaagctgatatttccctagggaagtggggacgccaaggagaagagtgtgggtggtacaaaatcactcactctggttggtggaaatttcacggctaggcagaaatacactg

SEQ ID NO: 56768 - DNA, 2371 bp, Bovine  19866880443752
  misc_feature (1)..(1): n is a, c, g, or t
nacttaatgagttcaataagcccatactaattcttcagagtagcgcagttcttaaatgttgtttggcttattcaattggtccaaagtccattttcgtgccctgttggattctccctagttccagggtccttcactaaaatctgtcaatatttatttgactttgatggtgtgctcataatccttctcctttccataaactcaacatttcttatgaataatttaaaaattttgtttccaattcttcttcatgacatgccttcatgggtgaaatacagaatgctcacgccatgcatgcaatgactatagcttatgaaagactggatttgtattaatatccaccaggtcagaaaatatcttatgttctgaatgaggaaggaaaaccagagaaacatcacagagtcaattgattttagaaacagtggtgaagataaaaatccaagaataacttagaataagttgaaaggaaattgtgaaaaaattacttccccaaacctgggataaggagaaggaggcagcagaggatgagataagttagatagcatcacccagctcaatggacatgaatttgggcagactctggaagctagtggaggacagaggagcctggtgcttcagtctgctgctgctgctgctaagtcgcttcagtcgtgtccgactctgtgtgaccccatggacagcagcccaccaggctctcccatacctgggattctccaggcaagaacactggagtgggttgctgtttccttctccaatgcatgaaagtgaaaagtgaaagtgaagtcactcagttgtgtctgactcttatcgaccccatggactgcagcctaccaggctcctccatccatgggattttccaggcaagagtaacggagtgggttgccattgccttctccagtgctacagtctatggggttgtaaaaaattagacacgacttagcgactgaataacaacaacaacaacaaacctgggatgccgttcactaggttttgagcttcttaagagcagtaccattgtcttatactgctccctctctctctctttttaagcctccatggtgactaacagaattctggacatatataagagctcaatggatatttgtgtattaaaagccttgattgaggctaaggtttaaaagagacaatattagcatttatctgtaggaaattcattacatgttaaaggcagtacaagtggaaaatatatacagactcataaaaggagttcagaagcggaggcttttttcttaagatattgtttactctaaaaaaaaaaatattgtttactctaagggaaaaaaaaatccaaaaccagtgaggaactatctacttgatttaagataataatttaaccctcccactttaaaaataaggagagagtacaagaaattgcgcaccttgggaggacattcatctagaccgaatccctcagtttacagatgtatagaggactcagcaatattaacttctctgtggtcatacagtgaactgggcactaagctgatttccatatgttacgcttcctgcctttctcctgttgatttatttagtaaataaataatgtaaaatatactccagtttcctgatgtgtacaattaaggaagaggcaaaggaactgctggaaacggaaagcatgtgcaatagccaagaggtggaagccacccctcaactggtgaatgaacggagagaccaaatgtggtccatacacacgacggaacattatccgtcccgaagaagggggtgattctgacacatgctgcaacatggaactaagtgaagggaagtaaactagtcacaaagcgacagaatctctaagactccactcatatgaggtccctagagtcgtcagattcacagaaacagaaggtagcatggtggttgccagggactgaggggaggagacgtagggtcttgttctttaaccgtcgcaatttcagttctgcgagataaagatgttctggaggttggttgctcgtcattgtcaatatacgtaatgctagtgaactggacacttagaagtggttaagagggtaaattctgagtcgtatggttttttttttttttaaaccacatttaaaagaaaaaaaaggaaagatgagacaaacacaaaatgacaagagagaaaaagacaaagagggtgcgatgcaaaaaaaaaaaaaagcgcaaagatcaatacagcatttcccagccacagagctcctcaccacccacccactagcctcccaagccagcctgtcttctgattcttagttctgcttaactatgctaaccaagatcactctgctattcataccagcaatgcctgctctgctggcaaactcctgatcccaattcctacacacacatacacacacacacacacacacacaca

SEQ ID NO: 56769 - DNA, 774 bp, Bovine  19866880453770
  misc_feature (1)..(1): n is a, c, g, or t
ntctattcttgctaactgggccggccctgtgccaagaagggtatagaggggattacactgtaggcttcacattgaatgactccttgtccccctttgtcaccccctaaacagattgaaagtatatctgaggatcagaatgagttgagacaggaggagtagatgaaacacagccagaggatgttgttcttttcatttctccaaatcagcctgtttatgatactgtcacccacgttctgctcttatatctcacaagcccaccccatcccatatgtataacagtcatcatttctcccctgtcagatcagttaagataaaaagaaaacacatttatctggggagaaaaaggaatagtcctagctttgaaaaaagaaactaagccagaatcagcaacaaataccagctcaactagaaggttcggaggcagggataaagggctgagggcgtgagagaaaagtcctgctgctttccctagcccttggcccgacatgttctggactggggtcctggacacaagctgccacatgccccatccctgccctcatgctggccacaccatccacctggtacttccccttgtctggcatccataaagcaggtggggacagccagcgccctgccaggaaggaaaagggcttggtcttcgggactctcaaagggttgtggcgatccgtcctagagctggatgatgtcaacaaactccttcctgaggggcaggcgtccctggtaccagctacagctgccatcaacatgcttcatgcagacataatgctgggc

SEQ ID NO: 56770 - DNA, 1157 bp, Bovine  19866880461680
  misc_feature (1)..(1): n is a, c, g, or t
ntaagtctgctcaatgagcgggaacttttctcctccccagtgtcttgtagatggccaccagctgggcaaactgcaaaagagaagcaaaggtttcagtttacccagacagcttctggaacagacaaaatggcaatccattgaacaaatatttattctgcatttgctccactgagggctttgtgcaaagtgctctgaggatataaaagaggtgtcccaccctctattctccaggaacatatgcttctgttggggaagggagagagtgagctactattcattcagtgcctactcagtgttaatgatatttcatttaatcctcatatcgaactgatgagatagggtctttatcatcttcattttacatatgaggctcaggaagggtaggtgactgcctgaagccacagtgctgcgaagaaaggtatagctggggttgcaatttgggtctgtataactttaaccaccatcatctctagagatggcaagtgatgaagctggatgggggaacaaggggcccagtcttggaaatttgaatgccaaggaaaagaaatcatggaaggtagcaaagacagacgctgtcttctggactcactgctcatctaagaactgaactcactggatccttcacctatgagaagccccagcagctccggggaggaggggtgaagtgcacgtacttaagtgtcagggtctgcctttggcgaacatgtagcgtccctggtgtcccctgcccacccctctgctttataagtggagaaactgaggcccagagaggttgttcactcaaggtcacaaagtagttgagccagactcatagccagacccctttagtcctaacccgtaactcttccttctccttcatgcagctgcctttcaggctctaaagagaccatgctcttcccacaggaaactttccagttcagtccgttcacactcattccccacctccaacacacacccaccccagagcactagcagcggcagtgatccagcatcttctctctggtgctactgggttcacactctaagccactgatacctggaactgctggaaggaagagttgccagatcaaaccgaccttctgtttactaaagaagggaaagatagaacatgtttcaaaagcccagttcctgttttcaatcagtgatgttagcacgtg

SEQ ID NO: 56771 - DNA, 1431 bp, Bovine  19866880665878
  misc_feature (1)..(1): n is a, c, g, or t
ncctggtaggttacagtccatggtgtcgcagggagtcggacatgactgaagcgacttaacactcatgcacgtagtattttaaatgtcagaggctcttaaattaaaagaaacttgaacagagagggctgagtctagcataaaggaagaaagtgactgcagtcctcccttcgcatcctcaggggattggttccagaaccccttccccacacatctatgaatactcaagtcccttgtataataacggtgaagtattttccgtacaaactatgcccatcctcttgtataccttaaatcatctctagattacttacatacaataccttgaatactggagtgggttgccatgctgttctccagaggatcttcccaacccagggattgaacctgggtctccggcattgcaggcagattctttgccatctgagctaccagggaagtccaatattaatgtaaatgctatgtacatagctgttgcatggcaaattcaaattttgctttttggggggaactttctggaatttttttccccaaatatttttgaaccccagttggttgaatctgtggatgcagtatctcaggtacaaagagccaactgtgctggttattgagggcctgccacataccagatactgcctcagtgctttctacttacattgtctcgtttaatcaagataattcgcatgtacacttcgagctcagtgttattgcattgatgtttcaggccagaaaacagactcacaggttaggcagctcataattacttccagaatccaacctagatctgcttgaatccaaacagtcacatcacataaaactgcagtttgtcagtgaggcgttttcggttttttggtgcaaaagggggctcttgctgatgaccccgaagtcccctcatatacatagtccctttctgagacttagacttagctgaccctgtaaacagcagcctcccaaccaggcacccccctgccttgtgccctctctgcttccccactgaagctcttagcagccagtcattaagactgtctcagggtagttattattctgacacacacgtcctccagctagcaggatgacagaagaagctcccatggaatttttaatgctagccaagcctcttacttctctctctcaccagttttcttcatgtagctttcccctcccaagactaggaagacggacatgacatataatagaaagagctagaaggcaggagacctagtacaaagtaccaactactaaatactaatactgaccctaatactaaattgtatgctcttgaatgtcacctgctcttgatccaggtttcctaattcattagaaaggagattggattgtggttggtggttacatgggtcatcctcagggcttactgcgggaagactcaagcagaagatacttagaattctctgtatatgattaaacagagcagct

SEQ ID NO: 56772 - DNA, 1716 bp, Bovine  19866880735701
  misc_feature (1)..(1): n is a, c, g, or t
ncaggagaggcagcacgtcccctctctgcccctaggcggcagtggagagcagaccaaggctcagccccaaacccagccccttatctcaaagaccacgtattaacatacactgaggaactgtcaataggatgcccattcgcacagtccgcagatgttgctaaggcagttaattggacgttattcatttgcttctctgggtcctggaatcttgacattttaaggtgggaggctacagaatgtccacgaccacgccccctcaaaaaaaaaaaaaaaaaaacaactgatggaatgagtcagtattttatcaaaagcattggctggagaattcacccatctggcctcagcaatctggcctcctagacaactgcggaaataaataaaaccaaataagaaaatggggataacaactgctactatttattgagctccatatgccaagctccgtgataagcatatatatatattctaaaatatatatattccaaaagtctaaacaacattcctttgcaatttcttcaagaagggaacattttcatactttgggagagtgatttttttcacaagaccctaaagtcatttgatatagaggcagatgaattaggtgggtggtgaaactgaatcatggctttttttttttatggatccaaaacgaaatgatgactacagagtaacatgatcaatttcctatgtgtctcagaaattatcttttaagactgctaccaagggggcttcggcagattttaagcagtggcagccttccaaaggaatatttgtagtcaaggtgacttcttttttactttttcagaaaagcagtgtttatttgttttctgaattgcaaaggccatttatctttactgcagaaagtagaaaatagaaaagattgaaaacaaaagcacaaattattcttaatgtcctgttattgctttgttgttcccaattttgctgctaataaaattatgatgcaataatattctcctatatatctatttctcgcacatctctgatttttttcctcaatacaaacttttagacatagaacctctggatcaaagagtatgtatatgtttaaagctttcaaaactcattgccaagttgattagtgaagatgttattttaaggtgaatgaattattaataagatggaattttttaataggtttatcgtatttgttcttttgtgtgttgcctatttataactttggcttatttttcatactgaaatatttagctttttcttttttcttttttgtgaggaatgcttacatagtaaggaagccaaccctttgtgtgtcttgtcattttccctaatttgtcactgttttcaatctcgaatgatttttaaagtcatattcttttactttcagttagccaaatgtatagatctttttctgtgtgttatctttctttctgggatacctttttttcctacatactttggccatgccacgcagtttataagatttccgttcttgaccaggaatttaacccagccacagggcagtgccagctctgaatcctaaccactatgccaccggggaattccctttgttggtataatttaaaagccttttcctccatggaggtaattattcattaaggagatctctttgcagggaacaacaggatttgggatatatttgttatatataaatattggtatattgctttgaaagtcttctttatagttacacttctaatttattcaatcatttttttt

SEQ ID NO: 56773 - DNA, 1907 bp, Bovine  19866880893658
  misc_feature (1)..(1): n is a, c, g, or t
ntggttatgaatttggctgtgtttggtcttagctgctgcatgcaggatcttctgtgcatggcacggtttccttgtagtgcatggattctctattgtggtgtgtggtgctcaggtgtagttgctctgaggcatgtgggatcttagttccctgaccagggatcaaacccatgtcccctgcactattacacattcttaactactggaccaccaggagagtcccttatatccaaatttaatattcttttcattgcactgttttgccacgatgttttcagtaagttgtttatagatgttatctcagcaaagattcaacacttaaaggttagaagctacaggattagtttatgagaaccaggaaaagatcagaggcaagccaagagcatgtctgggagatagaaaagttatgagagttaagcaggaacgagagagatgcacgcccctctcacgcaggacgggagcaccacagcagagagtgcagcgctggggggatgtgacgcctgggctctgcctcctattcgcttcaggacctaggatcagggacttatcattttccttctttcctgcagagggcttccctgatggctcagacagtaaagaatccacccacagtgcaggagacctgggttcagtccctgggtcagggaagatcccttagagaaggaagtggcaacccacttgagtattcttgcctggagaatcccatggacagagcagcctggcgggctacagtccatggggtcacaagagttggacatgactaagtgactgatactccttggtggagaaggcaaacgagttgaactgaattccctctgaggtgtcctttcctgctctcacatgttgcaatttcattatgtgatgggctccaaaccataggtagttctggaaagagaatccggtattgttatggaagaagggtaagcttcccacagggtcacacgtgaaatgttgtcatccagagccaagaagaatgttctctctcactaaagacctcagaaactcagaaaaccaggcagcgctttcgtttgtttccatctccattacttctttatcacataggaggatttggttagggactttcttttcactctttgttagaactatgagaggtaggcttttttgttgttggctctagatccatatctatgtatgtacccatatatattaaaagctttaggagttactgatgaaaggaagcatttctttgtttctttctttctttatcactcatttgtttaaattctctcctctctcttaagttccaaatttggggtagtaggtgagtttaggaaaatgttcctccagggactgggtgctcctcattcttgaatctcctggggaaatactgtggtctgagaggatactcattcttgctctgacttcagttcaacccgtcaaaagacaactaggtcacacctggtttctgttatgtttaaaaactcggccaccaggttgcccgcttgagaccaaattgatcactaaaataaacgtaaccaacccgtcctgacccaggtttagaaaccccagggtacaaatctgtcttttttttttttttgatgtgctaaaccacacagtcaaacttgtgcatatgattattaaagagttgcaatcataactcatttcaacaaaaagccaagctaacttaagacagatttaaataaagtcatgagctctgcacagcccatttcctcaggcctgagatcaagagcaatgcacattcagtcataccacccaagtgtcaggacacaacctgcaagtttctgtgaaatgtctgtgtttggtgttatgtcacttgttctgttttgtctggatggtactgagtgtctagatgtttggaaacatccagatcatagacctgaaaactttcattttgacgggctatttggcattataaccaagaagcactt

SEQ ID NO: 56774 - DNA, 1324 bp, Bovine  19866881061719
  misc_feature (1)..(1): n is a, c, g, or t
nttgttctttatagtttatgtatcctagaaaacacaagagctccacaggcacagccagcctatccacagaaactcaaatgcaccaaagtttagcaaatggagaaaaagagagacgccttcagattcaacggatgaagcgatggaaacgagactttggaaatctcgtaaacttctagctatttacccgagtcatgcagaaaggaagcgaaaagcactgaagatcccaagcacactcatggaggtaagcagggggtcgggagcgggggagaggggcggtttatctgagtctgggggaagaaggaggggagtcaggtttgatcttgtggtctttgtttctcccctgtccaccccacccaacccccaggcctattgcaccccgcattgtgtaatacttaaaaaagaaaagactaccaaaccacccagaggatagtcgcactgaacttgggagaggcacaattcttttgtacactgttgacaaacagccctggattcacaagttatacagagaaacgttaagtgagtgttacaagcacgaacaggaacaggtgaacagccagacagaggcgcggacactgcattggaagaacagagtccagtcagcactgaaagaacgcagaaacggcaccagtgggagggtccgctgcttccctccccgctttcctttctttccttgtttatttttggcttaaaatttctgctttgaaaaaaattaactacccattgctttaagaagcttggacctgtttgggccctactgcaatgccattacagtcgagaatatactgtaaacaaccttggggggctggccgctgaggcggggtcttgcttgagtccggatccttaagtgttccactctggaagacaaaaatgcaaaagagataaaaaacgaaactccaggcagattcccaagagaaaccctgtggctctgtggcggggctgcagtgggatccactgggacctggcccaagggcttcaccagttctgcaaacacctcaagggggttctcagcctttggcgtattgctgggacctaagtgaaggcaatctggggctgagaaccactttggcgggtagtgtctgagacccttacccccttttcctttcccttccttctagaccctttctagaaacttccaagagcatctggcttcttctctgggggctgcctgagggccagctaccctgggactcaccgccggcttctgggggaaggatcagccccagcaccagcgggggctgggccaggtgacggcttaaagcttcgcgctaactcctgcagagttggctgactcaggggtcagagccactctttgggctgggctgga

SEQ ID NO: 56775 - DNA, 1492 bp, Bovine  19866881480383
  misc_feature (1)..(1): n is a, c, g, or t
nctttatggagaggactgtcgaggtctttactcatcattctcactgaggcaactcttaatttccttcctgacttaggcaattcttcttaacttgacccactcttcattttctttattcctgtttcctcacactctctatcttctggtgcataatttctttcctcttgaatctacagtcactgtgcacttttatgagacatttccacgttgtcctctgacgtattcttaaatctgtggtcatgttctgttcctaaataccctcttcctattatagcaaactctggttcattcttatgatctagttcaaatatcaactcttctgttaggtcctcctcactccatctagcaatgaacaaaatcagtcatccctgcccctcttcctatagccctctttatatgcatctatttattatagctgatatttaatgtatcctgtttcctttgttgttgttgtttggtcattaagtcatatccgactctttgtaagctcatggactgcagcatgctaggctcctccatcctccactatttcccagtgtttgttcaaattcacgtccattgagttggtgatgctatctaaccatctcatcctgtctcctttactagactgcaaatctttcaggacagatactataccttttcatctttgtacacttaaaatactcatacagagaaggcactgagaaaatgttttttgaactgattctcagtaaagaagttaccactctactggcaataaaaaccaatctcatcaaaggcattgagtcctcagatgaaagcagaagctgatggtcacaactgaattttatcatgcaaatctaattaaaaaaaagtcttatagttaacagaataaacagaaaagtcatgtaattcctttttatttaactttgagaaaacatcacttggaatcagattagtgaggaacgtccttctggtgctctggactgattctctggacacctgggttctctttcaatccaccttctgacctgctgtaggattctaaaggagccaaaaagaatctgccctttaatgtggaagtgattaatttcatctttgacccatacatgctctatcaaatttctattttttaagagctctctttcctgtatggtgtatggaaaaagcattacaagaagacaaagaggaagcaggacaagtagataggaagctacttcaaaagtctaagggaaaactgatggcaacctgaaccaaagtgaaatgagatgatatgagaaattctggagacagaaaatatttgatttggtgtcaggctgaaagtgaaaagtgaaggggcttccctgctaggtcagacggtaaagaatctacctgcaatgtaggagatgcaagtttgatccctgggttggaagatcccctggagaaggaaatggaaacctgctccagtattcttgcctggagaattctgtgcacagaggagcctggtgcgctacagtccatggggttgcaaagagtcggacacgactaagtaaca

SEQ ID NO: 56776 - DNA, 1778 bp, Bovine  19866882052154
  misc_feature (1)..(1): n is a, c, g, or t
natttactaggaatctattctaggaattatatgttagttgctttcaagaacatctcatttaactctcataactacttttgagatgggaagaagggcattcatttttgagatgaggaaacagagactcagaggaaaaactggcgtattcaaggtcatacagcaagtgagtgacagaagcaataatcacgtgctagtctgaacccagagttgtcggccctgcacagcactatctccctctgctcgttcattcttgccatcttcattcccaccattacgaaaactgacttgacgtgtatgctgcgtcacaagtttcttgtcccattttccttcttccactgagaaagcgcgtgaagttgtgagcgctagttccatttcaaatacttcccgccccagttcctgtgaactgcccaggatggggccaggctatttcctttcctctctggtcctggaacagtctgttccaggaagttgtcatttgtcctgtctaagtccctggctaccctcaaattgctcctcagaggcactcagccatcctagaactggatcaccgaagttcatctccgtacctctgccccagttccttactgtgcttcatcagcttgcttccagagccccgctcaacattcatagctcagcaagcccctcaggcaaaggacatgtagcacatcttatttgcgagtttaagtaatagtctacgcactgctctatcactgctctggggatcttgtggactctgtaggtctttgtccacgactctaaacagaagtaactggaataaaaaatgatcccatgagggtcctcgcttgtgttggtgagctgtttctaccttgctaccagcaatgttttcctgatgcttcctcccagcttcccatctctaaatacctgccaccccagtcttaaccagtggtggaagaatggtctcagaactgctcgtctcagaactgcttatttcagtttaacagtaaaagactggttaatgataacaatgcatcgtaaacccttcagcaggaaaggagaataaatgttttgcggaccatttgttttgtgtgtggcagtttttagtttttaaaaatcaatactatttaatggaaacaacttgaaaaaaaatctgtcacagaatttgagatccaattaaaaaaaagtttaatgagaaaagaggtctccttctgtgaggtatgtcccagaggcatagacaataatctctcatttggtacgacgtcttgcattttcaaagcacatgtcttgccttatatgttccttacaactctgtgaagtggccaggataggctgtgctgtccatttgactaatggggaaagaaagccagagcagctaaataatatgctcgaaatcacagagaagttcacaggagctaagcctaacactagtagtttatatctaggtacttagatgctgccaagtttttaaattcactcatttattttgtgggttttgaacattgatattgaaggtataattatagattctggctgtgtttatctgccacttcctgcacctgcccgttgaccaagttggctaatgaccctgttttcatgccttctccccacccccacctctccaattatcttaatgtcttttcctgaaggtaatttgccctgttggaaatctcagtttgtgtttcctggctccaggtcactgacctctcttggctgtgccacgtcctacagaacagaagccaaggtggcaggcaatggagcaggctttggtggcagccaaggtggcaggcaacagagccttcttgaggatgagcacattctcc

SEQ ID NO: 56777 - DNA, 1199 bp, Bovine  19866880163510
  misc_feature (1)..(1): n is a, c, g, or t
naggagagtggaaaagttggcttaaagctcaacattcagaaaactaagatcatggcatctggtcccatcacttcatggcaaatagatggggaaacagtggctgattttatttttctgggctccaaaatcactgtggatagtgattgcagccatgaaattaaaagacgcttgctccttgggaggaaaattatgaccaacctagacagcatattaaaaagcagagacattactttgccaacaaaggtccgtctagtcaaaactatgttttttttcagctgtaatatatggacttgagaggtggactataaggaaagctgagcaccaaagaattgatgcttttgaactgtggtgttggacaagactcttgagaatcccttggactgcaaggagatccaaccagtccatcctaaaggagatcagtcctgaatgttcattggaatgactgatgctgaggctgaaactccaatactttggccaccagatgggtataactgatttattggaaaaaaaaaaaaaaaaaaccctgatactgggaaagatttaaggcaggaggagaaggggacgatggaggatgagatggttggatggcatcatcgattcaatggccatgagtttggacaggttctgggagttggtgatggacagggaagcctggcatactgcagtccatggggttacaaaaatttggacatgactgagtgactgatctgaactgaatttgcataagtgcagctgctgctgctaagtcacatcagtcatgtccaactctgtgggaccccataggcggcagcccaccaggttcccccgtccctgggattctccaggcaagaacactggagtggattgccgtttctttgtccaatgtatgaaagtgaaaagtgaaagtgaagtcgctcagtcatatctgactcttagcgaccccaatgactgcagcccaccaggctcctctgtccatgggattttccaggcaagagtactggagtagggtgtcattgccttctccaataagtgcagcaagaatggtaattgataacataagcccttttgagtttgctttactggagcatttataaaaaatctcaaattaaaggctcttgatggtaggaagccaagccaagaatataataccagatttcatcttcagtacatatagatttgagtgaattcttactctcgtcttcagtacctatagatttgag

SEQ ID NO: 56778 - DNA, 2826 bp, Bovine  19866880350388
  misc_feature (1)..(1): n is a, c, g, or t
ngctggaccctgggcctgggaataggcaagcaagggcctctcgacttggcagcaagctttgacgacttccccgcagggtccccaacacaaatgccagctcctcggtcccctgccatgatgataagggggcagggacaactggtgtccggtcaggcctcctgatgaccacaactcaggaagcagtgcttttaagaggcttccaatcactgccctttctgaacgctcttgtgtcctttcccaaccagcattttttcccaaagtggttcctctccgtccgaaggcatggctacacttcctggaatgggggtggagataagccttcagagcccgagtccagagaccactctgcacagggtgcccgtgtgccctattagaggggagcccgagacagacacccctcagtgttcagtacttccagctgaaaaccccacagtgttcagtacatccagctgaaaaccccacaggagaaacgtccctggtggctgatcgttattataagaggtgagtgaaagaccagtggagcaggaatcctgattctgccctcgagtgcgggacccttaccttgtcactcgcctctgggggcctctgtcccctgcacgttctccagggttgctacgaaacctagctgctaagaacactgccctgcgtaatgaacccaagacgatttacggactgaaccaaaacagtgataaagaaggacaagaggggatatcacctcttacaggtgagaggaggggccagcggcatctctgaggggtgcccaaggcagaaaattccctccagcgaaaaagaaaaaaataaaccagcagcaaacccggtcctggcatcaggaaaggaaggaagggctgcctccggctggtacacctcacagctgtggactgcagctggcaaaggttcagtggcgggcacggggcacagcctgcagagatgctgcatggcccagtgccttcccaaggaaacacctggccagccggcctgtggtccagccccaccagaccacagccggacgctgctgcccccagtgggaaacaggctcctcagcatctggtaagtgaaactgcggctgggatctcagtccctccctggggatattaaccccaggttaggctccaaacaccccctcgctgaagtttcggggggcatcagacctggtacagtccccttccaacgggtcccctgagccctctcagtggtgacttctggactctgcccactatctatccctgggcactgggctagaaccaaaggatgccaggatgtggcccaatcagaggctgagatccaaggagaggaaactcaggattggccccgatcctctccgaacgtgtctgccccctccctccggcaaccccacacggagctcacccttcccccccaacccctgcacgctcccgcccctccacggcctcttaccaaaggctttggcgacatctcctggacacgtgcagcctccgtccttcaaaaaggggaagagcagagagaggaggtcagtgggagctgggccaggccattgcctgccccctccatctccccccaggggaatgagatggtatctgctggcctggccccctccggccacacccagcagagtccaggcccagcactccccttgtgaccaagccggaccgtgtgggtagctctgtcaagtttacgattaacctccttctctgaacttttattccttttcttgttcaaaaccttgttctcctcaagactgaggagtatcaggaaaaaagagaggaactgcaacccagcaggaccccatggggcccttcctgggagacaggccagcccccgtattgtctgctcaagctcctctctgaagtacctagataatagtatttgatgcacagttcctgagttgctttgcagatatgaaagtgaaaagtgaaagtgttagttgctcagtcgtgtccaactctttgtgaccctgtggactgtagcctgccaggctcctcttggccatggaattctccaggcaagaatactggagtgggctgccattcccttcttcaggggatcttcctgacccagggattgaccctaggtcccttgcattgcaggcagattctttaccatctgagccaccagagaagcccctatttgatgcacagttcttgagtcgctttgcaggtatgaaaacccaccaccaaacagaagatgttaactactctactaatatttgatgaccatgagcacatagctccaggcctcctggaacttaaggaccaataacatgaacccctgtgacatcaccctgttccctcaccgtcaaccaatcagataattgtgcacaagctgatcacgtgaccctgcaatctgccccccacactccaacctggcttttaaaagtgctttgccaaaacccttccaggagcttagggttttttagggcacgagccactgtctcttgcatggccctgcaattaacctttctctgctccaaactccaatgtttccatttgtttggcctcgctgcatcgggcactccaacttgtgctaatgccctccctcaccactgcacctgctattcccaggccccgtcagtcatgtttcaggccagtacaccccccgccccccaaccccgccgcccccaccacccgcccacgctcccccactgggcatcagtactccacttaggatgcaggaaccactgagcaggcaggatcggggggctggacctcatctccaccagccctcgtacaacatgcctggccactggccatccccacataactagcattcagtcatcccctctccccgctgctcgacatgaagtgaaacttatttagcacaagagcactagtattttatagcctcaaagga

SEQ ID NO: 56779 - DNA, 2538 bp, Bovine  19866880352306
  misc_feature (1)..(1): n is a, c, g, or t
ncatggactgcagcacgccaggcctccctgttcatcaccaactcccagagcctactcaaaactcatgtccaccacgtcagtgatgccatccaaccatctcatcctctgtcatccacttctcctcccgccttccatctttcccagcatcagggttttttccaatgagtcagttacacatcagatggccaaagtattgaagtttcagcttcagcatcagtccttccaatgaatattcaggactgattttctttaggattgcctggttgaatctcaaacactgcttcattgcaattctgatcaaaaggcaggggtgggggttcaatttcttgtttttatgaatatttactgactgcaattacctcctccatcaagtgcatcattcatgtctggctttcctgacccgggaggaccatggggtcacaggcaaggatttatttcagaagcaggctctccataaagggcacgtggccaaagctcttcatgtgaatacagtcacacacatggccgtgtgtcttgttgatgcttcaaatttaccgcatatttttactttctctttcaaaggtgcaacccctctatgcccttcacttgacttgccaattatttttaaattgctttatctttttatcaaaaccagttctccacaatagggtttcaaacttataacctcaaaagaataaatagggactggccctggcagtctgtggttaagatgcccaagcgtccactgcagggaacatgggttcgatccctggcagggaactaatatcccatacgccatgcagtatggccagaaacaaagaagattaaatacactcatgctcccaataagaaggtccctagcatggcctgacttaaaatatgtgtgcacacctaacacacacacacacacacacaagcgtgttcttaagtctttctctcacttgtgaatagttcgtgactgctcgtgcgggcttctgcaaatgtcacacctgtgtggtcagtgatgaggcctgactcagaaagcctgcgctctagggacccccagaaaacaagctcttctcctcccaggatgtccacagatgtcaagatgtccacagttaacaggactgcatgatgtgcttgggagaggaaaccatacatagcaccccatctactcactgtgccagggtgggatttatgaaacagacaacgcatggccagcaggcagggctacagtgtaaccagtgcaacccaacgtcacacaacaccttagggcaaaggagtgtgcccccgactacatttacaggtaatctccaaaggaggttcaaagcatcctttcatgttctcaggaggcagagacatgcatgtaactttcattcatgaacaggcacagctgcagggaggtttttttttttaaaacatgcaaatatttcaagggttccttgttttgttttccaagagtgttgaagtcttttagtagaaaaggtatcacatgacatgagtgatgattcgatctgtgaactgtcagcatgacctcttcttaaaaacagctgcccagccctaaaggaaggggcagtgaaaacaagcatgtagtggacagaggggactaatcgagcaccaactatgaacaaggggttcttacaaatttcatttttctattcaagcaccacaagtaccagaagttgatactttgtaggtggggaaaaacaaagagggaggctcagaaaggtgggatgacttgttcaaggtcacacagctgtaataatggatgaatgagattagaaccctagttaagagtcaactctaaaaatgtctagaagcatacatatcaaaacattagcagtggttatcttaagatggcatttctatagaagcaaaaacagaaatgggacctaatcaagcttctaagcttttgctcagcaaaggaaacataatcataacaaaaagacaacctatggactgggagaaactatttgcaaatgatacaactgacaagaccttaattttctaaatatacaaacagttcatacgactcaaaaacaaacaaacaaccccatcaaaaaataggccaaaggcctaaatagacatttctccaaagaagacatactgatagtcaatagcgacatgaaaagatgctcatcatccctagttattagagaaatgcaatcaaaattacaatgaggtacccctcacaccagtcagaatggacatcattaaaaagtctacaaatgacaaatgatagggtgtgaagaaaagaactctcccacactgttggtgagaatctaaattggtgcagccactatggaagaggatggggtttgggaggttcctcaaaaaactaaaaatagagttgccatggtgatccagctatcccactcctgggcatacatccagaccaaactctaatttaaagagaaacacgcacccctctgttcatagtggcactattcacaatacccaagacacggagagaacctagcctggtccgttgacatatgaatggataaagctctctccaccacacagagccaatagtacacagccttaaaagaaggaaatcatgccatctcagcaacatgg

SEQ ID NO: 56780 - DNA, 1773 bp, Bovine  19866880407578
  misc_feature (1)..(1): n is a, c, g, or t
nccccttttatcagcattatttaggtggatttaacacttaattttaaggcaaaaatgttgaggaagaggaattaatctgtaattaccatgcattcatacttgggatttttttttccttccttttagctgtgttccagatcatctccctggtaatttaccctgtgaagtacactcagacctttaaccttcacctcaaccctgctgtcacttacatctataactgggcctatggcttcgggtgggcagccactattatcctgatcggctgtgccttcttcttctgttgcctccccaactatgaagatgacctgctgggcaatgccaagcccaggtacttctacacatctgcctaaggtggggaatgagcagaagaacatcactgctgctgagatagattccagagaaagaaactgttttcccccggaatactttgaacctgttttggggacaatgttcatatcattaaactatggtcaaaatgctaaaataatcttgggaaagtgtttcttaaatggtgttatagtttcatattcatcttttttatatatgttttgtagtgttaagtaagacttacttcttttaattaattacctgattattaagttggctagaaggttcattcaggcttgcccataagactcatgggaaaacctgaactcactttttggccaactcaatactaatatgccaatgtttccttatatctagcaataccattgatactgcatttgtaaaagaatatgagtatgaaagtaaccacataatttataaggtaaaaatgagaaggcttcaaagatttgagtaaatctggttaggtttctgtttttcccagatggaatggattgggtctattaaggactgaggagaagaagaagatactggtaaaaatcgtcagtgactaaatattctaaaagaaacgcaaaaaaaatttttttcaagcctttggctattcagagaagcaaaattggctcctaaatgcatgtcatttgtgagaatttctaatgaatatcatgaataattgatttggggctaagctttccattaacttaatatgacgtctaggaaagtattctttcatggccaaaacctgttgcagtagtatggcctccttaagcagtgaaatcttaagatgaaattttctcttttaaagtggttcgtagggtgggggtgtggtagaaagctactagtaattctgtgctctttggtgtctatatgctctagaccagagtagactggatgaaaaaatggactggtctaattcattatgacctttaagtagtaggttgttcagtaaagcattaggagggccattcccatcacaaaagtaacattaaacagcctaaagagaagacatggcttgaatttttcatctttggcttgatcgggctctaatcatgtagacacagcttctgatagattgcaactgtaagcaaaaacttaaatatggttaaaaacctggtttcccttggtaaacagattaaaaatatctgatgtaaaacgtttaacaggataattcaggaatgtaggatttctctgacttgcaaatatgatatatcacatggaatattattatttttttactattagtacttacataatgaaaaccaattcattttatatatcaaattattttgtaagttgtaaaaatagcagttgcagttttattatgaacttttctcaataaaccaggtgatcttatcttgtttctagtttgcagtttttttggttttgcttctcccctcattcccccaaatctgggggaagggaatttgt

SEQ ID NO: 56781 - DNA, 1749 bp, Bovine  19866880459092
  misc_feature (1)..(1): n is a, c, g, or t
ncgggctgctgcggggttctgggggcgcctgccagtacagggcaagggcgcccagaggaaggccgtcagacttccttgcagtcacgtggcactaagcttgtggcattctgggcacctgtcttgtgagtacgcactgatcttgaaaaagatcccacatggctactgaaaccccaggaggggtacttgcagtgaaactaggagggagacggtggaggaacgaggggagggaagcttcttcatggatcagtggtttacagtctttaaagagagtacagtgaggtttaatgtgacaggtaatagaccctatcagtctcttaatttagattgacagttctttgaataaatttgaactgggactagctgaaatccttcatttgatcaagtaggcagttaaatgaattattatgctccccccatcccctttttgttacggaagttatcaaacatgtacagaatagagtatggtgaaagtccacgtccccatcgccctgcttcaggaccaacacacagcccgtcctttgaaaacaaatgcccttatgtggtataatttcttccattagtatctcaatgtatacctctaaaaagtaagacttaaccccaacaccattatcatacctaaagtaattataacttcttagtaccattaagatagaaagatgttgtaatgttagttttttaggttaataagtgaaataaaagtttcacttattaacagaatagtttaagtcatatatctctgtaatacctagtttactaatttctagtttactaaaagtatgcttttgaattattctctatttgcatattgtctcatattgagttcacagactgtcttagttcacattaaaaatattattttatccagaaactttaaccctctttaagtggaaatttacaaaagtctgtgaacatagtcggcttatataaggtactccaacaaagaacagagtaatcactttatatagagtgtttactccacaaacagaatcagcatgtctcagggatctgttggaaggggaaagaatttgtaaacttttttatctgccagtgagcaccctggtttggagggtggagtttttggtgcttgcccagagaggaagcagtgggcaggtgcaaaaatagggcattgttatggtagtgagttcattgtccttacacagctgatgaagtaacacatttgcaggttcctctgcttcatcctccctttgttctcttgggcaatgagattaggctaataagcagatttctgctgtttttataataatttttcaaaagttggccataaatgtcacacaaaaattccagtagtgtcccccatttggtatttcaagttgctgcatgtgctaccctgtgaaacatagctaaacacctgcgtgtccttgtttagcagcaaaggaataacaactctttccaccttaaaaattttgttattaattctattgctacaaatatgtagaattgactttttaatgaagagaaaagaatattttggttattaatactctattcagtacatcaaataaaaatgtaagatagccaaagaaagcattctgaacatcacaatgcatttttgaatggagctggtttttgcagaaaagtgatttaaatccttgtttcagtaagcctttatttgaaaataggaaattcattttcatgggagtgcctctcggcaggctgtgagttgtgtttttcttttggcttctgcgtcaacttcaaattttagtttattcccatgagattattgttagt

SEQ ID NO: 56782 - DNA, 1980 bp, Bovine  19866880466845
  misc_feature (1)..(1): n is a, c, g, or t
ntttgcgtgacttctggcagttcactggcttgtgggagcatcccagcctctctgcccgtctgctctcaacttgctatttcagactgtgattattagattcccagcttgccctcactcaagactgcatccagatctcttttaccaaactcttctcccaaccaacctcaattctcaaacccttatcctatatgaggttatcaagaaaagagctcagagtagacttactacaccaaaatggaagcacctttcactctagattttaatcctgagcaaaacattatgaatcaaagaacaacacatctttaaaggaacatagacgagatggtgattcagtcccatgatttttcctaccctctccgcaaatcttggcttttttaaagaaataacctctagaaaagaatttaccaccttcctaagattcaataatcattcttctactccctggtaggaaattcatcaaattcatttatattttaaaattagcttttaaagtagaaaacacatctttttgccacatccttggagactagttgttaagactacgaaattttaaaaattgaatcaactataaagtcatgggtcagtttatatcagaaaatgaaatcataggccagttttaagattcaacctgtatagaatggggaaaatactattaactcccctctggggttggtctggagtcttaaatgggttcccccatgagaagtgattggaacagtctgatgtataggaaacactaaataaagtgctttgttctgtgtggttattggttgggaggtgttattaggaccagggctttgagttttctgctcacccagtatgaccatacactttcaaccaggttgctaaaaagtcactagctagtaaagtgatgaatcatttccaattacaatccaaatcagcattttcctttgtacccaggactttgttccctagcaccactcttaaagctgccagcttttgtttctttgcaagaaagatttaaagtgcttttctgtttcaccattcctcatccatcccatgacagcccaaacaaagtacatcacatgtacatgacatggaaattttattttccaggaacaattttggttacattttgacatagcacttagacttatgagagtaagacaaagtctctcttatttatttaacaagtccttaaaaatacttccaaaccttatttatgaggcctgatcaaatggcctccttattaagatttaatctatttcatttaactccaatttataaagaactcttcaggcatttttattaaacattttcatggtaatatttagagtctattactattatttagcaacaaaggaagacatttatccttagaaaatgaagtacaccacccatccactgttagttcccttgcatttatctcatggatttttttttttaattgtattcccttatttggcttcattgggtcttccttacagtatgtgggatctagttccctagtcagggatcgaacctaggccccctgcatggggagcaaggagtcttagcccctgcaccaccagggaaggcccctcatggattttttaaaacaattagaacttgggaaggaactgggtggatatgagtcagcgtactgaagtagaaggaacacaacatttgtagttagaggaccgggttttcgatcccagttctgttcctcatcagttgtgtggccctgggcatatacatcctttgacctttctgagtttttccttatcgattaaatggaaatgacaattcctgcttctcacttcctcccataggtattttaagtcacggaggtgacctgctatgtagaactgtgacaattcaaacttgccccaccaaccttgccctcaagtctcctgacttctccaactgggtctccactggccccccacacgctcaaggggttccctagcacccttacctacatgtcgccctcttgattcagaagggaaatatgcagaataaattaccatttattcttat

SEQ ID NO: 56783 - DNA, 1563 bp, Bovine  19866880562277
  misc_feature (1)..(1): n is a, c, g, or t
nctcagcatccacaaggggaggtcatttgatgcctggaagtggttcatggctggggatgactttctttggcctgcttcagcctgcttgcggggcactgcctgatcccgtgccatttccctaacggccccatgaaatagagttcattattatctccattttcttaaagaggaaaccaaagcttagaaagttgaatatcttccttaaagtcaccggtcaccaaatgccagaagtctctcccgggtctctgcaacatcaacagtcaatcatcagttgactgcccagcagtcagagctgtagtctaaagtctggatgggatgtctctaaatacagagaaataagcaaagcctgtcctctcttccgtctttgaccggctttttatcagagccttcccttcatggcatatccaagaagtcctgcctagaggggggtaattcccttcttcccagaccctaaattgaataaaagaatctaaaacccgtccctgacatccctgctgaaagctgtcgacttgaccgtgtgcctcgttcggagggcggcggcattcttccagggcgagtgtaaactgttctcattgaatgaatacctgattaagttaatggtgctgagccagggcgaggaggagcgatttggcagccgaattcctggcagctcattcaacgtccttaatgttccaccggcttcgtgctgggccgcctgtgagcccccgggaggggccgccggtaattactcagcgttttgattgaaaacagctgcaggtagcgcgtcatcccattgtccgtttcgctggtgattggaaatgactgggggcatcttggtctccactgcgcagcctcactccggggagcgggggttggggatgcggggaacaaggtagagagtagggttcccacttgctccgcttttcaaaatgaaccattcatcttttgagggtcagaactcagccacccattcagtgactgtgagtcagagccctaattttaaaacaaacgtttatttcagggagaattcttatcttggctgatccttactagctcctctccctgttctttctatgcttgatttaagctggtttcaataagatcactgtccttgtaagcacgtattccttccagtaaatccaaagaggatcctcggcattcccctgggataaatgggggacaatctggacatagttttggatcatgggatgtggatttttaggggttaaagaggctgcagcctagctctgggaagtatgcggggttcataatctcacatgagaatctgagcttagaaatggaatctctcaggccagatgctttttagttacccagtattttatgtccctctgtcatgagattcactttcgatccaacactgcatgatcatgtccagaaatttagaagatccagaaacactttgccttttagaagccagcttctaagggagaccgaacagcaatagacagacacaggatgagaacagtcagccaatgaagaaaggacagcagcccgagcgtcccacagggttatgaaattcaatctgcctccagcacagggagctgaccgtctagtgagaaagat

SEQ ID NO: 56784 - DNA, 1434 bp, Bovine  19866880663306
  misc_feature (1)..(1): n is a, c, g, or t
ntccccttttctttccccctccggcccactacccgcttcctcctccacacaaacatacatctcctttgtgtgccctgaatctttagagtcaatgctggctttcagggcataggaaagcccatgaagacctcaatttttccatagcagcaaagataaacctgtaccagctttatcacatataacaaaatttaatcttcctgagtcctacttcctcaaatgacagataggctcatccaaaggtgttaattgcttattaagtcttaacaaccatttatatgttagcaatcacctatgatatcttgaatcctaggagcaagacttgagctgacaaaaacaataggtactgagagacgtgaacgtcctgttaagaggctgaaatttttaaaactgtctgcttgggctttttaacatgagatttccaatcatgtcacagtttccaatttgaaatactcgccatttatctgagccttctagagatttctctgatctgtatataatttaagaggagaattttattttccgctgtaaagattgattttgttagtcaaagacatcagcagcaagtttaaatttgcattttaaatttagaatgatttatttccaatgaaaagtgtatcactgctgcagttattctaggagtgactaggggacaaataatttatattgaaagactattagaaatgtgagcttccctctaaaggaaaagattggcacccttgacttcatattttaaaacctctatatgacaagagactgcctaaacgcaattatgtgacaaacagcagacctggagaaaatacttgcaacatacataatcaaagggtcagtattaagactgcatgagaagctcctggcactgaatagcaaatggcaaacaacctaatttgtatggggaaaaaaaacaaccctcagagaaaagtacaaatgacaaataagcacagaggaagcttaacctcacaagtcagagatgtgcggatgttctctttgtcagattggcaaggttaataagattaatatttagtgttattgctggcaaagggtactgccagttgtcagtaaaaattgggagagtcaactggcctcagttctctgtagagttatttggcaacatttatcaaaaatttaagtgtctttttgacatagcaattctcccaaggatctatctggcacaaaaatgtacaaaagtggagcctgttatgttaaaaaatcttaattgtagctttctaatgatgaagttttagaaacaatctcaatgttcaccagcagaagaatggataaatgcatcaaattacagccacaccacagggcttcccaaatggttcagtggtaaagaatctgcctaccaagctggagacacgagttccatccctgggttgggaagatcccctggggaaggaaatggtactctctccagtattctgccgggaaatccca

SEQ ID NO: 56785 - DNA, 1664 bp, Bovine  19866880736389
  misc_feature (1)..(1): n is a, c, g, or t
ncaccagcatggacacagaggggatgctggcttgagagggatgataaagggaagttggagcagttacatggaggtatctgacccacaggtaattggagctgaaagcaatgttcagcaaagagaacatatttggattttttcttatagacattgcactttcttccatgaagggcttccctttggctcagacagtagagaatcctcctgcaacacaggagacccaagttcgatgcctgggttgggaagatcccctggagaacggaatggccacccactccagtattccggcctgaagaatcccatggacagaggagcctggtgggctacggtccatggggtcacagagtcagacacaaagttgaagtatttacatgaaggttcccaagaggcagatggagctgaaagcaacattcaggaaagagaacgtacttgcatttcttgtgatagacgttgcactttctcccgtctgtcatcttatttcatctcatagcaatcttttggaaatgttatcatcatcattcccatattatagatgagggaaatggaggttcagagaggtgaactgtctttcagttcagagatttcagttcaggttcagagaggtcatggagctagtgaagaaaatgagctttgttgtcaacagggcgctgactgacttttttgcatttctgcttgtccagtaaacattgtattgcctctttagattatactcattcgatgcctgcagcttccagcagcctcgcttgttgtctttcatttgctacgagggtcttaaataaaatagctggccaatttttgtgcatttataatgtgcagattttcagtggggcctgggtattctaaagaggttaaataggaaagggattgatttcatttgtaatgagtaattgtgagtaaaataagtaccgtgctccacattcaaagaagccagaaagcttctattgataactgtggggagaaagcagataatacaaacaactccacattttaaacatgagcgtatttgaattttatttttgaatgcagatgtgattgatcatttgttctgcaggcaaggctttagtccagttaggggggaaaataccagtgcacttgtatcgattattttctagaagaagttttagagacttactaatagtaaactttctaagcagctgagacttgaaattcctcattagcggaggtgaggcaaggagtcagactgttgcacacatcatctttgctgcagttgactggcacctgtgttgcctgaagtaatccaggaaagaagtcaagggaagaaagtatgcgtttttaatacagaagaaaataccacctctgtgaaggaagtgggggaggagggtccttctcaagagagaatcatcacttcagcctccagtatttattggtcacgcagtgggtcaggccctggtctgagttctttgaatgtgtgaactcccaacaagtctataagggccgatttgttgtttattcccaaggtgggtgtccaactctttgcaaccccatgggctgcagcccaccaggctcctctgtccaggggatttcccaggcaaaaacactggagtgggagtgggtagccattcccttctccaggggatcttcccgacccagggatggaacgcaggtaggttctttaccactgtgtcacctgggaagcccatgtg

SEQ ID NO: 56786 - DNA, 1659 bp, Bovine  19866880829588
  misc_feature (1)..(1): n is a, c, g, or t
naattttaagaaaatgccacctaaagtgtatatagcattcagctttaataaatagataaagtgatttataattagctttatatcttttcattaggaacataagttgtgctgggcccagttttgctacaattagcattgtgtttatatgccagatactacagaacaggaacacttatttcccttaatgttaacatgataaagctggtgattaatgtttttgatgttcaatcatttgttataaaatattgatataaaatgccatggaagtaaaatagatctatttacatagtgagtaagctcagctctgccagtccagttatgagaggtgatattttagcatctcccagtcaagtcatgagggtacacttagtatactgaaagtgtctggacagttcattaaatggtgctgaaatatcctggccaagctgtcctccgtggacaattaaagcagcctgcttacagtagagctggcctaactgggggcacttcatacattagtttgcatcaaattagggaggctgctagagaatgacaggcgggaaggcctgtctaatagcagagtcctaggggccacacggaagccctgcgttctaggttcagctcagccaccaaccaccagtgtaaacagccttctaagacttgagccctgctgaaaaccctgaaaagactttctttaagatcccttctagccgatttttttttttcttggcttctgtttctcttcatatcacttttctaatgctttttttctagataacatttctctgaagatagaaaaaacatttccagtgtctgcttagatagggagatagagttagtctggtttctgatgtggcctaattttagatttgattctttacccagactattttgtttgctcttgaatgaggaattctggaaagtaaccggagaggtttgtttagactcagctggaacatttcagagaggaagacagcaggtattttcagcagatgtttgccatgctgtggattaaaacaaaacgtgagactaatatattctgaaagtgggtctgaaatcccagtgatctttgaaattcttacgtttcagaggctcttggttattcacagcaattcagaccagattttgtcaacattttcaaaaccagaggttagagaattatatgctacatcttcagggatcgtaggtatttataccatctactgccaataaaagctttctgtttctcctgattttgccacattttagcagagctctgtgttctttgctagagggcacccttattagttaggattcaccaacacctgaatccttgatcccagagaacaatcctaatacaagcactctgtgagtactgaagtacacgttcctggaaatgctgtaatcctgaatgtcgcatcccattagggtcttaaagttgtgagcagtgatgagtgtgattgcaggccccagctcattcatcactccttggaaaagccttctctaggcccgcttcggagaaggcaatggcaccccactccagtactcttgcctggaaaatcccatggacggaggagcctggtaggacacagtccatgggggtcgcacagagtcggacacaactgggcgacttcactttcacttttcactttcatgcattggagaaggaaatggcaacccacttccagtgttcttgcctgg

SEQ ID NO: 56787 - DNA, 531 bp, Bovine  19866880831487
  misc_feature (1)..(1): n is a, c, g, or t
ncaaggctcaaggcccaacttcagctttccaagacagccagtggtgctcagagatctaggatagggaaatggagttctctaggctgaagtatgaagcatgctgtgacctctccctgcagaggaatgagctattcctttaacctcaaccagccagcctgatttgggactttggcagcacttactggatcctggcatcatcaagaagcccaaaggaataattgcttatttagtgcagatggcagaaagaaagctcaaagctcagataggagacccactctgatactctgctcattgtctccagtagaatttccacagcacttaagacaacgtgctttccctttgcttggtagaagcaatgtcagagtctgcgggcttgagatacttgtacaatatgagaaaagggaagggtgtccctgaactaatagtcttagaatatcaggaaactcaagaacagaacccagtcaagcctcaaaggcctggggcatttagttagggtatggcaatctctcggctcttcatgtaaccgtagcc

SEQ ID NO: 56788 - DNA, 1460 bp, Bovine  19866880833457
  misc_feature (1)..(1): n is a, c, g, or t
ncgggttccttttcctactccgggggtcttccgacccgggatcgaacccgtgtctcttgcattggcaggaaggttctttaccccctagtatcagttaggccttcatgatatctctggattcctaatatcagttgtcaggtaacattccatccacctgcttcctttttggcagagctcaaaatttggtttagaatctatttctacctcaagtgacgtggggaaggttgatcccggccctagcccagctccaggggcaaatcctgacgcatttaagctgacctcagtgctcctatttctcttgcccatggatcatttaggactgagctgtggcccattgtgaccaataagttgagagagaagatgttctggggggctcctgggaaaggtttcctcactctgaaaagagacatttaggaatacgcagtctcttcttccttttgatggtggttgtgtctgcccaaagaggcggcagccatcttaatccatggggagagtgagcccaagcatgacgatgatacacccagggtggcagaatcgaatcagcatctttgatgaccttttttcaaaccgatgaatttagtcatcttggacattttcttttgtggaacactaaatttcctggtagtttaagccacttccagttggttttgtttctttcttgcaagcaaaagcattttgatggagacacacactattgtctagaaatgcctgtgaagatcgtattagtaactcgggcgcctggcaaggttaagtaggaggcacagctgtttcctcctctttccattctaggtcattcctccagcctctggaagtagtcagaggcttatttgtacagcttctatccatgccagagattgttgctcagggttttgctgatgaatcctggaaacaagaaccagcttgtatgagctctgtcttttcagacgggtgaaccatccaaccttctggacttcaccgtccaaccatctggactcttagatgctaaagctccaggatctcctcagtcagtgatccctgaccgaggatcagtcccaacatggtaacaaggttgtggccccctccccagtcagaggccaccagcagccagaatactcaggaaaaggagatatgccttaaaaccccatgggaatgtgagctccatggaaaagtgagctccatggatgggagcagttgggagagacctttgcagtaaaaatgagtggaattcaaagtcaggaagtttgtaaatcatggaatcccacactacatgggatacaattcagggccctcatccttgaacacagttggttgtgatgattcaaccatattaggataaacggccaatatcttcctaattttggatcctgcaggactaacagtgtgaggagagtaatactattatttggttgtattatgtaaaagtaatacaaattatagtagttcatataatcagcgtattatttgtgcctaattaccatgcc

SEQ ID NO: 56789 - DNA, 1484 bp, Bovine  19866880843745
  misc_feature (1)..(1): n is a, c, g, or t
nagcagcttgaactaagacaggtatattctagaatgttctaaaagcattgactggaaaggcagatactattatcaaagtgtggttaaacagatatcaacaccttcagtgattcacagagttactatggtttcctaaagaaagggggaaaaaagttccaaattggcagactggcataaatgatgcataatgagatatccttttgattgcctagcttagcaaatgggtacctttgatgtgaatgtgtgtaaacgtgcttttgacacctgtgtgcaaatgcataaagcaaatattgtgatgccaggctcagcagaaattgccatagacacaaaaaattcccaaacaaacatttagcgtaacaactctaccgaactaatcacgctgttcccattgactcatctgaaacaggaggagatctcttttgtctgcacaaaactagtcatgcttcccttctgcatggttacatctctggcagaagttcctctgggcctaacccacttttttaagcatggccaatgttgtgtactggttaatgggaaaggagtatcatgtacctcttaaaaaccatgaaaaggttgggaaaaggagaaacagtcgcaagtcattcgattggcagctgggagaaaagtaagccacaggctcagcagttgagtctgtcactgacctctgggctcattcagaagatcctggaaagaaacatgctaattgaccagacgttcagactccccgaagctacccaacccaaagtcaagccatgttctgggagttccagtgatagctgctaaatagattctagctgggcaagatcatgccttaaggagaaataatatgagttggcaaacttttagatgaaggaccagatagtagacattttattatggatgagtgaaaggtggacatgttcaccagttacagagtatgatttatagaggcagactagcatggtgattatgaacacggactctaaagcctgaatttagatgccagctccagcacttccttgctggatgaccttgattaagcaaattactaaaccactgtgtgcctcagtttatctgtcgataaaatgaggataataatagaactcggggcttcccaggtggtacaaaggaaaagaatcagcctgcagtgcaggagatgcaaaagacacggatttgagccctgggttggaaagagcccctggagaaggaaatggcaacccactccagttattctggcctggagaattccatggacagaggagcctggcaggctacagtccatggggtcacaaaagagtcggacacaatctagtgactaaacacaatactagaagtcagtgttgtagcttgggtggtcctatagcagaccctggggaaagaactagggtgcacgtgataatttcagatgagatcccaggaggcacaagtgaagaaggaaggcaagtgaaatggagagaaggtcatgaagagccatcaaagaggaggttgttcctgagggcaatggg

SEQ ID NO: 56790 - DNA, 2255 bp, Bovine  19866880881642
  misc_feature (1)..(1): n is a, c, g, or t
ncagtacataatacaatggaatactattcagcaataaacagcaacaagtcactaatgtatacaacaagacgatgggtctcaaaaaatttatgatgaacaaaaggagccagacacaaaagaatacctgtgtgattccaccgacaagaggtagaacaggttgtaactaatttatgttggaaaaacatacaacctggttgtggagtggggtgggtggaggtagggaaaggagagtagagaatgactgcagaaggtcatgagggaactttctggagtgatggtaatagtctaaatcttaataagggttttaaacaggtacatctatttgccaaaactaagtgaaatattacaatttatgcatttcatcatatgtaaattttatatcaaaagaaaaaaagaactgtaggcaaagactgagttctagttaatgatatgcatagtgaagtatttagggggatatgtacttacaacttactttgaaaggcataaaaaaagatacactgatagatgggtagaggggccaataagtggataaatatgcaatcaaacaagaatgttaaactgttaatagcagaatctaggtatttttggtgttcaatctaaaaatcttcaacttatctgtacatttgaaaatctttatagtaagggattgagaacataatactagtaaaaaccccttagggtcaaggttcagaattcaaatgaggagccataactaaaatgaaccatcaaatctaacacatttcatgcaaagtttgcaactgagaaacctgtcacagccagtaattaccaagtcaggtctctattcaggcttaaggaaatctttctcaaagcccaaaatgtaaaatgggaatccctgataaatttgtttcctcctcaggctccaaagcagttaaatggtaaggagggtacaggtgtgagaaattcgtaacttcaaattgattacaactcactccagaaaaatacctggaagcataaaatctcacttctaaaaggtatgattactcactcactggagatagctgtccctgggcaaataacaatccaggcaatcgcagagtttaagagtgtcaactacaatctctttctcagcaatctagattagaggcctggaatcagggacacaactcagaataaatatacctggaacctaatcccacactggtcaccctggtctcactctcaatgccctctaaatagtcagagtttatttataatgacattcaaaatgaaaagttcatttgggctacaaatcaatttctcaatgttctctgatattttatatgtatatataagtatcataagttcaaaaaagactgaaggtgcccgggttggcatcctgtggctaaaataaacataaaaccacacaaacatcccatattctgagcagaaagacttaataaattagaattcagaaatgtaattaatactttctttgaaataatatacatgtctgtttttaaccttttttactttcctggggcctatgttatatttgggcatatcaaaaaaaaaaaaagaatgtgttgttccactcttagacatgtagttgatataaaaaacataatattcctgcaatgcatcctatggaatttacccatcctgaatcacacaaaggtaagttctgtaatcaacatttaccctcgtgacaatgttttataagattctcaacatgattacaggcatgggctagggtcaacctgattcagctgtggactgatttgagattatcacctcatctctgcctatagtttacatgtggtatttgctttgtgggtttcagtgatgccatcgttcctgaactttcacatgtctaaatgatttttgttgggagaaggggaaaaactgaatttaataagtaccaaggacctacaaattggctgaaattagataaagccggcctgcagcttgaaaactatctgaacgtcataaaaggcccaggtgggcggtagttcatccttgataagaacaaatagccacaatgaacaaacggctctgaatggagtagagggggcgaaggaaggcagccagcaaacagaagaatgccaagcaccgagcaaactattaaccaagaagaaccgctagaaaacgtttttttaatggtgagatttcttttagattatctcaaacgtttcaggttatagaagcaaactggcaaaacatgtcaacatctacaagaaaatctgtattatcagtatcagttaaccccatttttactgacttccaagttcttaattcattgattcagcaaatattta

SEQ ID NO: 56791 - DNA, 2043 bp, Bovine  19866880949353
  misc_feature (1)..(1): n is a, c, g, or t
ncctgccctcaaccccacccccagcaaattccagggtgagatccagacccctgatctggtgggggcgcctgttcctgcccttggacaagatttctcaggacctgggagggagacagtaagggtgagaggggcctggaggcacggcgagacgggcgcctggatccagtgacagctcgttagcccctctgctgctgtagccaccgcacctgcaagtcggtgagctctcctcaccaggaacatgtcacatacagttatggctgcccttggtggcacgggtgattccctggcaggcagtgttagtgactaaaagatgctccttgttgtgtgagggttggaattcctccttctgctgacttgttctttccctgtggtctttctcattcttgacaatgtcaggaaccgttgtctccaaatgtggggctgttcacatgtggcgcgtacagaggactgtgtgtgtacgcgagtattaccagtcttaaccacgcaccagcaagcatcactcagttgtcagttggggacgaggcgagcatcctcgtttagtttccacggtcctgagatcgccacctcacgctttgacatgttgccttgagattaagcaggtgggctttgcatattgcccacggaagttcctgcaacacaaacctcagttttcctcatgagaacactggagcgtggaattggccctcccgagctgggttcccagttttcaggatgtaaagtgcaggacacactgtccatttggtgttcttgttccttttccaaggccgttgtccggactggtccttgtgcagaacttccctccagatctttgcttatgaaaaagaacacttctgaaggggtctgagtggacagggacccatctgtggagcaggaatctcagggtggaatgaatctctctcagtatctagcactttcagactcatgaggctgtgttgagtaacccccgtctctgttggtccagactcatcctcagcccccagtccctgcccctgagttcagggtttccctttgtcattgaacaagagagggtcatgcagttggaggtgagaattgagggagtagcaggtaccccctgcctcggggtggccccagcccctgttccacagcaggctctgacctggaagcaggtgagagacctcggcaggcagactcccgtcatctgcgtgactgcaggagcctggctggtttgcggtccaggtcctgtaggaggagcgtctcctgccctccctcccctgtcaaatcccccaagtgggatgacccgggactcccagttctagctgggctcttagcgtgaccttcgccaagacttaggctgtgataatcaacctgcctgggccctattgttcatttcgagccagtgatgccagctcctctcccagggacattgtgggacatgaaagggcaattttgataccatcaaatcccattagttaagtactctggggggaggaaaaaagggtcactagaagccaattgtagattcctttgtaacagcctgacgcgagtgattagaatctgacctttcatcttttcaactgcataaaagacggaggcccggagaatactcggatctgtaatctcagatatggttaatttttttctgtcagccggaaagaaaagatcaggggttgtgtgaagtgcaggtgatgggggtggggacccctgcgtcggggtgcctctgcctgccggccccagtgccccaagagctcgctctgctgtcgaggacggccccggggctcgcgtgtgctgggtgggtgcctgccctcctgagagccctggcccccggggctagggcatgaggactcggtgtgcggggcctcgccagccttccaggtcttattctcccaaaggtgccaggtgtgccaggtgtcacaggcgtgtgtaacagccctgaactgctcccggctgatgatttggacgtatggtaggtgttcaacaaagcagcgtttccttagagtagtgcttacatggtttgcagcaagacagtaatgaatttaggatgaagaaacaacggttcttccacctggagagggtttggaaatg

SEQ ID NO: 56792 - DNA, 2609 bp, Bovine  19866880972013
  misc_feature (1)..(1): n is a, c, g, or t
ncgaagtggggtgggaggttgtcagctctaccctgaatccacttctcagtgacacacagagttgtctggatcccttctatcagggaagaaaaacaaaacaaaaacttggctttctgagccgcacagaccaccacagagccccgttctctgcctctagactgttgtacagaggtgtctccaacacacggggcagacagtttaaagcacaaagcaaaacagatttctttctgtcattaagagagctctctggaaagagatacctttcctgtgataaactcacagaggtgaacacatgccctcaggagcaatggctcagtggctggctggcggtcggccagaataagcacacatctgctcacactcagcggggcaccctgggtgggtgatatttaaagtaaaacacagcatctctagtgaagtttccacagcagtcacttgataaattggtgatttgataaactggtggttttgttgaggtagagagaaagacaagggcgagagaagggtgaaattgagaaaaagaacattttaattgatgtaaaaagtggaagctgtgagcttgctggtcagagcagtcgtgatttaagtctggaaaaccatattaagctggactccaatttctagggcatggtagacctgaccttataatcccataaatttgaaagtggttatagacattcacttctcagatagcttaaaagcatagcctcttcttttaaggggcatgtgatgttttaaaggaagttacatgggtctaaaactgacaagggattttaggacacattcattttttattgacagtccagctaaaaatgtagttgtgacaggatgttaaaaaccatcagctgaccatgtgtcccttcccttataagtggattttcccattcgggatgggggacatggttgggtaaaaccacgaagatgccacacccaaggttccattgctgaagggttgatggtttccagtttgttctacaagtagcagtaaaccagctgactcttcagagttcagaagagtcatcttacagtcagtctgcaggatatttgaggggaaaagcctgattctaatgttcagttactctaagggacatacttctcctctgtgagagggatcccattggcaggaatcagtcacatggtctcacacagatgctgtaggatggaaatcagtctaattgtgtgccccagaggggaaaactcagatattggtagtctgccatggtaggcaaggttggacaaaaataaaaagaaggcaagggctttgatagaaacacaacccaagccctaggtttcatctgtcctttccttccaagagatggacatcaatgtcttaggtccttattaattgtagagagaacctcgcccccatgagatgtatggcatagacacagggaagagaggaaatatccctttcttcttcagaatagtctttgccctgtgactaattagacatactgtgtgtgtgtgtgtgttaatcacttagtcatgtctgactccttgtgaccccatctactatagcccaccagggctcctcagtctgtggaattctccaggcaagaataccggagtgggtagccatgcccttctccaggagatcttccctacctaaggattgaactcaggtctcctgcattgaaggcagactctttaccatctgagccaccagggaacataagacacaaggggaaatgaaaccagggaacaaaagacataaggggaaatgaaacaatcagtggagaaagttatttgaaccatgtaaatatctctatgtatatctatttgggagaaggcaatggcatcccactccagtactcttgcctggaaaatcccatggacggaggagcctggtaggctgcagtccatgggtttacaaagagttggacatgactgagtgactttcatttttcactttcctgcattggagaaggaaatggcaacccactccagtgttcttgcctggagaatcccagggacgggggagtttggtgggctgctgtctatggggtctcgcagagtcggacacgactgactcgacttagcagcagcagcagcagcagtgccacctgggaagcccatcctatgtatattttaccacagaaagtttcagatgttatggaaaacagcatcctcaaaaaactagatacagaacaaccatatgattcagcaatcccacttctgggatatatccaaaggaaatgatggaatcaggatcttgatgagatgtctgcacctccaagttctttgcagcagtattcacagtaaccaagctatggaaacagctcaagtgtctgttgatgaacaaatgtatgaagaaaaaatatgttacatacatacagtggaatgttcagttcagttcagtcactcagtcatgtctgactctttgcgaccccaagagtcgcagcacgccaggcctccctgtccatcaccaactcccagagttcactcaaactcacgtccattgagttggtgatgccatccaaccatttcatcctctgttctccccttctccttccttcaatctttcccagcaacaggatcttttccaataagtctgttcttcacatcaggtggccaaagtattggagcttcagcttcagcatcagtccttc

SEQ ID NO: 56793 - DNA, 733 bp, Bovine  19866880976390
  misc_feature (1)..(1): n is a, c, g, or t
naccttttgatgggttccccctatttctggtagagcatccgctcattctgggaggcagtctggaagccacttgtttatcaggttaatgacatcacacccaggttagatctgtttatcccctccacctccctatgaactttgtagcactttccctactgcggataacaacctaggtgcacatcaacatgcgctttcagtgttatttttaaaaacacacataacgctcacatgcatcacgatgacataaatcatgtgataacactgtggtgactttcaaacgatgtagcgatcactcaataaacaaattcctaagcagctgctcagcacctagaaaggcaccagaacctgttaggatgggagcaggaaaaaaagaagacagtgtccctgctaaaaaagaatttatgacccagctggaaaaaaataatgctcacccataacaaaattagaggacaaaatcatattcggttaagtgcaaaattgcagagtacagtcaattagcaagctagaaggtttattagaagaaacagtagcttaacaacttttcttactataaagccatagtgcaagttggcttaaacatcaaatctggtttcccacaactgattagcctgaaaatggtttagcaaaacactaatcctttaatttaacaatctataaatgcagtctctaataagttccatagagcccttccttggattcatagagacgaggcaactctaacaggttatccaag

SEQ ID NO: 56794 - DNA, 958 bp, Bovine  19866881015202
  misc_feature (1)..(1): n is a, c, g, or t
nccctgcaaagatgcagagggcagaagcggggcgagggcattgagaaacatctgtaagtttccttttccagcataatggattatttgtatacacttactcctgatgtgctgcgattcacggggtcacaaagagtcagacacgactgagcgactgaactgactcttggcagaacttacataatatctaaacccaggaaagtcatggttataccttagtagagatttgggcttgaacagatagcctgagggtcattcagaagacactgcctgaccctagaggtgtcatacacgcccccctataagcatcttagaaatgctgactcccctaactagaactaggtagtaccctcaactctctcccacatgctccctcctggcccgtatcagcggcagcatccggttttgaacacaaaggacatttgttccatgcaatcatcgtataaagctggtctctttctattatgaataatcatgaaattgagggtgaaggagaaaggcaactccacatttgaagctacaaaaaaggctgtgattcgtttttagtctctttattaagcagcctagtctcagttagataatttgcagcaaggttctaccctggagcaagtttcctcagtcatgttaaattcatggaggaaatcctcccaggatttagaactgaaatatagacagctttagtaacaggaacgttgatgtaaagagcgggttaaggcagtatgttctaaccatttagggaaaaaatgggtaagatgttactaataagctctgctatatttttatcctaccattttcttcatctgaaggaatattgagatgagcttttaaattctgaatgattatctgacagattccatctttagggcaaattattagcaagggttttacttctctattacttttactcaaaactcagaggacacacgcttaccggagcccagatgaggaaataaaatctgca

SEQ ID NO: 56795 - DNA, 1398 bp, Bovine  19866881022619
  misc_feature (1)..(1): n is a, c, g, or t
natcatggcagcatcagatcccatcacttcatggcaaatagatcaggaaatagtagaaacagtgcctgactttatttttctgggctccaaaatcactgcgtatggtgactgcagccatgaaattaaaagacgcttactccttggaaggaaagttatgaccaacctagacagcatattaaaaagcagagacattactttgccaacaaaggtccatctagtcaaggctatggtttttccagtggtcatgtatggatacaagagttggaacataaagaaagctgagcaccaaagaattgatgcttttgaactgtggtgttggagaagactcttgagagtccctaggactgtaaggggatccaaccaatccatcctaaagaagatcagtcctgggtgttcattggaaggactgatgctgaagctgaaactccgatactctggccacctcatgtgaagagctgactcattggaaaagaccctgatgctgggaaagactgagggcaggaggagaaggggacgatagaggatgagatggttggatggcatcaccgactcaatggacatgagtttgggcggactccgggagttggtggtggacagggaggcctggcatgctgcggtccatggggttgcaaagagtaggacacgactgagcgactaaactgaacttgtcgtcaaccagttaggcagctggggctagttcaagtactctgtccagactcaggacctgttttcagttcaaagagggaagtggatctgcagagggtctaattccagggaggaatggctggtttcaggacaatatgatgctgacttgggtttgcctttgaacttcaatatggcagatagatgatgctggcagactattttagaagagaagtatagcctctgtgatgaatttgaacataataaatcatacagtaagatgaaatgatgattataataaggacagcaaacacattagctaacatttacaaaccaaatgactgtccagcaagagcagcttttcagctctactcaacaatacttacagtgtttagagtcctgtgaatgagcccaactgtggctaaaaccagtcatccaacccggcttgctttcatcccgggagctggcgccactgcttgtctcactatccggggccagcccttgtccatatagtgctttgtgcaaagtagaaaaggtctcctcttcctcacaatactttcccatctattagaaaagcactgtaatattcagtaaatgtcaacagtcaatatacaaatccttgggatatgaactttgagtggtgtcccttaagttacaagtagcacagctgtaaagagaagccttgggatctacttgtttggggcatgagaataagtcttctttcagaaacatagccggtctggatcagtggtttga

SEQ ID NO: 56796 - DNA, 1722 bp, Bovine  19866881088816
  misc_feature (1)..(1): n is a, c, g, or t
nttcggagaaacagttatattagaaagaggaaatgattccaaagccggggtccttggtggtggttttaccgtgcttgttgaaactgttaagcgtactgaggcttgttctctgctttgaccacaggatagcataaaagacagctttaattcttcttgcccacttaggacaaacttccgcattttcagggcttccctggtggctcagatggtaaagaatccgcctggaatgctggagacctggtttgattcctgggatgggaagatcccctggagaagggaatgtttacccactgagtattcttgccttggaaatcccacggacagaggagcctggcgggctatagtccaaggggttgaaaagagttggacgcgactgagcgactaatgtgtcatctcgtatcagcattttcatagagttgcgttgctatattaaagccaatctgctctggttcagtcttagaggcagcagggtggggaggcttggagtgaagcagatttgaattcccaacagtgtccagagctgtgtggtctcaggcaagtcactgagccactctgagcctgtttcatcaactgcaaaatggaggtaatagtacagcatcctgcaggagttttgcaaaattaaagttttagatacataaagaagtaaagtacagaagctgacatatagtgagtcctcataaatgtttgggggtatacagaatagaaagtgaagtcgctcagttgtgtccaactctttgagaccccatggactgtagtctgcctggctcctctgtctgtgggatttcccaggcaagaaaactggagtgggttgccattcccttctccaggggatctttctgacccaggaattgaacccgggtcacccgcattatgggccggttctttaccatctgagccacctggtcactcataaagattgttcaggaagttaaaaaaatcaaaagataaattatgctaatgttaacctacccacattatggatgatagtttgtattcaggattagatgcgaaacatcttttaaaacatatgcagagtagataaattaatattcacatgccttgagaatcttaaattttctatttcctgacttctggtgtaaaatttgtaataaactgtgtaagttttctgtatgctccgttttcctttccttttatttactttcagtgaacaaataaacccatagcattttcaaccatactgataattaaagctgcagggggatggagcaatgaaaatgaaacattaactctagtgatcaaagggaagccagaagctaggagatgatatgatgaaggttccagaagtcatttaggctactgatgttgctgggatgttattacatggttatctagtgggcagtaaccaatacatatacatatatatgtacatatatataataataatatatataatatatatatggcataactacatcacccttttgctaaatcgaaattggagaaattacctagggcattcagctattctctggacaacatactatttcttaattacctaactagaaaactcgtgttcctctggagaattcctgggaggcattatagacagcctcttgtggtagaggccccagagtgactctcccacaggaaatcagttctcaggtcctgatgtggccgtttctcccttcctgggtcccctccctcctgtctcttgctactcccactcatactaggggacttcccacccggcttccagctctc

SEQ ID NO: 56797 - DNA, 969 bp, Bovine  19866881136004
  misc_feature (1)..(1): n is a, c, g, or t
ntgtgtgtgatggtggggtgacagaggtactcaatggatgtcagggagaataattataaaaatgtgaacccatacagtatgacagtgcatgctaagaagccaaaaaacggcgactcaagagtaagaggagggacttccctggtggcccagtggctaagaccccacactcccaatgcggggggcctggcttcaatccctgatcaggaaaggagatcccatatgctacaagtaaggcccagtgcagccaaatgaataaatacaataacgacaacaacaacaacaaagaaccagaggaaaagagaagacgactcaagcaccttcttggcgggacccctcatttcacacatcaaccaggctggggaatcgcaggtgtgcagcacagagaccaaagtcaatgccaacacccaggggtggccttgtggtggccttgtcccttcttcttttcaaccaggctgcccccctcaaactggcaacagagtcttacctcgaaggcagagaaaggtaagaaaatcttctgtcttaggcttccttttagagaggtcagaaatctgagtagctggagggggtagcaaaggctccactatcttgactggagttgtgctgggactattcggctgggattgagcaaacttcctttgtgcttgcagcctgggcctggaagagcaagagaaaattaaaaagaaattaaccagagatcagaagatacagatctacgtgcagcaataaaatcatgacacaaaagggaagaaagaccctttgtttcaagcaaattctttgtttctaattaaggttctgtatatctctcacactctcataaaccacaagcctgctttaaagggcaataaatttgcttaaaaggctgtgttttctaaactgacaatatacaccatgatcctgtgtgtatgtgtgtacacaagcgcatgcctgtgcaaaccacgtgtgtgccgggtatttcaaaaccagcacgcc

SEQ ID NO: 56798 - DNA, 1420 bp, Bovine  19866881142964
  misc_feature (1)..(1): n is a, c, g, or t
natggggccgaggtgtgggtctgagctgaggacactttaaagtaatcaggctgtcaaattaaaagcaaacactttctcagcatttctgaagactgaaatagtgaaaagtgcattgccttctaagtatatcagagttaagtcatttctgccttgtagttctggaagacaggaggtgtgcaagtacgggaaggcccctaattctccttctaactcactgaatctcaaccagggaaaattctgtcccccaaaggagaggactcttgagagtcccttggacagcaaggagatcagactagtcaatcctgaaggaaatcaaccctgaatattcattagaatattgaagctgaagctccaatactttggccacctgatgctaagagcctactcattggaaaagaccctggggctgggaaagactgaaggcaaaaggagaagagggcagcggaggaagagatggttaggtagcattactgactcaacagacatgagcaaactccaagagatagtggagcacaaaggagtctggcatgctgcagtccatggggttgcaaagagctggacacagttgaacaacaagggacccttggcaatgtctggaaatgtttctgttgtcacagacatgggggtggaaggtgagatggggctaccaagcattcagtgggcagagggtaggggtgctgcaaacatcttacaaagcacaggacagccccttgcctccaacctcgcactccaacaaacacttatcaggcctcaaatgtccagagtgctactgctgctattccctgctctaacaggaagcagaaatgatcagctgcgacagaatcttccatctttcaaattggttcctgggcttcctgggcccccacaacacccttctctcccacaacctacagagatgctactcacagtgtggtccacagaccagcagcatcagcacctccagtgagcttcctacagatgtaggacttcaggccccagcaggtcaacgggactagtatgtgcatttcagtaagagctccagggaactcctagacattttccagtgtgagaggcactgtgcaagtgcccttccccttctccttcagtccttcccacagggctgtctgtccttctcctgttcactcatcattaactctgcactctgccttccaaggaagcagatctagtaaaaagcagctctcctctccaacacttttttccgaaaactcccctccagcagaggctctccctggctccctgcaacaccagttcattctatagcccttttaggagaaggcagctcatctcccacagtgcctttggctagtcaaggagcatgccatgtggagaaaaacatcagaaggcaaaatcattaaatttaaaaagaaatcttgtaaaagcccaaagagaacttttaaaaacatctaaaagtcaaggtgtt

SEQ ID NO: 56799 - DNA, 2000 bp, Bovine  19866881146988
  misc_feature (1)..(1): n is a, c, g, or t
ntgctcttttagtcacatcccaccgacttgttttaagaaatgctctcacggctaacgactggcagagtggatatttaagggcacttcctgctctaacatccacatgtctgcaactctagtggtcagtgtaagtataaaaaagtccttatggtgtgctttttaaggaagaaattattcactgggtccagagagcatggagtgaggaggtgtcagccctctcaaggcagcaactcactgctcctgcttctgcactcacaattttgatggtttcagttttagcaggcaccccgcttgcatctttgcgtttcaccaagactggagcacaaaatagcagttctgtagagaaagaaaagcctcactcaaaagaaatatcaagttccgtgggccagcctgtttcagtcccacttaagttctttgagcttatttagtagcaaatggtagtggtgttgcttttccggaaatggctctctgaaaggcaatttgtcttgcagtgcagtctctccatagtaaagctcatcttaggcctttcactggctctgtgtttatcttgtggagaaagaggctgtcgtgttcaggaatgcacacagcagaggagccagaagtgacacaataacagagtttgggagcctcccctgaaaacgtgtgagcgagtttttgctgtattcgacagttgaaaggatgtagggtgttgacagtcctggcagacccaacagataaaaactgctgcttggatgtggcagggaaccagcgtgtgtggtagggggggtggttacagatttgtctaccttccttctctcagggataatttaagaagttcaatattattttatcatgttatcaaaccgctaacctaagtgtgggggaggggatggcaatgcagaagacataggtttgatccctgggttgggaagatcccctggagaaggaaatggcaacctgctccagtattcttgcctggagaatcccatggacggaggagcctggcgggctcccaggccatggggtcatacagagtctgacacaacatttttagcgactgaacaacagcgacaaggaaaccaagaggaatgtaagagaataaaaacaaaggaaagataaatgaaggtaaaaggagaaaatctcttgatcaccgccacgtgatttagcttagtaagttcctcaaagggaaagagctggaaggttcatcatagtgaatggtcacacctgagagccagccatcccctggcactttgtttgaacagggctttacgtgggaagagggggagaagaaaggaaagggtatgtgatgttttccactcctgcctgtgcctctaatcctcagccctgcaaacctggaaacgtcagtcagtgtggcttccaggggtcccttcacttccacagcaacttctctgagagggaaggcgtgctgactgcccgcgtcatttttcagtttgatcagctggtcctgtgtctggcacgaggtggacgccgccccagcacgggaccggtcttctctcacacatcagtgtctgtggtggcacagacatctccagctgccctggaggtcaaactcgatggtggtggttttctccagaggcacgcatacagatctggtaatagagacatttacagtcacgtgcttgataattttctgtacggaaatcctctcccacaatgtggcatgcttttcatcctcaaagcctttgagactctgttgtgcttctaaatgagatcagcggcttaacctttctttgcttttgatgcaaactcataattatgggcagtctgcagagtgggaggttcgcctcccttctctgtcctcactgggatgacacgaaggcagctcttgtgacgagtgtgccattagggtgtcagcactgaagcacttgtgagaaacatttagtggcagctctaactcaaccctcatctcttctgagttcctagaagtatgtgttttaaaagtaaacctgagcaccgaaggtgctgagaaaagcaccgttatttagatgttcgttgacagg

SEQ ID NO: 56800 - DNA, 1811 bp, Bovine  19866881219278
  misc_feature (1)..(1): n is a, c, g, or t
ntagtgttgtttgcaacaacatgtgtggacctgcagattatcatcctacgtgaagtcagagaaaaacaaatatcatatgctatcacttatatgtggaatcgaaaaaatgacacaaattaaagtatttacaaaacagaaatagactcacagacttagaaaacacatttaaggttgccaaaggggaaaggttagggggaggggtaaattaggaggttgggattaacatacacaccactataaacaaaacagataattaacaaggacttgctatacagcacagggaactctactcaatagtctgtaataatccgtatgggaaaaggatacatgtaaatgtacatctgaaactaacacaacattgtgaatcaactatgaacctttgtgttagttgctcagtcatgtcggactctttgagattccacggactacagcccaccaggctcctctgtccatggaattctccaggcaagaatactggagtgggttgccattgccttctccaggagactttcccagcccaaggatcgaacctgggtctcctgcactgcaggcagattctttaccctctgagccaccagggaagacctatactctaatataaaataaaaattaaaaaaaaaaataggtgaagtttaagccagtaatatacactaacaccattttcaatttttactgtaattagtacattgaaggcaaatagtgctgctaaggagtgtttggctgtcttgataaattaagtagcccatctaaacccttattcatatttaatttggctaagcaatctgtttcctcatagacggtaccaaggtaaagttcagttcagttcttgtgtgtcttagcaggatttaaattactgagattttactgtggagactgaatcagcatgctgggttgaaatttctgttgtgaacatctaattatcccagttacaaggatattgcctttagaatgttaaataacattcacttcatggtttcttttacttttgttcagcaaaagattcaaaatcgacttcattatattggggatttgaagttatattttaaacaattcatgattgacaatttgcccacgggcatctcttttatcttaaagttagacgtttccctgaggccacacaaaagtgtcaagtggtgtaaatagtatttcatcactgtatgtgtctcttttctttctttttttctctccccttcctttctccctccctcctccccacttttctttcttgccacttggccttctggaataggaattgtagcttgttttggatacattctataaatgctgctttatagaacatccagcctagataccagaattggggtggtaattgccagtttgggtcatctggttcagattttaactataccttgatcggagcagattccctaaataaagtcacagaaattcctgaattgtttacaatgcaaaacccaccatatccacataggatagacacagagcggccctgatcattataaaccaccctcaacaaggtgaaagcttttcccaggtgtggctgagaagaacacctcagtccaggttcttatcttggtcctctctccttggctgctcttctacaatccatcctggctcaattaattggactgtttgattcacaagaaactgttctcttggttatctgaataatatctgtaagaatttttctgtctctgtctttacgcctcaaagtgaaactttaagaaaatgagagatttcactaactgggtgttatcagataaattcatgcaaatacttgggagttgcaacccccaaccatgtaaaaacgtttagcaattacagattataca

SEQ ID NO: 56801 - DNA, 1154 bp, Bovine  19866881277477
  misc_feature (1)..(1): n is a, c, g, or t
nggtttatatggggtgttgtttacactggaagtcaaatgtttatcacaacagaggtgtgagtcgagttttacaggatatatctttagacagatgtgtgtatatgtttgatgtacacagacatacacatgtgtacacacaaacacacacctatatacatatgtacagatatctctccttcatgcccaagctctagggcaggaagttctgtctgttctgaggtcccttcccgtctctacagagtgtgagagtgcagagacctttaggttgaccagatgcccaatggggacatggcagaggatttattgtattaagtatgagatgggacaacatgctgagatgctgctcacttctaaagctgctctgattttaagagagacctgtggaagatggtcataggaagtcaacaataaccattgaggattgccacgtgtaccagtcaccaagcttcagtaggctgtgttgctcggactgtctggtgcccgtctgcccttaacttttttccctgagtagggaagtcgagctttttctcactatagccaggagagggagtgggagttggtagtccttgcatctttctggagctgatttttccctgactcttttctctgctgcttctttttgtccccactttggggtacaggggctggagcagattttgttatgctgggaggaatgttttcgggccatactgagtgtgccggagaggtgatcgagaggaacggacagaagctcaagctcttctatgggatgagctcagagacggcgatgaagaaacactccggaggggtcgcggagtataggtatgtaggggtgggaaggggagtgggcacagcgccatcactggtgaggttacattcccttgcttcttacaggaatgggatggaaataggtctcagagagtacaagtttatattatggtgacttcccttgtagctcagctggtaaagagtccgcctgcaatgcaggagaccctggttcaatccctgggttgggaagatcccccaggattcttgggcttccctggtggctcagctggtaaaagaatccacctgcaatgtgggagacctgggggatggaagtaggtctcaaagaatacgagtctctctatattatggtaccaggggaaagacctgggaaacacttttaaaattaa

SEQ ID NO: 56802 - DNA, 1047 bp, Bovine  19866881285797
  misc_feature (1)..(1): n is a, c, g, or t
ntcaatttttaaatattattaaggccttcaataaaacttgtgaggtttctgtgctttgccctgggatatcactatgcccaagtcagacccagacccatggggcctagaactgagactctggtgcaaaatagagataagtatagagaccattaccacccagtgtggtaaggaaagcagcatatgttacagtgttggcagctatctggttcttaaggtggttggtaggtgcgtaggtgttcatttttatgactatgtttcataacttacatacatgtacacatatgtatttgttattttacatgtgccaacttttacatgatttaaaaggtgacgtttagaggatgtggaggcagccagggtgcaccccatcataacctagtgggtgccatatgaaaggtgtaaccggaataatgagtaagaatgagccagagaaggggagacaggcaaaggagagaggtctcagacaggaggagaaacgaggagaggcctggatgaggtgaggaggggcaggacctgtctgaggaaggcagagtagtctagcgtggctgagtgatggtggccccgagcaccggcccagatgctaaggacttcgtgagccagtccaagaaacagagctttatcccaaagacagtgaggagtcacggaagcgtcctgagctgagttacaggattagatccacgtttgagaaaaatcacgcaagctgcagggtgtttagtgaactaaagggaacaagactggaaacaggaaaatcatttgagacacatttgtttacttacacattttacaaagatcagaaagtttgaaaacgtgcaacactggtaagagttcagagaggcagagaatctaaatcaacatggcgtccttagagggcaatttgtcaatatctatgataataaacaattcatatacctttgacctaacagttctattgctacaaataaatctggcaggtaaatttgcacacctgataagagatgtatgtatgagatgttcactgaagtacccatagtataaagaggacagctcattttagaaatgagttagatg

SEQ ID NO: 56803 - DNA, 768 bp, Bovine  19866881378073
  misc_feature (1)..(1): n is a, c, g, or t
nttgagaagtgaacttgacataaaacaccaggctttaaagcagttcttcgatcttttgggcacttccaataacttcctgcttcctggcacttcctgccaggatccttctgcacttgtctcaaccttgtatttcaagaaaagtgcaggtttcaattgataagcactattagagccatgctaatactactctggatatgtgttagctgtcatcctttatgttataaacattacaattttgttcaattctttaatatctccatatgcaaaccttctattaaaccaaacctttgatctccccctactctgaatgtcttcctatgacctgttgccatggagatgatcacatatgcctcatgtaattatgtaaacagcagatagttcgtccatcttatctcacatataggctgtttcatttttccttttctgctggtaagttttcatcttagcttaggtgaatttacagcaccatgcttaaggactcaggtgttttaagtcaacaacaaaattaaatttctcttgatgaattaactagactcctcctaattcaatattcaattaatttgaaagtggaagagaccatctttaacaagctggaacccaaattcacaaagagatcagagtttctattttcagttcaattatctgaaacttaaaactgtcttattagagttaagatgataaaaaatacgtattttaaaaataacagttattccctggaaatagaatctggagaatagtagatggctgctataatagctcttgtgtatg

SEQ ID NO: 56804 - DNA, 824 bp, Bovine  19866881384500
  misc_feature (1)..(1): n is a, c, g, or t
naaattcagagtccttttaaaagtgttcctgaattcataatagatttctgttgtcatgcattctctcagtaaattgtcaataaaagtgcacccactcttaaacttgaaaaggttcaaaaccatggttctagattataattttttgactacttaatttgaaatgaaggcagcgcaagtgaaaacatgtctgaaggtaattgttttgactattactgagtgttcttcagtgatatttagcctaaagaaatctaacatctgaattattctatcagcgtagagaatccttatgctcatgtgtaacattccactgaacctgattttcatctcccagcattgcaccgtggagtgtagggaaatgcctgtccatccagtgggtcccctcccctgtggacaggacagttcctaagggggaggtggggtcggccccatgggagccggattccggtgttctgacctgggctgtcgggggacaggagatgaagagcagttcctcaactttgctttattcctgtgtcctgttaaaatgcagatgtcctgttagctagctgtactgggagctcaacctggtgctctgcgacacccaaggggtgggaaggagcaccaagagggaggggacgtacgtatacttatggctgattcatattgttgtgtggcagaaaccagcacaatattgtaaagcggttttcctccaattaaaagtaaattttaaaaaatgctggagggaaaggtaacacaagctactgagggcggaaatgagcttcgttatgtagataactcttttattctttaaaaaaatacatgtatttatttacttgactgtgctg

SEQ ID NO: 56805 - DNA, 1027 bp, Bovine  19866881423735
  misc_feature (1)..(1): n is a, c, g, or t
ngggctgtttgtaatgaagtggtgattaactggaacgctgttgaaacctctcctgacctcgaaccactctaaatgatgtcctcttccttctttgtctgcaaagagaacttgcttgatgaactaatttgagctaaatgtccatggtaatggtatcacagaacctgagaattgggagaaagcttgaatctcacatgtagggaaaaacaaattacccatagtcccaacttcatacaaatcaaacatccttcattttccctttcaatccttgtgcatacataatttgcagatcgcttattcaagattcattcaacacagttataatcagacataattttctagtctgccttattcaacttgcaatttatcatagcattttccatgttgctacatagtctttattcttttaattggctgcaaagaatttcataagtgattgtagtataatttactcaatcattgtccttttgaccaacataaaaaccttgatgtgaatcttctttaattgcaatgttttaattgttctaaatcaaggtcaacaaactgtggcctaagagccagatccacccaccctgcttttgtactgcctgaaggctaatgatagcctttagaggtttaaatggctggaaaaatttttttaaaaggatagtagtttatgacacttgaaaattacatcaagttcaaaattcagtgtccataaattaagttcattggaacaaacaacacccattcattgacacattgcctgtggctgctttcatagtaatacaatggtggagctgaataattgagacaaactgtatgacccacaaagctgaaatatttattatttggccctttacagaaatcatctggggaaatctgttttaaatatacatcatcatccctttcacctcactcagcagtcatacctatggtcatttttctactgtcaagaatctcttttgctatctttctagctctcattattcatttgttcaacaataatttgttaaaaatctgctcttgctaagtacctattctgccagat

SEQ ID NO: 56806 - DNA, 1609 bp, Bovine  19866881450296
  misc_feature (1)..(1): n is a, c, g, or t
naatgtcaacttgttatcttgaaccatctgagtcataagataatgtcgcctgttttttaaggaaaaccaaagacagcttgtgcttccctagtggttcagtggtaaagaatctgcttgccaatgcaggagacatggggttcgatccctgggtggggaagataccctggagaagaaaatagcaacccactccagtattcttgcctggaaaatcctatcagaggagcctggtggtctacagtccatggagtcacaaagactcagacaccatctcaatgttactcggtatcagccacccggcaggcaccagcccagatatctcctgcacctggtcagtgcatctagctgatatatcaccgtctgacacattgctgtctgtaaacgcattagctcagggttctttcccctgccagccgagctcaacctacactccctgaaagtcaaaatgcttcatcacttggcctctacatacttttccaggctgcgttcctgtcccacctgttatcccactggtgctgagactagactaaactattcagctcttttgaatgtggtttgcatcccctgtcttctcacacctggacctttgctgaaatgtttcataatgtctgaaagtgttttcttcttgcctctttgcattgtggctgtattcacttgacctaaactttcttccgggtccagcttagatctcctcacttgcacaaaatcttccacaaatctcccctcctctgttaaagtgaatgtcttcttccattgtaattgagagcactatgcaccagcacatagcatcagggggttttcgttgctttccagtataaatgcctgcgttataatagttcctcctttgtacttatcattatctagcatgctagatgtttacttatttatttcttcactgtctgtaccaccagaaagtcctgggactttatcatcttttttattggctttttaaaatgctgtatccccattgcctgaacagtgcctaacagatagtaggtgctcaataaacatttattaagttaataagtgaatgaatcataggagcctagaggtcccagattgcccccatctttccatcacctcagagtagctggcaaactgctttgcacatgcttctcaaatccaactgcattcaagagccagccacctggatctggctatgtatatctcttctgctttgaagagaggatgtggatttaactgcaattatacagctgtggtgccatgaagcaggcaaacacgatggaggatgagtcttttataggaaaattctaggttaatgggcaaccctaattgcaaaatctaattaggaagaggaaatcagttaaattaagaatccttcatgtaagagaaccaaataagctgttgggcaaaatttttcattcctcattcacttcaatcagcttcctcagagaagatggcaagacagcaggacttccgtaagaggattttattggcccaaaaactagactctcatgactacagaaaccaagaagaaaagaaaacctggcctttggtcaccagattcctctttggcatgtgtcaggaggaagctgccatgtcgcctcgcttaagatcgaaaggattatcactgtgaaagcccaggctctca

SEQ ID NO: 56807 - DNA, 2551 bp, Bovine  19866881527265
  misc_feature (1)..(1): n is a, c, g, or t
natatatacacatacatatatataaatacacacacacacacatatatattacacataccttgtaggatcttttttactccactgtggaaagtactgtataggctgtgaatgtctattcccaatggaacatgctttctgtcctggatacaaaaaatgagctgatcagggatggggtgttagagcagatttaaaggcacagagaccagtagtatgaatgagcttatggaaatacttgtaccaattcctaagggagtaattacagatagactttgaagctacttaaaaactggcagcatcatagatttgtataatcaccctagtagctgcactagattagcctaatatagttctggacacataaaagatgtacagtaaccacttgttgcattgagctgaagcttaagaaggactgaggcttagtgcatgtaagaggggaggagcatctaatcctttttcagaaatgaattaaatttcagtgttctattatcctcttttagagtttgaagtctattttcctaaggtcgatgcttaaaggagaagctgagtgtgtagcagaagaagataaaagaagaggttataaagaaaatatctcacatttatagggaacttactatagaacgaatattatgatgatgacttaccatggcattgggggaataaaatgaaactctggacctattagctttgaactaactctgttccttaattatgaaattaatttctaatgtgtcttcatagtatttcaatatacctgggcattttaaaataaagcaaagcattttagtttgcttttatactagaaaactcacgataaaacaataaaggattcattatgtcaatgaaatgtaggctgtgggtacagccagactgatgttgatttataaagaaaaaaaattgatgggccaaattttaacatggctttggacattaatcacaatagtcttgaaaataatctattgcaaccagcctgccattctcctctgaaacaggaagaaaacagtgttctgggggctgaacaggggagaagggcttgctcattcatttatttattcaaaaaatttttgttgacttttattaagtgccatgggctgtgctaagcacagaggatacataatgactaaaactaatttcttcctcccaaggagctcatgtctagaaaggaacacaaatacataaacaattagtgtttatagaatgtgaaaaaatcttaatgggggaatgatcaagtgtaaggaacctaaaggggagcatcaaatctagtcttagggaggaaagggagagacgaggagggcgtctaaagcaaagtcctgaagaataacttagcagggaaccagaagcaggaacaggaacattccagggaaagggaaagaaccaccattaaacaaagccccgagatactggctgtagacaggaagacacaaaaacagtagtggagtcacatggtgaaataaggtgttgatgtgggcactcaggccatgttcccaagggcgacaggacaaaaaccattcatccaagtggtgtcagtaattgaaaagactaggacattagacacacgaagtatgtctcatgagatctgcggcatgaaacccactactttagactcataacttgcacttgtattacatggctgactgtgtgaaccaaagaaaatgcatactaaaaactaacgtttaatgacatgtccacatgtatataagtgtaggcctatttactattgagctgcacagaaactgagcttaaataactctaatcaatagcgctttaacgagttaagccaattttcttttttcactctgttagcttctaaatatctattatcagtgaaatgtcattaactgttcctcagctcacagctcactggcagattatatacaagttaaaaacaaaaatcctatatattatttcccaggatctggggttcttcccatcacttcacacgctccatgttgaaataatttatgtgtgaataaatcaaacaagtgcattattgtgtagttaaacaacagcagcctaataaggcagcgagtagattttgaaacactaattactttggggaggagcatttttatgcaagcacgcgtgctttgtcactcagtcatgtccgactctttgtgacccatggactgtaacccaccaggctcctctgttcatggaattctccaggcaaggatactgcagtggattgccatgtccccctccaggggatcttcttgacccagggattgaacccctgtctcctgtgttgcaggcagattctttactgtctgagccaccaggaaaacctctacatttttatggtgagacatgaaaagaaccacagagtaaaagcctcctaaggaaaggccagagaatatctggattcgtgaaaacaagagggcttatatggttatttaaagggttttggttgctgtcattttatatcaggctttctgttctctttttgtgagtgtttttacactaaggggagttgtacctttagcaatgaaataaattgtgcagctcataacaattagaacaaaaacaataaatcaaggaaatacagtggcaaagg

SEQ ID NO: 56808 - DNA, 1156 bp, Bovine  19866881537103
  misc_feature (1)..(1): n is a, c, g, or t
natcttgtgatataccataacaagaaagtactatgaaaaaacgtatctgtgcacatatgtataactaaagcactttgctgtacagcagaaattaacacgacattgtaaatccactaaacaataaaataaattgtaaaaaagaaaagaactgggttcgaaaaaacttataaaaagagaggtaaattatctagtggtcagtcagtaagcaccatgttaattaagaccaataaagacacataattaccatatagattttccaaaagcccaaatttaaccctaaagcttctagttcttttttctatacatctatgtttcccaacgataacagacacacattctcatcagtaaaggtgtaaaaaattagtaaaataccctcctcaaaaggtagggaagttcaaaaataaagatcctagataaagcaatacaccaactgatttgcaaataatagctgactatggcgaaatgttcatattgtggatttcaactctcacagcagttttctcctatcaaggagagtagggcagagatgacaaatatgataaagagaaaaccaactgtgttgtttttattttttttaaatagactctgttaagcagtgacatacaccttggtttaaaggtctcatatggtatgggacacttgatgatatttagcagagacaaggagccgacaccctatggcgttgatctggattttactttgtatagcggagccacttctcagatcttcgcagctgctgctgtgcttttcccactgattctcaactattcttctagaaagaaggcaccaaaagctcccaagagaacacagctctcccaacacaccatgtaactcttttctgcttccccatctagagggtcatcccattacacttaccataatggtgtgttctggaaatctggaccggaccagcttcacgaactccacaaaatgctccgagtacccattggccacatccaggcaaataaacttaacctgtggcacagcttccaggatgttgctcatcttttccagatcatccttcccactgcccgaactcacggctacatgctgtaccgaataaaccaagaggtataagacaggaatggtaagtggcgttcagaggccagaccctgcctccatccaccctctagttctggggacagtaccgtgcccg

SEQ ID NO: 56809 - DNA, 684 bp, Bovine  19866881553422
  misc_feature (1)..(1): n is a, c, g, or t
nccccccgtccctgggattctccaggcaagaacactggaagtgggttgccatttccctctccaatgcgtgaaagggaaaagtgaaagtgaagtcgctcagtcgtgtccgactcctagcgacctcatggactgcagcccacccggctcctccgtccatgggattttccaggcaagagtactggagtcgggtgccggctgattcatgttgatgtgtagaagaaaccaacacgatgctgtaaggcaatgatccttcaagtaaaaataaattttgtaaaatgtgctgcttagatattattattactgatcaagttcacatatgggggccactctcttttttctgatgttttcagagtagtgaggcttctttagtccagtcatatttaggaaatgtttctagaaaagggatttggggcaagaaaaatataaaaatatttgctataaattttccacttgtgtcttaagtacagtatacaaatatttgttgtctgtagaggtgcttaattctttcttaaagtattgacttttccaaccagaaattttaccagctatgaaatttgcatttgaaaatttcttaaactgtaaaaatgtgatattttatactggttgaattataggctgaagactttaagtgacaagtcaagagaagctaaagcaaaaaacaaacccaggtaagcatgtgctgtt

SEQ ID NO: 56810 - DNA, 882 bp, Bovine  19866881989895
  misc_feature (1)..(1): n is a, c, g, or t
ncttattgcatcttcattcacgcagcccctgaatcaaatcagatctgggagcttctcccccaggccaaatggaaatcagccaaggatcagatccagccttcaaaaccgtcctcttttttttcccccctcttcactgtcacttccttaactgctattagcattttacccaaacctgatgatgtgttttgagtggggagagagtttccattaactctctgtctcaccatcactaaatttagccttcgatgtaaagtctcaagttctttgccctaaaaatagcttggggctgaaatgggagcagaagtgaggatcagtgtcagctgtgtgtcctcagaaacccatggatgttaaaggtcaataaacccccctggtcctgcccccgcttggtcttcacctccaccctctgggggttcagacacattactgctcttcccaatcagaactcacccacatcagtgaacaccagagagcatggtctggaggggtggggggcaggcgctactcactctctcaaatgttttggaaaactgaccaattttcctttggaattttgaccttgtagttatttttggtgggggagaagaaaacaaatacttatgataggcttcttgtcaataaactctatacataaagtgctttatcaactacttttagtaaaaatgctaaacgacaatggttgatattaaatatatcctttcgagggcttccctggtggctcagtggtaaagaattcacctgccaaagcaggagacatgggttcgggaagatccgaatgccgcggagcaactaagcctgtgcagcatgactattgagcctgagctctaaagcccaggagccacaactgctgaagtccccgtgccccagggcccgtgctctgcaaca

SEQ ID NO: 56811 - DNA, 780 bp, Bovine  19866880821111
  misc_feature (1)..(1): n is a, c, g, or t
nctccatatgattatcgcagctggatactgcttctgtgtgtgccctcagacatgtcaccgcccctctgtgggcaattttccagtctgtaggatgcgggaggtggtggaccaggtgctcctcggggcccttccaagccccacagccttctgatcctggactgaaaataatgacagtggtgcgagggcttcctgggcctatcagagcctggttttcaccgcttccattaatacgcacatatttttaacatcttccgatgccctcaatttgctttctcactttcatcctcatttctattgccccctgggtcttgggacctaattttagcgaaggtcaaatgcagtttcttgggccgccccaagaaagaggtggatacccacctctgcagagcagagcggcagcgggtgcttcaggccttccctgctgtctgcttttgcaggagtggggaccaggctgggccgggccaggcagggcgagggtgcagggctctctgcctggcaaggggtcgctcagctcgctgccacatggaagcctggccggcaaacactagactctgtgtccttcaagaggctcagagcttcaagtgatctctgcttcaagcttctcacttgtgatgggggagccgaagttccgggaggggttaggataaccaggccaagattcagctaaaatccatcaggcgattcagcaccaaaggagaatgaaagcacatgcagtcactccctgtccgcctccaacagccatcaatggcagcatttccatctggcactgggaactctgca

SEQ ID NO: 56812 - DNA, 761 bp, Bovine  19866880415801
  misc_feature (1)..(1): n is a, c, g, or t
ncatgacccatctatgttgggtggcacattgcaaaacactactctgagaaaactatattgataaaattttgatttcaggtatagcattttaatgaaaactttaaataatatataaagcagctcttggggtgaaagaggggacaagtcgatgttttgtatgtggttaagaggtataaaaagtgcttcacctgttgtgggtgaaagaaaagctaaaaaaaaaaagaagtcattggtcatcaacggaaatttaaacctgagagtacagaattttcaaaaatcttatttactatttcccagaggaatatgaggtttgaaaatgagatgattgtgcctggagaggaaatgggtgtgggttttgtggcttccagacagcggaagggaaaatcattgtgtctcagggaaagatcctgttttctcaggcttggaatagtatcaaccaaagttgatagtacttaaacaaaggcaagaagactacctgactatcggccttttatttctcctccttcaggtcactccacaagtaatttcatatagagaaaggcagaaggaaaattaaaggtgactcatctcttaacctctcaaagcctgattcaaaatgtcatgaaagcacctaagagaaatgaaaagaaagaaagcctgtacaagttaagaaaagcagaacaggaaaggagtctgaaaagtcactgcaatcatcactaatacattggacatctggcaaggagatacttttgcagggggcaactgggatgagaactctaatt

SEQ ID NO: 56813 - DNA, 4829 bp, Bovine  19866880456336
  misc_feature (1)..(1): n is a, c, g, or t
nggtgcagacatactaatgagattactaatttttcatgtgaaggaaaatattttcttgataggtatgttgttgtatctaaatcaggtcattctaaaactctgtgcttctccaccttaaaaaaaaaagctttgttgaatttctgacatgacaaattaatataaaaacagtaactattatgttttgtccttgattcaaaagcataggcagaaaatttcagatacataaaaatgtgacaatgtttttagggaaagtatctaatttttgtcaattccaggtacactgagtcatgtcacatttatgttgtgccagttcagtattttttcacttagtttctatcaccagattgtcttttaagagctattggtccaagatagctttatggcattaaatggtgagaagtttattagccaagcttgcaatttcacctaccatgcctttagatgtctctgttctcaaacaggacctaaaaatatggcccatttttggttcttttccttgtcgtaactgtgagaaacttcgtctgtaggcacttattcctttcaacttatattcatacattcttccagaaatcagggacatttggcagctctctaaatctactctgtgctcccaggctattcactgggacagcctttccttgctcctgcctcagcatccgaaacagcttatatacatgaggagctttattttagtgcctctgtgatagcacaaggactacagtgaaactaccgactccggagggtccagaggcactttaatttcagattcctaaagtctttaactgacctttaatactttgtttgccctccaacttcttttcctatacaatctcattgtggtgagaaacactagtgcagtaaagctttcttccttgcctttgtgttctatctcagctgtggctttccatgttgaaatacaataatttgatgcctctccttggtctactatgccaagtcctttatgggacaacagtattagagcctgaattgaggagatatcagtggacagggaattgttaagggtaaagctataagatctggtttggagtgcttcttgtgcacaggcattgtgcaagcattttatattcattgcctaacaagtcttttttttttttttttctttaagagacggggtctcactatgttgcccaggctggagtacagtggctatttacaggcgcgatcctactactgatcagcactggagttttgacctactccgtttccgacctgggccggttcacccctccttaggcaacctggtggcccgcccgctcctgggaggtcaccatattgatgccgaacttagtgcggacacccgatcggcatagcgcactgcagcccaaaactcctgagctcaagcgatcctccagcctcagcctcccaagtagctgggattacaggcgcgtgccaccgcgcccggcctaacttagtcttcataatcacactctgtatattgagagggtatgatctctgggttgtcatgggcattaaacccagacaatcagaggctccccgctctctctcctctgtccttggaatgtatgatccacttattcttctacatcaggagccacttcagggtttcagtcttgagagtaatgtgttgttgagaccatctgaacgatatatgtcattgaaatccagcaagtggaaccagagatttagtcacttatagccacgtaagacaatgcctcatataaatgttcccttgctcattaaaactgccacttaccaatatggaggtgatctacctctttcttccgtctgctctttttctccgtatatgggagtcagtttatgattacatctggagagctcctgtcaattggcaaggcagccagaacaccaaaggaatgagtcttgggaaagaagtatccacaagagaaatcccagggaggccactgacctctatgtagggaagtctgacttgtattttaggtgtttgggcgtcaccacctgaaggcagggatacccaggaacacctcagatttaatgtgtttattttaatgcatttaatgaagaactgtgtatagcatactgcaacagagaagaaaaatacacgactgaaacatggaatggcctttcactgtggggatgccagctagaggctgaagctccagttaaaaagttggaagaagagctgaagttagacaaggattgctctgcaggatttggagctggcagacaaggttgggggagcagggtaatacactggggaacataatgtgggttttgcaaatctaagaaggtaaaagatgacatgaattaggtctgaatgctatgacaaaatctgattgagatgcttggaggtggaatccctgggaaagtagagggagtgaagagggggatattatggtgattgagggtgaaacaaagtggctcatgtccttagactctaatacagagaaaagcaaaagaacagcaaccaccccaaccagtggagcaatcccagattcaggaaacacctatgttgaaagaatatgcacccactgggcttatttatatagctgttacttcaatagatataacagcctggatgcataaaaacagctactaccatagtgcccacatgggaagacattgcccttaagatagtgacttggttaatgcaggaactaacatgtcttgtgttggagcaatccaccagattcccaactggtaaaggaaatggcaaactgattacataggatccctctcttcaggtagtttttgctgtttagtagctcagtgatgtccaattctttgtgaccccatggactgcagcatgccacatctccctgtccttcaccatctcctggagcttgctcaaactcatgtccattgagttggtgatgccatccaaccatcttgtcctctgtcatccccttctcttccttcaatctttcccagcatcagggtcttttcaaatgaatcagctcttcacatcaagtagccaaagtattagagcttcagcataagttcttccaatgaatattcagggtttatttcctttaggattgactgatttggtctccttgctatctaagggacttttaagagtcttctccaacatcacagttcaaaagcatcaattcttcagtgctcagcattccttatggccaaactcttacagccatacatgattactggaaaaccattgctttgactactggactattttgacaaagtaatgtctctgctttttaatatgctgtctaggtttgtatccctccaagagagtgtgctaaatatgtctattttgtgtgggtatattatttggcctaacctacactttcccctgtcgccatgcagaccaggctgccaccatcaaggaattaaagaagctgaaaaaaaaaaaaaaaaatcagttgctcagtgatgtttgactctttgcaactccatggactatagcttgccaggctcctctgtccatggggttaaccaggcaagaatactggagtgggcagccatgccctttctccaggggatcttcccctacccagggattgaacctgggcctcctgcatggtgggcagattctttaccatctgagccaccagggaaggacttccaatagtgtatttaccaagtcagattggatggtgaatattgacgcaggcatttgttaattcaaattgttataacttctcaacttgtagatattccacaaaagacatgaagcacttagtatcatgccatgatccaattgcatgctttcaactaatttaattatggtgatgaagatgcaagtgaatgttacaataatgcacatttaacaatatttgttccattattatagtccttgatgatctgaaatgtgagcacagcagtagatgccattttgatttgcactctcggacaagtaaaatagttgcatgtcaaccaggatgagaaatatagaatgcgttaaaccaatcttgtcatttaatatctgatgaattacgagtgatcacccttcctgaaatatgtcagtttcttctggtagcacgcaaggctttgtattcatagctggcacaaattgctgtctcaatgtatgctcaatttaacaactgtctgttaaagttatcaacacattccaacatccattgtacaaaagagccccttcatgcattaaggcagagggattatcaaaacggtgcaggaaagggaaataccctttggtgcaccttataaaactgcacatgcaatagtttggaaagtaggcatttttatagcatgggaatatatagtataaattttgatgtggcagtaaaatttttttaaaaagagcgagagcaaagaaataaaagtctttccatattgcacacatgctaacccctactttctgaaaccataaaaagcttaaaatacccagcaggtgttttaaaacttaaattaattgccaacacattattattaatttcagaaatgctgaaaaaggaaaataaaaaatatgtgttgacatagtggtacatgggctatttgaaaacaaatataaaacctaaataggttcatgcatcatgctaagtcgcttcagtcgtatctgactctgtgcgaccccatagatggcagcccaccaggctccttcatccctgggattctccaggcaagaatactggagtgggttgccatttccttctccaatgcatgcatgcatgcatgctaagtcgcttcagtcgtgtctgactccgtgcgaccctatggacagcagcccaccaggctcctctgtccacaggattctctaggcaagagtactggagtgcattgccatttccttctccataaataggttcaattggatatatttcattcacaaaatagcaattaatagtatacttgctgctgctgctgctgctaagtcgcttcag

SEQ ID NO: 56814 - DNA, 860 bp, Bovine  19866880497421
  misc_feature (1)..(1): n is a, c, g, or t
naatgaagaaggaaaaagagttgggtaagacaggataaatgctaccacatggaatgccattttgtgtaagaatggcccagaaaacagagtgctgataaaagaggaagtagccttttcacgtgactgagtgtagaggctcctatctgttagttcattggtcaataggtccaatgtggttcatttactccaacttttcaggccaaaaaaaaagcccaatttaaaaagttggtcacatcccaaaccataacctgttcattgtatctttatgatcagcaccatcttttggtctagtacatttaacaataatgacaacaaaaataaatatggaaagaagagaggtccccatctgcacacggttcacatatgagctgctatgttcttcataacacatttttagagccttgcttaatagataagttatatctgtatacttgccaaataaaaatgcaatatcctgaataagtacaaattcaatttaccttgtattgtatgggaaagagggctccccaggtggcgctagtggtaaaaaatctgcctgccaatggagaagatagacacgggttcgacctctgggtcgggaagatcccctggaggagggcatggcaacccactccagtattcttgcctggagaatctcatggacagaggagcctggcaggctatggtcaatagggctgcaaagattcagacacaactgaagtgacttagcatgcactcacacacgtatgggaaagaaagtagaaaccaccttagacgggggttgttatgaagaactttctgcttctgtgtttttaatattaaaattcctgaaattttggacacttggactaatcatatataaaaaaagatagtcagatgtg

SEQ ID NO: 56815 - DNA, 2388 bp, Bovine  19866880517260
  misc_feature (1)..(1): n is a, c, g, or t
naacatattcttttgatcttgtgtgttctctgtttatttttaaaagaaacattttgcccttgatgaattcttcccatttctgacatatatccatcagtgaattgaagtctatatatgataaattgttgtatgttgattctttcagttaagaactcacttgaaaactagccatgaaaattgtagtatcaggggttactcctcaagatatactatagtttaaggttcaggattctgactaaattttgtgagaaactgaattagtattttttatgaaagttttgtgatgaggatactattatccctccctgactcttttcatatatatcattgttagattttgtattgaatctcaaaccagagcagtatttaattttgtaaatggacaagttttcagttgctgaattgaaactttttcagataatgagtgctaacattaagacccctgttatactttgcatttcagtcagcttatggagaataagattaccaccattgaaagaggagcattccaggatcttaaagaactggagagactgtgagtattttcaattccaaatttatgacgacgtaactatatttttaataatacttgcatttccaggaccatgtctttaatttcatgtcttagtctgtaaatttacaaaaacaagaggttgaattagtgatttttaaactaatttaaaattagacattataaatagtactaatttgtgataaagttcaaaaacagacttactttcctgacacgtttacttccttggttaccattgctttggtacttagagatgtacgttttttcttattgttgatctagtttgttttatttgcttatgggaggaaaggtggtggttttatttgcattaatggggcattataaaacaaagttttgctgataattattttagttcccatgatgttgctatgtgtgtcattaatggcattggaagaaatatttaaagttcttaatgttataaagatttgctttctgatatttaacacttgtggtgaatatttatttcattattttatattagctttctaaatattctttttgctggaaaaagcatttaaggataaatggaagtaagaattactttatcacagcatgtcatataacattaattgttgtttttccaagaagatcaaatgtggacttcagaatttaaaatgtatttttttttaaatttcagacacaaagtcttatggattgatatatattacttgagaatcattattattttaggcctatgtgtatatgtacaaaagacagaagcctctgtctgaaataattaagataaaatacacaatttgttacttgaaatatgaattatatatctccatatgtcttgataattcaagtttagtagctttgcatttctaaggccaaataatggctctattaaaagtaccaacaattattttaataagttctcttgtctgttttaagaggcactgtaggtaaaaataaaaattttatttaaaatagtgagagatgaagttcattttgggtatagcacatactgattcactgggccctagtacaaaagttaattcagtataattgtaagtaaaaaaatgacttgtcaacttctaagttatttgtaaatagaagctacacttataacttaaagttaaatacagatatatctaatttatttataaaaattttctccatgaacaatattacaataaagggatatatttgtggaactcaaaataaatgtaaagtcactacttaaagctagttttgggaaggaaataaagataaggtaaacatttggttacttttataacaaagttcataagttcataatctatctcagtatatacaaatactctgaaaatatttattctttgatctcttttgtgactacctcactactagtgagtacttgacaaatttatttttaattcatccattgaaactaagcattaatataatttaaatgtttgttaagatgaagagataatttaaaattatcatttaaacattaatagttttttcatcaataacatatttattcatgtatatgtgtgtgtgtttaggatttatatatacatgtgagatatatatgtctgtatatttatgtttttttttcttgaacaactttgaccttgaaggattctcagtggcttttcatgaagtctctatttggtttattttgtaattttaagtgttttcagaaacactgaaacaaaacaaactttttcattatttttcaagccactttggagtatcgtttgaactttcattttgaaaaagttaacttttcctaaaatttattaaccagataccttatgatctgaaattcaattaaagttgtaagtaggtgctattttttgactttgacttcccctgggagtgtcacttcatcttacaacaatttt

SEQ ID NO: 56816 - DNA, 1567 bp, Bovine  19866880544345
  misc_feature (1)..(1): n is a, c, g, or t
naagtgatgcttttgaactgtggtgttggagaagactcttgagagttccttggactgcaaggagatccaaccagtccattctgaaggagatcagtcctgggatttctttggaaggaatgatgctaaagctgaaactccagtactttggccacctcatgtgaagagttgactcattggaaaagactctgatgttgggagggattgggggcaggaagggaaggggatgacagaggatgagatggctggatggcatcactgactggatgggcatgagtctgagtgaactccgggagttggtgatggacagggaggcctggcgtgctgtgattcttggggtcccaaacagtcagacatgactgagcgactgaactgaactgagctgaactgagttgaggctcctggactcagtggttgcagctcctaggctctagaacataggctcagtagttatggcccaaggacctagttgctccagggcatgtgggatcctcccaaaccagagattaaacccaggtctcctgaattggcaggcagactgtccaccactgagccaccagggaagccctaccagatgaccttgaataactctttggacttcaattcctttaattataaaagggaaaaaataataataacagtaataataatagtatcttctttctgggattgtataaagacaacataaaagatacagaacacttggaatacatccttggcacacagaattcaataaatatttcttgtttcattttcattaccagcattaacttccagacttcatccttttgtgtctatctttcattggagggactgatgttgaagctgaaactccaatactttggctacctgatgtggagggctgactcatttgaaaagaccctgatgctgggaaagattgagggcaggaggagaaggggacgacagaggatgagatagttggatggcatcaccgactcaatggacatgggtttgggtggactctgggagttggtgatggacagggaggcctggcgtgctgaggttcatagggtcacagagtcggatacgactgagcgactgaactgaacttcctattattctaggagtccctcctgagtatgagtgtgacttgttcatcctgtccccagcatccacacagaagaagtgcttcctaagtatgtaatcaatcagtgaatgggtgagtcagaacctcaccacctatttacattttccagttacttgagagtgacgaatggggacttcattgtgctgaccttcacaagctctgaggaaatatttttctccctttctactgaagcagtcaaggttaaccttcacttgttaggctctctgccaagaagaaggcacaaaagagtacttcaaccaacttatgaaggcacagtacaagtaaagtccccacagagtacctgagggcacaaggcaactgaagctgaggcggttaactaccgggctaggggctccacagtcctactcagggcatcccatcaaagcgtaagcatcattacagaggaaaacccagagcacatgtggatctcactttaatccattatggagaagggaagattta

SEQ ID NO: 56817 - DNA, 2440 bp, Bovine  19866880674774
  misc_feature (1)..(1): n is a, c, g, or t
nggagatagtatataattgggctaaacttgtgggcctctctgatagctcagtttataaagaatctgcctgcaatgcaggagaccctggtttgattcctgggtcaggaagatcccctggagaaaggaaaggctatccagtccagtattctggcctggagaattccttggactgtatagtccatggggttgtaaagagttggacacgactgagcaactttcactgacacttgtggaataccaaatcagtggctgttcggaatgggagaattgtttagtggtgtgaaaaaatacatgttgaacttatcattaaagggataaattatatgttaccttttatgatgtccagttggtttggatgtagaaattataatgaatgtcttgatataaagctgtactaaaaaaattatcaaagtaaggtaggatagtgacctgtactatttctgacacttttattgaaagtcagagctgcctattagtgagtttcttctaaaggtcagaaatacacagaatggtatatgcagctctcaattatgtgcccacacttaacagagagaagctaattaccttgaccatatgcttcctccctttttcactgggagtctctcatgttttgcctttgccctcttcttgtacacattttcttttaattgccaccttactatcaaatgaaaggaaaatattgctgtagggttgggtggaaattatagggttttcaacattccccagatgggcgtggctccctgacttagggactttgctttccagaatctaagtttgaaggttgtggcccaattcttaactcagagatctatgaacaacagcacagcatgtggcttggaaaacaggactttatacaaaagccctggagtaagagaaggacctctggcttcctattaatagttcttcagctatgtggtcatggcatgtaaattcactcagcttcaactctaaagtaagttctgtggattagttaacctctcctgtctgctttagttgtaacttcttgcatctacagtgtagatgatgttttaactctttttcgaggcttcttcacccccatccccatccactcccaggaacgtgttaggaggaatcttccattgaaatgtacattactatcattcgtgttcacctttggatcttcccccagatcacaggcctgattcctatagacaaaactctgccttattcgtctttagacatcaattctttgcataatgtccagctcatggcagacactcattcaagtaactatttgtgtgtgtgtgtgtgtgtgtgggagatagctaaaaatcagtttatagttattttctctttttttaatattaatttatttattttaattggaggccaattactttacaatactgtattggttttgccatacatcaacatgaatccactcaagtaactttttaaagaagtgatttaatgacatcaatcattcaaacaacagtttcaagcaacagtgaaactaactcattttcctgacctcctgagtctagtactgatattgggaagacctagaaaggaaaagagtatatttttcacattgcacacataatggcatgaacattaataactaagatgattgaatgctaagtgtaaacccataagtgaaattatcttactgaataggtgcaacaaacctctgagataggtatacttaataacatcactttaatgacaagaaaattaagacctagagttacataatatgcttaaactttcacagctagtgaccagggaagcctgaattatggttaatctgacaccagaaccattgtttaaccactgtggaattctgcctccaggccccaagctttataggcaactagtcagtgagttagggttccaatcttaaacctccatttccagcatgttctgtcagtcttcatgaaagcaggatctgctcataatagctaaccatagttggacttatctgcttgtaggtttttgaaagtgggcaaaacttaattcaataaaagttgcctttgtaaaatgtgagttaatgaactttggatataccaaattcaagactcctctgaatcagtttcagtcactaataacagcagagcatcactagttacaaaagagtatgcataaataggtggctgatgtaatcatgatatttccattttattagaaaaagatacaatcaggaaataagatatggtgaaatatttccagatgattaagatacttggataatataataatggctccagatagatcttaaaagaagaaatggggtgtcaattgaaagaagtatatatttgcttgtgttttatgtgcctgagtgtgtgttttgtatggaaactaataaacaatatagactccacatatgtgtgggcatgtctaaagagtgcctgagatgagctaattgtttatcctttccctttgtggactatcaccagaatatcttttcttatgtcttaca

SEQ ID NO: 56818 - DNA, 2621 bp, Bovine  19866880702140
  misc_feature (1)..(1): n is a, c, g, or t
ngacaggggagcctggcattctgcaggcattgtgtagcagagtcttctgacttactgacaacaacaacagcacagtgataatggggaccctgaacttgtaactggggcagtgtcctgggccaattgccaagttcctcaaagaaaaccctgtgttaatggaaacaagaaaactggagccaatccggatctctggaatgaggttgctgcaaaatgggaccagatagaatgtgtgttgggaaggcacctgggtgattcaaaaaatgaaaggcctgaagaaactatgaaaaaactatcaatccaattataagagtacaccaacatatgcataaaataataatggaataatagaaataaagaaataaatttgattgaggaaaaattataccacattcactgtaaatacagaagatgttcaaaagaaaagaaagaaatgagaactgaaatcatcaaggcagggcatatggggaaggtggagttagagggatgccttgaaagataaactagtcttgatatatgagggacaaaaatttataggaagttttttcatataaagagtgaaacttattagacaatattagtgttgaattgttgctttttttgaggttattgcacacagaaaagattatttaagattaatacaattttaaaattaatatttaattgactaaaggttacaaactgacaggcttagcctttttttgattttacaaaccatttagatttaatttacaaatttgtgatactatttatatatccagtaaattttaactattacttttaaaggggattttacatcttagttaattaaatcccattaaatattttaaaatgcatttattcatttaatacattttgcttttcttttatatgcagttcagtaatctgaataacaaaaaagctctccaggaacttaaccaattcttataaacctaaataaattacagacataaacacagtaaatctaaaattatcataaacattatattatttccaaaacatggtagaattatcttgcttcttttaacttaaaattataagcttaaatcaattatttagatatacattttttaagatatcctggagatttattttttaatttacttatttttaattggaggataattacttcacaatatagtgttggtttagagctcaaacacagtagttaggacacattttaaaactagaattcaatagcttaaccagtagatttgtgattttcaactgggagtagtattactgccccctggggtgtatttggaggtatgagcaggtgcttcaactgtcacaatgcctggggactaccacaggcgttacgtgggtggtcaccagggacatgggaagctcctatagggagagatccaaaagcatgccccttgagtgcattagataatgttgtagtttggattcttacagaagctgactctgaccgatgattcaaattcaactaagttatttggaagttaagaaaacactggtaggtaagtcagagtgagacaggaggggaaataaagcaattgttcagtcgctgacttgggtctaactctttgccgtcccatggactgaagcatgccaggcttctctgtccttcactattttctggagttcactcaaactcatgcccagtgagtaggtggtgccatccaaccatctcatcctctgtcatccctatctcctcctgccctcaatctttcccaacatcagggtcttttccaatgagtcagctgtttgttttaaagagtgctttatcaagctaagggtaacctgagcataacacaactgtgtgaactcaagagtcaacatataacatgggtctgtagggtatcttaccctggggatgagagggctgggttctgacacaccaacttcattgtcattgattgagggctgctccaggaggcaggtttcccacacttcaggcaaagcaaagagaatccaccagagaagtctcctaagggcaaaaacaaaagccagatgctttgtgcttatttctgtttatttgtttgactcttcagattgtagcacattgaatggaaatcaaatgagtttaaatatagggatttgataaattgcctctttaactttcctttgatctttaattggagaggaatcacgggaagaaagactgctaatccaggctctgaggcatcagagaacttgatcatctagagtttgatccccatttgcctcccagagtaaacaatggtggctttgagcaagcgagccccagaaaaattaacaagaccttggaagagaaaggtaacactggtctcagtcctcaagaagtcatttctgctcattggcacctgttagactgaatgtgctggtggacggtgatacaagtcatactccccagcctcccgcagtccttggaaaaggctctggggccatgaatctcatggaaaagtgccaatgaggaaaaaggaagatgagcagagattacaaatgtaaagcaacatttattaaggtctgctgctgctaagtcacttcagtcgtgtccgactctgtgcgaccccacagacggcagcccaccaggctcccccgtccctgggattctccaggcaagaacacgggagcgggttgccatttccttctccagtgcatgaaagtgaaaagtgaaa

SEQ ID NO: 56819 - DNA, 1879 bp, Bovine  19866880813698
  misc_feature (1)..(1): n is a, c, g, or t
ntcccctttctgacttattttacttaatatgataatctctagttgaatccatgttgcttcaaatggcgttattttgttattatttatgactgagtagtactcttgcctggaaaatccccatgggtggaggagcctggcaggctgcagtccacgggatcacaaaagagtcagacacaactgaggggctttgctttcacttttcacttttgtgcattggagaaggaaatggcaacccactccagtgttcttgcctggagaatcccagggacaggggaccctggtgggctgccgtctctggggttgcacagagtgggacacgactgaagcgacttagcagcagcagtattctactgtgtatgtacatatataacttctttatccattcttctgtttgcagacatttgccaagacagacaaatgccaagacatgccaagacagacatgtcttggctaatggccatctaagatagtgggaattctttgaaacgtgtctcctagaaacagaacaatggtttaggaacaacttattattctcttgctctacacacatacttctttttttaatcaaaaactttaagatttggaaatttgaagtttataaagatattcttattggcttgggaaatgatgaaaatacagtaatatcaataacttctcccactgagaacaatcaatcagattgtcatcatatataactcttgggcattttgcctactatgtcaactgtctcaggattctagcccaggtggtagctttaattatctccattttttaaaaatctcctggcaaaggaaaatctttctaattatttaataattttgattcattctgggataaatttcagcatgttatattttgccatcagtaaaagctatgtgctaatttcattttaattgtcactctttaggaggctgttaagaccaaggaatgttacttagagcagaaacttacagaatatgaattgaaatcaaatgactaaattcttaaagaatatattgatttttgcatttcattgcattcttattttaacatatattacatatgttgttgccatacagtttttgttcaccactgtactccttaaaaatttgcctggtatgtggtaatatgcccatcaaatatttgtaaaaattgttattgaatgaaaaaatggatatgcttcattccagatatagtgggtgtgtgctcagtcacatctgactgtgaccccatgggctgtagcccaccgggctcctctatccatgggattttctaggcaagaatactggagtgggttgccatttcctcttccaggggatcttcctgacccagggatcgaatttgagtcccctgcatctctaccactaatgttttctcctgctttgtgctggttataaaaatgcttcctaatgttttagattgtaccagaataaaaacataacaatttaaaaagtataaattcttacctggactcacttatcccaaatggtggtgaacctaataatttaagataaagtgttatgtagcaagggaaattgtgccaatctagctcttcttaagcatcatttctcacagtatgtaggtggttagagtgatatagaaaaagcacttttaaaaagtatggcttgacttcacaggtttccagtgcaattatttgaagagatttcagtttaaagaaattcactctgtaactattgagagctttggcagagcacatttcgtatagaaggatttatataaacctgtttccatagtacctaggctctctgaaaccttgctttagaagaaaacaaatgaaatatgcaagaatattaggtgatttccatcaggatatgttcactgaacacgctttgttaacactgtgctcttcttgagaatccaggaagataaaaacactgat

SEQ ID NO: 56820 - DNA, 1683 bp, Bovine  19866880886834
  misc_feature (1)..(1): n is a, c, g, or t
ncaggagttttgttgcaataggaaaaagaaaagagggactgcgggctggaaaagtaggattcagagaagcagagagacttctgttttgttttttaaggttagtcagtaacaacatgttaatatgctgataggactgatgcaagaaacaaaaaattggtcatagaactgagggaagaatggctggagcaatgtcttttaagggaaagttgatcaaatgtattaggagagataatagaatatgttgaattgatataataatcctgatgtgggtagatgaaatatgaaactatttatattttctaagtgaaataggtcatcagcagaaagtgagaactgggtcaaaagttgctgggagagagaagaaaagtagacataatttttccgaaaagagggaaactaatttgactaagacatgttttctaaccactgaggtctactaagacctctgttttttgtttttttggactcatttcaacaaaactctaaatttaacttaatcaacatttactgtgaatgataaggatcatgggcagaaagcttctgagaactgctttgatataaaggccagaaaggttggtgtttgacactggttacaaaggcatgaccttactctgggaattctttagtactcattagagaggcattttcatgactcagatttagcatccacttagcattcatagtgagctgagacctttaatggaaaatataaacaaccattctcccctgcttttatggagttttataggctaccctgtgtttctgtcaagtgcctaataaagacaagaagaacttgttctaaattgctattgtaacaatgttcttactgggattttgttactaggaagtttaagaagtactttgccaataaattcaaatatacctaataagtttacttcttaaattatctaattcaataaagattacttcatcttgagacatatgccttcctggaatccccataatgctaatgacccctcattcatcgtctttaatttcttatgagaaacatattacattttcttcttagaaatctttatcctgatcagagagtcaattaaagagtgattaatcttatttcaaggtaggaaaatttctcaatttgaattgcagttgtagttctactttcaaattctttagtatatgaaaggggacatagcttacataagcctcattatcaacactgccattttacaatgatgtctgcatttaccttagtaacatggactgaaaaaaattcatatattctctttctttctctatttgtttaatgcaaatctcagtgtttcttttccccaaaaatatttatattcattgaataaaaagtggctgaggtttcttaactaaatttataaatatctttattctctgaatttggctttctattactatattagtattcttaaactgttttgcttacaatccttcctaaattccattgtgacagttctcagacattggtattcttttgaagccctatttcttttgtatagatagaaaaatagctagaaaacaaggttaaagcctctttccacctacaagctttgaaataacaatctgaaagtgtcacacaacatctggctggtggcttcctctttttagttatattaatatagaccatgcaaattgatgctatagtattaaataacagaacctgaattctggttttgttgcaccttttca

SEQ ID NO: 56821 - DNA, 808 bp, Bovine  19866880984357
  misc_feature (1)..(1): n is a, c, g, or t
ntgacgagaatttctgtgatgctgccaaaatgttcatggacagaggagcctggcaggctacaatccctacagttgcagagtcagacacgactgagcaactaaccttgcattctttccattggcaaatgtacaccataaaattggaggctactgcattctgagtgtctgagtcaggatagtggagaacagagcctgccaagctggcttgtgataaaactcacttgcatttatcataacagaaaatttgttgaggtttccttaactagctctcagctgtctaggtgctgcttttttggtggattagcttccgcaagacagggtgcttcaaaagacagaagagctagaaatagtctatggtatagccacaacatactctgtcccaagagtggtggcaaagggactccagtcccacccaatttcctaaacctgtgtgcattgcaacttaaaaatccacaccaatctgaaagcatatggatgccatttatttcatttcctttgcagaagagtactttaggaaacacttctcactttccccacccctctgtcttatcatttgaaggctacagaggaattaaattcatcttgaaagagtgtttatgaattagattgtgaccattacttaaatgattaaatactcaagagagataatgcaacccagagaccatgtcacaagagggaactgtggttatcgtcaattactgttcattttctataaacatggctatgagccaactttggaggggaaatgtgcagttggtaaatgacgtatttggtatctccatctgtttctttccttactcctttagca

SEQ ID NO: 56822 - DNA, 1287 bp, Bovine  19866881003315
  misc_feature (1)..(1): n is a, c, g, or t
ncggatactggcacccatgagagctcattccttccttccaagctaggttttgcagaatattactcctggggaagctacttaatgggtcttcccattttctatagaatttttctcccttaaagaattgcccacttaaatatatagtcatttaaatttagtcaatgaagatggagtgtcaggtcccattggtcactgtctgtgaagctggaaaattatcacaaaataatggaagtatatacaaagagaaaagggaacttgctaagtaaagacaacagatgaacattgtcataaaataacactgactctttttttggaactatagattaagatgtccccaacaggctgttttaaagtgccttcgcattctgagaaaaggtcacagttgtgatggatgtggttgctcctttcttttgtcatggtaaattaacagacttcattaggtgaagtgtgataaataatgaagcaatagaaaacagttgatctagatctagagaagcaaggagaagtttcaattctagcattgaaatcatgtttattagccacatacatgatcttggacaaatttctcagtttctttaagtctcagattcagcactataaaatactaactctcaatctcaagtgttttggtgaaactgaagaagatataaatcctacatatgctttaaagaaacaattacaaagttcaccatgatttgctgattaaagtaggaatattttaatttatttgtattttgtgctttacagacaatttatccatttctctcaacaccacagtgaactaagccaaggaacattacatgacttgcctgaggtcagaaaacaaataccaagctgagcctgaactcctcttgtctgcctgattctcaagtgcaacttctgtagtctcttcaatatatcatgtctgtagttgtctaacttttaaaacgcctccattgattttgctttcgcaaatcgttcacattataatgtagactgtaagggccacaggttgaagtgcaggatgaggagtgaaggcagaatcttggaaccagaaagcactgtcaaagtcatctaggtgaactctttgccttatgtaaagctcaccaaactattccagacacattgtcagggatggaattaacagctctgctaactcctctgctgcctagccatgcttgctacccccagagttcctccttacatcatttgaattctctccaactgcaatttatgcccctctcctcttattgtggcctcatcagagagggagaacagatggtcaccatcctcatataatcatactgg

SEQ ID NO: 56823 - DNA, 1694 bp, Bovine  19866881089006
  misc_feature (1)..(1): n is a, c, g, or t
nttctgtatgtttgaaaatgaaagtgttagtggctcagttgtgtccgactctctgcaaccccattgactgtagccccccaggctcttctgtccatggaattctccaggcaagaatactggagtgtgtagccatttccttctccaggggatcttcctgatccaggaatcaaaccctgggctcttgcattataggcagattctttgctgtctgagccaccagagaagccctctgaaacaccaggatagtttaactgtatgtaaacaaaatgttccagttcattcaatgtttcctctgcactgtattttccacttctttatattcatttgattaaactttgtgaaatttcaaattgaactgaatgtcatcaaattaaggaattatggttctttttaatttgtgtgtagtttttacctgcactgcccatgggtacacagagatatctgtcactgagcgcaaaacttgaaaaggcattcacatatgtttgcttgatgctatgacaataggcactgaggatttaaaagtggatggtatttatttcactagactgcaaatcttataacaacctacagtgtatatgttacaaatgatttgtggaaatatgatcatttgcaaataggcacattaatctgcaaatggccacatcaacccagaaccagttaaggctcttgaaaaccattaagactattagttttgtccagagataagcaaaataaacaaattcttgctgaactggaatcagtcttgctgcctttcaaaaccctctaaaggatgatgaagcccaaagctttcactgatgttttcttttattgttttgcttactctgctctttccaaatcagaggaacttaacattcgaatcactaagtaagctttgcagagaccttcactcctctggatgacttagaaaaaacaataataacaataataaaagcttaaaagattcttgagatttgggctgtgatcatttggctttgtgcaaaaagataagataaattttatctggaggcatagctggaggcaatttagattaaaacaaattcagaataaaagtaactacattatttacctttcgataagctttattttacagatttgagcacatctgagaggctcgatctgcttccagtaaaataaaagtcaaaatatatctaataagaacctttgactttgctttgaattgaaagactcacacagttgaaggagaggagaatccaactagggaagactggtgtctgtatttccctttatatacagcttgctaaattttagtctttttgacctgtttgttttaaaaaaacaaacatgtgataggagtatgttgcaaattaaaaactgatttgaaagaagtttacaagctaaaaggagaacttgtatttgataggtttaaagaatttaatccgatgtagcatataagcccccctccttaattattcatgacattctcctgcttgattctacagatctaccctgctgctgctaagtggcttcagtcacgtctgactctgtgcgacccgatagacagcagcccaccaggctcccccgtccctgggattctccaggcaagaacactggagtgggttgcaatttccttctccaatgcatgaaagtgaaaagtgaaagggaagttgctcagttgtgtctgactcttcacgaccccatggactgcaacccaccaggctcctccatccatggga

SEQ ID NO: 56824 - DNA, 825 bp, Bovine  19866881132823
  misc_feature (1)..(1): n is a, c, g, or t
ntattggggcttcaactttagcatcagtctttctagtgaatattcagagttgatttcctttaggattgagtggttgggtctccttgcaggccaaggaactctcaagagacttctccagcactatagtttgaaaacataatagaaaaatagtgaaataatttaatttacttaagactggcagtgaaatcataataggagtctagggttatttagacaaattcttataacattattttgttttccaacatgtatatggtgtcctttactttaagaaaatttccacttgaggatttcagagatctacttgataggtctatctgatacataaacatatatatatatttcttacatggacatatttgtgatatatgcatatattattatatttgtgcgttttatctcatatctttttattaatttatagtgataatttgtcatatctaatattaaattttacacagatacataatatgccagtatagatattttatttttcttcaattcttatctttatttatggttattcgttaaaacttattaaccctctctactcagataaggaatgtgaaaaaaaatactcacagcatttaaaaaccttacaaaagaacctctccactttaatcacatacgagatggattcataaattgaaacctgcttaattggcaattaaaagctgtaggacaatgttgtctctctgtatttgcagaattaagttccagctgttttgaaaaagcaaccagaagattgagagaaactgccaagtatccggagagaaactgggaagaagagccgcattagcttctgtattctaaagtcatgcatta

SEQ ID NO: 56825 - DNA, 2552 bp, Bovine  19866881139990
  misc_feature (1)..(1): n is a, c, g, or t
nctgtggattttgatatctgcggggtgtcttggtatcaatccctgaagatatcaagggagatctggatatgtaatatccagaagaaaaacttgagaacaagaaaaagacatttcatactctaagtaagtgctgaatagttaatagataagaagtaatcactaatttttaaaaatgagactaggtgcacaccagaggatactgggtctatacatcacagatcactttggttgtttcactgacaaggaagtgatttttgtaactgacttgaattgttaagctaagcatttatcaaaagtacaggcataaagtatagatcaatagttgtaaacagcaggggtttgaactgtaatataagcaagaacttacaacaatcagatgtatccaaatcctggttgtatctagggagttaatgaaccaaagctcttacaggtatgcaagatagagtagatgaccttttgataggaacattacagatccacaattgggcaggctatttagctgtctcatatgtaaatagcctttaaagcagagagtctaggaaatcattaattccgttactcatccaatctttcttgagaatctgtatattcattcatgtgataagtactaggcaaattgtggctctttttagacaatcacaatatcatatctgtaaatatagtaactggtgacacttaagatttttctcactcttttgtgcatacattataagtcgcattctcaaacacctactaaaaaaagaaattattgcatattgttactttttagtagaattggatgggagggggaaaatttcaaagaaaataagtgtgactagttcaaaataggaagagaactacaaatccttaaagaaatggactctacaatccttaaagaaatgaaaaaaagaaagttcccttattaagaatacaacatccataaccacattctgctgccaaacacatgtgtacatgtgcagaagggcacaaaagcactctaacctgggccatgtgtaggatttacacggcaatctaacacaggggcccatctgcttgtgaacaatgaggtcatcctgctgtgtttttccggcactttattgactgtgtaatggcgtttgatatcgctaagacatggctgttctagaagcactggtgcattacagcagagaggtgcattgtgtgtgatgagtcatgctcaacaaatttgtggtcggtctctacacagtgaggaaaaacaagaacaagatccagtaacagagacctgggaagcaagaaagttctcatcacaggcacaagggcacctccgttttgtgtaagatggagaaggcttaagtacactaagttttccacagagttccagtaatcttcaatagttcaagtcctggatcaaatgttagtctaataatacttccaccggagaaaaggcactttcatctgtgagtcactttgcagaagggataacttctaaacattggttaccatgaggtttggatgcctgccagaaaggaagttcaagaaataacatgaccaaggcaaagagttcgatgagaaaccttcagaatttttggagggaggagaggaaaaacaatctgaaacttgagtagatccagaaaattagttcatttatgtaacccctggtgattggcaagaattttctggctttcacaagccaatcctcaaatcagaaaatggacgcatctcaagggaaatgaatccttagaaggaaaagtatgtgttcctcctcaccactccatgctttttaaagagaaaaaccatagcctgctaccagaattgtagcttgacaaagtaaacactccctcaaaactcccttctttctctagggtgagatgcaagcatctttctaccacacctgtgaaacctccacagtctggctccagcccacttcctacattgctttcctgccatcgttgctttccatgtccccataccccagccccactccactctgcacagagctccaaggagccttcatcacatttcagcctttggcacatgttttcctctaaccagcatctctacccttacgcgcttgacaaaattccgctcttctctcaaaatacagctcaaatgttcttttttatggaaggacttccctgggcagtcccaattcaccccactttatgaccgattctcccactcatcatttaataaaatcaaggtgctctttgcacttgctctgtaccaggaacaattgtaaaagagatttttataaattaactcagtgaaacctcacaataaccgcatggagtaactacgaatattatctccactttacagtggaggggggcttcccttgtggctcagctggtaaagaatccgcctgcaatgtgggagacctgggtttgatccctgggttgggaaggtcccctggaaaagagaaaggctacacactccagtattctgtcctggagaattccatggaccatatagtccatggggtcgcaaagagttggacacaactgagtgactttcacttgcttgcttgctttacaggtgaggagagtgatgcacaggagaataaagatctgtccacaatcataccacatatacaa

SEQ ID NO: 56826 - DNA, 1713 bp, Bovine  19866881142178
  misc_feature (1)..(1): n is a, c, g, or t
ngaagctctgtgaaggtgacctttggagccggagtgggactaattagcctatttacatgaaacccatgatggagcatgatatttaatcacatcgttttggcaaataattagaagataaatcactcaaacaatggtgctactgtatttgaaaaacacagcacaaatactgttgacagcatttacaactgcacccattcatttaatttttcatttaacagaaaagaaagcagaaggcagatttgtgcaccagccaatctagtcttcaaattctggcaagggttgagcttgggcacacaccaatcttgcatgaaataggactctgcttctcatttatagtgaacattgaaaagttataaaatgtaatatgtggtttggggtcttttcttgttaactgacggtaaatactagcctttgggttatgtgggaaataccaatacatgtttacggtctgcaaagggttgcccagaaattgctgtggaggcagtctcttcagattttgcaaccccctctgagttgtttaaatgttaagaacaagcctctttatgaatgcttttattctgaaacatttatctttgaatgaaagcaaaataaaatactagggaaatggttttaagtacatgtatgctgttcttgaatgccctgtccatccgtatttacaaaagattagaagaatcagaaatttaatttttaattaaaagttaatgagcttaaaagctaaggagtttaaattacggtatatgacacatatactttcataatggcaagatcatttcacagtttatttcaagccaaaattaggccagatctagtctgtatttttggctttcaagtcaaatcacataaatgtacgtgtatacacatacacacacacacatatgaatttgtgtgtgcctgtcaatgagcttttttctcaaaattggttttgtaaggagtcaagtgatacgataggtgtgtgaaaaggcatgtgatttgatctggctgctgagtgaagccttgaagtattgctctatgttattaaataagcaagaaattcatcatcagcaatttgcatggctacattggttctaacttaaaatggttccagggaaggataaaattatactttttcttactgattataatttatattgtggagatctggaatacctggctcatttctttaatatgtatcccttgggatactgctttcttaaagagcaattttcttcccatgatttttacaagttaactatgaaccatgttacatcatgtttgcccaaggaatttaatgatttcttcacatagccttatacctcaaaggattataaatacttaaatgattaaatctaaaacttacttttcctggtatgattaaactagcatgatttctttaggattccaaatataggtgataaagctgaaactggaaatggaaactgagtctcagaaagactcagcaacttgcccaggggacatagtatgtagcaaaataattttctgaacatggatttgaattcatttcttccatgtactgtgtaggttctaggtttggaaaagttcagagacttactatcatggtccttatgtaattactagaacattctggaggtccagttctctctccctaaatatctctccaaacttagagacatattcacacacaaaatatcaccccagtttcacccctacccttggaagattgaaacgcatgtctaggacatagcaggacaagag

SEQ ID NO: 56827 - DNA, 2086 bp, Bovine  19866881175455
  misc_feature (1)..(1): n is a, c, g, or t
nagaaatcaagaaaacaatcccatttataattaaatcaaaatgaataaaatacataggaataaattttaacaaagatgtcaaggtctatatgtgaaaactataaaacacttattaaaactgaagtgaaagtgaaagttgctcagttgtgtctgactctttgcgaccccatggactgtacatggaattctccaggctagaatattggaatgggtagtctttctcttctccaggggatcttcccaacccagggattgaaggaggcaccaataaatggacagatatatcatgtttgtggattggaagaattaatattattaaaatgtctatgttacctaaaccaatctatggattatatgcagtttctctgaaaattctaatggcatttttcacagaaatagaataatcttaaaattagtatggaatgacaaaagatgtcaaatatcaaaagcaatcttgagaaagaagaacaaaggtagaagcatcatgattgctgatttcaaactatattacaaagctacagtaatcaaagcaatatgttattggcataaaaagctataaataatcataaataccaacagaacagaatcaagaaataaatcttcacatatgcagttaactaatatttaacaaggaagccaagaatactcactaaggaaagaatagtttctttaataaatgttgctaggaaaaatgtatacacacatgcagaagaatgaaattactaatagatccccacttacacaactcacaaagatttagttggaatggattataggtataaacataagacctgaagccataaaattcttagaataaaacatagagaagaagccctttaacatttgtcttggcaattttggttatgataacaaaacaaagcaactaaagccaaaattaaaaagtagaactacagcaaattaaagtgcttctacagaacaaagggaacaatcagcaaaatgaaaatgtaacctacaaaatgagagaagatatttttaaattgtctatgtaataagggatcaatgcctccaaatgtatgtatacataatggactcatagaactcagtagctaaagaagcaaagtaatgctattaaaaaaaatgacagaggaactgcatagacatttactcagggaaaacatgcaaatggccaacaggtacatgatgaggtgtccaaaagtactgatcatcaaggaaatacaagtcaaaatcacaatgaaatattacctaatacctgtaagagtggcaatcatcaaaaacacaagaaaaaccaagtgttgttgaggatgtgaaaaaaagaaacctatgtgcattgttgatgggaatgtaaattggtagagccactactgaaaacattatgggaggctcctcaaaaaattaaaagtagaactagcatataatccagtaatctcatttcctggtatatatctaaagaaaatgaaaataaaaacagggtatcctaaaatttatatgctaattataccaaaattaaactgaaatttaaaaaataaatggagcactttataaactaaatggtactttcactttcctttggacatctgagaatatctctgattattacaaagtaaaaccatttttgtgtgtagatcaaagtttcttctattcctactcctccttctcctcctcttctttctctttttcttcttcttcctcatcccctgccccatgccttcctctttttcctcttctttgatgatgtatgtacctttctgtcctatgccaaaaataaagaaacaaacaaaaactcttctatctcaaccagaggttaaaaaaaatcatatctaagcaacttatcttaacaatcagcaggacatttgtttgaaaattttacatatggtgaaatgaatgaaagttcctggaactttgtaaggtgtgactcagattcagggaaaaatatttaaataactagtaaactacttatcttgctaggcatgaagtatttcacaaacacacacagaaaaacaaacaaataaaaacaaaacaaaaaacttttaatattaccattctaatatcataactatgtgcacaattagattttatttcatcattctagaatttgctttctggg

SEQ ID NO: 56828 - DNA, 1149 bp, Bovine  19866881201796
  misc_feature (1)..(1): n is a, c, g, or t
natgacagaatcccaaaaggcattattctcaagagggaggatttatcgtattgaagtaggacaaaatacggattagaattcagtgctcaagtaaaaaaagcttcaagggtcacattaatctgaagtttgatctgagataactccttccactgcagagatgatgcctagtgctttgcaaaataagggtggttgatggataatatctaagcttccatttaaatctatttttaagctctatgttcatctttgtagtaatctttgattattaggtattctttattctgaaaacaatagtttggtctttcataggataagttaaacaggtatttcttcccatggagatattaaatcataggacaaataaaaggggtcttggaacaataatatttcatattaaaaagcaaaagcacaaaccatgcaagcaggcatatttgcaagcattattcagtgtgtatttgtatattattaaatatttccctcaattccacaaaatctggaaaagaaaactataaagaaaccaaagcattctttattacctggcaaaacttaatcaaatacccctctggaaaagtggttcatcagtctcttaagaatattatagcaattgtctttgaagttgccagctcctcctcgatagctggcaaaagagacaagataatacttcatttaagcacaatctttattgtattatcaaccgcaggccctgtgacctgtgcaccaggaagcagttccccctggctcaccaagaaaggcaagagaaagtgcttggaaccgtagtgataaatgggaacaattcaactgctcaggaatttgaacctgctatttagtgagatctacacaagaaagttgttactgcttaattgctaagtcctgtctgactctttggaacccggtgaactatagcctgccaggaatttttcagaatattggagtgtgttgccatttccttctccaggggatcttcctgacccaggggttgaacccctgacttgtgcaagtctcctgcattgcaggcaggttctctaccactgagccacttgggaagcccaagaaagattgaaggcgaaaggaaaagacagcaacagaggatgagatgttcagatggcatcatccacggaatggacatgaatttgagcaaactctgggaga

SEQ ID NO: 56829 - DNA, 537 bp, Bovine  19866881245620
  misc_feature (1)..(1): n is a, c, g, or t
ncagtggggaaaaaatatccagaactccctgaaataaagaaagccttctggttacaacgtgcgttgctagggatttatttttccccctcctttcctaagagagtaaaatcgcacagatatattgaagctcttggagttttgtgagcgaagtgtgtactcaagacgtcaactgagcacggtgttaagtgcgtgactacaaagaaagggttaaacggaagggggtgggtcggagatggggaaggctggcgaaaaggttcacaagcaccattttccaacttacaaaaactttgaacttttaagcacccaaaaataaacatgtgtgtgtctgtgagctcaggcagatttatttcggtatttttttttttttttaaatcataatgtctctgtttctctctcagtgctttaaacactgagcagtcccccctaggatcgcgtggcaaaagctgcagcaaggaatcggctgcgctgtttacgagcagcgttcaaagcagctctcttgtcctccacccactaccaacgaccgtcttcgagcctggg

SEQ ID NO: 56830 - DNA, 1649 bp, Bovine  19866881246284
  misc_feature (1)..(1): n is a, c, g, or t
ngagcagtagtgccttgaggagctggggaaatgctacaaacacaagggtttacctttccgaacacaccccaagatgatgtggctttggaggagtccggcagccaagaagggcaggcttagccagcattcctgataactatgggattagggtacctgccaactttccaccagcttctgtctccagataaagaccaaaactgttttaccatatataagaaaaaagtccacaagaggaactcttttataatttttttggatttcaacaaaatttgcccaagtgatgtttctgctgtttttcaagttaaaatccaattctcacacttgaaacttttgcttagagctataaaatacatttggaaaacaatgttaatataatattaatatggaggaaaattgctatttattagggttaaagaaactttgtgtggatcattttattgccttgttaagaaaaaccttaaaactttgacaatatgtttacttcaacacttatgtattttcaatgttgatgattctgtaaactgaatatgggaagtttctgatttatagattgactaatttggtatagattgaagaaacagattttaaaaagtgaacatcaccctgcatattcactgaattcttaagttcttacttaaaatgacttaagcaatttttttttttttttttttgcttttcaatgatagtttaatgctaatttttgtgatcttctcaaatgcagtttggaaatccccttgatcacagctatgactaatttatttttaattgcatgctgacattgcttaacttcctctacattttggcagttttctccattcttttcagcaagattcagcaagattatttcagcaatcttttcatgagaaaaaaatatttactccaaagtgaaaacaggtttctttgtgggtgtcctaatatatttgtcactttccagttctagaatattttggcattgaaagtgtctatctgacctttatagaagtttctgagagttattatgttttaatattatttctaagatcaagttaaatttatttaaaatgttgatttctgcaaatactaatataaggagacagcatcaagtttaactgaaaatacatatttagattgtgaatgtatttatgcaggttgatgaagctaggatgcaaagggacaaatgagactgtgaaggaatatgtaggttagatattaagaattccatttttgaaaatgaggagattcaaactcagagagtttatgtgatatgtccaaggtgagagagcaacaaaacctaatgtttgcatccaacactcatgcttgttctactattccatgttgacttgttactttttggcatttctgaatgaattccatccacaaggggaaaaaatttgaaatggaataatgatgaaagatttctgtggctttgagacaatgaacaaaccaggcattagtcagtcattttcctacctcctcccacccatcttttaaaatttggtcaaagaccaaatttattttttgtttgttccagtaatcttgcagattgttctagggggaaaaaaggacaagtggaatgtaaatagaacatttgattcttgatctgatcaagaggcaatgtacggtatagagaaagaggaaaactacacacataaaataaggaaaatattttt

SEQ ID NO: 56831 - DNA, 1062 bp, Bovine  19866881313573
  misc_feature (1)..(1): n is a, c, g, or t
naccctatggactataacttgccaggttcctctatccatggggattcatcaggaaagaatactggagtgagttgccatgccctccgtcaggggctcttcctgacccagggatcaaatctgcatctcttatctctcctgcattggcaggcaggttcttaccactagtgccacctgggaagcccacacacatatataatacatatacataattatgtatgaaagtatattatataatcatctgcatatatacataatcatatatgtatataaatatattcataaaattcatggaccttaacattttgaaaaacttagcacacaactaattcttaaatgtattcaaattattattcaagtgattatgcagttcatctagaaagtagtagttacaccataccttataattaataccagactgcctacacagaataaaattaactaagtttgtactctgactaattttcctttcagcactgtcactaagaaatttaaataacttcaacagtaggttttgtaatactcttctactataaggagttggtggaagcatctagttagtctttgaggcagtttcactgagcttgtggaaatcaatgtaaatatccccaaatactattgtaagtgcataaaacaaaaggcattgctatactgtgacaatgatagatttgtttctgtaattcattgaattattttgatgagaacattattattttgtaagccctcttcacattactataagatgggcaatttttttttaaattattagatcacatgaaatcagtggtgaatggtggacagtaacataattattgatatacagagtttatgcactgagcatctgagaggttctataaattacaagctgtgagatcttttaataaaatacctaattttttgtaataggctgttacccaaaatatcagttcctaactattggaaactgtaattgttacccaataaggaaaaaaagtatcttacagatgctattaagtatcttaagacaggatatccggattttccctttgggcagtaatcataagatcctttctgtaaaagaggcag

SEQ ID NO: 56832 - DNA, 2174 bp, Bovine  19866881379026
  misc_feature (1)..(1): n is a, c, g, or t
nttgggagaaatatcataacctcgatatgcagatgacaccacccttatggcagaaagcaaagaggaactaaagaatcttttgatgagtgtgaaagaggagagtaaaaaagctggcttaaaattcagcattcagaaaactaaaatcatggcatgcagtcccatcacttcatggcaaatagatggagagaaaatggaaacagtgacagattttatttacttgggctccaaaatcactgcagatggtgactgtaaccacgaaattaaaaaatgcatattccttgggaaaaaaagttatgaccaacctagagagcatgttacaaataagagatattactttgccaacaaaggtccatctagttaaagctatggtttttccagtagtcatgtatggatgtgatagttggactctaaagaaagctgagcactgaagatgcttttgaactatggagttgaagaaagctcttgagagtcccttggactgtaaggagatccaaccagtccatcctaaaggtaatcagtcctgaatattcattggaagaactgatgctgaagctgaaactccaatactttggccacctgatgcgaagaactgactcacttgaaaggaccctgaggctgggaaagattgaaggtgggaggagaaagggacggcagaggatgagatgattggatggcatcaccaacttgatggacatctgtttgaataaactccagaaattagtgatggacagggaatcctggagtgctgcagtccatggggtcgcaaagagttggacacgactgagagactgaactgaactgaacaaatattagcttccttccctctccttctaagggtaagattaatcataggaacgatacttctgttccactggtggaatccaaggcatcgctagttgggagagttgaaactccactgtcagccaatacagtatgtcctcaacacacaaacaggttctgctccgagagcacattcctaagtccacatctttcattaagtccaacaaagttcacctactaacaaaatctgccatttggtactgtactataataggtttataatattgtacttttcatacaaataatatataaaagcaaacagaaaaaagaaaacattaaactatagtaccttgaaagtacagtagtaccagttacatcaccactgcttttatgcttgtttctggacatcctgggcttgaaatagagatgctgtactctatatagtacagtatacaaaagcacaaccatttataaaggatgcatgcatctgacactttactctggacacctgaattaacttacgtgattagacatgtgaactcatgctcatatctttgaacgtctgcaccttgaagagtcatatgtaggggacttactgaatagtctggagagtggactgaccacaataaagtgagcaaaagaaagttagggaactctattatctttcttaactaatttctagaaaatgatctgttttattcctcaggcatatagcatgaacatgacttttcgtttttcataactcctagaaaagcctagtggttccagtgggaaccatcaagcggaattaaattgttatgtttcccagagttagaaaaaaatgaaggaaaaagtatatagaaaggtctatttcatgtaattctgccattacactattttcaaacaatcacttaagctctcattagtatagcctgggaatagatttctttcattctgacattgcctgagcctaaccctcaggttagacaccattgattttaacttccattgctctgtaaaacacatctgggtccttaattaataattcgctatgttagagacaaatttgctattgcatgaacatgcctgattgaaaacacagacataatgctcataaaatgttgaaaaaaaaagtaattgcaagtgagattataaattactcttggctaaaagcaaaaagcaagtatttatctttggagatggaattagcctttttttgttgttgttgttatctgatcaatgcttattaatcttcccagcctgactctctagttggttagggaagttaaaaggagaccctactttgttcacacaatctgttccacatttctacctttcttttctgtctgaaattcttataagtatcactattgtttaacacactaaggttgaatctatacagcaagccagttcaa

SEQ ID NO: 56833 - DNA, 798 bp, Bovine  19866881388842
  misc_feature (1)..(1): n is a, c, g, or t
natagcctatctttctctatgtattcacttgttgaggattcctacacaaagatctgggtgatgtttctcaaagattctagaccatgtgctgtgactcaggcaaagtttatttatattttatatgaattctgctaacttcataatccctataaatttctttattttatgggccttcttaaaaatgtaatattttagtgtaatattatctaacatggccacagaagagcagaaaggcatctagcattgtcctgtctaccatctggtcccactaaacatactgagtggcaaggaactatgagaacccaaatgtctacctcattgaccaactgccatgatcttgaagattagatgtaaaatgggtgaaatatttaaatagcaatctatattaatagcagaacatattgaaattgcatcccttgctaattgactactgacggaagtaaccatttggctcctattgagcaaatgctgtaaactgtctgctgcaatgaaatacaaatgtggtgtattggtttctataacttcttccactgtaaaattaaccttccatcctatctttcatttataaggtggaaactcattactttgaaaaattcaatggaaacatacaaacctctttgggaattacttgactcttaaaaactaaaccaaaatacacaggtaataaaagaaagtcttgttgctgtagaaaaattgcttgaataagaattttggtgtattattgtttttcagcaaaccaattatagaggctaaaattggaacctaagtgaatagctatttcatgttgctgaaagtgaa

SEQ ID NO: 56834 - DNA, 1089 bp, Bovine  19866881613513
  misc_feature (1)..(1): n is a, c, g, or t
ncttgcctggagaatcccagggatgggggaggctggtgggctgcggtctatggagttgcacagagtcggacatgactgaagtgacttagcaactatagtactgaaatcttagtgatttcaaacatgtatttattgtcttgcagtttctgtaggttacctagcttgccttagaagggtcttctgttttgggttctcacaaactgaattcagtgtggtagctaggactgcagtgtcatctgagtttgactggggcatgatttgcttcctcaggctcacatagttgttggcaatattcagttcctggcaggtagttggactgagggccagaagtctccatcagtttctagccatgtgagacttccccaaacagtgacttactccttaaagttggcaaaagacagagtgtcagaagaatgggtttataacttacaggacataatcacctacacataatcacatacatctcctcactgttgccagagtctgttggttagaaacaagttacaggccatgcgtctactcaacggaaggggattatgcaggagtatgacaactagaaggtggggatcaccatggtcacccagagtctcctcatatagtttttctaccaagttttctgaaaggaaactagtttgaaactagcatctccagttcaatgggcatgaacttgggtgacctctggaagatggtgagggacagggaggactggcattctacaaccaatgggtttgcaaacagtaggacacaactcagctactgaacaacaacagcatagcttttatcagaaagcacatgcttataataagagtaagatgaagttttaaaatctggtcaatgagaatttgatacatggctcatttgagttgagagtagggagctgtgtgtgaggctaagtttgctgtacagaatatgtctactttccttccacactccttacggtatgagggcacattattaaaatatttatacaacttacataactgcatctagaaattatgtatttgatgtaatctattcagccacattttatttttactctttcttttaaaagcatttttggcaacatgagctcacctgccttgcaaactt

SEQ ID NO: 56835 - DNA, 1105 bp, Bovine  19866881633361
  misc_feature (1)..(1): n is a, c, g, or t
natttttttcccgcacgtctagagaaagatccctccaattgtttaaagctttatttttgaccacaggccaagaaaaatgcttttctcaacttccctcatttatcatttttgtactggatcttcaaacaaatacccttatttctcctgtgatattaacttatttatagtaatgacaatatttatgtagtggcatcacccatgaacaccatagaatgtatgcataatattgatagagtgctaaatctcataatctcagtaccaatccttccctgacatgcggtcttgactagtaaataaaggagccactggaaagcctactagcatttagtggcaaggcctcagcaataggtttgcaggcaaagggggctctgtgtgtgtgttttgaaatctttgactaataagctatttatggagcaggatatgtaagaacagctttgtaaagctacttaagttaccctcagatcagagtctttttactctttttctaactgctttatagaactgagttttttcaaaagcacttgacagagacattcctctttttggccctataacttactgcggatatagagatgtgagtatcttggaatacgcctaagcgaatgcaatgggagtgattaaaagtttgggaagtagttcataaaggaaaaccagggaagtcaaagacaactgaagaggaaaggatgcttaataaatcttcatgttcttacagatatggtgtactgatggaaactgtgaatatatttccttttttctcattgacaagggaaaaatagtcatgcggaagctgaagaatgaagaaatgatatcagaaaaaatatatatttatatacatcatgtatatatatataatgtatattttataaatataaaatacataagaaaagatatagaatcgctctctaaagtattttttaaacatgataatttacaaaatttaattatgtgagagttggactataaagatggagaaggcaatggcaccccactccagtactcttgcctggaaaatcccacggacgaaggagcctggtgggccgcagtccatggggtcactaagagttgacatgactgagcgacttcactttcacttttcactttcatg

SEQ ID NO: 56836 - DNA, 742 bp, Bovine  19866881791625
  misc_feature (1)..(1): n is a, c, g, or t
nccttgcttttactgaaaccaacaaatggcataacatttgtcagaaaatgggatattttatccattaaagacataagtaggaaggagtcaaagaaacccatgaggagcagtttgtcggttctataccaaggtatataagccagtttgtacaatgaggcaatctgttctttctacacagagcatgtgaattattaatgaccctttcgacatttcatttctttgtagcagtcaagtaggtcttccttgtcacatgcttttgttggctataaaatgaaatgcatttctcctactgaggacacataagagaaaatcagaggttaaaatgttgtttaaagtctatagcaaggcaccatatgtttcaagcaaaattcagacagcaaatcttacctatagtaatcatctgtgggcacaattggaaagattcttcacagtaaaactccaaagtgtatgaaagataatttttttgacatttgtttcctttttcctacacatttcagggatttttttttctccacattttttaattaactttattgttctttgcttcttcaagatttcttaactagcagtggtcatgaaggtaaattgcattgttggggaaattaggcatggtgcctcccacctctctcagccttatttctgatgcttgggtagcttttcttctgtgtatactaactgtcagttctcttgtgtcctgtgcctgctcctgtctgcttggaaaatgcataagaaaatagatggt

SEQ ID NO: 56837 - DNA, 693 bp, Bovine  19866882081364
  misc_feature (1)..(1): n is a, c, g, or t
nattctagcacttgaaaagctttatagtttcttgatcttacagctgagagagatctcaatgacaaattcaaatatttcattttgcagaagaaagaattgaaatccctaaagatggggtgacttgactagatcccagctttatcttttgagatgcataattaaattatttaaaatgtgtaggttattgtcaaatgtattaaatttactgctttttctgtttctttcttctggcattatttatgaaatttactgtgtaaaaatgctttggcttcattatacctacatatattaatgcatctgaaggaaattttatattcaggtctattagtgcacaatgtaaattgaaaacagactctaaatggcccactgctaaattttttacaaacacgataggcccagtggaagcaggcagctgcactgacattctttctagggcaaaggaaaaaacaacactaagaaaaaatatcctggtttggtgttcctccattgccagatttattgacctgcaagagaagtcagtagctgttttgccccagtcaatattaatttctagggtcaataaatcctggtaatgaatggagaatgtgagtcaataaatgctcattagatgtgctcacaaaatgtgccacatataaaagaaaataataatcaatcaaccttatcaatgtttaaatattatttctgacacctttt

SEQ ID NO: 56838 - DNA, 2113 bp, Bovine  19866880352956
  misc_feature (1)..(1): n is a, c, g, or t
ntcacatcaggtggccaaagtattggagtttcagcttcaacatcagtccttccaatgaacacccaggactgatctcctttaggatggattggttggatctccttgcagtccaagggactctcaagagtcttctccaacaccacagttcaaaagcatcaattctttggtgctcagctttctttatagtccaactcgcacatccatacatgactactggtaaaaccatagccttgactagatggacctttgttgacaaagtaatgtctctgcttttgaatatgctgtctaggttggtcataaatttccttccaatgagtaagcgtcttttaatttcatggctgcaatccccatctgcagtgattttggagcccccaaaaataaagtcagccactatccatttcggtttttgtttgtttttggcttcccctcgcagcacacagaacttccctgagcaggggtcaaacctgtaccccctgcattggaagcacagagtcttaaccatgagactgcaagtgttaagaagtcccattatgttcattttgtagatgcagacactgaggcctcgatacttgtgtgcccagtgtcatgtaggcaggaagcggagaaaccagacttggtatttgaggatgtttgactatatgcttttgttcttaatgcctgggtatcctgcctgagctgaaaaactcccctcaggaagtcttgctgaactccaaatgatggggagccctggggttctggtcaccctgtactttttaggggtaaagacctctagacatgcagggtagagtcaagagggccttggggcagccaggctgagccagaagaatcagatggtgaaatattccccatgccctgggcttcctgggtcagccgcccagaaaggccatgtctgtggtgtactgccctctttcttgacttgctccacagccaaaaatctcaggaaagagagccagaaagggcgggattcaccccatcagtttattggtgtgaagactgtcttgttttaagtggagctggctgccccggaaggatgcaccttctctgtctgctagtctgtctctctacttccactctcttctctctttctctttcagcttataataattcctataaaagaacagatagtcagcagcctagggtttttgatgccatattcctggaacagttgatgcaactagattcattcgcctcaaactatctgggatgaaggaacagaggtttttcttggacagtttattgtagaatggtattttgatgctatatatatttttcttaaaatgtattctctagactacatttctggaaaatgaaatggaaagataaaaatacaattccctttataaattattagaataaacgtgttaccattactctgccagactgctgtaaaagtttcaaatgcttgctcttgactgctgtatttaaaaccacagtagaccagtaacggacaacctgcagcttagtcctgctacgcactttgagtagccttggtctagacgactggcggtgggagtgtggccacaggtggcaggtgtgtctcacggtcgacggtttcttcgatggacatggcctaaactttcagtggctgtcattgtcaagtgatggtgaccaggatgatgcacgggagtgtgtaagagctatccctcctcccccgcagtccatgttactgtggcagcaccatgtagaaaggagggtccaggcttgaggctggttgatagacactgcagagctcccataaataattgcctcgaggtttaggctctgggaggaagactcagagtcagtgtcttatctttgtctctgattggcatattggagggttatttggggaggggaatggagggaggccatgggcccactccacacaagcctgcctatcacggacctgagaagcatgatagcatatcagatcttctctccccttaaccttgtcagcctgccttccaactcagacagtgccagcagttgacaagaggaagggaggatgatgggaaattcctctcctggcaacagggaatgtgttacaggggtcccctgagggaaaggagcttgctctagaatcatatctgccaacaccttactcaaccatgcccgagaacaggtccccattcac

SEQ ID NO: 56839 - DNA, 2744 bp, Bovine  19866880424365
  misc_feature (1)..(1): n is a, c, g, or t
nggctgggccccaagggaaagagctgagacctacctttccgttaacaaaaatcttcaaagaatgagtatggaggtatgaagttttttacactttgaagcaaagaccataacaacaatgatgctaataatgctagtcaaagcgcaggctctagcagagcactcactagcatcccccatctgagatcagccccccgttcatttgtattgtcttttcatcttggttctttattgtgtccccttactgcctctcatgcctaaactagtgttatatggctatcaacaaaggaaatgtgttttattatcttaatggtatacaaatttaacagaaagttaggaaatggggaggaggaagtaagcatgttttaccatagatgttggtgggcactggtgtgggctctgagtctccaagagccacagtggaagccaccctgtcactcaggctgcctcgtgctgggagtggacacatgtgagagctggctgcatggatgggaagggaagatcccatgttggagacctcagtcctgcaaggtgctgaatgctgggtctgtggcaataagttgtatttcatgggtgggatggagaggcagctgttttttgtttttgttttgtttttttctcttatctggcagaaaagtcttttgacctaaaggccaaggaccagtgtcaactgcagctgaggctaccagccatgacccccatagagcactcaaaacaaggaaaagccatcaccaaagatgagcagaacttttcagcccttcctcaatccttgatgcaaaaaggcacaggccagttagtgcgcctgaaaaccagaagtaagcagaggaggcctgaccttctggagggggcgctgtgtaggtttacaggacactgggcttctgagtcaggatttctgcaggatcctgagaacccacccctgggctgacccaaccagcccagaagcagaggcgaggacacagcatcctagattagagggggcactggcaggttcatggcagagctctccccagcactccgacacacagacacccactcactcccgctcccttcccccaaggcctcttgctaatgagagcagatttataaggctgctcctgggacagagctgctcagctgtcaacctggcttccccccaggttctcaatggggcctccaatttccagagccaagaggcagggtttgactcactgaacattcgggaactgctgacatggccagatgccgtgcaggattcctgggacatcaggaaggacaggtccagcccctgaggggctcccagctagtggagagtcagacatgtgcgcaaataaccttcagacatgccatagttgacctgcctgccccaggccagacagacatccccaggaggctaaggatgtaggtccaaactccatgaagggccgtctcacacggtaccaagtaagtgggctctgctcagcccttaactgagccccactcacatgtaagcaatttgttcagtaagaaactgggacggtgatacacaaactactacatacaaaccaaataagcaaaggtatattaagggtatatgaagggaaatacagtcactattttgtaatacgttaaatgaagtataatgtataagaatattgaatccctatgttatacacctgaaactaatataatatggtcacccaactatacttcaacttattttttagaccactttttatttcatattgaagtacaaccggttaacaatgttgtgatagtttcaggtggacagcaaagggatatatatacatgtatccaggtggctctggagaaggcagtggcaccccactccagtactcttgcctggaaaatcccatggacagaggagcctggtaggctgcagtccatggggtcgctaagagtcgggcatgactgagcgacttcactttcacttttcactctcatgcattggagaaggaaatggcaacccactccagtattcttgcctggagaatcccagggacagaggaacctagtgggctgccgtctatggggttgcacagagttggacacgactgaagtgacttagcagcagcatgactattagtataatcttgtctcagtgaaagttaaaaatgcaactttaagtcatgagaaaactgaacaaatatatatattaatttagttatcatgagataaattatataatattataaagttttttgaaggctcaattgaattagcactcaaaaatatttatatatctaaattacttcatagaaatacctaccacagtagaatcactctataattttctccattaagcaataagccttgaaaatagttaacaaatatagaaaataatgtgtaagactttataaaatagaaacgcattcatataaattgactcatcataatatttataatattagagatcatacttaatgaacattattcaaacatatttcagcttaagactagcagatgaggctaaggcaatgcttttccaaacagaaatatcaaagtgaaggctgtttcttaaaggccaataattattttgaccctttaagccaaattctaataaataactcttcttagacataactgggatgttaagggaggaagggacggtatctattgtccttaacacacagaacagtgcttgtgcataaaaatgtattatttttacagaaaattcttaacctgagatttttgtactctaaatcattaaaaaatttaatatctttaacagtcaacatatatcttaaaaataattcaaaatttatgtcact

SEQ ID NO: 56840 - DNA, 2161 bp, Bovine  19866880521708
  misc_feature (1)..(1): n is a, c, g, or t
nccccaagggacctggctgcctagcttgctagcccctcccccatccatggtcccctcacctggtaatgtgccagggtgttgagtctcttccagtcattctcaatcttagtggtgatgtcttcatcctgcaggatcatcctcgccccgcttccttgtcgccactctgtagggggaacagttccatctcagacaggcccttgggcccctcccatgggaccctgaggacccctgtgcaggcaagtgcacggcaccacctcagggtgcctccaaagacagacaggtgctcgcagatgctcccagaggaggggtgcagaagcacagggggaccctgattcccaggtctggttctcatcccaacaaactatatgacagacataggaataatgtcacctccactgcccacgtgttcctggtgggtggccacatcggcaagaagtcaatgctgattaaatgaatgaagaaggcagggggcttccctggaggctcagtggtaaagaatcgtcccaccaaagcagaagacacgggtttgactcctgatgtgggaagatctcactctgccgtggaacagctaagtccagtacaccacagctactgagcctgtgccctagagtccagaaactgcaaataccgagcccacatgccacacctactgaagcctgggcatcctaggtgctctgcaacaggagaagtgactgcaaggagaaacctctgcaccgcaactagagaaagcccacatgacaatgaagacccagcacggccaaaaataagtattaaaaaaaaggcacgtgaggacacttaaggacatactaagcaaatgcaaggtggcatcaccagtgtcacgtactctttgcttgactgtgaggtcttggagctaacgagaccaagacggcaaattccaccactaggcaccctcttcctattccaggggtgcgacttggacccaaaagccagcaggtgggccagtcttggcagagagattgagtaaatgtacgtggaggggccagcaaaacctatcctcacacccaagaacagccacaaagtcgatgtggagaacagcatcttggtgatctatccgacacctaattttctttgatgccataggtgtacggttacctcccaccttatcctcatgggtcccagacacctacacacatgggttccctgatggatcccacatgggggaacaggagactgtttctcatctgccaaaccctcaccgccacatgtggtacaaatcacgtggggatggggacacgcacattcctgtcctgaaaagttcgcacatggagacccaggtgcaagccagacacagaccagctctcgtgcacgaatgcatccacatccacacacgcacacatgctcacatgcacacaccagaaaggaaaacggccttctcaattcaagtacaacatgtgtgtctgccaaaaagccaggaatctggtttccaagcagccatgaccccactcagcgcctcacagatgctgagattctgaaacgggtgagagcaccgggtttttgcggcgtgcgggtgggggctggcgtgagttaccctctgtcctggtctaaccccgccttggattttttactgtggctccacagacacacatttcggcttctctcccctgttctctcctgtccagctgagggaacatgactgattccttcctgccttgtgcacttggcatggccagtgctgcagatgagaatccggcccaggaagggagctgcctgccttcagcaggaacagagatgttcctaacagccacgtccatgcctctagctcccgagcttgtctgctgcctggtttagagcttcttgtagcaacaggctgtcccaggaatgaaaacatgagggtgccatgtgggttcactggagcagaggagcctccagaggtctctggggaccagctgtcacttagtgctgttgacggcacggctggactcgatcacggtggtgagggtctgggggcaggtggggtggtatgtaaaagggcagatgccccactggggcacctggtcatcagcattttgtttgtttgttgtcatgttgtctgttgtgggttttttgttttggattttatgcaggtaggtatgagtgcatgttttttgagtggttgcagtggcgtgctgcagtccatggggtcgcaaagagtcagacagga

SEQ ID NO: 56841 - DNA, 3486 bp, Bovine  19866880535308
  misc_feature (1)..(1): n is a, c, g, or t
ntatttttttaaatactatattaaaaaaaaattgtggcagagcttccttcaaggtgacaagtggaaaaggcagatgagtcatctccaatccaaggacagtgaacagtcttctctgttctcctctgggcagagggtcctggtggtcacctctgcatatcctctgggtccccacaaaatctatctccatagcccacatagctgggggagtatgactcatgatgacggtagaaaagagagaccctgactccctagattggcagttatcagtgcattcgcctcattctctcccacacaccaccactgcctccatccaagccccacgggactgccagctcctccaggcagggaccatgtgctctgtgatagcttcaggccccaatccagagatttccacacgcaggtgcttgatacacattgaatcaagccggactggattagctgggaaacagtcgctggctgtgctgcgacttggatacaccaatgatggcagcagttcatggaggtggagaggcagtcttctgccaggcaacaaggacagagaaacagactagaaggttgaatcaatagtggggaagtggcctcacttgaggagtgctatcaatccaaaggaaatatcgtgcaacgtaaagtgttgatgggaatttataggttacctctttggccacgtgtagtttagaggtgctgccagctgaattctcaacacgtggtactggccttggagagccatgaggcttaaatcaagtgaatgcaagggctgtggtgcagatctcaaagttcaaaaatccagaaatgttggggagggagggcccacaggaatcatctaataaaccttgcaccttcagaggaagggagcattggcagaaaaggggaggcagatatggagtgaataatgcccgagtcccaggctcctgcctcccacaccagcagcccctccttgctccatcctgctgtataaggaaaagtaatctggaataagacacccatggactgtaatgaagagctcagggatggagtctctggaggcctgcctaggttaaagctaagtggccacctaataccctacagagtccaagccagacttcagaagaaaataaacaggcctgggaaggcccaggtccctcttttctgtccagtgccccgacctggactcctctaactcactgccccgtgccccacacaaacagggaaggaacagagaggaaaacacatgggcacagaggcagaccaagcaagaaggcagaacaggctggaaggaggtcccatagaaatagctcttgcccctggaggacttgcaaaccctgtgaccggtactggggcgaggggtggggaagggagagcaagaaggcatccttgtagtagaatccttacctgcagggcccttcagtccctctttctgcatcaagacggagccccacgttcttcctcagggttcaacccaagggggccgggtagcaggtggaggacacactgccaggaggtgggggaggggtccttatcactgcctgctccagattcagctaccaacctccatcctggttccagcccctcacagcaagcaacatgagccccagcttagggtcaatgggcttgaccacctgcactttcccccagagctctccaggcaagggagcagataggatgccaagctgaaggcaagacccccccaggggactcacggagtctgtaagagatgactgggttcctgctggctggttaccaacacatctgtctactctgtcaactggggtggggggtgggggtgtggcagctgccttttcagcctttcacccattccctccagttctcagaggatgcagtaaataaagcacacagagcagtaaactttagtggacatgtgggttctaatcccagctctactccccaccagctgttgtgaccttgggcgaggaacccaaactctttaactctttgtgtcttcacctgtaaaaggaagcagacacctcctctctcaggctcctggtgagggtaaaggaaaatactgaaatcgatgtgcagatgagccagggcccatgagaagtgtttcatgccctttcttctttagtaaatggccattggaaggcttggcagtactctcaggagcccctttaccaatctaagacatcatgaggaagggaaacgggagcaaatgataacatctggggacaatttacaagccagacactatgctcagtggttcataaggatctcccataactctcttgttatgcaatatgcataacctcagatatgcccccgacaccatcctaatggcagaaagagaagagaaactaaagggcctcttgaaggtgaaagaggagagtgaaaaagctggcttaaatctcagcatttaaaaaacaaagatcatggccactggtcccatcacttcatggcaaatagatggggaaaaaaatgaaaacagtgacagactttattttcttggactccaaaatcactgcagacagcgactgcagccatgaaattaaaagacacttgctccttggaagaaaagctatgacaaacctagacagcatattcaaaagaaaaacattactttgctgacaaaggtcagtataggcaaagctatcgtttttcctgtagtcatgtatggttgtgagagttggaccattaagaaggctgggcactgaagaattgatgcttttggactgtggtgctagagaagactcttgagagtcccttggacagcaaggagatcaaaccagtcagtcctaaaggaaatcaagccttagtattctttggaaagactgatgttgaagctgaagctctaatactttggccacctgatgcaaagagctgattcattggaaaagaccttaatgctgggaaagattaaaggcaggaggagaagtggacgacagaggatgagatgtttggatggcatcaccgactcaatagacatgagtttgagcaaactctgggagatggtgaaggacagggaagcctggtgtgctgcagtccatgggattgcaaagagctcgacacaactgagtgactgaacagcaatgccaacaataactttctggattgtaagtgagggagctatggctgggctctcaaccattagtaagaggaaggcatgaagaaatggtgcccaaggagggaagccaggactgcctgtgggctgctcactgactctagccttgtgcctggactctgcctgagggcagaaggtgcagggctgtgaggcttgctctggtcacttctgtccctctaggagctgaactgagattaagcatgtttgatgatggatatttgttttggaaattacctaatgagctacaagattgttatctggcacccaaatggtattatcataactattacaaattaaattaggccacctttgctaaatcacacaaataataagagtaattgcaatggtaataaaccagaggattccagcccacttggttcctcaagatgttcttgttgatttgtgtattcactttggaccatgtgggctggaga

SEQ ID NO: 56842 - DNA, 1079 bp, Bovine  19866880715498
  misc_feature (1)..(1): n is a, c, g, or t
natcactggaaacagcaaccagcagaacctgacccacaggtgtgttagttcatagaatgattcgatacaggctgccaaattaaaaattcaagagtgtaaaataaagagtcaaaagcaagaaaggaataagataatgtttttaagtggtgtggaatttctagaaataaatttgctgtcattaaattttaaaactcagtgaagactactatttcctgcaagaatttgcaggattgttggatagattttccatctgaaaaggaaaaaaactaaatgttagatgcatttttttaaatttctttaaaaatctcaaagagctggcaactaagaaatgatgagatcaaaatctatatgacaaagggaatcaagaatcctgaagttacatttgtcctgatggcatttgtcaaagtaagagaacttgaatctaaagtttactcaaactcacaaagcttagaagacgaaagacaaagcacaaagcccaagacctcccaacatggagagtctgaaagtgaacctctttccataaagttaggaagccaaaaggttatgcacaaggtaagtagggataagcccagcttaccctcctactcccagcgactgtaagaagagttgccttggcacaaaggaaagcaggaggaaaaaaatgaactgtcattgaaaacctgtaaccacaagtcagatttgcagcccacttggattgcttactaacctcaaacaattaattcagcttaaataggttagtaccaatagaacccactggcatatgaaagaagtaaacaaagtcatctctggaagaatggactttattctggggactcaaagaaataccacaaataattacccataaaagtactgcagcttagtcaaaagtaaccaagtacacgatggagcgaaacactaataagcagaaactatatacagcaggaacagaccttcaaaggcatcatgtattgaaactatagtgatacattatagaaaaatatatgtattcttcaaataaataaaaggctagctataaaaatctgcaggctaacagaaaactatcttccaagtgaccaagaagattgcttctgctgctgctg

SEQ ID NO: 56843 - DNA, 1647 bp, Bovine  19866880719381
  misc_feature (1)..(1): n is a, c, g, or t
natactgtgggggtctgattgcagcctcttcgggacacggggacaaggattgctgggcaaagaaatgaaaggaccacaccagactaaggctatgcccgttgcaatttttccaggaggaacataagggagacagctacaaacaagcagaaaaatagttttctcccagacctcacttctgccagcacactgctttatttaagagaggagaaggaaaagaaaactctccctttacacacacacacaccctttcctgtggtcgtgccttggcagtccctcgcacaatatgctctaaattaatagcttcggggagataatggtttataaagcagaagtttgtatgcaaccagggaaaatgctctgctcctcattatacagctatatttttcttttgcagtcagattatgggcaaacaaggttaaatgcacacacagacacacacagaggcaaataggcttcaattttctgctctgtgacccgccgcctcaaactcccttctttgactttgctttgatgatttttcttgcttccatgtttctcctgtcctaaccgccctccttatcttctccggctcattatactttgctgttgctggtcggttgctaagttgtgtccaactctttgtgaccccacggactgcagcatgccaggcttccctgtccttcaccattatgcttggtccttgtttattttcttttcccctttttcctttttctatttctgtgctttcttggttttcttattcttcattctttttttaaagaatttttttgatgtggaccactttaaaaatctttattgaatctgttacaatattgcttctatttttatgttttggctctttggctaggaggcatgagggatctcaggttctccgaccggggatcaaacccacacccctggcagtgaaaggtgaaatcttaaccactggaccaccagggaagtcccttattcattctttgcctttctctttgaagcaggagaatggcccagtcaaaaataaatttaaaatcatagaatgttagggaaaaaaaggtgtctttgaaatcattctgatgccaagaaaccgaggttcatgaacgctaaagggactttgtcaagatagcatggtttctgagcgcttaggattggggtccaatcagccctctcttaactcagttccctttccactgaagcaaactctttctcctaaggtctggcatcagttggtaagctgaggggctttctgttttgggctgaactgtgttcccctaagtgataattctgtgtcctaatcacccgtcctcattgtacctgtgaatgcgaccttattgggaaacaggcttttagccgatgtaatcacgttaggatgcagtcatgctggaagaggccaggtcctaagtctgacggcccgtgtccttataagaaggctctgtaaagacataagaacactgagatatacaagaaggccatgtgacatgggggaggggctggagcaaggcagctgtaaaatctaaggatgactgatgggctggcaacttcggagagagacaggagacctctccctcagagcctccagcaagaatcaaacccaagtttggacttctcgcctccagaattgcgagagaatgtgtaagtcggccaccgggtgatcatgtgttacggcagctg

SEQ ID NO: 56844 - DNA, 1491 bp, Bovine  19866880778010
  misc_feature (1)..(1): n is a, c, g, or t
nccactcaggctaaatgagcaggaggtttatttaaaagagaaaaggcagggggatgaggaggaagggggcaggggagagggtgagctacaactttggccaggaataaggaaacaatctctttccaatcaggaacaatggaccctgagtcagtatgtagacctcataattcctggactgactgagtcttgcgcaggtggccatggtcagggttggggaagtgtgttctctggtgagaggacctgagagttggtactcctgcctgactgcccttcactgggaccggagctctttctgagaacagctggcacttggaagagctggagggaaggaagactctgccctctcccccaaggactttattggatcttggaggtggatttagcccagtgggaggtgtatgctcatttagataccatttcaggggatgcacttgtaaaggttacaagggcatggtctggaaatagcagctctcccaggataaggtctggacagggcatttcttgtattctgaaggctgcaggcattcaactcaggtggtggaggaagactcagtggcagagagaagcagattaggtgggtcagggacatgcccttggaacagctctgcagagtcattctgtaaaggtgtgcagagtcaaatgcaatccttcttttttttttttttttttctggccatgccatgtggaatgttggatcttagtccccagactgaggatcaaacccatgccccctgcattgggagtgcagagtcttaaccactggaccaccagggaagccctcaaatgcagtcttacctacgggcagtcaccgggaaaggccagacctgcaagcctttcagaagagggagcagccttcacccagtgctggactagatgggatccagagtctaactgtcttatttccgaaaggtcacaagaactccacaatgtaccccgaattaccgtgggagcaaccctactcttccgttttacatccaaaactgttcctgcctgactttccaaatttagtggagatgcactattcttcaggggagagaggaagccagagcatcctaccctgaataacattccaatgccccaggctgggaccctgggctgtcagggtggctggctgagccctagtaccatgtcaatcctggcagttggcaggtgctactctgaaagaatgggctggggaagaacaccccaggacagggactgtgtaaaagctactgggaggcgattctggaactaaagggactaaatataagacggctttaccctaggtggaactctcaagtagagaccatcttggctctgcatctccatcaatatttattgagtcccagctctgtgcaagattccgccacgagagctgcatactgatgtctgaccttgcagtctcagtgaaacaaccgacacatgaacgaagggaaaggcggataaaggctaaaggagagaggggaccgtgatgagacacctacagtgtcatttaagagttagaggctcccc

SEQ ID NO: 56845 - DNA, 1779 bp, Bovine  19866880782510
  misc_feature (1)..(1): n is a, c, g, or t
nagcttgtaagtgaacgggagttctgagagagagagggacccggaacctgttttttgctctgtcactttctctttcctggccaggtgggagtcagagacatgcagtttgggggtcaaggaccacccagaagagatggaggaccggttcagcatgcccctgatcatcactattgtctgcatggcatccttcttgctcctggtggcggccctctatggctgctgccaccaggcgcctctcccataggaaggaccaggtgaggaccaagcagtccagttcaccggaggactttcaccctgttattcccatattggagaaaagccgtgggccctttctgataggcagaggtcatcatcccttacaggaaatggaaatttgcctgaagaattaaagaggcggcaagggttttggagtcaaagaagacttgcgttaagccctagctctgcctctgattaactgggtgaccttgagcaagtcataatctctgagcttcaggtttctcatctgcgtagtgggaatatccaccttgcagagttgctctgtggatccattgctgtaaatgggctgaggcatacccgtctaaccagaaggtttatcatctaccttcctaggattcccttgtaacagttccgcccagattcagggttctcagccctggctgcacactgtggagagctttacaagaaatccccctgcttagtttcctcacaccccaactgaaacggcatttctgggccactgtattcgtttaaagcttcccaggggactgtcttctgccactgaggttgtatcccgggtaaagaaggagagaaagctcccttcagatggtttccacctgcagcgggagggcaaaagtttctgtacacatcaggttcagccttagagaagtcctagtcattgggcctgatgaaatgcattttcttagagttcttccctgttcagagaagtggtgaggagggaccttgagaggaaggtttgatggggaaggagtggaggagaggagatgggagaacaaagtccgtctctgctgacgttacagatttgccaccgggggacagctgggaattctagggatactgggcaggttctcatctcaaacttgccctgaagcaagccagccgtcaggattggcctccaggaccgcctggtgtccacattagctaaattggggttcctgaattataggggaacaagtgccagtattaaggttagagcaaggctgactactctcaaaaactacccttttttcttgggtcacctctgtcactctagcaacgactaacagaggagctacagacggtggagaatggttaccacgacaatccgacactggaagtgatggagacctcatcagagatgcaggagaagaaggtggcgaacctcaatggggagctgggggacagctggattgtgcctctggacaacctgaccaaagatgaccctgaagaggaagacacacacctctaatcggggctgccggccatctccgacggtgcagagctccagcccaaccacctcaagtgccatttgtaaggggaggaggaagacccttcttccccttagagggaaagactggggaagaagagcagacttggagggtcccttcatcccagtccccacaggccttaatttttcccttttcaagctgaacaaatcacattctgtgtagaatcctcttgtagaataacccactagtgcctgagtgcagtgctgctgggagaacagggaagagccatagaaggaactcttcgagaccatctacagcctccattcacagacaa

SEQ ID NO: 56846 - DNA, 2371 bp, Bovine  19866880835896
  misc_feature (1)..(1): n is a, c, g, or t
nctgtgccccctgcattggcaggtggatttctatctactgtgccccaggaaagtcctggactgagtttttatgcagctggactctctgtgcaaacagtgagtaccatctttgagctgcagacctatagaaagttgaccttgggagaataaatttatgctcctgatccagactgctgacttagttgtaaatgaagcattcaaagcctccgctgcagacgatacactgagaatttctggaggtgagaccggaaaacagaccccaggtgatgtttaactcacaggaaagcctctgttctcagcttgggctgcacagaggaatcacatgcccgaagagctttaaaatccaaaatgcgtgctccccaccccagagtctgagtaaactggtctgagtgaggccttgacctagggatttttaagaactcccccagggatgctctgtgcaggcatgatggcaaccctggcactatagctttgagagactgaaacatcctgtgttaagaaggtgactaactcgtgagtttgcacaggactccccagtctgaaaactcaaagttccatgtccccttcagtcctgggagtgctgggactattggccatctaaaaaagatttgcatccacattcaactaaaaaccaacagggcacagagcaggaagcaaagcactgagcctaatgctttcccagttaggcgccccctccccaccccagtgccagcttcctccatcgtctcctttgggaacccgcagtgctgctgcagggtgtggctgccccagggctccagtcctgatttcctgataattcaaaaagcatttcctggttggcctgaatgtttctgtttcccattccctcccacactatatttaggcacagcagacagttcctgcctgggcctgccctacccaccccgggtgtctatcccagcccctggaacctagcaggataggcctacaagatgaagggtctgatcccaggggctaggcccctgccatccaggggggcagcggagtgcccaggtgggtgctgtcgccacccccatggcccactctgacttggggggggtgcccccaggctacactgcttttttgtttatcttacaagctttaaaatagtatttccccatttccttttccttaggcctggctgttctaagcttcctgtatatgcatcagtctacagcctcagttcagttccgttcagtcactcagtcgtgtctgactctttgcgactccatcgactgcagcacgccaggcctccctgtccatcaccaacttccggagtttactcaaactcatgtccattaagtcggttatgccatccaaccatctcatcctctgcgtcccctagaggctgagaaacccaacagaagagtctatcaagtagccccactacaattacccacactggatagcaaagtttcaggcctgaagggctgcctttagtctgtcaaacacttcctgtgtgttaggcactatatttattttgttcgagttcacagcagtatcatgagatgacaagagtctctatttctgggtcaggaacctgaggctcagagaggtaaacaacttaccccaggtcacacagcagcagagctgtcacctgatcccagatggactggctgatagtctgcgtgtctgcatttcccaaactttttcattattgcccttctcaggagactttgtagtcatttttttcccctctaatcaggcgctccctcccgcatgaaattttaataatatagataccctgcgtatctgtgtaggtactatatggctacataatacacaaacagagaagactgttttcctcttcaagaaccactgcatctcctcgggagtggtctcactcctgttaagaaggccagcagggcctgaagtctgactgattccttcctttagtgttggatataggtagagaagtgaagtgaagtgttagtcactcagtcatgtcccactcttctcgatcccacagactgtaacccaccaggctcctctgtccatgggatttcccaggcaagaatactggagtgggttaccatttccttctccaggggatcttcctgacgcagggatcaaacccaggtctcctgtatttcaggcagattctttatcttctgagccaccagggaagcccaggtggagaagaagggtaaatccataaagaaggttctcccaaacgaatcttccccaaaactccagtgtgaaaagaagagctggttcataaaaagagctcgatgtcaaacatgtctgcggaaagctgaaggtaggaccatcccacctcctggagagtcgtcttaccaaaatccctgaggagctacttagaaacgcacccattttatttttacaccaatacatattaactaaagaccacaaatgt

SEQ ID NO: 56847 - DNA, 838 bp, Bovine  19866880892313
  misc_feature (1)..(1): n is a, c, g, or t
ntgatgggtggtgcagagcccacccagagtagctctcccttcattcactctttccctctacaaagtccttgttgtaacctgagctttcatcttctctctccaccttgaggacagcatctcagacagctgaggaagcagcctgagacagggagcatggagtactgagacatgttctgcaggagcccgcctggcccagcccacccccgccggctggagaaccttctgtcagcagcagagacggcctgctgggggagacggcatctccacacagccagactgtctgtctgttctgatggtccaggagggatgtgcgcagagcagcagccaagagccttctcaggtgtaaaacctcccggaggcactcaggagaggagggctcctggcgaaacgtgaagaacaagcactgtgctgtgtaaatacatttgtggggatggagctgttcctgggcccacgggggcccatttcttgactgtgtggcaggaattgtcttcgttggaacgattgacagggccagtggggaaagctaagcagcccttgatttcttttcttgcgttggcacatttaactaatgagcgggagaacaggcctggagaggcaccgaagctgcggccacaggtggccttggagcggaaaacttgctcttctcgtcgagtggaaaactcctgtgtggtccatctccacgttccagttctctggtccaagtcctgtaggatcttcatttcctttcacggggcagacaggaaactccctttgggaccaacttgggttggggtcatgttgtttgaccgccgcagttaagaagctctgtccagggctaagaccgcatgcttccgataca

SEQ ID NO: 56848 - DNA, 640 bp, Bovine  19866880920108
  misc_feature (1)..(1): n is a, c, g, or t
ntgtgtgagtgcgtttgcatgaaagagagagtttagccgtgttgtccactgccttcagactgccagtctccctaggattaagggctttagtctggggatatctgctgcagcgcttactcagtagctgaggcctgagtgagtgctggtgatggatggctcactgccgccctctcctggtcagtggctattttgcaaacacccctaggaaccagaaagtgaaagcaagcagcatggaaaacttgggtttacgatactttaatgctacctattttctgcagttgttttctttcgggtgtccattttgctggaattttccaagtgaactatagaaaagctggagttttcaaacagagcagggttttcctgggattgggcttgttggacaaggtgagaaagacactgacgcttgcccagcctttcctccggctctttttggctgaaacttggcaggggtgtgtttggtggtaagccttcttttgccataaatgggaagaggaaagccctgcatctttacctggcagcagggctggggagtttgtaggcctaaggaaatgccaggtagaaaacccaagggatggtttgtgggacaagccaaagcaagagtcctattcttcatctggtatccttattccaaagtctg

SEQ ID NO: 56849 - DNA, 1251 bp, Bovine  19866880935712
  misc_feature (1)..(1): n is a, c, g, or t
naggcaattttttttatttgttcttactgtgtttagtcattaatttagtcattaagtctgcctcttttgcaaccccatggactgtagcccaccagactcttccgtccatgggattccccaggcaagaacactggagtgggttgccatttccttctccaggggtcttcctgacccagggatcagacccacaccttttgcattggcaggcggattctttaccactgagctaccagggaagcccgtattttttatgtatgtatgtattttgctgtgccaggtcttccttgtgggatctaacctgacaagggattgttacctgaccagggatcgaacccagccccctgcattgggaacctggagtcttagccacgggacataccagggaagtcccaaaaaggcgattttgaactacttgaagtgtaggagatatgcccttcctatgccactttgtaaatttcctaaaaatttacctgtggacacacaactcccactgacttggggttcccattcccttattgaaatgtcccttcctcctctgattatcttttttaatttttttcaattaatttatttattttaattggaggctaattactttacaatattgtaatggtttttgccaaacatcgacatgaatcagccacaggcgcacatgtgttccccatccagaactcccccctcccatctcccttcccattccatcctcctgatcatcttttttaaagcccctgaatcctaggctagaggggcctttagtgagcccttgacctctggggtccttggtgaaatccgactccaagaagagcagggggaagacacagtcgaatttctcctctcccaccccctgagcatcttcctgtctcctgtcctgtgccctaagcctcttcctcccccaggtctctgacacctgttagggtgagcgccgagtctccttccatcctgggatccccctccagagcccacacctgtatttgttaatcaagccgctgaggatgcagtaattgcccggcagaaaacacgggtgcagatgttagggagcgccggggcaaaagcactaaatgagattcttgttttccaaacagagcccgagatttaattacaggctttccaagtgcttattaaaaacccttctttttttcccttattgttttcctgcatggcgcatattgaatcagccactgctgttgtcttgtttttggagcgttcataagaagaaccgatgggaaaatgcaaacacagatgacccaaaca

SEQ ID NO: 56850 - DNA, 1289 bp, Bovine  19866880941971
  misc_feature (1)..(1): n is a, c, g, or t
nacaggaaagcaagggagtcactcctgaatctcatctaagtcatatttgtgagggttattctttattgtacatcatttccattgctgttttccaagagaacaagcctcagataaagttaagcatagtttaggacacagtcctgaaagagctttaatgggagagggggggtgtatttgagagttaaacaagcaaataagtcaataaattaaatttatacaactgccttcgggtgctctcagacagaaactggctcctgatccataacaaggacacatcaagtccacggttaacataatagcttttcagtttcagaaatgtatctgtatctgcccaggaccagactgagagatcactataaccaaacagatggcactgaaatggacctgattatgtacaaagatgtaagattcattacagctcaatgaggggaagaaaggattacccaataaatggtgttgggaaaattatctagcaatttggagaaacagtaatttcagaacctcactttatgttgtgcattaaaataaattccaattgagcggaagagttaaatgtgttttttttaacatcaaaatctcagaaaattagaactgaatattttgccaacctctagagaaaagatgattttataggcttagatgcaatacaaggaataaaaatgagcaagatcgctaagcttgactacaaaagtgtaaagtataaaagtaaacaagccaccaaaaactactacagtgaatgtagcaaagaggcattatttggtgttcaagacctcataagtatcaatcagaaaaaaaaaaaaaaaagactaaaagagagaaggaaaaaagaacaaaagatgaaatgtaactagaaaacaaaagatttgagatgttctgttcccatagaatataaattaaaacatcaagttaccatttccttttaaaaattagcataaatttaaaaaacaatatctctgggacttctgtttctggttaggatgtagaaagtcacaattgactggggagcctgccctagcaatgagaacaagctaagccatgatttctttttttttcccttctgtagcatattagagggacttccctggtgttccagtagctaagattctacattcccagtgcagggagcccaaggttgatccctggtcagggaactagatcccacatgccataactaagagtctgcacgccgcaactaaagatcctgcatggcacagctaatacctagggcagctaaataaataaatattaagaccattagagaactaaagatgtaaagaaacctaaataaa

SEQ ID NO: 56851 - DNA, 1629 bp, Bovine  19866880951851
  misc_feature (1)..(1): n is a, c, g, or t
ngaaggtataaaatggaagtagagtgaccaactctcccagttttattactgaaagtcccacatccctggaaatcctttggccctgagtaaaccgtaacagctggtccccctcggaagggagacagagaccttccatggtggtctagcggttgagacctttccctcccaatgcaggggcacaggttcagtccttggctgaggaactaagatcccacatgccacacagcacggccaaaaaatttaaaaaaagaaagaaaagaaatggagacaggagaagagaggagaggaagccagggcaaatggatctagcaacctccttgttgaggtgaaggtcagctgtaggtggacagaggatatgtgtaaaaatggggtgctcagtcgtgtccaactacttgtgactccatggaccatagcccaccaggatcctctgtccacgtaattttccaggcaagaatactggaatgggttgccatttccttctagactcttcctttggaaatatttaacccaccatgccccccgccccactgtcactcccttcctggttcctcctgggcagtggtcatctgtctccaacttgtagcctccacacagcccccccagcagggccacacttcctcctcacctctcactgaccccgtggagggcacgctgggattcggcttccctcggaaagatccagtgcatctggtatctcctcctggttcttgtagcacaggccccactggggctgtctccaagactctgtgtttaacccgttcttgtcttgagtgccagcacactccctgcatacagaaaccccatcgctcacatcctgcgccccctgaccccctgctgcagcctggaactccgaggcggggtttattgttgttcagtcactcagtcatgtccaactctttgtgaccccatgaacagcagcacaccatgcttccctgtctttcaccatctcctggagtttgttcaaactcacaaccattgagtcggtgataagagggttttggggcagcttaagctctgaacaatacgactctttgggtctcccctagaaaggaggcctctaacagcccccaccccactccggccgaggcagaggcgggtggggcactaatgttgttccaccaatgccacgcgtccgccagacccgcgggccaccagtcatgctcaatgccgcctctgttgtgaggttgctcgtgaaaagccctgtgttgcggctcccggctccagcgaggtcctgatacaaggtctccattcatcctcctcggccacacaggcagcccctgctccctgaggaaagttgcctggggtcggggtacaggatgcatgttcctcccagttctacagaggccaagtaaatgatgcccgggttctctctgtctgcccagtgctgcctggcagctgctgcctgagaaatcctgccagggtctctgggtcacaggtgggcctctggggagcccactgtctcagccaacagccatccaagctcctggcggccacgacatgaaaggagaggacagacacaacaaagcaaataaatgcaacttccttggttcatctttcaatgagcaaagggaagaaaaactgctgtcggcaaggtacctacccctgccgactaatgggatcagtcagatc

SEQ ID NO: 56852 - DNA, 806 bp, Bovine  19866881026963
  misc_feature (1)..(1): n is a, c, g, or t
nagcctgactctgaaccccttggtctgcactggtatggccagaaaactcctgtaggcacctttgtgccggccgaaagatggccatgtctgaaggggcaatgaccccaggtgaggtttcttaactagggaacacagcaactaaagacagactccagtctactctgtatctatcctgttctgattctaccctatcatcttgtttctattctattccttatgacctgcccatgaatgtgaggaactgcttgattaaagagaatgaagtcagagagcgatatagaagaaataaaggagaaggaagaaaaaaataaagagaaaaatgatgaaagaaacagagacttgctgtatatatctgaaaagaagagggattatgtagaatttacagaatggaacatttctagcatcccagtctttggagcacagccccccagtcctgggtgatagagtttcccctggcagaagtgggtggtggaggtgcctggggtggtgctcttgggcactgaagctgctccaggcaggaatatctgggtctctccccagtccttccccaggggcccccgagcacggcagggcagggcagggcagggcagggctcacctcctcactgtacttgcccacgtaggagaagatctcggagagggcgctcatggtgttgaactcattcatatgcatccgggactgctcagctaggtacgcgttcatgtcctggtcgctgatggcgggcatcttcccgatgtctgagtaatacctgtggcggcatgggagtgaggaactctgcgtgcgtgtgtgtgtgtgtgtgtgtgcgt

SEQ ID NO: 56853 - DNA, 741 bp, Bovine  19866881078390
  misc_feature (1)..(1): n is a, c, g, or t
ntgagttatcacaaacgtggaagcatcttagagactgtaggacgctcaggaaggttagactttcttcttgtttccagggatgaagctcctgcatcagagtccctgctcagaaccaggaaccttcttttgcgtacagtgtgcctttctgggggccaagctgcctaactccccgcatccctccccactccctatccctggcacccactatcttccagcagtgctgccatggtgaccacagctgctcagggggcatcctttcttccccagaaagatttgatgaactcaccgtatttactggctgaggtcctggagacagtgggagttgttcactgcattgtaggctgtcacttgcttggacactaaggccaccacagaaccatctggcacctaccggggaaaggcaggtaagggcctggtcacagaaactgccacccagtcaggacgaacgtggtccttggggacaatcagggcctcactgagaaccaggggatggaggaggctgtcagttttcctttgatgaaacaggacagatctgagtatagaactgtagtccatggtggggctcactcttggagtgactcaggcaagagcctctcaccagcaccctctgtccttatgcttccctgggacagcacccagccttaaactccagggctcacctaagaaaggcttttgctcagggtctttgcccatgccctgcaggaagcgcacacccagcatgctatctccaggaaggtcagg

SEQ ID NO: 56854 - DNA, 1710 bp, Bovine  19866881196243
  misc_feature (1)..(1): n is a, c, g, or t
ncagcccgagtcctctcctgaaggctcccatctctgcgggttggactggagtagggtagggtgaccccagctaagccctcttcccttcccgtccccacaagcaacaggaaggtaccacttcggcgtcactgcaggagtaggagctgcgtatttaattcctcgccacaaaagactccattaaaaccctgatttatcaggggagtgatgtccaagcaggaggaggcagcgaggggcactgtgtctgagaacggacgctactgcatgccccactgtctcacacacatgcgctgggcaccacctccatgtacacccagaccctcacccaccccgagacccctgccccatccctgcgtgtcagtctgtctttctcgtcactctgtctctcacactctaatgggaagctggctcctttctccaaagatttcatatgctttgatttttgtgcaggttccaggctgattggaggttggagaatctgtaagaagcttaatgtgatctttaaaaaataaaaagatgccctctaaaaacttcaggttcaggccacccgcaagcccgtcctggctccgacctggtgttgggggaggaggccactccagcccaggacttcaaattctctttttggaactagtcgggtaagccaagactctgcctaaatcaccaagctatactttttcctttaaaatgttctggaccatttctaacagctttgagtctcttggtgttctcaacgtgggctctctctacatggtgagactgcagaatccttttcagggggtgggcagggggggaaccagagctggtcgggctgtgtgctctgggtcataggtgctgtcaagtggccctgccaatccgggctcctgcaccctctgcctgaccctgcgacctgcgccctttgtgagtttccgtctcagaactttcactgcatacccaccccccgcaaccatttcccaactgcatgtctggttcacagattcagacaatggccttccaccccccacccctctcctgctccatgtggcggcaatcagagccctggcccctggacgtctgcctttcattagcgaccagactgctgtgagctcaaaccagaacatgcttattccattaaaaagaaggaaacctcctaaatctataaaaccaaactctcaccctcaaaatgtcttaaatcgaaaacaatggtggaaggaactctggaccacgcactcctcctgcatgcattctccaaaccattcccttccaagagccttctgggcccccctccgggccccctcagcctggccatctgtgctgctctgtgctgccctgggctcctgtgctccgggccacgtaggaggagggaagttgatctccccaggcagcatcacagctttatccgggctgtgagaccacgaggcagaggctgccacctgagtttgtgcccccacaccgcccccatctcgacatttctgcttgcccctggagttcacggtggccccacaggaacagctttgtggagtgcttcagggcatctggacaggcagtagtggtcccatcgagggacagggttcccagtcacaggccaagccccagctccccgggaagttcctttccccatgtccatgcctctgggctatctcagagcaaactgcctgggggtctgttctgctaggtcattgcttctcaaacattcctgtgactaggatcactaaaatagttataaagtgtcagttg

SEQ ID NO: 56855 - DNA, 1183 bp, Bovine  19866881326441
  misc_feature (1)..(1): n is a, c, g, or t
naccccaacctggacagacacacacctcactgtttatggattttaattctataggaagatcaaagtaacacagaggacactaagaaaggactggagaaaaatagattccgggggcccctgtgcaattctgcgttttgttccacttgttaagtggtgtgaatgatcgctcagagagtgtttccgtggatggtgacacacgggagtctcaggttagcagcttgctggtgggtagtgatgattatttatgtgttatatgtctgctttatagtttggggggtctcttgagtaacccatatgctcatttgcctgttttatgtgacttcagagcaacattttataattttgaatgattgtggaggctagggttttggaatctttacatttggaggacttttttgttgtgtgtgtgatgctgttgaggctgagaccttacttggttaaggagatgctggaaaggctctgagtcagggttgagtcctagctccatccccaacagtcatgtgaccctgagcaaagcatttctctgagcctcatttcttcatccatgcactgaagagagcacagagcctgccttccaggactaaatgcagtagagtatgtgatatgggaaagtcttttgcaaagttctacacaagtgctgagtattaccctacagttactattccacataacattgttttcatgggaaagtacagtttgccttttaacaattggatttacagcgtagtttccaggaatgcatttgtctctaaagcagtcttgggccaaaagcaacacaacttgaccccgagataaaatgcactgaggcaaaaggcaggaactggcccagcaggttttcaaagaagagaaagaaaactgcccccagctatgatgctcatctcgcccatctgccaagaagtcctggtattggatttctccagtgaaacagaaaaaaacaggatgtacatgtgtctgtttatttctttatttatattaaagaattggcttacgcaatcgtggaggtttggcaagtccaaaatgtgcagggtgggtcagcaggctggagacctgcagcagagctgacaatgtagtttgagtccgtaggtagtcggctggcagaatcccttcttcaaaggtgagggtggtttttttctatgaatgtcttcaactgatgggataaacccacccacactaggagggcaat

SEQ ID NO: 56856 - DNA, 1273 bp, Bovine  19866881344906
  misc_feature (1)..(1): n is a, c, g, or t
ngtcccgggagctgtccattcagatgcagtgattttatctattatttatcccagggctttcagagaaaagatgtctcagtcatgcaaagaagagaagcagatctttgaagcagccctctctgggtcatttcctttggaaagaagaggcagtccagaacaggacagccgaagtgtcttctgtctggggccagagtccctgtgtaggagatctcaccgctgaggacatgggctcagcaggcattcagttacttaagtaccctgactgtcatcctctgaagacccacagtcctgacttaattaaagccataggtagatggggaaagcacaacagtccatcatggttagcaaagcccatcagctgcctaaagatactttatgggcacaagacatggagcagaaagtgagtcatacaagacgctacaaagtattgagagagatataattaagcattaaattataaagagagtagtatatgggccttatacacataacattgaacaaaaaaagccagacacgacagttttttattaatccatttatataagaaaaaagcttccctggtggctcagacagtgaagaatctgcctgcaatgtgggagacctgggtttgatccctaggttttgggctgatcccctggagaagggaatggctacccactccttttgttcttgcctggagaattccatggacagaggagcctggtgggactacagttcatgggactgcaaagagtcagacatgactgaatgactaacgcttgatcttttatacatatccagagtacaaattccatacaaagtagcacaaagctgggttaagtattaaatggcagacatttcaaagctagttaggcataccaaaagtgtgcagttgcacagagatgataagacaagttattttctatcttggtcagtaaatccagtagagttcgtacatggttgctgctgtaaagcaattttaatcattagtacagtagtaatattgactacattttagaattcccctttctttggagttagctaatcttaaactgtataagtctcaagagtatatcaacacaatatcttaattactatggcatctctagaacaatatttgcccacaatcagcagtagcagctttctcagccaggatagaatcctttaatatgtcctctacaaaacttgttattgataagtgttgttgcattatcccaagttttcagaagataggcaataaaatatgtttatttctaggagcaatcttactgttaaataaagtgctacattttag

SEQ ID NO: 56857 - DNA, 1011 bp, Bovine  19866881344957
  misc_feature (1)..(1): n is a, c, g, or t
ncagaatggaataaaggggagaatataaaacaatgcctgcattttgggcttagtttgtttactggctgccacaagccaagacaaagaacgtaggcagtggaactgatgcgaagaaaagatggagagactgattttggtcctttggtcatacaggacatacagggagagatgcacaatgggcagttagaaacagggatctggagctaaggaaagaaaaataaatcagaaaaataacattggtagtgaaagatatgagagagggtaagctattggagaaggcaatggcaacccactccagtactcttgcttggaaaatcccatggacggaggaacctggtaggctgaagtccatggggtcgcacagagtcggacacaactgaagcgacttagcagcagcagcagcaagctactggaagaggctggtttgaatgaaaagaaaggaaagctgagaaaagaacctacatttaaaacagggatgagggaggaagatgaggcccccaattagggagactttgaatttgaatggtcaagtgttcactcaaaatgtgccaacgtttagtcaaaacgattagaccgtggattgagcagccggacccttgaggccaagcctttctgggaaacagtgaactagaatttcctttatactttctgtaaaggtagaagattcagaagttccaattcttcagctgctatagggattttgtgaacatgaatcaagtttcacgaatctttttggagaagggccgacatgcgatggatatgagtgatcctaggagacagaagcccagaggactcccaactgtctacatttgagtacaagacccaggagactcttaaacacagaagtgtttccccttcgattcaggatcaatactcacttttcctcatgggccagatttctgtgtatttgtattaaaaaggaagaaaactcagccctgagaattgtgattcacctaagtgtgagctctgaagctttggaatcatgactagggaaattgccacctcacacat

SEQ ID NO: 56858 - DNA, 1152 bp, Bovine  19866881374020
  misc_feature (1)..(1): n is a, c, g, or t
nctggtgggcatcctgccgtctgcattcccacatcctgctgctgacttggggcccacccgtttctatattgagacactcctcgctataaagaacgggagccgggcacaaaagaaaggccctttcgagaaggctgtcacatgggccaacaaagggcaggaagtggcgggcggtggccccgtgtccgtccccaagcccagctcacctggctgggctgtaggccctttgtgcaaaaaatgtcaggcccaagccccgaacttcctgccatttgtcaggctgtgccgtgacctggagttcaccgaaatgcttgcggctcccaacaatacacacacgcatcctttggaaaaatcctctctccccgctcctccaggcagcagtggtttttttatggaagtggctgggatgggggtgggatggtccagggctgagaaatggaagtttcggtcgtatttctttcttgaagaagcccagctcagacagggcctggaaagggcagaatcccaggtatgggacaggggctctggggtctgaccccatctctgctcctgatcagcttggagccatgagccctttgcgggggggtatctgtttctgtgacctattggattttcttgtgtcccaccagccaggtgctcccatcccacctgcctcccttgaggctctaggattttactgcccaagaaagagatgcaatcagtgtcacgaatacctgtctgcctacagagaagcaaaaattcagcctgtgtgtctgagacctgagacagagctgaaggcatggggtcaccactgcccagccagccatgcatctggctcccaggctggatctggtgagaggagactcatgaggcttctccaggcaacaactgaacaaagacatccacccctcattccactcgaactgttttcacctggtgaggagctgcagacaggcttcagaacactgggacaggtgttaataaaatagtcacccgtcccctgcgaactgaagaaaaagaaacaatgaattttccggtttactagatttatccgtttgaaagcactgtccttttattctgagattatttctgaaatgaagaagagaaacgcagtgaatttttccatcctgctgctgctgctgctgctaagtcacgtcagtcgtgtctgactctgtgtga

SEQ ID NO: 56859 - DNA, 1319 bp, Bovine  19866881379031
  misc_feature (1)..(1): n is a, c, g, or t
nggaaaaggaaattatacaattttcattctggtgaaagaaaggtaatggtttgtcaagagcatcttttttcctggtaatgaattctaaagaaattttaagaggaaagcgttacagacatcctgatgcaaagatatacatactaagtgttttcaacagatcttttaagtaaaaggaagaagtgttcttcaaagacctattttaaaaaagtaatccacctgctttccacactgagtatacaacataaaaatataacttaagtcttttctgtgactaatgtggttctggtatataactttatgtaaagataagtctgagtatcccagcagaacactcattatttaataactctggtgagaacctggaatacttgtattttgtgttgtcatctcattgaaaacatacctattaaactttgggtagtggtttatcatgtggcaagactgacacattgttgccacatggagaagtctgacctgcattcttgcccagctaaggagctacttaccaggcaggtagctgcgaaggtgtggtcacaggcagatttcagagagaaccttgactcataccaaatttgaattaacctctgactgaaacttccatttctacatcatagccaagctgagttcattttaacctggacagttaccaggcgtagctgttgtcatccactttgacaatagaacttaagtggaatattgggttttgggtgacagagttcccagtggatctgtaaaataaaaattataggatgtggttttagttattagattgaattaacttactagatagagtttagtgttagccatccgaacagtgaaaaataagaaaataatgaaaaactttaatttagaatagtttattttaagccataggccataggagctgttgtttctggatggacctcttggattatgagaatcaaatcatgtcaccagtaaaaaggaaggttcttgatttcttcttcttcttttcttttctttttttttttttacatcaaagcaatgtattaacagaaagcaataatttgaggagtcctgttcacagacggcgaccacggcaaccccccttcctgcgggtgctgtcggaagggatgggggtgacatcctcaatccgcccaatcttcatccctgagcaggcgagggctttgagcgctgactgggcccctggtccaggagtcttggtcctatttcctcctgtggcccggagtttgatgtggagggcagtgatgcccgtatccttgcacctctgggctacatcctgggcagccaacatggcagcatatgggagaggactcatctcagtcagccttcaccttcat

SEQ ID NO: 56860 - DNA, 2514 bp, Bovine  19866881418752
  misc_feature (1)..(1): n is a, c, g, or t
ngatggagaatctggtttggggggaaatagaggaaaatgctgtctcactgggaaaagatgtttgcttctttcctacccagcatttggttctttctacccagtgggtttctatcatggccaccgtgggagaggccagcctggattactcctttgctgattctgggtctcattccaccagccaggtttagacagagacagcagatacattctggaagccaatcaaaggctataagccacaggcctcttggggagcgagaaggtgactggcaaggaccagagagtaaaaatgaggcttggtcaagaggaatgactgtggctctgtccagagacagccttgacaagctctgggctggttcagaggctccttctttgggtgcatctagttgcccagaagctagaacaacttgccctggcttgctcgtgccactagacacctatgtcaaagaccatattgccgtgtgtctgtagtggtcatcttcttcccacatctttgctggtcttggatgctatctagttaattcagattctggggctgagagaggagagagagagagagaactcagcattgacttgaaacaatctgtgccagagagattataaactcttatttcggtggcacactggtttccctaaacttcataaaaggccagaaaccgtgaatctgatgactggacgaaatccagggggaagcacactgtcatggcagtggggagaggcgcagcaatgcttatgaaggggggcacagaatattcgtgtcataggacaagatacaggtttaatctagtctagatgcaagcctgttctttcccttctcgataaggaaagctaacagaaagtttatttaaatcacttcttgagcttttatctttttgacaatatactggagaaactttgaaaaaccagttccagctgatacacatatatgtattttttgaaaatgtaaatacaacagccacatgttaatccacccccgcactgctttgagtgaatatacttcgaaaaaaacctttgttaagagagaaggcttttttccctctaaacaggaatgtaaatgtctattttactagcttttgtttttctttaatgaaaaatgaaatacgagacaggctgatgatgaagtatttgtcttgcagactgggcatttttatttttaaatatgatcctcatcccctccccatgaagtcccagcacgttacaataagggttgtagtcaatatgcactggttgggaagagactctctagtcatagaggggttttagaacccagtccaatcttttatttttttaacagaagaagagtctgaagcccagaaagataaagtgacctggtgaaactcatgtatttagtgacagaaaacaggcttaaaacctggactggaagactgtccagtgctctgtgcttcaggaagaaaccaacaaattaaggagagtgataccaaggacagatctgcagcaagcgtagggagagcatgaagacaaaaacaggaaccttactggtctgtggcttatttagatctaagacttaaatgaacaattttgttctgccaagaatagttttgaatagtctctacatataggactaaggatcaaagggaacaagatgggaaggcacagggggcgagagtaaagcaatggcttccatcattgtcattagctgattaactcaggtttggtgaaaatcctaccctgagtcaaaggaggggattactatttgctccatgtctttttaaaaaaattagtgaatgttaaaagagtttgctcaggagactgggagagctgtgtcttggtggacaggggtctaaagtacactggaatttactgagaaacttgtttgtaaagattattacttattgctgttttcttacaaaagtatattttggaaagttgtatactgtcaattaaactgcttttgtctaaaaaaaaaaacaaaaaaccacagtaatctttcttggagtcttaatcccttcttttctcagtttcctttctcggtatattaccatattcaaattctttctagtttaagaggaaaaagaaaaccctctcctcccttgactcaggtcttcactcacactatcatcctcctacctctttgtacagctgtgtatatttaaatatctagacatttatggtctcaatgtcatcactcatcagcctaccgcagtctgtattatattcacactccattgaatgcttccttttgtgatcaacagcagcccccagcgtgctaaagcaaagggacagcttttcagtctataaattctgacctctcattccatttgatacttttttcaaattcacactccttgtttgatcttaggtcttttagatcttatggcatcactttactctggctgctgcttcttcttcttcttcttcttcttcttcttcttcttcttctctctctctctctctctctctctctctctctctctctatatatatatatatatatatatacatatttctcattctgctttggggtcatatcttcaagttctcttctcgcacagtcaa

SEQ ID NO: 56861 - DNA, 920 bp, Bovine  19866881488705
  misc_feature (1)..(1): n is a, c, g, or t
naatactggagtggctatttccttctccggggatcttccacattcagcgattgaacgcgtgtctcctgcttggcaggcagattctttaccactgagccacctgggaagccattcttgtctatcttgtgtttctccagaatcttccttcccaccagtcctccgaactctctcttaatccatgctcctttggacctttcttactctttctggctttctccctcttttctaggtttctgttgtatatatgatcttagtcttttggtctaaacccccctgctttctccttgtatctaggctctttgattctaaccatgcattctcctcattctatcaaaagacctgagaatcttggtggaaatttctcccttcagaatgtatgtatgttcacaggaagtgggggtggggggacaaaccgaggcaggtctaagtgatcaaaaggttgggggagcagagagatgcagattaatatattaatgcattgtcttcctatgtgtaggttgccttccaatactttgcacattgtaaacactcagttactgctccttcccccagctcctttctttgcttctacttgttttaaggtgatctctctcctagagtagaatagctgtccaatttctagagatctttctgttccatggcttcccagggaacttaccatccatcacaactcctgaagccagacaagaatgcccataagcggtcagggtcctcgcctccttgtcctaagaaacctcaatcaagagcatggaagtggttttagaatagcatctgtctccaccagctgtgagctgatcagagggagagtaaaatttgtcacaaaaaaggaagcattgatttggctgtcaaacagtcagcaagataaaaaaggctactgatttgagatctcaccactctttgatggggctaaatttccttca

SEQ ID NO: 56862 - DNA, 1049 bp, Bovine  19866881530235
  misc_feature (1)..(1): n is a, c, g, or t
naaggataggagagcttgatttagaccctttccggccaaggaactgaaatccatgatgtcaagcagaacttgcaagtcaaagagtccgagtgttcccagggcccccagtgggtccccagttactcagggactcctcacttaggcttggtacaacactgaaaattcactttggatgtcctctgttattagatcacaccagtccctccagctcacgcagcagctgagtcatggtattttacagattcttccagagccagagaaggggaagggagtgggggagagatgcagaaaacgcaggtggcctgtcccaattcagacttaatcagatcagttaagcagaaacatgggcctctgacaaaattaaattatggtttcttcatgccctaatgggaagttcattgccccaggctccaggaaactgttccagttactgccttggccattaagtatccattctaacctctctgggcttcattttcttcatctgtaaaatgagaaatttaaaagaaaatttttctctgtgtcccttccagcccagacttatgacctaaaacaccagagtttacacttccgcctgggaaaggatgctaaccccaggtttgagcatagcatttagtgtcaggaaacctgaggttacgtttttgactcaaaatatgatgctttgtcatttcattggcctccgtttcctattctgtaataggaaagggctgtaaccaagattaaataagctaatgaatggttctcaaacttgaccttgtatagatagcatcagatgctggggcaggggggcggggaggggaagcttatgaaaacacgggttgctgggtcctactcctagtacttttgacttactaggtttgaaatggaggctaagaatttgcatttctatcccatcctcaggtgatgctgatgctgctggtcccaggatcacaccttgaggacctctgagctcaagtgtttaaaagctcataatagagtatgaatctaagctgttcaggctcaatctaaataggaaaggtttactaagtgctaaaaatgcagccatgtag

SEQ ID NO: 56863 - DNA, 1663 bp, Bovine  19866881735337
  misc_feature (1)..(1): n is a, c, g, or t
nggagggcagcagaggactctggggagcggtctgggcaggccaacaagcacagagcaagccgcactgcagggagggatcctgcagcccactgggccacctgtcctagactctgagcggggccccagctcaggagagagccgagacgggtgctgggcccttgaggaacagaatgaagtcactggttcctgtgtcagttttctggaattagtcaaagagagctttgctagtcctcagaaaagaggtctgaagtataagagggaaagagtcactaaccatccactatgggctgaactgtgtctccccaaaattcatgcgttgaaacctgaatccccaacgtgactctatttggagacaaagcccttaaggaagtaactaagactggatgaggttcaatatgatccaatgatccaatatgactggtgtccttgtaagaaaaggaagagacaccagatatgctcacaagaggaaaggccacatgaggacacagtgagaagagggccatctgcaagccaggaagaaaggcctcaggaaaagccaagccttgaccttggacttctagtctccagaaatgcaagaaaataaaactctgttgttaaagccaccagtgcgtggtatttttgttatggcagcctgagcagactaatacatcatccttcattcttactacaatccccacactagagcccagagaggggaagttacttgtcccaggtcacacagcttgctcagaactagaaagaaaacaaaggcctgctctcagttctgtgctaattctgctccaccagcttcctcacaaaagaacaaaggacttgctccgaaaagagtcagcactacctaataaatacacacacacacacacacacacacacacacacacacacatactcaaaagcacctgaatttttaacaaaggagtaaaaatccctaacctccacagctctgagagctcctaggcaggaatgatagagcttcttcattctctgccacacaaaccatcatggtgagggcttggtatttacttggataaacaataatctcccctaaatggcagccagccgctgagggtcacctgactgataacatttgcagttgctacgttactcagctcctaatttgctgtcatttgttacttggagctcctggaattccctgcaaagccaaaggaggcagacaggaaaccacgctggctggagtgggcaatgctagattcccagccaattacaccctggccccatgagtgtcccagccagggtccccagctctgatggacagcaaactttccccgcaggctcccttctccttgggtcacaaggggaaaggatgttcacaggagtagaggagacgcagacgtggccccaggcagacagaaggtggggggcagaccagaaagcttccattaaggatcctctaatgtttaacaccgactcaacggacatgaatttgagcaaactccaggagatagtgaaacacaggaaagcctggcctcctgcagaccatgcgattgcaaagcttcagacatgacttaacaactgaacaccaacacatttagcatcagtagccagaactcagacaccacgtggtgagtggaaaagagcaccaaatgtgaaacccaaagacctggcttttgagtgcaggttctactgaaaatagctgtttgccttg

SEQ ID NO: 56864 - DNA, 1368 bp, Bovine  19866881782401
  misc_feature (1)..(1): n is a, c, g, or t
naaagggctgggatcagggaatctcctactgtcctggggcagggcaatggcaggaagatctcattaacgcctttccacaaaggggaaaaataatatttcagcgtgttccctttgtgtcttcaagcggtgataaggtgccaccaaagtgccagtctgagctgcgttcaaatgaaggattattctgataagatggagaggggagatgctcggggcaggaggaccctctggagggggccgaggctggcttaaggttattaaacaggaaatgcctggtcgcagcggatcaaggggaaattacacattctgtcacatttgcttattgaatcccagttctattgcagctcgaaaggggaaaaaataacgccaccccatcaacctccttgtagctcttattagattttgcaacctttcaatattaaaatgctagtgccggtggcaaaattccttgtcagtttttaatatcagtaagggattgtggtattaggcttaagggggatggaaatgggaggggcaggggggtacagaccgtccgccgagtcccttgtgtccacagccgcagccgtctttgcttctcagagcgccttgcaagcctagtagatcctgtcctcacactttgagaggaggctgcagagatgagggtgaccatctcaggggggaccacacgcgcctctgagcttcacagccagagtcactgagccccacactcaggtttatcctgaggcaccccattccagtaactcagtttatccgatggcaccccactccaggactcttgcctagaaaatcccatggacggaagagcctggtaggctgcagtccatggggttgtgaagagtcaggcatgactgagcgacttgactttcacttttcactttcgtgcattggagaaggaaatggcaacccactccagtgttcttgcctggagaatcccagggacgggggagcttggtgggctgccgtctatggggtcgcacagagtcggacacaactgaagcaacacagcatccgcagcagcagcagactctatcgttaggtgctgctctaacaagaggccacagacggggtgggtgaaacaacaggagattattgtctcatggttctggaggccagacatccagaatcaaggtgctggcagagccacactctctctgaaacttgtaggggagaaacttgactggacttcggtagcttctggtgtttgtcggcatcccttggcctgtcgatgtatcaccgtaatcgctcttctatcatcacatacctgttttctgcctcggtgtcactcctttcctcctcttaaagggacatcagtcgtatcagactacaggccacctactccggtatgacctaatcttaattaatcacaccaga

SEQ ID NO: 56865 - DNA, 923 bp, Bovine  19866882159556
  misc_feature (1)..(1): n is a, c, g, or t
nggagccggttgatgtggaccatgtctgtcgtgtctttagtaaatcactgctctgggctccaggtgaggggctggtggcagtttcctcagggagacacacgttttcagttgcatcattttcaggaactcttctcatcagttcagcttttttatttgttgttctaagctggtgacttacattgtctttaccagctcttaccctgagttctgaccatctctcaagtgggaaaatgcctggcaaaacatcaatttcctctgaaaggagattctgaattgtccatgaaatgaaagcttgttcgctgaaagagctttaatagaaccacagccccgaggttgcagctgagtcgcttggacttttggtggcatcagggacaaaacacctcagtgtcagcgtgtgctgcgttgatgtgccagggcaaatgctcggctgtgcctggggatttacacatggactcacatgcacagacccatgggagctgggaagacaggacttagtggaaagaggaaagtctgtcttaaagggacagttattttccttgtcacctgctgctgaaatgagctctgggttagagtagggaaggttgaatccagtcccagctctgcctcgatattgctgtgggtccttggggaagtaacttcacctctctgaacttcatctgcaaaatggatatggagacctctcagttcagttcagtcagttcagctcagtcactcagtcgtgtctgactccttgtgaccccagggacggcagcatgcccggggttccctgtccttcaccaactcccggagcttgctcaaactcatgtccaactagtcagtgatgccatccaaccatctcatcctctgaagaagaaggcagttcttctcctcttgccttcagtctttcccagcatcagggtctttttcaacgagtcagttcttca

SEQ ID NO: 56866 - DNA, 1166 bp, Bovine  19866880490515
  misc_feature (1)..(1): n is a, c, g, or t
nggtaaaaaatgttactgtagttggcaatattataccttaataaaagtaaagtttattaagtgtaaatgagtatctgaattaaaccaagcttgaagttgcaatttttcaaaatacaggaaaaataattaccacttttagtagccagagtcccactaagaaaatagatatcaaactgaaagagtgctgagggaatgaaagagttaatgatcaaagaactgaaaaaaatacaaaatcattaccactcttaggtctgaaggcaaaaaaaaacaatgtttgaaatggaaaccagatatgaatcaaagtgtccaattggtgtcaaaagactggagttaaattattcactacatcaaaatgatagtgtcaaaattctttacacaaaataaagattcacattcaattttcttattaaaaattcagccaataatgtttacccattaattcaacaaatatttgtcaagcacctactataaaccaatctgaagtgcttaaacattgggtacaagaatcattgttcttgcatttagggaacttatagttgagtagggaagattagttattaaacaagtattagcatatataaacatatgcatagatcatgatatatactgcaaaaaacaatggtgcaatgtaagttatttcttcctaagatgtttgattgtctcaaagctgccatagcttttgatagtgatttggttggtgtaagcctttgctgattgcttgatccatattcataatcaaagcaacttccctgtactgacaagctctgctgttgtcagcacggttgtagtctaaattgtattctgaataagttaatgaattttaataaatgcttttcccaatatagtttccatgaagataatctacttcattaatttagtttaaaagtttaaaaatttaaaccacaataaagcataaatgtataagatttgaaattctctttgaattcaaaagtaagggatgtttggggaactattttaagtaactcagtacatgttgctaattacagtaattattattttgtcacatttattaccttcatctttcatagcatgagtaattaagtggcaaaaacaggttttatattgtgatcaaacactattctgttacatctaccctactgatgtcttcaaagaaagtgctgtcacagttttaccagtaaagaact

SEQ ID NO: 56867 - DNA, 1471 bp, Bovine  19866880520965
  misc_feature (1)..(1): n is a, c, g, or t
ntgactagcaataaacaaatgttgactgaaagtgaactaaaaatactttacttttatgtaattggttattgaataagaaggacagtcttcctcaaaatttaatgatgtcattaaaatgatataatcagagggtacatgatatgaaatatatgaatgttacttacggatattacatatcaaaacatccattaaccattggggggtttccctggtggttcagtcgtaaagaatccacctgtcaatgcaggggacatgggttcgatccctgaatcaagagtttcccacatgccatgtgcaccactactaagcccaagcaccacaagcatgtagcctgtgctctagagccccggagtcgcttcagtttttcactgaagcccttgtggagagcctgtaatcctcaacaaggaaaacccctgccatgagaaagccacacactgtaactagagagcagccccgactctctgcaagtagacaaagcccacacaaaaagcaacaaagacccggcacagccgtaagtaaaattattaaaagatttagacataacaatttatgatatgacatatttaatttctttgtcacgaaatatgtttcctttgagaaatcagtgaaaaatacatgtaagggtgctatctaaaaaataatagccaatgagataactaagctgttgtaataattttaaatctagttacttcaatgtctattttaaataagaacattgatagaagactaaaattattctttatatgccccaatttttattcctattatttagtagaagtctaaaatataggtataaataaaaagataataaaatatacatatatatgaaattatatagtgaaaatattaactcttctattaattatatgtcattcatagagtgacagataaaaattttagtaatatttaacatgaatttccttaaaagaggcaaacttaaggcatttaaatcaaatgctaatattaaattagtgtatctatttttatttgaattaattaggatacaaagagtcttatttatacagtatggtgacatctctcctgtggttaaatttttttctgataaaagctttagcactttctcctttcaaagactataactgaaaaattacaacaaataacaagcctaacaaaacaacattctgactatattgtcatatttattataaaacacttggctcactgcattttggcattttatacaactgattctgacagtgattaacatggtttgggcttctgcagtttcacccaagagaaataaaacaccaaaatctctgcaggtgtgtaatgggccagagatttacaatctgttctgcaaagtcagacttcaaagacttgaaaaaaaaatcttaaagttggcaatgcctctatcatcactaatatttaaggtgttttctatatttcaaaaggaactgtgtagctaattgcaaagatttcatctccaattgacttctctgcagctctcctc

SEQ ID NO: 56868 - DNA, 1567 bp, Bovine  19866880891317
  misc_feature (1)..(1): n is a, c, g, or t
nctatggttaataagactcttggaaatttttatttatttatttttttaatgtttatatgcataaggtgaaaagtggctctaagggagtgggttacaaccaggaaggtttataagacagaatggtaatcagggcaagaacttaggctgtagcatcaaatggaggaaggggagcatgacagagaaactcaaatttctctgacttcacagtagatttcatgaccagcccttatcctatgtaactcaaatacatttttttttaactgataatacatagtttttgttcactggaggtgtattagggtttatttatttatttatttttaattgaaggacaattacaatattgtgctagtttctgccacacatcaacatggctcatataggtgtacatatgtcccctccttcttgagccttcctcccacctcccaccactcaaatgcatttttataggatactgtacactagagtatctcaatctaatataattggcattttaaactgggcttttctttgctgtaggagactaatctatacactaaaaactgagcaaaatccctggcttctacccaccagacactcagtagcaacccctctcccactgtgacaatcaaaaacatctgcaaacacatccccagaggagcaaattcacccctttgaaaatcatcattgtaaactattctgagttttgtgttctagattcacttatctaagaacttgttggctaaaccagggcaagccttattaacaaaagcatgtcatatcagttctttccaaagaggtaatataacgcaagtccagggaagagatttttacaagtaacttgtatattcagactttaacaaaatgaagagcagcgaagttgacagattgtgcagcagtgccgttggtaggtgtgagtggggtcaattaaaactgtgtgagctgaatatgcattttcatgtgcctaatgatttctgaaaatcatttgctgtgatgcattaaactagccaatttaaagagtgattgaccaaaggaaagaaattgcatagccaataaaattgataacaaatttgggataaagtgagcactaatcttagaaaagctgtttgtgtgtaacatctgcaaggaatattcattatgaagacatatccactgcatgctgttaagtaaattgtaaattaagagtataatatacgtgtagcacaaaaatggataacttaagatttagaagctattttagtgcttggttaaccaaacattgatttcaatgaaaaagctgcaaataggaaagaagcttgtagacagtgagttgtgcttgatctgaaattgggcacaatcaacttcaggttagcatttggtcacttttgaaccactttatagtgtgacagtggtgttatgtaaactcaaacaaacattgattgaaaagtccaaagggacctggcacaatcttttcaccagcacatcttcttttacagcctcattacacttgccagtgattcatgggttttaggcttgactgagaagggtggaaggggctaaggaactcagtatgctatatttcaaccatgcaaatgagcatatttacctg

SEQ ID NO: 56869 - DNA, 1141 bp, Bovine  19866880906941
  misc_feature (1)..(1): n is a, c, g, or t
nacggcagcccaccaggctcccccgtccctgagattctccaggcaagaatactggagtgggttgccatttccttctccaatacatgaaagtgaaaagtcaaagtgaattcgctcagtcttgtccaaccctcagcgaccccatggactgcagcctaccaggctccttccgtccatgggattttctaggcaagagtactggagtgggtgccattgccttctccgggttcacctctaacagatgtctatttcagtaaattatgtaagttgtcttctttctcaatatacagagactatgaaatgaccttatataaaactttatacaagaaggattaaattatttggaagttctgcttgagatgatcccaaaaacccattatttgactaaaaatttaatgcctccactgcgatacagcactgtgtaacctagggactccataaatacaggatgaaacacagactttgataagacttagtactcaggcagaaaataattgttgtaactcatgtacaaattaggatattatccatgacaccatgttggcataaatgatttacttaaagtatgtaatgaactcaaagaagatgccctgagaacctgagaatcttcacatgaaacacttatattcctcatagatgtgtgtatgaattgtttctaactatatttctttttatattgtaattcaattgtctaagtgctactgcaaatgtgacactagaaaattcacaactgtataagactcaaaatgtgaaggaaacacctttacacatatataatgacaataaatgtataaatgatataaacaaacaggatacacatttcagctcacatttttaaaactaatagaacaaattgaaacctttttttccttgccaagaatgtgcatttcattatgtaaaagattttaatgctgatttatatgtgaacataaaaggaaattattaaggacagtctttcattaggtttttgaaaagtagtttctaaatatatgcatgtcagtttaatgaaaagagtgatgatagtaatttctaaatgacctacagatgtgtttatatagcacctacctatttctactgggcaaatttttttcatttaatttcacatatatcaaatggcggagttcaggcaattgcagatatagtt

SEQ ID NO: 56870 - DNA, 1885 bp, Bovine  19866880906942
  misc_feature (1)..(1): n is a, c, g, or t
ncatggtgtatggataatatcctaatttgtacatgagttacaacaattattttctgcctgagtactaagtcttatcaaagtctgtgtttcatcctgtatttatggagtctctaggttacacagtgctgtatcgcagtggaggcattaaatttttagtcagataatgggtttttgggatcatcttactgcagaacttccaaataatttaatccttcttgtataaagttttatataaggtcatttcatagtctctgtatattgagaaagaagacaacttacataatttactgaaatagacatctgttagaggtgaacccggagaaggcaatggcacccactccagtactcttgcctagaaaatcccatggacggaggagcctggtaggctgcagtccatggggtcgctgagggttggacaggactgagcgaattcactttgacttttcactttcatgtattggagaaggaaatggcaacccactccagtattcttgcctggagaatctcagggacgggggagcctggtgggctgccgtctatggggtcgcacagagttggacacgactgaagcgacttagcagcagcagcagcagaggtgaaccaatgaggtcattttaattgaaatccgtggggcagtgtatggaagccaattctaatgcaaattgaatactaacttctatttaaaacacctgtgggttcaattgataccatttcatgttgaactacactagaattaaagtttccaaacaccaatctttcaatgctagcaattcagaagtctcatttgaaatctcattttagcctttatctaaatcatctacatcttaacatttatggttttctactattgattatgtaaaggactgtaaggccttgattctatatttttatatggactgtagaagcacttgagggaatcttcatttgtgtctttggttgctgtcatcttcattgttttatggttataatatgaactgacaggtagtggaaatataaagggattcttgaagttcttcagcatatgcaaaaatggacattgaaatgtggagacttgtttatgtaagtctattaacagctttttcagaaaaacatgctgtgtgtgtctcattagagtggcattactgttttatgactaaaagggtagattttaaaaataataatcaaggaaacactctatagagtgttctttctatagcatctttatttttttggaataagtttggaagtacatgtaattaaattacaattaaatttggaagtacatgtaataaaaatgattaaatgcacagtatgataacaatgtacatttatttctcatttttagtttacctttgtttttaaaatcatgctagttatctttgaaggtgaaaccacaaactgtgttttcaagacatgtttttcctcagtagaattatgtcatggagaaacactatggatatccatcaaagtgaaacctacaaggacataagagctcattattagtgaacattgtaaccttcagatggcttcagcatttctgtcataaaatggcaagcggaatgagagactgaagcacatcacacactcgaaattaacatcactacataaattatggctcttatacaaatctaaaaggatctattttttactttaaagcaatgaattattacaacctccagtctttgtgataaaatgtttcagtgagttcaagttcagtaagatcagtgctggcttcaggtggacattattgattgaaatttgctaaagcatcctggcagatacaatgctacaactttagtcaagaaaccaagccaaggaacacatcgtggttctgatgcttgttctggatagtatgcttgttcctactgcaaaaacctagaaaaaacagaagatatcaaatgtagaa

SEQ ID NO: 56871 - DNA, 1236 bp, Bovine  19866880955358
  misc_feature (1)..(1): n is a, c, g, or t
nattacttgaaggctatctaactgcaaaaagttacttaaagaccattacagaaggtacagaaaatgaaatctgttctgaaagcaggatattgctaacatatgaaatacttgtgtttgtcaaagcaagtgacaccacattttctaaagaagaatatatttgatcttcaattcactgatcttatatccttgcatatatatttttttctgtatgaatagatataattttaaataccatgtgcttgtcagatccatgaagtgacttggagaaggccttattttcaaaattatcttgtcaatttcattgtgacagtaacagaggcaggtagcagcagttttcttctgattatattaaaatctcatctattatttagtttaaagctgacagcatatattaaggcttaatgaaggctttcagtaatttcagactaaatttatcttccccaattttatacattttttgtcatttgagggttataatttgatcaaaggttaatttcaagaggagtttttccgaattattttaacattgaataagtagagcatgaatttttgggaaatgtatccatgtgaaactatttttttaggagaactggaatgataagacaggtattaagaaaagcgttgactttttttagtagaaaaatgtaattaccgtctttatccatattctcatttagcactcatcaagtctaacctgtcgtctctcctccctgccagtcatcctaattcatcgactatagattgttttaatcttagtggaaaacatggaactttaatgatctgtgtagtagtatcaaatttattgcatagataaatataagaaaaatatttaagtgaaaaatatgtttaagggctaaacattttgttggggtcttccctggtggctcagtggtaaagaatccacctgcaatgcaggagacaccagagatgtgggttcagtccctgggttgggaagatcccctggagaaggaaatggcaacctactccagtattcttgcctgtgaaatcccatggatagaggaacctggtggactacagtccatggggttgcaaaagaattggaaatgacttgacaactaaacagcaacaacagcattttgttaacaaaaatactgactttagtttttgtttttttctttaattttttaacagaagtcatacttttctatagtttcttttctccaatagttttcttccattggatggtatcaacgatagaaaatgtttgcagccact

SEQ ID NO: 56872 - DNA, 1935 bp, Bovine  19866880971447
  misc_feature (1)..(1): n is a, c, g, or t
nagatgaaatgattatctgtcagaaatgttgtaactgccccccccccaaaaattaacaggtggaagagtgcggaggtgtttaaaatatctattaaagaagtatatccacactcctaagattttagacatgttcatagatatagtgagacaggtaagtagacagacagacaaaactagcataatttatctttaatgacagagttttaaagtagatcctgctccttctgtgactctaaattattttgcaagccaagcattaagaataagagtctgttgtgaatatgactgattataaaaatgaaagaatggattttaacacgttgtgtagtttgaaggatctgctcttctctgctctcttgtagtgttcactggcaaatctttgaccttggactacaataggtaatgtgtatgcagcatgaaaaagtctaaaaggaaagagtgaacaaaaaacaaaacagaaactgagtttattcacctatcctcttcaatctgacatttctccagtctctcttgcaactctcctatatgcctttaaaaacaacattactttgtaagtggagaaatattttcttcaatgtatgtattattaaagatgaaggagcaagtagcataaacagatagcttaatactggaaagtgtttccatgtaattgtcaggctagagtaaaagttaaaagtgtgctgcttgtcccttaccctttttataaagatttatgaagatactctttctttacaacagttctcaaaactttgtatgccagcatactaatacaactttaccaaatagacgcaatatactgatacaattttacccaatagatgcaataataggtctgctaaagcaaatatctttttgaaaaacaaaatagacatctcaataaattggtgaatcatttgaggtagtatataattagacttaaatatagacaacctgcagacaattttccttcagtgattcattattttgtcttatttagatgatagacaggaactaggatttctgtttgtttgtttttttttgtaagtacctcatgtgcaattaatataacagacattctaatctgaatattttgaatatttctagctctgccaaataataaactcttttgattgattttaattaaagtaatgaaataataatccatttagaaaattaaaacaataaaaataatgcttggttcttaaaattttcctcttagatataaatttccattaattttaaagcttagcatttttttaatcttagcactgcaaatgattaaataaacatattattttgcttctaaaatattcataaataattaggtagatctgtctttacttattgatggatataatccttagaactcaatatattattgtataaaaatccatgtagtttagcaaaaacttacacgtattctagacacataaagaatgaatacattctaatctaacccaatcagataaatgtagcttgtatgtgagtcctcaaagaagtagaaaagatgagtctttttaaaatttcctttcattataatgattatttataattctagattattgtaggattgatcattcagtataaaagttagcataacactatacaccaattgataaagtcacagagctgaacagaacagattacaggtcagctacacagaagccagacgaagggcaatgcccaggcaaacatctgcttcttcctattgcaattaaataacgggggcaaacctcaactgtaaaggtctaagtagctgaattctcaactttctgtgtattctatacttaccctgccaatattaaaatcatctaaaaataatctgaacacttgcctaacccttatactgccaaataaacctctgaaaacaaacttgcaggaaaggaaaaattccctatgccttcaaccagaacctccttagtcttccatttgttattcttcacaaggagatttatt

SEQ ID NO: 56873 - DNA, 3027 bp, Bovine  19866881435183
  misc_feature (1)..(1): n is a, c, g, or t
ntgaaacagcatgaactttttaattgtctcagttttaagtgttcattttatgttgaatacattatacaaagaaaatgtaaattaaaggaccacaatctgtttttctttagatgtatagtgagtgaaagtcactctgctatgtccgactatttgtgactccatggacagcagcctgccaggctcctctgtccatggaattttccaagcaagaatactggagtggattgccattctcttctccagggtatttttctgacccagggattgaactcaggtctcttgcattgcaggcagattctttatcacctgagccaccagggaagccccactttaaatgtataaaaatatgcaaatatgtactcttaagaactttttatagaatgctagacttcaatattcaattgaatatttaattatctgctctctttacacgttaagatttatagccagacaaaatgttgagagtctagaatttattttaaaaaaactaaagtagcctatctttttatctgtcatctaattttcaaaactattccagttaatgatatttaagcaggaattaaggagattaggaaatttgtttaagaaatacacctgaattctaatccagctctatatgaatttgaaattcatactcttcacacttttttccagacatggtgttttaattaattatttactattgcatggcaactctaaaaaaatcctaaagtgcaattaacaatttgaacatatttagataaaattatgatttgcttatataaagttatcaatgaatctatagtctgaggttttatgcttttatgaaatcataaaatttcaaagcacctaatatcaagtgcactttcaaatgatatagtaaaattagtcattcatcttatattctatttattatagcattattctatattcttttatttattatttattttgcattttcattttatgttctaaattgttaacctgaacagcaggcctaaatctattgttcaacatgaatttctataatttaatttgagattaaaactcacatttgtgtacttgtgtgtatttatatgcaaggttataacagataaaatcaaataaagtaattttccctgagttccagcaagtaggcatgttgatgtatttacttcatttattgaattgtatttctgagacaagtaaattaggttgtgattatacatgacattaaaaattttactatagatgcttttaacagtcccctacataatgcagtccaaatacaccaagagtaaacctttctttggttgataggtttttctttatttgatgtttttggtttcattggaataaaaaggttaatcctttagatcttctcacaggaaccaggcaagcagctcatttatttttatgggaaaaaaacttttcagtcttgttctgtttacctatttcctaaccttattctgacatcccaggccttttacttgccatctgtaaggcaagtactcatttaaaattaatccactggaacctatttgcattgaaagtgaagcagtctgttatgctagaaagatcattgaactgggacaaaaatgtctagtatcaactgcactaccgtttagctaagagaccatggagatctacttctatccattttccttcatttttccactatctggaaaatgaaatatctggattaatgtctagatttccttaggcccataacattctcgtggacatattaaaatttaagaactgatagtctgttttatacattcactttaatataaattaatagaattagtttcaggaaaaatcaatcatatttgtaagattgcattgtatctgataaagattttttacaatcaggttttaggtcatgcttccaaatattctccagctttattttttaacttaaaactatgtaacacataaggaaacctcaatcaaagtaattattcacaaacttgtgtgaatagccatgatgcctctcttgacattgataattcatataagtgcactttgacataataaaaggaacactttctaaacctctattaactatttaactgtgatgagctagtttttcagtaaagaaattttcatccagacccttataaactattttatctttcatgaaatatttttaatacttaaaaggtcttcatttaatagccctcatgaaaaaccataaaatgaaatgttgaagactagtttatccctaaaaacaaacaaacaaaaaaagaacccatgagaatcaacatagactggtagaataatgcaattatagaatttattatttattaaaaagttatagaagatttgagcagtcagtttctaacttttctgcttgatgaataagacaactgatgcctatgtggattaaatgactaagtgacttggatgaggtcatgaatctgtttaaaggaaaaatcaatatgtagcactatatgtgcacacacacacacacacgtaaacacacaaacaccaagcacaacaagtactttaaagggagaatcactagatttgactgtgttatacacaaactggcactctgccatgtaagactgaatttttcaattatttgtttagaatcatgaatatatatactcaaaataaataatagacaatacaaatttaaatagctttataaaaacacaagaacatcagttgtaagtcaaaatacagttagctacgtttgctaaaattatgtacaattaaatagtcatctttcattttgttttatattctttcatataacacctggcacagaaagacctgggataacaaagtttttgacttgccttaattaaaaacaaataagaactgctgccttataaaatacattggccaatataaaattactaactagactttaatgttgaacagaatctcatagacatgatgaaaaggatacattcaacccatgcctttaaatacaaacacatatgtaaaagccttggaacccctgaatcagaaatgttttgattcaggacaacagactgtgatgtattactgaatgtcattgctagtcacagcactggggcatgtaggaataaagat

SEQ ID NO: 56874 - DNA, 1193 bp, Bovine  19866881459209
  misc_feature (1)..(1): n is a, c, g, or t
naattactgctacattttcacttgcatattgagctactagtttctcatgcaatagcaatgacaattatttcaatagtgtctatcatatatgtgtattaatactgtatctatctcatatattcaaagcagaattttatcaataaactggacagttaacttggttaactatttcattgtaaatattattcttcaaaaattatgccatttaaaatgcaacttcaagaaatgactgtattaactattttactgaacacagtgagatataatgaaggatgtaacaatcatggcaaaaatgcattaatattaaatatttactgcataattcagtcttattggacacagctgtcgataaaatatgcccttactgttgacaagtagctcctgtgttttgcttgtagattagcttgcagccctgctctatattctttatcttcatcactgcaccagtcctttaattaggcagtgaaatcttctgcatagtgattaggaaatcacagttaagaaggtgttacaaagagatgtttctggaagctactcaaaatagctccatgctttggaaatttctccatgtacagtatcaaggaaacgtgtttgcatttcaaaagcaagtgacaactgaccttcagtaatcaggtttactaaacttttaatcctcaatcctgaaatgttgggtgtaaatagaaaaagttttgaaccatggttggcaaacaatggcaacttcattatttaatctgtgaaatgaggtggttaaccacttttgtggtggaatgcaaatgggttttagattctaagagaatacttgaacttatacaaataaatttgctactattgcatgccaataaaatttgaaaatatatcttataaaatggagaaacaaatccattttcataattatactattaccagtactttaaagtgtgatactttataagaagtactgatttcagaatcaaattttttcatttcagaattcaaagatataactgaccaaggtaaatgacataggactcgtgagtcaggacatatttacagatagttttattattatggacaaattatgcttgttattataacatgtaacattcaaagttattgcaattatataataccaaggaaggaaaaatactgacactagaaaaataagtttaagacataaaaatgacccctccgtttgttatttttatttctttcat

SEQ ID NO: 56875 - DNA, 1976 bp, Bovine  19866880367752
  misc_feature (1)..(1): n is a, c, g, or t
natttttaaaaaatgatcccatgagaaaaataatcatcttataactggatccctttgttgtacgcctgaaactaacacagtgttgtaaatcaattgtttcagtttttaaaagtactgtaggataaaattcagaaagaaataccaaaaccaaaacaaccccgcccccctcccatggcctaaccacaaggggtgcagtgaggatgaagtgacggggccctcccttgaggaaggggtaggtggtttctgctagactactaaagtaatatggaaagcggtattggcgtattggttattggttggcatctgtgaattcactcagcattcaaggtagtaataagaactaatacatgcaaaaagagcttttatctatatcctgtttgatcaagacagctctgggtggtaggcagggtagaatgctgagtagacctggtatgaagaaagttcaatgagtcatctgtggttgcacagacagtaagtaacagaaccaggacagaagtccaggtgttctaactataagcagggctctgttcttcagtgactcctctactaagtagaaagctgtgaggataaaaaagagagtgagacagagctgtgactctaggggaaaaacagttgggaatctggtgtatggagcaggtagcccaggaagggatgaggcgggtggacagccctgcgcctggtggaaggagcggtacctgggagatgtcctcagccagggcgctgtagaggcggtgcacagagtaggcgtggagctcctgggcgcccccaatcagctggatcaggttggccactgcatcatcgcgcacataggtgcctgcctggaggagtgaatgtggcttggtcagcgtggtgaaccctgcccgctcccacccagctctcagcccagcccctgcctcaccgtcgtcagcacacggaggatggtatctatgtgccaccgcttggttggggcgaacctaggggacatcatggctcttcagtcctggcgatgaccctccctggattccaccctctctacctcctgggcacccatcccctcacctctctgctgccagtaggatgccagaggcacagtcggcccgtagatcaggggggcaggactccagaaagccctgcagctcctgggtcatggctcgtacgttagagctattcaccagggccaggctcagttccagggcccgcctggagaagaaacgtgtgtttagacaaggtctcccaggtcaccccatgacattccttggggctcccctttcccaggcacctgtctccttagtcccctttctccagctgctaagctggcccggtgcctgggccctctactctttgctatggttcctctgccctgcttaccggctgagggaggcatcaggttcccacagacattccaccacagtgggccggtgccgctgcacggcactgtgatcagactgcaccagcttcagcaaggacgtcagcgccacgtatctggtcagagcacgagggtccttagcataccctggccgtcagccctctccccacccgtcctgctctggtatggaaataagaggctggtgaatccggagattctggaagaaggagggcagagggtcaagggctcagtggcacagccctgccagacacctgggcctattacctaatgttcctgtcactgttgagtaggaagcggccaagaatgttgacagctagaacctatggaaggcagaggttgggagtcagggaaggagcagcctgctcattcagcagtggggagtgcatggcacagggtgcccagggtggggagaagaaactggagaacaggacctgtctccctggctggagtgggtggggaggggcccaggggaggggcctcggggacggtacccttaggcccgcggcagagcggatgtccatgatggtcaacactgtctcaaatagcaccgcgttgcccgcgtttcggctggtgtccgtgtttgtggctacctgcgtggatgggagagaag

SEQ ID NO: 56876 - DNA, 3794 bp, Bovine  19866880431711
  misc_feature (1)..(1): n is a, c, g, or t
ntggaatcacaccaccttccagcgaaatagaggccttgcctccacaaatgttaacctaggggcggttttgccataacagttttctaactgggaccctctttaacaagagatgccctattaccagttgcccgttctatcttatgttaagaaccaagaatgaggtggagttgaagagactaacccaatcctctcctttccccagagcctgggtccttacaacgtttctaagacagccttgctgggcctcactaagaacctggccctcgaactggcagagtcgaatgttcgggtgaactgcctggcacctggactcatcaggactagcttcagccgtgtggtgaggaaggggagtcctgcatcccactgggaattctaaagggcatcttctcaatggaggagcccagctcctgggtcctgagctcccaaccactcccaccccctgccctgggattttccaccctccccctccataccagccatgtgtccagaccagatccccacactatcctttcctaaggtgcacagtgagactgaggaattcagatgccactcaggccatttcatatttccttaagtggatgagacctggggcaacccaccaaaatgcctccttaggacctgaagagaatggagcagaagagggcagtgggtagtgactgggagctgggaaggactgggaaatgaagggggcacctctccatccttcctctcaatagatgtgagggcgggcaatttgtcctttcactgtccctcagaggaagtgattttcctttttcctgcagttgtgggaggatccggcaagacaggagagcataaaagctacctttcagatcaaaaggtaaggctgtcacaggggaggctgaggagggataaagatggaaaggtctggtccctcgaagcccatagcttgccgtctctcagtcccgcagacaacacagccatcctttccttgcttcaaatacacagacttcacaagtttgtgaacagagcgtcactacagtggtgtgtgcagggagtctgcctccttgcaaaaaccaaacacagaggcatccaggtttagcagagcagagccctgggggaggccctgactcctctctccacctgggtgtttgcctccacctctgggtgtccctaaggatcagggaccaaaaccaaaatcaaagcgtgcttttttagtttccctggaatcaaaagagtcatgtttccaaagttcaggttgatgatcctaccattcaaatgaaaggatcctaccattcaaataaaagtctccaaacttcccttgcctaagaaaactagcctcttcccccaaaaggtcaggcaccttcatctggctccctgtcctctaagttctctgcctctttccagtctctggcttccgggagctctcttgtctttagctcctccaccttgtcccctcaaggacatgtaccagcaatgcctacttgaggagggagatgctctcaagtgctcctaaagccattctcatgtcaggcatgagctgcaggcctagtccattaatcagtcagggcattgtcatccttgagccacagtgaatgatctggccccgagcttttcagtcttggatgcgcattagaatcagctgagtagttgtgaaaccacagatgctcaagcgtcactcccagagattctttgttaattggtccaaggcaggacctaggcatctttagtgagggaaggggagggaaggagaagttgagcctctcagatgacgacagtgtgtagctaggatggagaaccactaatccagtccttctaggtttgaagtacccactccacccacctctagagcattctgtggcagttagattaaagtgttccctaactatgcaatcactgatacaaacactgagaattagcacagtctcacaaaatgactttgagacaaaaatagattcctgaaaaagttgtctgtgaattgaagctgtacaaatggaatcattttaaacaaatcatttactatctcacagactgtctgatatttaaatagtatgcacacatgtgaaacaaattattggaagaatgaaatagccaggttatctatataactttggattttggtgtcctgagttctctaaaaaacaaagtatccccatattatatgaatataatgtgtggtggtttttgcagagtacagtattaatgcttctattgaattataacagcttataataatggtagccctattttatggacaattcactgatcctgaaaaattgcctgatactttagcaaattccattccctgtttgatttttactcctttcctttttccctgcttcccaggataggcaagccagaggagtgtgccggcatcgtgtctttcctgtgctctgaagacgccagctacatcactggggagacagtggtggtagctggagggagcctatcccacctctaaggacgtggagagcatctaccagggcagagattgggctccaactccagagtcctgttcccgaatcaatcaactggcctttcccacctctgcctagcatactgctacccttaaaccataacacccccctgccacacacacacacacacacatacacacacaaatcaattatgccctgtgaaaagctccagcattctctgctatcaaggtgtggtcttaggaggattcacgctattgctgtagccttggacaaagacatcccttgagagaacagggcaggcctgctgagagggcttagtctactgtggtaaagagcaactagtattattttctaggcatcagggaaatttgagggaggtgggacagaaggaacttggagtggaaggaactgagttggaaattaacaacttgcaaatgaggtgcaaataaaaaggagatgatcacgatgctttgagtcaatgtgctcatttttcagtgtagggtgcataggtgtgatagccgagcacagcgttaagtctgagtggactggattcccctagtatgttcccagatgctaagtctggatcctcctaaccctcctccttgtctccaggacctgagcgtaatgctgagggtggaggtgtttgcagagctgccagctgggaggaggtggcacgggaattcccaggtgctactctcggctcacacccgcggggatggtgccaagaacatcgcagggatcaccgaggctgggaaagcgggaaaggaaggtcgaacttccccagatgtggccaggtcctctcctagcatcgcccttggcccgcaagttccttccttcgagggtcagagaggacgagccagacgcgtcccgagcaagcagtgaaaagggaggagcctggcaaggatgaccccgcgaggggtacccaggcccacaaacaaaagaaacaggttctgctgacggtgcccgaggagtggatgacacggaaagtgaaggcgctgtgcccccgcccgggagatagcccgggctccaaggcgacacgcacagggcgtcgcacgcgggagccggcgggaggggtgggcgcgagcgcgcgcagggtctcacgcggcccggaggcgcggcgcgcatgctcaatcaggcacctctccgggcggggcgggagacccggcgctccgaggcggggggaggagcgctcgcgcagccgcccctgacaggagcgggctccgcggctgctgcatcgctcagcgcccgggccctgccggagccgggtctagcatgtgccgcggctccccggcggcggtgacggcggctcctctgcagcaacagcggcagcagcggccgccatggccaagtccagcgcggagctcacccgcgagctgcaaggtacgaggctgcggtggt

SEQ ID NO: 56877 - DNA, 1686 bp, Bovine  19866880582172
  misc_feature (1)..(1): n is a, c, g, or t
ncctagtagaatcgggatttgtaaagaatgaacaaatgtatgtgttgggagccccagtaaatgcaagataaacaggactgtttagggggctggtactccctttgaagtcacacttttctttgaaagaatttattgtgtgactctaacaagtggaaagagatatatcattgatgaagtcctcaagaagatcactacaccaaatacagtatctggtttcataatctccagtctaatcatataagggccagatctgaaacctagacacagaaaagacctgtgattactggaaggcatttgtcaaacagctctgatagataaaatgaggaaaatagatccttccatactcataaacgtggccattgtgctcccaaagacgtctgtgactcagcttctgatggccagggccactgacgtcccacctacaatcttagcccaacccctgtttctatttcagtcgccattgaggcaagtacagcattagtgatctcagccttaattcatcctcaggctcgagcatgaccactccttcctacttcccacatctctacccctgccgatccgcaggaacatggggccagccctcctaacacctcctttcttgcaggctgacacagcccatcagccagggcctctgttagcttccaggcctggactctgaaaaatcacatgtccaggatctaggtcagagctcaaataggtagagatcgtgctgactgtggacggatatcttagtcacatatctgccccagggagtctctggtcctcacacaaccaggatcatgctctccctttccccagatgctgttgtgaggcttggtgtgactcgtttctttgttcattatgttcctcacacacttgacttcccactgtaagctgaatgtccggagtcctcatgtctcctcatgtcaagaatttaccactactgtcttttaatggtatcggacatatttggccgattacgtgaagaattcctcagcctgtagaaaagagggctctctgacagattctcctgctttatgtttaactacagttgctaccacattcaccaaaagaggaacctgtaaatcctctgctctgtttgaaaatggacaagatggcccagctgctgtccatgtcatctaaccaaacaggggtcaactggtcttattaaaataagacctccctgtttgacagttgccattgtgcatggtttctttacattaaaaagaaactgctcatcccctccttattcataattttagtatttagaatttaaaaagagtttcaaaaaaagtaagaaaataattcaatagaagttgttaaatttggagatctgatttccaaattaaaagggtttccaaaggtgaaaaaacaaacaaaaggatcaaaatcaatactcagagaaaacattatatttgaagaaagattacagtgaatacgcccaaagttccaggcaaaatcaataacaaaagcaacaccatgacatagtttcataaaatttttaaactataagggaaaaagaattctgcaagtttccaagtagaaaaagtaggtcattttcaaagagcaaaatatcagactagctttggctttttctgctgctatgagcaatgcctgatgacactatgctgacatcttctatggaagggataagctgcgactcaggaataatgggccacatcaagccattgtatagggaggcaacag

SEQ ID NO: 56878 - DNA, 3145 bp, Bovine  19866880583018
  misc_feature (1)..(1): n is a, c, g, or t
ngatcttcctgacccagggataaacccaagtctcctgcattgcagacagactctttaccgtctgagccaccagagaatctggactggtgggggctgaacctgggcagtgggcactgggtgggcttagaagggtgggcccaggatctgggggtcctactcagcctccctggatctctcacccctgtggtgccctcactcccataggcatcttctgctgtgggccctgctctgtgcagtccatcaagaatggcttggtctacatgaagtacgacacacccttcatttttgcagaggtgagagctgtgcgcctggtgccttcatgggcagcctggggagaccagggcactggcgttggtcctaggttctccaggcgtgccccactgctgaccaactacctctgtgaccttgggcaggtcactcattctacaaatcttagttttcccaactgtaaaaagccataataatggctgccgtgctttctgtgctcaggatcaaaagaaataatgggtatgaaactgctttataagtcatggagtcagcaagtgagtgcaagggattactgttattaatgcccaatgcactgtgaggagcctcccagatcaacttctttcctgctttctggccttgtctggctcagcttgaaaagtctcccagtttcactctgccaggaagctcccaacctttggatccggccttccctgcagttcctaggatccgggaaggcagctggggggtcatgcccgccctcagaccctctggctcattcattcctggctcacacccctcacaactgccctcctgacaggtgaatagtgataaagtttactggcagcgacaggatgacggcagcttcaagattgtgtatgtggaggagaaggccatcggctcactcatcattacgaaggccattggctccaacatgcgggaagacatcacgcacacttataagcacccagaaggtagcagctccccatcccggccagctctggccacaaccaagggtgccttccaagcgcccgcccagccagcagcagctgtaagctcacccttgaccctcaacccccaggctcagaagcagagcggaaggcagtggagaccgcagccgcccacggcagcaaacccaatgtgtatgccacgcgggactcagcggaggatgtggccgtgcaggtggaggcgcaggacgcagtgatggggcaggacctgatggtctccgtggtgctgaccaaccgcgggcagcagcctccgcaccgtgaagctgcacctctacctctctgtcaccttctacactggcgtcgcgggatccgtcttcaaggagagcaagaaggaggtggtgctggcgccgggggcctgtaagtgccccgtccccagcctgtagcacccgcctccatggctgggtagcccagggctggggacatggagacctggggaggctgggtctggggaagcaggccttggtgacaccaggcctcttccctgcagcggagcgtgtgaccatgcctgtggcctacaaggaataccgggtccacctcgtagaccagggggccatgctgctcaacatctcaggccacgtgaaggagaacgggcaggtgctggccaagcagcacaccttccgtctgcgtaccccagacctcagtctcacggtagagcagcgggctgggctggggcagattggagggcaaggcgcagggcactaggccagaagcagtggtgggaggaggtcagggaccagcctgggctcttgggcttcagttcccttttctggaaaatcaggtctcctttcccttactctggggtggcttcagctggggagtaggttggagtttcctctctggctttgggtgagccctccccccagaggcaggaatgtggggtcagggcggtcttcattctaaggagctttccctccctttctggtgggactgtccagtcccataaatttggcccgaagctctgataatgggggtctctttctctctcagttactgggagcagccgtggttggccaggagtgcgaagtacagattgtcttcaagaacccgctgcctgtcaccctcaccaacgtcgtcttccggctcgagggctccgggttgcagaggcccaagatcctcaatgttgggtgagtgcagcccctccttctgccccagccactgcccttgccagcctcctggctgcatgggtcccacctttgtccctctcctgctcaggtcaggacggtaaggtctgtcacttggggctagccagcaacacctcctgcctgagttcaagaaggcctgcttcaggcagtgctcctcggtgtccctgccctgccttgctggcttgttagggagctaaaacctcaaataggaatcactagtaatttgtcactactgtcgcccagcactcaagagttgagcaggcactttcaggaatgtaagctcatttggagacccccaataccctttaaagtacattagagataatcatgatgagcttcaggtcctggcttcatcactcatgggctgtgtgctctatgtatgatcttctctatgcctcagttttctcacctgtaaagcggggataacagtaataacctggctctgagaatcacaggagacaatgcatgtaaaggcctcagcgtggtgctgggcacagcatcagtgctccgctggtagctgcccccctttacagatgcggcagctgagaatcacaggagacaatgcatgtaaagccctcagcgtggtgctgggcacagcaccagtgctctgctggtagctgccccccctttacagatggggcggctggtggccacatctcccagagggtctcggctcctaaggggcaggctccactcctccaccacagtgagcacctcacgcaggctctcgagctggttgctgggctggtgtggtgagcagagtgaacagttcctaaggagagagccctgtgcctcaggccctcatcccacctgctggggcctgatcccaaggggaggctgtgtgcccagcaagtgcccaaggtcgtgttcccaggccatgctgccacctctgacatggactcacacatgcaggaacagggaaagcagagaaggccagaggctgacctttaagatcagctttctggtgacaggagcaggcattttcctcatccaataaagagcacccgaagg

SEQ ID NO: 56879 - DNA, 1100 bp, Bovine  19866880638664
  misc_feature (1)..(1): n is a, c, g, or t
nttagtttttgtccctccgtcttaaggcacaaaggaggaaactgcaggtagggctaatgagggttgggaattagtgaagaaccatgggaggcgggatggagatcgcgtactaggatactgataacttgcctcagtcaaggaactgaggctagtccaggatgctggctcagaaaggcaggcgctgactgaacacgctcccacctttggttcctgaaggaaggctgagatactacatcttggcaacaactagccaaggcttacagtctagtttctgggaggccccatttcccacaaaaggctaacgcttttgtgctgtgctgtactcggagtagcctacgttaggcgctgggagaaccgggtaacttgggatgaaggatggggaacagagctcattccaaaaaaaccgagagataaggaggccaagatgctgctaggccttctctaagaccgcgggggtgcatacaaacagcgagacttcggacaaaggcagccctgaagtaaaagcaggtaaggaaaagtctcctgacggggccagccccctgctctcaaagtcctcttgggcctcccccctacctcccggcacccctcgcgcggagccccgaagctgtcaaccccctccaggctcgggaaaggcgtggttttccttcccggtttctcccttaaggcacagcggccagcccagtaccactgcgtcttggcaaggctggtggtgctcccaccttcactttaattagcatcttcttctcagtttggggctgcacacaggcaagttgctgcttctgccgctacggtcgccgatgcctctccccagcactccgccggcaggaatcacttctacttccgggtcacagccaggctccacccctgcctcgcattccccctctcccttctttccaaggggttccggaaaggctcaggaatatttctgcgtttcgtttcggtagcgtagtgaaagaaaaaaaagaaagtaaaaaggcagccagcttagtcacagcagagatgacaattctgagagtccccagtgagttggggctagtaataagagggcacggaacgaactactcctcccatcatgccaaggggcagctccgcgcgtctca

SEQ ID NO: 56880 - DNA, 802 bp, Bovine  19866880640285
  misc_feature (1)..(1): n is a, c, g, or t
ntctaaagaaaaggcagggagggtgtgggggcaatggtctgacttagaattgtgtgtctcagagaagagactctgagcgagaaaagcccttcgtatgtaaacaatctagagagagaagggttgggtagggaagggagtgggaaagacagagacagagccagagggaatgagagaatctaaaaggagagagggaaagaaaaagcaagagataaaaccagagagggacagaaaagaaagagaagggagaagagaaagaaagacaggagaaaaaaacaaccagggggaaggaaagagaaaaaaggcaggtcagaggagtgaagaggcagcgaccaaagccggaactaggccaggcaggtgcctcaggtgaggagctgggagaacaggaatgccaggctgaggtccaggagggccacggctcccaccaccagcgggttggcagctccctagagagatggggaaaaggcagtctcagtgccggaggaccaggcactacgagtcccacctcctgccttggctgaggtggcaaagcagaagggtcccggacacccttcctcagaggagagcagggatatctccaactttggctttggattgcaaaacagccctctactcccaggcagagccctgccttccctctggctccctcaagtgagcccatcccccgctcctctcccctccctgcagcacgtggcccaggcagaaggtgcctggccttagtagcagacgttggcagcaggcgcctttactgcagtgaagcagagagggatgaaggggtgagggatgtggttgctaggaaacagga

SEQ ID NO: 56881 - DNA, 1569 bp, Bovine  19866880684619
  misc_feature (1)..(1): n is a, c, g, or t
nggtcaactttatggattgtgctttgagtccaattctttctgtaataatttccaagacagcccttcccctttaaaaacattcagcttatattaattgagaatttactatgtattcagcactatgttgaaccttttacatgcattatttaatcctccaacaccttgtgagctaggtactgtaataactacccccattcaagtgatggggaccctgaagctcaggaggttttagcaactctcaggccacagagccaatgtttggtggagctgggatgtgacttgagatcttgcttagggttagaaaacagaacattcataactccctgtgcctcccagagttcctgggaggtggctgcaggttgaggaaaactttacatcaacaaggtgctgagccccgggtctgactaacccctcataccaggtttccagggtttgcctagccaggaggtcacggtgatgccaggtggaagaggctgatcaatgccctcccaatacacgccgccatcgctggtctcagccacgttggtgaaaatggtgttactctggattgtggccatagcattggggttggtggtggcagaggtgccaggggccaccccaaagaagccattctcagggttgatggcccggagtcgacctgtcgagaggagaagtgaaaaaaaggaaggactaaccaggaagagttgagaggctcagtcttggaaggtcttgctcagctcctccctgccctgagctagaccctagatctgaggggaaaggctctgcatctccagggtagggggctgccaggaggcaaggggggggttgggggcggtcgttcaggaaaatgttctcactgacaaagttcaccctgagcagtgaggggagcgtcgaaccagaacccagagtatgatctgagggcctctcaccatcactgtcaaacctcatccaggcgatgtcatcccccacacactccactttccagcctggcagtgccggccgcatcatggccaggtttgtcttgccacaagcactggggaaggcggctgccacatagcgcttcttccccgctggattggtgatacctaggatctgcgagttggggagagagaggacaaggaagagagcaccagacagaggtcaggaatggtctgcctgggaaggacagttaggggtcgacagggaggaccaaggtttattcactaattgggtacaccgcctggccatggggcctggggtggcagcaaggggaagccccccaacagtcagcagcttcaggccaaaacttcaggcatttgggctgagtccttggcctccagtctggcagtggagaggcgaggctgaggctgactggtcaggccctgcccctggcctgcccccttcagatcctcaccagcccctcaccagcatgtgctccgccagccagccctcatcccgggccagccgagaggcgatgcgaagggcaaagcacttcttgcccagcagggagttgccaccatagccgctgccgaaggagatgatctcccgctggtcaggcacgtggccaatcagggttttctctggattgcatggccacggctcaccggctcc

SEQ ID NO: 56882 - DNA, 2047 bp, Bovine  19866880790880
  misc_feature (1)..(1): n is a, c, g, or t
nctcctggcattaccgctcctgcctcttgccccagctgcaccctcagccgactcaggaccccaggggcgcctccctgaggatgtgctgctcaaaggtaagcagggtcagggcgtgcttgagaggactctgccatgctgcccttctgaccctgatgcctagacctgctcttgaagctaccactcgggaaaatgcctggctctggggatgcataagatccagcccctggctgcagagagcccaagtgtctacttggctcctgatgtatgcagcccctgggtaaggctggcatataagtgaaactgaaggcaggaagttctccaaagagagggcagtatgtgggggtagacaggagcccagaagggtcctaaccaaagccccatgcctccttggcccctgcagagctggagctggtgcagaacgccttcttcactgatcccaatgatcagagtgcctggttctaccatcggtggctcctgggacgaggtgaacagtacagaagaggtggggattggagccaagaaggaatggaaggatatttaaggagacctgagactatttcttcccacagctgatccccaggatgccctgcgctgcctgcacgtgagccgggatgaggcttgcctgactgtctccttctctcggcccctcctcgtgagtcctgaagcttttgctgaagggtaccatggatggtgggcctggtgccgttggagtgatggtctgtctctgtcccctgcaccaggtgggctccggcatggagaccttgctgctcatggttgatgagtcacccctggctgtggagtggaggaccccagagggcaggaaccggcctagccacatctgggtatcccagggttggtgggtggagtcggggctgggacagggctggggtgggacagtcagaaaagtggtgcagcctgggctttctcttaaccctgtgctcccagctctgtgacctgcccgccacctccctcaacgatcagttgccccagcatacatttcgtgtcatttggacggcaggtgatgcccagaaggagtgtgtgctcttaaaaggtgagccagcctgcagcctccccgctttgcagcagcaccccccatccctgtcttcctctcacaggtgtcctctcctacccctgctctgtctctcaggccgccaagagggctggtgccgggactccgccacggatgagcagctcttcaggtgatgagcacagggaagcacacagacaggagcagggctgtgcactctgggcagctgggtgggatgccgggggctcaagtagatgtctcagactggctactggggatgaccagcactgctcccccaccctgcccaccctcaggtgtgagctgtcagtggagaagtccacggtgctacagtcggagctggagtcctgtaaggagctgcaggagctggagcctgagaataaatgtgaggcccgattcccctgagctcctgcttctctaaggagggcccatcctagacaggctccttgctaggaccttcctaatccccgccctctccccagggtgcctactcaccatcatcttgctgatgagggcgctggaccccctgcagtacgagaaggagacactgcagtacttccaaaccctcaaggcaagttgggtccgcgggagttggcacgggggcagcccaacacgcagagggcaggcagctgacacacagtccctgtgccctcttctccctgccaggctgtggacccaatgagggcagcgtacctggacgacctgcgcagcaagttcctgctggagaacagcgttctcaagatggagtacgcggaggtgcgcgtgctgcacctgggtcacaaggtaagggcgtgcgcatgcgccttccccaccctcgcccgctggcccgcctccctcttcctcaggaccccggcagtgtctatatctgctcctcaggcctcagccaagacacttcagcgtcccccgctttgccttccatctcacatgcccttcttggacgtttcttccttaactcattccatgcttctctccctggggcagaccccaccacctaacagctga

SEQ ID NO: 56883 - DNA, 1500 bp, Bovine  19866880799352
  misc_feature (1)..(1): n is a, c, g, or t
ncccatcagtgtactgacaaatgctagcttggcatccaagatgctgctcaagagcctcttcctctgtgaagcccttcctgatgccttcccctgactcatccaaattgagcccttcctcctgtggcccattgcctcctcaatagatccatactttttgcctgtcatatctcaatgcatttgttctgatcatctctgtgggatttttgttctatatgcacacacctccctgaggggcaggagctgtgtcttagtccccagtgtagccccaacccctggcacagtgcctggcacccaagagatgctcaataaattattgccaccttaatacatgagcagctttggggatggaaagtgaagtgccctggtgacccttctgttgtactcatccagaccaccatgttcccaaatgtcttcatgtgcggcatccagacaattgctcctttcccctggcctcaccagggaatgactaatgtcttgtttgctcaagatcagcgcatggcacggcccctcccacaggatgtggccatatgggctgaatctcggggttgggggtagttacgggcaccaggaagatgccttcggaatcagtccagcatatctccacactgggaagcccctatcttcaggaggcttcgtgaccgggatgtgacactgtgtgctattaagcaattgtgtccgtttccttgtctccctgttaaaaggtggaactttgatttctaaaacctacaaggctcagcatgatatgtaatggtctttaagggacacgtgaagatctccattctgttgtattcaggttggtgggcgtggatgagggtatgtgtgtgtgtgtgtgtgtgacaagtatagccccgtgttcttccgtatgtgactgcaaatgtccttaacaaatgtgatgtggagagcgacgtgagaccgggtgtgtctccctgtgtgcatccccaaggctgaaactgtcatggtgtcatggtgagtttatgtgctggcacctgttcgtgtcaagactgtgtgtgagcctgcgagtcgtgggtgcgtatgtctccatcgcctcccggcgtgaatgtgtgtgtgtgcatgcaccaccgcagtgtgtgcctctctgtgatgctgggtgtgggtgtggcaggaggggaagatgtatgtcactgtgtctgcgggggtcctgcctctgagccacccctcagcccgccctcctcccctggctccgtggctccttcccaaccagtggccctgccccccttctccctcccaaccggtctgtgcaagtggggggagctggtgcttcggcccccccacccctccccatccaggccccataaatagcaccagagccggagccggagccagcgccagcggctggagcagcaagggagtcagggccagggccagagagccggagagaggagcccccgactagagtccaggtagcccacccttcatccctcgcccagccccagcccagcccaagccggcccagtctccatacaacattgcccccggccc

SEQ ID NO: 56884 - DNA, 715 bp, Bovine  19866880804484
  misc_feature (1)..(1): n is a, c, g, or t
ntcttcttaccttggtggtgagccccaggtgctttgcttgatgcctggagagaatctcagtgacactgacagctgtcaggtgtgcaggacctcagtgtctgggcagctggccactcctctctgtgctttagctcaggccatgcctttctcctcctcccaggacacacccaacagatcgccatgctctctttccagccatcactttgttgagtcgtcaaagccccataccaggtatttaaagacaccaaatcatattgtgtccatcagactaggcctcttaaacacctttgttaccatcacagtgcacagtgacctctgtgactttctacagcactgtactcatttgcttccaagaccactgttccttttcttgtattttgtgttaaccactgttcattcagtcgtccaagtcagaaacctcagaatcagccatgattcttcctctcacttcttccacatccaactgtcaccaagtcctgccaaaattatatctgctctgtgtaagctgacctcctcctcatcccactgttactttatcttacttgaggtggtcatggatcttgcctggagtagagttgtagcttcttttctgctgttgcttccaaactaagctgaggtgatctttccaagatgaaaatctgatcaagtccatctcattgctaaaattcaacaatggctctccatcaacttttttcttttttcaaattttattgaa

SEQ ID NO: 56885 - DNA, 1417 bp, Bovine  19866880813426
  misc_feature (1)..(1): n is a, c, g, or t
nccaggagcggagcccatacgtatgctgcggatcgaggtgagctgtccccctgcacacagagtccaaggcctgagtcctgcgtctgatggcccaggccccctgtacccgctccttctgcctccggagtcctgccttcttgcctccatttctctaccccttccctcgatgcctgagtacccataggctccctcagcctggcctggcctggccctgtggcatgtctctcagacagaaaatgaaattgtcacctctcctgacagggtgaactggacctcccagaagtcagccgccgagaattggacctgctgattgctgaggaggatgaagccatcttgttagaggaacgtcggctaggtaggacccgcctggcagtggacggtcagaccccaggcactggccatctgggccgggcaatgttcacatctcttctgtgtcctaagcttgatcctctcttcacagaattaaaagaggagccctgggccccagagcgggagatcacagtacccccgccctcgcctttagctcttgtagggtaagggcaggagccccgggccaggtaggggtcagcgctgggagggtgttttcatcctcttgcccatttcccctcagggtggaggaggcagcagagccacttcccagggaggtcctggccccagaggagctgaagccggaggtcccacttcccggtgagtacctactaaaccagggtccttcctgggggtcctggcacagctgctgcagacaatgccctgtaacccaacttgctgaagggaggaccctctagcttctcacctgggtggctttgagggcaaaaggtgtggacctagactgttgttgcagaggtgacacccccgctggagctgcgtccgccacccatcccagtcagccctgaggtgagtggtgcccctccacactgcctcctctgccagagctcctcacccattttcagtttcctcaaggcccctgctggcttccacaggactttgtccaagtttgtacaaggtagcctggtccacaccccattttatccagcctaaacttcccagatgggaacctcatacagtggaggctgcaccccccgagtccccacccaagcccttcaccagggcacctctagggattgggagtgtggggcctatttacagtccaccaggacctcaggaaaaagagtaatgggtagccttgcccccacctcccctccccattcagtggaggaggcccccagtccccccacctcccaggggcccaccagctcgccgtcgccgccgccagttgttattctgggatgaagagactcagatctcccggaaggaattccaggaacaactgcaaaccagagcccactgcagggagtgtgtgagtacaccccagcctctggagggatggagggaggcaggtgcatgctggccatctaaa

SEQ ID NO: 56886 - DNA, 3244 bp, Bovine  19866880829623
  misc_feature (1)..(1): n is a, c, g, or t
nttgaagttgtatattaccgcagcataacctagtttattctgactgagagagaaacatattttcattcaagaagcatcagatggtctgtgagacaaacaaatcaacaaaaaggcattcttgtccattttagatcatcagttccaagaactaagggagtatgcttttgagaacaaaatttgtacattatcattgccatgcaagccaaagaagtgtttggcaagccttggattatcaactttcaatagagccccagacatattctctaccttaaaaaatcactagtcccaatttagaggaagtttaaagttgttgttcagccgctcagtcgtgtccagttctttgcgaccccatggactgcagtatgctaggtttccctgtccttcactattgttttaaatagtttaaagttacaaaatgctaaagagagatgttaaggacatataagaagttaaaaaaaaaaaaagaaagaaagaaaatgggagcactttggagggaatcatgagcagctgtcaggagcgtttttacgtaaaggtcaaatcctgttgcgtaccgggggtctctaggcctgtcctcctgcactgctggttgccatacgggcccgcctagtgctttgacctggggaccagcactgtgatgttctcctaacttgtgttattctgtctcagatctcactcacatcatcccacatgcagataactttacataaaaatgcaatgagtgagggatcatgactctttttaatatattcccccagagggacttccctggtggcccagggttaagactccacatttccaatgcaggggatgagggctcatccctagtcagggaactaagatcccgaatgccttgcagcacagccaaaagataaaaaaatattaaaaatgacaacaacaaaacatatgttctcctagagcagagggccccaaaaccactgcccccgccccaggccacacagcaggaggtgaggggtggaagagtgaacaaagcttcacctgtgcttacagctgttccccaaagctgttattaccctctgagctccacctcctgtcagaccagcagtgagactagattctcataggatgcaaacccgaaaggtaatgaggttgaatcatcctgaaaccattcccctacccagccaccccatccagccacacctccagccctagtcagtggaaaactgtcttccaagaaaactgtccctggtaccaagaaggttcagacaagtgccctagagaaagtgatcaaactgggtactctagttccgctcactttagcgtaaaaggaagtgccaatgttcttccaccagctggttgaggtgccttaactagcactgaacaagttgactataaactccttagatatgagttgtattttattcatctgtgaagagcacggtaattagtgaggagcctgctttggattcagccagattccagctaggatattgattccatcacttaataactggataatcttggccttgataagcttaacctctctaatcttgtttcatcatctgtaaaatggggataataatgcctgactccattgacttgttgtggaaattaaatgtgacacttctttgtaaagctcctgatgcagctcaaaggtctttgttgagagcttggagaaacagtggcttccatccaaccaagagagtgtgatctcagaagagactgtattttatttcagtcactcagttgtatccgactctttgtgaccccatggactgcagcacaccaagcttccctgtccatcaccaactcctggagcttgctcaaactcatgtacatcaagttggtgatgccatccaaccatctcatcctctgtcatccccttctcctcccaccttcattctttcccagcatcagggtcttttccaatgagtcagttctttgcatcaggtggccaaagcactgaagtttcagctttagcatcagtccttccaataaatattcaggactgatttatttcctttacgattgactggttggatctccttgtagtccaagggactctcaaaagtctccaacaccacagttcaaaagctttgattctttggtgctcaactttctttatactccaactctcacatccatacatgactactagaaaaaacatagctttgactagatggacctttactggcaaagtaatgcctctgctttttaatattctatctaggttagtcatagcttttcttccaagaagcaagtgtcttttaatttcatggctgcagtcaccatctgcagtcattttgaactgttttagtctccatcaaatttcaaggagaattcctttgccagaggctgcaaatgctatcatgctgaggttgaatagataatgtttacctcaagggaaaggattggtttccattttatctgcattgtttgaatttttatatgaattaaaaatacatgacattaaaaataaatacagtttttttaaagggaaaaaaatgttgagttagcagggttgctggcttatttgctgaatcttttagctctttcaagggacagcaagagcaacaaacagaacatactaatatttatctatattaatacaaaacactaataattgggcttccctggtggctcagctgtagagaattcatctaccaaagcaggagatgcgaaagcagggtcagaaagatcccctggggaaggaaatggcgacccactctagttattcttgcctggaaaatcccatggacagaggaaccgagagaagcctgctgtctatggagttgcaatgagtcggacaggacttagcaacatttagttgcaacaacaaaaagataagtatccatattaataagggagtcccaatcctatatggacctgaaggtagaaacaaagtacaataatccttcacagttgcaccaaatctttgcaagactttcatttccttgtactgacagtttccacttcccatgattccacttataatttttggattttaccatggtgtgaaagtaatacccacttggaatttttatcttttttgagctaatggcacaagacactctcctgtgatgctgtgatgctctcctgtgagcaggggaacaagtctaagctccgagacaacacggtgatcagcagagtaaacaaccgaaacgcaggcaaccattctgcttttcacttacagtacagcattcaataaattacatgagatattcaacactgtcataaacaggctttgtgttagatgatcccgcccaactcttggccaaaataagtt

SEQ ID NO: 56887 - DNA, 990 bp, Bovine  19866880851266
  misc_feature (1)..(1): n is a, c, g, or t
ngccccagggtgcactcggtggagccgaggaaggtgtcgttgcggggactggtggatccgtcctcggcgtcaaacacatggaactgcaggggctgcttctcctcgaagaagtactccagggccagtacgcgggagaagacggggctggagcaggagcgcagcacctctgtgcgctccacctgcggcaggaggggagcccacctctgggaacccgggctgctttgctctgtcccggaccgcccccggtcttgccagctttcctcaggttcccatgccccagagactggctcctccctccctgggctgaaccccaagcttagggtgctgcctgcccctaggaccatcagccatcaggggctctcatagttggaagcagtgccactgcctttgggggccatctcaggaccccataggaccctgtgagctttggtccctgtgaaatgctttgtgtgtgtaacgatggcacccgcatctctatggttacccacacagactggaagaggcccctgagagtcctgaccatccctcgtggctgcccccacccagcctccttcctttgcgtcccggaggtctgtgaaggagaggccagccactctcacctccacccactgctcatcggagtggagcttgagcagcacacaggggtggggcttggtgagtgtgtctcggtcgaggaggccgtggcaggacacccgcagctccactctcgaggcccccagtgtcatggctgggggctcgggcacccaggccatctctgggtcggacatgtctctgtggggacagagcagacactggccactggaagggggacacctgccagaggagggggtctgtctctgggagcctgggccccacccccttaccctgcttcccaaggccctggcatctcatggatcttcttccccctgacctcactcggcttcccctgagctctgagcctctcactccagtgagtgctcttgtcacccctgctggccttgtatgcgtgga

SEQ ID NO: 56888 - DNA, 856 bp, Bovine  19866880917784
  misc_feature (1)..(1): n is a, c, g, or t
nggaagtcccaatttttctcattttttaagacccttcagagagagcaaccagtcttccccactgtggcttcatgtcatttctcagcccatgtttgcctctttatacttttccaggggtctcttttacctggtagccctggatttgtcagtctgaagccacaggcaggagggacgtcattcatgtgagattaaaaaatgaaggggattgtcacctgatttctgggctgtgtatcttgttctcagggacattgacaaggtggatgaactgatggctgacatcacagaacaacaggaggtggcccagcagatctcagatgccatttctcggcctgtgggctttggagatgacgtggatgaggtgactgggcaagaggggtcagggaatgttgaaggcatgggaccagccagaaggaatgcccaagagaattgtggggcaggtttggggggaactccaaaagtatgtttttggaagtagaattttcctttgttctgagtggcctgtcctcccgtatccaggatgaactgttggaggagctagaggagctggagcaggaggaattggcccgagagttgttacacgtgggtgacgaggaggaggagcccccggtcgcactgcccagtgcaccctctacacatctgcctgcggagccaggtgcccagggctcttctgtcatctcaaggacttgagggtgggatagacaggggggaaattattcctcatccatcctgcctcaaaggatccaggcagagagggttactgctacagttgcataggttgttaactgcataagggtacctggctgaaggggaatggggacttgagatccagcttgtccttcaccccacaaaccatgta

SEQ ID NO: 56889 - DNA, 2419 bp, Bovine  19866880976349
  misc_feature (1)..(1): n is a, c, g, or t
nttctgtacagttagggggaaaggaagaaggagatgtcaagggtgaaatgtatctctaacctgataatacccaacaattcttggaggcttggtctataaatacaggcacccaatgcctagaaatgcctctaaacatagaagttcctcaatacatattttttgtgtgaattaaagattagataggacacatcttccatccatctttttactccagctattactatggcaaccaatagcttgcccctgtcacctgagagtaccagcttgcaggtatagctcctatcttttacgcctcttgctcgggggcgtctttgctgcagcactgtggaatacctaccattttctgacacttgtgtaaagctggaagagtgagggaattaacagttaaaggggaacttttgaccactgggggtgagggtgagtagacgaatatcctgtctctggaatcacattctgtatggctccacagaaagtgctgggacaatgttccagttgttcgaggtggccaccagctccacatcacttgtttggatggcttttccgctttcccatttcactcttcccagttccccatttttgtcccctgtggttgctctccacaataacctacctgcatcatctcattcttttttaagggtttgattttcggcggtgggggaaggccactctgagacagattcctacataaaatgtggtatagtagaattagcactggacaaggacccagaaaacctgggttccagacctagctttctcaccaatctcaaatgaagaggagtgtttttattactattttcagatgtacatgtactgacaggaaaagatctccaagtcatttgttaactgaggggaaaaaaaaaagcaagtcaagaaaaatgcttgcaacatggtctgacatacacaaaaagggcaggcatgcgtgtgtgcaagctcagtcgctaagctgtgtctgactctttggaaccccagggtctgtagccctccaggcaactctgtccatgggattttccaggcaagaatactggagcgagttgtcacttcctcctccttcttcccaaccttgggatacaaccggggtctcctgtgcctcctgcattgacaggaggattctttatcactgagccacctgagaagcccagccatatgtaccatatacaggttaataaacttagacaaaatggtgggggatcacagcttactatatatttttgtatggcttgaatcctttacaaggagactgtattttgtgtaatttagaaacaacaagaaacgtccgcttccaaggccgttgagtcacgcttgtgaaagtggagagcggaagtcaacgctccacgaatacaaggtgagaaagaggagctgtgctcagatgtgcgcgctaggggatcggggaccaaggtcgggcggtcgagagaccggacccgcgggagggagggcggctgggtctttgtggtcgccagggggcagatgtgcggagcaacccaaacctacaactacccacttttccccgggcaggacttcgcagaaattataaattccatcccttagctgcagttcagacagatccgagggttttcagagtcgaggggagcccccccacctctgccccacgaggaaagctagcgctctgagcagtctgcaggcttgttcataccacatttacgcgcaacaactcttttctccgcccgcaccacacctcccggcccccacccgcagaggggaaattgagtcactggaaggcgaggccagagtctccaggggaatgtgcgccaacgccagtcctcagggccttccagatgctgggaggagggggagggacctcaggaaaatacacagagtggggtgagggcggggggagcggctggctgggcgggagctgagccagacacatggagaaacgctgcccaggatcaaaggaaatatgacatttgaaaagaatgcgcacgtctgctagtgctgcggagcagggggcgggggggctgcggggtgcgtaggcggcgtgtcggggatggtgagctagagcaggggcagggtctctaccccttcccgccttgcctcggcttcccacggccctcggtcagcctcttaggtgcgggttggcagtccgtctcaggatgctcctcactctctctctccttgggtctctcctttctttatttccatgatgaagctggaagggaaatgtaacctgaggcgacaaaccaaagcgggggtaataagaaaggaaaaaaaaaatcaaaccaggccacctccccgctcggcctcggaacattcttctctccccgccggcctggcttcttctccccgcccctccggcgtcgcggtcctgggctcgccgccggggcagctccgcacgtcactggggtcccccggggctggggggtccccagggcgggccggagggagggcgggaggggagggg

SEQ ID NO: 56890 - DNA, 1139 bp, Bovine  19866881034331
  misc_feature (1)..(1): n is a, c, g, or t
nagattctgattcccttgtccctgctgtgtgctcccatcacatccccatcttagtaaaaggattcattagatcatacagtcccctcctggataccctccaatgtctttggcccggggtcctgcttcctccctgcccacctcacaggctttcccactgcccgctccactggcccctctcaactcaagcccttggtgttcatattcttttcacgtggaatgttctttccccagcacattaaaataactggctcattctccatcttcagcctcagctaaaatgtcagatgcttcccctccctctcctgcttaagttagttccccccacaggttatttccttgagagcaccagttacagactgtgattgtttccttgtttattgtttttctctcctaagctgtgagctccactggggacctcatcttcttgtccactcgatcattagcatctggagcagttccctgcacccagtgggtgctcatttaatttttcttgcatgaatgaatgaactgttatcttcagcccatatacagagtcacttctctctccctactgtagctcccatcccaaatctcaaagtatttgagcgtgaaggacttcagctgaatctttcttttgttcgaccccctggaacccctactttgctgttaatcactgtcactgccaccaacacctcagggggtgacgtcacccacttcatctgccaggcggctgtgcctaaggtttgtagaagaccaggactcagaggtagcctggatactccaggagaaaaagccactaagtagaggaggcactgggggtggagggagggtgagatgagaagggagcgactgcagagacaggcacttggggagtcgcgggaagagggtgtaaaaactactgggtgtggagtggttgcctgagccagccagctgccttactgtgtgctctgtccaacctcctgtgttcagagtttccagctgcagctacaggcccccagtggagacactgttccagcccaaggtggccctcccatgacccagctgctcagaatcctcaatcctaacaaggtgagctccaggagcccctcgaggctaagacctagggcagggaggagtcatctgtgcttaccctggtcttcgctctcctattcctaggcccc

SEQ ID NO: 56891 - DNA, 1622 bp, Bovine  19866881126380
  misc_feature (1)..(1): n is a, c, g, or t
naggtgaagagggccttaaagggactatccgtcccttcgaatgatgatatagaagaccaagaaaagaaaaagactggcccaggatcacaggatagtgacacccttgacccaagcactttccactaaaacaattgtggggaaaatacaagaacattccctttcttccaacagtggaaaagattctgctaagagggctgctgacttgtgaaggatttttgaagaggggaggagtgaagaggaaggggctgtcacacatctgcacacactcacatacacatacgtgcactcacaatctcacacagacacccagtggtcccagttccagccttcagtgctctccagaggggctgccctggggttctggttgtagccctcctgtctggctgtctcacttctcctctccctcccaaagcccagctgctgtcattttgtgccctgccaaggaggagggaactgcagtgacagcaggagtgagaggcaggacagagtcgtggggcctggagagggatggagagagagacgccaagaccaggtgaccaggaaggagtcccagagagagagctgagaagcaggttgaggggtggtgagagcctgggggagaggcgggaagaaccaaggagcagaaagagaaggtttgtgggtcacagagccactcagccatgctgggaacaaagcgacactggccgccaggtccctcactcagcctggagttgcctttggccctcacacttctggccctgagggccgggtgggcccaggaggggacagagccagtcctcctggaaggcgagtgcctggtggtctgtgagcctggcagagctgccgcaggagggccagggggagcagccctgggagaggcgccccctggaagagtggcatttgctgcagtccgcagccaccaccacgagccagcaggggagatcggcaatggcaccagtggagccatctacttcgaccaggtaatccccctaccctgcaaagacctggagtcactgtccaaacccactctgctgctaaggaaatggccctgctgtgggtcccgctgcccgtctcctttcccttcactcccaccataccttccttccctttctcatcatttcttttaaatctgtccattcttcctgtttagtctacttgccaccccttcctatccttactcactgccccttcccccaatgccgtggcttctcggagccccaagcatccccgagccccactcagcagggtctgcttcccacaggtcctagtgaacgagggaggtggctttgaccgcacctctggctccttcgtggcccctgtgcggggcgtctacagcttccggttccatgtggtgaaggtgtacaaccgccagactgtccaggtgacctgaaccctaggccctgtcccatccctggctcaggagggggagggaggaggggagcgcaggggacccacaggcagacctccattaagctacatcctggggggccaggagcaagggtgggggagggcctgcttagcagagattgggaaggaggcacagagtgcaatgctggccacctctcagtcatccaggagggcgcactgagccccagcttccagagtgtctctctggggcggagaaaaggagggaagtggggttc

SEQ ID NO: 56892 - DNA, 1024 bp, Bovine  19866881152819
  misc_feature (1)..(1): n is a, c, g, or t
ntttttcatgattagcaatcctgaaactgggaggtttgagtcaagcagacttaagggaggaagtgattcttaaatctgcttcccaagaaggtggggcctggttttggaaagaggacaggaagggcatttcaagcacgtgttatgacaggaaggtgggtgagagatagccaaacagacttagctggctggcagagactgaaccaggtgcctgtagagataagagcagtggagccaagacaagcctcttgctttaaggcaaaaggatgtgtcaggagttatatttggcctcctgtgtgggataagtgggaagcaggcaggtgtctgaggccacagtctgaatgatgcttgaggaaaggattttactcccttctgtgcagagaaaagagcaagaataaccgagtactgacctggcccagacatcctatttggggcactcaccacctatcatgattgcacggtgaggaccagtgcattcagtgggttcccacagaggtcaagttgcttgcccaaggccacacagctgggaggaaaccaagtgcccctaacactgcgctcactcaccgagtttgtgattagtctctctaactaatatgtataccctctgatctcaatcctgtgctaactgaacaccaatcaaccaaagtcagatgactaaaactgctgttgtcgataacagaagagggcagggtgggcgcaggcaggaattccacccagtagggaatggggaccacgggaggcagagttgagagacccaccgacaaactctagtagaggcatgtcagggccagacttgggcggtggggtgaagaatcctcactggggagtgaaggaaaaaatagactgtgaagagaggttctgtgaccttgaagccaatattaataacaactaaattctttacaaccaggataaaaagaaactgagattctgcccaaggtcacacagtttgtaagtgatgcagcctggtctcatgctgaaagtcagggtgcccttcagaggacaactgaaatcaccctttatatacaca

SEQ ID NO: 56893 - DNA, 814 bp, Bovine  19866881159065
  misc_feature (1)..(1): n is a, c, g, or t
nctcaaccccatccgcgggacataggacccgcatctgctgcagccctgtctcctgaataccctcagcatctccctctggacacagggctgcccaggtgtcaaggcccagcctggagctctggcccctgccacaccaggtgatagaggccttgaccaacgtggtcaggtccacaggtccaccccaccgggccctccaaagatccgtggctgatctagcccaggagactcagacctcaacccagtgccatggagaggggacccagacctccaaccagaggcccactggtcctacccttcccctaaccctccatactgtctttacaaggctgggcctgcacttttggggggaggggggtaagaaaagcattctgggagtttcttggacctgcccattccctatctccccctatttatctcccttttcttccatcccctatctcctcgttcttatctcccttttgcaggtggcagattttggcctgtccacatttcagggaggctcacagtcaggggcaggatctggggagtcagggtgcaccccagcctacttggccccagaactgttggctaatataaaccagaaagcctccagggccagtgatgtctacaggtaaggcacccactccaaacatatatccaaacatatatccccaatttctacacctgtctggatccttcgaagggatgctgtatgaaaagggatcttgccagcagttgggtcaggcctcagctttgtgtctactgcagctttgggatcctaacgtgggcagtgctagcccggaagagaagctgagagtaagacagactctgggat

SEQ ID NO: 56894 - DNA, 1228 bp, Bovine  19866881229059
  misc_feature (1)..(1): n is a, c, g, or t
nttggcgtctctgccccagcctttcccagatgcctgagagagtgggccagctgccctggctgcccacggaaaacacagctgctgtacaaggtacactgggtctaccactcagctccacccacagcccttccagcctaggggtgtgtggatgaggacggtggacgagaaggaaccgaggggaaagaggagcacaggggctctgggtcaggtccctggagctccagggcaacagacagaggtaagttgagttgctgagtgaattctgctggccttagctggcatcactgactcaatggacacgagtttgagcaaactccaggagatagtgaaggacagggatgctcggagtgctgcagtccatggggttgcaaagagttggacacaactgagtgactgaacagcatcaacaactgctgtaaaagcaggaaccagtatttcttgagcttgcctatttcatgggtttgtgttataattttcctttgtttccttgtcttgagaggtggtacccagactggaatgaaagagtgctctaggggccacgaaaatgtggggggataagcagtgcagtccatgtacccgtattctttgtccctacctctgaggaggctgtgctctgtttctagaggtcacttcctggggtctgtgtgcggctgtgtgtatgtgtacacctgtgtgcactgtctggactcctaaaccccagctcagcatttacacttctagggcaaagaccagtcagaccctaaatagcaaggttgcagttggttaaagattcatctcttgtaatggagattgtcattcattattcattgctgatagctgggccccggagtccctaagtgctcaaggccaagtccaacccgtcccagccccgcccctgcctctcactccagcttgttctgaatatcctgtcccgcctgctccagtagcgccccgcggatgaagttccggggcacggtgacacgctcggccacgttgctcagcatcttgttgtgcccttcggccacccgcatggccacggggcataattcctgcgtcaggctgaccatggactccaggatcacctagtgtgggacgaaaggaggccagagccccaaggaggtcagggctggccccacaacggaagagactgcagcatgtctagctcatcaaggtcacagggcaggttagcagcagagccttggacactcaggcctccccacatccggtcagtgttcctgccatcctacca

SEQ ID NO: 56895 - DNA, 846 bp, Bovine  19866881238685
  misc_feature (1)..(1): n is a, c, g, or t
ncttcctgccattactgctctgcaagacggtgagtgctctgttctcttccaaccctgttcctcccgggccccagtgccctcctcccctgtctgtccccgtcccgggctgacttgcactcctcccctcaccagaagcagggctgcacagtggcagagaagtcttttgcagtgggaacactggcggagtccattcaaggcctgggtgccgcgtcggcccagtttgtgtcccggctgttccccgtgctattgagtgcctcccgggaggcagaccccgaggtacgaagtaatgccatctttggactgggtgtgctggcagagcacgggggtcgccctgcccaggagtatcctcagtttgcaggagggggggcctgaatgtggttgggagcgtggccccggggttcgggaggagagcggtctgcccctgtgcctgttccttgactttggaccagacacttccccaaactgctggggctcctgctgcccctcctggcgcgagaacgccatgatcgtgtccatgacaacatctgtggggcgcttgcccgcctgctgatagccagtcccacgaggaaaccggagccccaggtaaggttggggggcatcaggcaaggccatggaccctgctgcagagcgtgtggggccaggggccaaagtcttctgtgtgtccaggtgctggcccccctgctgcatgccctgcctctgaaggaagacctggaggagtgggtcaccatggggcatctcttcagcttcctgtaccagagcagccctgaccaggtaaccccgatattggagcccttgcaaggggcttgatgctccagtctcattgatgggcagagttagcatcagttg

SEQ ID NO: 56896 - DNA, 725 bp, Bovine  19866881247933
  misc_feature (1)..(1): n is a, c, g, or t
ncctggttcgattcctggttcgggaagatgcgctggagaagggataagctacccactccaatattcttgggcttcccttgtggctcatctagtaaagaatccgccagcaatatgggagacctgggttcaatccctgggttgggaagatcacccggagaagggaaagactacccactccagtattctggcctggagaattccatagactgtatagtcatgggctcacaaaaagtcggacacaactgagcgactttcactttccagatcagctgtacaaactagaccttccccaggcctaaggctgaaatgttatcagactgtgggctggcttggatgtggttaggcatgtacacctcttgtctctctgcctggggctgttgctcccagcagcagagtcctggaggctggatcagctacaagatgaggaagactaggaacatgtctgagttccaagaggtttcctgggccggcacaaggcagcgctcattgctactcccacacacaacaatgacacactccctacaaaagacactgagacacacttatagtctaacagggcttccctcaaatacccagccacccacagttacacctaagttccacctgtagcctcagatataaacacaacaaattcccagggctacaactgccaggtcctaggccttgggttcttggtccccctttaagcaacgcccaccgcccccccaacccttccgtatccacgg

SEQ ID NO: 56897 - DNA, 1319 bp, Bovine  19866881248154
  misc_feature (1)..(1): n is a, c, g, or t
ncagttaaccagatgcgaagaaaggaggaagaggagaacttgtgggcacgttttgcaggccaggacaggcagtagggacatcacttctgctcccattctggctttataactatgtcacacagccaacacccaatggcacagcagatagtattcctgacagcccgaaaaaaaaaaaaaagaatcaggggattttggtgaacaatggtgtgtctctaccacaaaagctcacacagaaagccttcatctctcaacaccaacttctctgaagtgcccaggaacacttaccccgctggctcctgcctccctctctgatccagtcgaatctcctgccaccagccccctcactcaccctgcccccatcccatgggccttcgttcatttcctgaatctcaccaagcccatgcatcaccccttctttctgcctggaactttgtctcaccagggctgagccttccttgtcatttatatcttggctccatatcccctccacagagacctttctgtgactgtcttctgcaacattgtccccatctctagacacttctaagacgttgtcctgtggagaaatagagctgagtgtttccagaaatgaacgaatacacaaaatatcaagcaacatgattaaagacaaatcctcacctctgctggagacatcagagtgcaattacagactatcagagagaaagaatgacttgaaagaacttcaaaagtattacctcagcaaaaaagaaaatgaatcggagaggaggaatagaatgcaagaggcagtagtgggccaaaatagcaacaaaacacgttagcaaatctaatctttgattgatggtaaattataaagctatattgagaggttaaaagcatacaagaatttaaatactagacaactatgatgtggaagttaggaagaaagattgcagagggaaattaaagcatgctatatctttagtggaggagaagaatcaccagtttcattaacttttgacttatatagaaaaatataattaagtatgcatggttttaacctagccacaaaaaatgggtatagaaacagaagttactgcttctgattaatggaagaaccaagaaaactttattaatccaacaaaaggcaagaatggagaaaagggggaaaaaaaagagaaacgtggggaaaaaaaaccttggtaaaggtaaaaaaaaaaaaaatccaaatacatcagggattgcaaaaaaatgcagactaaagtcaactattcaaaaatgaggtgtgtcaggacttccctggtggtacaatggatagaaatccgggggcatgggttcaattccccggtctggggaagatt

SEQ ID NO: 56898 - DNA, 832 bp, Bovine  19866881380572
  misc_feature (1)..(1): n is a, c, g, or t
ngcagagagccctaggaaggccaggctgcagccttggcagggccccggggcactgcagccctggatgggcaaccatgcctgtgaacccagcaggccccagaccctggctctgtccctgctcttcaagagggtcagcccgagctccctgcagaggtgacaggctcaggaggatcctggggaccaagggctaaggaaactggagagcagaaggagacatccaagggcagagatgtaggagcagaggggcttggaggggaaagtcctggcgtccagggctttacaggggcaggggactgggagggctatgcaagaatgtcttttcctgcagtttctcctctcttcccatcccccagctgaggagagcgcccccaaccatggctgccagagccccagcccagcctcccaagatggagaggaggaaaaggagggggctgtcttcccagagaggacggtttctaccaggaatgctaaggtgagagccagcaaggctgtggggagggacctttgatgaagcaaaaggacaatctaactgacccagcttccttctttgccagctgcaggaccctccattaactctgaagcccccaaagcccgtggctgtgcccaggggccgccggcccccacaggagccagggggccgggaggaggtcgagactgggggtgcagccccaggaatgaacaaaccccggctgcagctgggctcacagcaagaccaagaggagcctgagatccaaggtgcgccacctgctagaggggccggggcacctctggggcctcgctgcccctcccctcgggtctcttcctgggcacaggatgagtggcagacaaccag

SEQ ID NO: 56899 - DNA, 1235 bp, Bovine  19866881496374
  misc_feature (1)..(1): n is a, c, g, or t
nctttccttctgaagtccggaacccccctcccccaagtgccctcatgcccaagggcggtggtggcttctcactcttgccaactctagggtgtgtcgccacctactattgctttcctgtaactctgctccctttgcaagtagagcctccattaaacttgtcctaaattattctgtgcaactgtgctgttgaacagacacacctgacagatacaccctctgaggataaaggcacaaagaacaggttgatgtggttgttccacagtccagaggtggagttcgtgatggaaacattcatttggtgtggtgtgcttttcagagccagtagccccagcaaagataagctcatgtgtgagatgaaaatcagagaagattttcatcgggaaaaccattatgaaaactagcaaagatcttatcgtcctgtctacccttgctaatggcacagttattgatgagaaaaatgaacctgaaatgaacccgaactcctcttctggggagccgtggttttgaatagccctaaagccatgtaacagaaacaaattccccaaactacagaaacttccaaataaactgaaagcactgtaaaggttgaataaggacagaagctatccatcatttaataaaagacatatacttagtaattaatagctccagctgcaaaccatgtaagctggccagagatccattggcctggtggactgagatgagatgttcaatcacgtgagaagaggaaaagtccagggtcttcccaggaaaaacaaaccctgccttagaacccccatactaacacacatttcccccacccttactacatacacggtgctggatcttggcacatagtcagaaacaagcagtttttaaaaaagttttatttattttgtggctgtgcctcgtagcctgcagtatcttagttccctgaccagggatcaaaccggtggcccttgaggtagacgtgcagagtcttaaccactggaccgccagggaagttcctagcctcctgacttctgtccctgcctttttggtagaacccagagtaactggctgctttggactctgattgttagggtttgccctgggtaggtcctgggttggtcctgggttgttcttttccatgacatggggaaatcctcttatatgtgagctaattctactctagatgtaacattttccctcctcttatcaaaccccagcatctgatatccagagcaaggctttttctgcatctcgaatcaaatcta

SEQ ID NO: 56900 - DNA, 1640 bp, Bovine  19866881507707
  misc_feature (1)..(1): n is a, c, g, or t
ntttaatttcttttgccttagaagactgatctaagaaaatattgctccaatttatatctgacaatgttttgcctctcttctcttctaggagttttatggtgtcatgtcttatttaagtctttaagccactttgagtttatttttgtgtatggtgtgaaaagctgagtcttagagacagaagcacgccctggagtcaagggtgaaaagtgcactctagaccaaagaaatgactgtgcaggaggcatgaggaaaggaatatttgcaactacagccacacaatttatagcacataaacagttgtttgagacaaacagcttttgctatgctgataaatacgccctacacccaacaaaactaaggtctcagccaggagaacattcacacctgggaaacagccaggagaggaatgcctacaacctaagctgttcaggtttaggaagtgacttggcaagtccctcactgcttgtgacatctttcttccccatcgacctgtggtggctccaaggccacctcacacccgttcaccataggccttaagctgggcacaaaagtagaccaaccacttgctgctccgtgggattcggaaaaaggcttaggtctaactgcaagtcaggcgccctaaacagggcctggcgattgcccttgtcatgacgcaacctcctctgctagttgaagcacccttgttaccaggctcggtgctcggagtctcctccccactcattggtccatggggaagcacctccgaggaacctctgttacccgggcgaggatgagagcccattggtccagacacctcacaatccctccaacctccccccaccgcctgcagggttcgtcccattggttcgctcgctgcctgtctcgggagccccctgttgcctcggactagactacttagcgccccgaacgagcgcccccaagttgaccctgttccccattggctgctctggagaccgcgccatctaatgaggagcgaagtgcaaagcaccagagcacgcgctccccgcggcgggatctaggctgcaggagcggaccggcggcggccgaagctgcgcaacagtcagctgccgggcctatctgcagaggacacccgttctccttcggaccgggcctgggctgtagctcggaccctcttccttcgcgaatcttggcatctccaacctggaacccaacctgcaaggctcccgttaagttcgaagcacccacgtggtgtgcagactggctcagggctgacgtatatccagtctgtctccatttacttatccccttaatcatttatccacccatacatagttcatcggttcctttatttggcattctgggtccacctgccacgctacctgtccacatccttctctccaacggtttgggaaattttgtaccctgaagaatttggattgacatctgaacggaagtggtgtagacgagggtgaaaccctggagggaccatgttctattatcccaatgtgcttcagcgccacaccggctgcttcgccaccatctggtaagggcgggcccggccagggtaggtgctctgggagggacacccaggggtcccaacctgagggctccccctccctctacacccctcattcttcttccaggcggcagcgacgcggggctgccggtggtaagcgcga

SEQ ID NO: 56901 - DNA, 1649 bp, Bovine  19866881516272
  misc_feature (1)..(1): n is a, c, g, or t
nctatagatgctgatgtttgacaaggcgtacaggaaatatagaggacaaaaaatagctttttcacaaatggtgttggaacaattggatatccatatatgaaataataacttcgacccacacttcacaaactaatacaaacattaactcaacatgggtcttagagctaagtgtaagacctaaaactatatcattttagaagaaaatataagagaaaaatctctgtaatcttgggttaggcaaagatttattagaaacatgacccaaatgcctacaataatcatctcttctgggaagccctgaccctgaccctcccagacagttctttttttccccactcttctatctgagcactttatatatgatattcatcaaatcatattgtatctgtttacatctctctcctccattgaacacaccaagaatgaagatcacatcttaattattttaatatctacaaagtttgataaatgttacttataggatgtctctaactctgagcttaatcagggagaaaaatttttcctagaagcctcccagcacatttcttgatgtctcattggccagaactgggtcataggttacctctaagcaaatcactcgttaatggaattaccatgattttcctggaccaattacacttcactcttcggggatgggcttaccttccccagggagctgtggctgtttgggtaggctggctgcagagaacttgcagaggtatgggggtggtggaattagtggcataaaccaggctgcttcattttccattgtgagggtgtaattcaccaacaacctagacttatacctagatttcagaaggaaaaactaccatatatcactatctttgaaaataaaaagaacaacacagctctgctacagtaggaagagtgaaattattcatctgaaacagcaagattctgcactgggctctttataactttttagataatacatctatagaaaaagcttggtaagctttattgcagaatcatttacatcaactcgtacaattttgaatatttattatttttcacagtagccattgttttagaacatatgttattatataaacattcttcacaaatcttaaaactaattgaagcatagctatctttatagtaaatgctagaagaagaaaaaaaaaaacaccaaaaaactagccagtgttgtggatccctggagtttttattttcactatgaatatagcagcttagagaaaatagggtacaagaaaaaaaatgtgtaaatgtttctaacctaagcaatctggccagcaagcatttcactgagaaaaactggcttctttttttaaaggaaaaattcacatttctgattttatgtgtttttatcatttgcttggttctgttttgttagataggatcttgtatgtttcttccacactgtgaactgctgctgttgctgctaaatcacttcagtcgtgtccgactctgtgcgaccccatagacagcagcccaccaggctcctctgtccacaggattctctaggcaagaatactggagtgggttgccatttcctttctccaggggatcttcccaacccaggcatcaaacctgagtctcttgcattgcaggcagattctttaccgtctgagccaccagtgaagccctggatactataccagggcaaa

SEQ ID NO: 56902 - DNA, 811 bp, Bovine  19866881589752
  misc_feature (1)..(1): n is a, c, g, or t
ngaatatctgcctaacagcttgattcctccctcacctctgccctcagttctgggagcactcctgctcctgccccatggatgggaggagtgatgattcccatttgttaacctggcttcaaggcctgtggtggctggtgttgcggtgagcctattattcctttgtatctttaggtctgtcattatgacttcatgctccagaccacctggtgactgaggatccttccccggagcccctggtggccagaccactcttgtgctgtccttctgcccactgaaatcttgcaggtccctccctgcttgagtgagtgctgtgttaaagcaagggcaggagctgccctgaatatgctcagagtgactggacattcatcacctgggggatatatataagatcataatcccatccttggagctggcttcccttcactttatccaccactgtgtgcctgtgctaagtacaggaaaatgagactcaggaggcttttattgccctcgtatttagcagcccctcccctgccagagcaaagttctagggtgggagtgagggagtggctgaccttgtggtgtgacagaaagcatcctggaggagcaacatgaatataaggacccacatgccacatccagcagccccaatgcctagtaaggcttccaccgccaaaggccactgtctcctctttaataaatcaagcattagattaagcacatgagaaggccaagtgtctcatttctatttctggccttcagacaccggtgacagtggtgacctcaggctgggacgggaaggatttgccccaaaccctacccaggaggccct

SEQ ID NO: 56903 - DNA, 723 bp, Bovine  19866881611785
  misc_feature (1)..(1): n is a, c, g, or t
nacttaagagacacgggtttggtccttgggtaggaagatcccctggagaagagcatggcaatccactcccagtattcttgcctgggagatcccatggacagaggagcctactctgtgtgatcccatggtctgtccatggggttctccaggcaagaattctggagtgggtagctattcccttctccaggggaatcttcccaacccagggatggaacccaggtctcctgcattgcatacagattctaatgccttttaattcaggcctgggtttgagggaagaaagcttttctgtggggcttcccaggtggcgctattggtaaagaacctgcctgccaacacaagagacttaagagacacgggtttggtccttgggtcaggaagatcccctggagaagagcatggcaatccactcccagtattcttgcctgggagatcccatggacagaggagcctggctggccccagtccatggggttgcacagtagcggacaagacaaacgacttagcacacacggcttttcagcagaagggccctctgctgggcacttgtgggattgcatggtcgaggctgctagaattgcttgctgccgcaaatgctgagaagtaggtagcctttgctttctttcctggtcacagccctctttcaaggagaagtgatccttggaaaaatggatatgtttactcaggtaggtgtttttacatgtgtatagatgcatacatata

SEQ ID NO: 56904 - DNA, 682 bp, Bovine  19866881620549
  misc_feature (1)..(1): n is a, c, g, or t
ntatccttctctatatatgttgtggtttgtaaatatgtccacagttatttgatactacttcttcaaaaggtgaagcctaattctcctcaccttaagtgtaggagatacttagtgacttgctttttaaagtatagaatgtggcagaagtagtgatttgtggtgtctgagattgggattggaatgacattgagttttccccctcattctgggaccacctgctctggggaaagccagctaccatgttgcgaggtagacctaaggagaggcccatattgtgggtaactgaggcctcctgccaacagctgtaagattgagccataaagaaattattgtaatagattctgagactggtgagggcacaggctccatgatgtcaaggttctgtgttcctggaaatgagcagaggacagagcacataatccccagggacatttttctattgacaaagagtacctcagagtttatatagtaggtaagactagtcccagagcttgggttatgtgggtggttgcttacctttgctgccaaaattacccttcaggataagaacacttattatctcaacttctgggagtgcagctggcagaaagtcctcagcaatcaacacccttcagggatttctgaagagagccaaagagaaccccccattccggcaacccacgtccagtggttggtgaatgaa

SEQ ID NO: 56905 - DNA, 1110 bp, Bovine  19866881627196
  misc_feature (1)..(1): n is a, c, g, or t
nccccgggaacttagaccccatgctttacactgaaagctgtcactgatagtcctctgagagccgtgaggctggagtgactggggcagggcccaaggcaggaggtgagagggggtaggtaggaagctgaggaaatgtggggcttagcagtgtcaggagtcggaaaacaggcaaagatacagcagctatgggaatgaggagttgggttgccttctctgctgagagctggcaagggatgcctgacagtgtaagagctgcagggtgggagggctgagaactgggggtgtgtgtgtgttgcaggggggaaatgagcgcagaggcaggacccaggggcaggatccagcagtgtccctactcacccacacacccaagggaaccttatctgcaccccctcagcctatcctgtttcctggagcccacatgtgggaggcgggctctcacatgcctggacgagttagtgatgggaagcagcagggtgagggagggctcctggaaaggcccaagaggagccccaccttgtccctccctgtttctgcctcaccctctgccaacctgacaggcacaggacagacttaggcaacttgcccactgccgctttgcctttgggcttccccaggcccctggagagcccccaaccctgcacccgcccagctgggtaagtagatctgcccactagaccttactcccctccactcacttttgccctgcggtatatacatatagggaatgaggccggaccaagaaggagaggccaggtgagaagagtggaggtggaggcagggacagcctgggagtcaggactggggaggtggcctgacagagagcaggggacatgggttacaagaagtagtgtttgagctggggctggggttctggtggggggtagagacagaggcccccagacagaacagaggcaggctgcaggggagtgagggacgctcagtcccttctcactagcatcaggcggaacgtgggcttctgccccacctgaatgcgccccacggctctttccagcctcccggaaggacagaagaatgtcagtctgctaccgtcctccggggaacgagacgctgctgagctggaagacctcgcgggccacgggtacagccttc

SEQ ID NO: 56906 - DNA, 1282 bp, Bovine  19866881724742
  misc_feature (1)..(1): n is a, c, g, or t
ncgccttgaaggagaagcacattacagatatggcgtgccctggatgtggccgccccgacctcaccgatgacacccagctgctcggctacttctccaccctcgacatccaggtagggcagtccctcggactcgggatgccctgggctttgaacaggagccttgcccacccgccactttggcatcctgtccccagcttcgagagagcctagagccagatgcctatgcactgttccacaagaagctgacggagggcgtgctcatgcgggaccccaagttcttgtggtgtgcccaggtcagtggggtgcccagagttgctgaccggaaggaggggtggggagtagcacgcggtcaggccttagatagctttatgctcttgcacccacagtgttcctttggcttcatatacgagcgtgagcagctggaagcaacatgtccccagtgtcaacagaccttctgtgtgcgctgtaagcgccaggtgaggcacatctaaccttttggaatacctgctgagccactgcaggtgctgtgttaggctcggggtttgctacagaacagaacagacaagctctccggtctcaaagagcttacagactagcaagggagggagggggcaaggttgaggaagggagtgagaacagaagtatatacatcacccatgtgttctatgaagaaaacaaataggagtctgaggtcaggaataacagggtggacctacctggtacatgggattgggaggttagataagtcttctctaaaatggcttgatttaggaacttccctggtggtccagtggttaagaatccgccctgcaatcaggggttcagtctctggtcgggggactaagatcccacatgctttgaggcatctgagcctatgcgccacaattagagccccagtggcttgccacaactaagacccatcaaagccaaaagtaaatcaatatttagaaataaatgaaatggcttaatttaagctcaggcctgaaaatttaaaagtcaactatgcaaaaagtattcgagagagaaagaacaaaacacagaaaggccaaaatccaaaaaagtgttgtatgtctggagcctcaagagcaagggcgagagtgccaggtggtccgagaggagctggctgccaggtcaggagaggtcatgatgaggccgagtgaggagggcattggcctttcattctctgttttggctgtgccatgggtcatgtaagatcttagttccccagttagggatcgaacttgcaccctctgcagtagaagtgggagtctaagcaccggacc

SEQ ID NO: 56907 - DNA, 1242 bp, Bovine  19866881771060
  misc_feature (1)..(1): n is a, c, g, or t
ngtgatctgctggtcctaggataatccacgccgggttttccgattttcaggggggaaattacactggggcccatgggaatctgtttcctggttttctttccctcttcgggggctgtgccacagttgtacccacagactcccagaaagcactttccatcctgctctcatttagtccccagataacctatttccagtttcttttgtgggggaaaagggctcttcagttccatttctggaaatatcctgctacatgttttctttccacatttcggaggcaaggtgggaaacccactggatgagaccaatggtcctcctccaagtccaggaagaggtggggacaaacggtggagcctgggaacggggtggtgtttctgcgccttgaggaatggggagatccagctcctaagcaggcaagggagtttctcggtgtccccctgccaaagcactgggaggtggggacaggttgaaactccaagtctcaggcccctggcagggaatttcccaagccagttggcctgattggatacactcatgctaagtccctctgtgagctagaatttttcacttcctttgggattccaggggtggggtgggggtgggaggggtgctacagttcctatctgacagatgaaaaacctgaggctcggaaaggacatagattcacaagcagccaatatgaggttggagcaaggtcttctgggtacatggtccaggttccgtcgccctgcagtatgcaagtgagatagtgagttgaatcacaagagactgctggctctgttgattaaaaacagattattcgcattttcgtgtatttcaatctaatgtgaaagacaagtggaggcgctttgctcactgctgtctgctcctcctcttcttggataagctccccaaaccccacattccaatcttgcctcatgttccccctccccaccaggagctggccgcagacccagccttcctgaccactgtgctgtgcgctctgggtggcttctcactgctgctggtcctggcttcccgggagcagcgactgcagcgctggaccgcgtcccctgtcaggcctcgtgtgggcagcactgcttgcactaggccacagcttcctgttcactgggggcgtggtgagcgcctgggaccaggtgagcaggtggagcagggcaatgggggttcctaggcctcaaacatgcacccaggcctggaggagcagcataagcttgcaacttcccgtgcctctctcccctaggtgtc

SEQ ID NO: 56908 - DNA, 3223 bp, Bovine  19866880488874
  misc_feature (1)..(1): n is a, c, g, or t
naaaaaaagattatctatgtgtgtacaactaggttaggttgatataaacggggagaaaattgaatacttggatttgaggaacttctaaatgaaactcagacgtcattcattatgagtatgttcttttgtgaaggaattaaagctctttgacaaataaaaacataaattcagtactagcatctcctatatatgccagttcccatcattctgttattgtagagaactagaattatggaaacagattttgtttcttttaaagctgcagatgttattaacaaatataagcacacttcactgtttgatagattaatatctgagaaatcacttataatttaaatacttttataaagtgcttaggaaactggtttaatcgaagaacacttttaaagcaagaattggctcaatttatttatatgtatgtccatccataccatgtgtctcaaagtatacttttatcacattctcacacaatgtgttccagctaacctcctgacagttttgttaggtggttctctgagtgtagaaattgaatttgcgtgcctatgtttcagttatgaatcctttttcatagatttatcctacactgactctttactgactcttcacttatgtctcaaccagtcctcatatatttttagaaatacaggttgtagtttctttgcaactttgttgctgtcagatctactggtgcttttgattaattgcatgaaaagtgacagaacgcctctattactcctttccaagtgtcaacactctcttcacatgaaatatgtttttcttatcctcaagaaattaaatgaccttgccaaagttatgacatcctttagccataaagcgagtattacagtgaataaataatatgaccaccatcttccaataagaatgctgaaagctcaggggaaataaccctgtttatgaacctgagccttgccattttcacttttctgtccccttcccacccccaccattttagtaccattcatcagtgtcttttgcctgggctacagcaattatttcttaactagtctctaactgctcttcacttcaacatggcacactcatacattgtttttaatgcatatatgagcacaataataatattatcctgccaaatattatcaaagtttattttcaggaatatcatggattttaaatccctgcatgatttagccttggatatcttgctggcttaattagtggcactttgtctctccatactttgtccacagtggcctttaagatctattctctaatttgggggatataaggaacttcacatggtattgcttctgccaagatattgtccaatcctcaacctccctccacagcatcacttgtatttgtatatattcttcatccatcagaggtcagcttggattccactaagtgcttccaccttcttgagactagacccttgcccttcttacctgccattttgttgttgttgttccgctgctaagtcaatgtatctttgtggccccatggacagagcatgccaagtttccctgtccttcactatctccttgagttagcacaaattcatgtccattgagtcagtgatgctatctaaccatcttatcctcagccactcatttcttcttttgcctccagtcttccccagcatcagggtcttttccagtgagtttgctctttgcatcaggtggctgaagttttggagcttcaacttcaacatcagtcatttcagtgaatatttgggcctgattcctttaggattgatctccttgatgtccaaaggactctcccaagagtcttttccaggattgcaattcaaaagcatcaattatttggcactcaggcttctttatggttcaactcacatctgtatataactactggaaaaatcatagctttgactatatggatgtttgttggtaaagtgatatctctgctttttaatactgtgtctaaatttgtcatggattttcttccaacaagcaagtgtcttttaattttatggctactgtttccagctgcagtgattttggagcccaagaaaatgaaaactgtcactgtttccactatttccccatctaattgccatgaagtgataggaccagaatccatgatattagttttttgaatgttgaattttaagctggctttttcactctcttctttcaccctcatgaagaggccctttagcctcttcactttctgccattagggtggtatcatctgcatatctgaggttgttgatatttctcccagcaatcttgatcccagcctgtgattcatccagcctggcattttgcatgatgtactttgcattgatgttaaatagacaaggtaacactatatggtgaacatttcttacaaaacgtgcttcactggagaagggaagggcagaccacttcagtattcttgccttgagaaccccataaacagaatgaaaatgcaaaaaaataggacatggaaagatgaactctccaggtcggtaggtgcccaatatgctactgtagatcagtggggaactaactccagaaagaatgaagagatggacccaaagcaaaagcagcaccccagttgtggatgtgactggtgatgaaagaaaagtccgatgctgtaaagagcaatgttgtgtaggaacgtggaatgtttggtccatgaatcaaggcaaattggaagtggtcaaacaggatatggcaagagtcaacatcaaatattttaggaatcagtgaactaaaatggactggaatgggtgaatttaaatcagatgacattatatctactactctgggcaagaatcccttaaaagaaatggagtagccatcatagtcaacaaagagttgaaatacagcgatctcaaaaatgacagaatgatctctgttcgtttccaaggcaaaccattcaatatcactgtaaaccaagtctatgccccaaccaataatgctgaagaagctgaagttgggtggttctatgaagacttataagaccttctagagctaacaccctaaaaagacgtccttttcattataggggactggaatgcaaaagtagggagtcaagaaaaacctggaataacaggaaaatttggctttggagtacagaatgaagcagggcaaatgctaatagagttttgtcaagcgaatgcactggtcatagcaaacaccgtcttccaacaacacaagagaagactctacacatggacatcaccagatggtcaacaccgaaatcagattgatcatattctttgcagccaaag

SEQ ID NO: 56909 - DNA, 1458 bp, Bovine  19866880646869
  misc_feature (1)..(1): n is a, c, g, or t
ncaaatagggaaaggagtatatcaacgctgccatattgtcaccctgcttatttaacttaccatgcagactacatcatgagaaatggtgggctggatgaaacacaaagctggaatcaagattgccgggagaaatatcaataacctcagatgtgcagatgacaccatctttatggcagaaagcaaagaagaactaaagagcctcttgatgaaagtgaaagaggagagtagaaaagttggcttaaaactcaacattcagaaaactaagatcatggcatccagtcccatcacttcatggcaaatagatggggaaaacagtgcaaacagtgacagactttattttttggtggtccaaaatcactgcagatagtgactgcagccatgaaattaaaagactcttgctccttggaagaaaagttacaaccaacctagacagcatattaaaaagcagacatcactttgccagcaaaggtccatctactcaaaactatgcttcttccaataggcatgtatggatgtgtgacttagattatatgaaagctgactgccgaagaattgatgcttttgaactgtggtattggagaagactcttgagggtcccttggatagcactgagatctaaccagtccatcctaaaggaaatcagccctgaatattcattggaaggactgatattgtagctgaaactccaatactttggccacctgatgcaaagaactgactcatttgaaaagaccctgatgctgggaaagattgtaggtgggaggagaaggggacaacagaggatgagatggttggattttagtaccaactcgatggatatgagttttattaaactgtgggagttgggaatggacaaggaggcctggtgcgctgcagtccatggggtcacaaagagtcagacacaactgagcaactgaactgatgatgatggcgggaaaagttaaacacatatatgttaaaatgaaaacaattcaagggaaaaaatatcattatttcaacacattctgaggcactttataaaattaatattgctaatcatttggggaatacagtatttttcactatggaaaataaaatgaaaatcactgtgcttgcttgtacaatctttagtcaagaaaaacatactgacttgcattgaggtttaggttctgataaaactacataattcgacccagtggcctttcattaacaaatctattgcctcttaagacagaaagtgaaatgagtaagatggtatcacattctaatgaaatgtgtaacatttcatcaaatatgcttttctaagcattcactaagatgtaatcaggtgaaaaaaaaagatgataatatttttatttagtgtgcttgaagatcaaacagcctcagatcatctgaaaatatatatgtttttttattcaccggagaaaatttcaaaggtgactttgctggaacaaagaagatgcaagacagggaacacaa

SEQ ID NO: 56910 - DNA, 1727 bp, Bovine  19866880701358
  misc_feature (1)..(1): n is a, c, g, or t
ntattggttaaccttatggcacactcctgttctttatgtctgccatttgcgcaaggtggagtgatgaaaaggttatcaaaggatgcttcagtagaaccaattacttcctcttctggtcttctctcctactgatcatcttatctgatattgataatatgttacctagtgaaactgaatactgcagctcaagtctgttactttactgtacttactgaggagcagactttatgtcattctcatctctttcccttcatggtgatgggcacaatacttggaccattacaggtgttcaggaaatgttagtcacactggattaaaagtcagacactcacaattatttctaaactacaagaaaacaatgatcaatgtcagaagaaaaacttctgtggatacaataatatttctaagcactgattaccaggtgtctttctactcctttcctaaaaatcagaagaggtcaattcccaataaatgggttgaatcatgtttaaccaaagaagctactgaattaagcaatgatgctcagcaggaagattttaagtggatttgcaaaaatgataaaaatcccagagacagaactgccaaattcagcaacttattatattaagagaagaatgaacttgaagagagagtgcacgatggctgaaggcatatgtttaaacagccgtatattttgctgagcactgccattcacagtttaattggagcatcaagataaaaactctgcttacacctgagtgcttaaagtaaaacactaaaatggctagcatatgctcaagatgattgagacattcatcttcttgggcgtacatctctctctggcacagaaatacaatatggaatccagggcactgcactgaactgaaggcaaaagtcagaaacaaattccagatggtactgatacaggtgaatggtaagtactttttacaccaacaatcttcctgaaaaccacatccttctttccttcacaatccattcgcagaaataatgattgtattatcaggtgggtctacacaggctgggcagaaagaaaaaagaaaacagctataaactgtggttttatattttatttttaatggagggaattcctttaaaatgttgtgttggtctctgctgtacgacacgaatcagccataagtacgtgtatgtgtgtgtgtgtatgtatcccctccttcctcagcttcgctcctaccccacccctcaccccacccctccaggtcatcacaatcagcatgggctccctgcattatacaacagcttcctactagctatctatattacatgtgggcttcccagatggtgcagtgataaagaatttgcctgccaatgcaggagacataaaagacatggattcaatccctaggccgggaagatcccagggcatggcaacccactacagtgttcttgatggagaatcccatggacagaggagactggtgagttacagtccataggattgcaaagaattggacacaactgaagtgattcagtatacacacataacatgctctgggttcatgtacctcactacaactgactcaaattcattccttttcatggctgagtaatattctatttatattacatttcaattcagttccatcactcagacgtgtctgactctttgcgaccccatgaatcacagcacgcccggcctccctgtccatcaccaactcccggagttcactcagactcacgtccatcgagtcagtgatgccatccagcca

SEQ ID NO: 56911 - DNA, 1225 bp, Bovine  19866880901470
  misc_feature (1)..(1): n is a, c, g, or t
ncaaagcaaagcatacatatgatattattgttattattataagtggtattttataaaatgttaccaatatataaatggatgtttcaatcaatatttgacatttatattgtaatatgtaagttccagtccaaagtacttcaattgaaatatttgacattatttttgcatattcagcttatctttccagtttgttagattttttaaacccattcacatgaatgttttctaaattttataggcacctcagaattcatttaccccatcatataatgggattctctttcttatcattataaaagggataaaatactaaaaaatataagaaagcagacagaattccaaaaagatatatattaattgacagaagaaaggagggcttcttttttgttgtcatttttaataaagaggttttaaaagaatcctcactaaatttggggaacttcatctaaaaagccaatttccccatttctatttgaaaagaatcaagcaatcaaaaaatctacattgcaggcaaaaactgcctatttgtatcacataaacaagtagcgggaaaaggatatttctcttcacttttgaggtattcaataatagaccataaaacatcaaaggatttataaattggcatctctgcaaatcatgtatgtctcctgaacaaatatgctttaaataaagacaaacaactgtaacataataaggatctgtgcagatcatcttttactaccccaggtgctcagaatattcataaggcagcaaatggagcacttctgtttttacactaaaatttagtttatctgaaccagcatgtcagactggctgtcagcagaagagatcctcagacattaatgttcttagtactgcattaacacttgaaacaagaaacataagagcttatatgtgacatgtcaagactgctttggaatgatttcctatagtagacaataaaaagcccaaatgacagtactgaaaaaacaggtgtatttggggaagagattataaatgaaacagaatccatcctgctactttctactatttagaaaacaaacaaacaaaaatctagtaacatcttacagccttcaaaggactttataagaacaaaccctttcacacatatttttaaaatatgtgatattatacaaaaggtattggtgcctgtatctcatgaaaagcatccatgaaaccacccaattcatgctttcaacttgccctgaatatattcccgaaaaat

SEQ ID NO: 56912 - DNA, 761 bp, Bovine  19866880925080
  misc_feature (1)..(1): n is a, c, g, or t
ngataatttcagcttttaatttaatgactataagtacaataatagttccaaatatatattttacctttatgctcaaaagctcacggcaattttatcaatttagaaagttttccatccactacaaaaattcagcaatctctgaaatgcaattgcttgataagataataggtagccatgaaaattataaaagagcttaagaagggaactgaaaaaagcatgttgtattcaattgaagtcatggccagaattatagtgcagtttttaaaattagaattttatctggatatgaatttcagaaatatttccataagtataaaattttaaattaaaactttaaaatgaagctatttaccctttctgatttagagttgaagaaaatggaggaaaaaaataaagatttgatcagaaaaagcagcctagatgtcagatgaaatactactatttgagaacctaaaacaagtatattgcacatttccatccatacctgtttctttcctaactattgcagcgccactcacctgctagtctccatgtggagtcagtggtggacacgttagtcagctgcagcctgtccccagccgtccgtgtgtgctgacataccatggctttccctgcaattgggttaagccttgggaagtgaacctgcaagtccatgggagcagtcttagtgttagaaaggccagggagcctgtgggcaagtcagagtactgaggaaagagaggggatacataatcaggtggaaaaacagggaatgattgagt

SEQ ID NO: 56913 - DNA, 866 bp, Bovine  19866881018487
  misc_feature (1)..(1): n is a, c, g, or t
ntagttttcttttctccttatgactccaagacaaactgaaagcaatacaggtatatactcaaatgtaggagtttctagttacatatttgcagcggtagtggacttttaagtgtgacttccagttgtggctggggctagatttgtttcacaagcctccctttaaaatgtttcaaatgcacaaagcctgccttaatgaagcagaatgaacttgtaacagattgtactgcttgttcgcctgcttatttaaataacctgcaaagacagtctataatacagtcaattagcactgactaatgattatttaaagagtcactgatggatacctggctagtgcatactccgttaaagcctaatgagcaatgacaagaagttcttgaacatttcataaagttggtagacactgtattcacttggaacttcccaggtggctcagtggtaaagaatctgcctgccaatgcaggatatgtgagtctgatccctgggtcaggaagatcccctggagaaggaaatatcaacccacaccagtattcttgcctaaagaatcccacggacagaggagactggtgggctactgtccatggggccgcaaagagtcatacatcacttagtgactaaaacagcaacaaatttatactcactactgagcatttgctaatgtcttaacatcttcagtttccctttccttcaaaatagagatattctacttaatctaacttttttgtgtgtttttaaaaataataaaataattcaaaattgtaaataagaatgtacatgaaaaagatcttatctaccctcaagactagacataggctatatctttttcctttttttaagtttattctaattggaggataattgtttcacaa

SEQ ID NO: 56914 - DNA, 1565 bp, Bovine  19866880615321
  misc_feature (1)..(1): n is a, c, g, or t
naaaattttgtgtgtcccagtattaacttggccaaattaaggttcccaatctgaacaattctacttttagctctccaactttacttttcagatgaagacagtaatctgtccccctccccactgcgggacctgtctggggggttaggaggccaggaggaagaggaagaacagaggtggctggatgccttggagaagggggagctggatgacaatggagatctcaaaaaggagatcaatgaacggctgctcaccgctcggcaggtgagtaggttcattctttattcgtttgccaaattgatactgagagctttccacgtctggagaactttgcaaggcagcagggatatcagcagtggagaaaagacagacaaggtttctgttctcatggagctagtattcttgtgtagtaaataattttgaaaaactggaatgtttataacaaaaatagggtgatgaaatagaaagcagaaaacaaacaacattagatagggtagtttggaaagacctctctaaaaatataatgtttccaataccagagaagctttccaggcagagagaccagcaggggcaaagaccctgagagtggaacatgcctaatcatggccaaggagaagaataaatgtgactgtgacaacaaggtggtatgcagagaagtgatatgtttggtttatatttcagtagattactttggtttcttagtggtggtaaacgatagaagcaagaccagttaagaagctattgaagtagtcaggtaagagatggtggtggcttgaaccaaggtgaaatgagttggagaaaccagatggattctggatatatttaggaaacagacacttgttggggaaggaaggaatcaaggataaccctgagtttttgacttgagcaattatccagttgatgctatccattgggattcaaagactgaaaacaacaaaaaagcctccagagaactaggaccgagttttgggactcagggcaggaaggtaacgttactaaagcatttgtccttgaggatcaaggatctaaagctgaaagtctggagacctgagaggaggcagtatgaaaggctcctagagactgtgcccatttgactcttttctcaaggcctgctcttcaagaccctgctttccgtgtccccatttcccccctccctcgttccggcagaactcccttcttgatttgctgacatctccatatctccctagcgagctctgctgcagaaggctcgaagtcagccttccccgatgctgtcactacctgtggctgggggctgcccggcccccgctctcaccgaagaaatgctgctgaagcgtgaggagcgggcacggaagaggcggctgcaggcagctcggcgggccgaggagcacaagaaccagactatcgagcgcctcaccaagactgcggcgcccagtgggcggggggaggccgaggggcctcccggggcgagcggcggggagggcgggcggtggccccagcccccatggtgcgctacagcagcggggcacagggttccaccctctccttcccgcctggcatccctgcccccgcgcctgtgtctcagcggc

SEQ ID NO: 56915 - DNA, 1647 bp, Bovine  19866880740842
  misc_feature (1)..(1): n is a, c, g, or t
ntctgtttctcatgggttgatgttgccctgcgtgtgtgtgtgtgtgtggtttgtgtgctcgtatcacttgtgtgtccatccgtcagcccatactaactcatccgcctgtcctcatcccggctggacctgccctgcctgtggttgacttgcatgttgccatttgcttctcagttttctacaagtgctctcagaagtggtttcactccctctttccttccttgaaaaacgttatattgttgccttctatgattctgcattctcctggttttccttcttacctctctcacctatctagatgtctcttattggttctttttccagctagtttctgaatgctaatactcccctgggtttaatccttctctttacacttttatgtgcttgcaaggtgatttcatccccaagcactggtgataaccacagatgtgcctttagctgagctattttatgaaatacacagtcatctcactgatcctaacaggattttaattaactgtgataggaaagaagctttgctcttaacagaaaaatcttttaccagagatttccagagaaatcttggggttgtggacaaccagctgtacttcttggaaggctcctgtgtttcttttgtttgtaccccaaccaaatgtctttctgacagacctagtgcagatttaattctctgtcgactactagaaatatttgtacaatttgtagaattctacaaatagaaatatttgtagaatttgtagaaaatgtcatgcatctaaaaggtattggggaaaagtttagggatgaagagaatgttgactgataattctagaagtgatttaggagatgacgggaggtgcaattggcaagtgaacgttcattggtaccaaggagggtagaggggatgttgacactggatttatcaagtgttttcttctttataggctggttcaagacatagagtcagcggatgtctcttctttgtgtcctgaagagcctggaggtctgtatggtttagggaaatatgggtggagtggctggaagggcctagaaagtagtcctttttggacctactttaaaacttgtctgctggaagatgtggcagccttactgtctttggggatccccccttttggctttgtcccccatggccccttctcatatcaccccacatttctgtcaccccaaacctatagcgtcaccatcgtttgtgcctctgctttctctccagaacacccgggtggtgtttgaagttcctgtggctgcagctgcacatgtggtcttgccgtgttccccaagctcagcctgggcatcctgcgtgtggcgccagcccagcggagtgactgcactcacccgccggcaggaggggctagaagtggtgatatccccaggggccatgggtgcttatgcctgtgagtgtcaggagggtggggcagcccgcgtggtggctgcttacagcttggtgtggggcaccccacggggccccttgagccaggctcatacaataggggctggactagcaggcttcttcctgggagttcttgcagcgtccctgactctcctcctgattggtcggcatcagcagcgacagcgacaaagggaacttctggctagagacaaggtgggctggacctaggggtcccaccgtcggtaccacaagctacagccaggatc

SEQ ID NO: 56916 - DNA, 1598 bp, Bovine  19866881032962
  misc_feature (1)..(1): n is a, c, g, or t
nctgccatcaccccactctcagcttagattcttgctcttgactctttgcctaatataaccaaggaatttccatttccccacccatttacagcccaaccaggtcattgcctatgtactttgacttctgctgggcataccttggcttgaatcctgtcacttctgtggccaattagggcagacatgggttgtaaagctctggaatgtgtatccagaaattctgacattttaagttggaaactgaaagatctattaaatacttaatataaagatctgttaaataggtggtattttcatttcttttcctagttcacacagacatgactttgtaagagaaatgaggatgtggaaagtgagtcactagctacataatggggactatgtagtaggatctggtaactgaaaagatgttttcctagtgatgaataaattcatctaataaatacttggaaaaattaaatatataattccctaccacattctccaaagtggttatccaagtttagaaaaaggcaacaacaacaacaacaaaataaacaattagggggactggacaaaggaaataaaaggtgctgctccgtgctcagtcacttagtcatgtccgactctttgcaaccccagggactgtagcccgccaggctcctctgtccatggaattttccaggcaagaatactggagtgggttgaagggtgatagtagagccaagattagataagatcataaaaatgcaaaccgcccacttttgctagaagctatgcccaggaacctgaaaatgagaacacggtggaaccagccaactaactgagggtaaacgagaaaatgtattacagattgtccagtcagataaaggatgcaaaagggaataaatgaacatttaataaccttcaacttctaccatttaagtgggttggaatggccagaggcagactggttttcctgcctagaatatctgtgaaagctgaaaaatatatagaaaccatttggttgagggctgtgagaaagtgctgagacaacagaagtgagaggtagctaagtttctggaaaaggaagaattcggagaagtgagagaggtattgtaatcctgagggcatatgtttattttgacttgaagggaatggtggttgggaactgataatctaggatttatatctcctgaggcagttgcaagggaacagagaaactagcagaactttttggtggagatttgacaggggtaagacagttgctcaagtcagtttctcacttaccatatttgccaaatactggggctgcatggagcagaggacaaaaacacccaaggagaaagtctctagaagtagagcattttagcagacttgagaaacagtgattagagttgggatcgtcatgcgtattatagaccaggttttcagtggaaaattctagagggcctggagcaaaccaggggtagattgagacttatcagaactacagcccagccttgactcagcacagctcctgagtagaaaaggatgatttgtcaaaattatctgcttagtgcagggcaggataaacttgctcagaggaagctaacaccacctggagcctttataatttctctaggcacaatgagcatctttca

SEQ ID NO: 56917 - DNA, 1736 bp, Bovine  19866881149206
  misc_feature (1)..(1): n is a, c, g, or t
nttggtttaaatgcaagtttggtttaatagcagaaaatcagttaaggtctaggaaaagaaataaaatttatattaattgaaagaggagaaataaatgttattattcctagttggtatgattttccatgtgcaaaaaccaaaagaatgtatggatgacttatcacaattagataacagtaaagtttctcaatgatatacgattaatatacaaattttaaaatatcatttgcaatagcataaaaagtaaggtatctgaaattaaatatagtaaagcttgtataagatctttattcaaaaatttataaagatattaaaaagatttagatagataaaagtacatacttttcatgtttagaacaactcattgtcataaaaacttcaaatcctcccaagtagatacatacatatacaggcattgtgtatgtgaaatttgaaaagtttatttcgaaattcatttagcttttgaaagaaacagtggtctctctctctcagaattcactatctttattgcaggactcagcactcaggagcagctggcttgatagacaggtggaagggttacctgtaggttcagttacggtacagctgggagacagcaccctatggagttagactgcttccagcaggatgcggcacacaccttgatccagaggacactgtggtgctgcctctcccaaggccaggaaccaagggcaatagatagaagtttcccctcttattggcatgtctaatacccactgaaaggagtcttagtccctgtccctacaatgtgggactcagaaggtctggagatcccagtgcctaagacatgaatacttctatcagacaactagcaataaagtagaagctgaaactgtcccctggctgatctgaggtctcatgcccctgaaccaacagaaagaggaagtggtcactctactagacaaagagattgatccttggagcaggcaaacagaaggcataatcagagtaagggctgggagtcagagggagggtggctagttaaggcaggggccacagaagatcagtccatcttgtctaggtttgttagtcggactgaagtattccagaggctttgggccacatgaggatcctgagcagcttcagggggaagagttatcacacaggaactgctaaaatgttttccagaaatgccatccagctccttggctaagctcaggtagaggactgggactgcaccttgtttgctatcctgtagagacatagaggaagtgaagagtaaagccaggcaagctctaacttaccgggacgctgagcagcagagccctgacccaccctcttcaggcaccgccagcttctccactacccaccttaaagaagaagctgaggagccagaagaggaagcgataggaccaggagaagtgcttcatgattttcgtgtacacaacgcccgggtccacagagttcacggtcacacctgagaagtgtggtgcgtggtgaagtgagaggaggatggtgggaaggaagggttaagtgtggttctgcagtgtgcagtaaggagggatcctaccacttctgtcgggtagaggcgacaagagacttgggggtggtgccagagaagtccgtgtttcacaacttacatgaatggcaatgcccaagccagtaaggacatagaagtattagaaagcatggggtgatcttcagggggaatatgatgggtggtgttggaggagagggaagttgtggatgatgagaaagttggaaaagaatgaaaa

SEQ ID NO: 56918 - DNA, 1693 bp, Bovine  19866880397128
  misc_feature (1)..(1): n is a, c, g, or t
nactgaaacttcctttcaagtagaataactctagttcatctaaattgccttacttcactacgaggctactgcacaaggttgctttttatttctgctatggagtaatgggacttaacgcttctttttttaaaacaaagctatgactggaaatacaagtgagtttaatctgtctgtaaaatctgcttagtctacacacaaactaaggaaggacaactgcgaataccttcaaacaaatcgccatgatgcctcaagtggcttcaaaacttagtcaaaccttcaagtttcaaagatacttaaacttcctatgtccattcttcccatcttagttctcccaaaatacgggtagttttcaccggtaagtactggctgtttatacacaacagagttccaaactgtaagtcatgtgatacgttttggtcaatgcagtgctgcttccaactcgaagcgacaatggcttctgtgtctcgtttacagcaagctaacacaaccaaacactacgtctaatgcacagcgcaatcattcaagctactggacatgctgcttttacttaacaactttacctgtttctgaatgatttcactttgattagaagcttggagggtgtgttcccgcttaatttctatctgttgctgcttcttcttttgctgctgatccctgagttgctgaaccctctgcaactgctcttgcacactggctgcctgcactgcgaccacattctgaatgtggtgagtctgcacagggctgctctgctgaatctgaacgggtaactggagtttgatctgctggggcacaccaccttgctgagcctgtatctgagccacaacctgcggctggatctgggagagaacctggacttgtggtggcagctgcggcacagccaggacttggggctgaggctgcggtacttggagcggaggacggggcggggatgaaacagcaacttgacttaacgtttgtcctggtgaaagagtttgagttgaagactgtacctggggttgtgactgtggctggccctgggaaggtgtcggaagagatgtatgtggctggattggaatcggttgggaggctggagtctgaccctgggcctgctgtccgggagacacttgggatggcgtcgatggacgtactcgagtctgtggtgggctctggacgcgagcaggagactgtccttggacattgctctgaggcggacactgtcctgcaacctggggtttggaggactgtgcttgggtgggctgtgcttcaggagggacatgggaggccacagttgtttgggtctgaacttcaggctgagtctgagtttcaggctgagctggggatgggggctgggtttggggctggggctgagctgaaggctgagctgaaggttgagcgggctgcgcaggctgaggctgggcttctggaggactcacgctcgacggcggagctggaggcaggcttttggctggctgcacctgtgtcggggatgataatttactctgtctttgttcacttgtacctgtgaaaaggcaagagcaaatacttatgactctagaacgtaagactgtagtttaagaagaatttgaaggggattttctaaaggtgagaattctacatttcaggacggaggactgaggcttagaaatgctccatccagaaatactttggtcaggactcgcctaaatcggggaaccctccccatgttcacggctgc

SEQ ID NO: 56919 - DNA, 2192 bp, Bovine  19866880542312
  misc_feature (1)..(1): n is a, c, g, or t
ngaaaggaagccctggtgtcagtcagtatgggggctgtaaggacctggaggtcagggctgttggactgtgattactggaacaatatcctttccctacaggtcccactggactttgctcgtagctcagacggtaaagaatctgcttgcagtgcaggagacccaggttcaatccctgggtcaggcagctattcaccccagtattcttgcatggagaattccatggacagaggagcctggcagggttacagtccatggggccccaaagagtcggacatgacagagacttcagtaagcacaggtcccaatggtacaaatgcccaatctctcctgcactcctgggggatattttcccactttaatatcatagttctgggggtgagaaacagtttggaccagagtaaaccagccttgcaaatagccaagcagaattaccagtcagcagcatgaagcctgagttacttttaggagccaactcctccccacttcaacccatcccatggagcccctcctggtccataaggtaatggatgtggaggaataaagactttactctttattcacaagtttctcctgaccgcctaagaaacactgtaggagctggggatacagtgcctgttctaggagctaggatacagtaatgaataaaataaatacccttccatcagtctacagggttggagggtgggattgtgtgtgcatacagacataaagtggggcttctctcgtggctcatggtaaagaatctgcctgccaatgcaggagacctgggttcgattcctgggtcgggaagattccctggagaaggaaatggctacccactccagtattcttgcctgggaaatgccatggacagaggagcctggcaggctgtagtccctggggtcccaaagagtcagacatgacttagggactaaacaacaacaacaacaatagacatgaacagataaagactgacaggaggggagttccccggtggtctagtggttaggattcaatacttccactgctgtgcccagggttcagtccctggtcaggcaactgagatcccacaagagttcccacaagccaagcagcaaaaaaaaaaaaaaaagagagagagagagagagactgagagctattttgatttggtcctaacattaagcagggacccaacagaagtgagagagggaactctgtgcatagctggggagtgggcagagagtgttctaggaagagggaccagcaagtccctgaggcaggtgtgtgctcagcgtatctgaggtgttaacactcctgtcacgtggtggctcacctcctcactcatggggaacctagatccctcagagttttttctggggacaggggagtggggccaggtagtgcatgaaactggtcctgcatcttcctccttccccacacatgcccagagcagacatgggggcgtgggggcccgtggtcagcctgccccagatccctgcggatggagggaagaggagagaggaacagcatgaaacactcccacctgcttctgaaaactcctgctgagtcagagtcctaggggaactgctctaatgaataaataagaaccctttgaaggcggcctatttaaaattgtgcgcaactgggcactgggttcttcccctagatggatcatatagttccctttccattgtgttcaggagccaaatgtgctcagcagacctttttccatggtagataacttctgaaggaagactggaaccctggttcctgtctctagttatgtcgagtctcccactgggggcttctgaatgagccggttaggtgggcgcttggcaggagccctgtagctgggaagcccagccccctgtttggtttaagcccaggagaggagctcagccaaggccgcccagaggggtcagcaggtggcccaagggcaatctctgaaacacacgtgcttgccctttctgggaagctgctgctaggatgaacgggcaagggctctgcctgggtcacctgggagggagaagccgggcctagagtctttggtctttgctcagccatcttgtcattgggctgtgacctcctcgactgggcagaatagaaagatgcctttgtatggcgtgtgattcctcaggacatgtgtgtgggagcctcctaccctgtgggctcttcatttttgcatttctggcacccagtacagtgtcaggaacatagcagggcctaaggaaga

SEQ ID NO: 56920 - DNA, 824 bp, Bovine  19866880557128
  misc_feature (1)..(1): n is a, c, g, or t
nttaagaacagattatgcaaactgatagctgtgaaaacctacatatcaaactataagtttatacgatggtctttagttaataaaaaacatttaagttcctacctggatcttgactatgtttgagttttccaagagcacctgctaatgacgacacttcacacttgaatggaactacagttagaaattttccatgtagcatgaacagattttccccgtaataccagagctacaaaaacagaagttatcaaaaatataagaaaccctttttctaagatctgattcaacagagccatttttgtggggtaaggaatcttaatatgacagaaaaggataaggcaaaggtaagcaactttctagaataatctcacacgttcaattcattaattaaggtaggtttacaaagctcttatttttgcccatgtgtgaatagagcataatttagggaatattttctttcaactcataaacatctgatcaatatatatatttaaaacaagtgaattgtcactactacacatctgttaacatgaaactcacgaaggctcctataaaataagcaaactgttttgatgtactaaaaagaaaaaagtagaatttaatattatttctatctcatgatcccaattataaaattgtaaaaatgagaaaggtataagaataaaaagctcacatgaaatcaaaagtgaagtctggaaaaaaaaagtgaagtctgttaaaatagcagaagtgtgaagtgttaattctgtttaaatataaattagcattctttgctgagaaatctagtctccttatcctctaattacaagatcaacaatgtcctatat

SEQ ID NO: 56921 - DNA, 1778 bp, Bovine  19866880619418
  misc_feature (1)..(1): n is a, c, g, or t
nacctagtaagaggctctcgtgaaacctgaagccccgcctaagagcatcagccagtgatggtctaggtgctttcacatgcatctgtcttgtcatcgaagagagagtcaaaaaaacacatctcttgcctggctgaggaggaagaatccacaaaaaagagcttcataaaacgtccatgaagggaaactagtaacatcagaagagttccagcacttcaattgagtataattctctattattcttttcttgatttaatttctgtagctcacgaaaacttacttcaatcttgttgagctcggaacaaatgcttatctaaagaaaaaaattccaaaataaatttttaccataacttgtacaaataaaccctccacaattacttagagctattccaagaaaaactaataataatgcttcttggttacaaacagaattcagtatatataaaataacaacatacctgggatttcacaaatttgtaaagacttaacagtagcctttttgcttctggtatcattaccacaacagtaaaattagcatccagaagtagacatatccaatccataatctgaagataaacagtgaaaagggaagttaagattttacaaagtctatgattatatcaagcagttataagaaaaataagctttctttacagaagtctgaacattttagtttagagatgaaggaatttctaagcaatctaaaaaggctcttttctgctttcatatttaccattttataagcataattgtgtcttttccatcagataagtcagtaaaaagaaaaccacagtaatatttaatcctagggaaagtgagcatattttatttaaaaattttttttgatttaactactggcagctataaaaaaagaacccattcatctcctattctgaaatatactacatacattatgacgcaaaaatagggtgtcatgtattatagatgaatggccaagaactaaaataaaattactttatacttacttaagtatcctacatcttcaaatgggtggggttaacatgaaaatatcattcatgaaaaagcattaaggaaatcaattatccatttgcgggaggggggaaagcagattcctatataccctctacatcaaaataaattttatatgtatcaaagagttaaacacagaaaaagaaaataaatgtattacagaaaaatacacggtggctatttttatactcagagtgggtagggccttaaacatgacacggccaaaaagaagccaaaaaggaaaagcttaacaactttaacggcatgaaaattaaaaactcacctacggtagaaatgacattaaagaaagtaaaaagacagtgataggaaacgagtatttgtaatactttgacagaaacagatgagtacctcaatggacaataaataacttacaagttaaaatgaaaaagacagaaaatgcaatggaaaaatggacaaagaatctgattaggcagtgcagaaaaagaagtataaatgggcaagaactgatggtctatctttctcattaccaaagaaatgcaaattaaaacacccatctgttacctactgattggccaagagtaaggtctcggacctttgtggccatagtacctcttgtcacaacacttcggaaaggcagcctggcatgctcaaaactaaaaatacacgtaccctttatccagtaatttcactaatgagaatcaacccaataggtgttctctcataatacataatacaatacaagaatatctgtataaagatgctcacgaaggttcatttacaatagcaaa

SEQ ID NO: 56922 - DNA, 2257 bp, Bovine  19866880654432
  misc_feature (1)..(1): n is a, c, g, or t
nttattcagtcagatgtagatatacgaaaagtcaaagtgttagtcgctcagtggtgtcagactctttgcaacccccatggactgtagcccaccaggctcttctgtccatgaaattctccaggcgagaatactggagtaggtagtcttattcctttctccaggggatctttccaacccagggattgaatccaggtcttctgcattgcaggcagattctttaccgtctgagccaccagggaagcccgtgtagatatataggaagatacaaagcacttggcagttgcctggcactcagtcagctctcagtaaatactgctgctttccctactgcctccttgattgtcccaccccccagattggcacgcaatgtggttataatagagtactcgatttagagtccaaagcacctggtgaagaggcttggttctttcattcattggcttatggccttgggcaagtcacttaacttccctgggcctcagttttcccatctgtaaaaagggaataacaaatttgtaagtttttagggggaataatggcattgcagggtggatgaggagcaaacaaaatacacgaagaagggctttgaaaaaacagcacggtccataatgttatccctccctccccacagccacacacctgcggcttctccccttctccgggctcagctctatccgcgggacccaaggcagattaaaatctcaacctgctttcctcactcccctacccccagcacctctctgtggtgccattcatggaggcgccatggtggcacagcgccagggtttgacccaactctaccgcctggctagtcgtcgtctccttgtgtcaagccccaattccaatttctttctctttcagttaaaacacttggcctcgaggcctctgtcccttgagcctggacttgcccgcacaccctatgaatagctttgattagaaagaaaaaccagcatttggtacaagggtcactcagcacttgtgttgcgttcagcagggaagggacgccagtctacccagtgctgtttcctgagagcctggctacaggcttggctggggaggggatggcaggcagacccctgtagggcttggcagctgctgatgccctgcactgatgatgctgcccttcattggttcacggctctccccggattgtctgtacattctagggccagtcttgagttattaacccactcccatcgtgatggacacactgggcctccataggactggtgtgacagccttgagaggagaggggcctggaaaggggagaaagaaggggcagcatcgggagaggggccaggactgtcctcagcccagcccccacctgttagagaccaaaagccccttgccctccagaagtgttactgtgacttcaactctgctccactgtgcctgtgcacacacacacacgactccaaaagctcttaatttccaattaagggcaaacatttggaaggggattttgacatcctctttctagtccagttgtttatacccttttttgagtcacagactccctctgagaatctaatgaaagccatggtccctttcccagttgaaatgcatgtatagaacaaatttttcattaaatttcaaagtctgtaagaacctgtaaaatttccagtggactgagattaagaatttctgatcagatccaactacatcattattgataaagacactaaggcccagaggcggcaagtgatttgcctatgctcacacagcaaatgagtagcagagcccagtctgaagcctgggttccaaattactagttcagtaattccccacatagtgtctctcccttttttctccatgatccctctcagccagtcctttcctagcatagattagaacacaaatgttcagtgattgtggttatcaggtgagctggaaggtgggccaacttcttttaactggttcctacaggttcagagcagatggggtttggttctagaggtgtgtgaggggactgagtcggggattggctgggtttcttccaagctgttccaggctgtgaattctgagcgctccagtctacaccaagtgcagggccaagagaagtgtcctcagactacagagcaggggacctggagcatgtccagccttcctctaaatgccagccaggacctcagctttaacaccaccccagtgtccctgttcctcctctgctctggaacccacattggctccctagtgccataggatcaaattcagattccttccctaggtatctcctctgcagaaaaagagctcatct

SEQ ID NO: 56923 - DNA, 1605 bp, Bovine  19866880762496
  misc_feature (1)..(1): n is a, c, g, or t
nagcctcttacagatggtggcctgaaaggaagcactgtctggggagaataccagtgcactgacactctgggaacacacagctaagcctggcactcagcctgtggtcttggtgttcatgggaggaacaggtccatcttcatcaccaaagacaaacgcttttctttgctggggatgccaggccagtgaggtagtattgtagctaacctactatttccctctaccagagcagtttctattgttctcaacacctctgagacaatccttatgggaaaaagcagcaagaaaggtgagctatgaaggggttcacttctgcgtggttgggcagaaatcctggctactgctggcagcctggtggccccaggaatcaaacccctggaggctggtagtctgagcctccacaggctgctccacactggggggcacactgggcacaggggcttcctccatacgtccgcggttcacagagaccccgggccaccaagtgcggaatgagcctcactctattccccatgtccatggggctttgctgcgtctgtcttcctatttcttagtaaacatgtttcccactggtaggatggctgagtccaaagagtattgtatttaaaatgctgacagtgcccaattgctctgcagaattacacacttcacgtcgccatcaactctagtcaccctgctttcccataccttcactcaagtcagtaccaaatttctaattagcccaacggagagagaagaaatactgtcccattgttttttatttacatttaattatgagagaagtaacccccttttttttttaaatgtctactagcctttcacatttattttgctgccaaatgcctgttcaaatcctatgtcttgtcggttatggatatttcatttataaaaaaggtctttttcattttaaaggaaagtttccatttgtggtgcaaatatttttcctcaatgtctcagctgtcttttgagtttgattatattatttttccactgagaattttaaatacatatatccactttactcatctatggcatctgggttttatatctgtttgaaaagaaagtatcacaacaaaaatataaattaatccatgctctctttttaagctttctgttactgtttttaacagtatgttgtttttctttttaatcctcatttgtctgatgaatgtttttgctgaagcaggaatttggatgatattttccccacacacaccctccttccttgtctgacaggaaaagttatcacagtagatttccatgtgtgtttcggtttgtttttggattctctgtttgattccattgctctactttttctctaggacaaagtattttgactattgtagcttcaaaacacattctaaatatctaatcctttttctgtaacacctgttttccttttcttacacattaagttttctagaggaaatactagcatcattttggtcaagtctcccttaccctccaaacggaaaactattcacattgcaaatgaaaattaattttgatagattaaattagcataattagtatactgcatggaagcatatgatgtttctttccatttactcaaattatatcctttatatcttttctttctggtggggg

SEQ ID NO: 56924 - DNA, 820 bp, Bovine  19866880794955
  misc_feature (1)..(1): n is a, c, g, or t
ngttaattagctggtgagaaactacttcagttcaaaccagggatacactgtgtggagagtgatatatggattgttaatctaaaaacaaaagggtctacaagatggggccatatgagtgtgtcaccgtgggtaaccacagtcagtcaacctcgaggcctttgtcgtttaagatcccaaacagcatagtggagactatctctatgacaaacacagtgtatcttcagtgctgacgggtgctctggaggaatgcctggtcagagtcacagcaaggaatgagtgtgaactgcagggaatgagactggccttgctgacacccctggttctacccaatgtatttcttggcagattcacctagaggaatcgaaatagtcctcaagcttccaactaacctgcttttgaacatcagggagtaacagacagttgtgtggtgggtcctattaccactacctttttccttctgaattacaaccctcgcatgcttttcactgccgcaggtggaggccctggggtgtttctgtatgctgccttcaccaggcggtgtgctgcgtgttctggaagtaagctcaggacttgaatttcaggttttagtctttctcactagattcccaaaccagcctagtttggtataagagctcacagaatactccttaaaactctccccagctagaacagggaatgaatgaacctggtatactgaaatgttaataatgaaagaaagtaaaaaatatgaaatatccacaaaataacgatctcaatacaatgaacatatgtacgtgtgccgcattttatgcaatttaaaagttgtgtgtgaaatgaattt

SEQ ID NO: 56925 - DNA, 2586 bp, Bovine  19866880796313
  misc_feature (1)..(1): n is a, c, g, or t
naaatgctgtttctactgcagataccctagtatacaatattatggtgttgtttctgacacataacaacacatgttatggtgttgtttctgacagtgtattgctaatctaatgagggagaaaaattgtacttaaaatattcagcattattttaactaatagaatttattgctaggatgatttcctttgaagaacagctttcaaatttatgtgtactagtatattttaaaaattatttttaagctgttattcttattgtgaagatatgcagttggtcctttatatctacctgtatatatatcatttatgattgccttccttgaaacaaatagacatcatttttaagaacagctttaaatttacatagaaactatacagaaagcagacacttctcatatgttaatgctgtcataggaatgttcttgaaggggtggtcaaagtgaataccctttatactgtcttgacaatcttaattttcctaaaattatgtttataaacgttatgttataaacacgtcatattatttaggaaaatgaaactcttttaatcatcatttctaagaagttgtagcgcttagtaccacaggtgtgtctataaaatatttcacatgggaaaaagtgaagattgtaatttatgcaaaatttcttttgagaaaatagctctccttcaagtcttaaattctagacatagaagcacagtacataaggcgtatctgtctcatactctgctggtcaggccacgtctggagggtcacatcccgttcatgtccagtatgtccagtctcactctaaggggacggaaggagaccagcccgagaaagcagccagcgtgtatggacacttgaaaccgcgtcctgagcgacgaccgcagtgaccagggcaggaccctggcatgtcagaaggactgttcttttatacacatgctcatctttctgtccaacctcctttgaagataactcgcagctttctaactgttgtgtaattatcattttctgtttctagctgtcttttgggtttaaggtaaagtaagaaccctcttgtctggagttagcaagactccctcgccttagactgaactagggaactcctcggacaagggaggggaagtaaggtcctctggccagggtgttatgtaagtcggttgatggtctggtattttctttaattgatgacaggaagagctcaagagggacctgaaaattaagaaggaaaaagacatggtgcaggccacagcagtagctgccacctgccccgcagcaccgcccgcacctccagcccctccgccttcgcctccacctccgcctcccccacagcacccgggccctctggccacggccacgaccacgctgcctgtggcttcccagaaaaggaagcgggaagaggagagagactccaactccaagtccaagaagaagaaaatgatctctactacctcaaaggaaactaagaaggacacaaagctttactgtatctgtaaaacgccttacgatgaatctaagtgagtagatctttctgagctctagtttattctcttaaaagtgtagctaagtgtccagttttgaagaaaatgaggatatcagtagcagtgtaaatgaaaatagttaaacataagggtaatgatacttcattttgtggtcttgcatctgatattcttaaccttgacactagaataaaaatttatgttttttttttcccccacgtgttcatgattcatgtttgtccttcatcatattcttttctgtcaaaaataagctttctgttgctcctttgctttctccttttctctctggatcaattccagatcagtcagtaatgctctctgaagaaagagtgtgttactatcaccgcccaaagttgacatcatcctttctggaatcttcacaagcccatgattacatccaaccctagagacaacctagattcaaatggtggaaaagggctttgagttggaatggttcggaatttttatcatttaattgcaagtaattctatctttctgcaatagaatactgtaacctaatatttttgtccaagttcccactttcttattggggacagaagtcagaaaaatacaaaaaggagttctttcactcattcctcgagaatgacactcaaaaatttgataagcacggcaactggaagctgtttttgatagttgtgacttgtatttggttatatatacaagattttagagacattaattcataaatgtggttacacttttttttctatcatttttatcactcagctaggtatttagcttccattttcaacattcgtatgcaggccaacgttttaaaaccaaaattaacagcagtattaattttacaatacccaaaagtttgattatgctaaaaagtgcgatcatttagaattagggatgcttaatgtctactgtaagtagatgcctaatccgtttataaaataaaattgtctcttcagtgatgtttaagttgtaacattggagctattttagtgatgctgtttaaattataatccgtttggaagtgctaaatcaaaactttttgttggtaacttcagctgtgtattgaattaaacgcagatcagtataggcatcttcacttttca

SEQ ID NO: 56926 - DNA, 921 bp, Bovine  19866880813600
  misc_feature (1)..(1): n is a, c, g, or t
nattacctgatgtttaactggaaatgtgtattttacccatgtagcttgttgcattgtttcttcctcttcttgtttttttctccttttttttgactttctccttttcttctctttcaattgatgtcattctatgtaacctaagaatgtatgaatagaaagacagagttacatttaaaaagtaaaaagataaaaacacagtactgaagattaagaaggtaaaagcaaagaatgactaactgtaattccacaacccggaaaactggaaagtcacaaaaataagcagatatacaattatgtaacagtagaaaatcaaacagtacaaaaaggcaaaaataaaacttgctgtccttcccatatgcctctccataagaaataactcatttataatttatttcatgcatataccaacattataatcacacaaaggatgttatattataaatacaattacacagtttttaatcaatggaaaactgcatagatctttccaaaccctaagatacattatcttcttgcctccccccaaaaagatcaacaagccccaaaacttttatcaaccaatatttctatttagcatttggggctgtagcgccttcacagggtccactaacatagaatttaggcttcctactagcagagagacagggaccctgcttttgggtgactggaagggttgggcaggaaggaccacattaatcaggcaataatcattaggcgtacagcatagaccatgctctttttttcaggcaggaaatcagataccactgcacctatctgtaaggagatgggtgagtctgtggtgaggttttaagttgattacactagatttctgtgaatgggagtattttccataaaaaagaacattaaccaaaatctacaaaggagctcctgtctctaaaagccctagtggtagaagaactg

SEQ ID NO: 56927 - DNA, 1344 bp, Bovine  19866880961092
  misc_feature (1)..(1): n is a, c, g, or t
nctttttgaaacccgtcctctcttccctgtactcacctgcacaccttcaggcacaggatttacaatgctcctgctctgggacccaggtcgccatcctgggaatcactgccaggcccctagttctgtcagctgccctcaacgcccagcccaggcccccaccccaccagttacgcaaatacagagagagccacagccaggctgggccggagtcaggaaggatcaccttgataaatgtgtatataattttccaggctccttgtcagggttggacgggaacagccacggtgatggaggcagcctggaacccagacagtgggttcctgaggacactttgacaaagaagattctggcacatcccctggccttctcaaagtccactttttctgcctctctcttacagtggttcttaagtttagcttcatattagaatcacctgggcaggtttaaaaactcctggtgcccagatgacacttcagaccaatgacatccaactctctggagggcaagactggccatcagtactttttaaagcttcccaggtgattctaatgtgaaccaaggctgaaaaccacagcaacagaagtgaagttttcaggggcaactggaaacacctgcttctatttaaatacagctcaagacttgaaagatggaaggaatctctgagattggatcagtttctattaaatccacataaccttttgctaaaacatgtctttattaatagaaaacatttatacgcatttcctatgtgtcagactctattctaaatgcttgatatatatatatatatattaattcatgtcattcccctaacaactctttgagggaaggcactattatgaggatgcccattttgcagatgagaaaactgaggcacattataggaactgccccaaggtcataaagctacctagtgatggagtcacaattcataacctgggtggtttggctccagggacttccagtaacctttagtctgttctgcttgtcatgaaagccgagacaggtaaagagcctgtcctgttgacagcctcaacccacctgtccagccccacctcaggcagagcattgctagggatccacagattgagtctgacctccaggagcctccccacatggataaagaaattgtggccctgatggggaagctgacacggctgaaggtccttggggagggtcaggcatagctgggctgggaacctgggccttggggctcagggggccctgagggcagtgaagaggaggtgacttacttctcattgtcgtagtacagcttcccaatggcccaggccacaatgatggggaaaggcacacctggggggagaccggtgtcagaggacctgt

SEQ ID NO: 56928 - DNA, 916 bp, Bovine  19866880988409
  misc_feature (1)..(1): n is a, c, g, or t
ntggttacaatggagctgataccgttataatggcagttgtcacctagacccttgaaacttctagctagctacgtgtgctgcctgttggctccagtctttttgtttaccctgcggtaacatgaccctgaattttacacatttttttttttaatcccctgtatggtgttttgggcttgcaggtcagttttttacatcgtgcatgtatttatgtatggcatcggtctttttctaacaccagaatcacttataactctgcattaatgatttggtttgtacttctcttcgcctccaattttgagagacccagcttgtggcctaacctccagtatttataatggaaagataagccaaaaatgaatacaagtgattacttatggcgggagcaggggagagaatgggagcaaaagttagacttctaaatgtactatatgttgtagatttgactttggaaccataaacaaaagtgaatcaaaatgagaataaatcagtaccttaaagataagccttctctaactgtccttactcttttaggtggcaattgcattgtaataaaaatttaaatgtttttatgttcttctagttgtccgctgaggtgtatagaatacattcaatacagggaacagaacccttggtgctgttcaaggaaggtgcagtttcgtggtttagaagctttgcttgcagagccccagcagaaaattgaaactgttatctctgatgaagaagtgattaagtacgttccaatacttacaatttttactaaaagaaaatgcactctgggggattccagactcatagcttccaatgcaggaggcaagagttcgatcactggttggagaactaggatcccacaaaccttggggcacagccaaaattttttttaaataaaaaacaaaccaacaacaaaaaaaacttgcta

SEQ ID NO: 56929 - DNA, 3662 bp, Bovine  19866881233714
  misc_feature (1)..(1): n is a, c, g, or t
nggacatggaacacagactggttccaatagggaaaggagtacatcaaggctgtatattgtcactgtgcttatttatcttatattcagagtacataatgagaaacactgggctggatgaagcacaaactggaatcaagattgcagggaggaatatcagtaacctcagatgtgcagtgacaccatccttatggtggaaagcgaagaactaaagagcctcttaatgaaagtgaaagaggagagtgaaaaagttggcttaaaattcaacattcagaaaactaagatcatggcatctggtcctaccacttcatggcaaatagatggggaaacagtggaaactgacagactttaggggctccagaatcaccgcaggtggtgactgcggccatgaaattaaaagacgcttgctccttggaagaaaagctacaaccaacctagacagcatattaaaaagcagagacatgactttgcagacaaaggtccgtctagtctaagctatggttttttcagtagtcatgtatggatgtgagagttgaactataaagaaagctgagtgcaaagaattgatgcttttgaactgtggtgttggagaagacttgagagtcccttggactgcagggagatccagccagtccatcctaaaggaaatcagtcctgagtattcactggaaggactgatgttgaagctgaaacaataaactttcgccacctgatgcaaagagctgactcatttgtaaaaaccctgatgctgggaaagattgaaggcaggaggagaaggggatgacagaggatgagatggttggatggcatcaccgactcaaggcacatgagtttgagtaaactctgggggttcatgattgacagggaggcctggcatgccacagtccatggagttgcaaacagttggacacaactgagcaactgaactgaactgaggaaataaacatttgttttctcaagagtgtttgttttcttctcctcatcctctacctttctgtgactgccttatccctgaaaagaaattctggataattcttgttacagtacatccttgttaaataggatttttgcttcggcattaggcgtcttaaattgctcttatttattttgcactttccagaaccaagtcaattaaaaccaaaattgtgctcatcaaagtggcatgttcctttccattataaatagcagtttttgtttgtatgggcagttgggaaccttgtgagccacaggaccccaagttcagaaggccattaagggaagtgtagctggctgctccttccctccctccaccctagctgaagcttgccaagacccagctggctgattttgcaaagcccttgaaatatgtcattaatggtgcttgcttttgagattgggctgttgacctaatttgtgatgaacaaaacctggccaaatcatgccgtgctcccctccctgcagggaaagtgttcgtgaaaagtgtttagcaacatcaccgatttaaataacctcagctaataaagatgatagaaaacactccagctatcaagtaggattttttgaggacagaagagcaatttaattttgagcatttgtatgttaaatggcatgttgttggcatcgtttgaaagcagaattctggtgtctataaacgcccagttcctcctaaatatttgggacagtttcataacactgtgtaggagttgtacacagcaaaccctcttaaattgatcagtttgtgcattcctctcaggcttacaataaaaaatgtctccctatcctagttcctagagtggtgcaatggaatggactattaattaggagccagatcagcctaagttaaaatctgtctctactgtattttagtgagcgtcctttgggttatctgtgtagcccacaatccctcgtgggctgtaccctgcaataggttaccatataatgtctgattaccatataatagcagtatgctaggtaaatattgtagtcatagaacagctattccccacttttttttttttatgtaattattttctgttttggctgcaccacacagcgtatgggttcttggttccttcaccagggatggaacccacaccgcctgcatgagaagcatggagtcttaaccactggattaccagcgaagtccctattcccaacctttaacaacaaaggtttctttgctgttcttccacagacctctattttgatatttacctcctcagttcagttcagttcagttcagtctctcattcgtgtccgactctttgcgaccccatgaatcgcagcacgccaggcctccctgtccttcaccaactaccggagttcactcagactcctgtccatcgagttggtgatgccatccagccatctcatcctgtgtcatccccttctcctgccttcagtctttccaagcatcaggggtctttactagtgagttggctcttcatatcaagtggccaaccagtggagcttcagcttcagcatcaatccttctaatgaattttaagggttgatttcctttaggatttactggtttgatcttgccgtccagagtcttcatcagcacaatagatggaaagcatcagttcttcggcgctcaggctttgtggtccaactctcacatctgtacatgactactggaaaatccatgactttaactatatggacctttgctgacaaagtgatatctcagctttttaatatgctgtgtaggtttgtcatagcaagtgtcttttaatttctggcttcagtcaccatctgcagtgattttggagcccaagaaaataaaatctgacaacatataggcctttacttgtgatacgaagctgcttaggtgagcaaacattttaccaagaaacaatcaaacaaagctgtgttttctactctgaatgaggttgaatgtttagaacttgaacagattcaggtagggatgtgtgtttgttagtttcccagtcatgtctgacttttgcaacccggtggactgtagcccatcgggctcctctgtccatggaattctccaggcaagagtactggagtaggttgccattcccttctgcaggggatcttcccaacccaggaattgaacccaggtctcttgccttgcaggcagattctttaccatctgagtcaccagggaagccctcagggagagatattggaagcttagtcataaaaacaaaggaatttgagaaagaattggatgactcagaaaactttgaattcattcaaaatgaatgaaaaaggataatataaatacataaatattagtaggctgttccaactgtagttatgaaagacatgattttttagcaaaactgttggattacaagagaaatgtggaaaaatacatagaaatgagaagacctttaaaaactggcttaaaccacatttttagatgaccagtgactatccccactcttaatttttgtacatcttttcaaacaatttcttttttttttttcaaacaatttctctgtcacatcaaggaaacattaacttagtgaatgtgaaacttgtttcttcttggtaactttgtaaaataaccttttcttatgttacagaggtaatcctaattttggaaaattttaaaaacccaccaccacaaagattaaaatagcctaaaatctcaccattagattgtatattttttcatagataggaattctttttccagttagttttaattt

SEQ ID NO: 56930 - DNA, 899 bp, Bovine  19866881271930
  misc_feature (1)..(1): n is a, c, g, or t
naacaaagaaatgaagcctcctttgtttttgtttttaaaatcactagcatgccagtgaggggggaaataaagtgtctaatgaacgtatgtataaagaaatttctttaattttaaactcttaatttaaaatgatctcagtattcattccaggtatatttgggtttaagaacttttgataaccgggcattgaaattaaagtggttgtattgaaaggatgttactattgttaacaaagatgttttgttctattcacaaagcagcatctctttactgctttgcagttaccttgattttctaaaagaaaagcatgctcttcgcttggccagactgttgcttagcattcttgatacctacattgcttatggatggcatttttaattaacggtttcagggtgtgggggtgtcaccatctaaataatatcacccaggtctggatttagagctgccctccgtcttggccccagaccacactgaattaattcataaacttctcgcaagtctgccctttggaattgaagagactctcacgtgacacacaagggctgatataaaaagacagcagaccacatgatgcagaaaatactaagggaaaaattccagctgtaaatactcgctctaaatccccaccaagctaattagtgatcaagatggtagcttgattaacctattgttgagcgtgtaccattcattgtaaagaggcatgaagttaaattctgccaggagagtggcagaggaatccccatctggggaaactgctaatgaattgttgtaaaatttccaaggagtggagtggggagtgcaggataaagcaacagaaacatttaaagtgacactaattattatttttatgcattgcacataccgaagataacaggttctttgttgaagtttttttatcc

SEQ ID NO: 56931 - DNA, 1765 bp, Bovine  19866881317023
  misc_feature (1)..(1): n is a, c, g, or t
nggtctaccttatctcccccttactgctgggtgcggactcaaatccagctctcccaaatcccactctgagaccttgtccacttcatccactacagtagataattcattgctggacatataacttctcataacagcactcagaattgtcttcattaattcaactgatttatttatttttaaaaaaattatttctttctttattttttggctgtgctgggtcttcatcgctgctcgggcttttctctagttggagagagcagggctactctctagctgtggcgcttgggcttctcattgcagtggcttctcgttgctgagcacaggctctagggtttgaaggctccagtagttgtggcacttcttggcctttcatataatatttattgaacacctactatgtgcatggctgcctaccaaagaatgttcacattcttggccttggaaaaaatatgacaataaacaaagaagcgcaccctagtagcagtggggtgaggtaggaggaacagcagtgggcctggagagagccgacctgtgtgagtaccagatccggtccactaagagcctgcagaaccacaactgtgagatacattaaagataatatattatttacaggataaagaggctcaggaggaaaataattttgaaaagcgctatataacaggagatatatttagacagttggggttacatgtacctatacacagttgattgacagtaaaaagactgtatcaagctatgatatcggggctgtcacagtttaggagagaaaagaaattgactgaaatgctgttatatggggcttactatgctgggtactttcacctgcgttcggcgatgtgttatttaggcagtgtatcaattaggatggaacttggtgggttcctgcaagaaaccgcaaataatagtggcctaaacaggatagaagggctttccaggtaactctatcagtaaagaatcctcctgccaatgcaggagatataagagatgcaggttcaatccctgggttgggacgatcccctggaggattgtagaaatccactccagtattcttgcctggagaatcccatggacagaggagcttggcgggctacagagttgggcatgaccgaagtgacttagcatgcacacatgcaaagagagaagacaagatacacagaaaagcagcaaagaatgcagctgggacaagatcaggaagacaatgccatatgcccgggcgacccagagagagctgaggatgccagatcatcaggacaacacccaacacaacatcagtggtaccagctatccccactccaagatccctagtttccatatttccttgggcaggtaaggaggtgcaaaccccttgccttcacccacattgtattcccttcactgagtcatagtttctttgtcatctgctcccactcagagtgactcacccacgtcaacgaattcaacacactttccccacccttcctgccattcccaagactggttctcagtgcacttggggtcgatgggggcagagagtggggaggacctagctttggctccagtgctgacgttgctggggagggaggaagaaggatacctagcaacaaagcttctggagctcccgaaagggaagactcttggatttctgctgaaggcagtgtaacatctggaaagcagtgtagaaattggactggaggcaagaaatgaaggagggttggatctgcatggttggctttcctctgtgagggcttccctagtagctcaactggtaaagaatctgcctgcaatg

SEQ ID NO: 56932 - DNA, 757 bp, Bovine  19866881382107
  misc_feature (1)..(1): n is a, c, g, or t
ngggctgtgaattcttgaatgggatgcctgtggtggggaagggcagaggcaactctggataactgtcctgacaagctaagaaaaatgacattgggtgtggttgaaggttggtagctagctgcttcgaggataaatgtttccagtgacttccgaggactcaggaataaaggaataaaaatcaccctgaatatctgaacgcataaaagctattttcaggaaatgcaatgctaccttgaaacatatgtctcttcccagtttgttttattcttaccgttttgggttgttgttgttttttaatcctctctttctcttccttcagaatgaggtaggtaattgatttctttatcaacatgccgggtgatacatttttcacggctttcagggagcacagaaaatctaaaaccattgtctggcagatgcagctttcagctgcaatcatctttatcatcaggtaagcctgctggcatatgtttttcaaattttattcagaagcgttgtcttttactggtcaagtaacattctttgtgattgcgttatccaaaaataaaaaagaatttttagcaatgatcgaaataaagcttgttagatcattttaatggtaatgaattggttcctgaagatttgattaaagagaaaactaggtcaatttaagcagagtccaaatgaggcagaaggaaagtccatagaggggagggaaaaaaggaagttgtggaaccacagatacactaaaagaaaaaatttagagtataaaaataac

SEQ ID NO: 56933 - DNA, 858 bp, Bovine  19866881946554
  misc_feature (1)..(1): n is a, c, g, or t
ngcagtttgcctggctctccccacgccaggattcacttacattccttgactccattatggggaggataagttggccaagttctggcccctctggacccatagttggacctcacaacctaggaccttgcccgtgagatgagctgggactgaaggcttggtgttgatgtctggggctctgagctcaagacttttgagtttttcggatagataatgttcacagagattcaaaggaggaaagctccaaacagattataaaaagctctagccaaaacctgctcctggcagggtgcattttgacatgttgaatagtgatgggctaaagagctctgggtgaataaagagagattctgacaagtctgtgcagaagataaagctggagggcaccgatgggggtagtggttgttcacgggctacattaaggagctgcagttagaaaaccagagggaggagcaggggagagtcaaccaggagcattgaagacaacctgccaaaatgtccccttaggacatgcaaagctaaccattgcgatctagcagtcaagcgtgccttcagtgtggacagaacgagccagagactagaagcaagaccagagataaaaaggaaaagagcaaaggagaagggattgcttaaaaaaagggtgaaagatgcagcatttgagtctgctagaaagtgaaagtgttatttgctcagttgtgtctgactctttgcgagtccatgggctgtagcccaccaggctcctctgtccaggcaagcatactggagtgggttgccattccctcctccagggggtcttctcaacccaggaatcgaacccgagtctcctgcatggcaggcagattctttaccatttgatccacc

SEQ ID NO: 56934 - DNA, 1105 bp, Bovine  19866880440071
  misc_feature (1)..(1): n is a, c, g, or t
ntcaatcaaggtttctctgtacaagccagaaaggacctaggagcattacagcttttgttttccttcttaagccacaggaattattggagaaagtccacagactactgactttaagtgattttaggtctggtagaaaaaacaaaacaaaacaaaacagttccttaggtagagaacagagtgttcatcagagaaatctctgtctctctctcccttctcaagttcaggacatctgttatctgctgcaagctgtggaccctaagcattgacattatttgagtttgcattaatcattttaatccttatttattatggagcacattgccaaagcaaaacgaaactctctaaatttcagctctaccacagaggaatgaaaggtcagtttacccaggtccacatctagttgaaaaaaatctaaagcataaatcttacctaaatataccagttaggtacatctcccctgcattcctgaaaaaatgttacattagtgtaaccattgcagacaaagggctttagagaaataagaggtatgccccaaattaaagcgtctcattggagggtttgttgaattggagggaaatttctccatggacaggattattagagcaagagttacaccaggcttatggttccatgcaccccaacagaaataggaacagccataatatgattcttttggagatttgtatttcaccaatggccttcaaacacatcatgacattgaaacttcatgagcaattcgtatgaagaaagcaaggcattttccttctctaggtaagaacttgaagccctaggagattaaatgatgtgcctgtaatcagttacagcagtcagatggggtaccaactttctttgcacagtttcaatgtgccagccactgtggtgaccacttcacatgagagcctctctatcccttgcaacaatcctttctcactaaacaatgaagttcagagaggttcgataacttgcccaagctcataaagcacagagagtctgatttagtctatgtttttctttgcagtttatggtgcttcccagttagatgtacagagcaaggttttgaaaaccaggacttctaaccccaaatgttacctcctccataagtatg

SEQ ID NO: 56935 - DNA, 4695 bp, Bovine  19866880473747
  misc_feature (1)..(1): n is a, c, g, or t
nacccagcaagccaaaaataaacaaacaaattatgttaaaaaaattaaaggtcacaagaaagcatgtgtaaggaaacccagctaactttctttagcccaatgtttgctaaactcctttgaccaggaaaactctgtcttccccacccccctcccccataactattaatgtttttccattgaattaaactcagaaagcactgctactagcaaatgccctgttttcataatcttcacattttcagaatctcattatttacatacatatatggaatcattaaatgactttcaggaaaagattcccataatgcttctaaacccaaggtgggatatcaaggctgtcacattacctgtctgtagctctttgtctgtttctagaaatccaggcccaaaatggtatttcctctcccccatgggaagttatgtgagttggactttgcaaagtactttacaaaatattttcaaagtaaaggtagataatttctgttaaagaaaaagctttctagcagtggcagatgagttggaataactctttccctccagtcactctgggccaactttgatcacaggtgggagctttcgtattaaataaatgcaaagagaagaataaagactattagaatcaagcctccctgatggttcagtggtaaagaatccacctgccaagcaggaacacaggttcaatcccggggttggaaagatcccccagagagggaaataccaactcactcaagtattcttgcctagaaaatcccacggacagaggagcctggcaggctatggtccctggggtagcaaaagagttggccatgacttagcaggaaacaacgacaacgctgaggccactgaggtaacagaactccccaagagcagttggttaagagcagtgactgcatttctgacttcgaccggagtatttccttccaccatgttccctgcatcctttaattctagcagtctgaagacatggaaagccttcaaaaaagttgtgagcagtaaagcagtgtaaagcccctctagttactctcaagtatatacttactaacaaccagggagaagccacagtcaactgggacaggctttacccaacccggcaaacagaacgtgatatttggcaaacctgtgagcagagcttgattgatggattgcccaacaaagactctcccacttctctctaaatcacaaagaacaagctctttccccaccaccagctccgcctcttcctgcaagtctaccctggccagggataggggataccaggccactttcctttcccatgctaatgcagttcaaacaaccatcctttgatttcccagcaaaattgcctacctggggtcactcagcaataaaaaggcataacaaaactgcaactaaaaaaaaattaacctttatatactgcaaacaacagaatataactaaatccagaaagagtgcctgtgagtctccatgtccatgtttggagggagtggatggaagcatttttaaagttcatgtttctggttttctcatccttcatttctccttcaaccccctgcgccacatccctctttctttccttacttccttttcttctttcatcacttcctccttcctcagcatcagcagtcctgacgtcccacttcctcctcggccacctccttagtgacacagccaatatgctccatgtgtcctagggttggcagtctggttaatcccttctttgctcaaatcaagccacaggtttcccgtttcccaaggcacctgcctccagagtggagaaagggtaggatgcgggaaatcactgctcgagaaccacagtgaggcactactgaacagggcatcagctcaccacaccgcagcatgggctccctcgggctttccttaaccgagactgatggtcaaaaagagagttgatctaaaacccagtgagtccaaagtgtgatctaatcatttttttcttcaacacacagagaaggtgggcaccatgcaattctagctgtcagcttaattttgcagtgatgctaggaacagatcaataatttggttgtgtcgtttgccaagactaactgaagcagttaaattgtgaagtagtgaagaggtgcacactcagtcacttcagttgtgtccaactcttcgtgagcccatggactgtagccggtcaggttcctctgttcatgaagttttccatgcaagaagactggagtgtgctgccacgccctcctccaggggatcttcccaacccagggatcaaacccgcacctcttatgtctcctgcattgcgggcaggttcctagccacttatgtcacctgggaagcccatgtcaagagataaatgaattcaatttattaagcaataaattttaaagcatattaagatgctttaatatgggtaattttggtaattttaatatgggtcattttaaagcatattaaaaggaccattgtaaatagaaaaacagacatttacattatttttataaatcaaagcaactaataaatacacatttttatatacttcttcaatgaccaacagttgtagtactgcccacagcaatgttatcctaggttgcagcctatgtctgagaactgaaacctctctttttcatctcaaagaaaccctctacacttgtggacctccaagaggagggtcttctttatgcttcttaaggtatcccttcttccgatccttctttatattcctaattctgctctgttccaggcgtatcagagagctacagactctacagaggcctttggggacctctcagcctagcactgtccattcgtttttccttaggaacacaattcactataatgtatcatcactggaaaccccttaggaaatcttttattcatttcatcctttttacagagtacattaagaaagatttaaaataaagcatttcacttgagatcaatatattattaaagatattatcataaagttcatttaatacaattttaattacatttgttacgtgtgaaaacaaatttcacattttcctccagttaataagaagtgctatttcatttaccttgagtgtaagaaaaataatcatttgtatacaatttaaatttaaaggattacagacatgttaacatgcacattgaggcttaactgcaccatattgtgtcaaaatttttttaaaaattaactttgtgatctgatagttgaaatgttttcatcatatgcttaacccacttttttgggtaatttttatgagcacacacatctcaataaataaccatagagtggatataaataatttttaatctaagtaaatgaagagccatagtggatggagcaggcgctgggtcttatatttttagcacctaatatgctatataagcagagaaggcaatggcaccccactccagtactcttgcctggaaaatccatggacggaggagcctggtaggctgcagtccatggggtcgctaagagtcagacatgactgagtgacttcactttcactttttactttcatgcattgggagaaggaaatgacaacccactccagtgttcttgcctggagaatcccagggatggcggagcctggtgggctgccgtctatgcggtcacacagagttggacacgactgtagctacttagcaaatgctatataagaaccccgatcaactcagcttgaagatatgcttagaacaatcttaaggttattagcaggattatcatttttacgcttctggtcagcttatttgtatttcaacatcatttcctctcttcaaccagaagttcatgaaggttaaaaattaaactatatatgtgtattagttagctatggctgtaataataaaatatcacaggatgagtgtcttaaaccacagaagtttatttctcactgttctggaggctgacaagaccaagatcaaagtgaaggcgttttcaatgccgtgtgagaactcttcctagcttgcagacagctaccatcctctctccgagtccttacacggagaaagctctggtgtcatttcttgaaaggcaccagaacctatgggactagggtctcactcttacaacctcatttaacctttctcacctcttcatacagcctatctccagaaacggccacactggcgttacgacttcaacatataaggtgggcacacaaatgttcagtccctaacaggatgttgaagagtaaaagcaagtcaggtatatataatggtcaaagcatcagtcaagtgagtaagttctgagcaccatcatctgaccgaggatgcacatctgcccaggaaacatgtgcccaagtggctgcagctggaagggaaaggcctcgttaaggagtcggggaagatgagccagctgcccgggtcaggacaggagctggctgtgtggtctgacaggcaccgccgctggaaaccagcagaggaactgacaacgcacgggccccacgtgtggctccaaactctggagtcatcactttcgactccctggagaagttctgcacattctgcaggacaagattagtgggcccgggtggtggtggtgtcgtcactaagtcatgtctgactcttgagactccatggactgtagcccaaacaggctcctctgtccatggggtttcccaggcaaaactactggagtgggttgccattcccttctccagagaatcttcctgacccagggatcgaatccatgtctcctgcattgcaggtggattctttaccgctgagccacctgggaagcccttcaatggg

SEQ ID NO: 56936 - DNA, 2070 bp, Bovine  19866880481379
  misc_feature (1)..(1): n is a, c, g, or t
ncaagaagatccaaccagtccatcctaaaggagatcagtcctgaatattcattggaaagactgatgttgaagctgaaactccaatactttggccacctgatgtgaagagctgactcatttgaaaagaccctgatgctgggaaagattgaaggcaggagaagcagacaacagaggatgagatggctggatggcatcactgactcaatggatatgagtttgagtaaactctgggaattggtgatggacagggaggcctggtgtgctgcagtccatggggtcacaaagagtcatgacggagcacctgaacggaactgaactgaagccacattatgtaagataatctgctttgtgcatgcatgctaagtttctttggtcatgtctgactctttgcgaccctatagactgcagcccgccaaggcttccctctgtcccatgggattgtccaggcaggagtactggagtgggctgctatgccttcctccaggggatcttcccgacccagggattgaacccacgtctcattatgtttcctgcattggcaggtggttctttaccactagtgccatgtgggaagcccaatctgttctacttaaagccaactcattgtaaatattaatcacatccacagataccttcaaagcaacatctagactagtgtttgaccagtaactgggcactagagcttagtcaactggacataggaagtctgccttcacagagaccaaacctcagaaacagataaaagtgacttggaagatactatacagggagagtgcttcattaacatattattaatatctttagagaaataagagaagatagtataacctcaaaacaggagccggatgttatgtgttttaagaaaataaaagctcagtgaacaaagtaagagcctttggaaaaactcagcatatatgaaaatgtcaataaaagtttcaaaagatgataaactcagaaagtaagacaaaaccccacataggtgtaatttaagagagaaaaataaaattaaagaaaatccaaaagatctgacatccaaaccataaaacttccataaagatagaacagagaaaataaaggaaaggaaatcatcaatgaaataaagaaaatttcccaaagttcttacaatttacagcttgtgagagatcccactgagtacccaggactggttgaagtaaacccacatgaaagtgtacatcattgtgaaagctcagaaaactgggagcaagagaaggccttccaaactgttaagagaggaaaagaaaccaggtcacacacaggaaccaaaatgactttggatttctcaaaagtaacacagaaggaattgcttagaattccatacataacttaattatcaaaaaaaaaaaaagtgtaatgatggagtaaaaatacgttcagctgtgtgaggtctcacttgacctcatgcacacccttctcaggaagctgctgtggaagagatgtactgccatgagcacagtacctagataaagtcctaagtagagacatcctgtctttacagtagcagtgtggtggggaaagcatcttccttcgcatcctgatctctgttcttgggatctgttccctgggtgtcttttcacccttcttactatcattcatgtatgtggttaattagatgaatttttgtggactagcacgagctacaaaccattacgtggcatttgtgtggcaagatgtgttccaagttcaaaataaccaatttgctaatcatctttggaatttggaccctcttcagaggaattaggaggccacattactgaagagtctgtgcacgctgagcatcagcagcagcatccgtggctcacaagctcctctgtttctccaggttatcagtgtacttgtctctcccaattcactgggagaaactgtgaatctgagatcacagcctgcttcccaaacccctgccggaacggaggctcctgcgaccccataggaaacactttcatctgcagttgcaaagctgggctcactggagtcacgtaagtgcgactgtgcagttagtctttttctacactgcctcttcttggtaagaaaacaaaattaactggggcaaaa

SEQ ID NO: 56937 - DNA, 1561 bp, Bovine  19866880504678
  misc_feature (1)..(1): n is a, c, g, or t
ntgctgctgctgctgctgctaaagtcgcttcagtcctgtccgactctgtgcggccccatagacggcagcccaccaggccccgccatccctgggattctccaggaagaacactggagtgggttgccatttccttctccaatgcatgaaagtgaaaactgaacgtgaagtctctcagtcatatctgactcttagtgaccccatggactgcagcctaccaggctcctctgtccatgggattttccatgcaagagtactggagaggggtgccattgccttcggtgctatgtgacttctttatgtattggtctgttatcttatttcgttatcttattgtctttgctagagtgtgatcattaggtattacttttcaactggactagtctagactctagtcctgcaattgaaaaaaaaaagtctttggagtatagaatggaaatggtcccacatctgaagactggtgtaaactcaggtgagggaggagcccttcttaacttttcctggcctcttcctcatttaccaagagggacacttactgcgatctggagaaggtgctggatgtgatgtgggaggtgatgaggaattggagatgtagagggtgaagtactgtgatgttggcacttccaaggactgagagctcctgaggtccagggcaaggagagaaaggaaggggtttctgggcgtgtgccctggcatgcagagaggtgtggacctgagtgcagaagcactgggaacctggtgtcagtatgttcctccgcaacctgcctcttattctgaattgtgtcctttcgtcatgcttctgaaaggcaaaaatgatccaggaaaatatatatataattaaggggttggaaggagcaggataaataagttatgttcattaagatgttttcataattagtaccccctcagagaatgagatctgctagattttattccttgttcctcctttataactgatcttcctctgactcaatttccttatcattttaatgctttaattttaatgcttgctgccctcacagtttgaagaggtgtcctgagaattcacttcctacggcttgagtggttgagaaatctaattctctagccgaaaacatgagtgttactctctttgtgatccttgagaaacatttatcatccagttgctctactgagaagccaaatgagcagcaagaaaaactcatctttttagattcaaggagaatctcactccctccactgcaggaagaaaacagttcctaagagcacagctaaggtcatttgagaatctgcactttacctttgatagctgtgaacttctcaggttggaaataggacctaagtccatcacaacagcatttaaacttagaactcaatggatagcaattaggaaaaatttaaagcacaccctggaggctccaaaagtaaacatttctctgggcagatgtgttatagctgaattaactgggtgtttgtgcaactgcaatgaatcggagagataacagtctttattgcctgtagatgtagcctgtgatttcaaaatacaagtggtgttaaatgttcccagtagaggttcaggcagttt

SEQ ID NO: 56938 - DNA, 2769 bp, Bovine  19866880593852
  misc_feature (1)..(1): n is a, c, g, or t
ntgaaatggacatggccccagtaaatagcagacagaaacataaaagcagcaccaaaaattgcccatctgaaacaagcactgccatctgcctaggttgggaagtataatttagtgaagaaacaggcagaacacgtacttccgagaatgttaatccacagtcaataaagtaactaaccaatccgtagtaacaaccccccaaaggacaattctggagtgttttattctgagagcaaattaaagcaagacaaagatgagtctaccaaaaacacagcagactctcctctatttctcatatgagtcctgagagagagtcatggaaattatctatatctttccgtatctcctacctgcagtgtacagagtcaacccaaaatctttgttcaagtgcagctacactggattaactctgagctcagggctctacactattgctttgatgcagaatatgttcagatttaactatttacaagccgtattgatctaggaacagagtcagagttttgattaggttgcaatgagccagttacccaatcagaagtcctttcatcaaatcattaatgattattttaaaacagtagaactcctagggtgcataaaagctggtactttattctttgcacgtgagaacggatcctcggcttttctggtgcctcagtggctgggaagcattcccacgggacctgtggttgtgtagcacatgtgaccttgtgtgcttgtgttggggtcagggcaggatgggcacaagtgttttcattcatcatatatacatgaccatagaattagcttttcagacactaatttggggtttggggcccttcatttctgtgcaatctattggatttggtgctctcattaagatgattaaaataaaccagtctatcaatatgtggtccaattatttcaattgtctaaacacaggtttagtctggtccttttctgttgtgagagaagcatgacataagagattgcttttctggacttttccaggacacctgggtcactccaagctcccttaagttttccaaaatgaaatcagagtggaaaagagatgaacaacatatatttcagtcttcaatagatgtttacgacaagtgatacatccactagagtttccagagaacgtacatacgatctaccggtaggattccaagcagttaaaatggcatattttcattacattattggcttccatgatgccagggagcttctctttaatttgatgtattgttctattttcactcaattgaaattaaatatgacttgtttttcccttagaggaacctatctacaggcttacttctgtattacttctgtattttttaacccgtgaatcttgttttccaaaaattgtacactgagtgaacggtacactgaggctgtataaatatacacatgaacactcccctcattcaatttcatcacacacattttcagagacacttctcaaaaattactcgtctaattaacttctttatgaacaaataaattctcttcacctatggatgagctacagttacaatctagcatctgggtgtcggatttcagaatcttattaatgggtggttattagctgaagatacaaagggagaggtgaacatatagagtgaatttacagttactgtctgaagagagatggtgagaatcacccagtccctctaatctaatttacatacaataaacagggttttagattaaatgattttttcctgtagttccataatttacgtatgataaaactgatgcatcgtcattatcaacttcagcattttaaatctttcttttcctttccctgaagaggcctaaggaaagcaatatttcattgttctaaagtaattttcatcttctccctttcccaggtagatttcatcttgagtgtcacactatacctgtatctatccacacagtacaaagaggcactcttatcaacaacagtctttaagtactgtcttcccaaggtttctttctttctcataatagtcaacactggtgaaaattctaaaatgggtacaatttgcccaacctcagagtctaccttatggtgagggattgggggcaggaggaaaaggggacgacagaggatgaaatggctggatggcatcaccgactcgatggacgtgagtttgagtgaactccggaagttggtgatggacagggaggcctggcatgctgcgattcatgggtcgcagagtccgacacaactgagcaactgaactgaactgaacagttgttatataagaaagtaacaaaatgtgttataaaagagtaacaaaactgggccactggacaagggaatggcacaccacttcagtactcttcgcttgagaaccccatgaactgtatgaaaaggcaaaaagataggacactgaaagatgaactccccaggtcagtatgtgcccagtatgctacaggagatcagtggagaaataactccagaaagaatgaagagatggagccaaagcaaaatcaacgcccagttgtggatgtgactggtgatggaagtaaaactccaatgctgtaaagagcgatattgcataggaacctggaatgtaaggtgcatgaatcaaggtgaattggaaggggtcaaacaggagatgacaacagtgaacattggcattttaggaatcagtgaactaagatggactggatgggtgaattgaactcagatgaccattatatttaatactgtgggcaagaatccctagaagaaatggagtagccatcacagtcatcaaaagaatccaaaatgcagtacttgggtaagtctcaaaa

SEQ ID NO: 56939 - DNA, 4589 bp, Bovine  19866880596824
  misc_feature (1)..(1): n is a, c, g, or t
ncatcaccaactcccggagttcactcagactcacttccatcgagtcagtgatgccatcatgccatcatggatgatccagccatctcatcctctgtcgtccccttctcctcctgcccccaatccctcctaaattggtgctaaatagtagggaggtgtagggggagcaagaaaaggcagaagcaacagtttggcctttaactcatatctgtgaactgtttagctaattataaggttatttaaaataagggagaaatcatctcagttgtgagtgatgatttaaaaagaacaagaaagaaaaagagaaaaaataaaaagaacaaagagactgtcattaatgaaagaatattcatgcctggaagaattccctctggctaccagggtatctaatcacagggaaagagtcttacttccccagatcaaaggctagaatgcaaggagcagtcaaagaggaaatttgagctggagaaagtagagcaaggtgcttaaatgactccttgcacatgagaatgttgataacacagttatctgagcatcttgctgttgttgcagccctgagttatgtgtcactctaaacttccatgacacatatgtttctacaatcattctcttgggccttagaggatgctggaggatattggtcattggctgtcctgataaacctctgctctcaaatcatgacaatcttagcaccagactcttgttcagatcattcagagttttaaaagtgggcaacccagagcatgaagcatatttctttcagagaagcaggattctgctcgaaccacttccaagcccactcaaacccttgacaaggctgccgagtctgctagctcggaacagcgtggtcagcagatttgaccagtgttatacctctgtctgtcccacgagccggccacaagaacccaggggagtcagggcccagaacactgacttgtaataagagggtaattatgactctgaaaatcaaccacagagggaaggctctctcttggcaaagccttaaaattatatgtatttcataaacatgagctggaaatagcaaccaccgtggaaaagaactagcctagtcccactgtgacccctgtgcttccagacccagtgggtcggcagcagcccagggagcacccatggtctgaatatgcgggtctcagtcctcagagtctcgtcctgctcagctaaagcccgtgaccagaaaacacagtgcagataaactataatttggcaaagcagtgtggcaactgagactgccaggcagaaacactcattgaggctgctttcataagactgaaaacttaactcttttttttttttaatatttatctttttaattgattgatgattgctttacaatattggtttgatttctgtcatacatcaacatgaattaaccataggtgtacatatgtcccctcatttttgaatctctctcccagcttctaccttttcccacccctctaggttattacagctcaatcttaaaatgagaagtttataactttcagtgatagagtcctatttgttaacatgtctgtttgttactatgtccttgacactgtggtaagcacttgtaagtgcttctgcactgagatacagttctcacccaaatacccttgttgttgttcagtcgctaagtgtgtctgactctttgcgacgccatagactgcagcacgccaggcttccctgtccttcactgtctcccagagtttgctcaaactcatgcccattaagtaggtgatgccatccaaccatctcatcctctgttgtccccttctcctcccgccttcaatctttcccagcatcagggtctttcccaatgagtcagctctttgcatcaggtggccaaagtattggagcttcagcttcaacatcagtccttccaatgaatatccagggttgatttcctttaggatgggctgattttatctccttgctgtccaggggacactcaaaagtcttctccagcaccacagcttgaaagcatcaattcttctgtgctcagccttctttatggtccagctctcacacctgtacctggatcagtggtattctttgctcccctcaactcccatttttctgatgaaaaagtaaccagcccactggcacaccgctagtaaggtcgggaagccaggacttgatgcctgtttgtggaactcctgccccctgcccccagcctacactcttaacctttgttactcaaaatgtgttccaagcaacagtagcagcagcatcactggaaatgttaaaaatgcagcatctgagaataaatcagaatctgtgtttttaacaagatccctcagtgacatgctgctttatctctctgtctccgaattgccctgaaccacccccccaaaaaagaaacaagttctattctgcttttgcgtgttgaatatagtatttctcaaactccacagtgcctctgcaccacctgagaacctgattaaaatgagatcttgttctagaagactctcttgcttgttaaggagaaaggaaaatctgttgacttgccccggtcattctttttccacgtcagaggaactttctgctaggtcactgagttgtattttgcaaattcctgaacttaccaccaaaaaaaaaaaaaaattatcagtgaaaagtttggagaaagaaaaagatccaaacctacaaatcagaatctcagaatctgcaagagtagaattcaggcatctctgtttataacaagcctccaaagtctatgcagttctgaacttgagaaccactgacatttgagaatcccaataaattccttatttgccagaatgtgaatcagtgaattccaggagacataggacattcagaaattgaatgtcaggtgcatagcctgcattttgtaataactgctttactgtaaagattgaactttgttcctcagaagtttggggtcaccctgagctccctttcaaaggtaaaagtaatagtgtgtaccttccccctctaagcaacgtgcacaaggcagcaagttcccagatgttgtaaatagctgggcacagaagcatcttcagttacagggtgacctgtgctactttgggtgatgttttgagcccctaacttgtaaatgtctagattaattcagtctatcaagctctaatcaattgcctgacttgtgcaaagccctgtgttaagttctaggatcctgttgatgtctctgtgaccaacggatccacttatgcggcctccctcccttcatggcgggcttaaaagaattggacaggtttcctgggtgtgctccgtccactggcccacttagcatgggggacaaaaaacccaggctccaagataatatactgtggacaaatttgactaagatttgaagcttatgagggggaaaagtttttttttttttttttttcccctgggtctttcttctaaatactgaattaactttctggggattactttagaaaaacctcatagtaatagcattaataatattttattgatcctaatagaaaaactcaaaaaccctaaagcactcaaattttgtgcacacacaaaagaacatgctagaaagtgaaatgttacagtgtgtttaatgttgttaacacagtaagtgtttctggatcctcaaggaaaatattagaggctcagcccaatgtatagtgtgggaattgtgacccagctttccttgggaaagttagagagctccctttcaaaagttttcatctcatgaggtctgaaggtattgcatgggccctgcttggggaaagaggaaagtctgagtgacttcaggttgagggggtgaagtagtgacagaggctgtaagccacagctaagctcactccacttttgggtggcaccccacataataatttggtcagcagttttctcaagctcactgagactcacatggacataagtttcaatatttccccataaatagcccacatgcatgttaagtcacttcagtcatttctgactctttgtaaccccatggactgtagcccgccaggctcctgtgtccacgggattctccaggcaagaatactggagtgggtagccattcccttctctagatactgcctacaagtcagagttaaaaaaaaaaaaaactcatggctttccattgtttgattatgagcaagagaaacgaagctgatttctgaatccattctaattacagtaattacaacaataaagcacctaatgtttgtgggcttcattgtggttgatgaatccagaaacctcattatcctctgagtgggtatgagtgatgcttaattatcagataaaaacggaggttcctagaggtcaggcagctcagctgatgggaaacagccagaacttagatgtgtacccaccacatcaccgccctctccccaaatcataaagttcctggagtgtctaaatgcagtccataactgagcaagcatagtggttgatgctgacttcagatcccaagtgctagttgcacatttgccattatttccctctttgtgcaaaaggcagatgtttccttatcaaggagccaaaaccgaatcaggataatgttcacctccaccaagcgagtggggcagaaggtggaagtcatcacttggagaatcagatcagaaaacaactactaagtcaaagga

SEQ ID NO: 56940 - DNA, 1130 bp, Bovine  19866880669380
  misc_feature (1)..(1): n is a, c, g, or t
ncattgagtctggtgatgccatccaaccatctcatcctctgttgtccccttctcttcctgccttcatcttttccagcatcagggtcttctctaatgagttagctcacatcaggtggccaaagtattggagcttcagcttcagcatcagtccttccaatgagtattcaggattgatttcctttcggattgactggtttgatctctttgcaattcagcttcattatcagtccttcttgacatctgagtcaagggtatgcaaaaaatatccataagataaacttgatatgtggtcacattgaggggacagaaaagtgtgtggtcttttgaaccctggctgtggtccatgatgtatctgaaactgccctgcagctctgaatgggagatgctgttaccattgggcaaagtcttaaagtgaattcaattgcaaggtccacatcctgcctccaaggaccccctagagtcatgcagacagtttcatatgtggttctgaggcataatggatgggcattagagtgtggttggcagtgcttctcagaagcaagggtgtcttttcttctctctacttttacagcatgttgacacatgtccactctcatcaataaatgttcccatctccactgatctgtttggaagaggcaagaaattcatgttggggggacaactcatttgtctttagaaattgaaaaagcgagtgcttcagaaagaactggggagggaatagaggcgttttggaaatgatcgataaatctgcatctaattttttactaaaataagcaccggctatttatagagtccaggcagagattgtgaggaaggaattataagatagagagacacaaagaatctttgtattttgtttgatagacagaagctcttcgggcagatgtaagacgcatgccttacatatccgtgaatgtgggtggttattataccaaaaaaagtggcttcctcggtagccaagcagatgatctgtgtttcttctacctctacatcaatattattattactgttactataattattgggatactattaatatcaactaacattgactggtctaaacatagaaggagctatattttatgagcaggatctaaggacataatctttcctctggcaccgagaatctc

SEQ ID NO: 56941 - DNA, 1220 bp, Bovine  19866880679109
  misc_feature (1)..(1): n is a, c, g, or t
ntattggtatgagctattcatgtgaaatggaggaaataatgtaatttcaatttaattccccttttaaatcactttagaatagtagcctgaccttctgatctcaaggcctgaagtaaagtagcctaaaaccaaagcaaatcaaactaatgaacagtttttaataataaccccaagcacaataagaattactaactccctgagttggaaaagctttagagtttatttcagaatcagtacatgaacatgttttgcaatattcctaccggatggtcaaccaacctccacctggattctcctcacagcttcacgtcagtcctcctcacaggtcaccctccacttctgaatccaaaaaggggtcacaggctcctacttgtagtgataaaaatgaatccctataatgctcatgtcagccctccggcgaaacacaggcaaatcttctcctgttctgtatgcatcctcatttgctcagtcatgcccaactattttgtgaccccatggactacagtccgccaggctcttctgcccatgagattctccaggcaagagtactagagtagattgctatttcctcctccagaggatcttcccaacccagagacagaacccacatctcctgagtctcctgcattggcaaatgggttctttaccactgagccacctgggaagtcctctcctattctgcatggtacttatttgaatacttcatgataaacattgcatttctcctttttttttttttttcaagcataatcattatgtcccagttcctccctctgattcaagaatttcagatcgtgttccatcatggttaccctcctcaaaacaagctacccaatctgtatctctggtttgacctcaaagacgccatggctgccagagatgttccaccataaatcaggaccatttgaaacagagggcagtcttcagcagtaggtacttgaaggtttccagtgttaggaaacattgcaaaacccatttctgctcgaaagatgcttctgttagattttcctgcccatccagcaatgggcagcctgcagaccacatggatggacagcctgactttgaaagggtgtttcacagtgggatactgctgccagggagccaagtcacgtgagcatgactagatgggtgaagagtccaaggaggagagggtgcttgctgcatattttgttcttcttgcttagcatgtagccctgccaaaggcctcattcattattcat

SEQ ID NO: 56942 - DNA, 3265 bp, Bovine  19866880745728
  misc_feature (1)..(1): n is a, c, g, or t
naatgtggctctcttatagggctccttacatatgagacctgcactgtggctacagccagtgcagaaaccagctgtgggaggcacaggggtccattaagaaccatagctattctggcagttactgcagagatgaaggatattaaaatattaaacttcagccttagaggatatgaggtcaccaaagccatatttcaaagccagaaggccatccttagtactttaagtgggttttattgtttttttcctagggcaggtaaatttacatttggcttggtaatagaattctttcaaaggggcctgaatttgaaaacatacaggcccttagctttccttcttttgtatttgatttaaaggcacacagaggtcagtctccttgggtttatggttgaaagataattccagcagtagaaatgggttgtgctggactgagtaagggatagaaattgggaaggagccagtcttgtaaccaagactgcttacaagtcaagactggttaccagtcttgtaaacagactgctttaggcacagtttagcctctgtgtcaaaatcctagctcctctgaccatactaaattatagagggattgttagtgatgaaagaaaagaagggatataagataaaggcaacaaacatctcctttgtttttcacctgtacatcagcatgctagcggagaaggaaatggcaacccactccagtgttcttgcctggagaatcccagggacagaggagcctggtgggctgccatctatggggtcacacagagtcggaatcgactgaagcaacttagcagcagcagcagctagaccagcacatacagtgaatgctgataatctattacagtggttgcttgataagcaagtgcttctgaagcttttgtgcccaatcaaatgagacaactactgtaaaacagagtgttcttacgaatgaataaatgttagttttcgagcactcttttttcaacctttttatataaagtcggctatttttagaggataacagaagtagtgataactagttaaaatctgagtttggttttatgataagaaattgcatcctgtgagcctggccacctttttaacacagcttgtcagctgcttatccatctacaatttgatttctctactctgcttatccatctacaatttgatttctctaagaaggtttttcttccttaccactccaccttccttctgaatactctagtgccctctgtgactgaacttttccatgtcctagctcagctcctactcctgccggaaaagccttcctaccatacgcccctatctaaggcttaaaggccaagtttaagtgtcccttctccaaagaagcctctgccgcactctctcattttgtattaatctgtcactccccgacctcctacagtatattgttgaaactttgattatgtcactcatgagtaagttccctggactaaaaaaatctctatgtgtcagcatccgtgttcgaggcagttgaatcatatacttgaatatgagtatcttgaatcctaagcacttgaatctgagcatctgcttaagaatatttactgagatcataccaaaagaaaataatgaaggaaaagatgagtttctaaagggagagaaatttgttccaatttagaattccagtgaaatttaactggggacaaacatgaagattaggcacctatttgtattggtctgaagtagcaggctggtactccatgggcttactgacggtacaagattgatttcctgtatttaagcatacttttatgacaaacggggcttgatatggaaggagacagcagcttcacaatatgaatagcctcaattagggctcagttagacgtgtcacatctttgttactgagatcagaggggaagaaatgtcgtctacgtggccagagagagagaacatcagaagtcatgctaaaagatatgctcactcaaataaagcaagcatgatatatccacttggctgaacacataagcaagtttaagcttaagcaagaaacacaacttaataaggaggagaaaattgtgccgagatggtgcgaggagagagagaattgggatctgttgattagaacctactatacttcatacctgaattcataactgaatcaactcattcaatgaaaatatactgagtacccgtaagtgtaagaatccacctgcaatgcaggagacctcggttgggaagattccccagagaagggaaaggctacccactccaatattctggcctggagaatttcatggactctatagtccatggggccacaaagaatcagacacgactgtcacccgtaagtgctagttacatgctgtttgacaaaacttttactagtaaaagggggagtgctacagcaaataaatccgaggtggaaactgcctctcgcccaccactgtctgttctctccttttgcagtaatagaaaagcctgtccactcagctagaaaccacatacattcctcgtcctccttcacggctgggtatggagagttctggccaatggaatgtaactcctaggtcatttccaactaagaggtcaagccgttcacccttccttcctttcctttccctatgagctgcaaaatggaagtgcctaggactcagcatcaaccacagacagaaagataaaacccaaggagatagtggggttgtatgatggacaactcctagtccttgactggtcacatgaaacagaaccaccgcacctgcctcaactgtcacctcagtgctgttacattaaaggcaagcaaactgtcttcattattctactgcactttagaagcttcttctttatgacagcttaattcttatcctacctagccgaaggcaatggcaacccactccagtactcttgcctagaaaatcccatgggcggaggagcctggtgggctgcagtccatggggtcactgagggttggacacgactgagcgacttcactttcacttttcactttcatgcattggagaaggaaatggcaacccactccagggttcttgcctggagaatcccagggactggggagcccgatgggttgccatctatggggtcacacagagtcggacatgactgaagcgacttggcagcagcagcagcagcagagtcaaaatggggcttcccaagtggtgctagtggtaaagaacccgcccgccaatgcaggagacaaaacagacttgggttcgatccttgggtcaggaagatcccctgagaaggacatggcaacccactccagtattcttgcctggagagtccccatggacggaggagcctg

SEQ ID NO: 56943 - DNA, 1064 bp, Bovine  19866880750695
  misc_feature (1)..(1): n is a, c, g, or t
nagtactcttgcctggaaaatccctgggcggaggagcctggtaggctgcagtccatggggtcgctaagagtcggacacgactgagcgacttcactttcacttttcactttcctgcattggagaaagaaatggcaccccactccagtgttcttgcctggagaatcccagggatggtggagcctggtgggctgccgtctatggggtcgcacagattcggacaggactgaagcaacttagcagcagcagtagcaaacacaaaaaggcaacatgttggaaagatgaagtatttgggcaaatcaccaaaccatcttgtgcttcatttgtaaaatggagagagggtcctaacacacaggatactgcaacaataaatgagctgccacatgcagcaacacctttaaaagcctttatcattacagtgttacatgttctcattcaacttgcaatattcaaccacagatggtggtcagaaacatgtttttctatgcatgaactcttcttgggttttattcatttctttttatccatatgtttacagaatacacaggtttgaaaatttgtacttcaatattcttaagcttttaaagctgcttgcaattgaaagtcatatttttactgtctgctgaagggaatttacactgtatttatggcctggacataatcattaccttccaataaaaatgactcattaaataaaaagcaattttcaaccatgagcttctaggatacatttgcttactaaaggaaatccagtaacttcctgctcagtattttctgcatttcttactacagttatttggggttcatatgtctattcaagatctaacaaatctgagggactcacagacactaaaagacagaaaacaataacaagaaacacacaagcaaagaaaaccacactcgttatcggaagtgagaaatgctaggatccatttgagagggacagagaacttctgatcttcattcagcttctggttagaagctgaaacacagcagcactgctctttccaacatcttcattaagaatcccacaggccaactaggaaagcctccctgcaagcagagaa

SEQ ID NO: 56944 - DNA, 993 bp, Bovine  19866880773633
  misc_feature (1)..(1): n is a, c, g, or t
ntttcactcttccctccccaaccaggccttggcaaccaccattctactttctctctgtaagtttgcttctttctgacattttgtacaaatggaatcttacactatgctgtttttcatgactgactctttcatgtagcataatgttttcatgattcattcatgttgcaatgtggattagtacttcattctttttaagaggtgaataatattcccttaaatgaattaccaccttttgtttgttcattcatcagttgaatggtacttggtttgtttttgctttggggttattacaatggtgctgtgaatatttatgtgtaagttttctgtggatgcatgtttgatttcttgggttgtaagagttctttatgtatagtggatacaaattcctcatgacatacatggtttgcgagatttttttattctgtgggttgtcttctcaatttcttgacagtattattttcaaaacagaagtttcaaatttgatagagtcttaacagttttgtagttttagcagctacatttagatttatgacccattttttagtttatttttgtgtataatttaatgtttacaatagctctgtaagatgagtactgttctattcattttatatgaaaaatacctgtgactcacagtctaaattagctcccaaagatgaaacaaacatgcacggaaactgggactcaaactcaaatttcaaattaaacccagatacaaagttgacaataccacaaaacctgactggcacttctcgaatatgaaacctcaattatttttaaagttggcattttattcaaaggtatacttatctcgtgaaatgctgtttcattaggtgtttaaattggaaacaaaataaaacaatttggtaaacatcttccaaggctgaagttcattaaaaggacatgtactataagttaaaaatacatataagaagaccaactagactctccagagcatggttaatgagtctcataagtcacatcccattacat

SEQ ID NO: 56945 - DNA, 721 bp, Bovine  19866880779419
  misc_feature (1)..(1): n is a, c, g, or t
ntggagtctctctgggtacaaagatgacttattcttggcatgcacaccagcctttccacagtcccttttacttcccagtgccaagttggagctgctatgacatgtgtaagggagtcagggctgcccttgttcctactagttctccttgtgtcctgcgatgggattttgttttgaagcacaggaaggcatatgccccctctaaatgacatgtcagacacggtttggtttggatcctttcccccttctgacaccacaatttgtcaccagtagagaatgcagatagccatgccaaatgtgaatgtctcctgcatgcgcacatttggcaaatgtttacccagatctttactttgagagttaaacaactaatcatctagttgtttagttgttaagtcatgtccaactctattgcgaccccatggactgtagcccacctgtcctccgtcaatgggatttcccaggaaagatttgggttgtcatttccttctccaggggatcctccccactcagtgactgaacctgcatctcttgcattggcaggaaggttcattaccactgagccaactaggaagccctcatcatctaacagacgatatctaaggtactacttagcattgaaattttgtaattctatgggggtttattggcacttttgtgaaaagctgccgatgatatgccattttgctttcactgagaaaatgttacaaaggagaacattaatcta

SEQ ID NO: 56946 - DNA, 1685 bp, Bovine  19866880804737
  misc_feature (1)..(1): n is a, c, g, or t
naaaaaagtcaacacgactgatagtttcaattttttctttttacttgaaaatttgtttaaccatcaaattttggcagttacaaacctgtacactgtttgttttttctgtggggtttttttttgttatcttttttgtttttctttcatttttttagaaaaagaacacaagactgaatactgccaacagcattatatgcagaaacaattcatttccataagggacaggatccactttaagtgttagctttccctttgcataaggtttggtgtgtgatgtgtgtgcaagttgaggtgagtgtatgtgagtgtgaagaaatgatgtacttcattctgaatctgaaatggcatacaaatcaggtacttagtaactgggcaaaacacactcaatttttaaaatgtcaataaaaacattttcttggaaacagagaaagttaaatgaaaacagtggaaccaaagaaaggctagagaacatttggaaatgactcaaaaacaccattttcaaatctaaaatgctttatgtgtgtgtgtgtgtagttacctcaatagtttgcagaccaacagcgtgggtgacttaacattatattcaaccccccaaattaaagtatcctgataggcatcaaatacagtatatctacaaaagcctggaaaattgaaaccattatatacaattttataaacattttaacaccgaaacatacatcttttacaaaccagcctgtttgtaacaggtaaatttacatgacaatctctctgatacagtgcttaaaaagaactgcttccatttctgaacacatctgaacacatttgtcatttcccaaaatgcagtagtatgggctcataaaattgttcaatagtagcaattcaggtatttgtttgccagaagggtactacagtacatactgatgggtccaaacacactccaaacgactctacgattctcgagtgcattctaaacactggaagagactaattatggcctttgtgtaatattacatacttgtaattattgcttttcattattacataaggaaagaaaatcttattcttttcctatctcttagccagctggctaaatattaactgatgccaaatccacatatggcaactttaaaccctagaattatacaaccagaagcttaaagacattgtggatttccaccagactaatgtgcagttgaacgctgcaggacaaaccccagcaaaaacacagaacccgccttgtcacagaccacacaaaatgataacgctgaagaaatgcctcttcacatctccatttctcatgattggaagctaaaaacaaaaaacataaaacctaaccactttagcaatatccgtgcactgggagggcagcagagaggagagaccagacgattatctggacagtgcatgccaaaggaacagcagagctcccaaaattctcccatggaggtgtccctgggtcctcaatgatctagtttgcttacctcttgtctccctgatgctgatcatgtagactcaggcatcggcggggcagcgggtgggtgggggtggggaagtaaacaggaattggccaacaatgtttcccttgcttcctttccccaggctctgctaatgattcccaagagtggttccaggtaagttccaggaacgcatcaatcccctctctaggttttcaccccaattgtctgataggataaatcttaaat

SEQ ID NO: 56947 - DNA, 2165 bp, Bovine  19866880814344
  misc_feature (1)..(1): n is a, c, g, or t
ntgatctatacgcctacactagcccaacagcccacagccaattcctaacagacaccagatataaaagcccaacctccttgcctccaggtggatccaactcagtagtacagtgaatgattcagagctccctttgggatcaggctgaggttagacttcaactgagaccacatccttgcttcgcatcctcctctgtctatcttgttttcttcattccctttctcatgggaacacttgctcttgaaatcatttgtactcacatccctgtctcagactctgcttctgggaagcccgacctaagacaactatcttcaagggcccttcctctcacagaaactggggcaaagtgatcacgcatgaacacagcactagggagctatgagttgtcactgtttttaaaggctacaactattagcaatgcatctggaaatggtattgttaatgtaatagtttacaaaacttttttattttggtttttgtattttctgtcactgatggtttgcttgttagacttaactgcaaactacccccaccgctccaacacacacacacacacacacacacatttacatccaggacagcatagcagttaaccctacatatctgggcaaggaaacatgcttttctcagcccttatatcagaccatagagaagagccattaacacccccttccttactccactgcctcgaggaacccacgcttccaccgagagagatctccttcacttcttcagggttggcttaaccagaggcctctgagatgagttttgcaaggttgatgcctttcccctgcctcctcccatctccctcttggaatcccatgtgacaattctacgtgacaatgacaatgcatttgttcccttttcaacactaccaccacagctataagaaatcaaattagctcttcttacttttgtagctgtcattcgtgtccatacaacactaaaatttgcaagtgcaccatttgcttttcaagtttcccacatctgcaaggttggcagtgattcaaaacagcttctggcaaatgtgcttggggccccatgtgcccgagttgcttcccgcagcccctgagcctgttgtcctcagatcgctccccgcgtcttccccttgccaaccccgtcgtgaggatggactctgagccccacaatatacgagtgacagatgcaggcttccaccaggacccaggctctgaaacagctctctgtcctctccgcgtgtgagtagatcaaggccgtggacaacgggcgccctcagaagtcctccacggcccgcctccacatcgaatggattaagaagccgcctccttcccctgtgccgctgaccttcgatgagccattttacaacttcacagtcatggagaatgacagagtcaccgagattgtcggggtggtgtctgtgcagccagctaacacccttctgtggtttgacatcgttggtaagtctgagtcccccagggcagtattgggcagcgtaatcactgactgttcagagcaactagcaaaaaagaaaagacaataacaacaacagcagcaacaaaaacgcttaaagactatgctaagattaaaagatgtatagtgctggaatgcaaaagagccagtaaaatgaatagtcgacctgtgctttcgttctgagttctgtagctaagctgaaccgaaagtgctctctggctggagtttccatagtatgttatttactgcaatcttaatgtctttctgtgtgtcatttaaattctattgtcacacttggctaatctcatttctaaatgtattgatggtactagacttgctgtccttcatttctctctttttcttcaccttttttctgcattctgttccttttttttttttttttttctgctcccgactgccctgcttcaaggtggcaagcatgctcgagagatgttctatattctacagacagcttgtgggcagaactgttcaacagaaggtacccttagtgcaaacacatttgctaaaatacagctatccaatctgccttttacggggttttttttttttctttttaagcaaattaaattacatctttcataactgcctgtgacaggctgaaatgcagcccacagatttcgtacatgcctctaacagcgattgcattactcatatccagggactcctttgtttgaggttcgatggggtttggatttggg

SEQ ID NO: 56948 - DNA, 1063 bp, Bovine  19866880852367
  misc_feature (1)..(1): n is a, c, g, or t
nttgtatgtgatatactcctgagaatgagttaattttatgaaagacagaattaagaatggaaatgacctctctaggctgaaaatctgggccaaaagcaaggcaaggaaatattacagggatgaaaataaaactttcattgaggttcagaagtgtggttgtagaaatgaagggtggaagcatggcctagaaattcatttgaattgactctttaggtgaccaaaacctggagatgaaattgtgacgtagtttgtttctatttagcttaacatggcctccaagtacagtgatgcccaagtgtggttttaaatgaaccagttttgcagtactctgggcaggcttcgtgcattgggcatagtgcatcacagggtattttcagattgagtactaggggagtagatgaacagcatgtgaagaatgggtaaaagccatcttataagagtgaaatccaaagacaactaggaatgttgactccagagaagagaagacagagaggagatagattcgttcattgtattcagttatgtgaaatagaagaggctgaatatgtattctgtagtgttccagtgggtggaaagtgtaggcaggcaaatatgcgggtccgatatgagaaggagctttctatcagttacatctgcctatcgatggagcagaagggctcggaaagagggagctcatgaatgtagtgatccttcacctgctacaggggatgtgtgaatttgatgactgtgatgttcttcctgtgctgagagtctcaagatgcgccagacatgaaagcaaagcatgattctctcacttacaatgatatgaccttgcaaacatcattgcaaaactttcaaacctgttttctcatctctaaaatgggtttaatatggtacctgtgagtaagtgctacagtacagtcagcactccatcaaaggcagctggcaccgctctaatcttatatacctactctgcttctttgctttagtctgaccagtgagtttaacttcagctgataaaatgctaacgtaatgttcagttctcagtttcttgctattgttagccagggttaaataatgagtt

SEQ ID NO: 56949 - DNA, 2251 bp, Bovine  19866880859588
  misc_feature (1)..(1): n is a, c, g, or t
ntttgtactttctcctgacttaaagagttgacatttcaagagtctggctggatgcagggatggaaataaaatcaagttctgtttgggcatctggcccagtaaatttaatttgcaggagaagcttgactggatgttaccagatacacagtgaaatctgtgatagaagcatctagactagagggacaacctggtaggtctatattaagagaagtgcacgcatgcatgctcagtcatgtctgactctttgcgaccccatggactgtagcctgccaggctcctctgtctacggaattcttcagacaacaaaactggagtgggttgccatttcctactccagggattttcctgacccagggatcaaacctgtgtctcccaagtctcctgcattggcaaccagattcttaaccaccgagctacctgggaggcccattaagagaagcatctgagcactaaaactgggaagattctataaaaggagcacagatttaggaataaagatggagaaacatgaaaatggatgccatgtttctgatcatgattcctaggtatgatttggagcagcctaaagggactcctccctgggaggactctggtctgtcaactgcttgtctcttcttggaccagttctcatttagccaaaggtgctgtggtggctgaggctcagaacacagtggaaagtcacagtgactctggacgggtctcaggagggatcagtgggcttaacgcatgggctgcccggggcatctccatcggctggcttcattaccccactcaccctgggtggagatcaaccaaagcaatggcaggaggaagggggaggacacaaagaccttgaccttcagggttaagattgaagccaggatagacaccatgaacacatacgccagcactaatactgctgaatggagtgcatgcaagtcaggtcacacgcagcatcattaggcatgctttcctatacacagtcatacacacatgcaggcatgctaaggatttgcacaaacgacttggataactggggtcaggtggccggtcagacggagcatcagaggaaggtgtgcttgtaagattactgaaggcatcctggggtgggtgggatgtgccgcatgtcaagaggttgtatgaatgcatcatgcaagggagagaaacagtgctttcaggccatagaggcgcttgcaaactggagtgtcggagaaggaaggagatgaagtgatcattgatggcagagggcgagtcctcccacggctcagggcagcgcagcaggagcctcggcctttggctttccactgcactctccctcggattaccgaaaagaagtcatgattgcacgggagacacgcggaaactgagatgcatcttctgtgaccctgatggggcggtggtgaaggaattaccaaaggtgatgcagcaccgacagccaggcgatgcctgtggtgtgagaacacgactgagaagatggaggagcagagagatctttcatggatcagaagaggtgccatttcaaaggcgttaagtggaaatgaagatggagtggaaagctgggaatgatgatggtcatgcacagggatggtgtgatagatgcccattaagtgaaagatagccgttctaccagcattctagaaaatgaaataggtagaaaacaagccttttctttgggggaagttcaggggacactctactgatgttccatttgggggccatggggcattcattcttttctatgcttcattaaaacagatgtggaacattctaaatgctttccccagacccagtcattcctgggaagagaggcaggttcctgcccatcctaggcactgacacgtgaaggaaatgattcccccagagcagctctccggagtcaccgcctcccacggacgaccgtgggaagtcagcttcagctgaacccagcgtcagacccagggctggcgtgcactcttccctatgcttggattcctggtccttagcacttatttcctctccgccgcctctccctgccgggtggtgaaggggcagttttgccctctctttttgcagcctggtgtgctttcttgctttctttcaaggaatttaaaggttggcttttaaggtctgtcctgcctgcgtccatctgctttttgtatttggctctcacaggaagctctcgctggctatatatccgggctctgtttcctgtccttcctattctggaccacagcccggcctctcctgggggcggggggtttgggtctatgtatgacactcctacaaaactgag

SEQ ID NO: 56950 - DNA, 877 bp, Bovine  19866880898207
  misc_feature (1)..(1): n is a, c, g, or t
ncccttagatattttcaacttaaattttctagtcttattttcaaaagcaaacagtgaattagaaagcacagaagaggatcaaaagatatttgaaacagtttgtgacagtttggtcatcaaaaacagcaatgtttttgattcattcctgagttgagaaaataagtactatttattgacatcggtgccatttgttccctaggaaaaaaacacataaaaaccttgaaaatcagctctgtcgggagcaatccaaccatctaatttcatcatttctgggagaagtttgcagtgctgtttcctggatgaaaaacatgaaagaaccgatggcataaaagaaaagttccacagaataataaggggaatttctattattttaaatcagtccttcaaaaaagactgcagtcaccttgaattattgtataatcttaaccaaattatgtgtgtatgaaaatctgtatttatactgcacctatttctacccccaattttaaagtatcttaaagaactttcaaaagaatgacacaattagaacagaaaaaaagataatgatggaggaaaaagattattactaatgatcaggaaataatatggttaatgtaattagcaatgttttgttctaaactgtgaaaaagggggatgtctccttatcagaaaaaaaagacatatggcaagacttaaaattgtgctttctacagcatcttctcatcctgtggaaggtcacataaagcctcctggtactggctgccaagcaaccctgttcagcatggccaacgattgaaatcaaaatatgtttgtagctgctcaatgcaattgctcacacaacaaatttattttgttcccagctggcaatagtgggtaaagaatctgcccaccaatgcag

SEQ ID NO: 56951 - DNA, 1208 bp, Bovine  19866880930626
  misc_feature (1)..(1): n is a, c, g, or t
naataccctttgaccaaaatatttgaccaaatatttgggcaccatagcccagccaagttgacacataggttaacctcctccagggcagaaatccatgctctcttagtcatctctgattatccagtgctcagagctgggaagataatccacattcttcatgtgcttttattttaactaaaaagtaatctacacagattttaaatcagaaaacacatgaagaagaaaggtaaaatctttcctactttcaacttactccctagaggcacctccgtgtaataatttgattcatatccttctggtctttttaaataatgaaatgtaaatgtgtgaaatttgttttacaaattcgggacccaactgtacacactgttctgaaacatgcccttttcacttcaagggagtccctggacatcttcctataatcagtacattcttttagcagctgcataatatcctgctacatggatgcaccataatttatttaacagttcccttattgatggatatttttcattgtttccagtttggaactgtcacaaacaacacggcaatgtgtatcattgaatatattttagcactctttcgtaagaatattatatgataaagatctaatagtgaaattatgagatcaaaagataaattcattttaaacattgctagatcttatcaaattaacagatgcttaaggagtgtttgttgaattggtttgaatagactcagagttctgcagcaaattcagcctagaaggaaaggacagagaaaatgaagggaaagcaaagaaaggaggtcaggaaagaggtggagagtgtttgacaaccaacctacatttggttctgcctgagaaggcaatggcactccactccagtactcttgcctggaaaatcccatggacggaggagcctggtaggctgcagtccatggggtcactaagagtcggacacaatggagcaacttcactttcacttttcactttcatgcactggagaaggaaatggcaacccactccagtgttcttgcctggagaatcccagggatggtggtgcctggtgggctgctgtctatggggtcgcacagagttggacacgactgaagtgacttagcagctgtagcagtgcttcagacagtacattgtgtccccaaggctgtgcaaaacacctcccatgaggtaagctccaagaaggcagggctctgttctgtcattggtgcaa

SEQ ID NO: 56952 - DNA, 1307 bp, Bovine  19866880962263
  misc_feature (1)..(1): n is a, c, g, or t
ntgagctagaagaaagttcagaatatgtattctaggtttatccttggagaaacatactatgagcaaattatactaactgcctcgttgaaactcaaagcctgcatttcagtcatttctaaaggaaaggaagtctggttttatttacaaatgcagtaagtgttcctgcctctgggaaccatgagtccattattaaaatgatcaatccccagcctagtaaagtgaaatgacactccaggtcatgagagggaatgtcttttctgaataatacataacacaaatttgtttacttctgactttggtaccacgattgctttttttcttcctaggtttatgtactatttgttctctggggaaatcttggccctccactcttgaagatactttctttttttttggatcctggagttcccttgaggaatctgcctttgcaccaagaaataaataaatcttttaaaaataataataaaataaaaaaacattgaagaccagtttaaaaaataagcaaaaaacacaaacgacaaataaacaaataaaaataaagctatttccacaatgttttttggtggttatgttcatcatctttgccataagcatgaagcattagtttcccagctggggtgttgttgtcaggtagaaaataaaatgtgttgaggatggttgttttagaaagtttttacttcagaatcctgaacaggcaggaagaaggaaaatctgagttcagtctctaactttgctccagacttgccttaaactggtctctgctcccttgctgggcctgctttctctgctgaagaacggcattgataatactcaatctgcctacctggcaggcagttgatcggggggaaaggggacgtatcaacttcaatgcacgtttaagacggtccagtattcctacagcacaagcacactgccagggtgatctcaatgcctgggagctgctctgcatgcaacaaagacactgatgttctcagctccttctctgttttctataaaggcctccagccactctcctgctgccatcgagcccaattaaacccccacgaggatgatcctggtaaaagccccaccatgtgatagatactttgggaatacatggttctagtcttcaaggagctcttagtttagctgaggaaagaagaaatacctatgtgaaaagttgatggaacacagaatataggtaatatctttgcctggtatattagtttactgttgttgttcagtcgctcagtcgtgtccaactctttgcaaccccatggactgcagcataccaggcctccctgtccttcactatctcctggagtttg

SEQ ID NO: 56953 - DNA, 815 bp, Bovine  19866880988182
  misc_feature (1)..(1): n is a, c, g, or t
ncctcatccgtaaaaacttgacttacttttggtggtcaaagttttccttcctaatacttacagagacaccaattctcacctagccgagtcttttcatcctatggtgtatccgaggaggatgatctcagacactggttctgagtccccacagatctagcagttctctggggcttataaatgaacactgcgtagttaggagagccctaatctagatataggactgaagaatctctggctgagggccaacggatttgggttcttctttttcacccacttttattccagggaagaaacaatccacacacttatccgttagaaagctgacattaagcagaaacgggatatggagctgcttaaatatttcaagggaataaaccctgggaccctcaaaataatctcttgatgctgtttcctgaagaatgctgcacaaaactgactttgatgaggattttgtcaccagccaaatcctttccaaatactgagagttaagaaaacgatagtttcatccactttcattctgctagaagttattgttttgttctttttttgccaataaatttgatttcaaatactcataaaatctttaaaacacaaggaacctggagtcagaggaaaattaggggtacctttggatttcctcctttttcattttatttcacttgattattattaatatatatgcaactgtatctatatattgatatatgcacacatgcactttttgaaaatgttaacaacaccgtcacacttccctaataagtcactcatctggcacagggtttttttgttaagggcatatgaaacagagtctcaga

SEQ ID NO: 56954 - DNA, 1948 bp, Bovine  19866881063224
  misc_feature (1)..(1): n is a, c, g, or t
nttttcaccccgtccatggatgtttttacagtgtaacagtttacaggaattccatgcttttcatgagtatcctaattacttttagagcttttataagctgagccccagagttttcccatcacagtggtaagtacttaagagttcttgcagtaagtttctgcagctttggtgctttgggtgagggctgtaatgatattcaagaacactgtgttttcctttgacttttctggcacatgtttgatttcctgtttggcgcttgtttcaaccctgaaatgagaaaggtgggaaggagcaggctgggcatttttctgctcctaattaaaaatgcttgtccacgaatatccctcaaagtggctcagagtttatttagggccctctgtagagttcttgagggacctagagctcatgcagaaagtatgtttgtatggattacggtgtcttctctgattcctttggaataactgtgacatttgatttgtaggggaattgcatcaaggaggcttatatttttgcatgcaaagcagtttccatcccaataggctaaagaacacttgaaaggtctttttcacttttgtgaatgaacagataaaatattgtgtcctgggaaagcttttggttgcataagaaatcaatgcaacctcagggtaaatgggaatattgctgtgattgtgcactgatttcccaggcatcatgggaagtgttttgacctctgctcactctcttcccattgctcccagctgtctcgtgtgtgtgtatgtgttttgtccacgctggaaattcaaataaagtatttgtgaatgtgattatacatctcaaatggtagacgaactagttagtatagttttgcggaaaataatgttctgatgtaaagagaaacatcttgattttgtatttttttttttttcatttgccattattacttagcacagcccttctctattggagatgattggcttagtctcttcccggtttgctctctcagtcactctttccctactctctcgtaggagtcatctctacagcagacattcttgatcgagagacaacggggtcgtactggctgaccgtgtacgccacagataggggtgttgttccactctattccactattgaggtctacattgaaattgaagacgtgaatgacaacgccccgctgacctcggaacctatttattatcctgttgtcatggaaaactctccaaaggatgtatcggtcattcagatccaggctgaggaccctgactctagttccagtgaaaaactgacctacagggattacaagcgggaatcctcagaacttttttgccatcaacgtcaaaaacagggtaagggggtgcttgtatgacttttttttcagttgttagtccaccttttaaattcacaactctggtatttgctgtgcctttttatttatttcattgtgtggagaagagcatccttctttctgggaacagtttctgaaaaggtgaatgttcttccagtctgtttcggtatgttttaacctcagctgaatggaagtgaagtgatctaacagaaattaagaggctttctcagaaagccttaggtttgctttagtcataattataaaaaatggctcctagaccattcagagagctggctgcttgctctcgctttcttaggagaacatagcctaggctatgctgagttctctcgctatctggctttgtgatgcctctccttcgagactgcctccctccacttggccttaatccagctcattataaataatctccttaaagccttaactttaaggcccagattgttgtgatttctgtattacccatcaatgaagtgttatgtttagaagagcttccagtatctaaatctttacataaaacacacttttttaattttctgggtttttgcttaaaagtttctagagattgcagaaaactatacttgttggctaaggatcagaaagggcagg

SEQ ID NO: 56955 - DNA, 1338 bp, Bovine  19866881121252
  misc_feature (1)..(1): n is a, c, g, or t
ncttcccttgtatttccaagaaatgctactgatcacaaaatgtaacagtgtgtgatacatgtaagccctttgaaaagtctacagtgataggcaaacacaaatcaatagttgtctcttgatggactggccaaaagttgatccttcctcgtgtctgtcttgattctattgtacttgtaaacataactatattaaaagttttgtcaaggaatagtttcatgtcttgtttgtattttcaaagctggaaatataattctgaaatctaaatcagggagagaaaaatcaattcagctgatcagtcttttgagagtagagaggttcttcctagtttattgtttctaaaaataagctctccaaatttggcactgctgttggggagcagggatgtgatgtcagcagctgaaagtcctccaagtgcacgccacacacggaactgtcagatgcttacggagctactgagaaaattcctgacatatgtgttttgttctaagaacttaacacagcacgcttttttttaaaaacattgcttttatagaaatgttctgattctcctggattcttttgaattgttgccagcatgtgatttggatccttgacttggccctgcgaagagaagttgaaaaccagagatgaatagccacgcagtctcttacacttgaggactgtccagttaatatttcaagtcgccaaggccagcctcgcagaaagcatgtattttattttcgttctaaaacattatgttctgagctatttcctgaagggcttttgcaagaaaccaattcattctgtgtgggaagatgactgtttctcagtgagttctctttcaggtccttgttccagactgctattggtgataggcttataataatattaataagaaaaagggataatgagaaggtgaataagaaattaggaagaagggaaggatgaggaagaagagaaaaagatcataatgatgtccttccagtaatttgaaagtgtgttagtcattcagtcgtgtctgactctctgcgaccccatggactgtagcccaccaggcccctctgtccacagaattcttcaggcaagagtactggagcaggttgtcatgccctcctccaggggatcttcctgacctagggatcaaacccaggtctcctgcattgcaggtaggttctttacagtctaagccaccggggaagccctcaagtagtttattcttttataatttacaaagtgagttagtgagatagttgatgtcacaagtgaggaaactgactctttggtgtgacattgctttcttaagtaatagagctagagcttaaataacagagctagagattaagtcggagaaggcaatgg

SEQ ID NO: 56956 - DNA, 2005 bp, Bovine  19866881127887
  misc_feature (1)..(1): n is a, c, g, or t
nattgaaatcaatccccataatattgtagctttgaatgatctcttaaatatccctagctcatggtaggtgctcaatcatgttgaacgtaagaatgaacttagtattaatctggacttcaactaagtggatattcttctctgggaagagattttgtaaaaagagtatctcacatattgaaaaaattatgaactggattttttttcaaaactgtaaaattcactctaattcagagagagacattcagtgtctcatttgaaaccacctttttactgttgccagctgattaaaatcacccttagttcataaaataaagaagctacaaggatgtattatacagcccagggaatatagccaatattttataataactataaatggagtataactttcaaaaagtattaatcactatgttgtacatctgaaacatatataatacggtacaattatacttgaaaaaacataaacataaacatcatcccttttttgaagtaacaaggaagcagtatttcctaaaaaggtagttgcccaaagaaatgctacggaagaaaacagtaaataccttcattctctatagtgtcaactacattgttgacaagctgaatgacagtcactatggatgcttgtggccaggaaagacgacaggagggaggagaaggacagtctcaggttagttacgtcttctgaatatacactcttaacaacagcacaacaacaacaaaggaactgcccgccaatgcccagagcttcccacagtccaccgactggactacagcggacactcttatcccctgggttctcggaggaagggaaacagcagcaaatctaaaggcatggtcggcaggaattgccacgccataaattcacacctcgtggcccagggaaatcaatctaggaaggcagaggctcataagctcgtgctaatttctcattagtaactcccaaaggctccgaggaagatcgcactattcccagggataattacttgctggtcagctgtgctactccgagccaaatgccagtcatggacgatgacctttgcaggactgatggtttcaccctcagatggcaccaacggcaacctgggacgacccgaggcccagctcccacccgccaagcgtagatgggagcttggcctctgaaatagtcagaaaatggggaggagatttctgtgcccacctgggtcgccttagcatctgataccagaagtttttggcgaggtgatcaggcttaaaccaatgggtagaaggctaagtcaaagatctcttttcgtaaacatcatattactcttgaaaacatatggcttatgttttcaatcaatatcttttgatattgatttctaacataattccacagtgattaagagaacagactctgtatgatttcaatacctttagaccatcaaatttttgtaccttgttttatgtccctggatatattccagtctctcctagtttatagtccatgggaacttgaatagaatttgtatcctactattatgcaggtcaggaagcaacagttagaactggacatggaacaacagactggttccaaataggaaaaggagtacgtcaaggctgtatactgtcatcctgcttatttaacttctatggcagagtacattatgagaaacgctgggctggaagaagcacaagctggaatcaagattgccgggagaaatatcaataacctcagatatccagaagacaccaccccttatggcagaaagtgaagaggaactaaaaagcctcttgatgaaagtgaaagtggagagtgaaaaagttggcttaaagctcaacattcagaaaacgaagatcatggcttctggtcccatcacttcatggaaaatagatggggaaacagtggaaacagtgtcagactttatctttttgggggttccaaaatctttgaggatggtgactgcagccatgaaattaaaagacgcttactccttggaagggaaagttatgaccaacctggatagcatgttgaaaagcagagacatta

SEQ ID NO: 56957 - DNA, 945 bp, Bovine  19866881129496
  misc_feature (1)..(1): n is a, c, g, or t
nactgagtatatatatgtaaataaatcacatttattatattaacttcataacacaaaccaaatgaggcatgtaaagctgttagtattattgctgctgttgtttttatgaaggcatcagaggttctgatgtgaatacaaatgccagacttgctctaaaggaaatctagtgcctttggagagtttctgaggctgggaatgatttaaaaattaggttacttgggccagaagagggcatatggaatcttctataccccagatctcccgtatccttccagggcaagaatagaagtgaccttcaggggtcactggggatagacccatgtgatataagaggatacagtcagccttttgaaaagaccacccctgccgtggaattgattaggaaacactctaatgaactgttgagtgattacagctcaaaggaggccggcccttgaacccactctagagagaggtaccccagtctccaaagaggccattctgaagctgaatgtacaaaaggaaatggggtattggcacacttcccagttttgctgctgctcccctggccctaaactcagcttctggtttctgaacttaaaagacaaaacgatttcagactccaaaccaagaggcaaaatactaacatgagaactgactgcgggaaaagataacccattttaattaccttcagtatgatgcaggggtttgctctggtgtacattataatcccattgctttgcagggtccgcagacgcagggccagtttaaagtcttcttctttgctgttttcagaaagccggtatttgatgtaactgtttccggcaaagctgagagaagtgtgtcctgaaaagaccatgatgaggagacatagatactttgaacatccagacaccagaagggacccatggaatcacagaacaactaccaatcaagttattaggtggcaaaagcatagaggacaaa

SEQ ID NO: 56958 - DNA, 1578 bp, Bovine  19866881145989
  misc_feature (1)..(1): n is a, c, g, or t
ntgtaaagaatctgcctaccaatgctggagtctccggttctatccctgggttgggaagatccccgaaaagaaatggcaacctgctccagtattcttgcctgggaaatgccatggacagaggaacctggtgggctacagtccatagggttacaaaagagtcctagacaactgagcaactacacaacagaaatgacagcaactaatgctgcgccatggtcccctggactgagggatgctctcttttgggtatatcttttgtttcctttaacatcatctccttcttagccgatgaaaagggcaggggcccaaagcttccttgtacatttaggttaggacaatgctggaacaagtgcaattaaagagatgaaataaggcagcaagccaactctaccatgagactctatgttaaaaaaataatgataaaaatctcactgtatgtaatagatccatgcctgacaacttatgagcaaatcaattcttgaaaatggattccgactttaaaggcaacaggacactttctgttcagaataatctcaagattaatgttccttaaatgagaatggtcatatcagttagctgttttgtaaattaggatgtttgtataacggaacatcatgtttgcacatttataattaatgcatatataatttaagtgtgggcttccctggtggctcagcggtagaatccgcctgttaatgcaggaaacgcgtttgatccctgggtcaggaagatcccctggtgggtggaatggcaacccattccagtatccttgcctgcaaaatcccatggagagagaagcctggcgggctacagtccatggggtgtcgtaaaagagtcagacatgactaagcaactaaacaagaatttaagcgcacatggacatgatataatgggatgctacagaatttggctccctgagacctaggtatgagtgtggccttgccgttatgacttgggcaaattgcttaacatctctgattctcatttgtcacgttgataagctaaagatagtaaagttgaagaaatgaatatgaatgtaagttgataaactggaaaacaagcacgtgctgatgtgatttttcttcttaatgcattcaaaaacaggtcttgcaagcttggaggggataccagaggcatcatccttgaaactacaactgtggagtgttttaaatattgttctgaatgcaaacagaggcagaattttcagtaattcaggatttaatttgttctaataaaagacagaggccttacccttcagctcaccccatggacacttcatgccatgagtctttgtaaagcgaggctcggcatctacccagacttggctcagacaagcctgcaaaacccggagtgtttgtggtgggcagcactgaaaccagaagagacttcccacactcagggtccctcctgctcggagtccattgtgcttctctaggcctttcaattaccattttgaacacaacatctttgaaagttactttgctttgtttggttgttcaggagctcacaaatggccccaactgtgggaaataaaaagcaaatgaggaaaaggaagtcttttacagagaaacactgttc

SEQ ID NO: 56959 - DNA, 768 bp, Bovine  19866881159306
  misc_feature (1)..(1): n is a, c, g, or t
ncgaggcgaggatttggaagcatggaccaaagtgagcatacaggttttagatatgaatgacctgagacctttattttcacccacaacctactcagttacaatcgcagaaaacacagccctaaggactagtgtcgcccaggtgacggcaacagatgcagacattggctccaacggcgaattctactactacttcaagaacaaagttgagctgttttcagtccaccccacgagcggggtcatctccttaagcggacgattaaattatgatgaaaagagcagatacgacctggagatcttagccgtggaccgggggatgaagctgtatgggaataatggagtgagcagcactgccaagctttatgttcacgttgaacgggtaaacgagcacgcccccgctctccacgtggtcactcacattcctttctcattggacacagagcctgtatatgcagtggtgacagccgatgatctcgatgaaggggccaatggagagattgagtctgtttccatcgtggctggggaccctttagaccaattcttcctggccaaggaaggaaagtgggtgaatgagtacagggttaaggagaagaagccggttgactgggagagctttccctatggctacaacctcactcttcaagccaaagacaaggggtcacctcagaaattttcagcagtcaagatagtccacatcgccaaccccaaaagagacactgtcccaattagatttgagaaagacgcgtacgaaggagcattagtaattttccc

SEQ ID NO: 56960 - DNA, 1601 bp, Bovine  19866881222554
  misc_feature (1)..(1): n is a, c, g, or t
nttccctactaatgtaaaacaaacgcaaatgtaatttactttatcaggacccttaatttagtgaaggtcatgagtacactcagcagaggtgaggattacctacacttatcaaaagataacctggtgacagcgtagctgaataggaaagaaaccagggactcccactgaaaaccatcagctctcatgtataaagaggtcttcttacaagtcggtgaattctaaggaaaagctttgacttggtcacctctgcaccaatgcaacctcatttgtcattccgcttgagttcaagaatagcccttcactttcccagtgttgacaactgaagagacatgaaacaacacttctggcacaaaacatgaaacttaccactctcgtcatcaatattgaaccttccaagaccactgccatccctgatggagtactggatctccccatccctccccgagtcctcatcgtgggcagtcacctgcagcacactggttccaatccgtgagttttcttttacagagccaacaacagcaaagtccgggaaatagggagtatggaggttttcattgacatccaccacttccacctccacaaaggacacggatgacagagagacaggccgccctttgtccttggcccgaactgtgaggttatagaactgctgcttttcatagtcaagctccctgctcaggcggatggcgccacttgctttatctatttcaaatctcccgttgtaatcattgaccaaagaatagcgcacttgaccccccagtcccagatctgggtcatgggtctccagccaagcaatgacggtgccaacggggaggtcttcaaggactttcacactgtagctactgggaatgaaagctggggagcagtcattgacatcatccaagaaaaccttcagggtgacaacggaaaagagctgctggccactttctgccttgtctctggcttctatttttaaagaatagttcgctttggattcccggtccaactggtctgctatatacacgattccagtggagctattgatggcaaactgctgcgtatctgtcaagactgagtaagtcacttcaccattagaacccaaatctttgtctctggcttccacttgaataatctcagtgccaatacttgaactctcaagaatgttaactgaataactgtcttggagaaaaatcgggctattgtcattggcatcctccacgttgatggtaagcaacctccatgaggacttttgtggattccctaaatcatagatggtgatgttaagtagatagaggtctctgtgttctcgatccatgggcataaggacttgaagttgcccggtctccatatcgatattaaaacagctatccatattcccatcagatattgtaaatagcaccttcccattgaagccagagtcggcatcataggctttaatcttcaggatattagcaccaactggcagattctccttcacagccacatcagacggaaatgacttgtcaaaatgcggtccctgccggttaactgaataaaagtcaagaaatccatcttctagattcagtttcccatttgctttggccttaatgaggagcttctctgccagcttttgagccacgcga

SEQ ID NO: 56961 - DNA, 967 bp, Bovine  19866881312159
  misc_feature (1)..(1): n is a, c, g, or t
natttctgcagcaccaaggctcttctcccctgattgtttggttggcactttgggaagtagcattaacactttcagggtcactagggggctaatcatagccattttcgtgattgtagaactgaattgccgttcagaaagaataatcatagcagttcacacaggggtctttcctagaagatttcactatcttaggacaaagtcatttgcattaagaccattccatgaggctagtgtcatgaaagtcattatttatacagcttttgctctcaaattttcaggcaccttaccagaagtccactgaatcctctgctcattgcatatgtgtgtgtgtgtgttaaactgatgcacacaggcagtatatgaaggtgattgggaggactaatagacagatgtgctgctgctgctgctaagtcgcttcagtcgtgtccgactctgtgcgaccccataggcggcagcttaccaggctcctctgtccatgggattctctaggcaagaatgctggagtgggttgccattgccgtctccagtgcataaaagtgaaaagtgaaagtgaaagtgaagtcgtgtccgactcttagtgacctcatggattgcagcctaccaggctcctccgtccatgggattttccaggcaagagtactggagtggggtgccattgccttctccgaatagacagatgtagatagagataaatattaatagacacatagacaaatagacatgaatgatggcagttactgccttgtttacatgagcatgctattttaaaagaaaattataaaaataataaaaattttttaaaaatttaaataacttttaaaaaatttaaaagaaaattatttcataaaaggcaaacttaaatttattaaccatcagctccgtgcacgacactattttggatacttacatacactactagactcaaagctgtttgttgtaagtttacattcccaataagggtgcacaa

SEQ ID NO: 56962 - DNA, 1473 bp, Bovine  19866881321353
  misc_feature (1)..(1): n is a, c, g, or t
natagtgccagcagagcattaaaccacacttgtgatctttctgaacataagccccaggtgggaccatgacaccagagctgctggtatcatcgtgttcaatttaagtatactatgcttgcaagttgaaagaataaatttaacacactttggcaagtggacccgaaagccggagatgttttcttaaagtttttttttttctttttttaactgaagtatagttaatttacaatattgtgttagtttcagctatatagcaaagtgattcaaattcttttccattacaggttactataagatactgagtatagttctctgtgctatatagtacatccttgttatttacctattttatacatagtagagtgtgtatatgttcatttcaaattcctaatttatctccaccatcctcccacccacctatccctttgggtaaccatatgtttgctttctatgtctgtgagtctacttctgttttgcagataagttaaagggttaaaattcagttatacagaaaaccacttctgtgtaatttcactgtcctggaagttactggatatgactaaacttccaacacacagcttcagtaacaagctcaggattcaaccccaaacataagccttccttttgttaaaagtggttttcaatattgtaaaaacacacagttcactctcttagggctgagaagtttcctatttctttgtgttcctctcacacctatgtacagagtccccagaccacaaagccttattaaatcagacaggaatgaaaacacaaaataacttaagccatttactaattatgataacccagcaaagcactgatagtgatcaactgaaaccatctctgatatttctaaacatatgcacataaatataaatccaccaagtgtatttgattaactgtaaaagttagactttgggaatggactgtcaaagcccactttacactaaaagccatttcattgggcactaaaaacacttaaatacaaaatgagagaaatatgtctaaatctagtttcaaaataaaccattttaataaataaccccatttcccgtgcatgaacatcatttcttcagagaaaagcattgctcactgtgacagaaaacaatttaactaactaaaaaatgaacaatttagtatgtacatagccaagatgaagtatgtctttataaaataggaaattttatagacaaattaactaaagtggtaggaggtaaaattggatttgtcttccttaactgaagtatctgtaatggcaacatatttaaaaatggttcattggcaaaagctcagcattttcttgtaatattctgtttctaatgtgatgtatttattttacatttcctcactcatgttctcagacgttttccttctgaaaataacctataaatattgtaaccatctattattgccggaaaaaaaaagtcccataaaagcctttaatattatttacttaatctcttcattttcaag

SEQ ID NO: 56963 - DNA, 1789 bp, Bovine  19866881324567
  misc_feature (1)..(1): n is a, c, g, or t
naaaaatcctgccagcaaggccaaccttccgatttctctgatcttgatgatattagagaaacaccaaaaatgccatatttttttccgattcagttaactttattttggtattgccgtttatattaacttgaagcaaaactgagcttttttaaggaagaagacaaaacagtattttgttataatttttcagaactaaactcttatttgaaaaaagtataaagtttcattaccccctgccctttggttctcctctcttccgacatgcgggctttgaccttgagtttccagaattgccaggagaatcatctgactgggaatacagtaactcgaagcttaaaggtgatgagctgagtaacttttctcttttgcatcagtcggctcatgggcacgtgcacagaggccacggttaaataaatgcgtatttgcactctctgcatatgagcgaatctctgtgtccacagtttctggtgacatacggtgttggtgtgtctcatccactcagatgtatttttcagttgtttcactcatgttcagtccacttctttataggagtcaatgtttccacaagtttgtggttaaaacaaacaaacaaaaattcctattcattctcaagcttcctgagtaaactgtacactcatacacttcacagatttttcagcttttctcctcttcctatctcttagtcagacctactcatggaaacattatctgcactgtggtcttgaaataaatgaatttcactaaggctgcttgggagaatgaaatctttggtatgttccttatgtaagaaacccatttgcaagaatcacagagaaaatgacagactaatggtctagaatagaatcgctgctacactttctatgatgcagtggcataaaaaacaatcaaagtaaaaccaacaattcatttcttgccccaggaaatattagaaggagattaatgccgatgagtcactcctgcttgcacagcataccctccaggcagagtgccctcggaacccagtaatgaagtaataaatagatcctaatgctgttgtgaagtcacccaagaaaattgtgcccactcttggctctgaactgtataaaatacctctttcttcaggatatcttcccctggttttctgcagagtagctctgcagctaaatgtatcccagacaagtgtgttatgttttgatcaattacctttaaacacatggtatcttttcactttctggataattagcttttcctgtagattctgaaatggtttgcagccaggccaagatggaactaggtggggtgaccaatgattcaagagctggaagggtccttaagatctgcttatccaatccccttattttatcaaagaggaagcatacccagagaggggaagggactcacccaagctcacacagaaagttaagtagctgaacaagaactagaactcatccatttgaccagtattctttctattactattattcaccactaatctgcatggggcatggtatctgcctgcttctgctggagctttgatttcaccccattcctgctttgggatatactagaagatagaactcatggagagtatttctctggaagcctcatgatcttagggtttttttgcagcccccataggaaaggtgtattgacaaaattcatacatttctttggacatctatcaaaactgctttcaccaaatgaatgttttctaaaatgaggatggaatgatagttataaaatggaactcaaactgatcagtaagtacagtaaagctctgattatattacctaccgggtccatttgtttt

SEQ ID NO: 56964 - DNA, 819 bp, Bovine  19866881331138
  misc_feature (1)..(1): n is a, c, g, or t
ntgtgcccttacaagaggaatctcaggaagaagccctctccccttctgcaaaatgaggatgcatccagaagacacagtctgccaaccaggaagtgtgacttcaccagatactgagtctgctgcatctggatcttggacttccagcatccagattgtgagaaataaatctctgttgtttatgaaacaccaagctgatgatattttgttagagctatcccaatggactgagagagaggctgtgagcatgaggcagctgagggacagacagacaggctctgataggcttgatcctgaaggctttccactggttggtccagaggttagtgacacgcagctgtactctttgcccttagattctctaagggaccctacagtaataatacatactttttccatcagagtttggagtgtctcttttgtaaatgaaaggaccataatagactattgctgtggaaaccaggtcaggaggaaggctcaggacagaagaaacattctccaatgtcaacagtgcacacaggttaaagactagaagaagcctttagatttggtaatctggggagaaaccagtgaaaggcatttgtcttttttaagtcacattattgctaggattgttcatctgcattagcttgaatgtcgaccaccactttgcatcttttatttgtggaattctgtgagtcatgacctaaaatatttgtggtctccagcatgtgcttgaattaaaccctgtctctcttcattaatagttctcagagggatattagctggcttgaattttatctgtaggaaaatttgccaacaatttggttaaaagcacattat

SEQ ID NO: 56965 - DNA, 1581 bp, Bovine  19866881349895
  misc_feature (1)..(1): n is a, c, g, or t
nttaggaaaagaaaatacacatcaacaattactggggtctcaaagtttttgttgcaaaatttaatgtagcctccaactaattttttttctcccctataaagaagtttttttttttttaagttctcacccctgttcattaatttggttgccaatcattcacatccctctacttcacatgatggatactaccaagaaaaataaaaggaaaatgcattattaaatttcagagaagtagcgatatgcgtgtgataagaacatccaaataccaccaggctcacataactaatgctcacttcccctcattcaaaaagggctgcttcttgcctcctttaatgtctttcataaatttgttctccagggactgctggctgctgttaattacacatatcaactcccgctatgccagaggaaacttaattattctaattttcaaggtcatagaaatatccaaaggtgccagtttgacagtccaaagaatatccgagctcaagggaatcagaagcagaacttgccgtggaaggctgcttacacgcttatccacagagcagtgcagggttgctagcttcccaaccggaattaaattgttcaggacaagctaccctcgagtgaccggccaatgaccctggccataaataggaaacatttctttgcaacatgtgggagggcagttttctttctagggtccttcaaagctgcaacttctttcctataggcaagagcttacctttgcaaaaccacttaaaccttcttgcttaaccactgaggttttggccatgaagacagaaaagagagaaagaaaggaaatgctctgcagaatttcaaataaaagttgttctacagtttctcggaaaaagtaactccagagtagatttccagaaactgaccagcaagaatcagaatcctgttttaaatcgtcctgatttcttgaggaatccttaactggaagcccaagattacttggattttcattattgtaattaaaagatgagtttctaacaatgcacatctatctggataataatatgtcaagggaacataacataaaaagtgaacacactttcagtttagcaaaagatattttaagctccagagtaattttaagtggtaaattttaagtggtatctaagtggtaaagaacctgcctgccaatgcaagagacagaagagacttggggtaaatttctgggtcaggtgatcccctggaggaggacatggcaacccgctccagtgttcttgcctggagaatcccatggacagtggagcctggtgggctgcagtccttggggttgcaaagagttggacacgtctgaagcaacttagctcacatgcatgtaagtacaattctgggatttcatggcttctggaatataacttcttattcactggaagtagattctaaattcccatgtcgagttctgcttataagatttacctttttcctcctattttccaagtcttgctgctgctaattgcttccagccctgtgtggttcataaagcctttcagtacccagaggctgtgacactatgtttcctctagggcctttatatagctcattcataaagatcttccaggaagcctc

SEQ ID NO: 56966 - DNA, 1091 bp, Bovine  19866881351509
  misc_feature (1)..(1): n is a, c, g, or t
nccccaggaagtcatcgtcgtgcggcggcgggtactcgctgtccacgtcgtatccccccaggtagtagtcgctctccagcccccgtgcactgcccggtggcgccgcgccctcctggctctcataggtgggcacctcttctatgtcggacaggcgggccccaggcatccagtcggacgtgtcccagtggtaggctgtgagagggaagccagggcagttagtttcctccagggcagcgctgggcacagggcgcagaaagccgtgggcaggggacctggcatgcaactttcaatgcccaggagacagctaagaagccaggcacagccccatgctttttatagggcccttctcaggcccagccgtgctcttgccctgggggtacaggcagcggcagctctgaggacacctgattgttgccgcgtctccctctcagccttggtgagcaagggcacgctgtggaaacacagttctagaaggctctcccctccacgccctctttctagctgtaggctaagtgcagagccaggctggcaacatgctctaagaggcaagatgcaccagccttcctgtggacagcaggagggcgggagatacccgtgcaaatgaatgaatgactggggaagggagaggcttggggagggagatgtgagcagggctttcacccctagtgctgagcacacaagacacctggaacatgcaaaagtcagggcacacgagacacctggaacatgcaaaaatcaggtcaaagacactcagaaacgatggagggagacggacaggttaagagcaaactcagaaatttctaatgcataaggaacatctggtgctgggggcgtggcagtgtcacctcggttgaagttctgtccttgatccatgacagacactgtttaaatacaaagggagaagtgaaactgacagtccaaggcatgtgaagagggtataacaggacattttaaatgacttttaacaatgctcctattcctccctgttgttatttacaaaacaaacaaacaaaaaaacccatctatagcaggccctagtagttttaaatcactaatgaaagttactgattaaatcaatccccataatattg

SEQ ID NO: 56967 - DNA, 1618 bp, Bovine  19866881383591
  misc_feature (1)..(1): n is a, c, g, or t
nttgacaggcagatgctttccctagtgctgccttggaagccgacccaaacctggctctctcttctccctgcctggtccttaatgagtttctgtggactttggagcagatgtgggtgggaagtacctatccccccctccactttcttatcatttggttcactgtaggtcccccttcccaacaaagacagggacgtggggaaatgggggctgtcgcaggaaccctaacgcattgttggattacagagcagctgggcagctttctacatcttcatcctctgttctaagccacccgccatcagcaaataagacttgtcgtccaaccacaccatcccacttgtgaccttagttttcacttgagtagtctattttagcgtctgtatttcttgattgggagcccacttggtgtttttggtagatgtgaattttctgtgatgcttagaaaattttcttggtgatcagtgtaagtactggctgggatatactcgatgaaaattttccccatggagacccatcatttctcatagaatctctcacctctttctgtaccgccttggaagcagagtatggtggatgctgacagatgagactaagagagagggaaaatggccagctccagcagctagctgtcatccatttgatcaaagaaacatggtagcaattacacggatttttaaaattaacttctagagacatttttatacaatagttggttagtaacagggtaccgcgtctccttggggaattttatctgtttttcccacttttcaaaccagcttagaagcaaatgtttaggaatttcttgcatatatgaagggataattattgttttgctgttcagtctctaaacaaattaaccaggcaggactatattttaaacatgtatttaacaattacaatgttgttaattacaatttaacaattcagtgttgatcatcctcttgaataccatgggattaaaatcacccccatatttcatatattatcataaacttttcttggcatgtaagtcacattagtaaaaaatgattactgatttctcgtttacattttctcacttctcaattttccattttaaagataatttacttttcttgctgattgatttgtgagtcaagttctatatatacctgtgagtaaatacaagtatgtgtttggtcacccttaatcttactgatttccagtctccatagccctgtccaatttcctttaccccgataagactctgaaccagcatctctcatatctacctaaatttccttagatctgtagtccagtaaacaaagagtacctttcacttcggaacatttatctttttcaccttaaaatgaaataccatgacatctaactttgtggttgaggttttaagtgtgttcaggaaattaaaagctgggatgcctgcaggagccataagataatgatacatggatgataagtgtaacaaatttcacatatatctgaaggagctgagtcatcactgcctttttgctgtgaacaaataccaattccctgaccttaaaaatcttcaaacgttaagttaatgcattttatttccatttccagtgagttgtttgaggcagtattacacacatgacttctgagggttttatattaccgggat

SEQ ID NO: 56968 - DNA, 1262 bp, Bovine  19866881547300
  misc_feature (1)..(1): n is a, c, g, or t
nttgtaatttttttatattctacatataagcatgtcataccatatttgtctttctctgttttacttcatttagtatgctaatccatgttgctgcaaatggctttatttaatccttttatatggctgaataacattccattcatccatcgatgggcacctagatagctttcatatcttggctattgtaaatagtggtgctacagataaacagcaatgacctactccgtaacagagaaaactatattctgtatcttatagtaacctataatgaaaaagaatatgaaaaagaacatatttgtatgtgtgtgtgtatgtatttatatacatatataagtgaatcactttgttgcgtaactgagctgcacatattataaatcagctttgcatcagtataaataaataaaagatgtgagaagcatgttactcattgtgtgtactcagtacatgataactgcctttataatgaaaggcaacgtgttaatcactcagtcacatctgactttggcccatggagtgtagcctaccaggctcccctgtccgtggaattttttggcaagaatactggagtgagacttctagtcccagggactgaacctgggtctcctgcattgcagccaaattcttaaccgtctgagccaactaaactgtgctgtcaataagaattaggacagggagtaaaccccagtttgctgcctgaaaagcaagtgactccccactgccgcacatgaggagtccttggctgcgaaacgtcatctagaaggagcagaacccaggttctgtacttgggttgaagttcaaggacgaggtagaggagttgggcgctgcacgtcttggagtgggcaaggcggggcacctgaaagactccagggtggcctctggttccttttctcacccaggctctggttgccagctctacaggggcacaaaaggagggaatacaaatgtttccttctggagaatttcctcttacaataaacaaaccagtcttcatcatggtattaaaagaaagtggcatgaacgctgtgtaggttctgccactcaccctgtagctgtggcaattacaccatttgggataattgtcttgtaattgccgctgtgatttaaaatctaatgttatcctccaattgttctgatgtcttttcatgaataatgcaatcatcccatgagccctctgccagtttctcattcagattggccctgtgttgaattatgcaccattgtcttacccaccagtgtctcacaaaaggaatgcgccagagaca

SEQ ID NO: 56969 - DNA, 1616 bp, Bovine  19866881566673
  misc_feature (1)..(1): n is a, c, g, or t
natacgtaccagctgtgagaacttgggtgagttacttagtcactgtgcgcttcagttgcttcatctgtaagacaggcaggttacaggaagacaaggatgtaatgcatacaaagagtgacaaatatgaagtactcaaatcgtagccacagatgatttttcctaattttcatccaggtccttttgtgtagaagcagctttcttcatttccaagagctccaactagtggcagctggaggaacagtttagttcataatgattaaagctattaataacaaaagaaaaatccttttgagtttaaagcgcaggtgttctctggagtctagctttgtgggaaaactcttcggagtgttatccatcatcttatttaaataaatgtgttttgcacagataggaggtacagggctttgatgtggttgcccatctgtgtggaggctcgtcctctatcttggccagtcactttctgatgaagctgagtccctggccaatttcaggagctccttctccaggcagagattttaaagctgtatcattcctgtgacccagaaaaaaaatgtcatttaactaggtcacaaagggattcagtgacaggcgacgaggtcttggtgtgtaggaggggctaaaggtctggatgcttgttctaaatggtaagaaattgactctgagaggaatgatattaaaatgaccaaaagggcagcaacttcaggcacaaaactgaaatgcagtgataagatttactgtgtaaataattcacctagcttgggaaaaggctcaggatgggctctgagcacaatgggactttttcttgtctcagaatataattaattaagaattcaggatacaaggtaattagagaaaccatatcctggaggcattctgctgaattattctgatcatttttaacaatgagaaaatttaattttcttgtcttgtggcagagattttgaatttagataatgtaaagagcaatgttcatacagtacagccagtaaattaaattatttcttttgattttgatttttgcagcaaaaattaggatcgagtgattcaatctaaatcatggaaatgattgtcagagctgaaaaatgcttgagagaaaaatgtacaaattacaattgactctcatcttctctaacattaagttgcccatgttgctttctttgtaattactgtgtgtgtgtaaatctatttcatgatttgccctgggacaaaagggatgaataaattattcttatatataatgggggttatgtttacttaccaccaaattaaacttgctttccttaacaggaagaggttgtcaacagcttttagtcatcagtttagtaccagttaaaaattaaattcagttttttaaaaattcactttttatgaacctagcattcgcagaagatgtgctacaacctactgtgtttaaattgtccattttttacattactttggtattgcctatttaaatatttcctggggtatctgtgatgctttttattaatataccatttatccagcatgtgttttcaaaacgattataatgatattctgttattggtgcctcattttgtaccaacaaaaatctctaattgtaccatcaagatttcctgatgtcccaccccaaaacg

SEQ ID NO: 56970 - DNA, 1500 bp, Bovine  19866881675860
  misc_feature (1)..(1): n is a, c, g, or t
naatgcaaattttgcattttagaaatgacatacactacgtgtctttctattatgtaaaatacccaccctatcccacaaactggcataggacctatcaccaaatataccagtgtttctacagtgaagcatatggatagtcacactaaatgagggaaataaagactagaatagcctcggaatggtttgcttggttttgccagcaaatgtttgccacaattatattctcaatctttttacttcttagagctttggggattgtagaattgcagataaagagctgtgaacctagacaccccatacagagtttcccaggaggagaaagtttttgattctgacatttccctctaatgaacacagtaatttttggtctctttgggaagctagagtaatggggcatatgtaggcactgggtggagggatactagcaatgtttatcttccagattctatgcttaggtttttaaattttatttttatttacttaatgtgggatctagttaactcaccagagatggaaccttgggcccctattggggagcgtggtctctcagtcactggactaccagggaaatccctgtgtttctgttaaaggctaatgctaactcagattaccagggggaaaatgattaaagcattctaatgaaaaataaatcaactttattctctttaaagcaatccatgacttgttttgagtatagttaaaataggcaaacatgtaagttcttcctctgagtttaacgttatttaagaatatagtctttcctcttccttgtcctctacttctgcagttgttccgacatgttcattttaaaaggtccgatcacgtatatctttggtaatccaccttttaaaatgtagtcaaatgtccctaatgtgaacagattgaggccaggtcagctggaaattagtcagaatcatggagtagttaaaaataaatgcagctttattactttaaattacatccaacgattcaaagtcagctaagtatttcctggtaaagtcctcaggagatttgctttaatgaatacataagactgatctgtaattagaatatcactttgcttgagattttatatatgtatatatatatatatttctaaaaccatcaaggatggttaaaatggtgttttactcagaactgaaaacattccctttccatttggctaacactttaatttccctcattcttgggggaataaaagattttcaaagtaaaggtaagtctttagtttctcaggatgatcataaaaccctaggcagtagaatccagtcgatgagttctggggaaatgcatagcatatctatctcagaattatcctggaaacattaggtcatagatgactttctttaaaagaattttttccagattatataacacatagtacttatataactttttgaaaatatagagaagaataaagtaaaaatgtaatttacccataatcccactcctcagagataatccctgataacattctagtcattggtaagcactcttcat

SEQ ID NO: 56971 - DNA, 1587 bp, Bovine  19866881704180
  misc_feature (1)..(1): n is a, c, g, or t
ntattcttgagctcactggtaataagaactgagatccgggatgcgggaggaaaagatgaaaccaagacatccatagtgctttaacagagagataacacacaactcgggtaattctaactggaggtgaggaaataggagggttcagtgaacatttcaggaaagagattctcaaacataacaaccacacaatgaccaggctattactggtttgtttttttggcagcactgtgcaaggcatgcggcatgcaggatcttactgctctgaccagggatcgaacccatgccccattgcagtggaagaatggagtcttaaccactggacagccagggaaaccccagatccttactgttttgcagatagagagagcacagagaggccaatggcttgctgagggtcagttgcataagctgggtcaggacaaggccagaatctactttcaggcttcccaagtccaggcccgtgtgacctacctaccaaagaaagctatgtgagatcaaaggaaaagacatctatctgtgtggtagggtgggagggcaagcagaggggaaacacgaggtgactgtctcaaggagcaggtgagattcagtcacaggacaaccaagggcttgtggtgcagaacaaggtgccttctgaatgaccatttgagaaggcagccaatttctggtccagaagtaactctcctctgagaactgggtgggctttatttcaggaatactgatgccaaagcctgggttttgttacctgctttgaaatcactgggactatcccaagtttgcagtctggtttatctccatcactgatttgggacacagccatagaagcctgggaagggggagcattgtcctttcatttagccatgttccaaccatttttgttttgcttagcaaatgtgttaaacttataccgtatgttggcaactattacttcatttcaataaatcgtggttactagtgaatggcagttgggttgagcagaaaagtgtttgtttcattttattctaataaggaccctgtgaaatacaggtttgtaagtttggaaaggaagatcaggatgagaatggaggaggaaaagagaattgatattcattgagcaccagttacagagttcgaaaggtgttttcattttttgctgttatgaataatgctgcagagaataatactaaaataaaaatatttttgtcatgcagaaatattttttaattgttgattaatattgacactacctgaacccttcctacagcagagggtttctgaatgtctcctgagatagagcatatagcaatttgatactgagcatgaccttagtaatggtatccctttcaccccgcccacacacaacagagaccatgagcatcttttgaaaatacgtagctggggagttaataccacactctgcatccacctccaggctttcctcccttctgtcccccatcctatttctcccactccatccctgacggttagactgccccctgggggtccctggagctacgaccagtgagcctactgcctgagaacaggaaaggacttctctgctttcactttgggacttgggtttttccattctaacaataaagctctactcag

SEQ ID NO: 56972 - DNA, 1446 bp, Bovine  19866881977585
  misc_feature (1)..(1): n is a, c, g, or t
nctgtggagcgcggtcagcactcaccgctgaataaattagatcgatgaaaacatgtttcagagctgggaaatgacagggttattctaggcttataattttacaaagagcacaagttaaacaggcaccacggttcttcatgctgaaactggccaaaggatccatttttcccctcacacatcaggaaaagcaagtttcgtatttttttttcaactgggaatgttcagaatcaaagatgtcactgcaaaaatattaaaacacaagccacatttatccaagtaagcgtattctttagatttttttaaagcccagttacaagagggtagtatgtggtgctctcctgctgagaaaattatgctgttgctatatgcagccttgtcaaatatgtttccaagaaagagcatcatctaagcccgtgtgttgtatttcttgtaggtgaagagatagtgaagaaatacaaaactgatgcaatgctttaaaaaggcaaaataagaaaaaacaggctaaaattaaaatttgatgaatgcaactacattttattttgcaatggaaaactgcatatgccagagaaatcacccagggggtctaactttctaatcaacatcaagtattttgtattggccagaacaccaacccaggacgcatttttctgctttgctcaaaaaaacagcagactctcacttgttcactagatctggggggaggtcttgatttcattgtagctcctagtgccctgcgtaagacttaggggcctggggatgatgatctctgccatcttgtttttagatgtgcatgctaagtcacttcagtcgtgtccaactctttgcgacctcatggactgcagcccatcaggccgctctgtccacgagattctccaggcaagaatactggagtgagttgccgtgccctcctccaagggatcttccccacccaaggatcgaacctgcatctcttatgtctcctatattggcaggcagattctgtaccatcagcaccacctgggaagctgtgtttctaaataagtgattttcatataagcaaaataattcaagacaaaggctaagtatagaagacgaatagaaaggagaaagataggagatgatatcccagcatgaagcacaagaataaattatgagaactgagcattactcactgagtagtgacgtctcaaagaagcacgtgtccaagagccctctcagacctccttgcataacacgcaaagcagacagagacggcaggtatggcgtcccctgttcctacagcaaaaaatgaaaggataccctatgccaacatcaccaagataatacacataggtctcagagttccagtgagcctgggccgtgaaaacgccctctcctccgtgaaaggctccattgagactggccacaccttcatctcagctctgctaagaacatttatttagtcttcaacgctttacagactcatgg

SEQ ID NO: 56973 - DNA, 709 bp, Bovine  19866882134319
  misc_feature (1)..(1): n is a, c, g, or t
nttctgcctaatgttaaaactgtagttacagtcaagaatatttactggaaaacacaaagactgataatcacattctttccaatgtttgcacaatattaactttcccctcaacttacaaaatgggacccagatatctcaagtattcctcttcattgatatctttctcaatgatcataaaatataactatattattttggatgcttaacacaaacaaacaaacaaaaataactgagcatactaaacatgttacccaaacctaactttatagctgaaaattgggtagcttatttaaaaaaaataaaaagttgatttgaaaggcttcagcccattttcttatttaataatggtcgttcctcttttcttttgcctaagagactaactttcccaacagtcataactactattttcactttcccccattggctcaaaattacatgcaacaaagcctcttggcttgctgccagttattaatactgcaaggaccagaccgacgctgtaacacttcccagggcacaagactgcacaaagcagacagacgggccgtctaacgtcacggctgagcttgattcccccttgaaaacctcggtgcacctctgggtcatgtaggcaggcacgtgctgcccggatgatggttcacctctcagaaacaatttctgagcctttccttttcacccaagcggagtcgagcttgctcgtgacagtacgggg

SEQ ID NO: 56974 - DNA, 1548 bp, Bovine  19866880346202
  misc_feature (1)..(1): n is a, c, g, or t
nctttcctttgtggctttgatgtgaaacaatctgcctgcaatgcaggagacctgggtttgatccctgggtggggaagatcccctggagaagggaatggcaacccactccagtattcctggctgggaaattccatgaacagaggaacctaacgggctacagaccatggagtttcaaaggactgaacacgattaagcgactaacgctttcactttctttcatatttgttaactttatcaagtgcaaactttttatagttgatagtatttattttattattattattttttactttacatcatcaaaatctttttcttttatatcaggtattaatattattctttagttcagtttggatattcttttaaaatccggtggaattcaatgtagagttttttatgacaaaattcaatttgtaacattcagaaaacaaagatcatggcatctggtcccatcacttcatggcaaatagatggagaaacagtgggaatggtggcagactttatttttgggctccaaaatcactgcagatggtgactgcagccatgaaataaaaagatgctactccttggaagaaaagttatgaccaacatagacagcatattaaaaagcagagacattactttgccaacaaggtccatctagtcaaggctttggtttttccagtagtcatgtatggatgtgagagttggactgtgaagaaagctgagtgccaaagaattgatgcttttgaactgtggtgttggagaagactcttgagagtcccttggactgtaaggagatccaaccagtccatcctaaaggagatcagtcctaggtgttcattggaaggactgatgttgaggctgaaactccagtagcttggcctcctgattcgaggaactgattcatttgaaaagaccctgatgctgggaatgattgaaggcaggaggaaaaggggacgacggaggatgagatggttggatggcgtcaccgactcaatggacatgagtttgagtaaactcagggagttggtgatggacagggaggcctggcatgctgcagtccttggggttgcagagtcagatatgactttgcaactgaattgaactgatcttagttgtaagttaatgagtaactagcatccaacttaatcattttatttttggtaatttttaatttttattctctttcagcatagtggagagtttacagtctctctcagtgatatcatattgacctggaaatactttctacatgagaaattaaacttaccagttgaaaatataaaagtgattgaccattatgaggacatcaggaagatttatgatgatttcttaaagaatagtaacatgttagatctgattgatgtttataaaaaatgtagtgatttgacttcgaattgtgaaaattatgcgaacatatctcctgtaagtattttttaaataattctgtcttagttgaattaaaatttggctagatttatttttattttaagtgatggtattagcatttatagtaacttgataatgcttttgctttttggatcatgttaagaatggaaaatttag

SEQ ID NO: 56975 - DNA, 1025 bp, Bovine  19866880493741
  misc_feature (1)..(1): n is a, c, g, or t
nctttgtttgtagtgatgctttctaaggcccacttgacttcacattccaggatgcctggctttaggtgagcgatcacaccatcgtgattatcttggtcgtgaagatctttttttgtatagctattctgtgtattcttgccacctcttcttaattatacaatattaaaaatggagttcttcagtagcagtagcacatttcaagtgttcacgagacatgtggctaacacctacaatactggacagcaaaaactacacaacattcccacagagagttctgttgaacactactatgtaacaaagctttacagtctatttcccatggtacatacatgaagggcagatggattttcaaaagactcagggacattttttagttttctgggtccataatattggaaccaagatgtagctttacattgttaaaggatacatctgttcctcccatctttaactactacctgatgtgaaagggccagttaagcttcagtaaacactacaatcgttatatcttcaaatactatttcaatcctattttctcctctcattctggggatccaattaggcatatgttaggcacactctgtgttcttatcttctcttttgtttttgcattccttattctctccttgctttagttcgtatattattctaatgacctatcttcatgtccacctgtactacctaacgctatgtctggtttactattaaatttacctaattattaattttagataatgtttttacagttctggaaattctatttggttttgatttaaaatgtttggttctcaggagttccaggtggtctaggaattaggatttggcgttttaactgctatggcctgagttcaaaccctggtcagggaactgagatcccacaagttgcatggcatggtccaaaaaaaaaaaaaattcactgttagaatttcccaattttatccaatttgcccatatattcctttaattacttttaagtgttgaaggactctgtctttcaaaggtttttacattggttcttggtctcc

SEQ ID NO: 56976 - DNA, 1321 bp, Bovine  19866880569237
  misc_feature (1)..(1): n is a, c, g, or t
naaataaatgccttactctgaagaatccaattaaaaactgactgtgattgcatttgatctctggaggaaggtgactcaggtctgggaagaaggagcactgtactgaatctaatccccatgccatgttagagtgtttacaccagcttgagtggttgtgatggggtcgtctgcatcatttggttcttgtcctctgactcactgtttctgctgtggggttaactccctgcagtggaaaagggggaagttacttgccagaccatatggagcagagaatagcagattgacttaggtttcggtggaagctgaaagcatataaacttaagcctcccagaggataaccttggaaaattcgtttaaatagcatcctagtagaggtgtctaattttcaaaatctatcttcaagccttaagaaagtttccaaagttactttatggaaaaaggttgaatgaggacaaattgtagaaggtatgcagtttcactgcctttgcttacgttttcggtttagagaagctggaaaaaaagaatgcctccctgtgatttgctgtaattctgcctgggctcggaggtatgaccatgtccatgtgtgtataggagattcagggatttcaactctgttaaacctgggttcctataggcataactagaccagctaatgttaaagaatttgaatgagccaatgaaattggaaaactggaaatgcatgtatttccaagttggattagacaagactcctcctggtacataaccctgacaacccatggatttgttaatcgtggccttaaattcacagtgtaccttgaatatatgtagaactgttatcagttcagttcagtttggtcactcagttgtgtccagctcttggcaaccccatggcaaagggaggcactccaggcctccctctccatcaccaactcccggagttcactcaaactcatgtccatcgagtcggtgatgccatccagccatctcatcctctgtcgtccccttctcctactgcccccaatccctcccagcatcagagtcttttccaatgagtcaactcttcgcatgaggtggccaaagtactggagtttcagcttcagcatcattccttccaaagaacaccctggactgatctcctttagaatggactggttggatctccttgcagtccaagggactctcaagagtcttctccaacaccacatttcaaaagcatcaattcttcggcgctcagctttcttcacagtctaattctcacatccatacatgaccactggaaaaaccatagcctcgactagacagatctttgttggcaaagtaatgtctctgctttgaatat

SEQ ID NO: 56977 - DNA, 1490 bp, Bovine  19866880659906
  misc_feature (1)..(1): n is a, c, g, or t
ngatcaaaccctgcatctcctgtctcctgcactgctggcagattcagctgagccatcagggattcccccactgaaaagggtatttaattttaagtggtcactgaacttttgtaaagtagaatttgcaagcttatggagaaatactgttgtatctgtgtgggaattttctctagcctctgaactgagcacaatgattttaatatattaaagtgtatataagtgtatcctgttcttaacacagaataatggccccaaggacatctatattcccatactttttaggcaggaaccacccctctatgaaaagtctcattcaaggactggattgtgtaagtaagtgttagtcactcagtcgtgcccgactctttgcgaccccatggactgccgcccaccaggctcctgtgtccatgagattttccaagcaagaatactggagtgggttgccatttccttctccagggaatcttccctgacccagggattgaacccaggtctcctgcactgcaggcagattcttaaccaactgagctacaaaagtctcattcaaggactggattgtgggggatactcaaatgatgaatagtaatttcagcactcaggtagttcatgaccccaaagtggagccctaaggtttaacacgatcctcaagtagtaaaggaaactgatcaagaaccttttggttttagatgactgtcccacttccttgtcctctttttctcctttcttcaaaccaatttcaagtcatgcttcccatcttccttcccactctcttttttagttttttgttaagacaggtgtccctggatctggtgcctaacctgtcactgggttgtgtgtgcacactcagttgtttccagccctttgcgatcccatgaactgtagcctgccaggctcctctatccacgggacttcccaggcaagaatactggagtgggttgccatttcctaatccaggggatcttccctacccaggcatcaagcccatgtctcctgcattggcagacagactcttttaccactgtgccacctgggtcattgggttacttgatccttaattcacaactcatttgcagaaagtatttttacttctatcatgatatttgatgcccaagttatgtttctaggctacctcccaaatcatctttttcatcaagcaatgtaacataattttaatagaaactgaaacagtatatatttaaaatgcaatccttagggaaaacataaccaacttcaaaatttaaaaagaaaaaatgtttttgtgaaatcttggaactgcttttgttgtttaatcacaataaaccttactgaactatttcacaaaacctccagaaagttcattcagcagagatgggctgtaagaactgactgtaatagaatcaaagaggatttaagctatgtcaacagagtaactgggggacaagcggtcatagtacatgattgcatacaccgtaattcttactttactcatttgttaccttcttaagtgcaag

SEQ ID NO: 56978 - DNA, 2832 bp, Bovine  19866880745487
  misc_feature (1)..(1): n is a, c, g, or t
nctggactattacagtctcttaatttgtggtcctgtgtcccaggtcgctcagtggtaaagaaactgcctgccaagcaggagatgtgggtttgatcgctgggtcaggaagatctcctggagaaggaaatggcaacccactccagtattcttgcctggaaaatcccatggacagaggagcttggcaggctacagtctccagggtctcaaagagtcagatacaaacttagggactgagcacacatgtatgctccatgtttaataacagtcttagcctggaatatattttatacattgccatcattgctatcttttttctaaaatgtaagaagtatcattttatttcctttttttaataaagtaagaggttttaactttgtaacagactgacttgtaacttctttgtcccatatacaaagctttcccagcctcatcccacatgactccctctatgttacccttctttgctacctggtcactgaaaataccatattcttccttacccctgtgtgtctcctttgtgaaaccatccctgataccagggtaaattggtgtgcttcctttgatgtgctcctactgcataaggtatacatggtcttcagaatagcacttagcactctgtaatgcctttattgattacttgtttattttgtcaaagagactacgggtcccttgaggtattggtttttacctttcaaacacagttcttgggacttaggatgtacttatggctgattactgaaagaatgaaggtcaactagtctttttatttttgcatttgagtagatctttacagccatctgtggggttggtattcaggtcaccagaatcccacttctggtataagagagaaaaaataaacagattaagtcatgtggctgaagtcacatttgttgttgttgttctgtgctcagtcatgtccgactctttgagaccccatggactgcagcccgccaggcttccctgtcttttactatctcccacagtttgctcaaacttacgtccattgagtcagtgatgccatccaaccatctcatcctctgcagctcccttctcctcctgccctcaatctttcccagcatcagggtcttttcaagtgagttgactgttcacatcaggtggtcaaaatattggagcttcagcttctacatcagtccttccaacgactattcagggttgatttcctttagaattgactgctttgatctccatgctgtccaagggcctcacaagagtcttcttcaggaccacaattcgaaaaagtcaattcttcagtgctcagccttctttctggtccagctctcatatccacacaagactactggaaaaaccatagctttgactatatggacctttgtcagcaaagtgatgtctctgctttttaatacgctgcctagtttcatcatagcttttcttccaaagagtaagcttcttttaatttcatggctgcagtcaatgtccatgactttctttgaagcccaagaaaataaaatctgtcgctatttccattttttccctgtttgctatgaagtgatgggaccagatgctgtgatcttagttttctgaatgttgagttttaagccggctttttcactctcctccttcacctttatcaaaagactctttagttccttttcactttctgtcattagggtggtatcatctgcatatctgaggttattgatacttctcctgacagtcttgagtccagattttgattcatccagtgcagcatttcgaatggtgtactctgaatatgttaaataagcagggtgacaatatatatagccttgacatagtcctttcccaattttccaaccagtctgttgttccgtgtcccgttctaaatgtcctgttcttgacctgcataaggtttctcaggaggcaggtaaagtggtctggtattcccacctctttaagaattttctgctgtttgttgtgatccacacagtcaaaggctttagtgtagtcagtgaagcagaagtagatgtttttctgggattcttttgctttttctatgatccagcagatgttggcaatttgatctctggttactctgccttttcctaaatccagcttgtgcatctgaaagttctcggttcacatattgtgaagcatagcttgaaagattttgggcgttacctttctcggtcacataaattgtagttaaacttcttgacgtaaatcttagtgttattttgtccaaaatctaatgtcttcatttgataatattattttctgtattttttggtgcttctggaagctcataaggtagattttaatatggctcgagggagaaatattcacaagccttaaagccacttcttgtggctgattttttatagcttaatagaagaggagggataacaatagcacatgaaatggaaaagaatggttgattgacccagctggagtgattcttacatttacttgaaattatttcttgttctagccaaaatctcataccataaaccatggcactgcatactgtggcagagatactgtgaaagctttactagttcttttggatgaagaagcagccagtgctcctaccaaaaacaaagcagagcttttgtatgacaatgaaaacacaattcatcctaatggaacttctgttcttacactttttcggtaagtaatgtggaagttatatatatgtgaatgttaggtctataaaggaaatttttgaaaaagcccctcattggttataaaagaattacatgttatggtaggaaacttgggaactacagaaaaagtgtgaagagaaaaaacaaaagttagttaaagggagatttaacatttgaatgtgaggaagtcatatataaaatgctattt

SEQ ID NO: 56979 - DNA, 3458 bp, Bovine  19866880783822
  misc_feature (1)..(1): n is a, c, g, or t
ntcttgtgaagctcacaaacttctttaatcccaactctaattcacttcacttcactgagaggacagaaattattcaacataagtgttctcaatgaatcctgttatcatctaagcccctaaaatgggactctcccatttccctaccacagatgaggacatggccccatttttttaaagccagcatagctgtattcataattctctgcaaagaggacatttttgctcttttttctctttacattcatgtaaaatgtctgttcttttctgaatttaaattaatgccttggttctgtgccttgcatctccccatcctctgctccttcagactaagaaagctttctcaagatcttaaagtatttccaaatatagaaaatttcttcttggttctggctgttagattaaaactattaaaagtccacatgaactaccgttacatattgcatataggaaagggaacagaaacactagatcttagttaaaatcattcttcaactgaagccaaagctggaaatgcttctgaaggttctttatctttcacccactctatttgcaaacattcttgttcacattcactttctcagtatgcacctttattaagacagatctaatcacaccccagttcagctcaagccatgagagtactccacaaaataatgttttctataatgtcctcatgctaactctcgtatattcacccagatgccaccctgatcatatccatcccataggtatctaggtgcagtgagtttaagcctgcaattctagcctgagttctccccaagatttcttcaaatcaccaagagttcttatggtctcttctgctcagttctccattatgtcaattcagaagtgaaattcagtctcttcattaattcccatagaaaagcctccattcacataaactacagcttagctgaatacagaaggaccacaaggaaggatcatagcctgcacccagagcaaacagcttcacatcaaccactcctcttcaccggggtcctttctagtaatcccaccaccagggatttcccagttggctctttacataatcagcactttacttcatgtctttttgtaaattcccctctattcttactcttttccctctccagaaaactcagaccctggaggtttcatttttcccctccaaggtattttttccagacagatactgcttcttccttaagaggaattccaatgtaagctgttaaatttagattagaatctaagttaatttttgaagataatttaataattctagtcttgtttcttttgttctttgaatgaggaaacagaggcctagaaatcttaagtgccttgcttactttagctcttacaacactatttacagagaccatctgattcagaaacatgtgggtggtttttataaaaaaacactaaatttgaggctgcaccttccatctgctaaaccaggatctactgaagagctccccaaataacttttaggcacacaaagtcactgccttagaatttaaggactgggcgggggaggggggtacaaaaaaatactaaagctgttaaaatttaattaaatctgagctgtaagaatgacagtttggtttcacgcagcacctgaaaagaccttagacaattttgacacaggacaaagtaaatactagtgtcacttgagcggaagtaacagcggactaggagtcaaagctaatgtgtaaccttgagcaagttacttaacatctctggacctcgggttcctaggggaaaatactgctttccctacttaacgccaaggactatttgaagggtaaaatgagatcatgtatgtgaaaacacttgtagaaggaggagaaaataaatagctctctacaactgctaggtattgtttcaaagtcctacttgggcctggaaaacatcaatcttctgcctgttaccagtgtgctagtaatacaggctatggagtttctcaagaagcccgcaggatccaagttaggcagctcattgctcaggctgagtagccagagaggggaattcttgattcaaagcagcatctgttagtgattaaggtttcagaggcatgtgcctgaactgaaggcaatgctacagaattggtcatagcagcagtcccagttgtaaaacagattccatccttaaagtggatatgaaaggtaaacatgaaagcactattccacagtcacatgaaacaaaaatgatgcttgtttaacatcccccacagcacacgtgcaagcacacacaacaggaagcaacagccagaggcttatgggaaagaacgaggttctcccaagcgacagccaccaccatcaaactcagaagagctcacttgcattctaacaactgcacataatgtttgcaaagtggatatctctgccattcactctctgatgctctcttccttgaaaactcaagtttgatcaaattggcaaaaaaaaaaaaagaatccccatatccaaaaattactatgaattctgtctgtgtcagagatctgactatagttaacatgaccatgttcactgtgacttagaagacaggatggaccttgaacaaagtccgaagatctgggcctggtgtgaagagtgatcttaggacttctaggtaggctgggtgagaaattctgagagtgtttgggatagcggtagaatgagaccccaagatttttattaatgttgttttgggaaagtgtgcactatctataaaagtggatgtagtgtgtgcttgagttgaacttagaaagcttagagagaggactgttaaaaaatttaaagaaaaagtcaagatgagcagtttaaggtgagtcagaatttactgttcaggctataaatttcagttgaaggtacatgaataagaaacatgatgtcccacaccaggggagagtcctggtttttatggggaacaccttgaacatacccagaaagtcagcaacttggatgacctggctggtttaagttcagcctttctggaagcacttgcgaaaaagcagggagagctgtacccaaggccaaagcaagtgaccaataagaaaacagaataagaagcaaaaaactgggactttcctggtggtctagcagttaagacctcgccttccaatgcaagtggtgtgggttcgatatctggtcaggaagctaagatcccacaggcctctcacccaaaaaagccaaaacataaaacagaagcaatattgtaacaaatttgataaagacttgaaaaacttgtctacattagaaaaatcttaaagaaaaataaagtgaaagtgaagtcgatcccacaggcctctcacccaaaaaagccaaaacataaaacagaagcaatattgtaacaaatttgataaagacttgaaaaacttgtctacattagaaaaatcttaaagaaaaataaagtgaaagtgaagttgctcagtcgtgtccaactctttgtgaccccatggactgtagcctattaggctcctccgtccagggattttccaggca

SEQ ID NO: 56980 - DNA, 2564 bp, Bovine  19866880787800
  misc_feature (1)..(1): n is a, c, g, or t
ncatttaagattacaagatacataaaaaatttttttgtattgtttataaattcagctagtcgttaagtcataataacatacctatttatttttttggctgcaccatgcggcatgtggaatcttagttcccctagatcaaacccagtccccctgcagtggaagcatggagtcctaaccacttggaccaaatgttagggaatttcctaacatgttcttttaaaaaaggtaatgtgagaatatcctgcatgctacaactaagatctagcgcagctaaataaataaatggcaagagtcacttagtatcaagtacaagttgaaccatggtcttgtttgattttgttatgattggacccaaattccgttaaattcaaagttctattttatgatattaaggtataagaactcaattttaaaaaaactactcactgtcaaaatctctccttcctataggaaatttagctgagttttcttcatccccaatttctcttttttcttgtgttgattcagtattttgaactcattctcagctggaaaagctacagatccttttagtgcaagataaggttttatagccagattcagtggcaggccatgatttaagaaattatgtttggaacctgcattctgtaaagaaaaggttgatttgtgttttaactgttctattgggaatggaactataatacaattgtgtaatattcttattgatcaatttaaatatgccctgcactgtttttaccctttaagaaatactttagatacaagattttcagggaataaaaactttttgaatgagagagatttcccagaatggaagaacaacctggtatgtatgaaatttgtttaactgttctaatgcatactgtaactttttttcacgtgcttctgcttataaaagtatcaactttactttcaaaggattcataaagatcattcaaatttccattgaaataaaggacaagtcgcattatcacttaaaaaaataaataaataaataaataaataaatgaaataaaaaaaaatctaatgctagaggcactgtaatagttataaattagaggcaaagataacttagatcttttgcaggcaactacttctaatgcaatatgaaggacactaaccacaagacttttatcactggaagtgatttgacaacatttatcaaagtttaaaaaatgtgcactgtcttgacccacccaccactgtatccaagtatacaatgtatcctaaggaatttgcaggaactttgtattgtcatagcattgcttaatagttggaaattggaaacaatgttagataataggaaatgggcacatggatataaaataatatttattaagatggaaatatgtgtactaaatgtcaagttaaaaaaatcaggttattgaacaatgtgtatcatacaatcctttttaaaaaaataaaacatgtttacataccaactgatatggcacaagatgttaaataagaatggtttttctccaggtagtggaattataggcaattattatttgatgtgtgaatgtgtatttttctgtttagaaaaaaataagggaatcatgggaaaaagtaatttagtaatctattcttaaccaaaactctacatcctacaattatacaaaggtgcctagtatttcaaaatattgcagataaactgtacttaaaattgcatgttaaacaagatatgttaaaaataaagcactgtattgtaaacgaaccaggctgacccaggttatactcttaatgtatactcttaatgtcatttaacctggacttaaccccttaaatcccaattaagcaaaaagcaaagcatggggttactaacggaaccagcaaacaatatttaaactctgggtacacaccagaaaatggcaatttaatacttagcaaaatatatgtcccttcaatttacattttacccattctgatattccagaagtttttccttgattaatctagataatcaaaatggtttccttccttatttgaggaaaaattgttcttcttagactacaatgtggcattaagccaggaaattcatggttctatataccataaatgttgacaataaagctcattattttagattaggaatagtcaaacttctctcaagaaattgaagtcctcttaaacaataaattagtaattaacggattggttcctgcttgctgttagttgcaaggatgttcacagacaaacttgtgatatgctcctctcccccactcattctctaggaagtatagaacggtatgtacttttccctttttccaatcatgattcatcctaccatctttacttctgaaaacagagataacatcatcctacacttaaggagatttggggattaaatatcgaagtactggtaccaacacagtactgggaccatgtttaggggctcaaaaatactaatttccaatgacagtctctggacttgcaaataacagtttgatgtactcttgcttgcacaactgtctgataatattcaacacattccaaactccctcgatatatagaaataaccaaaaataaacaatcagatattttgaaacggaataataagtatccca

SEQ ID NO: 56981 - DNA, 645 bp, Bovine  19866880846598
  misc_feature (1)..(1): n is a, c, g, or t
ntgataaataactttattgtaaggaattgaagacaacattgaatgatagagaatcatgaagttagtctttcagagaaaagacagtgaagcacaggagaaagagcataaagcaatcatggatggatctgaacaattttggatgaaagtcagatttctaaaaggtagttcaagcagaaaatagaaaagatcaaacaggtcaattttgtaaaaatcctttacaatgtactaaatacaattttaaatggttgttctaaaattttaaatgtttctataaatgaatattcattaattaaaatatcaccaacttactcagtgttttgactaaattgttaaaactggagagtaccataatgtcttgtacagaataccaaaggtaatttagtattttcttcctaatgtgaggaagaacaagtaactgtcaattccagtgcaagtctggagtatagcaactctcctattctcaggcaaaatagcacaatccttggagcagagacctcaggttctggagaaggacacctctgccacttgctaacttggacaaattgcttactatctttctcaagtctaattctttacttataaagtggggatactactaaaagagactcttgtggaggttgatacaagtgaagcattcagcaacat

SEQ ID NO: 56982 - DNA, 1287 bp, Bovine  19866880876076
  misc_feature (1)..(1): n is a, c, g, or t
ngccgtgtctacttctctattgtgtcttccctgaccctcctatttctaaactatgttcttctcttttgaatttccctgctatggcatctgtccttttttactttgaattttagttatgtgtatatcttatttcgcttaggtcaagattcctgaattcagagtcagtgaatgagtgaactttctgttcttcacaacatcttatacaatgccttacatataatagaagctcaagtgtttagttactgaactaattaattaagcaaattattagaattaagcaaatttagaactctcagaataggaatatgaacactttttatatagtactataaaccactaggttcagaataaacttttattctctaactgtagggttgaggagaggtgaaaacaaatttaaaagctactttggtttgtaaatgtttactttttttggatgtagatctcccacacaagtggataattcaccaatgaaacccttaagagaacgcatctataagtcaatggaagagaaaaaaatcaaggtacaatttaatgtactatcatgaaaatgataaaaatttgttttgcttttagaagaaataaatatataaagctgagctggatattataaatatacattatacatggaactatagggattaaatggaaaataaattatgacagttgatatacagaaactttccttttaatacaatcttggctaatctgtatctgacgtattcaataccctggacctaaaagaaggaaaggaataagcacctgctgtggtaagtggtcaataaatatctgttcagtgaatgaaggggaaaataaagagaacatggttttctcatttacatttctcatatcttaaactgagtcttgagagtctgtgtagtttcaattttgttcctgtctgaagacataatggcagaatgtaattgattgtagattgagacaaggagaacatttcacattgttcattcactaaagctattctttatattttcatttagcatccctgttcacatatgaaacattgtgcctatatgtagttaataacatgtttttaggcatttaaatttttcttaatctttgtctcaaaaagaagcttatttttaactcatttattcatttaatatatatatatttattgagtatctgctatatgtcagacactgttctatggttgggaatttgttcatttaacaaaattttcatgtaaaatttacagttatccttaaattatcaaataattattcatctcttaataaaacttgagaactctaatttgttcttcgtatt

SEQ ID NO: 56983 - DNA, 766 bp, Bovine  19866880977378
  misc_feature (1)..(1): n is a, c, g, or t
naatcttttgggggtcacagaaatgctatgtattactagcatctaggttataaaagtacatgtatttgtcaacactgatcaaactgttcctttaagaattgagtttactgtatgtaaattattccttaatttaaaaaaattaggttagctcagtaagagctaaattatgattgttaaatactgtttactaaaagaagacatacattttagatttgacatttatggaaataaggttagtgttttgtaacagaccttaaataacctgacatatcattgcctttgtgaagaaggcctcagcaagtgtgttaatttttttctcaaaaagcagtcattcttttcaaatgctttccacaaaactgaagcccaaggattagaactacagttggtggctcagatggtaaagcatctgcctacaatgcgggagacccgggttcaatccctgggttgtgaagatctcctggagaaggaaatggcaacccactccaggattcttgcctggacaatcctatgaacagaggagcctggtaagttacagtccacggggtcacaaagagttggacatgactgagcgccttcacttttctttcctcattttatgtatggggcagtaagggtgattaatgactcaatcaaatttagttattttaacaaagctgcactttcaataagtggtaaatcagtgaagaatttatgattcataggaatctcacataaacagctttgtagtcaggctcaaacacatgcttcaaggcatcactgttacgtc

SEQ ID NO: 56984 - DNA, 1142 bp, Bovine  19866881106397
  misc_feature (1)..(1): n is a, c, g, or t
ngaactgataatcttcttccttcaccacttcttcaattcttcccatctgaagacttccctcttttaagtatattatataaagtccaagaagactttccttaccactccaacctagattcatccttctttcatctgaacatctctcaacccttaggtagaacttattccaaacactcttacccaagccaactgtgcaaaaatcacttccggttataaagattaaaaatttgcttaaaaaataagacaatttccagggtctcagtcaagatcaggaaaatcagtgtccaagattagggcacagaagccagtactttttaaaagccctcccaagtgattctgcttcacagcctggcttaggaataattaatctataccacagagtctgaaattagtcataaaatacttgattacatttaaataaacattatttatgtgtgtcttctagaactttttgcagaagtcttataaaaataatttttaaccataataatcataatagttgtatgtttaccttaaaattggcatcaccgactcgatggacgtgagtttgagtgaactcagggagttggtgatagacagggaggcctggcatgctgcgattcatggggtcacaaagagtcggacacgactcagcgactgaactgaactgaactaccttaaaattataaattaaacatcaaatgtgcacgtcacacattaaattatacatataaaagcttcacttttgacaaattaacaaatcatttcaaatccaatggcaatattttgacacagacacacagaggcatttgtgaatatagtataatgacattatcatagaagggcacatattgctcagaaattaatgcaattaagcttattcaaatgggcagcaaccaaaattcacttttaaaaaaaagttaacctaaatacagtctactaacctgtttgttgttctctgccatggaaagctgcaatgccaagagcatggagtctgcaccacacacagtagttctctcagagttacaaagagtgtgccagttccttctgaactctttaatcatatccaagatagacttctgattaagcccagccatgctcttaatgtaggacagaatgcaatgttaaaaagccatattttaattggaaattaacatttaaca

SEQ ID NO: 56985 - DNA, 1098 bp, Bovine  19866881274979
  misc_feature (1)..(1): n is a, c, g, or t
ntgggagggtcttacacatttttttaaaaataaatgctttattattattatttttttaacatagaggaagcttggtggcagatctgtagccacttgatgtttttataactaagaattatagttcaggctctctctgctgtagaatgtaaaggtgcactaacacacatatatgtaattgttaggaaaattaagcttagtcactaaaagaagactcgccatctgaactttcttctgtgtttttttcaccttcaccatcaggcactggatcatctggcctctcaggaaaatctgggtctagtccttccgataccattttgtttcttatcgccgtcactggaacacccacttgaagcattttgagatatctggcatatcctggatccttggctacagttaagagattttctggtgttacttcactttgctgtggtccagagtcctgcaaactgttctgctgtgattgctctcaagtggcttcagaatgtgttccatttgtgatcctagtgacatttacaggagatgcttcaagtgtgacatcatccaggcctgggatagatgataactttgcatctaaaatattgagagttgtttcagtctgctggatacgaagagaaaggtctgctagtttcttctcacaaactagaaaagcggttgaggaactgtacagtgtgcatcgcaaactcgcttagaaatgccaccgttcttttctgttgaatagctggcaccttagtcaggcctatgcctgagcccatgagaggaagcccatcctcatccgtctcctcagcgggtgggggacccaggactcaccctcaaacccctccccagcccagcccgcccaacccggtaatagcgtccgaacgcctctcctagtcccctcttacacacatttaaacaataaggaaaatacatgtttgataacaagcagaaagagaaggtacttttaaaagaatgaaaattagaaagattattgtcttttctagtaacaaaaaaagagcttggtggatgtggaactctaacatcaagaatgagagagagacagagacagttcgttcttgaccttgccaaactgcccttcatgtgggatgcaacagactcata

SEQ ID NO: 56986 - DNA, 941 bp, Bovine  19866881765208
  misc_feature (1)..(1): n is a, c, g, or t
natatgaaagaactgatgaacatatcaagttctcccaaatattatttttatattgtgcttcaacagtctatagttctgtgttttagggtagttaatgccaacaacagctacttgctattatttgctaacatttggttgaatctcttttaatactcagttggtttcttggtattatgaaagtcagtatcttgtaattcttaaaaaattgagcaagttaacttcagcccttatatcttgccctgtaaagaggcatgggtataggaccaaatagtgcccataggcccgtcccttatgcttcaggggacttcattattggttactatttagtggcaaatgtatgtaggggaatgagatcaggtctcatcagaaatgcagctgtaccttttatatcatttctaagaagacattttccagcaattatgatagttgttatttatagattttcattgatggcaagttagtttcattagcaaggatatgttctttgttcaaaccaaatttttggtttatatggcaattctcatttcccaaagagctgagtaagcatttgtcattgaatgatcataagtattttactgcatattaaaaagattatttgtgaatttagaaatcttcaataaaggaaatattttattgtacaggtacagttactagcaaagaaaattatctactcatatttaaacctgctagtgaattcgaagaatgacttggctctggctcatattctcaatattcctgatagaggacttggaagagaagccttcactgatttgaaacatgctgctcgagagaaacagatgtctatctttttggtatggacatgttatattttcaagattttttagagattctgaactgtggatccatgtaccttaatgtagagttcttgtaactatgatataacaacttttaaattgtgaatatgtgttctacctcatgta

SEQ ID NO: 56987 - DNA, 876 bp, Bovine  19866881078777
  misc_feature (1)..(1): n is a, c, g, or t
ncattaaactatactttgttttcttaagaaatccagggaaaatacatattacaggtttggtggtgggagctggtgggagaaacaactaataaaaatatgaacacagtgccccttagggttgtttatgtagatcacttaattacatatatttgagtgactttcatattaaaaacattaaccaaataatatttttaaaataagatgattctttcaagaacatcagatatgtttttcatacctgatttgtctttatcctatatatataatcaatatacagcttctcttttcattctatatcaccaaacccttattgaaaagctcattgtattcaaaataactccttttaaattgcttgttatgaggcaatttaaaatcatttcttgtcagtcaactgcataatgcaagctccctctctttgagagaatggtgttatatatccaaaataatctccaaaaacataatcaaggagaagaatcactttgaaaatgctgcatgctgtattcatcaaagtataggccagagatatcctcagttgattttaagaccattgaattaatggcagtttcactggactgggatatttgaaagttgaaaaatcttatcaacaagacaagcttagatagcagcagcaagctgcaccaggcttaggtatttaggagaaaactctaactggcaatgtatcatgaggaacattactcagtgtcttagggtccccatttcttcttgggctatatgaaggatactatacctgactaaccatttcctagttttctttgaactgcaagtttccctgatatatgagagagttaagagtatgtggctacagtcattatttataaaaattacagaggaaagaacaacctatttttgatgcaa

SEQ ID NO: 56988 - DNA, 1459 bp, Bovine  19866881094137
  misc_feature (1)..(1): n is a, c, g, or t
natggcatggtcatacatctttttttatatatattgatattgataactggtggctcagatggtaaagcatctgcctgcaatgcaggggacctgggtttgatccctgggttgggtagatcccctggaggaggaaatggcaacccactcccccactccagtactcttgtctagaaaattacatggatggaggaacctggtaggctacagtccatggggtggcaaagagtcggacatgattgagtgacttcactttctttctttctatggctgtattgtggcaaatggtataagatgcataaatggagagagagcaaagaagagctgtattagcagttgagctaatggcaaattagagcttttgcttatttttggaaaagggatggatacatgtagaggtattaaagaaaatcatagaatagaacgaacttagtaacttactgaagtttaaagagtgaggagggagaaagcagttctgagttctggtctgtgcagctggatcattgctgtcaccattctgtgaggtcaggaaacactgcagataaagtatttttaggaaagtcatatcagtgtagtatgtgtgcttatgtgctaagttgcttcagacgagtccaactcttcgtgacagtagcccaccaggctcctctgttcattggattctccaggcaagaatactggagtaggttgccatgccctcctccaggggatcttcctgacccagggatcaaacccacgtctcttctgtctcttgcattgacaagcaggttctttactactagcatcacctaggaagcccatcagtgtagtatagactgagtttgaaaactgcaagcaagtggagacatttagtaggaagctggggttcagaagagagggctcaactgaagatgtaaatgtaatatgtccaattgtcactccaaaattctgtgatcattaagtgttttggagaagtgatatctagagatatgctctaatattttcttccttcatgcaaatgaagccattgtttttctctttctcctccttcttccataaccacaccagtctcctgcagagactctagcccaaatctgaataagcacatatctgtacccattgctaaagctcagaaggattatggggctatggaatgctggttctttcagtgttctggtggttggaggctccaagtcattcaaattaggtttatcaggtgaccaaagaaagaaagaaactgtaatgagaagggaatccagcaaagactgcaaaggctatatgatactgatttggttcttctccatgatcctttcaaacatctataaagtataattatcatgatgtgcaaggtctgaaagaatttgtggtataaattgggtagcaaacttaattctgtgccaggtttgttgtggaagaacatgattaatacaaaatatggagctcagaagagccataggaaagttaatatgagaactgttaagaaatg

SEQ ID NO: 56989 - DNA, 1290 bp, Bovine  19866880186416
  misc_feature (1)..(1): n is a, c, g, or t
naagtcactcagtcgtgtccaacttccagcgagcccatggactgcagcctaccagcttcctccatccatgggattttccaggcaagagtactggagtggggtgccattgccttctctggggaagaagcacaggtgaagggaaaagattgcctcgtatacagtcccagcatttgaaatttatgggggaaatgttgatcaggtagtgaagttggctagactttgttaactatctaggaaacatgaaaaaggagaagttcatgtcactcaaatattaacttagggattgttgtgacaggcacatgccctctgtcgaatatttaaagagaccttcatcttctgcagctagagggtgggatgtactgaaaatcaggattaatattagattgcacagatggcaagagttaggaaggagctgaataaataggcatgacaaatctctatgctaaaagtagtgttctgatgaaagaggagatggaaccatgaattcttgggtggagatcctgagctcctagatagctctaaaccctatgggccagcaaaagaaccccctagctctttgtgagagtaggtcagacataaattgcttagaaaccatgaaaaggtgatgattcacaagataagcttgttctccttaatacaaaacaattcaatgtctcacttcattgattgtatttagacttggagcctgtcctgatacactgctggaatgataccttgcagcctggaaatgatgcttccactgtagcagtgctcaaagggtagtctataactctgtagggatcctagagagcctttcagggagtttataaggttaaattattttcataataattctaagattaattttgaatattctgtttgttgacatttccactgttagtgccaaagcaatagtgtatcaaagtcaggtgttttagcaaaaatcaaggcattgacaccatactgtactagaattctccactgccaattttaaaagtcagttttctaacagatgctctcgatgaaagcagtcaaaagtattatattattaatcttaaaaatcttgatactggagtaagtgtatttttaatactctatgtgacaaaacagtaagtatgaataaagcttttgctgcataccaaagtatgatcattatatcaagaaaaagcacttctgcaattattttacttgaaagctgaacaagcctctttaagggaataggatttttccttgaaataacaactgacaggcaaaagatggttattcaaacttggtattttggcagtcatttcctcaaattaacaaagtaac

SEQ ID NO: 56990 - DNA, 1110 bp, Bovine  19866880386175
  misc_feature (1)..(1): n is a, c, g, or t
ncaagagtactggagtggggtgccattgccttctccatcacaggtggcatagatactgacaaatgacatatatctgtttacagatactgaaattgaggcttaggagttaaaaatacctgccttagcattgatgtgagcattggtttaataaatcacttagctctgtgcatggcatataagtacttaatatttggtatcatttaatctaaattttgcattccttattttttttttttaattattgggatattggggaggaggtcacattaatattttatttaaaatagtttttaaagaatcattttgatgttcaaaccaagataagagttagtaatggggaaagggtgctttgtttctagcttgaacttaaatcaagctttgctttaagacttgtatccaagttggacacaaaggatgatacttcgtggtcagaaagacttgtgtttaaaaaaaaattcaagagagatagatcaaaattatactttaagcattagaaaggaggcaatagtaatattcttaatatattagacacagagtcattgaataaagtctcagtgatgcaatagatgttccttctttcaattttatcagtttgcaaaattcatgaggttaataagtattaaaaatctcattactgtaccatatcaaatagggatgtagctcgagggtgtaataaactagttctattgttgaaactccatcaaaaagcaggactgcacttaccagcattataaaaacctctatatctctctgcatacaactttaacaaaaaatattacatatggggtttctgaaaactcacaattcaaatcttgaaactcattgacttcacatataaagttatagcaggtggctattaagagtttgaaagagattcactgtcagcaaagtgctattggtctagttgtagatatactgggaatttacatcaatagccatattttgcttttttttttttttttaaatcttgtataactttgctgaagcaataacggttccaagtattttgcacagtgcaactgttaccccctacttcccatagagattatatatcaatattgatagggtttaatagctgcctactccttctcaggaagaactaggaagcct

SEQ ID NO: 56991 - DNA, 1167 bp, Bovine  19866880540317
  misc_feature (1)..(1): n is a, c, g, or t
nagtctgacatgacttagggactagacagagataggtatacaagttcatgctacactttctattagtaaaaaatgcgttattagggattaataccatatatcgatatatagctactcaatcttacatagatattttgacattaacaatgtttatttagtattttataggagtatctcttccattactttattttcaaattgtgaccctaatcagtgaatagtcaattttttaaagaaccagattatttacctattatttaaagacatgtttaatcattgcatttgataatgccattatctcatggtttagaacaagtttttttccccccctttttcctcctctgtttacttgaattcttggtttgattgaattctctactctccttttcctcttttggtttggaacttattgattctatatctggtttttagtgctcatctttatgagttaacatgaatattgacttagaggaagattgagcttagactttgtattggtcaggaggaagataaagatggaaagaattctaatgcatcgccttccatgttagtgccaatattttagttctatattatttagcctcttggtcagatgtatcctgtcaccacttcacatcctctcagcctcgtttgtcttttgccagctgctggtggagaaccagccctgtgtgcactgtgagccactttacacaggagtcccacagcctcccctgtgcctctggcctcccactctattcctcttggagccctcacatatttatcatgggagtatagacagttaataccctgaagagcaaaactttgtccattcccattggtcagatatttacttactggctctgctttctcccttcacccacagacgatctctagatacactgtatgtggcttttgggggaagtctcatgggcttgaacaatcagtcatatgtttattttgggtcttcctcctttcctacttcatttcctctagcacctactcctgctttctagggttatcttaaaaaaaaaaaaaaaaaaatagtatgtaagttccctgccttgggccctggttgttaaagattaagatcctgagacctgagatggagactttgggacatatgagcctgaaaagcctaaaaccctggaatggtaggtactctgtaagccctaccccataaactcaagg

SEQ ID NO: 56992 - DNA, 882 bp, Bovine  19866880666717
  misc_feature (1)..(1): n is a, c, g, or t
naatatgacttgaagtacaataatatttgaaatatataaaaagaatctgatcagttctcctgacaaggtggattatacctcaaagataatgagaggaacatgcttaaatgtcacaggagaagaagctacaccacagatttaaaagctttttaatgctcagaatctgatcaaagtaattatagcttggtaattcagagaatgagagatatttacctctcagagtaaaatgagatatttgaaaaatacaaattccatatgagaaacatttgataatatcaaaatatcttgacatttactaagaaaggaagcttagcacagaacaaatttcctttcagtcagaaatacttgattttatactcattttattgttatgttgtcaaagaatttaaattatactatgaacacatacagggactcactttggattgcagaactttatctcttcattgcaataatagaggcaggaatgagatagagaaggactaagagcataagctgtcaggaacgttgtttcattgagataggctaagggggacagtttatataagtatgttaaaaaaaatccaaaaaaattaattgaaggaagctctttgttcttgtgatagtaaaaaaggaaagatctttttggaggtgaagcctaagactataaaagtacctctatacatcaatattttctatatataattgtttaaaaataaatgatttatttagtgatgagcagagcaaagactaatagagttttggcaagaaaatgcactggtcatagcaaacaccatcttccaacaacacaagagaagactctacacatggacatcaccagatggtcaacagcgaaatcagattgattatattctttgcagccaaagatggagaagctctata

SEQ ID NO: 56993 - DNA, 1334 bp, Bovine  19866880689164
  misc_feature (1)..(1): n is a, c, g, or t
nactcagtctatggtgttctcttacagcagctgaactaagagagtacgttttatgaagagggaatttattcttagctataatacttaggacattatcatacatacattcagcatataaaatgtttatatgtacatattttcatgtgtaaatttaatactggattactaaaggaatgtttcccattgattgagtcctctgaattttgagaagcactcttattccttatatttccataaatgctttaacttctcatattttccctccagattcagagtagataagaaccttaaagattcactaacatctttgtctcattctaattcttttaggcatgagtttcctcactgatcaaatgagagcatatagattcacatcagaagagatagggccaagggtgcgagagaaccatgttctcagaggttatttgtattggttattgagaaaaggacagaaatatcccagtacagtgtccactgcagcactcacgcatgactgggcagtgcatatggttttcggcacttggagaatatcagggcatagaagaaatatgcctgctttttattcctacttaagtaagaacaaagtctgagtaagaatttggctcctatacaaaaaagttaatacaaagattgcttctcttcaatagatttacttgacttaatttcttatggatcttcgtatttgtagatttaagagctgaggcaaaaacttacctggttgccagagaactcccagagcataatcagctctcaacatattgcttctgtcaaaggaaaagagacacaaaaagtgacaaacgcagatacaaatgcagtctggatgaaacatagcatgcttttcataaaatggaaaggacatctgctagttgcctacttgtatatgcttccctttacttcagtgtttcgagtacaagacagattggggacctgtaggaaatggggttcagggtataagaacccctcctggctgtcctaaatacagttactggctaatgtggatagaggcagggaccaccctctatttcatctttccattgtctgccagggtggcatgtaatctattccaggcatctgcaactggaagcaaaacatgccaattatttttattgatctaaagccttcataggtgggacaccttgccagggcagcatatggaaatttagataaggaaatgattgcagaggcatggaaagggcttcgctatttggaaaagaatgtgtaggccttaaaaaaatgaacaagcacttggtattccagagcttaagatgagccaaagatgaattatgcagttgctgcaatcgaaattgattactaagccttcgatgagtcacatg

SEQ ID NO: 56994 - DNA, 855 bp, Bovine  19866880719492
  misc_feature (1)..(1): n is a, c, g, or t
ngggttgcttgaggaaactgggtatggtggacagaagcaaactatttagaatgtacttttacagtggcttctttctactactttctttcttctgggtacttgaagctggctattcttttcaggaattataacaaaatacttttattttctgtgtgtatttttgctgattcactaacagttttcatgaaaactgcatattcccaaagactttctttcttccctgtacacttaacaatattttcatcattcaaaaatagatctcaatatcacctcctctatgaagatcttctggaatcttctccaatattccattaagtcactgtcctactaggcttccataatatttcatatccatctccaccaatgctaactcactattttttgcatataaaactgtctcctttcatggactggaagaccctagaggggaagaaccactagagcagttacctcctttatactggctagacaaacagaagtgaatagaccatacaattcattagttcattgcaaaaatattagttatttttttttgcatttatgttattattttgtatttatgttcttacttctcccttaaattgggctttctctccataggccctgttgcctctgttgcacgtggtttatcacatgtatcaagagattagaacattaagcatgtgacaaatatcaacagtgacctgggggatttattataatctaccaatatgctcaaccttgtaattgctcagggctttttgctccataattatttggttgcctcagtgtagccattcaatgatgttataattagtgggtaattaactaaagcatttaccgaggtgctgtagagcataaacatgtgtgcaagct

SEQ ID NO: 56995 - DNA, 1467 bp, Bovine  19866880785313
  misc_feature (1)..(1): n is a, c, g, or t
ntttgaaaaatgtggtaccagattctaagtctttctctttcacagttcacttcttatctttggtggtatctagaatcttccagcaaatgaaaatatcagggttcttttttttttggtgacattggcatttaaaatacccatcttctgccccgatatttgattgatattttgtctcaatgtagatttgagatcatatgatctcaaataataataatcatagatcatattataggtgctttttggagctcaatgtaagcttagggagggcagttttctgtattatttccaaatacttggcagataatagtgagagaatcaataaagatatccccatatagggctaagacaggttcaccaatgacatcccaacatgaataagggattttatttttttaatgacttgaaaatatgacgaattgtttggaaaagtatatcaaattatctgaaactacagtgcaaaatagattaaaatgcttacatgttagcaagtagaaatgaaaaattggtgaaaaatttatagttttgaactaaattataccatttaattataacagtgtctctcatcttttaaattaataagatattgcttctgtttttaatgatgtcaatactgtagtcagcttggactcagttggtaagctagtttatcataacttgaaagtcatcctatatttatagtatattaaatgcatgaaccaataattctgaggctggaataatgcatcaatccataatgagaactgcttttaatttagccattgataagtaaaagataattcaatattcatcttctaggaaagttattttaataatgatcccagttgtcctttctcaataataaagtcaaccactcaagcaaacttgccatgttctaatctcagtgaaaatgagcgtgtctaagtccttttagatcagcactaatgaggctggcctctgagacttgagtccttcatgagtcccatggactcatgctatattccattccaagacaaatttcatgcagctgcaagtatgagaattaaatgggaggtctataaatgcaaacttaccattattacaataagtaattcaaatcagcagcagtagcagtttttatagcaagggcaagaatattatatgctcattccattaacttttattccgtatcttgaattcatacattctcaagttgggagtatcctaaatttatggatcttagcctcccttaacctctgacttatgcataaagttcctcagttttgaaaacagctattatcttcagtctccattatacataggaacagtcttcacccctctttttttaatatcctcttttcttcattcttcatatgatactggttttcagtctttctcagagtatgttaagtaaagctgtatacaaccctttagaaatggtctgactagctgaacaaacaagggtattaacatgctcaccctatataattagtctaccaacacatccaaaag

SEQ ID NO: 56996 - DNA, 1031 bp, Bovine  19866880803598
  misc_feature (1)..(1): n is a, c, g, or t
nttaaaaatagagacttttcacatgaaaaatctaggcaagaatactggagtgggttgccatgccctttgccaggggatcttccccacccaggtattgaacctgagtctcctgcattgcaggcaaattctttaccatcttaagtaccagggaagccatggtgaaggcaaaaccagaactctccacactggagccaccctccccaggagtgcttagtagcgtctgttactccctcagagggagcgagtcacctcctgcccccagctcagctgctaacgctgaacacttctacctggtcctacaggcactgtatttgtgacctgtagtgtagaagaatggacttaatcagtcagcatctgagtacccactatgtgtcacatactccaggataaaggcttttctttttcttacacaaaatctgtgaactatacattgtcttctttatagggaactcagaggttggccaagactggggcttgacttggctgaggcactagatccgaattccatccaactctatgttctcgaagcttccccagtttctcattcttgtaggaactgcagtaattctggcttagtttcatacttcttagatttgagagaaggaactttctggggcacctgtgtgaagtattttgcattccattaaggcttcatcatctgcattaagagaatttaaaaatcagtaaatttggggagggctttagtctaattaggttcaagtgtcaaagcagaagtttttggggcaattgaaggcagatttgcaatcctgtcaagtagatgcagtcagatatgtaacctgaacatttcaaggacagttaataatggcttctcagggaactgaatgggaagaacatttgtttgatgtagttaattttctgagcagtttttttttgtaacacaaattgctaagtgcacctctggtgaagtgaggcctcatgctcacaactcagtagtggtcacttcagctcctgaatgtctagagtccggccttttggtagggttttcaactggtgttataaaatttatcaga

SEQ ID NO: 56997 - DNA, 1535 bp, Bovine  19866880862744
  misc_feature (1)..(1): n is a, c, g, or t
nttttcctgtcctttttttagtagttaccccaggtattttaacatgcatgctttaaaaaattaaatgttgatcagtatctttctatttgttccccaaaacaaagactctagtgcttcagatctaatcaaacttctcgaattatatgttattattgtccagtatttggcttgtattttttaacttgacaaaataaatgctattgttttatacagtcgatatttgtttagatttacctacatttttatggaaatctttctgggtaattcctttctgcatgtgagactttccactttggattacttttacctgaatctgttggtggtaaattctgttatcttggttttttgtagcatgcatttgttattctttccctcttcccttgaaagatcatttcaccatgtatttcattgttggttgacaattattttcactcagcactttaaagataccgttcattgtcttctagttttcattgttgtacaaaaattactccattagcttatttgagatgtcttatagaaagtcttggctctctacttgtcttgcaagtctttcccttgcctttgatgctttgtagtttcactaagatttacatctataagagaatttcttttaatttttgcctaggatctttttggcggagaaggcaatggcaccccactccagtacttttgcctagaaaatcccatggacggaggaacctggtaggctgcagtccatggggttgctaagggtaggacacgactgagtgacttcactttcacttttcactttcatgcattggagaaggaaatggcaacccactccagtgttcttgcctggagaatccaagagatggaggagcctggtgggctgccgtctctggggtcgcacagagtcagacacgactgaagcgacttagcagcagcagcagcagcaggatctttttggatttccaaatctgaaaatcagttgtgtttttttttaattttaagttctggaaacttttaaccattatctcctaaacgattgcttcttccacattctctttattctatcctcctgaaactccagttagagaagttagaacttctctctcctccacgtctcttaatccctttctacctttatttctatactaaagagtaaatcctttacaacctgcagtagcgttacaaaaaaatccacttctggttaaatataattggaattataaagctccagaaagggaattggaagtaaccaaatcttgttctatcacaatgcgaaagctcgatcttcagtcagacttgagcaaggtcattagctatcttgctctcaggcccaccctggaacctcactggaaaaggcacactcatgctaaagttgggtttcccaggtggtgctagtggtaaagaacccgcctgccggtgcaagagacacgagagatgcgggttccatccctgggttgggaagatctcctggaggaggaaatggcaacccattccggtattcttccctgggaaatctcatggaccaagaagcctggcaggctacagtccacgggggtcacaag

SEQ ID NO: 56998 - DNA, 1925 bp, Bovine  19866881011987
  misc_feature (1)..(1): n is a, c, g, or t
natgatagtgtgcctgataaaaggggccggatactcccaagtcaatcagctcttcacttaaatctctggagtgtgaaaactggacaagaaagatgtcgacttgagggcgttctcctgagatacatgacttaacatccttgcagaggcttccacacccaacaaatggtgtgaccttgcgactatgatgagtcctagaaatataaaacaaataatgatccatgctggagagattgaaatgatagaatttctatggaagatagaggagaaatagaataaaaggctgagtcaagtgagcatcctagaatggttatactatattcatttataagattttccagatgattactttccacaggacagcccatcacaaataccatttactaaggccagaaagaatgtgctattgggaagggggctacttagctaaattgctaagtagcagcattactctatagaggagagatgatatttggaaaattatggtatatggacagaagtcaagccaaagtgtcacaattatcatagtgagtgccaagattggagtggcagtcaagggaagctaactcacaaaaatgtatgaagatagttaatggaacatggcaatcctagagcaaaataggtgggcagccaacaaggatactattcaacttgtaccaacaaaggaatgcaatgatgaatgacaaggagtctgagggaaggcatcccatcaaagggtcacaatccatttacagtttctagtcctgagccagttttcagactcaaaccccatttattgaagagatgaccaggtctccaggatcctgcaaagccatagcaagtatccatggtgatgattcctttgtccaaaaggatttgggaccatttactcagggaaactacatactgaggaaaaaagaattcccagtcttttgacgagtgttaaagaaagggaatcaattgatgaattgatgatgaaattgatgaattgatgatgaaattgattgttaaagaaagggagtcaattgatgaattgatgaattgatgatgaaacttggaaactcaaaatatgataatggccccctgttcacattgagccatatgaaaaccaaataataaatgaaatcctgacttgagtccaggtttcaatgggtcagctggatctgcagacctatatattggtcctttctccatttccataaagtatgattgggattagcatgtttgaaaatggtgcaactccaattttggggtcatggctcttcccactataaactgaatcctataggctaggtggaagcttctaaaactgcccttaccaatgtccaaagcagtaaataaaaaacaatatcacgtcttggggagggagatagtggctattagtgtacctttaaagatttcaaggatgcaaggatggtaattcccatttatcccatctagtccctaccaaaaccagacagactttgggataactataggactaccaaaacctcaaccaagtaatagctccagtcacagccatgtacactctcagtgactcactgggagctcttaatttatgcttctttttttctgcagttcctggcaaagtcacagcatagaagggtactggggcccaaagagctaacattttcacagaggacacaccaagaatcctaaattgtaaactgactcatgggcacttgagcctcttgcatcaagggtctagcaagcaaagaagagtcagaatcctgacagagagaactgaccttgatcatcaggaggaggtaagactactcttacacaagcaactctcttaggcactttttgggatttagttgcccaactgactctatgaatggacaaatatacaagcctagcctgaaaagtggagaaggcaatggcaccccactccagtactcttgcctggaaaatcccatgggcagaggagcccagtgggctgcagtcca

SEQ ID NO: 56999 - DNA, 2582 bp, Bovine  19866881041249
  misc_feature (1)..(1): n is a, c, g, or t
ntttattattaatggtttctgaggagcgtctcctgagagggtaataagtacactctgtctaaagtatctgtcttcactaagtacatactgggcttccctggtggctcagatggtaaagagtctgcttgcaatgcgggacacctgggttcgatccctgggttgggaagatcccctggaggagggcatgacaacacaactcagtattcttgcctggagaatctcatggacagaggagccttgtgagcctgcagtccatggggttgcaaagagtcggacacaactgagcgactaagcatgcacgcaattatatattaatataaaagacgcacgctccttggaagaaaagctatgataaacctagacagtgtattacaaaacagagacatcagtatagtaatcatgtacagatgtgagagtcggaccataaagaagcctgagcaccgaagaattgatgcttttgagttgtggtgcctgagaagactcttgagagtccctttgatagagagcagatctaaccaatcaatcttaaaggaaatcaaacatgaatactcaatgaaggactgatgctaaagctgaagctctaataatttggccacctgatgcaaagaaccaactcattggaaaagaccctgacgctgggaaagaatgaaggcaggaggaaaagtgggtgacagaggataagatggttggatggaatcaccaattcaacgacatgagtttgagcacactctgggagattgtgaaggacaaggaagcctggtgtgctgtagtacatggggttgcaaagaattagacacaactcggcaactgaatagcaacaacaaattacatattttatcattaatgtttcttaggtcaaagataccctttaacaatggcccaacattttgacctcataaaatttgcaattgcaaaaaatacgtaccaaccccccaactgattcccatgtatctctaatactatgagttgatatgcaagatttttttttaaagaaaacatattatttccccacaaaaagagattatgtaactatactcaaacacctaccagtatcctggcccttaggatattgtacttctgatggaggcaatttgtcctggaaaaacacctacataaatgtgtgggtatatgtactttctcacagatacagtactagagtcacaaaagttactcttctagctcttctgcagtgttttgtagtgaaaatagcatgagttttggagtcacacttgatcaagttacatatcttctcagagtccctgttcatcgtgtgtactatttaatacaggggaattgccaggtatttaattatgaagatatatgtgagataagaagcacagaactattcagtatttaatctcctccaagttccccctcccatttcaaaaagacagtaaacttctgagcagggataaagtggtgcccttcccttgcctgttcccttccactcaacacacaacccacatgcacctggtactcagaaaatattactgactgaattcattagcattcagtggaaagccagaccctaaggaaccatatcaaataaatatttgcaatactatcacctctattgtaatcatctctagatgaacttcccagtcccaggtcttatctccaagaagaagatgccttgtctgaacacacaggggtttgaacagaaccaccacttgagtgtttgcctctttaattctaacatgagtagggcaaccctgtgtacttttaaaccttccatttaccctgcccctgaagcaaatgatttgagtgtgtaaccaactgctagtccctttattgagtttctctgtggcttatcttaattatagtaccacagaactgaatttgccaggcacagtgcaatcttttacatctgtttagattatgattaaagtataataatattttcttcatgaacaggttttgattgttggagtctgaaaatatcttttgcatcactaattcagattagcattctgatgctggccacataaaatctaaagttctgaatttgtgagctctgggctactgatgattccttgctatgtacaaaaccctgagacttcaacattatttgtttataggtgtatgaagacaaagttaagtcaggattcttggcaagagtctgttactttaacatgagaacaagccccctagcctggcagagaaccatgcaatattaaaaactcagccaacggggaggagttatgaacttaagtgctctttaatagactacatttgccaaacacatacatctcaacttaatattttatttatgaattaattttaattagcataacaataaaagagtgcttgaaagtcttttggaataaatttgacttttgaatgttattactgtcctctctttaggcacatcaaaatctttttttcaagaatgaaagtacttagtattaaattttacacttggactttttcatcttgtttttgtatcaggtataatactataaagataatcttttaaaattaagtggaaacgttatcttactaacttgtttctcattttgtatcagcttgttcactatgataattttaccataagaatctgggccagactcattaggactttt

SEQ ID NO: 57000 - DNA, 864 bp, Bovine  19866881043778
  misc_feature (1)..(1): n is a, c, g, or t
ngcatcctctattcagcaaaggtaatttaattaaatactgttcctaaaatataatattgattactgaatattgtcttttaaattttagaaaactcccatgaagtcatgatgatattgtgagccacgtaatacagttgactgtaatcaggtcaatgcaatattgccaataagtatgacaaatggagccatcaacctagtgaacaaacttacatccttcatacataaagctgtagccaccatgtctacattatcagaagtatatctttgttttgttttccagcaggggagatggctttgtgctctttcattgtgactagaaccagtttttgtcaaaaggattgctggtattgcaatgcagtcttgctaaatagcaaattcccactgtgttgcagtcatcttcactgcttatcaaggcatgagacatcctttcctttaaattagacatcttacatatgaaagacatctgtatgcatccattctgttaaaagtatcttcttccatccctatatttgcaaagcaactcattatttattttattccatctctcatcacagtttgcctcatatttgggttaacatatgtatctccttaattatgtgcttttgaaaatctactcctatgtcttactcaactttgtaacacccacagaatgaatcagtgcttatacattgtaaataatataaaattagtcatttaattaaaaaaataaaataattaactgataatattgatatccctttaaaagaagggattaaagcacttggaactttgaggaccttaagtcaagagattctatttatttacataaaaagcccagtacaacttgctaaatatatctagattcataaaaatatagttattttt

SEQ ID NO: 57001 - DNA, 1541 bp, Bovine  19866881169149
  misc_feature (1)..(1): n is a, c, g, or t
ngataaagaaactttctattatagactggcaggctacagtccatgggctcttaaagagttggacacgactgagactaagcatgcacttgtgagaagaatcaccttgttccgtggatgtgggtagctgggatgttactcactgctatggggcctgtccctatactggggagaatattactattatgtaattgctactttttaccaaagaacatgaaaagggattaaagattaataatgttgaagatttatagttgaggagtgcttataaataaatgaaatggatttaaaacaaatcaaaacatattattttgtatatgaggagcagcttcttaaatcatacttttgctgatctcccaaagggacatgcatactgtcaactttattacagtaaacagtaccattatttactgtttgcagaatttctatactgcacctttccagtaataagtgtaagtggacaagctacccccctttctgggattcagtcattgccttgtaaagagaaggcttatatatgaagataactgaggccccagccaactctgaccttttaagattagtacaccagctagtcactctggtctagaaacttgtgcaagctctgcaacctgagcagccagcagtcagagcagatttttacagtcagatctacccattcatgcaccttacaatcggcactctaaattactgacacacttgataagctgtgtcaataaattttttgtacgtgtgtgtgagaatgaagtgtggcccatagatatctctttttcccgtcacctctggcaccttcttggtctgataaaccaagatcttggtctgacaaactgtgaattcctctgtgaaaccttcctagctttctcagaattagttgtccctttatgtcccttcataatattttgttggtgtttctaatattgtatctttcaatgattcattgtattgatttttttttttttttagtatatctgtcttcctgctagactttaagcatcttaaaaagagagtgatcttttcttaatacttgtattcaacacattgccttggtttatagccaatacacaaatactggttggataatgaatgagtattctttttatattcaatttaacttatgccttttaggaagatgcataggtcagaaatggtcagagacactttaggaagtctagaagtcggttctcctgcttagatactaaaatttgcttatattcttttggaagtaacatcaaggaaaggttattagacataatatagaagttttcattctttactcttacaataagactcactgaattgtgcctagatttactttttcccaattattttattttttacagtttgcaaattgtctatatataattactttcaattaacttccctcagccaatcaacagaccataaactcagcttaagcatttatgaacagagctttgtgatgagaatctatccttacattaattgttggttcagtaaaagttagggctcaggaaatgatagtagctatatttgagttcctcatttatggttgcattaatatgttt

SEQ ID NO: 57002 - DNA, 1109 bp, Bovine  19866881265520
  misc_feature (1)..(1): n is a, c, g, or t
ntggttcacatattgctgaagcctggcttggagaattttgagcattactttactagcatgtgagatgagtgcaattgtgcagtagtttgagcattctttggcattgcctttctttgggattggaatgaaaactgaccttttccagtcctgtggccactgttgagttttccaaatttgctggcatattgagtgtagcactttcacagtgtcatctttcaggatttgaaatagctcaactggaattctatcacctccactagctttgttcgtagtgatgctttctaaggccgacttgacttcacattccaggatacgtggctctaggtgagtgagctgacttttacagattagcaaaattttcaaacttcctatattttaacccaaagagcttgtgatgtatcatagggtctgttgcagcctagccaaagatttctcagagctgcaattcagtctgaggttcttccttctgaagtctctttctttccctctctcctttcatagatgtcagacttggatcatagtctgaaggctcccctttcccacttctgctttctctcctctttattcttcacaagtgttttccctaataaatttcttctacatacaaggacccaaactaacataagactcaacagctaaatgcattctcttggatttctttccttctaatatatgagtgatttgataaagtgtgtactgtcccaattgtaatttaatgcactgaaataacagttcttatttcaacatttttatttaataatcacagtttcaaaaattgtaatgatgttacagtgatcactcataatgtacgttctaacctgagttatttgtatgttaaagatgagtatcctatcaccccgtgacttgtcactgcagcagagaatgtacattctttacgttaatgatccattttgagaaacactgctgtaaaactgaatgttcatttgatctgggagtgttcaaaacaatatttaagattatcctctgtatatcaaactaacagtgcttatatttaaaaagcagaattatgggtaagggtagacatttttcagattgaaagccttgagagaatacacaaagagttttcttagatctacaaggaccctaga

SEQ ID NO: 57003 - DNA, 1458 bp, Bovine  19866881344256
  misc_feature (1)..(1): n is a, c, g, or t
ntattctaaacagacttctggaaagtcccatggatcctataagaatttatgattatctgtttcaggaaatgaatattccatcccttaatttctaaccttgtgcagttaggctgatgctacaaaggaatgtaaaacaaaagtaacctgtctcctcctttaaaatgaaccagtactagttgtcagaaagtttttaggagctcagtattacaggtggcaaaacaggtaggaaaagtagtcacttttgcagttaaaatttgctgagatagtgaaggaggaggcattggaaataagaggttttctcagaggctggggaaagagaaggcaggtctccattagccactggaaaaactttttgtgtacaagtgaaagtgaaagtcactcagtcgtgtctgactctttgcgaccccatggacttagtctatggaattcgccaggccaaaatactagagtgggtagcctttcccttctccagaagatctttccaacccagggatcagacccaggtctcccacattgcaggctgattctttaccagctgagctacaagggaaggcaggtacaccaaagcttggagaatcatggctcttgtctttcaacttttaaaaaattgtatttatttttaactgaaggataattgctttatagtattgtgttggtttctaccaaacagcaacatgatctttcaactttttatgaaaataaaattttcactactcatagcttttcatttagtactatatgacaagtcctctaatgatacgacagtgagcaagctggaagttcctgaggcaggggtgtggtgctgcaggaagataaaccccaagaaaaccagcaggggactgagagactggagcttcaaggcagccagaacagcagaggtgctccttcggttgagttcctgtaggagaaatcatgaaagtacattttctaccctacttctgggccaagttcatcatggtctgatcaactcctttcctgctgtgtgagaactccaattccttttcctttcttttgaaaagaagtcacacctcaattttgcaagtcagaagcaaaccaatctattgtaaccagaaaggaataaaggattgtggttaaagaaagtagtggggagggcaagcaccttggcagaagatgagaattctggtcctcaggattaagtaatgatggccatcccttcacaacagcacatatagaccactcttctgttttacttgatgatccctttctcagggctgtttcttcttatgtaaatattaagcctactgcttcttctggggaaagctaagaagagtgaatactaggaatttcaggttacatcatgtgtttctctaagcatgaatactgtagtgagttgccattcccttctccaggggaccttcccgacccatggatcgaacccaagtcttatgcattacagacagattctttgcctctttagctagattcacattacttagg

SEQ ID NO: 57004 - DNA, 1442 bp, Bovine  19866881386378
  misc_feature (1)..(1): n is a, c, g, or t
ncaggaaacatcagaatagaagctataatgcacaagatgctattttactattaactcagacctttcttttgccagatggtgttggaagaaagcttttgttttcttgttgatgggcatctcctttgaattttgctagccagatatgtttcctctcttctcagcattcacagacactgtagctttcttttaagtacctcttacatgcagtaaccggtgtggcatttccaggcattgtatgcccttccgattggtttctgggagaggaatttatgcttcttgatgtattgattttaatcttcaaaaatttggataaccatgcatcctaccagcataccctgttatagcactcgccacattaaaatgtcatttgcctaatttcctgtctctctgaaatccatactactgcactttcagttactcaagaactctttctgatttatctttctattctagtctggcatatggtagattctcactaaacactttcttgagtacatgaacaaatgaagaccagaaattcaaatctactttgatatttaaaggaagtctttatacttcctggaatcacatgggacagaaggaacatttactataaatagatgcctatgctgtgtctggagcatagcacatgttacctcatttaatctgttcaagcaattcatgagatattcccttatttgctgccatttgttggatatttgtctgtttgatatatataatgttctgtcttttaaaacactttattatttaatatttttaatgatattttgaagaagttattactattcccatttttaaaagaaggaagttgagacttaaagagaatatgaaatatttgaatccaaatctacctaactctaaaacccaaatatttcctacttgaccatcatgacttggaagacaaaatgtttgggacaaataggttatttattttatttttccactttattttctctctaatattggtatataccacccctaatggtatatcttatgttaactcccttctagacaaaagatcttactattaactaaaaaatatagagaaacctcactggccatcttataggttgctaggcaaatgttaagtcaataaatatattcctttgactaacaatccttggtttgatcagttgtaaccagattcttaaagtcacattccaaaaaacttggctacttttgcatagcaatctgccttggcagcttttcccagaagggacctgtaggtctggcaattgctcagaatttcatgagtagtccagtcacaaatagaagatgctcccaaaggtaattatgagactttcatcagtacagtaattttaagcacggctttactaaagtagcatcaaattctaattggatccactaggcttaatttaaggagccatagaggactaattctaatgtactgttacatccagtatatcagcacaatattatat

SEQ ID NO: 57005 - DNA, 1403 bp, Bovine  19866881593848
  misc_feature (1)..(1): n is a, c, g, or t
naccacctggacctagcagtgcgtgtgatggttaaagacgtctagtttaggtcctggctaactgtgtgatcttaggcaactcccttaacaactctgacaaatagtttaactagaaataaagatattaaaccagatgacctttcagttctcttctaaatctaaatgttctgagccatgtaacagtatatgttaggttcccctagaaccgccacttcccataaatctctctggtgatggaaatattctgtatctgtgctatgcaatgtggtgaccactagtcacttgtggctatcaagcagttagaatgggatactgttattgaggaactaaatttttttactttaaataacctcatgtggtcaatggctactatactggaaagcacagctctagagataagcatgggtagagaataattatttccttactaatgtgtaatcaagcagttacaccattttgtttttcacagagttgttccaaggactaaataagagccaccagggaagcctaagaatacatgtggagaacttcaaatattagtccatagtaagcacaaaataaatgttacctcttctggtaacactcattttatgcagctgagttttgtcaaattttattaagtaaccatatttttgtagtttgataaacaataggtttatgaaactaagcaattatctccttttgtacatgggaaaaggaaaaatgcagagacagtagtagaaaaggttaagcagtacctgggaattcaatatatatggcagcataatcccaaaaatcagacctagattctctccccttttacagaatactttccattcacaataggtttctttttttttttttttctttcagctccatttcctctgagccctgaaagggtctcaacctccgtttctgtagctgaggagttttacaaccactgcataccactcattttacctcttgttaggtgcccttccgagcaagataagatggctaattacatataccattaaccgaatgcaattccaactaattgacaaaaagcattatacagtagcagtttttgaagaacaaagttgtatgaaataacaaggtcataattccaaagtctgaccccaggaacaaaaaaattctaaacatttattgtcttactgtgaattctaagacctgtgcctttcacatggtgtcccatagctatgagaacttcattcatcttttaaccaaaatgcactgagtgtgggttacctattagttctgctaggcatcataaataaatgtgtgcaagatatagtccctgaccctcaggaagcttgcactgtcccttccacatatagtgctccagtcattctcctttgcccgaggataattatctgtcctgtacagcccatcatgcactcctacacagcctgctgtctccagct

SEQ ID NO: 57006 - DNA, 1008 bp, Bovine  19866881612328
  misc_feature (1)..(1): n is a, c, g, or t
naaattcatttttaagggatgcattttaaaataaaggaacatttgaaataccacaaatctgtatcatgttcctattaagccaataggcttaaaaatgttacttgactacaccaagatttaattcccaaatatgaatattctattaagaaaatgctcatattatgttagacacataacatgcattgcaattacaaaataaacaattctgcaatactgtcagctgtctaaaattcaaaccagcaagtcaaggaaacaatctgttcacacatcgtaatgtatttaatcacattaaaatgaatattgatgattttgatagttaagctgatggtgatatttattttttccatttcttcattaatgccatacttgtgcagtattagacaataatttgtcaaggtgctagaacacattttattgaaaagagtgtaaatgtctttgtcaattataagaaccatctgtattataaaactgttcttcacataactcagagaaacttttcaaagctgttgttcagtaacttcttaagtgtaaatttcataagttttaggtaatggtcatgttctactttgcattatttgaaagaaaaagtctataaattgatcatgaaacaaaaaggtattttacaaaatgaaatgtaattagcaggctgttcagtccatatttgtctttacatttgaagaacaggacaagtgatcaaaagaaaacttcagtcatcacttaaaattgccagtgtcaacccagaatgacattttatgggactaaataatactttgtgatgctctatgtgtgctttcatgtctccagcttatctataccagacacagagatcaataaatcaaacttcaaagtaaaaattttatatcatctcccttcctgagtccccatctatctctgcttcccctccagttcttctcaaaaagaccagaaaagtggagaaggggactgaaggtcttggcagagtgtaagaggtttcagctagaaaaatgtttaaaattcttgagtgtgtta

SEQ ID NO: 57007 - DNA, 728 bp, Bovine  19866881825684
  misc_feature (1)..(1): n is a, c, g, or t
ncgattctttaccactgagctccgggaagtacttagggttagggtaagcaaaattgctcaagatgatagaggatagagaggagaaagactaaagtcaaccaggagccatcatcttttccccctgtttcctcacaaagcacttgccctctttaaaaaacacacaaaccacacacacacacattttatattgaggtatagcaaattaacaaacaatgttgtgacagtttcaggggaacagtaaagggacccagccataaatatacatgtatccattctcccccagatttccttcccatccaggttgccacacaacattaagcagagttccttgtgctatatagtacatccttgtatctcaataaatgctgttcaaaatagcaaagaatatttgtttgataaaattccaaattattacactttccaggatgctcctatgtttgaacctggccctgaccatatactttcctgaggctggctgtcaccttgtcctgttacctaaatcccctgctacttctgtgcttgtttatcctttatgaactcaatattctagagggagggaaggtaggaatggagacacaggaaattttaaaaaaaagaaatacttaaaatgtttctctcaacaaatttagtgagagtggagaaggaaataaatcaagtctttggaagctctatgtcttgatttggcatgtccaggctttattttcctagcagtagaattctattatata

SEQ ID NO: 57008 - DNA, 1209 bp, Bovine  19866881886497
  misc_feature (1)..(1): n is a, c, g, or t
nctgatctgatcaaggttcttaagcaagagcatttgcaaaaaaaaaaaaaataatttaaaaaattaagcaagtaaagaataacatgtgatgttcatttattcattaaaatgtcaggatgacccctgataagagcttgacatattttaattttggctagtattcatataggtaccaatgattttaaagacagaattacagagaagggacttgtatcagtgatttggggagaatgtgttgctgccaatctatattaagaatggatgatttttattgactatttaaatatgagctatcactacagccacattatgaaacaattattaggataaacatagcaggtagacacatccttattatgttttatagactaagataccataatttaaaccgttaaaagcaacttgcctcaggccaaaagtttaatatgcagacagacagggcttagagacaggtctgtctgatactgacacgtatgctttttattattctgaaatattacttctgtatttaagattacaaaacattttccacatgcgatctcatgtcatagcattaaaacattaataaattcacatacaaagaaagtctaaatgatgtgcaaattcatgaacagcctatcagaattttttaaaccacattttgttaattatcaggtatttgttcatatgtgtgtagtagggatcaaagcactaatgttgggaaagatatcagcggaataagtgaggggcaacaaagtaaaaatgggcaatgcaggaggtcaccttagagttgttaaaataaaaagcaaaaattcagttccacaaaaattagcctccaaagatcctattatcacatcgggccattctttactttgtgtactgaaatcattggtgactatatcctttaagaagttacatcaagatcttaaaagcttgttattatttcgaaaatcttctttggtgagaatagaatataaatatatttgttaaaaaatattttcttaaaatagcataaattcacatatcactaatttagactatcattccctcaaaaactgtgagctaaatgaacctttatcttattcctgagtagagtgtgactctaaacttctttggcatagcaagccactattgaaccacactaaaagtaaaaataaaaccacttaggcttttagaaaatagactgtaagagcctcaaaggacacagtactggcgctgctgtcaataatg

SEQ ID NO: 57009 - DNA, 947 bp, Bovine  19866882147588
  misc_feature (1)..(1): n is a, c, g, or t
naaaagagagtaagaatgataagacagaaataaggatggagggggaagagaagaaatcagttcatcctgctttaaagatttcttttaacatttaatttccttcttacctgcaggcagttttctaaaggtgcacatttaacttctaggttaaatatgaaacttgaaaccataggcgctgtggcataaattaaataaggggagaatagagagtgatttgtttttctcctggaataaaaccccagtactcctccagggttgtgtgaaaggctgaggaatctgtggtataaatactttaattagctgacagcttgtgggatgaattacatctgatctctgttcatgatgcttgtataataaaggacttaattgtttcattttttacagtataatggatggatggaagaggatgataatttgagaatttattcatttaaagcagtgattgcaatattgttctgaaaagtagaatataacatgtagaaggttatagagaaagtaagtaggcgtcttcagcttctggagactgcacctttgccctctggctggttgggtagctgaccatcaaatagctctataacttttgtcttttgccatcaagaatcggagaaggcaatggcaccccactccagtactcttgcctggaaaatcccatggacggaggagcctggtagattgcagtccatggggtcgctaagagtcagacatgattcagtgacttcactttcacttttcactttcatgcattggagaaggaaatggcaacccactccagtgttcttgcctggagaaacccagggatggtggagcctggtgagctgccgtctttggggtcgcacggagtcagacatgactgaagcgacttagcagcagcagcagccatcaagaatgtaacagccccttaaaaaaaaagttgtttattgtaatggaggataactgtgttacaatat

SEQ ID NO: 57010 - DNA, 2880 bp, Bovine  19866880111532
  misc_feature (1)..(1): n is a, c, g, or t
nttgggggcttcaaatcactgcagatggtgactgaggccatgatattaaaagacgcttactccttggaaggaaagttatgaccaacctagatagcatattcaaaagcagagacatacttgccaacaaaggtctgtctagtcaaggctatggtttttcctgtggtcatgtatggatgtgagagttggactgtgaagaaagctgagtgccgaagaattgatgcttttgaactgtggtgttggagaagactcttgagagtcccttggactgcaaggagatccaagcagtccattctgaaggagatcagccctgggatttctttggaaggaatgatgctaaagctgaaactccagtactttggccacctcatgtgaagagttgactcattggaaaagactctgatgctgggagggattgggggcaggaggagaaggggatgacagagaatgagatggctggatggcatcactgactcgatggacgtgagtctgagggaactccaggagttggtgattacagggaggcctggcgtgctgcgattcatggggtcgcaaagagtcggacacgactgagcgactgaactgaactgatcctaagtactaatgctgtcaataagcaggaaaacctttgtctcaatttggacaaatactattgctcttaagttacttaggttcctctggtgcaattttaaatgctgttcaataaataggtttcttctcacctaaaggtcataatttgcatttgaaatatagtaatgaatttctcaataatggactaggcaccagaaattttacattcttaagattgaaatctatgtttaaagtccatgtgtaatcaagagacacttaaaatgggcatgatttaaagaatatcaatcagtatatgtaagaaagacaaataccaaatacgtttgagactaagatcagagggctattatttacattagttactgggcacattgaaagtattcagaacttacgttaacatgtagagcattactttcttagagacacctaattagtgaattttggtgctactgtaagaaaattatctgcttctattttctatacctataaaacagatgctatctaaatttataagatagatttgttcctagtctatttatctttgcagagaataacagtttactaattatttaggaaaggcctgctgaacaagattttaatgaaagttattagaaagacatgagggtaaaagacattcttaccattgaaaagttatttagaaattttcaagttcaagactagttttattttgaaaattcatacaacattatttattcatacaacacacaacaatgtatcaggcactgcaacaaagtgagaatcgaaggatttaaataaatcttagtggatgaaccagaatggaccctgggtctctgagctgtttattcagtgttattttcactttaccaagatgacatttcagaaaatctttttttctggaatcaccaatgtttcaacactctggaaaccataatattgcatattttaaaataatattttgtgtaagtggttgaaagtaactatttcataaaagggaaaaaagtatttgaggattgaaacattttagggaaatgctttaggattccaaagaagaaattaaacagagaaaagtccctttcatattcaccgatgaggagctgaaagtaaaagttcgaaaatatgagaaaagccttgggactcatttgggtacatttgcctgtatttccaaaaggtaaaccacataactcaaaagaatgtttttggccagtttaatagccttaggagaataatttgtggtgacaccatacaacttccttttatattcatgctcctaatattgatttacctattggtctctctcctgaccgacttttccaatatctctgagaatgtcagcagtcaactttatctgtagagtaacaatatattttaggtctagatttgtattcccaactactcctagtgactttacctagatgtttattgggaaatgtagaaacattattaaaaaattaactttttcctcaaaaaatgtgccctccctttctgtcttctgttctggtaaatgctatcattactcattctgctgtgtggctaccacccaagcatcaacaataacatcttttttttctcactctacacggcaaagtttttcaaatcctcttgatttcatccccaaaataaatctagcatttgtcctttgttttcctgtgcttagttgctcagttgtgtccaactctttgcaacctcatggactatatagcctgccaggctcctctatccacggaattatccaagcaagaatactggagagagttgccatgccctcctgtaggggatcttcccaacccagggatcaaaccctggtctcccacattgcaggtggattctttaccatttgagccaccagggaagcctttgttttccagtccctctctttctcagattaggtttttatggccatatgtggactgttgcaattactcgcctagccagctacctgcctccgacatactacgatctgattataccacctccctactcaaaacctttggaagctcccttcatccttggtataatgccaaagttccttcttagcatagcatccggggaccttcacaatctgaatcagcacatacttccgtctcttctatactacccgctccatgcactctccactccagtcacatgggaccctttattctttgcatacaagtttgcatttgtccatataactttgctgtctcttaatttgttctttctgccttccttacccatctttatttttttaatttgttttttaattgaaggataattgctttacagaattttgttgttttctgtcaaacttcaacagaatcagccatagctatacat

SEQ ID NO: 57011 - DNA, 4591 bp, Bovine  19866880200959
  misc_feature (1)..(1): n is a, c, g, or t
ngttcatctagtcagggctatggtttttcctgtggtcatgtatggatgtgagagttggactgtgaagaaggctgagcgccgaagaattaatgcttttgaactgtggtgttggacaagactcttgagagtcctttggactgcaaggaactctccagtccaagggactctcaaaccaggccattctgaaggagatcagccctgggatttctttggaaggaaggatgctaaagttgaaactccagtactttggccacctcatgcgaagagttgactcattggaaaagactctgatgctgggagggattgggggcaggaggagaaggggacaacagaggatgagatggctggatggcatcactgactcgatggacgtgagtctcagtgatctccgggagttggtgatggacagggaagcctggcgtgctgcgactcatggggtcgcaaagagtcggacatgactgagcgactgatctgatctgatctgatctgaaaggctgttttcagagtgtgctgaaagaaagcaaacacacactaaactttgagagccactaatatttaaagagtgtacagagaactaaatgaggaatgctcagagaagtgagagataaactaaaaaataagaggattcaagaaagcgaaactaagaaaggatttcaaagatgaagtagtatcaagtgataagaaggtgttaaccttggtgagaacagtttcccgtgttgaggtggaaactgaacagtaacaggctgaagaaagagtgtgaagtgaggaactggagactgttggcagataattctgttaagaagtgtggctgtgaaaaaaaggagaaggaaatggaacagcagctggagaggatgaatggaattttctccctccctcctcgctccttccctctctcccttccttttcttctctctctcttttttaatggaacaaaagagttaaaatagtgctttgtactcagagtttaatattcttgggtgctaagtcgcttcagtcgtgtctgactctgcaaccctatggattgtagtccgccaggctcctctgtctatgagattctctaggcaagaatactagagtgggttgccatcccctcctccagggcatctttccaaaccagagatctaacccccatctcttaggtctcctgcattggtaggcaggctctttaccactagcgccacctgggaaacccttgagatgagttaattttagaggttgactagacccatgctatgacttgtggaagttgaaagatggtaaagatctttgggatacaggaggtcagttgtgtagctcagatgtggaataggatgttttataggtaaggatgaagaatgtaggtcacataacaatattatcattagatggcagggaactgtccaagggttagaagatgagagctgtaggctcaggtaaatggatataaaatcacacagcatgagcttaaaacaagaggggcttcttgaatgaaaataaatgtgtgacaaatagtaagtggcagtagggagccaagaggatgccagcactgccacaagggctgagatgtttatgttgacatatgggagaatgcagagttcctgctagagaagtcagcatgagaagaattgacctccctttgaggctaggttactatttaaacaaaacaaaacagccattcaggacatgtcctgggagaggttaaagacgtaaagatatagaggatttggatttcttgcttctttttcagaatgaagagttccaaagacccatggaaggatctggaatgaaggcagaactggagggaaaggagcagaaggaagatgggccgctagggctagtggtcttatctgtgatatctaagatggagagggggctaaagagttgtaggttagccagaaatgacataggtgggattccatttattaatggaaatttgatttctagtaattttggtagtgccttgaacccaagtttccagttatctgattttatagatagccggctatgtataggctatgtatagatactaagatgatctagcctgccaggaagccatgggatattaaggcctcttgttgcttcttagcctctagcatgtgtcagatgagtccaaactttaggaggaatgaatagttgttacagtcagtggcagtcattatagtaagcatgactaaatgtagtgatcccattattctcacttagccctcagcaggacatattggaatctgagagatgcttatgggaaacctgtggttcatcagtgggattgttgaggaacacttgtttccatctctttcctcataggagttagctgaaattccccagtagcctcataacacagagttagtccctttcagttctaagagggaagaagtagggattttccaggagaaaggagaatccccagtctcagtcccactattcttgataatcacaaacaaagggacaaaattcctgaggtcaccgtatgtattttcatgccttccactagaacttccggagaaggcaatggcaacccactccagtactctttcctggaaaattccgtggacggggtggggagcctggtgggctgccgtctgtggggtcgcacagagtcggacacgactgaagtgagttagcagaagcagcagcagcagcagcatgagtgtatttttataatccatatcctatcatctcagaaactacatctgggtatttgtatcctattgcagttttgtgcattcatttcattcttacctaacagattacgtgtctcttaaaaacagttttgtggacatattttttaaaaaatatgattcagagtatatttaattcttgatttttacttcttattttcccccaatatctaagttgtgactatgagagtaagtattttggattctaaaggcatattgccaagttaggataattattcttgtcagtaggcatttttggaacccacaggggaggtatactattgtatttgagataaagaatgactaagtaaagaataatccataagaaagaatactggaaatgaaaattattgaaaattctgtaatatcaattattcaacatatctattagaatatattttggaaccattgaaaaaataatcaaaattgtacaaatgtattgagaaaacagtaggacgatatgttccagcatcatatttcatcttcagtttagaaattcttttaggaaaattatatttgcattttaatgagaccttttattcattgcaagttcagtgctattgatgaccactaaggcaggtttacccgggcataatagcatcctggggagatggtgaagtaggaggcaccaagggttcatcccacccaggcagtagttacacagacagaatttggctgatgtaactgttttgaaactctggaatctaatgaaggcttgctacttttaggggaagggttggacattaaatcatgctcagttgcaatttcagcatttaagaactacccatcccactctccttagcccaatggcagatagctgtgcatgtgtttctgaagcagcttgtgcatggcttgcaggagccaccgtggcaataagaactctgtccttcaaatatcagggatttatgttctgattgctgattgctgtttctgatcatggatttgcagacacagaggtgggcagctgtatttcttgcaccacatcttaccgttggaagcccctcctgcttccagatgtagtgaattccaggagaattaaagggccagcattcccctgctctacactttatttttctttttttcacattttgggagccaaagattaaagataagaatattcaaaagcaaccatgtgtatagggaaaattagaaagccgccatgcatgcccagagttccaaagaagagcaaggagagattaagtcttcttaagtgaacaatgcaaagaaatagaggaaaacagtagaatgggaaagactagagatctcttcaagaaaaatgaagataccaagggaacatttcatgcaaagatgggcacaataaaagacagaaatggcaaggacctaacagaagcggaagagattaagaagaagtggcaagaatacacagaagaactgtacaaaaaaggtcttaatgattgggataaccacaatagggtggtgactcatctagagccagacaccccagagtgtgaaggcaagtaggtgtcaggaagcattactacgagcaaagcttgtggagggataaaatttcagctgaactatttcaaatcctaaaagatgatggtgttaaagtgctgagctcaatagccagcaaatttggaaaattgagcagtgaccacaagaatggaaaaggtcagttttcactccaatcccaaagaaaggcaatgccaaagaatgttcagagtattgtatgattgcagtcatttcacatggtagcaagttaatgctaaaaatacttcaagctagccttcaatagtacatgaactgaaaatttccagctgtacaagctgggttgagaaaatgccagaggaacaaaagattaaattgtcaacattcattctgcttcattgactatattaaagcctttggctgtgtggattacaacaaattgtggaagattcttaaaaagctgggaatacaaaaccaccttacct

SEQ ID NO: 57012 - DNA, 1934 bp, Bovine  19866880398631
  misc_feature (1)..(1): n is a, c, g, or t
ncttttacacctctctaagcacccatgataacctttcctcctcatcactgatgttgtcaaccatctctctatataaacttgctgtcagtttgcttatcttctcaggcctcaactctttctgacttctacttccattaaattccccttatgatcactttcctaaattcaatggaattttttcaactctttaattttcttgatctttcagaagattttaacactcatgtcatttagaagggtctatatgatactaaagtaaaaaacaactccaatcccttaggctcaccataacacaggtctctttcttgctctctctgtaggtccattgagggttagctggaggcctttgttcaactcaatcactcaggaacttggacctccagagcagcctctaatttggacactgcttgttatcctggtagagggagacctctggtgaacttcatacaggcaattatagactatgcccagaatcaacacacattctgtttgcttataactctttagccagaactaacgcatggccacacccacccaccacaagccaggaaggagagccatctacgatgtgcctgtagacagagctggaaaattctgatgagttggacacaattcctactgtgaggttcactgatcccttcctggtacttactctcccttggcatctgtgagactcttttgatgcttttcctgtctctagctgctctttttcaaagcaaatgagtctttgctgactcattcccctctactgtttgtcctagcagttcatctctttccccatgcaatctcatctttgccactctttacactatctgctatacattaatggtataaaatttatatcaggactctcctctgagcgctaaacccagataactagctctcaagctcttccctcttcttcatttctactcctgctgctgctgctgctcctgctactgctttgtcgcttcagtcatgtctgaccctgtacgactctatgaactacaccctgccaggctcctctgtccatgggattcttcaagtaagaaaactggagtggttttctgccctcctccagagtatcttccccaaccagggatcaaagccgagtcttctgcattgctggcagattctttacttgctgatccaccagagaagtccttctacccatgcaattcaatcaaaaaacaaaaaaacatgaacttgtccctaaatggtttccttgcctgtatttcccacctcaggaagtggcaccatgagcagtccaattttgaaggccaacctccccaaatcacctacttcatgcattccatatctaattcatcactagcccttgccaggcatatctcctaaatataattcatcccatatccctctttcccacttcactgtcatgactctcctccgaacaacccacttcccttgcctcaaatacaacagcagcttaagtggcctctttttttttttttttatctatgtttgatgctcttcagtcaattcttttttattaaaaatgaaagaaaacacaatggtttttccagaatgtaaatacaatgttccagccttcaaattaaatagctttcccttcctctcagtgtaaagctgaaatccccatttggccaggaaggccctccatgctctcttgtgtcccttcttatctgcccactttaataatattactcttaatgattagtcctgttctggaggagatttcttctaatttctagattttccaagatttcttccatcagagtcttccacatttcttccaactggaatactctcctctctctttccgtttagatctgggctactcaaaggaaagccttcatttgagtatctatagaaaattttacattccatgataatttttgtaaataattcctgttcattgttcagataagctccatgaggccaaggcctatgttttgtttcttcactttatttcccag

SEQ ID NO: 57013 - DNA, 2865 bp, Bovine  19866880571433
  misc_feature (1)..(1): n is a, c, g, or t
ngagtgagcaagcttttcttcagtgatggaaggtatagaatgaactttaaatagtagcattaccctgggacagtcacagccctgtggctacctctgtctgtaaaatgacagatctgaactaaatcattggcgctaaaatattttcttagaagaaatgttctaaaaaataatccctttgggcactatgctagataaaactgataaaaccagaaccagtgcatgaaatgggtgtatgtttctacatgtgtatgggagtgggcctttgtgcccccaggagaggtagaaagtacagtctattaagcatcctttaagtcacacttcccacctcctactcccacccaccttgaacacacacacaaacctattagcctctgagataactccaggaaaatgctagaaattcactgaccaaactttggaaatggataggctaaacaccagcttctactcctgccttattgttccgtaatactgtgattctgaagttcagaagaccctgcattcttatcttcacccatcactttttgaaactgagacaaataaaagaaaagaatagcgttgcagaatccccctcagcttcagggcattgtggtagaggtaaatcaggaaacattgaaacaggacaatgaatggagcctggaactgggctcattggtgtctaacaggtctgtgctcctaactggctcaagcctgggctaacagtctgtgctcctaaatggctcaagctcagactgagtcagactgtttatatctatttccgtgttaccacttttacaacttcatcttatgtaaccaatcaatagatttagaacagacatcttttaaactcatggtgtgactgaattgaccagatgttcagctgaattgacagagctgtttctagtataatgtggacgcagcctgagagtcagtgaaaggtgacagaactttgacttttccttgtccagagatagaaaaggcaaaaggaggaggaggcagggaaaatgcaagagaaggataggtagatgaagaatcagcaagggagcaatcagcagcctacacaggagtcccagatacaatacttgatttcaagggaacctctctctagtttaacctttctctattttaaaacttattttaaaatgaagaattgttgaacagagattatatgaggcagatggaaggagaggctaatttaagactaaaacatgaaaactacagcaattaatatgttgttcatcactaagaataagataatcttccttgtcactatgtataattaattttgattctctgatgtttcatgtatatatcaatactaacttttaacataaagcaaaaagaaagccaaattgttgggaaatgtgctaatatcacacatgcatgcatatatatatacatgtgtaaacatgtagtctattccaaagccaaggaaaattgcttcatggcattttttcagcgtgctatctgaccaatatagttcatgcatcagtgggtcctggtaactctggaaggagttgtttctacttggttttaaattccactttgtttcactgtaaatgaacaaaaccaccttatttgtttttctaaaaaggctgacttttttttagcacagtaaaaaaaatgtagattcaagcatggggattttcttgaagaaaaactgatgaatattcatgcaaagactgaagaatataaaatatgaaatgtcaactttcctaaaagtcatgggataatttttgtggaaggatattatattacttaaaaaaaaaaaaaaacctccagaaaaaccccaacaacaccacagaagcgagtgatatatttaatgccactgataaattatgattcttctagataaacatgaggagggaactggtatgctactttgaattattatcagttatggtatatttataaagtgatagtgatagtaagaaagaaatttaaaaaaaacaacaacactaaaacatagtctaaaatatccttctccactttgttttccctcatagcacttataacccttgtgccttattatttctaagatcatttaaacatttttgttttgttttctctcttttaactataaaataggtctattataatattaataaaaatttattgttttgttcactgctgtatccctgacaatctttttaagagctggcactaataggttataaatattggcagaatgaatgaactggtatgtggcaatatgtgccaagagataccgagtcagtttacttgagtataaagagaaaatctttttgaaatcacagcaaaaagacgaagctaaccatgatagtgaacaaaaattcatctggattcaaatccaaaggaactttcaatgctggaaggctatggagagatgccattggagaaaaaatgagttcggaatgtgataaagatatatagcttatataaggctaactctcctacaaataattataaaataatatataaaccaagttgaaggcactttagaatgtccaaaggcagggagcgtcatggaatatttcaacttttgaaagaataaatggccactgggtcagatccatatttatttgcctttgccccaaaggcacttcccacttcatatggcacaggggaagaattattcaagcagaaacctgctatttcattaggttgagttatcagagaatacatgagctatacattgaagggggaaatcctaagaagaaaggcaccagaggcaatgagtttccaacccaggatatacactttcctcaaatcctcgcttgacctttgaatcacaaggaaaactccaagaagtctagtggaaaacaacagctggaaaaggtgaaaaacctgagtagttctcttagctcctgagtagatctcttagctcctgttatcttggtatttgta

SEQ ID NO: 57014 - DNA, 1321 bp, Bovine  19866880652082
  misc_feature (1)..(1): n is a, c, g, or t
ntacaattaaaagttgatatttttttctcaaataacttgcaatatggtatatcagggactcagaataaactcttatttcccctgaaagtgagtgaggtaatctgtatgcttgtacacacacatacacataaagacatctgttaatggagtgcaaaaaaatcactattttaatcaagggacacaaaattcaacacttttctaggacttaatgataaatatatactttggaaaatttctggaaaatcaaaagttccagggaaattgatgtaaagacagctgaaggtttttccagagtgatcttggtatgacaatggcagttataccaataaaaatacagaggagtcaacaaatggactattatttaggttactgttacgaggcaagtaatccatagacgttccagcaaaaacttcacaggggattctctgttgttgattagtagaaaaaggacagcatggaaacatcttttgatcatgtgaagagttggcatatattccattatgtgctatcctgcaagcaacaagtgaaagaaaacagcagtgaatttctaaactacagcttggcaggggtcaatttatgaatgattcatcttatgcttgagtaaagagccagaaagatgtaatgaaggaaactatgaaattgtaagcacaacttggctcactttcttaatctagagaaattaggattgatgtgacctaaattaactttggccctaacatttaagggcttccctggtggctcaatcggtagagtctgcctgcaatgcaggagaactgtgtttgatccctgagttgggaagatcccctggagaaggaaatggcaacccaatccagtattcttgcctggagaactccaggacagaggagtctggtgggctacagtcaatggggtcacaaagagtcagacatgactggctgactgacctacttaacatttttctatgatttgagatactcactgaaattaactggtaaatggcacagtattaactgttttgggaaagtcgtagtatgatcatgactcagggacaaagtgatccagaaaacagatgtcataggcagcccagtggtgtaagagtcaatggcataccgaaacaggacagagaaaaaactccagggggatctttcttataagcttgcaaaagtggcctttccctttccaagacagcctcatatggggaagaatctgatcatgttgggtggggggagtggggaggcatatggcttttgcctatcgctctttctagtatatttgttccaaacatagggatgaaacatgagtgatatttaatataggtcattaaaggataccaagaaaatcc

SEQ ID NO: 57015 - DNA, 990 bp, Bovine  19866880751810
  misc_feature (1)..(1): n is a, c, g, or t
naaaatgtaaaattaaaagtatatacacaagaataaaacatgcaaacaaaagaggagaaaaaaccagataatgagaatgaaaaagatacaatatacataaggaagaaactgcaaccactggatataaaaagagtacaaagagatttcttctaatttttgaatctgggtctctttgggaacaaaagaagcttaccaccatagtagtatacattctaaccaacagtttcagcaacagccttcttttcctattcagaatattatttgtgttcttagtctcagttattgcacctcagagagccataaggaacaagtctgcatccttaatttcttgtttcttcctgtcttttaaattcagatgtgtattctttccaactgtttgtcttttttctcccttccctgcagtttatcaggatgtttcctttctcacatcattcacgtaagcacagtgcatattctgtctattacatggtactttacctacagaactcagaaggttaccttgtcattggtgttggcccaaccacccaaatcttactgcctcatcagaaacacattgcctgcattcatcctctgctctcatcagcctctgaaggccaataaacaaatcaacactatccactaactaaagacaaatgagacctctcagactgcaaattccttctgttgtctatatagacattctaatatatcttgctttttcattatgagactactgctgctaatttttcacctttatctggctagtgagacaggcatgacactttatttcacaggtgtattaacattttcagatgctcagttatcttttcatgcttggaaaggtttattaactaagacacaatggacagagcatcaacttttacagtaatgtctctcaaaatggttatctgtggagcacctacattaggatcaccaaataataaaaatgtaaaaataattctttatcaagagaagaatttttaaataaattgtaacacattcacacaatag

SEQ ID NO: 57016 - DNA, 1094 bp, Bovine  19866880970236
  misc_feature (1)..(1): n is a, c, g, or t
nattgggggcaccactgtaaactattattaatgaggctagcattttaggatggaagaaacattattagaaatccattattctgagtcctggctctctcaggattctgattcagtaattctagaataggatccaggaatctacatttttatattggcttggccaaaaagtttgttcgggtttttttctgtacaacgttacggaaaaacccaaaggaacttttctgccaatccaatacattgtatactgatcacattcaaagaaatcttaacctgaagatttaaatgctgataatctagagtagatactacagataaaagaaatacctgatggtttgacaaataaacaggagaaagtttgacagatatcctttgaataataggttttgaaagaagtacctaactagagagactatagggaataaagtgaaggacttgaaagaaggcagctcacaatagaaaagaagagaaggggaataaagcaaaccttagtcttcatctaacaaggctcctcaccactgactttgcttttgggcgggagtgcatggagatggagttttggaaaacagtctctcccaactacagattagtctctttcctacacagagatggaccaggagagaaggaaagatgtcataatattctcatggaatgatacaaagaactctggccaatatgtgaagaactaagagataaagcagaactcaaacaagattttcaatacaaaagaccaaagctagaaacttccacgtgtgtccttgctatctctaggtactgagagaattacgaacgctttctctgccccactgttattattcacaataattcccagaagtactctcatgtaccaaacggatcatattcagaagtagaaaatgattcagtaatttcattttaagtcttttccaaaagtctattcaattcctggactctttgtacttgcaaaaactgaatttgcctaccagataaaatgttttttcttagttctctagagtattagttacttcccaatcagaagacagaaactacacagtatttgaaagatggaaaatttagtataaagaaatagcaacagaagactgaagtaatagggaatt

SEQ ID NO: 57017 - DNA, 991 bp, Bovine  19866881386559
  misc_feature (1)..(1): n is a, c, g, or t
ngtggtttaaggaagtaaatatctgtccagtgggaggaagatttggtttgagttctacccattgagtgggtagtgttttccttaacatctgcaaaggaacttccagtctcaatgtattacacacaaatctgattaaaagacttccacaaaatttctagcctcgggaactttcagtctttggtaaaggacaagagataacggtaatgtgactcctatataaagatctatttttaagttttcaaatgcttcaaaagatgatctgtctctggggaatagggatgtgctacagactctgcaactgttggtgccgctctcattacagagtctaaccaaatgggatttcaagagcagcttcccaaagaatcattataaggacatttaggtctaaccagatgcatcaagatgtcagattctcatggcctttgcattaattcaaataaagtaagcccttctctgaggttttgaaatgttcagtttcttttttactaaaatactgactcttggagtggaaagcgattgaagtaaagttatgtcttatttacgttattgtgcaaaaggaataagtaaaatgaaaaatctcatttgaaagtattttgtggtttgctaaataaaagcaatatattggtaaaaaacagcaagaaaaagaatattgtgtcttaggaattaagaaatttatcaaactattcagttacaaataccttttgtatgttttgttatatgtcagactctgtgctaggctccaggcaagcccaagaagtaaataccctttctgttgttaaggcacttctagtctaatggtatttcccctgagaactagaagaactgctgtacaatagggtctcagccatttctcctcacccacagtcaagaatccatacttcaatgatgtcctaagtctggtaataccaggtacatgcattaagatgactttttagtgatctcctgtgaaaatggccttatctaaattatatttaatagaagcaatcaaata

SEQ ID NO: 57018 - DNA, 1946 bp, Bovine  19866880369270
  misc_feature (1)..(1): n is a, c, g, or t
nttctgctacattgttacaaggattaaatacctgaactggactgtcagtaaataaattctatcagtgttattgttatatttttgttaattacctgtgatgggtagaattacaaccaactcttgaataatgtgggtttggtctgtgcaggtccacttatatgcagagtttttaaaaacagagaatatggttgaatccacagatgctgaaccatggatacagaggaaccatgggtatggagggccaaccataagctatacctggagttttggactgggtggaggatcagcgcccttgaccccctccttgtttaagggtcagctgtctttcctccctcccctgccccgctccccccagtcagtcttcttccttcctggaggaatttccttgtgtgtgtgctttaatcttatgcagtgtgtatatatttaagaatactttgtgtacaaatactagctctgtctttgtaagtttacttccaaacattttaatatttagagtattgactattttttgctccctggatggtttatttttgtttatttgtgatgagctcattcattcttattagagagtgatatgcatctattctgctgtgccatttatttcttgtttatggaagattatttgcaagatcttgagctgtttgaatcaatctcgtctgggcaggttttagtgtattcaattctggtttgggtttaataggtgttctgttaggtttggattgcttaaataaaataattcctttgtgaaaacatctgtcatgttggaggttaaaagatatctttttagaccaacagccacagtaacattttagtaatctgtcagatagaatttgcattggctttgaacactatatatattttaagatcattttaaatcctccagctaggttcttatattactttgaaatagatttctaaatgttgagcatgtaggtattatcattctgtttatatggacttcttgtttccttatagatcaggctaacccctgtcctttaataagttggtacagagttaaggtcctcgggcaagggggccgggggcagggtttgactgtattactgtttaccctagaactgttgtgcaggctaacatattatttactcttttctgaacctttgatgaatgtttattaaataacttttaaacagctaatgacataggctttcaagttaactaaactttagtgtgaatccctctaaagagattatgaactgtccagcccttggcaagcttcttacccattggaatcctcagggtcttattctgtaaagcgaaggtttattctgtaaacctatcatagataggttcattagaataaagagagacttcatgtcaattgcacagcccttaactcggtgaatccttgcaaacaaagtcataacaattattatttacctagtactgtcataataagtgatctctgaaatgagctttcctgatagctcagttggtaaagaatctgcctgcaatgcaggagaccctggttcgattcctgggttgggaagatcccctgaagaaggaataggctatccactccggtattcttgggctttccttgtggctcaactggtaaagaatctgcctgcaatgcaggagacctgggttgggaaggtcccctggagaaaggaaaggcaacccacttcagtattctggcctggagaattccatggactctatagtccgtaggatagccaagagtcagacatgactgagtgactttcactttcaaaatggttttcattacttttcagtactttgctgtgtaatgttttatgtgatcagcacaaatgggaacttctgtatgtacaggaggcatcagatgctctgtttaaagcttccttcagtttagccaagatggggactggattgctgcctcttgtcctttgctctgtgcctgggggctgaggggatgcgtcagcagacactcttacctctggcttctg

SEQ ID NO: 57019 - DNA, 2898 bp, Bovine  19866880444798
  misc_feature (1)..(1): n is a, c, g, or t
nctcatctttccctcataccatgctgttttttgcaaaagcctctctggcctccggcttcacagaatcaaacaaaacaggacaatgacagctttgggacctgggtagagctctggccctgactccactcagaggccatgggtcagtttgatgggtcgccatcaaagagagcctttatgaagacggtgctttgagacacccaatcagtgcgtttttgttagtttctccaaacttaagctgagtcaagctgtattgattaaaaccggttgggaaatgaattcctgaggctgatctataaagaaattcaatctggagatggagcgaactgtcgtcaggattccttattaggcacttcgcaccaggggctaaataaagcaaacaaacagatacgtaacacaaagggcacactttttcaggggatgaaaatgacactgtggttggggaacatcacatctaataccataggaactgaccatttcttaataaccaacaaatcgatccctccctaacaatgcttccaagaagcgagaataagaagggactatattaacaaagagggatggaaatgaaattaagtccctaacccagccttttcagtatctctaagataggggggtgatcctgtcagaaactgcattctacaaagaatccagaatggttgcctcatttaattaggaggagaaaagcgtgtggggagagagggagtcttctgggtaggggagtagagcaaagagatcgaaccttctgtttcaaaagttgcttagcaaaagcaattttaattgctgcctttgttataacagattaaaggtagttatgtcctggtgtacctcactttaagcaatcaatgtgttcctgaatagttatgtgcaaatcaaattttgtaaatcaaatccaattttaaatgccctcagagagcttgttctttccaggaaatttttggtgaattctttggtaagacctaagacaatcctcttaatttattgggttggtagctttaatttcttttagatgatgataaatgttattccctctcccatattccgaagaggggactgaaaatagaatggaaataaaatgacttaatgatgcgatatagtaactgatggtatctcctatggtaggttaatttagtaaatggtgagcttacctcttgtattttctatgaataatgactagtatttaacatcgggacaatgagactgtaagaaaaaatcaaaaaggattacttggaaggagttttaagaaatatctaatccaaccttcaaaaccgatttctctttgcagtattccagaataatgactgtttaggctccacttgaatactgttagaatgagctgtgatattcattgataaatttattcattaaatatttattgagcattaactatatgggggacaggaagaaaactagatattggcacccaccttctttagaacttaattcacctgggaaggcagatattcactaaatggtaacacagtaattgatacattatttgatagacattatgaagattaaatataggatgctatgaaagtagtcagggaaaactgacccaaggaaattgcatttcatctaagacccagaagatgaataggtgctgagacgaaggagagccggcagaggacgccatgtgtgggattgacactgtatgtgggactgtggtttgagatagttattctggctgctgtgtgaaaagtggactggatcagggcaaagataggaacaaatagacccacagtcagggtaaaagatgctggtgacttaggccaagatgctaaatgtggggctggagacaaacagattgtcctgaaaaattattgggaatatgctcagtaggacagagtgattgtctgtatatggaggtgcatgcatgcttagtcgctaagtcatgtctgactttgtgaccccatggactgtagcccaccaggctcctctgtccatgggatttcccaggcaagaaaactggagtgggttgctatttccttttccatggtatatgggaagtatgtgaaagcaaagagtgaaggatgatcttggcatatctgagttggacaaatggaaagacagttatcccgtctactgatattgagagcattagcaggagaagagattagggacaagagatttggtgcaaataattctgggcatgttaagttagaggtgccatcaatgggaaatgtccagcaggcagtttagtaactgagtctgggacttgactttcatgactgtggcaccctgtaagcaccttgcagcaaggccagcacacagcagccccccacgactggcttggggttcaggacacggttccaatctctggagaaacaaagtcctagactgataaaccaggccagcagccaaaactataactggaacataagacctagatctagacaggaattaaatggggagtgtggggacccaggacataggaatgcaggcgggttcaagtattagtgttcctactcaatatttatgatttgggtcattgaggtaataaaagcagtagccaggagacttttttttaaaaatgtggaccatttttaaagtctttattgaatttattacaacattgcttctattctgtgctttggtttatgaccccaaggaatgtagaatcccaactccctgacaagggatcaaacccacattccctacactgggaagcagactactagaccactaattgtcaaactgctggtcccaacttctggaccgctagggaagtccccaggagactcttttgacctctgatgccaaccagcattgtgataagaggcaatatgctctctgctgctgctgctaagttgcttcagtcgtgtccgactctgtgcgaccccatagccagcagcccaccaggctccaccgtccctgggattctccaggcaagaacactag

SEQ ID NO: 57020 - DNA, 2067 bp, Bovine  19866880493486
  misc_feature (1)..(1): n is a, c, g, or t
ntgaaaagtgaaagtgaagtcgctcagtcgtgtccaactcttcgagaccccatggactgcagcctactaggctcctctgtccatgggattttgcaggcgagagtactggagtggggtgccattgccttctctgtatcagtaagagagcaaatcaaaagaaaaggagagagagaaaactcagccagggggcatgataggaaaggagcccacttaggaagcaagttcaaattttgatatgaatttagaaataaggggagaggtgggccatcagaggcacatgccaggaccacagggaaatgtacaactgaggagcgtattttgctatgtaagccatgccagttatgcctgatagctcagatggtaaagaatttgcctgcaatgcaggagacccaggttcaatccttgggtcaggaagatcccctggagaaggggatgggtacccactccagtattctcacctggagaaatccatggacagaggagcctagcgggctacagtccatgagatcacaccgagttggacagggctaagcgactaacactatcactttcaagccatgcctattacacaggtctgagtaactgtgaggccgggaaaggcaaagccctggggacaagactgtggtggaggtgtcagaactcacaaaaccccggcgttcaaacttcagaagcctcacctgcattttcagctcaggaagctgctaaggatgctttttcagctacaacaaaaaccaacttcacagtctaaagtgatgccatagctggaggtgctggcagcagccaccaaagctcagacccatggcaatggataaaccactcttatcatggtggggggagccaggatcacccccagaactgacagaaggcacggacttcaagagggtcttttcaaccagcattgaacgggtgcttatggtagaaattgaaaccagtggctgttgttcagttgttaagtcttgtccgactttgtgaccccatggactgcagcacaccagggttccctgtccttcactgtctcctggagtttgctcagaatcatgtccattgagtcagtgatgccatctacccatcttatcctctgccaccctcttctcttgccctcaatctttcccagcattaggggtcttttccaatgagttggctcttcacatcaggtggccaaagtattagagcttcagcgttatcacatgaacacaatgaaaaccagtggagaaattcccgtattgtcaatggcctggataaataggagctcatatatgctattgtaaaaatttaaatactgcctttgtggaattcagtctattgatgtgtaggaatttgttctaggaaaataattataccagagcagaaagataaatgtgcaaagcagttcttgaaaacattatatgtaatggtacaaaaaaaattatttaagcaacctaaaatatccatcctcaggaggactggttagatgcattgaagtaaatccatctggcgtagtgggccatggccgtttacaatggtaatatagatctgtatgtattgacttggaaatatgttaactgaaaatggcaagttacacaagagtatgcataatagagtcccattttgttttttctgggaaaaaaaaagaaaaagcatgagtgagtctacataaggaaaagctaaaagggtcgaatctcagcagtgaggtctagcctcgtagttagaagtgggccctctgcagccaggggaccaggctcttattctcttattcttcttcttaggctcttattctcagctcttgcttgagacctgggacaagttcctgaaccttctttgatcagtttcctcatctgaaaagcagaggttgtagcttgatatctgaagtagagtagcctgaggtcagctctccgtgaccaaaggtctgaacgtggcgctgcattttgcctctaggtcttagatgatgcgatggtgtggactgatgctcttcttgctctttacccttgcttgctccctcccttcttcccacttttgtgacattatctgtgaaattaaaaactggtggcaatctaaatacccaacaggagaggagttagataaatcaag

SEQ ID NO: 57021 - DNA, 1498 bp, Bovine  19866880499341
  misc_feature (1)..(1): n is a, c, g, or t
ntctttaaaataagcctattgacatgttccttgccattttactaaaaatgtgtgattgataaattatttgtaaagcacattctaaataaaatgtgctatgtaaatgctaagtattggccctattgagaagtgttagaaagcaggacacaaaattttatgtgcttaaaaacagattcagggaaaaagaacataactgaggccccattagaaacacattaaaaattaaaaaaaaaaataagcaaaagctttgctctaagtaaagttaggtaatttacaatggtgccacaaaaagttgaattaaaagcttattttaaacatcatctgtgtgaaagtaaattttaaagtacataatgtagttaggagggaaaacaaacaaaaaaatggaatctaagtcaatcacatctgaggtttagcctgaatttaaccaactgcagagcagctatgtaattttcgacaacttctttagacacgatgtaattgtttcttctgatgtcacataagacactagttacaattttattggtctttgaaataatgtttttaaatcagtagagaaaccaagtcataggtggcaccttacagactaaattatttttacaattttacattttaaactagtcattactaaattatcactttaactccccatctgaaaagtgaaactatcgtaacactaacaccaacactgtcatcaattgtgaagagtagaaaatggattagaattctaattaaatatgtgtaaatgggatttctctagccaataaatttagaatctatttaaatgtgttaccctggagaatcagaaaacgtttttcaataaaatcattaaaagtaatttattaaaaattcagtgggttctttgccagaaatgtactcttcagatatgtttgccaaaatatgctaatatttatgttcaaggttaatcctgggatcggtgtttgaataataatctgtaagaaataaatgttcattatttgaagactaattaaatagactctaaaacatgcatataaaatattatgcagacattaaaaagaatgaagcaaaaccgcatatgcttatatggacaaaggtacaaaacaacccattaaaaacaaaggttacaagcgagcacgggacttgcagggtaactgaggagtttatcaaagctcttccataaaaagcaacaataaaagctgactgaatagttaaaaacaattttaggactctggaaacttattgaagggatacaataaatggaaaataaaataaatctgtttgtgaaaaactgctaagtctcaggtaagaacggggggagcctgtggtgattttgtctgaggatgcttccatccctcctcccagcccagatgacgcgtgagttccactaggatggtaaaccacaaaaaccagaaggaggcggttcactcagctgcaaagcacgaacgaaaacgcttcacatccagcagcactgccaatatcagcagcaactgggagtgaatgaccagagaagaccagtcag

SEQ ID NO: 57022 - DNA, 1730 bp, Bovine  19866880544171
  misc_feature (1)..(1): n is a, c, g, or t
ncatccaaaaacacccacccagaatagtatttgaacaaatatttgagtatcttattgcccagtgaaattgatacaaaatcaagcatcatacttggcatggtccagttacttagcagtgagaccagatggggaggagccaatggctggctctaaagcccacactctagaaggagagatgctgagaagaggcagttgtagccacagaggggagtggcaggtgatgtgatcaggcactactagaaccagaaggagagcctgccaatgaagagattcgggtgttagctggtgcgagtggaagcacacccaggaagccaatgtgcaagaaacagttgaagggatatgggcatacggcttcccagctgattcagtggtaaagaacttgcctgtcaatgcaggaaatgcaggagacacaggtttgatctctgagtcgggaagatatcctagagtaggaaatggcaacccactccaatattcttgcctgggaaatcacatggacagagaagtctattgggctacagcccatggggtcgcagagagttggccataactgagcacacacacacaagtgatgatgtgagcataagagcactgagtgtgtctgctgcagatgcctggaccagggaggctcctcagagaaggtgacatttaaagatgagaagaagcagacatgagcctaacagggaggagaagccagacgttaagtggagaggacagggttctgcagaaactgaaagagccatggacagtggtaaactggaaaagggtgctggtaaaatctgctttatccttcctgttttataacagggacaggggaggaagcgggaggcccagagaaactgaataacttgcccagttcacagagccagcaaagccagagacctcagttctgactgcatgagcaagggggtgagggaggcaggtaagaccatgctgtcagaggggtgaggggactagagacacaactcagggagcctagcagaagagaacaggcaggaacaccttgacccctcctcctcccactcctgacccggggagcctcctgggttgctatggttctttcttcgggcaggaaaagcttctcaagtacaaggatgtaactgaacagacacggttataaataaagtgacagataccatagcaacagggaaagcaaaatgaaatgcgccatcttattgtaaagggcaaaacctacactatatatacaacaagcaagcatctccttcctcttcccagtgctttcctacacagacatctcagacttcacacgcaacaggcctgtctcctccactgaagcaattctgatacagaatttatacatatctttgtgcccgtctctttgtgtgttcaagtgtttagctacataaagtgcccccagctctgtacatcaagatatactttaccttatgatccagcaatcccactgctaggcatacacactgaggaaaccagaagggaaagagacacgtgtaccccaatgttcatcgcagcactgtttataatagccaggacatggaagcaacctagatgtccatcagcagatgaatggataagacagctgtggtacatatacacaatggagtattactcagccattaaaaagaatacatttggaatcagttctaatgaggggggatgaaactggagcctattatacagagtgaagtaagccagaaggaaaaacatcaatacagtatactaacgcatatatatgggaatttagaaagatagta

SEQ ID NO: 57023 - DNA, 1271 bp, Bovine  19866880692882
  misc_feature (1)..(1): n is a, c, g, or t
natgaggattttaataggaaggatggaaggaaataaatatagaagcctagaaagaagcaagagagggagagtggaaggaaggggcttcagtccataacctgacctcctcctcctcgtattttcagcagtcaggacccagtactagtaactgtgacttccaaggccagtcctggtgcctacaccttaatccagtgctcctgtttgttcttcatgattccgcccaggtggcatctctccaaggggccattcttaaccgtcatgggtaggttagatggtccccagatgctcccacagtactgtctttccacatactcccttttttatatagcaatgatcttattacatgcctcacttccttacatgggcttccccggtggctcacccagtggtaaagaacctgcctgcagtgcaggagcaacaggagacacgattcaaagatcgtgtctttggaagatcccctggaggagggcatggcaacccattccagaattcttgcctggagaatcccatggacagaggagcctgacgggctgtggtccatagagtcacagagtcagacacgactgaagtgactgagcacgcatgcacaccgtcttcacaagactatgaaatccatgttattaccaccaccatccttcataaacacacaagttggttggagctcagagaaattaagtaactaccctaaggtcacagagctaggatgtgcagatccaagatttaaacctgccttaccctggtctcattccaaatctcttcattttccccatttcaaactgttttctacaacaaatagattgctaaagtgcccccattggaaacatgtttctctaaagtgaacctcaagctggacactcaagagtggtcccaagggtcctggggcaatggaacattctgcctttcaaagagaatgatcttataattcacaagtttgcctttcaattaaccgaggactgtgactctttatttaatgttatttctacataatctaatttcggctgcaggttaatggacccgtggggagttattgctacttcagtttcaaaagcattcagcagcattcccagattattggtcattaatggaatcacccagctgttttgactttctcccaatcctttttgaggtgaccttagaggaaaggacaaaaacagagaccaagggactcactcttaggatagtgggactcgctgaactcttatctacttctgccagccctgtgacctgtggattccaggtcctagaaaaccaaggctcatctccagacccta

SEQ ID NO: 57024 - DNA, 787 bp, Bovine  19866880755998
  misc_feature (1)..(1): n is a, c, g, or t
nccagaggcaggacttgaggcttcctcccatgcagcaggaagcctgtggagtctccataaaggccctaggaatgccagaatcatgtatatgttttaaatgtacttcctcgggtggtatatgctgctgagtgaatctttaggaccaccatgtgtgaaataaacttcgtagtttttattttcttttcttacaatgacacccttttaaacatgagttttctttcttcaggaagaagagttgaggaaaagtggagaagcaaagtacttccatctcaatgatgatctccacgttctcattgaagtttttgcacccccagcagaagcctatgcccggatgggacatgctctggaagaaatcaaaaagttcctcattccagttagtacagtgtttcttgataattaattggtacttgaaagtcctccctttgtttaaaatcctggataattcttatcagtaattgttatttgcatagtgcttgatctgctaaagtgtccctgtgaactacttggcatcattccttctttttctgtgaggctagggatcttgaaagagatgaggcaatacagctcgggtgacccagcaagaatggtgaagagcagtcagtggtgtgtgttttgggtcgcaggtcctaagcctttttgtgacactgaagtcacctcacaggttcattgctatgcagcatgagctcgttggtgccggccacgagctgggcgctgtgcttggagctggtgcgagatgagtgcagccccggcctcgaggctgtgtggtttagggaagggatggatgcag

SEQ ID NO: 57025 - DNA, 1502 bp, Bovine  19866880760980
  misc_feature (1)..(1): n is a, c, g, or t
ncctctctttcccatgtgaatctaacgtctcaggtgccagtattcattcttacagtttctcttcaatcatagaatctgaggttacacagcctcagatatgcatatgacaccaccctaatggcagaaagtgatgaggaactaaagagcctcttgatgaaggtgaaagaggagagtaaaaaagctagcttaaaactcaacattcaaaaaacaaaaatcatggcatccggtaccatcacttcacggcaaatagatgagaaacaatggagacactgacagactttattttcttgggctccaaaatcactgcagacggtgactacagccaggaaattaaaagatgcttgggaaaaaagctatgaccaacctagacagcatattaaaaagcagagacattactttgccgaccatcatccctatagtcaaagctatggtttttcccgtagtcatgtatggatgtgagagctaggcagtaaaaaaggttgacatcaaaaaagaattgatgccttcgaactgtggtgctagagaagactcttgagagtcctttggacagcaagaagatcaaagcagtcaatcctaaaggaaaccaaccctgaatattcattggaaagactgatgctgaagctgaggctccaacacttatggacacctgatgtgaaaagttgactcattagcaaagaccctgatgctgggaaagactgaaggcaggagaaggggatgatagacaacgagatggttggatggcatcactaactcaacggacatgagtttgggcaaaacggcatgctgtgacccccacgctggggacactactgagcaactgaacaacaacattaggccttcaaaagtcaatggcaaagttataatataggaaaaggaagataaaaatgatcagctttttcatttatgagttaaactataatgtaagtgactatcctttttaacctcaaagttagaacttatgggtggacaaattctagtgtatttatggccacaggatattgaaaactggtacagttttggaaaatataggatatatgattgtaattggtataatgtaattttttaaagattggtacacttgttttcttagtagtgactttgtatctgaaaatgcttccccatccatcacttgagaatctgttctcccaccttttaaaatgtggagctccaagtgagatctctgaaaatgatcttcagtgaaactgcttatctttctcatggccatctaaaatgtccccagcaataacatgtaaaactgactaatgatatgcatatgcctctcctagcaattcactactcctgattcttcacagtgagatatgctcattaaaaaagcaagattaccatcctacagaaaaggtagtgattaatttaacatgttttatatcaaaataattatattcgctttacacaatttaatcaaatccctacaatcctctctaccctctccttccctgctgtggggaacataaccacttaaacagtctcgagaatttttaaag

SEQ ID NO: 57026 - DNA, 1926 bp, Bovine  19866880959916
  misc_feature (1)..(1): n is a, c, g, or t
ncctttcaagtagcttttcacccctatcctcttttaccatcccttctaggactctgatgacactgaatttagatttttgttgtattcacacaggttgctgaagtgctattcattttgggtttttttagcccattttctctctgttgtttggattgaataactcccattctgttttctaattcacagattccttcctgttcccactacatccatccattgagctttttatttcatttacttcatttttttttttttctaaaagtactgtttggttttctttatatcttctatttctttgctgagactctttttgcatttatttcaagtgtgtttgtaattacttattgaagcattttatgatgggtgctttaaaatatttgctagaattctcatatctcagtcattttggtgttgacatcttttgactgtctttttgatttagtgtgagatcatcctggttcttgcatgctgagtgattttgtattaaaacatgaacatcttaccttttatgttatgggactctgcatctcatttaaaccttctgttttagctgacttttttgggcattgctccagcaaggaatgagaaactgtggctctattagtgtcagatcgtggtagatgtccaatttcccacctggcctccattaatcccagagacataggggaggtgcttctccttactgagggacggggatgagagttctcactcccaaacaagttgtcactgatatttcaccgactgggaaagtgtaggaatgcatcgttactgctcattgtatgacctatactgatgccacagagtgcagtgtgaaatccctgaatctctacagcgtctcctttgaaaatacatcagtgggaatatggagtgttactgctggggaggggtagaaatataggcatccttcctccaccgttatcccgtgatggattggtactgtttcttattcaggatgttgcctttactggcataagcctattgggatgcctcactgcagatgggatggtatctacattgcctgcttggcctttgctggcatgagtgagaataaggacttttttttcccctgtggtgtttgttgggggtagagcagttattatctaaaagtttctttcttgctatgctgttccttcactggccctttggctaaagggatcaagcttttgttactttttttcccacttttgggatttctaagttgctggctcctccattttaaaccgtgggatatatgtggtataaagaacgtgcagaaaaccaattgtgtcccaactagctgggctgccatcttctctccaattttctgtcttcttttaatccagccttttagatctacatgcatgtgtgctccgttgctcagtcacgtccagctctttgtgactccattgattgtatcccaccaggctcctctgtccatggaattttccaggcaagaatactggagtgggttgccattcccttatccaggggatcttcctgacccagggatggaacctacgtctcttgcattgacaggtggattctttaccactgagccacctgaaggccttttagatctacataggacatgaagttgcttagtcatgtccgactcactgcaaccccatggactgtagcctaccaggatcctccatccatgggattttctaggcaagagtactggagtgggttgccatttccttctccaggggatctttctgacctagggatcgaacccaggtctcccacattgcaggcagatgctttaccgtctgagccaccagggagccccagatctacatagtgctacacataagaaaagctacatctaatccaatttcctagaatcaggagtcactaataatattttaatgcagacttgagatgtactctactctcagtatttgctagttcggaaatactgaactataaaattagaagaaaaaa

SEQ ID NO: 57027 - DNA, 701 bp, Bovine  19866881009952
  misc_feature (1)..(1): n is a, c, g, or t
ncagggaaggagcccgctgagaggacggcccagggtgggaggagaggacgcggagcgcctgttgatgccggtttccctggtccagctccctcccccacagtctctgcttctccaaacagatgctgagttacactgctctctctgttcccagggcctgttacgtgcctgccagcaacaaggcactaataaatgtttgttgaacaaacaaattaatggagatgtttttgcatataaaacacgatatgttgcttaaaaattcaatttgtgctcagctttgcagatgcgcatcaatagttggttattttaattacatccagctttttctgtgcagcgtttatgaagtggactgtggcagtaatataattaaactaatcagagtagcaagctaaataggattatccaagggtgatgttgaccctcaattatatgatatggtgaccactatttaggacagtttaagaggtggggggtggtccgctggagtgatcaactccctgggacacaccttctaggttcaaatccttgctctgtccctaaacttctgtgttaacttgaaagtgaaagaaagtgaaagtggctcagttgtgtccaactcttggccaccccgtggactctacattccatggaattctccagactagaatactagagtgggtagctgttcccttccccaggggatcttccctacccagggatcaaat

SEQ ID NO: 57028 - DNA, 1445 bp, Bovine  19866881019045
  misc_feature (1)..(1): n is a, c, g, or t
nttttgcacctcacacctataaggggagtaaagcgtgtatctcctgctcaattttctgacccacccagaggagaccagggtctgtctgtgtggcccgactctgcagatctcttctgagtgcactttttgttttcagctccaaaactgaaagttttcacaagagagaaggaagctctggaggctgagggggtgtacagagatgcttctccaaatctggaggagagaaatcagagaacgctttctgaaagatatattatctgggttgaggctgaaagaatccatgggccttatccgcagagaagggaagaaaaaatattttccagatcagtggtcagcaaaagctggtcttatcgcaagactgccagttgtccagcgtgactggtgctgagaactgggtgacctgaccacagagggcaccaggtgggggccggtcaccctccccaccccctcctcacatccatgctatctcttgtccggcaggcaggcaacatgaagctctgccggcagcaaaagtcggccctgtgtcctgttgcagactgacccacatgcaaggacccccagggccatcacgtccctcctccatcaggccctccaaggtgactccctgcccccggcactgacccagcctggtgccaattacagggtaaaagcgactcctcaccacggagctttcagatcggtgctattatccttacgtaacatttatatttccttttgtcctctgcagcctcaggacttccggctcctgattagtcatggaatgtgacttctgctgcaaggaaaaagggtctggatggctttattctgctccctctcaggtccttttgttaagctgtcccctgttccccaccccacacccccgagatggctgacgccccatgacaaattgagaagaagagagcagccaactatatgtgctaatgtataagcctgtgcccatttattacggggcaagagaaaatcaacacaggctgtcaggaagaaatggacttgatgtttagaggagggagggaagaggaaaggaaagaaggagggaaggaaaggaaggagaggaagaagagaaggaaggaaaaacaccagagggggcaaatatactcagagaagtcaagtacagtatgagatgaggtcaaaggtaggattaggggattggagggagatttccctggcagtccagtggctaagacacttagctcccgatgcatgggggccaggttcaatccctggtcaaggaactagatcccacatgccacaactaagtgtctgaatgccacaaccaaagatccagcattcttcagctgcaaaaaagatcctgcaagctgcagataagacctggtacagccaaaaaaataaatattaaaaaataaaatgaactcctttgcctacaaaaaaagaaaaaaaaaactagatggggccagctcacataacaacttgctaggcaggcaaag

SEQ ID NO: 57029 - DNA, 1116 bp, Bovine  19866881027034
  misc_feature (1)..(1): n is a, c, g, or t
nctgaatagattagtgatggggggcggggtgggggagcgtaatcaggggtgcagctttgctcatctccaaaggaaggaaagaagaggtagagagaggcaatcaacagtttagggcactcctttcgctccctataataggtttcccaggtggtgcagtggtaaagactctgcctgccagtgcaggagacacaagagacttgggttccatccctgggttgggaagatcccctggaggagggcactccaggattcttgcctggagaatcccatggacagaagagcctgaggggctacagtcatggggtcgcaaagaatcagacacgactgagtgacttagcatgcatgcacgggcctggtccagttctattcatgccacaggcacagggagagaaaactgcctaagcggtacttctttttggggtggtagtgaagatttcctgagacacctcatgaaaaagttaagagcattttggatattgtagatgctcaataaatgcaagttccattctttctttccaagaagggaattgctgcatttatgaatttaattttgttaaccttttatcaagggttcattaatggaattccatacggaaagggaaaacttaaggagaaaatctctccaggactttttgctctgtgataattagctgggggaagtaatgtgccaattaggctaagaggacagtgaagcttaaatatcatctgagtaattttgaaaactgttttgaacacagcttccagtttgtttcacagtctctcttcatccttgagcactcgaatgtaaaacattcttcctttcatggatatggtttgctgtttaagaggaaaaaaaaaaaaaaggcaagcaaaatgatgtgtcactggccttctttctgccagcttcaaattacccccatttaaccccagaagaacaatccaaagagcagcatccttcagctgaaatttcagcttaaatgttttgatagcttcccagctgaattgtcattcgtaagccttttaaaaattaattattaaaaccatttccattagtcttttgcttggccttcatgcaatcatttttcttggtgctgtttaacaagtgacaaaccaccagcattagctataaatacacgg

SEQ ID NO: 57030 - DNA, 4024 bp, Bovine  19866881031358
  misc_feature (1)..(1): n is a, c, g, or t
ncctgggaatagggtcattctttggattggagtatttgctaagttgctgtagcaatagcaataacaaaagtccaaagccactgtgtatatgagataaaagtttttttctctctcacttaaagactaagaaggtcacggcccagggttggtagggtagatctgccattttcaactcagttggtccagccagagcatttcacagagaaggaaatccaggctcagagagcaaaagggcttgtccaaggtgccactgcccacaggggacagagccagctggggcattcttccttccgggatggcactcctcccacactgccgtgctgacctcgtctttccctcctttcagatgttctagagcacgttccagtttagtgggtaagcaggcatctctctgccatggagctcctgggaccacctggcagagaggcccagaaaggctcgagcagaccatgtggatgctctcccagagggagggctggactaatggctcttccggcctgggcgagtctctgcatcctcccgaatgcctacggttcacataaggaccatgcagcccagggggtagcaaacacagggagggcacggctggtgtgagagctgcaggaaacaagcaggtgacctgagaatgcctcttactcacccagcatccattcacattagtcttgtcttacagtacaaagtcccaaaagaaagtttgggagagaggctcttttgcccctttgcccaacaggtctccccctcttttcatgcttcttccaaaccctaacaacctccacactcaagaaggaagagcccaagatcttcactgcactctgaacagcaggagggtgtgtgtgtatgtgtgagtgtgtgcgtctgtgtgcttacacatgtgtgggaaagcctatgtgtttatgtggtttagcaaagtgtatccgtaccctgggcatgcagagctctgagaagaagagtcagttttcacagtgtattttcacattgaatttcacaatgttcacatgcctcctgagacattaaacaagactcctgggacttcccagggcggtgcagtggttgacttcaccttccaatgcaggggtatggtttcaatccctggttggagagttaggatcccacatgacttgtggccaaaaaaccagaacacaaacaacaggagcaatattgtaaaacaatttttaaatggtccacataaaaaaaatatttttaaaaaggcccctattctttctttccaaaattcaaaactaaggacatgagttgaatgaactcaattaattcagacccagagccatggaaggaaaaatcagtccttggaagaaaaactgctccgaagtcaaaagagttctggaccaatacaccgatgctgaccctaaattaacagaaagcatgaggatgtgagctaaggacagggatcgaactgtttatcttttattggagctgatttgaattggacttctgtggctcccatcaggaagaattttgactacatcatctctttacaaaacatcagcaagtgaacagtactgttaattatatttcacaggtgcggaaacaaaagtgcagaaaagtaattaactgtccctaacatataccacgacctgacttcatggtctgcacttcaagggtccctatgctctgctgtttggaccgtgctttttctctccatctccaaggtcatgtattttttccagaatatagtggaggactcaccccctttcttctcccatcatggatatatccaggtcccacctggtcagagcccaatgagtgaagaaaatgtagcttaaaataccgtgtctgaaagctgtcttgttagggattaattccacagaacattaataggagttactcaaaagcagattctggaatcaattagtttgggaaattctgagttaaacactattaaagtgtttggaggggcttccctggtggctcaggtggttaagaatctgtctgcaatgtgggagacctgggtttgatccctgggtcaggaagatcccctggagaaggaaatggcaacccattccagtattcttgcctggagaattccacggatagcagagcctaggaggctacagtccatggggtttcgaagagtcagacacggctgagtgactaacacttccacttttttcaaacagttcagagacggattttagcatcagactgaaataggtgtgagtcctagcttgattgtctattagctttgtgactctgtgcaaactatttaagctttttgtgactcagtttcttcatccacataatagaaatgatactagtccctgccattgtcagccaggattcagtgcgagaaacagagaacattgcaagtattttaagtggaaaaggattcaatacaggaaattaagagcttacagaaatccctgtaaagactggaggagaaaatcacacctccatgagtgatgcccagaaaaaaaaaaaaaggaagtagaactgactgtacctctaccatgattagaaatatgaagaaacttaaggcctttcaaataccatagtaggcactattcagggttcaggaagccaccaacaccattactggactggcccgaccattaaaaagtcagtctagtcactgtctccaccacaaccgcctctctgtacccaagatagcatctggtccccatgaccacacgcactggaccctaaaaatagccaacccaccaaaactcactccatcacttcttctttcccagtcttaccgtaggacatcttgctagtggaactgttttctcagctggaatcccacgtataagagagtgtgaagcatgccatttcagggctccaacctctgcatttcagaaagatacacaagctgaatgggacagcaatgcggttagcacaagttcctgtccctgaagcacaggaaggccaaacaaactgaatgtcagagtttggagcagagaaaggcttattgcagggccatgcacggagacaggtggcccatgccctagaaaaccccaagctccccaaagggttttggcagagcacttttaaaagccaggttggcagggaggggagtgtgcagggtctgtgagcagcccatgcccagttctctgattggtgagtggagagggaacagggtggtgtcacatgggttagcattatcagttcttaggctccaggaggcctggggctgtgagcctatggtcatcaagtaaatatcttctgtttggtggtgggttttcacatctgcaaaacaactcaggaaatgtgcatgaaaggctagtatctgggtacttcagagagcagctaaagaagaggatgtggaggaaggctgaccccccagccagccaaggcctcatggggtcttgctcagttggagtcccaggtgccaactgactacatccagctctccatgctttgtgtcattatgagattgaatgagatactgtgcaatatgcacccaatagtgcctgaaacagaaccccaaaacgtctgctgttccgtttctatcgttgtcatctgcagcaagatttctcagaggctttattatgttgacgtacaagtttttcctccccgatggtaaaaatagtaggaagactatatcttctattttcttttttcagcccagagaaaaattttagattcaattatagcacttgtatataccttatgcctatcacctttgtgttatttttacctctctttgaaactttctatctttatttttatttggtcccttttaattcttctttatgtcttggcttacagtaaataggttctggaaaggtagttaaaattctttatggtgtgcagcctggtataaataaacacatctattaagtgagttgataaatcactcgggcatcaagggcatgacttttaatgatggaaatcgagaatgaaggtgatattttggatggggttccttccctacatcgtccagaaaacaccacgtggtttcccatgggcttgccctcacctcacacctcagtgctgaattgtcctctaaatatgagaggagaagccactggggaactaaggtggttcccaactctgcccccggcat

SEQ ID NO: 57031 - DNA, 1426 bp, Bovine  19866881081268
  misc_feature (1)..(1): n is a, c, g, or t
ntcctactgggaatgcagaatttacaagttagaaagacaagcagcaaaaactggtagtgcagattaagcatttaaaagctgctacaccactggcctcctgacctaaggactcacatgttagggtaggttggttatggaattggttgtattgactccagattgctcatcaaacccaagaaaactgagcagcgaggtacaccacgaatcacgcacaatctgcattgcagcagcaagtccttttgaggtatttgtttgtctcagacagaacccacagattagatataagaaaggagctcgccacctgccggccaactgtttactttatatctaagaactgtctcagaagctgtatatatcacaaaaatggcaaagtcctactaaaaccacctagaacagaatggccatttatgagggatattccaagtaggtaatataacataaaaggtggacctggaagcaaattccctgaatcaaagaagttgaaggaaacatgtgcttcacgctgtaacaagcccactctggctgctgtagagggaatgcagagcggctgcgctaatccaggggaagggctcttgacttggcctcagtggcgctgagattctgcccattctggaattgggaccaagtagattcggtgtgaggggcaggggatgggtggagctggatgggtgagggatgtataattaaagcccaatagattaaaattcctttaagaaatgagtaatacaaagattaaggcacatctgatacagcttcttgaagggctgctcaaagatttataggcagaggataaattggctctgacgagagaaagaagacgatgtgtctcagtgctcacctcttccagtggcaggtaaagtgtgaagaagaggaccatcatgcaaggtggccagtggccacctcctgtgccaggggcggggactgggcagagggcacagtggagtgaatgcttgtgttcccccaaattcctactgaaatgctaaagtgatggtattaggaggttagaaggtcatgagggtggatccctccctcagctccttccaccagtgaggagcagaggaaagtaggctgtctgcaataagggcccatccacgctggcacccttatcttggaccttcaagccttaagaaaagtgagagatgcatttctattatttatgagtcactggtctgggcactagctgtagcagtcccaactcagacagaaggtttgggagcctgaggtctctcttagaggagcaggctggagagcccaggagccctcctccacggagggggcacttggttacatcaatctcagtcagttcagtcactcagtcgtgtccgactctatgaccccatggactgcagcaccccaggcttccctgtccatcatcaactcctggagcttgctcaaacttatgtccatcgagtcggtatgtcatcca

SEQ ID NO: 57032 - DNA, 1226 bp, Bovine  19866881133797
  misc_feature (1)..(1): n is a, c, g, or t
ngttcgatccctgggtcggaagatcccctggagaaggaaatggcaacctgttgcagtactcctgcctggagaatcccatggacagaagagcctggcaggctacagaccattggctcacaagaattgggcatgacttagtgactaaactaccaccaccaccatttcatgtgagtctccataatggaaaaatacctcaatagggggtcttgttggttcctggggattaccactcttgtatgtactttccctgcaacccactcaccccccaaatttgtataatattatgttgtaaactatttctagataagcagtgatatccactgggaggagatgatatttaggatatgaatgacaaggcgggtaaggcatgtgcgctctagggaagagccatgtccaggcctcgccttcccccaggcacaggtttgagagaccaaggggagactttggcagagaattgcaaacgggaccttgaagccgtggtgggtggagcggagggagataccagctggcccgagctgataggaaagagtggaagcagcaaggagtgggcggatgctgtttctgtgacattttcttcaagtggttttcttcctgctctaagattttgctctcctttaatccaacttagaatttgttttcccattactgaggatgttatataccatgtatttgtttattccctttcagcttacaccagaaggactcctacctacttcaaacacagggaatgtttgtgtatccatacatgtgttctttatgaatttgtgatcatgctcaaggtcaaggtaggaggtcatttgcatgtcagttgtggagcatttcaggagaccaaggctgcccctggctcttctctgtgtgatgaagcaatgcagaagggtcacggcagctttgccaagtttggtcaaaagatgcctcctgttgctaatgagcatgggcttgagagtcaggagacagggttcaaatccaagctcacccactacgtgaccttgggcaacttcctttaccactcctggtctccatctcctcatctatataacaaagattctttaaatgagcccaatgcatgtgcactaagtcactttagtggtgtctgactctgtgagaccccatggactgcagacttccaggctcctctatccatgggattctccaggcaagaatactggagtgggttgccatgccctccttcagaggatcttcctgatccagggattgaatgcatgtct

SEQ ID NO: 57033 - DNA, 1473 bp, Bovine  19866881157904
  misc_feature (1)..(1): n is a, c, g, or t
natgtgcacgtaaaaaagttaccaagggctttaccttttggtttaattatgcactgagccctatacagtaatatgttcagcagtttaatattaatacatgataaaaatactaaagctttcctgaagagaaaggtttcaataaaacagaaatgttttccagtgtctacaagacaaatagaggtaagaaagcaaattttcaaaacgcgaagaaagagctgttgtaaaattatacattatcaacagtctgcattgaatgtcggctgtgagaaaagccctgtattcttcagctctgtggggaaacccaaaaaaatagactcagtgcatctgctcacaaggcatcaacatgcaaataaggaagagaaaagccaagtgatgacctgagaatacgcaggaaaacactcaatgaactgagacaaatataaccaacggtgaatgctgtaaaaaggctcagaagtttgaggtcctgcaaaagtttttagaggacagttctgactaggagctgtgacgtcactcagggtggagaacaggaagctggggtgggggggtgttgagaggagagagacagagtttatacacacatttcttcactacagagaaaactgaaaatttctaggttatatactgctgggcggtagggtggggcggtggtgataaatttactctcaagaacgtctacagaatttctaaaggaggaaatcagtcttctgaactgctgggaagtcaaactctagcctacttggaaaggcaataaagaatgtgagttcactgacagggtaaaaaccagaaataagaatccatagtggaaaaaaaaaatttctttttaacagaattctctaaggcccagcagcagcagcagcatcttaaagtctggaagctcggctggcatctgctccaggatatcctgttttgaagagagcatcccacactactcggcatgaaacacgcattcgcacagagcgcagtgaaggcagaaccccaaagattcctggtgttcatccacacactttacaggcacgccccccaccccccccaattctacctcttaagatgtaattacactgaaatgacgtctgcgaatagccggtagcagcaaacatctgactgaaagcttagctgtgtggtacagcttccagtcggggatgtttacaacaacagaccttctgcacaagttaacagagggcatcgacacaagtattgctggtcaccatctctaaatgcttgttaggccttttagtcctgaacactatctgtgacattttgggacaaaaaaatgaaatgattaatgaaattcattagcaagagataagtggtttatcaacagcaatttttcctgaataaattattacaaaagacaatatgcattgtaaagttatcttggcaaattagtaacattaaagatatgacccagttattctatacgaagatacactttctatttgatatgtgcaaaaaatgaagttttctctcccgtac

SEQ ID NO: 57034 - DNA, 882 bp, Bovine  19866881176737
  misc_feature (1)..(1): n is a, c, g, or t
ncagaaagccccaatttatactcaaatggttggaaacacatccattactcattttcttcctttttggaaaaaaactaactatgttgaattgcactgcatcctttaagttattcttagaagaccagtgttcacggagatggttaacctctgctattcacatggccactgtgagttctacatgctttagtgataatactgttctcaccatcagatttatttgctaacagaggctcttctcaatgacacacgctcagggaatatttgtgacggtgactctgatgaagaacagttggctcagatgacattataatcaaatatcttcaccaacacactttgagaaaaatcagtcgaatttcaataggcacatttcaacaaaaaaatacttttgcattaccaggctttcttgcttgggctaagaggaaacacttttatagtgcacatactattatgcccacttttataatgggtcattatttaataaaaataatttcaacatatatcataaattgagtttttcttgggcctaatactgcactggaataccttcattttagtacacataatctgaagaacattgagtattctaaggactgaaatatatagtttctcaaaaaaagcaccagttgtggcagaaataaaagaacaggtttcatctcttctttgtttaaataggcaactgataggacttctttgcatcttttattctggaaataatggccttagatactaaatgttaaatgaaaattaaaataaataaaccaaatgggtcagatataaccagcaagttctatacaaaaagatttgttaccacaaacatatttcaagtaaatcattaaaaattacgtttttgagttctaaaggaatgacaagccttttttagag

SEQ ID NO: 57035 - DNA, 727 bp, Bovine  19866881198708
  misc_feature (1)..(1): n is a, c, g, or t
ncggtgggtggtgcccactcccttggtctggatctggattgatgagttaaaacaccatcagatcgggactttactggtggtcctgtgggtaagacgctgagctttcagcatgggggactcaagttccatacctggctggggacagatcttgaatgcagcaactaaagatcctacatggagcaatgaagatcccacacagccaaataaatttatatataaaaaagactgtcagaacttcacaggccccaaacaaccctctccaatattgtcctttatgatgctgaaagttcttctgtctccttttgttctaagaaactttgtgcctgccaaacaacaggaaacgtggagagatagggagaacaaaaaataattaatatttaatctccttatctcctgaattttgtatatattattatgagatttttaattaaaagctcatctcagattcagtttctctattaaacagggtaaagggagacgggtagggtgaacaacatgacttaagtttagaaaggtacgggtttcattgactgttccctgatcctctgaaagacggtaatggcacacatcagataactgggaaggatcttcagctttctgtatttcaatttctgaggagagatcagtctggtgatgcactgagttggactattaattaactattgaaagcaaagaagaaaatccaaatcattgctgctcttgtggccccactcgagtgatggtagga

SEQ ID NO: 57036 - DNA, 1431 bp, Bovine  19866881235899
  misc_feature (1)..(1): n is a, c, g, or t
nctgtagacacctgctctactataacctcaggactctagttatacggctaacttgagaaatcatatgaaagcacgttcaagcctctgttcccagtggcaattggcaataatgagtaagtcataaataagcctcatagaacaagaagcatattgttttgtactaatgccaggagtaagaacggtcgctctcaaatatgaaatagatttgtgtcaagtatgtaagtcgttacgcacaccaaaacgtgttcatctttagcctcagctataccttcattagattcaacctgcttactctgtttttaatgatgaatacaagagcaaaaagaacatttgtgaaatacagggtacatattgtaattacaatttgtgtctagatactttatagaatattcataattgattttattagaacatacttaattattcaacttctatacgtttagttttcaactgtcttcaagaacacatcataaacaaattacagcatttgacaaaattccctaacaaccctgaagaaaagattttatatattatatgtgagaattaaatatagtagctctgataaagatgtcagtctttttgtcaacctttaaaaaagaaaaacagggaaattgtttgaaggagagacttgcaattgctggttcattgcaactcagtatgcagcatcctaattagtcaagtattgtgtgcctacctgggcatgaaataacttttttttcctaatttaaatctggaaattttcaattgcagaacagcttgaataccctttgttggaaatagccactgggttcttttttttaagtatttgtcttcagaaacaatgaaggtcatcttgtatccatagagaccacatgcactttcctcattatttctagcattgtttctgtaatgggtagttatttatgacatttaaagcaaaaaaaaaatgcagaaagcaacattaaatattaccacagtaaatatcagtgaccgaaatcacttactccatagtttctcaaagaaattaattaatattagaaaattagtagcctttcaaaattgtgtgtattgatgtgttcagtagttatcctgtagggtgtctgtctgtgtgtgtgtgttcatttcttggaaatcactgaaacttaattgtatactctaattgttttaactggggtttttttttttttttttaagaaacagtaacttcacatactttagatgaaagcaactcttggttttggtggcgtgccgattttttttgtcacctaatcttccttctgtctttcaggaaagtggtgtggtagcaaaacgattttagcctatcactgcttataaacaaagccgaggtcaggagttcgtttgcttattacctgccttgctttgttatctccatggcctgtatgtgcatctctaacctaactcagctgggcacaggcgaagaaggcatagagt

SEQ ID NO: 57037 - DNA, 1340 bp, Bovine  19866881252189
  misc_feature (1)..(1): n is a, c, g, or t
ncctcctgaatgttgacctcttgccttgcaatctggcagcacctcctactacagggaacagagtggtgctggcagtttagtcactaagttgtgtctgactctctgcaaccccatggactgcagctgccagtctcctctgtccatgggatttcccaggcaagaatactggagtgggttgccacttccttctctgagggaatagagtgtattttcccaatccttggcatggttcaacaatatgaccccctttggccaacagaatgaggctcaaataactgtgtgccagctccaagtccaggctctgaagtctcctcccatcagcatgggaacaacacaccccggacagcccctgtcccagaggaagaacaagggcctcaagggcacggaatcaaacctccccagccaaacccggtccaaatcaatggactcacaagtagtgcacagatcagtgagttcaatgcatgttccttgtggtacgctgagcttcagggtggatgttcgattcatcacaattgtagcaattagataaaggacgcagtgaacctgcaccgtttacagctgcctatcgaagcatcagctttctgctctgctaaatggagattgtaataattaccgtcctagacgcttcatgacaacaggtgtgaaagccgcttcacagatgatgacgcaccagacacacgtgagctcttcttgcctgttattaattagagagcgatgcacgtcgatctgttgcaaagagctaaattgagcctaatcaagtggtgggctggggagcgctggcaggaaggcagtagctagggccctttggggacagctaacagacatgtggctttgttctcagccacagcttgtcttggaccactcatccagagaaggcaggacaggctggattcttaggcgccagccttgggcgatttgcccagaagaacagggaggggaaagatgcccccagagtgggctcggggtgtgggagaagcatcctgaaagggagtggccagggctttcccaagggcacagtggataaagaattggcctgccaatgcaggagacacaagagacatgggttcaatccctgggtggggaagatccattggagtaggaaagggcgacccagtattcttgcctgggaaatcccatggacagaggagcctggtgggctatagtctgtggggtcacagagagccagacacgactgagaacacatcatgagcacgaattcatgagggatttctcagagacactgccttgctcgtcacatccaacacttaactaattggactgagagacaaacaagaaaggcttcagcatttgataaattaatcagtgagggctgcagcaaa

SEQ ID NO: 57038 - DNA, 805 bp, Bovine  19866881260086
  misc_feature (1)..(1): n is a, c, g, or t
ntctgtactgttttaattaaatttttcgctatggaaaacaagataattgaagcagtttagagattagttaactgtcaaaaaattataccagcagtcactgcaacgggaagatttgcgtcagtacaactctcattgtactcaaactcccagactagtcacataattaaaacttcaggtgagctctcagaagaatgaggaatgttccttcactgagtctttaaacaaaagctatattaaagaatgacatgtacattttaaagacatatttggtttttccctaaaggctttcactgatgttcctcgttgactaaacttcagaagggtttattcttcgggcagatggagaaacagtgttccctgtggtgccattttacagacaaagacactgtctatgtagtgttttctggagacaagtttcttcctctatagctttaatgagcccgatcgagggacaggcagaaagggtggcctgcatgcacaacacagtgaggtttctcccattcaaactgtctctatgacacttcaaaccctgggttaggttgaccaatgtcagaagccccatgaggaaatactagttgcagaagaactagtgacaccagtaacttagtcatagactgcttgctctagtaagtctcatgtaacaacctttatatctgaagtgatgaaataatttcccattcatttgataatttctctgtttgcaaatacagagttttaaattagatggaactggcttgtccaggaagcactgggtcttggctaagagtgtggctctcaagccagactgcccagctttacattccag

SEQ ID NO: 57039 - DNA, 872 bp, Bovine  19866881261074
  misc_feature (1)..(1): n is a, c, g, or t
nacagcaggggaaaaaaagtgaatacagcctgtctctctaggtagtaaatacacattctccagtgttgggtgctacatgtggtgggtttgtttcaacttaggagatgaggcttaccttatcaactcaagaccttttatcaaatgggggaaatttcagctacggtttcttcacatattttgcctgctccttctctcttcttttcttggatggcagtctcaggttagatcctcagactgcacttgccagcctttgtgcctagtgcaggactctgcagcacactcgcaggctgccatgaggggtttaaactgtcatggggccacctcagagatctgcagcttccagacgctgtgtgaactgtcagcgtatggtgatcatttgtcatcttagcattagatcatgccccactgatattaatgatactgtgtttttatacggctggcacatcagcagctgctgataaattctagccacagtcgcgttgactagtgggcaccacgtaacttctcaaccatgggatcagacgggacatggtcaccctcattttcgcatcaacactaaccttcacgtggtacctattctctttttaaaatggattatgaataatatcatagatactgaagattgttttagtgagagaaaatgatatgtttttctccacagtaggtgaagttatgagaaatgttattgggaaaactgaatagttaatatatgggccataaatatttcaccagcatatgatatgatttacattaatctaccaatctatattaaaatgtccttttttattattaaggaaaggctggaaataggaaaaatgatctatttctttttctactaaattataagtttccaactggaaaaaaacctgtta

SEQ ID NO: 57040 - DNA, 988 bp, Bovine  19866881386569
  misc_feature (1)..(1): n is a, c, g, or t
nacggcagcccaccagggctcccccatccctgggattctccaggcaagaacaccgggaaatctagtcgtctgtaaaatcggggtaatcgtgccaatcctgcttccctcgtagggtcgctgccaagccccaatgagatgagtgtgtgacaatgctttgtggattgtgtggttgcagacctgtaagctattattatttccccagctaccgtcgttaagggctcagcggtgccctgcaaccaaatcttctaaggaaatctaagttctcactgagaagcaaacaaaacaagttcattccatcttggcaacaatcagaaaatcagacggaataaaatccttgggagagaaaaatgtcttttgccagaactgcagcccactcaggaactttaagttccaagcttccaactcagctgaaacctcttccatttctagctcttcttgtcattggaaaaggcaacacagtgagtgagggaaatgtcccttactaggagactttctggaccttttttgcacttgcaaaatagtatcttgaatgacccccaagtgattcagaaatgaggagacttcactggcttattaacaccatcaatgcttcatgcaacatgtagcatggatttttcctcctctttaaggagacatcttcctgtctttcctgccttggaataaaatgcattttatggatttcagggtgtcttcttctttcacagattacagcagttctgaggatgttcaagggtgcacagattaccactagatggcaagcctcaaatttccagctagatttatcagctgcacagaaaaatccctaagtctccaatgcaccttgtgggtcctcttgcgcctgatgcttctaagaatcaagtccatactttgtagcatcacattagtgagccacccagctccgactctgactttcccttccgccagctgctgtttctcatcactctccacggttatagatgcactgtcctctgaccctacagaaatactc

SEQ ID NO: 57041 - DNA, 1862 bp, Bovine  19866881491288
  misc_feature (1)..(1): n is a, c, g, or t
ngtctcttaactgtcattgtgttattgatgattttatcttgcttaaagattgattcctactttttaatttgatggaaatcaagattttttgcttcaaaaaatagaggtatagttgtgcaagactttggaatcaagactttggtccaactggtagctatcgaccctcaatgagttattttaagctctctttgcctcagtctccttgtctacaaagtggaagcaatgcttactttatacagaagttgtaaaaaattagataatgtgattatcgcaaagaagcaaagggagcaaatataggtgctgcctgtaaaaaatcccccatgagatcctctctcttgctctttcctttcttcttctcgaaatgctccaggaaaccatgaaattctttcacgtgaccttctgactacatggaacaggagttctaccgtctgttccacaggcgcaagaaattaagtgttcacttgcatcaaaccacggagagttctattgtatatatcagctagctattgtgtgaaacaaacccctcctacacatttagttcccactatgaactgattcatgtccctcagaattcttatgttgaaaccctattgcctaataggatggtgttaggtcatgaaggtggaaccctaataatggcattaacgcccttctaagagacaccagaaagctctctctctgccatgtgaagagatagcaaaaagacggcggtccacaaaccaggaagggaattgtggcaaatgagttcctgctgtttaaaccagcctgtctatggtactttgtcatagaagcccaaattgactgagacagtggcttgaaacaacaccatttgtgatatctcacaaatgaatgagtcatttgtgacgtttagcttactctgaatggactggacttggtctcagttgggctcactcactcatctgaagtcaagagccatgccagctgtgggctgggtggtctggagtggattacgccgggataatcccacttccttccgtgtggtcactctcactccagcagggtagcccaggctggttctcatggcagtgacagggcccaccagacagcggggaagcacacgtggcctgctgatacctaggcatggaccactatctcctctgcggtattccactgaccaaagcaagccccaaggccagccatattcatagattgaggactagagccatctcttaatgggaggagaagcaaatcacattgtgagaggtcatgagttggggccagttttacgatgaacctacagcatagcaactagggtcaccttaactagtactgtcacaaacagatggtgatgacagagccagaattcaatttcagacctgactaacatcaaaatcagagccctttttagaataccataatactactttaaggaatacaaaaacaactttgatgaaaccaataataacatccaaatctacaaacggatagaagactgtctcttcttcctccccattatccagagcatcttcaaggatgctgaagaggtggaagcagctctattttgttactttccaggattaattcttcagatgtggagtcacctccctaattagttctaattagatgcatagttcatgtcaggtcacaacaaacccaaatgtgaataatttaagaaggattcaaagtcagtgacaacaaaaccagcttcatggctccctgggcgatggctagccttcctccacatggattgccaggtacctagctgactttgaataccaaacatgggctgatcttaatagaaagagggcaaccatcatgcattcaatggcctcagggagggacgggaggaaggagttgtaatttccttcacttctgggagtgcttggcctacactgacatta

SEQ ID NO: 57042 - DNA, 1497 bp, Bovine  19866881534301
  misc_feature (1)..(1): n is a, c, g, or t
nttgagtgcctgctaagttccggaactcttgtttttccctgctttattatggtatcattggcaaataaaagttgtacatatttaaggtatattatgtggttttgatatatgtatacattgtgaaataattatcacatgaagctcattaacatatccatcaactcacataattaccattttgtttatttgcggtaagagcacaagatctgccctcaaatttcaagtatacaatacaatattattaagcatcatcaccatactgaatcttaggtctccagaagttatttatcctgcataactgaaacttctaccctttgaccagcatctcccgactcccctcaccctcctgcccctggaagtcaccatattctactctctgcttttgtaaattctacttttggagattctacatgtaacagagatcatgaaggaattgtctttctgggtctggcttatttcacttagcataacactctctagtttcattcctgtccttgcaaataagatttccttctttttttaaggttgaatattttactatattttatgtatgcataagcatgactgagcgacttcactttcacttctcactttcatgcattggagaaggaaatggcaacccactccagtgttcttgcctggagaatcccagggatgggggagcctgctgggctgctgtctatggggtctcacagagtcggacactactgaagcgacttagcagcagcagcagcagcagcaagcatatatagctattgtcaaaaagacaaaagataaatcttggtgaggatgtggagaagaggaaacacttgtatactgttcggtgggaatgtaaattggtgcagtctttacagaaaacagtttgggacgttcttcaaaaaattaaaaatagaatgactgtatgattccacaatctcacttccaggcatatatccaaaggaaatgaaatccaggtactgttttagactttgtggatacagaattgaatagaatagttaaaattctaccctactgaaatttacattttaatgagaatacagacagtaaatatatcagccagcaagtagagagcatggaaagccattgtatcaaatgagttaatttaatgggacaatgtacaagaaggagaggaacaagaacagtcctagacccttgactttacaggttaggaaaaggaacagaagagtgtgagtttcctagaaaaccaatgtaaaaagaatttcagaaaggaggaagtcatgtttgagattctggccttacctccccctctagtgagacagatcactagacttccaagaatcgaagtttagtattgttcagaggctcagtgttttttttttttttcctccttaaatggggcccctgaatgttatcataagaataaagtcagtgaatgaatatggagtctctttataaattgccttatggataacacagaccatcatcatgcccaccagaaaatctgtgtgcccagatttggtttcatacatttttttt

SEQ ID NO: 57043 - DNA, 1335 bp, Bovine  19866881546844
  misc_feature (1)..(1): n is a, c, g, or t
ncaggggtctcattcgaggtcctccaaatctgacttccacctacttttctgccatcattccttgctgcctctttcatgacagtctcctgacagaggagacttgagtatttgactggttggaaaattcttcctagcttcctttgagggtctttgtgtgggcctctctccccatgtgaagcctgctcacaagcccatttagcacctggatatttttctgctatgatttgtttgggatctgtgttgtgtcttgttcttctggctttcaactcaaatgtaaactttttgaggacggtcttttcctcctatagggtccagataaaaatgcctgcagcaaatgacaccacaccaccctttaaaagaaatgcccaagattgcaataaggccggatcgacctgacctttaattatgtgtttgacttggaaattctttaccagtcatgaagcctcggtttcctcatctgaagcatgatcattatagcttctggctgcatccttgccagaatcagacaagaaatccaaagtatttagtgtgtgtggagcaattctcactggaaagtacttagcaccatgctaatgggtgcccgtggtctgccgccttcttccacacgtcctcacatataaacagggacctagtagtactcttactctgggaactagtactttacctgtaatacaatctccaggataaaactttacattaatgcacttattaatgtattaatttatacattattacttacaaagatgaaatatgctacttattatttataaagaggaaaaaattggtgtacaaaaaatagaggaggggtgtatgtgggctgcaaagttttcaaagaagatggagccccagagctgaaagatcaagaaagtgcatggaggaatccgatgaccgaaggatcagaaatgaaaccctgcatcggaggagccggcatgggctccttctttcctcttccagctcagtctgcggaaatgtcacctcgcgggaaaacccagggagcgctgatgctttgaagggttttcagaacattctcacctgctgtgagggtggggctgtcagaggcagcgaagagcacatcaaaaccctcggctgtctggagcatcagcctggcaggggtttcggtctcgctggatcagtttggataatctcaaagcaagaactcggccattttgttagctcaggaaaagaccctaaggtttttcccaaagtcaaagcagaaataaagaccttctctgcctgacaaggaaaagagtggcccagaaaactgtggacaggggctctctaagagatgccgggggccagagttgggaaacacccttagttcccccagtggcttct

SEQ ID NO: 57044 - DNA, 3083 bp, Bovine  19866881716867
  misc_feature (1)..(1): n is a, c, g, or t
naatagaaatctaatagcaagggacttgcaatgaagtagataataggcaaactacttatgctggatgactaagcaggctctgcggagttggagccgatgccacaacaaaacatcacaaactgagcgatttaaacaatagaaatctagtgtctcacagttctggaggctacaagtgtaagattaacgtgttggcaagttggcaacctttctcctaggctgacttcttaatggttttctcacagtctttcctctgcttgtgtctgagtcctgatctcctcatctaatgacactggtcataaacagggccacttcagtgatctaaccttaaaaacctctttgaagactttatctccaagtatgatcacatgctaggtcttggggttaaaacttcactatattcatttgctggttcagtccacagacttcgctggtggctcagtggtaaagaatctgcccaccaatgcaggagacttaggttcaatccctgggtcgggaaaatcccctggagaagcacatggcaacccactccagtattcttgcctgggggatcccatggacagaggagcctggagggttacagttcacagggtcgcagagtcagatatgactgagtgactaagcaacaacaaccaaaagctgagtccacaaaaaagccatactgtgtgacactaagatggggaaatgtgaaagcaggaatactgctctaagtggaatagaatcaggatgtctgtgaaaagaggaaccaaagtgccataaatctaagtggaaaggggcagctcgcaggtcttgattgacagtcgtctggacagtgggcttgttcaacactatgctgtcctgcatcctgactcccacagcctgggacccagggcactggctgggcggggaggttcagaagcataaggagccccacgttaatctcggacaacctcttccagtcgacactctcagtcagtgttgtactcgtaagatatctgtgatttccacgaggttgatgacattgtcaccacctgacaacagaaaggaactctctcaggcagcctgagatcgcatggatgcctctgccaccagatttgtcttcacgattgattgaatactttggccacctgatgcaaagagccaactcattggaaaagaccctggtgctgggaaagactgagggcaggagaaggggacgacagaggatgagatagttggatggcatcactgactcaatggacatgagtttgagcaaggtccgggagttggtgaaggacagggaagcctggcgtgctgcagaatcaaacaacttagtgactgaacaacaagttcccacctagacagtggtctgttaatgacctgttatgtgttgctcttccattttaaaaggcacagtgatgcatcataaaaatagtgagtgaaaaaataattacatgttcctgaaactgcttagtagtttatccttgaactatcaaatcattgcaattaattacttggtaatataacttttctttttttaatttcatgttaatgttccaatttactagtcacaaaagatcctgacatcactgctacaccagcagggtggatattttaagcagttttgacaatataattatggtgattagctagatatttgctttctatcagctaaatgataacaccttgtcctgagaacctgtttcttggaggaatctcaaagatgtttatcagcaagcattatttatggggagggtggggtgggtcaaaggcccccaggttgaggggctcacatttcaggttgacacgaggccagtggtagttaaaggagaccctagcccaagaatggcactcaggagaagcagatggtaagatcataaaagcttcatgtcaccagggagcctggtagcgggggtgtggtccctggatcaggggcccttgggactgagattcttatttctttaggctgtgctgggtctccattgcttgcaggctttctctagctgcggcgagccagcgctgctctgcagcagtggtgcgtgggtttctcattgtggtgccttgtcttgttgcagagcatgggctctagggctcctgggtttcagcagctgtgccatgtggcctcaatagcggtggctctcgggttgagctacaccgcagcacgtggggtcttcccgggtcggggattgaacccatgtctcctgcactgggaggcggagtctttactatcaagctatcaagaaagcccaaggctgagattctgcaccacaatgtcaggaatttgggcctctaccatttctgagaggccagtattagagcccaatataacagacaggtaagttcctgaaagtctgctatgtcccaagaagtctaagccagatatattgtgtgctcttgtgctaagtcgcttcagttgtgtccagctctttgccacgctacggcttgtggcctgccagactcctccgtccatgagattctccaggcaaggatagtgaagcagggaacccacctgccaatgcctgatatatttaccttggcagtaaaacaagcaaacaaaataactcttactttaaatgcatagccttattagcaattaaggtaacattaagtaaaagcaacttctaatttaccatagaacacctattgaataaacagtaccaaacagatgctgtcagggatggaaagacacacgagtacactctgcctcttttttctggagaaaggcaactcaactggatctataaaactattttctttgacttttaaattatttcaaatggaatcacatggatgaagttctgagtactttgcccagcacttagcaggtcagcaaggaaaccatgtctcctttcctttgggtactgccttagctcagtctcctggaaaatcaacctgaggcacagcctaagtgacagtgtttataaggggataaaaagcctgggtagcaagaggtgggagtttttgtttttttagtttttttttttttttttaataagagaaataattttaaggtgggagctttaggatgaaagtttcttttcttactcagggtatgatgaggccaacagatttggaaatgatggccacagtttgttatttccagttcccagaaggaaggacacacacgg

SEQ ID NO: 57045 - DNA, 1698 bp, Bovine  19866880398421
  misc_feature (1)..(1): n is a, c, g, or t
ntgctggatttataagttgaaacacatttttcctttggttttcctaaaaccagggtagtgctaagttgaagactaagtgccccaattatgaaaaaagtagaactttcaagcaaatcttggtacagttttctgatatattgaagttttgaatacattatatctgaaacccaagcattatttcttcctataatttaccttgaatgtacagagtcagaattcagcaaattgtctcttaaaatgcctcatcattttcttgtcttaatgaagcttacaaagacaaagctcttaaaaactgtgtcaaagaaaatacccaaatgcaatctctgcaggatgaactcagacaatattttcctgatgttgttcctgaaaatgctatttagaaggttataaggaatccttttcttactaatattgagtcattgccagattttaagaggggttttagaattcaaatttgatgtaactgtcaacaaaatatatggaacatcatttcagagattttgggggacaaactatctctgtttgtaacaagagaagaggatttgagtgccatctattttcatcagcatacatttgcaaagttctttttttcccttgtacttctgcctctgaaagcaaagtagtacagtgggcgcaggaacggcctttagtgtcattgccaaatacttctctggttctttgtttttcagtacctgttaagattacatttcctgacttcctctagcttgcatgaggctgtgtgaatagttctagccagtgagttacgagtgggaaggagacacaccccttgcagctgaacctttaatgccaaagtgagacactctagaacactctttcccatggcttcagttacttgccacataagtttcctagaagtgtcattaaaaattaccacagaattgggtggcctaaaacaacagaaatttattatctcatagtttaggaggccagaagaacaaagtcaaggagttagcaggcttcattctttctgaagattttaaggaagaaaccattccatctatgcctgtgggtgagatcctggtgactgctggcaacccttggcatttgcctgtagatacatcacttcaacctctgcctccgtcttcacattacttttctgtgactctgtgccctttcctcttcttataagggaatcagggattgaatttagggtgcagcctaaatccaggatcattttatctcaatattcttaactagttatgtctgcaaagcccctgtttccaaatatggtcacattctgaggttccaggtgggcgtggaatttttggagaagacaactcaacctactataccagccatggctcagacacatgatgctccatcaacccaggacctggagtgaagactgggtgggacagagcctccgccagcttacgggctgagaggataagtgagaaaagcatctgtgccacaggaagtactgagattttagagatgttcgttatcaagcatccctggacagacacaagactgatgttcaaaatgacccttttaagtgtccaatcgtccatctgtcctggtgtgaaaaagtctattttaagcaaatagactcagtggtcacattaacatcaaatgatttagatatataaacatatttttggaatttttatatatttacatattttttcttataaaattcatctgcttcaatattttgtcaaaatattagtcattcaa

SEQ ID NO: 57046 - DNA, 1065 bp, Bovine  19866880678190
  misc_feature (1)..(1): n is a, c, g, or t
ntttcccaggagatggactcttggtgatcttttttattcccacttatacctagaagaatggagaaggcaatggcaacccactccagtactcctgcctggaaaatcccatggatggaggagcctggtaggctgcagtccatggggtcgctaagggtcggacacaactgagcaattcactttcacttttcactttcatgcattggaggacgaaatggcaacccactccagtgttcttgcctggagaatcccagggacgggggagcctggtgggctgccgtctatggggtcgcacagagtcggacacgactgaagcgacttagcagcagcatacctagaagaaggccctgaacacatagtaagttcctgataaatactcataggaataaaatgtctaacttactagaaataatgggatagtgtagcctcaaaaatcagcatgtgtgttttcaccagcttttatctagctgttgtgaaacttttaactgaaaggggaatataaaaaatttagaaagagaatgagacagaaagagacagaggaaacaaatatatttacttgatgaactgaattgcaaatgggtttctgttgtcaatattaaaatactatgttatttcatttggagaacacagtaactctttgattgcattcagagatataaatccctgtgcatatcatcatgaaatagtattctctgaaatatgggtgatgataaagattctttgatttgagatgtctattcagcctcattccacttctctctgcagagcagcagttattcttgttagcagagatgtcagaggattcatttgaattttactgatacctttttaacactctactcatccaactgtgaacagatccttgtctatcaattatgcaaaaagagatgtcacttgaggtaaaaccaatatctcaaaacaaactgcttccagttcctgacactgtctctcctttagtgagacttaagaatagttctctgagtagctttattacttatatttatagttgaaacccactggtacgccagaatgtccatgccttccgggaagtacataggaccgtccaca

SEQ ID NO: 57047 - DNA, 2333 bp, Bovine  19866880788543
  misc_feature (1)..(1): n is a, c, g, or t
naatgtatgctactatatttaggggcttccctttatagctcagttggtaaagaatctgtctgcaatgcaggagacctgggttagattcctgggttgggaagaccccctggagaaggaaatggcaacccactccagtactcttgcctagagaatcccatggacagagagcctggcaggctactcttcatggggtctcaagagctggacatgacttagcagctaaaccaccacccacccaccatgctactatgacatagaactgctgtaacttaatagaaaatatgattttggaaagaggtgttcttcaggttcaaaaaacaaaaattattataaattaagaaaatgaaaagagactagggaaaggccattggattcatcattagcaaacctacaagtttagtgacattaagtgtagatgggaatgtgaaatctatccactgaaagtacaaggcgtatttggaaatattgatgattttagccagtcaaatctaggttaagagaaatggatgctcctccccagttgaccaattaaattcaataaatatgtattgagcataaaacacaatgcttaatgctatggaaaacattgaattttgaaagcatcattcacgatgccataaagcacttgtattttggaatgcagtatttcagttgcttcaatgtatattttggtggctttgtaggtcactagtcactttgaataaatgtcagtgagaaagtgctggcatgtgccaaaagcctgtaatcaaaattctgcctcatctgttgcatcctaaaactacctcaagatatgcaatatttattttctttgatataacaactttttgaccatagtttaaaaatgcattttaagtatttctgaagatgttttctgcaggcatatcaaacaaatttgcactcttggcagataaaattagggctagaaagattagatgacttggctgggcaatcaaacagcatttgtgaagggatagatcagatttgcagaccttttacctggcctaaaaggattcttatattttggtaaaatatatagaaatacataacattcagagacacccacctcccccaatttataatgcttcaaacccagtaaaagtttatttttttctgataagaaagccaaaggtagatatgcttggttggtaagagtctgactttcttgctgttaatgactcagggacacaagctccttcaaaattgtgacacccgcccccacccaattctgcagttcatgacattttttgcattcagttgatggaaggggaagcagagtgagcaggaacactcatttccaaaaggccttgtctggaaagtaaaataaatcgcttcttaatattcctttgatgataattactcacaaaaccacaacttcatgaaaggggggctgtgtgggagaaaggattttatggatagagagcagtctctcccttacattgcaagtgagattttaaaaatcaataatttaattcaacattttaatagtaattctaagctgacacagctagaaactagttgctaagggagatcacggcatgatccttaagcccctttgattgtttggtttcattttacaaatattatgaaacctcatggttttctctttagtggcacttctagcctagtatctaatttattgatacgcacaatttctcactgtctgtctgaatacattatacaaacatggtaacataaattctgcaggtgtcccatcactactgtaattatttgtcatgttctcacctcttccttggcttgttgatgctttatcgtgcaagagagatatttttggtgaagaacttttatgcaaggagtttcattaacaagaatgaagcacatctcttatcagatttgttttggctggggggaggattaccatggatttcccgtagctggtaaagcgcaggtctgcaggacgagcagcagagaccagcatggaggttaccgagcaagcgtctgcatctctgctgtcgtcggccctgggtgcttgtgtctgcagttctgcactgtgagatggtagatgccaattttaataagggaaagaaagacaagttgtgctaatatgcaaatatctgaagcattctagtggagctgagctgattaaattgcttattatgctgaagactcaaacagaagaaagagagaagcaaggatttttttccccaaagcagatctgatcatagacttatagcctccaggtggaatatatatcctgagtactttctctgagcaggagtagacactgctggattttatccttgcatgtcagcaactgcagtgagagggaatgctcatgggtgcttctcctgggtcaaaaattcattaagatttcc

SEQ ID NO: 57048 - DNA, 1247 bp, Bovine  19866880964861
  misc_feature (1)..(1): n is a, c, g, or t
ntctgggtcctaaatttgtggcaaataaaagcatcaaaaactgaagcttcacaaatctaaatgtaatttttatgtgcaaagaaagtttgctatttaaagcaaatctatttttctaactacatccacatttaacactaattttaaacaactctgtgttttctcatgcatatttagaagcaagcagctgcacatatgtatacaacacttggaaatgcagcttgaatattccttaaaatgccgggtttccatgtcagcaacacataaagccaaactcactgactttgacctcacgtactcactgttctctccagccatcaggacaatagttttcctttcttggattattttttagaagagggaattctagcaatttttagtttgatcttgctgccttttttcccctgggaatccgtaagcacttccacaaggccagatcaggactggttccttcatcacagtggttgcaaacacaaaggctaatttggtagcatattacacaactcagagatcaaaatgatgcctgtttttgtaaacagggaacacagccactctcattcatctatgcattgtcttttgctatttttcctatgtttttaaggaagtgagacggtgaccatatgatccttgaagccaaaagcatttactattttacccctgaagtaaatgagttggacagcagtaaataaaagtgaatggcagggactgtgatgaactaataaaggtgttttacatttgaagggcctagcaattactactatgcagaaaaaagcaggcacagcttaccaaattcaatatttgaaaaaaacatagaaattcagatttcatatgaaatcttcaaattgttaagtgtcagctactaatccaactttttaaatgaacgaaaccaaacaaaataatctactgccttgatctatccttttacaacctctgaagtaacccttaatagctacgtggtatctctgtgtgtctcagtttctcatcagcaagctgccaactctccaaaaataccaacaaagtaaaccctgataattaagcagaactggaatttttgcttgccttcactaaagaaagcaagaatagagtccaggtcctgtcttggagaggggagagaaaaggcaataagattgggtggtggtggggatcaggggggagcttggggaggtcctgttttaaggtgtgtctttcagggttgggggtgataggaataaagcaaatctggacatagtgcaggaccaggggcacaaagg

SEQ ID NO: 57049 - DNA, 1302 bp, Bovine  19866881387618
  misc_feature (1)..(1): n is a, c, g, or t
naaacatgaggtacagtcattctaattataatgtgaagtactgtcccccactgtaagaaaaacaatctctcaacttattagggaagttgggaaaacatgtctcttgccttaaggatttaggtggaatgcagtagttttgcttataggacaaatttggcctgaagacattttgttagcttacacagagttgtttttttatttgaattacttacaaaaaattaaattggagatctcacacatagaattgcgttttctcaggaagaaagaaggaaagttctaaggctgaatttccacatactaaaaatcaaacataatgtcatattgtctcacaaattcaaagagcaccacttagcttgtatctgatttagaaccattattctaaataatatttaaacaaataattaaaacattggcataagtcctccatgtaggtagggaatagtgtggatagccagaagcatagcaagtagaagaaagcagtggtcccagaaagagatgcatatgagcacagtgatacagagtaaggagcaaaacacattccaaagatacccccacactcaaagtcaaccattatccctccaaaggtgaaattctaggatgctttccagtgtgggaataattgtatttctcacgaactgttcttcctctgttatactgtaatttcctttagtgactccaaccttttaataaaattggttatacctatgaaggcttgcatagcggtgctttggacaacaaggaaaaagagaagtaaaggttggtgtgatttttctgatgtgcaagcatactctggaaggggttgtatgtgggagatccaagtggtgttcatcagagtgagatatagagcacacaaccttaagaagctgcaattccatgaataatccatgactcaaaaagaatacgaaactaaccctcactaactgaatacaagaggaggtgcagaaatagaatgaacagcagaaatatatatatacacacacatacgtacacaatatctgtaaatatacacacattcataaacacaggtataaataaaagacaatagatgaagagataggaagatggtttgttttgcaagtaattctttatgaaagaaaaaattgattaaaagattccggaggtccttagttttccttgcaaaattcctggaaactaaaaagttgcttcttgtatcttcccaacacctgtatagtcactgagtgacattgcatgctccagttttgacactgtaagcattatgctagtctttctcattgccagtttaaaactacgcccttatttaaatggctagaatgcatcttg

SEQ ID NO: 57050 - DNA, 1299 bp, Bovine  19866881419869
  misc_feature (1)..(1): n is a, c, g, or t
ncggctttcgaaaatttttaagtttaaactgattttgagtctaaggggaaggaaacagataaatacatttttcatgcttatgttttcaactttagtggaagtgtaaaaaaagtacttgtatttaaaagcccaacttgtacaaagctaccaatgaaaaatgacagatattatattatatctatattaaagctagaactatttacagtcaataaagcaaggaaacccaatttacaatgcaaacctgcttctaatccctttgcaataaggaatcttggaataaaagggtccaattcatctttttctaataagattagaaaaaactaaaaagctaagcagctgctatattaattaattagatttggggaattactattaagtacaagttttgtgaaagcacatgtctgatataattttaaagtaccaagtgatctaaattcaggtttttcttaaaagaatgggggtttactttctgaataatgtctttttattgtgacctacagtcctctcttcaaccctactcactcttctccatacatactgaaacccaactctattggtttcttgcccagataaactaaaatcacatggagatatttgctgctctagaaatgtctccatgcctttgcaaatgaagtggggtttttgtttgcttttgctttgcttgaaaacccatcccctgctcctgccctagtgcctccaaccacaattccaacttttctgagtagattaaggcactccgctttctgctcgcctggacttttatatatgtactttcagcacagcacttaacggcagttatgggacactgtctgcattgccttgctcagtgcctatcacatagaagcactgaataaaatttttgcataatgattagaaagacagaatatattattcctaggatgcatttcaaattcttttagggtagcaatttaaataaaaaataaaaataaaaataaacaaaggcacaaagcaacacttgaaaaaaaaaaagaaagaaaagaaaagcctgtgatgtcagcaagctgttttttctcctaattctctctcagtgctcttcagaacggctatttttttcttcctatttaccaactttaaaaaatgggatctgtgcagaagcctttgcttgtcttagttaagcatggtgagattctcagtaattagtgcttgtaaaacactacaaggttttcagatgaattaaagtgtgaaatcttattacaagcagtatattgctgaagtaacaaacaggcaggaaaattacaccatttcctagtttctacgcttttaaggaacaacgcaatc

SEQ ID NO: 57051 - DNA, 902 bp, Bovine  19866882106131
  misc_feature (1)..(1): n is a, c, g, or t
naggcttgaattttaccttagccctgcttgtctcattgccctacttttaggtttcattctatgtggacttgatctgcctttggctattaggttcatcaaaaatgttcagttttcaataataacttctagttctttgagccaggttccccagggcctttagatccacagccaaattacaaaaatgaacaaacagcttttccactctcactaataggaaagcaaacctctcatcacattctcagcaaagttggcctttcatcaaagtctcttatttggggtgattgggtgaaagatgtaatcaaaggacatttagttcaaacagaaaagtgtggaattgttagcacttcagttcaaccttgctttgagtattcaggcaataataattatagctacaaaagctacttgccttgtgttaggcaatatgttctattctttacttttaactctactgatagattttgtaaaaaatatggactatttttatctcttttctatataagaagatatgaagttttgaagagttgagtgacttgccaaaagtcacaggagaggcaaattacaaaatgcagattcacgaaagtactcctaatgccaaagactattattttaaaaacttcccactgctgtcccccttagaacaagggcagtgatgatgaggcaagggcgtgttgctttctctttctgtaagagaaagagcccaatgcttgagtcctctcctggtcattttcatttctgtcctgaaagtgtaaggtagcagagtcatttagatgcccctttcgtacccaggatgaaacaaatgatttcttaatgttccctacttggtaggagcttaaggaagctacttattcctttatgtcattgaacaaaccatgaggtcaggattttttttctcctggcagatt

SEQ ID NO: 57052 - DNA, 1027 bp, Bovine  19866880350352
  misc_feature (1)..(1): n is a, c, g, or t
ntgaaaaaatttctttgccctgtgtagaataaatctgacaagaaaccctatgagtttttattagtaccattattgttttctttggcttcatgtactatatcggtaaaatgacaaaaataaaaagaaaaaaattgtaaaaaggcaaatattttgtacaaaaatacaaagttttaaaagctctttaagtatatttcatattgttactaagagttggcctatatatctgtatgtctgcatatttttcctacatttgggattttatcaatagaaatgtaaggtactgtttacacggtgtatgttttcagttcttcctaaagctcaacaaccaatgataatcttttttctgattggagcattccatactctggaagatatgatttgcataactgtatggttattggctgagaagaatctatgtgattcagtccatttgcttactgacaatccatatatcacactaggggaacacttttgttccaaactttgtccttgagcaaggcagatggtagagaacatgggctttcaatgttttcagtaattggtcttcagtgctttccccttcaatttaatgagaaggtgatgcaatcagaaagaagtatctttgccttcgagaactgtcgacagtttgttcctattatgatatcacggtccattataatgtaattgctaattctaaaagagaggaaaaagaatggggtgttagttcctcttaaagaacaatgttaacggacaattcagaaaaaggagtgtgtgtttttaaagaaaacattccaaatacatcattcagtaattattttttcaaataaatgcctccaagttcttattcagattcaataaaaggtaaaattcacttcaaaggagcctattctggggtgtcctagtctcaactcaaatcccaaacgtagtagtgctgttgtgctcagtcgtgtctgactctttgcagccctatgggctgtagcccaccagactcctctgtccaagggattctccaggcaagaatactggactgggttgccatttccttctc

SEQ ID NO: 57053 - DNA, 975 bp, Bovine  19866880352289
  misc_feature (1)..(1): n is a, c, g, or t
ngtttaaagttaaaaagggggggaagggtgtctctctgcctgactctgacttgttagagacaagatatcagaatgtacaaagattccctctgggttctcataagtgtgtgggtgtatcatcctcagaatgtatatattcacactcaagcccagaagtcagcattccagtacacattagaaagctgtcattcattgagctgtgttgaagacagatttacttcctcagcaatgtgatggaggcagctccgtgagctgcctctactgtggccgagataacaagcctgcagggagaggctgcgtcacacgctcctctgtgaaacagctgctccttattcagaatcagtgtgtgcagctttttaaacagcgcgttttcattctgggacgcatgacaggccttggttttgttttttacatttctctgctgctcttgggtcaagcaaacgtctgcgtgactttgcaaataacacttgatttctgttttcttaaaagaaattggaaagctggacagccagataactggggtcatggccacgggcctggagaagattgcgctggactgattaattttgggcagtggaacgatttcccatgtgaagacatgaatcacttcatctgcgagaaagacagggagagaggtaagcagtggaagggatttaagagagcacagcagagcttatatcttattaaagggcaagaggtgaggagtataagggctctgaaagtaggttctgcaactggattccagtcctgattctgccacttagtatcttggcaagctattaacctcagggaaataataatagtaatcctcttaatggggtttttgtgaggacttaagtaagttaatacatgtgcctaatgtagaggaagtactcagtaaattttagactaatgggtgggcctaggtcattaccttataatattggcagtcagtgttctttatcatatggcaccaatgtcatatatctttttata

SEQ ID NO: 57054 - DNA, 801 bp, Bovine  19866880560022
  misc_feature (1)..(1): n is a, c, g, or t
ntggaaggctgtctgcttttgcaggaaaaatttgccttttttttttttttttttttaaagaattctctgtatttctttccttggctacttaaaggtcattttgtcctttttgttgtaatcagaatctaaagttaataggtatagcttttaaaagtagaatagtatgtattctgtgttactttttaaagttttatatgcaataaagtttttattttatatgcagtacttttttttttcccctataactgtccaaattgagattaaatagtaagtgagaagtcacttggaattgtccctcggctggatagagtttgacatcatgtttttatttggtcgctgtctttagcacaaaagaggcttgagagttcccactgctgattagacagctaactttactgacaaatctctttattctctcaaaactttaccttctctgttttctccttacacatactacttaagaaatcacatatcttcagaagtagagagcgtattctagttttagaataaccataaaatctcacacagaatagttttatcctattttgctgtcataatttttcttccttaatgtgccttcagtagtgcatatatggttaactagaaataaattacagattattttgatatagagaagcactaagcaagtgattgtgcaacagtgccaaattaatttgtatttttattttgcagtattctggaagaagtcctagctgtttttaagagttataaattagatgatactcaggcctcaaggaaaaagatggaagaattgaaaacaggaggagagcatgtatattt

SEQ ID NO: 57055 - DNA, 912 bp, Bovine  19866881161428
  misc_feature (1)..(1): n is a, c, g, or t
ncaatgaagaggtcttcgacaacaaaaacagggcatgaaaagctgccaggtgagtgaggcagtaactgtggatgctttcacaacacctggagaaagtgctaaaccctagctgtgactttaaggtcatttattgcttacttgtttactgtccttctgagtattacggtctcttcaaacatgccaccaaaattctagcaaacgagaatgggagagagatataagagttgagaatcagtgagctaggttgtcaaaatgtcaaaactaagagaaagaagctgggagtagagtgaaagacgaataagatttctgacagtagctgcaaagcctctgctttgggcattggacttcccaggatggcactagtggtaaataacctgcctgccaatgcagaaaacctaagagacgtgggtttgatccctgggtcaggaagaccctccagaggagggcatggcaaaccactccagtattctagcttggagaatcccactgacagaagagcctggtgggctataatctacagggtcgcaaagagtcagacacgactgaagccacgtagcacgcacgcaccaggcaaaaacatctccaagtccttccaggcctaagattatgtcttaagaagacagcgcatttgctggaaaatttatgccccaccaccagatcccaggagagagaaaggaaggggtgaagggaaagtaatttttcatggagctgagcctgagaccactgtcaatgtttaattatatcacgcttgctgtttatttgggtcattttttaggataaggtacatgggatcatataaaaactaaatttatttggtccctttcaaaaacactcaactggcttacatgtggagcaataaagtgcgaaagtgacatagcatccaaattgcagccatgtggactggctttttta

SEQ ID NO: 57056 - DNA, 1346 bp, Bovine  19866881280239
  misc_feature (1)..(1): n is a, c, g, or t
nggcccgtgaccttcgaggcagaggcgcgaatccggagtgggaccactcgttcgggaagaaggactttgaaccgacggccactgccgtcacctccccagcccggagctcccggataagccgcctgacttggattctcagacggctaccaccttcccttgcggcccatcgagccgtaaccagccgccattcacccgacttcccaaaccaggagaacgccggccaacagcccgagcgtcccggcttgtaacccgcagcgtgtacagggcgaggccgcgcatctgcagtcacccatgggttgttacccacgaacccggatcgggcgttgagtggctaaccctggctcccaaacgccctcccgacctccgtcacagggaagctccctaacaccaccggacccgcccctgcgcccacaagccactctagccgcgcacggagccggcactctcgttgctcccgccctgacgtcatcagcgggcgccgcgacgaagtggcgggcacgctcagccaagaaagatgtctccgacgccgccgctcttcagtttgcccgaagcgcggacgcggtttactgtgagttgcggaacggtgggcgcggccccggcccaacgctatttgttgctctcctctccctgaaattacttgaattttgcactggggtaaagcagggacagaggcgttacgccgcggcgacgggttcccggccccgtcgtgggctggggaggcggcaaaggcgctttacctgcctcttccaagagtcctctgcggtccgcctcctcctttccgccggcgggtcccggagccctgcgcccttcgtggagggctcacccgcagactacctccgtttgggtcctgctcctctgcggtgctcgcttagccaggcgggtgtttccagaattggcagggggctgctctagagggaaggcgggactggttttagtccagagaaccggcttccgccccgcctcctaactgccaggtggctcttctcgccgcttattcatcaccctttaactctttgtatctcactccttagagatcgatgaggacggtcctaagtggggcgaggcaaattgatcagcttgggaagggttgtcatctgtcattttattcttccgccttggggaacagtaatttaagcatttgggggaaacactttacagggctttttgatgttagcttatttaactcagaatagccctgtgaagtagggtgtttaattatccgcagtagacgagatagaaactgagacagcccgccccccagcccccgcctttgttgttgttcagtcgctaagtcgtgtccgaccctttgcaacctcatggactgcagcgtgccagtctttcctgtc

SEQ ID NO: 57057 - DNA, 994 bp, Bovine  19866880366258
  misc_feature (1)..(1): n is a, c, g, or t
ntgatgctgaagctgaagctccaatactttggccacctgatgtgatcagctgactcattggaaaagatcctcatcctgggaaaaattgaaggcagaataagagggtgacagaggatgagatggttggatggcatcaccaaggcaaactccaggagatgatgagggacagggaagcctggtgggctgtagtccctggggttgcaaagagtcagacacaacttggtgactgaataacaagaacaaagaatcaaaatgctaattgcaagaataattggaaaggggccaaaaggaggatccgtggatagttcgggaagagacctttagagagggcttctcttattagatcagagctggaaggagtccgaaggcagctttagaagaatatagactgtaattctttttattgcagtcttgcagaaaagctcttcctgctaaaatactaacacaaactctgcaatattttctagacttgctcacctctatttatttcagtcttctgctgggaaatagaggtgaaggaggaaaaagggcatttgagcccaaagaaatttaaaatggaaagcaaactgaaaggctctgaggccaggtgatggaacaacagagcaggagttaacagtttgttgaagacagcctgtacctcctgaatcctacataacttggtccccatcctattttttctcctacagtttctccctttggtccccatccccttcagtttctcccttgagatgctgctcctggacattctgtaaagcttctcttgacttttaaaaacctctactgactttaagaagtgtcttttcctagtgcaaagacattctgtggttagaaactgcagcttcatacctgagttgaaaagacattcctgctaatgggcctaactggatgcaaccgaaccacaagaatgtggtctgtaatccccgtagcctaacaggagagaaacaggaagggtgtttgagtgggtgtgttacgtggcatccgttataatttcaag

SEQ ID NO: 57058 - DNA, 1533 bp, Bovine  19866880522877
  misc_feature (1)..(1): n is a, c, g, or t
nctttcatgcattggagaaggaaatggcaacccactctagtgttcttgcctggagaatcccagggacaggggagcctggtgggctgcggtctgtggggtcgtacagagtcggacaggactgaagtgacttagcagcagcagcagcctgaaatagaattttcagtccccaaaatgggtgggataaaaacaagcagctcagccccaccaccaatgccaggacgtgatcctctggcagtgtaatgagttcttggaactttcagtgttttgtctgcctctcaaggagacttatctgtgtttcagcttacagaaagattttcacaactcagcattactcctgggacaaaattaacaatgctgttaatttctttaagcatgagatgaaagcgttagcaaaaatggcaagagattgagtgaactgaagatctatctgaacagtttgagtttcagcggcaaacagtacttgccttttgaatgtgaggaaaaattaggcttgacatcttaagagacagaaaatactgaactttttgacattctggatagttgagtggagtatgctatattctgagatacctttaggaatagtaatttacacatctacactctaaaatagaatattcaagtttcctatgtagtcactttgctgcttatacaaatggagctaactaaacaaaccaaatactcaagtttcactaacttacattattcaggttctgggacagactagtgtatcaaatcatcatcactgacaaaattcaaatgaaatggatccaatactatcacaccaattactgcatccatcctttatcttctaaaacaaatgctccttcacaaaataaaaatttagttaaaatatatttttagaatgttttgtcaaaacatatagttattttaaaacacaacatatctttatattctaatattttcttcctgcttatccatataatatttattgaactcacctatgaaaaagttatgtttcctggaagaaagattagttttcttttttgctatgttatataagctaaaatgtaatttttaccactttcaaaaaaattgtagtaacttaatcaccccaggagagccaccttcatttgtttgtcaaaggataatttgcttggtatctacttctccaataaaacctccaagaaggcaaaagttcagagtatacctatgatgttatttagtgttcataacatccgagaaaaatctatactttaaattcatgcaaagtctaagtagcaagtgcatgaaggtacaacatgcattgtatgatcaagattctttcctcccaccaacatataaagaaaaattccaattgcttttttgtaggcaacaaaagggagccctggtgagctaggcttcctaaagaagtctgtgatatgattgaacacattgattccttttatattaatcactttttttttcaaagcacgataactgctctgtgatcattttcttctttacttacttcacacgtattagtaacctaacagatcatcaacatcagttgactcatcaagctgtatatacatt

SEQ ID NO: 57059 - DNA, 1498 bp, Bovine  19866880532712
  misc_feature (1)..(1): n is a, c, g, or t
nttagggttattgagttcaaattcctgtcccctcaaaaataaaacaagagcacataaggctgagaaacttatgtatagtttattgaaggaaaaaaaaagataagtaatcaatagaaatggtgttcttcaacaacttagaaggaaatattcacttgatagcatttctgtgactttatgtcagtttgatgctttcatcctggcataagattattcagatttatatagacacagcccaattagattaagagatgcatgaactggtaaatactgttaaatgagggaaggtttaatgcaggaaattagcttcaatcttggatttaaagctctaagtgatgtaacttggatgacagaatgtgagacaaattaactgttgataaaaccagtgatgtgggaatgatattccttcaagtgaagttgctagctctcattgacccaaactggtttcattaaaaagttgaaattctcatatatgtatatatacacacatacatacatatatataacactatataatatagtgtaatttatatcatggatctgaatgatgagggcagggtacaaaaagtgctgtcatgaatgtacaaagctcaccaagtaggttaatcccagatgcctttattgtggataagctcctgcatatgattgaacttcctaagtaagggcaggcacaaacaacagcgtacataactgctcaaagggtaggctttggaaccactctctctgacttcaagacatggttggccattattagttccatgaacttgcaaaaacgattaaacctattcgttttcctcacgtggaacaaggagaaataacagtatccggcaagggcatgtttagatgagaacagacatgtgaagcactcattgagcaccgtccacaatgtttgggctcctaataggtttcagatgtattttaggcacttgaaatatatatatatgtgtctagtaggtcttgtaagtctcgtatttagtcgcatttaagctaacattattgtggtttccagtggtatctttgtttttatgaaacccagcagagtgacttgactagtaagccctcaaaagaagttgctgaatgaacgttcaactaaagcttggttgatggcaaataaacagcacccatgagtgaacagaataaaggaaagtgctttacaaagttaggaaattctaggaaagagatttgacaccatgcagaatggagttcttgactgtaaaatgtaccagaagaatctctttgtttgaatggaaattctagttgtaccaacaggcaaatcttaccttcaaatctttctttttctactggcaaaagaatatccaaaggaaatttttattatctatgaataagtataaaagtaagttattctttgagctttactggtctttgaaattaatccagactattagagaattagaggtaataattcaagtgtctgatagagtaatggatgagacactgctttacttttcacccagtcatggctgctagaaatagctaaata

SEQ ID NO: 57060 - DNA, 2826 bp, Bovine  19866880558698
  misc_feature (1)..(1): n is a, c, g, or t
nagcttaaagtgctgccatctggaagatttgcttcaggacctgttcacggctggttcactgttctcttgggcagcatcatgtgccaaaaaagaggcaggtgggaaggttatgtaaaaaactgtctacatgactgaagtgactgcaggtgcaaaaggcagatgcagagaataacccccctgaaataaaaataaacatgttgataatcccctcaactaagagacagctctgacctatggactgtagcctaccaggctcctctgtccatgggattctctaggcaggaatactgcagtgggttgccatgccctcctccagaggaccttcctgacttagggatcgaatccgcatctcttacgcaggttctttaccactagtgccacttgggaagaccaaggaattagtcactctgtcatgtctggctctctgcaaccccataactgtagcaggctcttctgttcatggaattctccaagcaagaatactggagtgggtcacatttccttccccaggggatcttcctgacccagggtttgaactcaggtctcccacattgcaggcagattctttaccatctgagccaccaagtaaattatatacatgtaatacatatcatatttcataacatacacatgtaattgtctttatgtgtctataaacatatcacatacatatgtgatatatatatgatacatatatataattatacatgtatatcatacaatatactcagtgtgtatatagtaatatagtatttatttagatacaaataaacacttttaaatcactttagaaagatatatgatggaaattctaagttttaaaataaaacaatgttcttttcactgccccttgtatactgtcacactttacaaatataaatttcttgtatgatatagtctgacttactgagttgattacattttaaatttctataggaaagttcttgaattagcatatttttagttttccattattgcctttccttttccagaaagtaatgagcacctgtcaattacttctgcaaatctaattttttttacaactatctgtatggatattgagctcattaataattactgttttgtctatgtataattctgcttttactgtagctcatctgagtctcacaggcagctcccgcatctcttcagcctcatacagacaagcttacacattttagattcagtcaaacgtgatttcctatggccgtgccttgcgttttcctccccggctgtcattctacttggatataatttcttaacataacctgtcgaaggaaagtccttgtgccccagatcccacttcatcttcagggcagtttggggcttaacttgagctgccaaaggtgcaaaggttaatctaatttagggaagtagttcttttgtttctccgtaactaaaattccagttgtgcaatgtaataaaaggagtcatagcagcaagaaatggctttgccatgcctctaggagcagtgtccaaacaggcaaattctaataaattatcaacttaaccaaaggacaaaaaaaaaaagaaaaattctgttcggaaattctttcttaacttgaacatgccaagtataaaattgtcactcacatattgaaaaatccaaatctagactctaaaaactcaggataatgtgttgagttctgtgtatcttcttaccaaagattacaggactattgcattaaagtgaaaattatagttaatgtgtttcccataatgttacattcaacatcattttatcctaactctccaacaactgactgcctggactttgaggtcagatcgtgttctcagtcctgccgcatgaacgttgagcaaagttatttaatctctctgactcttagctttctcttcaggaaaattggtggtggttgtgtcaggggcgggtgggtgggtgcagagggcaggtaacacgtacctataggattgaatgtgagttttatcaaggagtatatgtaaagtgcctagcaaaatcatggctttaaaacaaaacttagttcttttcttcccttcttttgctttctttgccttctttttggggcatatgttttcttctttattgtcagttactatttgtgaaaaaaggacactttcctcaattaataatcagcacattaactttaaaaacaggaataaattcctttaaacattagaaaggaaacacttggaaaaaattactcattctctttcaagagattcattctcagaataactggaatagagcttcattaactatttacatgttggatgtaattattaggaagggaactttgtttcctttttagctacagaggtgacatgaagtattttaagaagtcaaatgtaatttttttgtgtaataaaaaaacacacaaagaaatgtccactatcttacacactgtatgtatcaatatattatataaaaataaaaactgggaaagttaagaaaagttgttggtaggggcaggaaccatgcaaactgaaagacttattttaggagtttcatatttttaacattttcataaattatttctgcttgtaatcacagtgccttggtctctctactgcatgatgagttctctataaaattgacctcttagcagaaactgaaattgaatacactgtagggtaggctattctatgatgtcagtcttctgtgaaatttgacccctcaagtacgttcttccaagctttgttcccatttatatatgcataaccgtaaaaatctcattcacattgctcaagtgggaataacccatttttttcaatcactctccgttgttacacaagtcataacagcaaaagcttccatctttttaagtatgggatataaaataaaacaca

SEQ ID NO: 57061 - DNA, 858 bp, Bovine  19866880567012
  misc_feature (1)..(1): n is a, c, g, or t
ngtactggtgttatataaaagtagtcctgataattctaatgtgtgcaggaagagatctgcatgtttagaggatgaaggaataacttttatgaatggtgacaccttgaaggtttctttcggtgctttattcatgtttgctaggtgaacataaatcttacattccagaactgtctttccatattggtttggagataacaattcctgtgtatatgtgtttatgtgggacctcatcagaattagaatattccatttatcatgagagtattaatctaagaattttacatttgatttctagaattagaattttgcagtattggattataaattggcagcattatttgactataaaccttttgggccatcttagaacaaaagaaagttttgatcgatgtctgcttaacatctcttttaccagaaccatatcaaagaaaatatacaagaatttattattttcattgacaaaagcagtgatgtatagaaatctcatccctttatcttccatattctatggtacccaataaaaccagctttgctaaatgattaattcctaaatttaaaatggaatgtctgctacaaaactaaatcatgaccagaagactgcatggcataaatccttcacagggtgctataacctttatcgtttttgaaatgtgcccccatgcaggaggcctcaggcaaatgtacaaggaacccagatgacatttacatagccattgtgtcagattagactctgtgatcctcccacatcatcaggcaaggcctgaacagagcagatgcacgacagactgcccaagcctgatgcagagcaaatcactaatcctagagaaacaacagaggttttcgtttacacttaggccc

SEQ ID NO: 57062 - DNA, 2480 bp, Bovine  19866880574035
  misc_feature (1)..(1): n is a, c, g, or t
ngatcgtccatccctggatctgtgactctcactgtgtcttgcgatgttcatgtttatctaggggaaaatagaatttcttaggatcataggcagagattcccgtctcagttaccaatcctgagcattacctccttcagtccctgatatctctcctatatgcttttgaggggaataaaaagctagaaccaagaaaatggggaaggtaaaaggtagtgctttcatagtacatcacatacacattgagaaattcaataagagagtgagcactaccgggcaagctgttccgaataccacttgtacctgtagagggagatcatttaattattttttcaattttggagaacaaaaaagtaaaggttggcagagggaaaaactttccccttttaatctttcttgctattgtatagctatgaatttctgggaagcattaaagtttatttttaccatccattcaagctgtggttccatttggtgtaaacacactcagtacattatatgactagtgtgtaaagagatgtattaatcacttgactacaactacaggtggtttggaactgaaataacactaacactatttccgtaagatacagacacaggacaaatatcttaaggaaaattagcgttgtgcttttcaagcctttagcaggatttttttaatggaattttattgtactattcagtttattacagaaaagcactttccctaaataaagtatctctcattatattaataatactcaatatagtaatgccaatgttgctgctgctgctgctgctaagtcacttcagtcgtgtctgactctgtgcgacctcagagatggcagcccaccaggctcccctgtccctgggattctctaggcaagaacactggagtgggttgccatttccttctccaatgcatgaaagtgaaaagtgaaagggaagtcgctcagtcgtgtccgactcctattgaccccatggactgcagcctaccaggctcctccgtccatgggattttccaggcaagagtactggagtagggtgccattgccttctccgaatgccaatgttagagagggtctattttattatttctaaacaatgaagaaagtgttgaattttaatataagtgataattagaattttctctatactcagcatcacttggatgcccagtattgagctatctagtttaattctacaagaatttattgagtactatctaacaattgtctcatgttgtgaatataaagttaattaaacccgaaagatgtggccaagatgatagagtagaaggactctgaactcacttcctccatagatatacaaaattatagctgcttatggagcaactctctgtacacatgtcctgaagactagcagaaaaaggtttttcacagctaaagacataagaaagaatcacaatgagatgtgttgcaaggggggagatgaagtataatttggatccactcccttgggtaagttttatgatagaacaatcctgctcctaagccagagaagagatgtttatgtgttgtttatttgtttttgtcaagcatttatgtgtaaaacttttaaaagctttgagttggacaggtttggaagacagaatgagttttaggcagtggaagctggagggagaagacagttcaaagataaacattatctcattaattctcacagcattcctaactgtttggcgttattcaccagttcacagaagacatatgtaaattttgatactgctttttggtactagatctgttgtacataatagcttgttcactcttccattctataacactgaaatctaaaatcggtctaaagattacttattttaaaaccaccatttttcctctacttcacagtttcaaagcatcttcacattagttacctttttttttctttttaaaattcatagtaatatcctaaagcagagggtagacatttttattcttattttcctgtgagggaatagaggctgagagtgatacaaaaactggctcaatatatcacttcagattgacgagagtacaatctaagtcatcctgactccctatttgtattatttttgtattcagtttctcagtctggtaaagaaagaaggtgaagttgctcagttgtgtctaactctttgtgaccccatggactgtagcctaccaggttcctccattcatgaaattttctaggcaagagtactggagtgagttgccatttacttctccaggcgatcttccagacccagtgttcgaacctgggtctcctgcattgcaagaagacgctttaccatttgagccaccagggaagcccctctcagtctggtagttattgtgataaaatggaacaccactgtggcatatttcttcttacatgaagtttatgatctctttaaattaagagtttaagttcagttcagttgctcagtcgtgtccgactctttgcgaccccatgaaccgcagcacgccaggccttcctgtcaatcaccaactcccggagtcctc

SEQ ID NO: 57063 - DNA, 1175 bp, Bovine  19866880757816
  misc_feature (1)..(1): n is a, c, g, or t
naaaaaaaaaaaaatgtatccctgtcattgtattgtgagcttaaaataggaatatagtttcagtttggtaaactctgattgacttatctttcattatacatggtctttctctttaccttgtttgatagcattcttacgaattatagcactcctttgtactaaggcattgtttccagcaggcccctgttaaaatgcaaatatgccatctggcaagcctttacctcattagctcacaccatctcagcagcacatattatgtatcatattagatatggaagagacactgagctgatgaactctaagagaagacggatggaaaaatcccaagaagggggtgctttgggatatgggctagaggcagtagagctgaaagagaagagtaagatgcagagtagggggaaaggaaaacagtttttccaagtttggcgtttcatccagatcctggctgtgatggattcaaagagacacagaaagctggtgctggaagagaaattcacaaacatgtgatcgaacacttttactttacacgcgagtaattggaggttgcaaagagctaagtgaccactttaagtaccctcagctggattctcatcattcgctcttaaagcccagagggcctgcacttacctaatgccttaacattgcacagtgtgtaaaggtgcacaattattcacgtccaattttatgtgcatacttggtagcttttactgtcttcaagtgcattgaaatcccctaaatatttctgttgtgttctctcatagcagttgatagaattagggtgatgcctgctccagtcactgatgaccaaggtcaatctctcaggagaagtagaatttggttaaaaattcagggaaattaaactccagggtagccctgtctagaagactgtgtgctaaaatatttaacaacatttctcctgggttcataatcctatacccaagtcctgacatacatggagaaaagtcttatgccctgtgctaaaaaccacgtaacaacccctaccttccttgtccagtttctgactgccacatgtatgactacattgtcaagttggggattttaggtgagtaggagaggctctatttctacagatacatagcaaatatgagcagaaacagtttatttgtaactgaagaaatggtgtattttgggttttgaaacagcaatggatgaga

SEQ ID NO: 57064 - DNA, 1342 bp, Bovine  19866880769730
  misc_feature (1)..(1): n is a, c, g, or t
ntgctataaaaatcaaatttgaatttcaaactccaaaaatactggagtaggagggaggaaagggaagagaatgcattaacagttctctgtgaacagtgggttaaaaaacaaaacaaaacaggaaaccaaaaaaggcaaacgatatcttatgaacccgtatttggaaaaccctattctagattgagtgtaacagattctaaattcaattaaatgccatcttagggttgcgccattattttagtcatttgatcccattagtgaagtgtgctgacgcttcctttccggagctatgattcatgcagggcatcagaagatgagttaagtgatatttcgggaatactctgttgattaattatcaacaagggaaatccagcttgaaagactggcttgactttccatatgaaccacacagggtaaaagcctatttctgcagagaaaagccacagctcctttagaaactttgaaactgatagaaatgttgaattattatgaaattgtatatttatattatgaaatttaaaaataattcttactttaaagtttaattggttaaaaaagcatggtaatatttttattatttggggcattgccattggacaatggcagttgaacagttgaaaaaattaaaagtagcatttataaatgaatctgtaatagtaatatctctaaggactacttattctacatttcaaagaaaggagaatgaattatataacttacagggaaagtatcaaatttatataacataaatcttcagaaaaatgttagaatgtttacaaaatgttttccatatacagtagatttcagtaaatcacagaagcagcttcatgaattttgcaataaagaaagtgtctcataaatccttttcaagtaggacattctgtacagagaagagtacccaatggtttgattattagcattataattagcttggtcagttggatgaagagttcagaccagttccatttaattctgttctatgacaataacataaactccccactgtcaaactatctcaaatgtaatagtacttgacacctgtgtttattagtacagatgatcttgaattctcatttttccaactataagagtgttattttaagacttaaaaacatcaataatcttattattaccttgcttagaagcatccaaagatactacattgtctagacatcaagccacttaagactgcctaactcaccccttgagaaaaagggggtgaagacttcaaatctaactctgcttcatagaagatgtgctatatatttaaggatggaaataagttggacaaaactaacgggaaaaaagcattctaagcaatggaactacatacacagaactt

SEQ ID NO: 57065 - DNA, 2275 bp, Bovine  19866880795688
  misc_feature (1)..(1): n is a, c, g, or t
ntgtttgtggttaaactgacagatagtaattaacaaattaataagattacattgaatttctaggttacttgttagaagttagatgcatatttttaggggcatatgttttaatatgggggcatcagtagttataggaaaactaatgatgtttcaattccttgattttttcttaagcaccaaatgaaataaagtgatttgacacacatttaacgaaaaaagagaccagaagattattggaagattaaaaaagtgaaattttctcactttacaaattgatttaaagttttacaccaattaacaatttcagcttattattataagaaacttaaaaaacatggtaccatgagaaatatggtttatcctatatttgtttgaccaaaagccaatgtaataggagcaaaagccaataaacaaccttaaattcccttgaaactcagtgaattcagctgaatttttgatcaacttggtcagcattaccttttaagatgaggctgacttttccccctcagttattgaggggttattaaataattgatgctgctgacctgaatttggaacattggtacacaatgaagaaccatttctcaattgaaaagttacccaatagcttattttcataattctgtcctcatttcagggatttctcctcctcctttccatatgagaacttccagaaccatagatttatgacaaattgctcagatagtatgtaaccatcttctctagtctgggaacacttactggtaggtcttacaactccatgaagaggtgatggtatgactcctttgtgagatcttcagagaaagttaataccttttcattgtagaagtcccagtgacaagaatattaccttacacatttcagtattcaacaaatgaacctgtttggccacactggacatgtaactgtgtcttggtaaagagaatttgatattctttagccataatattcctgaaatgggtaactataagggcattgtatacacttaaaatcactcaaaatacaaaaagaaggggaagggggacttggtagtgtcatgatgcaacttcaaattcacattattttaggagcatttgacaaattctgtattacttcaaagaaatggatggtgtctctaatgaatgtatattctctagagttatatataaaagagccataacaaaactcacactcaataaagtctttagtacttagctgccctcttctccagcaatgttacaccatctctcataaatatcttgtttgaacctacacacttaaaaaggcattaattactattgacagtgctctacaaataagctagccataaaaaatgtgaataaaaggagtgacatgatcttggttttgtgaatatttggaggaacaatgagtttgagaagaggacaatcctatttcattcccactgacgttcgtgtccatgtaaactcccttttaatagcattcacattacactggaaaataggtatgttaccttttgaaagtgagtgcattaaaagaatccagctctttgctaaaaaggtcagctcttgaaagccttcaagagctttggtagctgagaaagctggagggctgtaaatccttcatttcgttgctaagaagcttggctcctgagaatcacatcagtgttctctaacacagagagtggaatgcgaatcctttgttcccagcctatgatgctgcacttctgagtacttgtttccttggctaagagaacatgcgggagaggtctatgaggtgaacttagagattaattatgaatagagacaaactgagaaagataggcaaaaaatgtacagtgtgttaagaaagaagacttacttgcaagaatgccagatggcaaatgccattacacagaaatacatgcactgaaatgatagtcacatggtaacatttgaaaatattttgtaatctcagcatattttttttactatgaaaaatatctgtcgaggaaaatgccttccccattggcttattttaacacactgattgaaaataaagaaaaaatacaaaaagtcattgtacctttaaatcaaactgtgacataccagaaccagtcttcacttattatatagtaagaggaacactttaaacaactggataataaataattattggttgttcagcaaaaaaataagtacagcacattttggatacatgttgaagggcattgtatcaactttttttctatttgcataattaaaaacagcacaaatattatgtgatgaagtggtacatttaaggagatcattatacctatctttaaatatttcaatac

SEQ ID NO: 57066 - DNA, 1193 bp, Bovine  19866880894398
  misc_feature (1)..(1): n is a, c, g, or t
nttactttgtgacagtttggtggttatcgttttagtctgttattttctgtttcagtgtacagatagcgctactgcccaagaaagtgacaggcacgttgttcatggctctagcagggccgagggtccttgtggcagccattcggggcttcctggccagggctgggagccacccagcagtctgtcctcttcctggtcagaaggcattgagctctgctcaagtggactctaacactgttagcaaatagaactctaattttttgttcccaatattgctttgcatttcagggaaacagacagtaggtttgctgcctgaaagactgtaaactactatcctcaattcttctcgccaaaggaaacttcagccccattaacctattgacagttttctttaaaattaaaggacagggaagtgaattgtgtgtgtgtgtgtggtgttagtagctcagatgtgtctgactctgtgcatggactgtagccctgcaggttcttctgtccatggaattctccaggcaggaatactgaagtgggtagtcattcccttctccatgagatcttcctgacccaggggctgaatgtgggtctcctgcatgcaagctgattctttactgtctgagcaacctgggaagcccagggaagtgagttaagtgagatgatatgagttctggcagataaagacatgattagacaatggcaccccactccagtactcttgcctggaaaatcccatggacggaggagcctggtgagctgcagtccatggggtccctaagagttggacacgactgagtgacttcactttcacttttcactttcatgcactgaagaaggaaacggaaacccactccaatgttcttgcctggagaatcccagggacgggggagcctggtgggctgccgtctatggggtcgcacagagtcagacacgactgaagtgacttagcatagcatagcatagcatagagaaattacagggatattaagatttcttgctcttatttcccacttagatgcttcatctcatatctcagaggagttgtcatggttttcctatttttttttttttaacataatgaaaggtttaataggatctttagaatcataatccttattatggtttcataatattcttcatgtgggacctaatggcaaatgaaaaatgtcaaataaatatttaataattcccaatcaattcta

SEQ ID NO: 57067 - DNA, 2298 bp, Bovine  19866880988505
  misc_feature (1)..(1): n is a, c, g, or t
ntcacgtgaaatcaaacacagagaaaatactagaaatatgcagagtggtctcttgcattttttttcccagtatcactttcgccatggctttctgaagactgagaccaataattagagtaagaagtgaggtatactaattgtcccagtgcagtccaatagacctctctgtgataatggaaatggtctattacctgctcaatccatcatgacagacactaagccacacgggactgcagagaacctgaaatggagctagtgtaatgtaggaaccaatttttaaattttaactttacattcatttaaactgaaattcaaatagctgcttatagctggtgcacaggccagtctctttaaggaacaatactaatctgcaagcatgtaggatggaaacactagtttaaaactaacaaaaacatttcccaccttaaaaagtcttggacttgttttggttaaggatcctgtgggcacaccttttgctcttactatgttattttctgcttaatctgtattgcccttggtctcttgtattagtctggctagggcttttataatgtttaaaggaaggagagtctctctctctcatgtagaaagtatcctaattaagacaaataagtcatgctgcttttgtttatgtcacaattttccctgtagctagaattaagtgatgctgtcaaagggcagtgctaatgtttgatggtttttaatatttttgtccatatcaaaagactaaataaatgtaatcaatattctcaattcctaactttctagtaattattccaataaagagatattcatgctaccaagcatcgatacatgctcttcatagccctaataaatctgctcccagaaaataaaccgtgttcatctaggattttagagagaatattagcaaacaccaagctcagaatgtgattaaacaagtttttcagcacatggacctcacaaaatatggattttcaaatccaaacatttaatgaaaactatcaaaaaataagaatcatatctgcaaaggagctgcatattatatttgggtcagctccttaagcaaataactcacatggagagtttaaatagcactggctcttcataagaactttctctaaatcccatcttataaaaagaacaaaataataataatatcaagagttaatatgtaatacttgctggctgactctgttttaagatttttaagagttcctcacaagaaccccataaagtaaacactactttattcccattgtacaaattaagaaagtggtttaagaaagaaggctgcccaaggctatataactggggtagaagggttgtggtgttgatgataagatctgggtatgtcttagtacagaacttttacctcttatttatttcatagtcaaaaacatactttcaagataaaccttttatatattaatatgctaagataagcctttaacaaggcttgtgattgacaaggcagtgccaacctccttcccaattcagtctgaaatttttcagcatgctaaaaccctttttttgtgagttgcagttaggtcagctactgggtatataggttgactttggtggttgagtccctaagtcatgtctaactcttgcaaacccatgggctgtggcctgctaggctcctttgtccatgggattctccaggcaagaatactggagtgggttgccatttccttcttcaaaaggttgactttattgaatattaaataattacagttttacttggtaaagtcttcaagattatataagagaatgaggaataaatgcttttaatatcctagtcattctagaaatatttgtatcacacacacacttacacaatataagcagatccaggaactcacatcttatttgcagatctacttgtacagaaatactgacacagggaaaggaccccagcatcaaattattggaacaggtattacattatgttatcaatgtcaaaaagagagaacagcaccttgagttcagggggtctaagacaaatgtatgatatggtagggtataaactttgcctttgattctttacaatccagataagtgaggcaaaaaaatgaaaggtgctgtacaaacaacaggaatatatttttcacagttcagaggttgggacgtccaagatcaaggtgctggttgactcagctccccagcgagggcactcttcctggcttgcagatggccaactttcggctgtctactcacaaggtggacagagagcgggggcgggaagctttctgatgtcttttcttaatgggcactaattacatcaggagggaccctcaccctcatgacctcctctaa

SEQ ID NO: 57068 - DNA, 991 bp, Bovine  19866881155666
  misc_feature (1)..(1): n is a, c, g, or t
natgctcagtcctacggtactttctttgctgatcattatttcaggcagccttgctgacaaagaaaaatctttacctgttttattttacagcctccaaattttctctctgccagatgggtgcttacctaattgcaaagcagattgtgtctgtgtctacaaaagcaaattgaattggagacttgaacattaatctggaggccatatgcgtgtgtgttgtcctaagtaaatatgacaatagcatccagtcatcattaagctctactcatcaaatggtagagctctatttgcattgattcatccatacatcagtatttttctaggaattaagttagatgacctacatcagagtcacccatgctctttctaaaatgcatatatgtgagtcctactcaagatctacactatcagaatctcagattgaaattctagagaaactgaatttttaacaaacactccgagaggttctcttgaacagtgttaaagaaaatattcacgtcttattaaaggactagaaggcagacttcattcagggggttactgggatgaggttttttaatagaggggagaacttaactttgaaaacaatatggactgctggagatttagagccaagcagcagggcggggctcagtggatggaaaattactaagaggaaatatcaagagtaaagaagattctggatcagccaacttgacaggacttttgcttaagccctgccaaggtgataagatactaactaagggtgggggataagaaacttaaacacatacaaagggtaatcagatactaagaatgggggatgaggagtcttctaagatatggaggctgggggattttccctatactgacctactagttgctaaaactgaactaaaggggccaacagcagagctcccagtgaggtctagtctaaaagaggactcaagggagctccactgaagtttgtttaaggcaagggtctttgtcaacagtaaagtccaagataaagagc

SEQ ID NO: 57069 - DNA, 1474 bp, Bovine  19866881327113
  misc_feature (1)..(1): n is a, c, g, or t
natattgcctatatagacggtataattatttgatatatattttatttgtcatcttaaatgttttttcagttaaggcagtatgctaatatatcatgaattaatttgaattttttcaactcaagaaatcatataaataaaaatatttttttgtgtttaaacaaataattaacaatttaaaaatgaaatggaaccttgattactttccaatttattcctatgtctttctaggtacctgtaggtaagaagttttccatttttttcctttaattcaataaaataaaattgactggttattctatattaattgaacttatagtattgtgtataaattcacatttggaagcattctatatacttccatttacttgagagtttccaatgcatatctcaatgttcatggcctacattgaaactaaagaaattctcatggatctcaagtttctgaaatgataggatgtagcaactgagctctgcaaagaagatataatctttgcaatatataatatatagctatatactctccattacacagtattcaaaagtggcacggaaccacatttactaaatagaagccacaaactatatatctgtgttatgttctgtggtgcctacccctaccctctgtttcttataactggtttggaatattgagaactttcagaaaaataaggagaaggaggaggagaaggagaaagacataaagcttgagaaccatgtcatttcccatctttgaacgtatcactctccattgccactgagcaccagctgatcactttcaacatcaatgcatttgtttcctctccataaggacagtctatgtggtgtcatttgtattcacctcgggcagacacagagcctctgctcatttcatcaaagaactatttatgaggctgtaaaaaagatgagtttctccgaatagtctccaaattaaactttttaaagtttaatgttggcacacaagaataattacagttataaaccattaaacatttagaagaaattcataggattggagggagaaaatttacagctgtggcctaatacaataaatttcctctgtaaaagcagaaccacagaaacatttctattctggactccagagaaagaaaatgctttattaacattacccaaacatggaggcactatttttggacattatttatacagaaagatgaataccttttaaagatatagttaattaacaaaactcccttatactggaaaacaatccagtgccttagagtattttttattttttctactagttattatacagcaactattacattcctggctgggttggcgatggtggtagggcatctctatggagttcaatcatgatgtttaaaaacagaattacccagccccacaactgcagctcagtttctaggagacgtcctcctctgaaattctaataggccttcataatgcagacacgcttgttttttactgtttgcttaaataaggactgtgt

SEQ ID NO: 57070 - DNA, 1664 bp, Bovine  19866881367320
  misc_feature (1)..(1): n is a, c, g, or t
ncaatatcctattgctatatatttatacctggaaagtggacatcactttttcatcagaatcaaaaatctgctgccccgactgggcaaaacctataaacagagtgcctatcaagtttgatcttgagaaacttgtctttgaatatgctacacatgacaataactagggatctcaagtcagataaatagttttcatttctacccggcctattttaagatctggggtatctgaatatgacagcctgtaaggaaatctgtatgattatctctagatttattcctttaaaaataaatatttgtgttttttaatgctctcaactagtatataaagtatatatagagaatttcatgaattttgacattatagataattttgattaatttggttaaacaagtaatttagtgaagaatgaatacatttagtgaaattactaacttgacatgttcttcacttttttcttccatcaaattggcctatagttttatttaactgactaaacccataaaattgtttgaatatcagattgacagcccaatgtacataccattcagttgcaattctctttttgtgtatattctacctgtctgccttatctgtcagttaccatatttaaactcagctatgaaaacccatgcatatacagcacagcagtaaaattaattgatacctttttgtcctaaagaaataaaatattagccaagtacaccatattacaggccttagaatagctgcacattccataatatatacaaaagttatatgaatacacagaagtagtaattgaagtgtcacataatggatccaagtcatcttgtaagcccaccttcatttacaaataagaaaaatcagagatttctctctattttcagtgtattaaacgttagaactgaggccctgtcaaattccaggcactgtacacaaaacagaagacacagagatgaggcacatgcaatgcctgagttacagtctagcatgggagaccataacctgagggtcatcgttaaaaatcagggtaagtaccaaaactaggggatgtctaaatgttacagaagtaggaagaagaagtagaaggaatgtgtgtgatgtcatcgttgggacattagaaaataattcagagaaggggtgacactggagttgcctcttgaaagcagcgaggggaatgtgtgaggacaagtaagccttccagtaagaggaagccttattcccatcaccagaatacgcgagagcagcacacctttaaagacttgccaatacgctgtgtggctgatgcggaggatgactgtgtcttcttaggagagtgggaggagaagctcccagttgtgtgattctgaatgttacccatgcctctgggtctttattttctcatctgaagcttgaaataatgcttaccttgcagcatcatctccacagcaggaaaaaaagctaaaaggcagacagggtacagaaataagctggtccaactgattgtggggatcaaaatttaccccaaattgactaatttacaatttaaaattacaatttataatctcaatttacaattgagacaactggtgaattttaagcacaataatggtatttaaaaaaatcattccaatggaagagtgaagatagatttaggggaagaagtgtataaaggctgctgtcattgagttatcatctcccaaaa

SEQ ID NO: 57071 - DNA, 1773 bp, Bovine  19866881388466
  misc_feature (1)..(1): n is a, c, g, or t
naataaatgcattctatttcttttgtttccattttttcctaacacatcatatgcataaaacttcctctaagatttagacataacctgtatataaccagacattatttacagagggcatctctttatctactattatttttatgggaaaaggaaataccttgcagaagaagtgagacagaagttaggaaatcatagcaatagtaaattacttttatcaatttttttaattgttatgttctgaaatttatagaaactatataagatctagttttcaaaaccatgccaagcatacaaactaaagtgagacctgctctacgcccttagagttactctggctcgaatgtcctgtgacaattatgataagaatccatttactggacacagataggaaggatgacaactttatcaatccaccaggaatcaatggaacaacagcagtttctggggtattttgtcaaataaataacactgaggttaaagctgaactactggaagggaaaagctgtcatgctgagatgtgtttgttgaagaaaaggatttcaaaaatgataaatatgaagtaaaaatggaatgtctgggaaaactgaagatgaactaggatatgaagaactttattggatttaggaccttgttcctgataatatttatttagaaacattttccaggatatctttgaatgattatatatatataatatatatatgtatatttataaatagatatatatatatatatatggagagagagactgaattgtgaatgaaagggagagatttcaaatactgtaaaatatacctttctccaagttaagaataaagaccgaagtaagacttgtctttctaaaacactgtgttcacatcagctaatatgcaagttaatgcatttattccttctttctttattccctcccttcctcccttctctccctttctttctttcctttttaggctagacgacaatttcaaacattattataccattatttggcatggaaactgtcacagatctgaaattccaagtcttctgaattagtattttatttttcatatatcagagctatttttcccacagcataaaatgattcattgctctcctttgcttagaacttttctgtgtcttctctatgccaacaggatggactccaagctacttagtatagtcaggaaaactctttagatcttggctggagtccaacattgaggaataaattttagttattttcagtcataattgaatatactatagaccagaggttgattacttcttttgatatgtggcacattcaaaatcaagggctctgggtagcacattcaaaggtataaaacactcacatcaacatcaaacagcaccagtgattctagttcaatctctaatgcagtataatatctcaaatactttacacaaactttgagaacacaagtcactcttgtcatcttttagcagtgagatgccccattgagccatacaaatctctagaggcaaagtttttccttgttatgtgtgcatgtgtgtgtatggtgatgtcatgcagatttacaaatcttattctgataagcttcattctacttttcagtggggaaaaaaatggagacacaacagcctaccaaaacatacttagtgagaacaaccattttagacatttggaatttcttgcatttgcttaaaaatatactgtatcctttcttcaccttgagttaatgcttgaatcaatgtccagtcctttatagtgggggaccatgtgtatttgcacaggtgtcacacccagaagccaga

SEQ ID NO: 57072 - DNA, 1174 bp, Bovine  19866881411980
  misc_feature (1)..(1): n is a, c, g, or t
nctcattttgggtaccttaattaactttccaaggacttataatctgacttaatcagtttatgtgattctttaaaattgcacagtcagtgtcatctcatttcattaatttggcttaattattacacttgctacttagaaattttagattaatgttaactgaaccgagggacttagattcttttcactatcatttcagtttgttcatataatcttaaataaaacttaaatttgcccaatgttaataaaatgttcaaacttccaatgtcattagcatctagagtagttattaaaaacaagttgatttcagaaaatgccttctactcatttataaattgtcttgagtaactgatttttgataataaccatgaattaaaacattgcacagtgaaatgcgtaagaacatacttttaagaacaggccgttcacactttggagtatcagggcaaaggctttgctggcttatagtaatacacatgtccagattgcagttcaagacatgacctttattatgcataaatatttttttctttgtgagaagtaactttgcacataaaattttatgcgattttcaggctttttttgactacaataaatcttttactgaataccctttatactaggatggtgaacacaagtgagtaagtcagaaaatagtttgacttagcaaatctgtaaagttattacatgataaggaggaatttatgtattctgtaatctagcctggataagagagtgtgatttgttccatctaaatgatttgtttaatctccattctcaagatgtattctgatttaaaaatattcccacttttttcctaatctttgggatgtaacctagggaaagaacatggacttgtgttttagatggttatttaaatgctgcctccaatttccagaccttgataagtaattaagtctttctgagctacaattacttcatttgtaagaagaatatagaatataaactccacagcattatcatcagaagagtgatggcatatgtaatatgcccaacacagtaccatgtatatatatatatatagtcaatacccaataaatgtcacttcctttagctgtggtttcttggcctatgtccttttgttggtcatagctcagtcatgtccacctctttgcaacctcacggacagcagtacaccaggctctcctgttcttca

SEQ ID NO: 57073 - DNA, 1099 bp, Bovine  19866881482271
  misc_feature (1)..(1): n is a, c, g, or t
ntattttcaatatatattgaaatataggcaatataggcaatatagaaaataaaaatctacctttgttcagtgaatttgagattcgcatgagaagaattacagtatgtgggaaacatgacaaagttttgaagtcaaatattcctgagttcaaatccttacttcttcatattctagttctgtgaatgtggcattgtcatttaagatctctgttcctcatctatgaaatgagagtaatttctacctcaagttagatataagaattaaatgtcatgtatttaaaatgattaatgaaaaataaatttccgtcttttccccagtgacgaccttccaaccctgattttttaggttaaaagggatttgctctgaaacctaataaaaacaatagcagcagcagcaacaatgcaataataataataatttgcagcattagtagtaatagtggcagcatagcgttctcagtgaggtaatctaatgagatcaacaattggtctcattatttctcagatttgttaacgcccttctagtctttaaccattttgatttggatcacatttttttatttttcagagtttctttcttgggatatttcatgttctcaggattaggtctctttgggaaagatggaaactgggaaggccaacaagcatgtgcagacagctatttatatgattctagcttctatttataagggtgataccataatccctctaaaactaattgacatttatgctttaagcatatctgttgacaggactggcagaaatgctattatacaactgtttgtttttccttttgtattgatttcagaaagatgcttctttcttggggtgtcttcctgaatggataattaccaggaaagtgtgaaagtagagagttcaaacttcaaggcattttattaacactgttcctctctaaaataaaataaaacttgttagagcgaatggtaacctatgcttgtgtgccagcaaatggcagaaagatcaagaataaaataacagggagctcttaagtaaatagaaatgtattttctagaacaatttccagggctgaaggacaaatgagttcagatactcaaattgtactattatatttcaaagag

SEQ ID NO: 57074 - DNA, 2104 bp, Bovine  19866880353532
  misc_feature (1)..(1): n is a, c, g, or t
nctattataaggtgagttacaagatattccctttccagggaattggtttgatcattcatttaaaaatggacctttccagttaactctggtttttgtgggtaatgggatcggtcaagtaaatgattataataagcaaaatcaccgtgcactaaagctctcaggatcttgtatcagaagagagagatttataacattttggggatgttcacgatttcttaagagaaaaacatagataaagatgaggttggttaaaatattattggctaaaatcttaaattattccattctttttccttatctatttttatctggtgtatttctgcaaatcttatttttgaaaatatgttgcatacaaattaaataatggtaggcatacggtttgatctccatgtgtggtcagttatctccttttgtcatgtgctcttttttctttttgttaaaccgagagctttatttgaaaggtagaacaacatgtacgttttttggctgcacagtgtggcttgcagggatcttagtctcccagatcagatcagatcagttcagtcgctcagtcgtgtctgattctttgcaaccccgtgaatcgcagcacgccaggcctccctgtccatcaccaactcccggagttcactcagactcacgtccatcgagtcagtgatgccatccagccatctcattctctgtcgtttccttctcctcctgcacccaatccctcccagcatcagagtcttttccaatgagtcaacttttcgcatgaggtggccaaagtactggagtttcagctttagcatcattccttccaaagaaatcccagggctgatctccttcagaatggttggatctccttgcagtccaagggactctcaaacccacgtcctcagcagtgaatgcttggagtcctaaccactggactgccgggaattccctgtcctacactcttctattctgcaagtggcagcacaagttttacagctgggtactcatgagcaaagccactgccatggaaggaggacggtgctcatgggacaggcccaaggcacgggggctggtgtgacactcagaagaaaaattcaaaacctgattttttcggattttctatatccacattcagtgatttctcagcaaactcaaaaatctgctgtcattttaaggcataaaattctccttggcagcattaaccaggtgagatgttggtcaagttcattatcttgctgggcctccccctctcagagaggttctctctcccatgccacctcctgcccctcacactcctcacctgctggatcatctctggatgctgctgcatgatatgcaggaagcggtcgctctcctgggtcaggggcgtcgtcctcttcttggtgctgcgtgaaagctgcttgaagaggtatgtcacgatgtggtccaggcaggagcagcaacctgtgcataccatggtgtctggaagagagcagggcagggatggaacagagcaggggtactgagctgccactggcaatgcagctcaatgtgaggtgccaagctcagacccctcagaggcatctagctggactggggacgtggctggtgtagccaagactaccaatggggatgctgtctgttaacctctcaccctcatcttacagccgggtttaatgccaaatctgaaaatgagctcttcataatagctaataatagaaatactactgaaattattgacttcatatgatgtggatttatgtcttctgcttcataaaaagtaacaaatagcttatagtagagcaagtgcttttatcgtgtcagatactgtgctaaggactttatctctattttatcctttagagaacgccaggaggtaggtgttccattttaccaatgagtaaacagaagtgtgtagaggttctgtgacttgccttaaggtctagtaactgcaagtaattggaagagcaatgattagaatccaagcacgcgacgtgagcccgtgctccgagttacctgggtgatgtcactgaacccagcttagtacagcctatcgacactacggtttgttaagagtgggatgctgaaacattcttttctctctggcatttctgggggaagtgtgtggtgtaaagctgcaggtgtctgtgca

SEQ ID NO: 57075 - DNA, 3079 bp, Bovine  19866880558260
  misc_feature (1)..(1): n is a, c, g, or t
ncccgctgggggctcaagggtgagttgagcctgagctggcctgggtggtgcagtgttgtcccccggctctgatgtctctaactatgtgccccgggttggacgcagtcagcatgcgtgcttgcgtgctcagtcacctcagtcgtgtccaactctttgtgaccatatggactgtagcccacccaacacctcggtccgtaaaattctccaggctggagagggttactggagaggttgccatttcctcctccaggggatcttccccccgacccagggatggaacccatgtctcttatgtctcctgtgttgagaggtgggctgtttaccacttgtgccacctgggaagccctggaagcaatcagaaagaatgtcaaaactggaagggatcttaagagattcttcatctggtcccacctcctcattcacccgcgaggtccagagagggtctcccagctagttagcagcgcagtaccttagacaaggtgccagtagtccccctggttatttccattttccacattggcaccatcactgggggccccatttaaactctgtctctcccacggcaacatcccgattctaactctccactgtgattggtgccggctccctctatggaagccatgccctcatcctcacctgctcttactccctggaagagtattaagagctactttcttctgacctcaatccctaggactcacaggtaagagcggagaggctttaaacttggggtctgaggtggtggggtaagctcggggaatggaaggcagtgaggagagcccgggtgtgaggagttccatccaggtccaaggtctctgagccagagagcctggttcctgtcagtgggggaagggcctgctctaactggccagcccccagcccagcctgggtctccatggtaacagatgcccgctgtcaagcttggccttggggctcagccagggggctggtgccagggactctggggcactgctgggtagcctgtttgtgctcttcgtcccttcctattctgcacctgcaggcctggtttctgactctgtttgcttctttaccccatgggaaccctagtgatgggccccaagtgaggaatctttcaggcctagcctctgaattttgtccctcttccctggcccaggtcgttccaggctgtgtgacctgtggcaagttccttcacctctctggtctcagcttcctaatttttcaaaaggaaatggccacaagtgatgatgtcaaaactaccatccatcacatcagctaagaggaaggacacttcctgcaaagggtcaagagctacaggaatgagggagagagaggcagagaccctcttatgtagtccagcctgagtctacctaaactttgactttctcccctgatgcgagggagctgggaggggccagaagggtagagttcattaacatttatggggggtggcaggaggtgctaaggggagtgagaagtagcctgggccctggtggttaatcccatcccctagtgccaagttcaacaccccccagcggggggacgtctcacgcctgccactagcagcccagcttgtgcagacaggcggccacctgcaggcctgcccctcgtcaccacctgctcgacctcagccaacccctttcctgttgacaaacagaagagcttgggctgaggaagggtgaagggcaaaggcctctgcagcaatgcggatccccccatctttgctatttgatccccaccaccagccagcacgtggaaatcaaatatcagcagtctagctgttgactgcctgtggctgagtcagaggaaaggagaacaggggcacttgcctgaggctggagcaggggagaaggccctgaggggaacatgggctttgctataactgagctctgaagctgcccgtcctgggctccagttacgcacggactcaactctaacccctgttctcagtttgagacttcctaatgccctccaagtttcatgtctccctctcacccacagggtggttaaaaacagggccagactatctgagcctgaatcctggctgtgtgactttggggcaagttaacctctctgtacctcactttccacatctgagaaatggggctaataataccctcctctgggcagagtagtgaggattaaaggcatgaatccactgaaggcactcagagcagtgcccagctaacagtgtcatcactgcaatcacatcagccttctttctgcccatatctctgtgcttgttctgcctctggccctttgcaccctctgctcctgggaatgtccttctgccagctccacatgtacccatcatccctttcctgtccatggtctcctttgaggcaccttctcagatctaactaaacagcctacccccaccatagaaattagcctgttctacttcctccacagtgcttgttggtcattgaaattacattgttggctcttcatttccactagactctaggccacttgaaggaagttgtcttgcccaccccatatcttggtggcatgaggccacagtcagtgccagctgcctacctgaagccagacctgatgtcccctgtcactctgggtgactgaggtcagtgccctgttctcccttgttagaaggcaggacaaaattcgcatctgcctcatggggtgtagaaagcagaagcaagaatgccagccctggacttccctggtggtatagtgaagaagaatctgcccgccaatgcaggggacatgggtttgattcctggtccggaaagatcccacatgctgcagagcaactaagcccatgtgtctcaactgctgagcctgtgctctagggcctgtgaccagcaactactgaagcatacatgccttagagcccacgctctgcaacaagagaaaccactgcagggagaagcccgagcagggcaacgagaggagcctccactggctgcaaccagagaaaagtccgtacagcactgaacacccacccagcacagccaaaaaaaacaacgccagccctgcccacctctacctctttctggcatcaagagaagctgaatagggagattgaagcctgtccttctgatgccaggtgttcagagacctctagcctcctgggacc

SEQ ID NO: 57076 - DNA, 924 bp, Bovine  19866880924382
  misc_feature (1)..(1): n is a, c, g, or t
ncgggagctacgtcaattttggagtcttccgtctctatggggatgatgccctggacaatgctctacagaccttcatcaagctgctcctctctatcccccacagcgacctcctggtaagccctgagcttcatcattgaccgaatctgagcccctcatcatgtcagtcttttttttttttttggctgaggccatgattgaatgtttctctgaagaactagaagctagctccactgggcccttctgtcttcccatctgaagggcactaagctgtttatttctgatcgtgctcacacgtgctgaggtacacatgacctcctctgactctaaccctgcttctcccacaggattaccccaagctcagccagtcttactattcactactggaagtcctcacccaggaccacatgaactttattgcaagcctggaacctcatgtcatcatgtatattctctcttccatttctgaaggacttactgcacttggtaagcacctgggtgggtgggtgggctggtcaattggcttttaccacctcactaagcaaaagggagaatcttgcctcaataggattactgctttgggatcacaccagagtatataactcttgagaacattctcctccagcacatacttactgatgccctcctacagactaggcactaaggacctagtaattagtccctgtcccttgggagcttttcatctggtagatgaaatagacttgtagacagatgactgcctgttcccgcccttacctgtgtaagcacagcagtggggtgagtacagagtgtgtaggagcaccccggaagaatacctgaattcctggccttgaggaagggtgtcctgcaaggcgctgaacgggcatcatcagatgaattggggaagaagcctcctggcagcaggaacagcaagtactagcccccaaa

SEQ ID NO: 57077 - DNA, 1347 bp, Bovine  19866881126074
  misc_feature (1)..(1): n is a, c, g, or t
ntatacagcctttcatataaattattttacacattcatttgtcttttatctcagatgtgatttgctaatttctcttcctacaatatgtatagtgtaaaacttgtggatatttttaacatacaaaaggtttcaattttgatgcagtcagatttagcagtcctcttatatatcagttagattttgtgtcctgaaaagcagcagttttaaaataccaatttctcataccttgtctaggcagtttaagtatgactgcattccagatgctgaaatcaagctgcacaggccaactctttctgccttaccttttttttttaaaccaggatagtgttgaatactgcatcattggtgtcacgattttatcgcagctaaccaatgaaattaatcaagtaagtgctacagccttcctcattgaagtaagtgccatatttttacttagtattggtgttttctgcctgtgtgtgggatgatcttttttggcagttgtgtgcttttgcggtaagtgattaatgcccttttgaaacaaaatagttccatggggttttcctctgtgagtgaggtccggatgcccttccatctccagaatattttttctctcatctcagctttcctcagtggtattaatgtttaatgttagagaagagcgcaatgatcctaagtcagaacttaggaaacccacatcactggtgtgctctttctgctgtataagttaatgtatttataatcattcaaaaatcaattctcatttgccttcattaaagattttgctgataatcttttcagaatgcacaaaacattctgctaaatatcaaataatttgttaaaatagtcatcgatgtcacagattactacagaggaaacaccagtggctttcttttgctctggctataatattttttagtcatttacttttgtatccagccaaaatgttgtaattattgaacaggcctgaattaattgtcccagctcacccttcagctgtcagctattaattacattgcatcactgttgctattgctcgtacttatgcagacttttaattaaccctgagaaatttaactgtgagttggtattttaaatacactcactagcttagagcctattaaaatctggagtccatattgtattctctgtcacatgcaatccacactacgattggtaattattaaaataataatttatacttttgagtgatttctgtgtggcaggcactgttctaagcacttatattaattttattctcacagtagtcccgtgagatagagactctggttatgctgttttctggataaggaaaccaaggcacataaagattaactaatttgcctatgatatcacagttaccaggtg

SEQ ID NO: 57078 - DNA, 1328 bp, Bovine  19866881142002
  misc_feature (1)..(1): n is a, c, g, or t
nttctgcttgtcagtacatctctggcccgtggtaggtgactccatacaatttgctgacagaaaaaatgactttttaaaaaggaaagaattgagtaatgtttttttttttctttttcttttcttttttttggccacgccacatggcatgagggatcttagttccccgaccccagatcgaacttacgccctccgcagtgaaggcatgcagtcttaaccactggactgccacgggagtcccagaactgagtatatttaaaagtgaatgggtcttatttatgatatttcctagtgtggggaagtgatacttaaaaaaaggaggtgttagctgaatctttcggactgaaaaagacaagaaggacaactgagttatggaatgaataatatttgaatgagaaatctcccttcctagctaaaagtagctctgttcacttaggcaaataatttacattcaaaatcacggaaacaaaaacaaaaaacacacaaaatgactagttctctccttattttccttcgaagtgaccctttcaataatttcaacattcctgaatctagggacaagctccttttctgggtaaatgttaaaaatctatgtacagacattcacttaaatcttctgaaggataacagattgaactgttttctagggtttttgctatgtgtgacctctagattgagctttttgcatgataacagagaggtatatactaatcatacatgcttatacacacatacacataaaataaaagtaaattctcaaaagtcatacctgtgggttttccagtattcgtttaacaccatcaacaaggtgagagagaaacttggccctctctgcattgttgaatagggatcttctaactgaggcaatctgtactaagcaggataacacctagagcagggcacaaccaaaacacaaatgagcagaaaagatggtatagctcttttcattactctttcccttgctataaatattcttctctgttttgtcaccctctgctatcattataatgatataaaaaaaaagatcaaggaaggtgtagttgaggatatctgaaacagctttatttaaagaaaaataaagggcattagactcacagtgagcataacaactggttaaatccacagtttggaacttcatacaggtattatttttcaaccacccctatggcttctttgtgtttaagatacatatttaaacttgaaaataccaagaaactgacagtaaacaatgctttagacataggtttttttttttttttttttttcctgttttattaaggccttttggctatcaggttttgctatgtagggctatcatgaaataaccaagt

SEQ ID NO: 57079 - DNA, 1636 bp, Bovine  19866880472583
  misc_feature (1)..(1): n is a, c, g, or t
ntaacagttaggaacattgtcatttctttgttcattcattcattcaataactcgctcattcatccatcctttcatccattcaacaaagacgaaaattcctggcctcttgaagctttcattctagtgagaaacagacaataaaattaaaaatatagtatgtcaggtggtgacaagtgctaaggaggggaaaagggcagaaaaaggagataggaaaagcgtgtcagagaaaagaatacaagcgtaaacatttaaaatagaaaggtcagagaaggtgacatttcaacaaagacctggaggagatgaggaaatgaatcatgcagatattagattgaggacaaatgcaaaggtcctggagcagaagtgggcttagcatatttgtggaacaacagagaccagagtagctgatgtagagggacctggaggaaaggctagatggggtagggccttgtggcccactgaggtgactatggcttctagtgacagaggaagacaccagaggatgctgagcagaggcgtgaggtgacctggttttgttcttccagaacaagagagcagcagagtcttagaggaccccatggggatggctctagcaggatgggaggggccttgggggtcccaggtgggatgaagaggccagcaaggccgggtaggcgccaggtcacacggagaggcagcccccgatttcctcctcctggaaggcggaccagcagctgacgggcagatggccagacaaaggccgggtgagcagacagggtggcctctgaccgccaagttggacgttcacaggggctggctggtccctcacaggcctgcgcccctaagagaagagacagacggagggaggagggcaggctggggccacgtgactgtctcttatcctctggaggaagacagagagtgtgtatggtgtgaggatactttgtaatcccaactgggtgatgcgggcctgctgcagaatcagcacagcagagaggtgcaagaatctggactccagacacactgtccaggctcgaattcagctctgttccttgccagcgtggtgaccttgggcaggtcacaacctctctgttcctcattccatggtatgctgataaatgtttagcaactgtctctccaaaaggcggggggaggcgggccctgatgagtagtgttgccagtttgcatggtgcaaatactcccaatgtggcctgatttcaaactcccaacatgatgtcactgatcagaattgagaagagatacgcagttccacagagctgtatatgaatctaccatccagattcaacagacataaataacctaaagaacgcagataatagatacaaggcagtaaaataattaggaagtgatgaatcttgagtgtttattacctttgtttttaatatgttgtttaattgtaagttgatgtaatttagtttttaacaacggtctgtgcttaacaacaagctcacacaattcctgaaaatttaacaatcaactctcaggagtataagccacctccggcgtgccaacttcctcatctgtgaaacgaagataaaaatagcaactcccggctagctctgggcactactgagataatgcttgtaaagtgcttaatgccacgccctgcccagagtgggtcaacctggtcaacaaaggg

SEQ ID NO: 57080 - DNA, 1057 bp, Bovine  19866880499547
  misc_feature (1)..(1): n is a, c, g, or t
ntccatccttcaccttctcagattgaaggaagcacagttcttcctgtactttctctgccagtcctggggaaattgataggctccaggggaaattaatggggcttcctgggaaggcccacaggaatgtgggcatgtgtgctagtgtgtgcgtgcatctaagtgtgactatatgcaggtctgtgaatatgaatgcagatatatgtactttcgtatgtgtccatttctgtgtacccagtcatgctctatgtatattgcaggtacatgtatattcattgtatatatgaacagtgtgtatgagtgtgtcatgggtgctgttttgaatacatgtctgtgtgtgagtgtgcacattcatgtgtatccaggcaagcagataattgtgtgggatgtgtgtacacatgtgtctgcagctgcatatagcttttctcccactgcttttgtggctgcattgcattggaaggaagggtttggggaagcatcgtgggcatgctcgtccccagtttgctgaaatagggccaagtcatgctgtatgtttcacggtgatgaggtttcccgagcatctgaagtctggtctgggggcttctgtgggggagcctgtgccctggggcccacctgcaggagcagagggttccttctcttccctccttccagtccccttggcagggaaacttgacttctcggctgttaattgggatccagacgcgcacagcaggtcttggctcacaccctcttccttggccttcttcccagagtcgctgcccttcagaggagaaggggtttgtattcagtggagggactgagctcagggtaggaactccatcatcgctggcttggtagctggaggcgatggttgaacattggcagtacccccttaggtgggctttgtggtccagagggaggagctggtattgggggatggcaacaaacatgcattgaggcatctgaaggacctgaacctgttcctgcttcttcactacctagctgtgtgagttagggcaagatcttgaccatgctgagcctcaattttctcggctataaaatgggagtgctggtactttcc

SEQ ID NO: 57081 - DNA, 1724 bp, Bovine  19866880536778
  misc_feature (1)..(1): n is a, c, g, or t
ntgcccacgagtaggtaggggacggccccaacacacctctcattgcgctgtgcatgtagatgctgcgctcagtcttctgctcagctatcgggttgcttggcgccatctactgcctctcggtctcgggaaccgggctccgaattggaccacagtgcttaatgaacggctcctgggattaccacttccaagacaccgcgtaaggcttagcctgtattcgtggccctgccccattctctgtctctgcccacctgcctttcccacgcggaccggggaacctaggccggactcggctttgagactgcttcctccacgtgggccaaacgagctctgtgtatatccccctcggcgcctgcgcggggcgggaagccccaggttgggggggggggggcggggagggcgcggctccgcgtgacctcctgctctcgcgtgaccctgccccacccgcagaggctcttacctgctcaaccgcacgcaatggaacttgtgcgtggagccgcccgatgtggtcctctggaacgtgacgctcttctcgctgctggtggccgcatcgtgcctggagatcttgctctgtggggtgcagctggtgaacgcatccattggtgtcctctgtggcgattgcaggaagaagcaggtgggacggtgtgggatggagctggcaaggaaacctatctgctccctggctgtgtcctgtcctcactttatcttttccgcagggttcctctcagtgaggctccatctacgtgatccgtcgctcctggatacccacctggcccgccccaaccctggaataaactagagtatttagagttctcttccgcgtctcagattgtgcccttatacaaggagtgttggaaggcctccaggtacaccgttgcttggggcttttataccttgcttgctattttcttaataaatactgagctgttggtgcactgaaagtactgtataaacaagacaggcaagttctgtgctcttaaagaatttaacattccaggggttagaagatggacagtttttaagaggcaatagattatttcagttggtgataagcacttttttaagaacatggaggtaatggggatagatattcactgacgcatgacctttttcataagacaaagttcaagaaagaaaaattggacctgaaatctggtggatgggctaatcatctggactgttgggagagtccaggcagagagggcagcaaggacaaggacacttaataggactcaatgtacagaaaagccactgtttgagttttgtagggggaagaaaaggaaacatatggaaaagacaagcttcccaggtggctcagtggtaaagaatccacctgccaaagcaggagatgagggtctatccctggattgggaagatctcctggaggaggaaatagcaacccactccagtattcttgcctgggaaatcccctggacagaggagcctggtgggctacagcccatggggtcatagagtcggactccactgagtaactgagcaggcactcatggaaaagacatgttagtctcctaaattctagaaagtgaagccttaagacaatatagcattgtcacctaatttggtagaagtttcttaatctggggtcactggtggttcagaaaggaaacaacctgggctcttaatggggatgacacgtttgcagaggctgtcggaaaagcaaggacttcctcaacctgaaagcaaaatctgtttcagtgcatttgttt

SEQ ID NO: 57082 - DNA, 936 bp, Bovine  19866880538364
  misc_feature (1)..(1): n is a, c, g, or t
nagtcggacacgactgagcgactacactttcacttttcacttagagccctgatctcctccctgtcacaaaatgccctcggtcccgcggacagatctttaagtcccctttgccctgagggtgatttctggaactgactgtggtcttgtgcccattttcccagtactcctggctcttcttcttgtcccgggggctggtggggactggcacagccagttactccaccatcgcacccactgtcctgggagacctcttcgtgagggaccagcggacccgtgtgctggccatattctacatctttattcctgttggaaggttggtattaccctggatctacttctctgtgtggtaaactgaggaccaaaggggtcagaacaggggctgggctggatgtaggagacattgagcagaaggggttgcatttgaaacccaactctaccttcctctctgtgtcactttatctctctgagcctcggttttctcatctgtaaatggggccaagagcacctacctgtaggctatggtgggggttagagatgtgtaatggagatgctccctgcatactaacgcactcctggaggagggagaaagagcagctcagcagtgtgggctacacagggaggggctgactctgggaggtgaggcagggaactgtgttagggttgggccacacaccccgcaatgggataggacagagtgggctttgcagtcggacccctgaactctgacttaggtttcctgaaatcacctgacttgggcagggctgagacttggagaggcgggatgagtggtccttatatagggagacagtggatggttgggatgggcctggagccagagatcactggtgacttaccaagggcagtggacatctgggcctcatgtggctcactttccccagttgggagctgctgagagctggctccctggggtagggg

SEQ ID NO: 57083 - DNA, 784 bp, Bovine  19866880624827
  misc_feature (1)..(1): n is a, c, g, or t
nagggaggccagacaaatcagatacaggacagaacatgtagcgtgtttagtgacaggtgttaaggagaaaatgcaaggccgacatgggagatataactaggggagggtggtaggagggatggggaggcctgatccaggtggattctgggtgaagataccaagggagtaggtaatgtggatgtgcagggcaggagcgctccaggcagagggtaccacaggcacaaagaccctgaggtggaccacccgggtgtctgaggcaggccctctaagggaaacagcttcataaagtaggggctggatttcacccctccccacccctccacacaaccacacacagcaagccttggaggccagcctggaagccggaagtggggtcagagggctgatggagagcaagacagtgcagggtggctgggttgcaaggacttgagcttttactgagagagggatgagaaggaccacagcagggtactttacgtgacatgaccatgctcgtgtctgcagtcctgcctcatgggggccctggggtgggcagtgggcagagcagtgggctctggtccaaccccttcccccaattgcagtgtgaaggagggtgccaacaaggaggtgctggggatcctggtgtcctacagggtcaaggtgaagctggtggtgtctcgaggcgggtgagtgctgggctgggggagcctgggggtggggtgtggcgcaggggtctcctctggctctgcactatcatctcttcttgccacctctcccccaaccccagggacgtctcagggagctg

SEQ ID NO: 57084 - DNA, 2049 bp, Bovine  19866880637790
  misc_feature (1)..(1): n is a, c, g, or t
ncctccctgactgccccagcagcattcacagccctctgcttcctttgagttctctgtcaccagctgagatgttgctcccctactcagaggcctccctctgcctgccatgagacagaatttgggctgggagggagggagctccagccttggctctgccactgccttatccctgagtgacctgagacttggagcctcactcccctcgtttattcagcagacatggttctgtagctttgccggcttctcaggttgttgggaagatgcccaagtgtataatgctcacctctccgagcctcatgggagagcatccctcctctgttccaggcatggctggggaggtaggttggggtcacctacccaggtctcataatttaccataatatggggcatggaccagactccacttctttgttacagagccatgagccgagtggagggcagggaagagggacagattgctggagaatgtgatgttggatttgggtcgctctggtgggggagacttgatcctcagagaggagggaggaaggcagagcgggagcgaaggtgtggaggtgggaagggcaggcagcctgcttagggggtgtcggtggaggatcagggaccacctgagtgcccaggagatggaggatgggagcagacaggctccgacagccccagccctctcccagctccatccagagcacttttcctcgttgttcagtcactcaatcatgtccgactctgcgactgcatggcctgcagcacatcaggctgccctgtccttcactgtctccccggagcttgctcagacttgtgtccattgagttggtgatgccatccaaccatcttgtcctctgtctcattcactttctctttcagctggagttttgtgtggtcgacgcttggagtgacagccatggcctttgtgactggagctctgggcttctgggcccccaagtttctgttcgaggcccgtgtggtgcacgggctactccttccctgctttcgggagccatgcaacagccaggacaggtgagggacgtctcggctcttttttggccacacaacacggtatgcaggacctgagttccctgaccagggatcgaactggtgccccctgcaatggaagcgtggagtctcgaccatgggactgccagggacgtccccaacgtctgggctcttgatgggaaagttcttggggtcctgagtcccaagactcagtctctgggtggacaccaggacttggggctcactggcctggttctagctcaggcagagctcttgctgctgagtggccacaggccgctcccttgtcctctccaggccccagtccctgtcttctcgctcttgggccactgtgagggtccggaaggcacttgggggtgagtgaggcttctgtggaacctagggaatggtgggatttctaggcagccttccttcagagggacctgtagcatgaggttgtcccattttacagatggcaaactgaggcaccaaaggagattgtgattttttttttttttggctgcactgtatggcatgtgggaatttagttccccagccagggaactgaacccgtgcccctgcagtggaagtgcagaatcttaaccactggaccgcctgggaagtcccaggatattatgatgtttatcctggctctacagctagattcttatctccccagaggcaaagactgagtcctaaaagtcccccagcagcttgaaaaagtggaaaaataaaccaggcctccatcccacttcagacattcactggctgtgcattcctgggccagtgatttccactttctctgcttcagcctcttcgtctaacttggctccttcccagaacctgggtgagaaactgacctgggagttagtgttcgggtcctagggctgatggaccgaatgaccgcacactcagtagcttcgagcaacagaaatgtttcccatagtcctggaggccagaagtccagaatggtttcactgggtcaaaagcaagttcatcggggccgcgctcccgatagaggctctcggaaagcctcctcctgtgccgcttccggtgcctgtg

SEQ ID NO: 57085 - DNA, 1584 bp, Bovine  19866880666025
  misc_feature (1)..(1): n is a, c, g, or t
nattaaccgtttcttcccaagactttagtcatccttgtcaagctgctgattatacgtctctgtttcctggcaggggcccagagcaagggaggaaaggaacctacaatagtggggggaagtagaaaactctggctattctgataaaaaaaaaaacaaacaacactttgtaatcaatgcaatgctgtaaagccaatggatccagttcagtagaaggaacactgtgattcaggcttccggaatctacagacaagcattttttttttttaaggaagagaattacttagcaccaatttctctctctccagtaatacttccttttcctcggagcccttggctgtaatgagtcggagcacagttcagtggtacttttcatcagtaatgcagccgggcaggtggggggcgcagtcactcggcacaaacagcgctctcacaccactatgcagctctgctcaagggggcctcctgactcggggacaccagcggcctcaccgtcttctctgggggatggctctccagccccaaggggcttcactcaaagcggcgcaggtggttgtacagagactggacgtaggtgaagacgcacatggggtccggcttgcggcccatcaccatcatgtcctccacctcaatgaggcgctcgcagttggccaggttcctgaaacacagacgccccatcagaatgtcagccccagccagcagccagcatcactgctggggaacacagctcagcccagagctggaggctcctgagtgcccccagtagggaattcacattaccccacaagagtttgtggagttactctctctaatgcagtgtttcccgaactcccacatggaggaagcacccttccaactcgtgttttgacttgactgttgtatttcagtctctcagttatgtccaactctgtgaccccgtggactgtagcctgccaggctcctgagtccatggtattctccaggcaagaatactggagtggcttgccatttccttccccagggcatcttcccaaaccagggattgaacctgcacctcctgcattggcaggtggattcgttaccactgaggtaccagaaaagccgctttagctaactagtgagtgagtgaaagtcactcagctgtgtccgattcttttcgaccccatggactgtagcccaccaggctcctctgtccgtgggattctcctggcaagaatattggagtgggttgccattcccttctccaggggatcttcacaacccagggattaaactgggatctcctgcatgcaggcagattctttactatctgagccaccggggagacccaactaaacttactttaaattttcagtgaaattcaatttccctttcaagtttcactaaatattaagttctgctaaaaaaaatttcagtttttattaatttagtcaaatttatatgaatcaaaatggttagttttattgataaacatccagctctgaacttaaatttcactaaaaaaatccaatgtctatcagcagtgtatggagaatcagcatagactataaaataaatgtaaaataatcaggtaaaaaataaatctacccatatgcctcctaaaacagt

SEQ ID NO: 57086 - DNA, 680 bp, Bovine  19866880690025
  misc_feature (1)..(1): n is a, c, g, or t
nggaggggttgagggctagtggccggattccggacttgggctcacctcagcctctccccgggaccctggggctgagtctgcttctagtcaggcagagaactaacattcctgagtggctacagcatagtccacagaagccatatgacaattccatgggttttaacatttgctaatctgcctgtttaaccggtgaggaaaaactctaaaaagtaaagtgatttgtttcaggttgccagcttgtgaaactgggaagcaagtatttgtatctctactcctgaatcctctaagttctctcagggacctgggcactcagtcctcagctccaaagaggctatcttcagccccaggggtctagctcccagccccaaatacccagcgctcagctgttactccagggatcaagactctgaaataacaggcacttaaccttcaagcccaggaccctgttccaaagacctggttccacttcccccatccatcctgacctccttatggtacctgcggtgtaggtaaaaggcagggttgccagttctccagcccgctccatgaaggctgcaagccttgggcaccaaaatcggtggcttacgtcatctgggcatcgcttccagtctgcacggagacaagcctctccacagtacaagacagcactgcactgggggctggggttataggaggtggtg

SEQ ID NO: 57087 - DNA, 939 bp, Bovine  19866880715208
  misc_feature (1)..(1): n is a, c, g, or t
ncagttttgcatccccagggcctataaccgtgttttgcacgtgggggggtctcaactgttgaataaatgcgtgtcctaacaagtgaaaactcttagctctaagctctgcttaaagaaagcattcaataaacatcatgctggttaggctttctcttgccttttgtatacacacaattaagaatatatcttttctgagttttttggaatgagacctcgtctggtggtaaacagagctctggaagcctccatctgagacttgaagttaggatcttccaagagaaaaaaaatgggcctcttatttcagaccttttctgtgtccaagtttggttatattccagaagaatcttctgactggtaactcctggcttctcacagagcagaaatatcagtggaagtggatgggacaaggagggagcaggccctgggctgacctctttccttttgtcttgctcctcgtggttgacccgcttcacagacccagcagcttctctttactgtccggccagctggaagttttagactgcagtgtccttggaaccgggggggctgcgctcagtgtgtatggaaataacaccacggcgcacaggcaggagggacttgttgccgggcagtcgtgctgacggagacgttcttgctctaacagtcttgtggtgttgtgtctcttctctggaggagtctcttccctttccttttctctactccaggctgtggaactagcaccacttggagggctggcagttctgggcgtgtgtttctaggccgatgagcaaccactgcactctgatgtgctggctgtccaaatgttgatgatagatgcctcaggccagggctggacaggctgatctgcagcagaagcaggggctttgagtggggactttttccctagggaactgcaggtgagggtggggctcttgggggaactagtggcacttggagtga

SEQ ID NO: 57088 - DNA, 1481 bp, Bovine  19866880716364
  misc_feature (1)..(1): n is a, c, g, or t
nctccccccccaataaaggacccacagtgtggcaccttccaatgactaaaacccgcacgcagcagagtacagaaattggtaagtcctagagtagttagtgaaagtcattcagtcgtgtctacttgcaaccccatggactatacagtccatggaattctccaggccagaatactggagtgggtaacctttcccttcttcaggggatcttcccaacccagggattgaacccaggtctccccacattgcaggcggattctttaccagctgagccacaagggaagtccaatactggtgtgagtagcctatcccttctccagcggatcctcttgacccaggaatcaaaccggggtttcctgcattgcaggcagattctttaccaaatgagctatcagggaagcccacagtgtaattaactgtgtaattacacagtgtaatcagtgtagttaagctaatggcattaaccacatgtcacgtggcagaatcacagagttggtccactgagcctccagggacagaggcggagctgtgtgctcatccgtttccaccaccatcctggcctcggacagagtttggacatagtaggtgctcggtgggccctgttgacctggctgggacacatcacctgcacacctgctgacaccgctccactgtcgtggtaaacatcgcattgcacgttggcaagtttggggcacacccagccactttgtgcctctgataaaggctttgaggtaactagagcaggttcagtgcataactaagcacagatcaggggttagtgagcccttctggtggtccatggtctgcgatggagcagccgatttacaagggtttgttctcccactggtgactttccttctgccccccagggcagggctgggctctggcacaccagacccaccctccgagagggaccgattccccaaaggaaaacccaaggttctgccccgaactgtgccgctgccaccccccaaagtcttcctctgggcctaggaatttcatcccaaaggagctctgtttctttctgttactttatccagcaagcttacgctgacccgaggagggtgactaaggggaaatggagtattttcagccaggggccatcacagtcactgtatcaagtatcttttgggggcagtgaatttcacgacaggtgtgtttttattcaggagaaataatgcacttaatttagagggatgaactttccttccaagaactgttcactctctctctcccctaccctcacccatgctgccaggagaacccacagcgatggcaaccatgacatttaagcctggataaaccattgcagcataagccacaacatctgacttcaagtcttgtcttttaatgacttttaatgaggtgaattcaccaagccatacttctctcttctttcaaatgggcatcagcctgtctctacaggcttggaaggggtgaaagtgaatgtgtgaatcactcagtcgtgtccgactctttgcaac

SEQ ID NO: 57089 - DNA, 703 bp, Bovine  19866880755624
  misc_feature (1)..(1): n is a, c, g, or t
ngtagagaagattctggggaagttctagggaagagtacatgttggagtcttggggctcatcctacctcggtcctgggcacccagcagcccaatctcagtgatatctcgacaccaggcctgcagctcaatgtcgtctctcacagactcgtccgtcttatagtggagactcacaatcccctccacgtagctgccagtggaggggtcagggcaggagagtggaggctgatgacatggagcccacaggccctttacggtccttacctatgtggacaggccagggcccgcagcccccttgctggggcacagacctcctcttctcccagcctccccccaccaccagccctgccttcctcccacctcaccgagagagaatttcccagagcctcagggcatcttgggcatagaaagaagacttgactcccaggagcccccggtcagccaggtcatcagggggacagaaggagctataggttagaaaggctcctgctcgctggagcagctccacatggccgcccccacctgtgctcaccacctgagaagcaaagacagcgtggtcaggcaaatccacctgccctcaggccagagggagcgtgaatcccacttctctccttgtacctggtcgaagactcccgagtcagagaccagcccagtcctggccccggatgttaatttccatggtgtatcgcaggtgcggaatgagaag

SEQ ID NO: 57090 - DNA, 988 bp, Bovine  19866880933603
  misc_feature (1)..(1): n is a, c, g, or t
nccatcctttggccccagtacccggtgtaaatgcccataagcccttctgccctcaggatgctgatgagggcatggaagctggttttgtactctcgtgtcttggctccttccccactcagctgcatccggttcttcaccaggtccaagggctgcacaaaaactgtagctcccatcctgggggaagacaggggtagcatcaacggctaggtgtctcagatctaccaaagtcccttggagcccagcgacaagaggtcacaaagggcagggccgccatgccattgattaagagttcaggaactggtgggcatgtgtacaagagtctctacctgtatcaagagcaatgggtcttaaaagtccagcagtccagaagggaccatgcaatgaaagcgtttcacacagcaacaagggtgtcaagcagtgaccccgggattgcgtgcagtccaacccaaggagaggtgggcattcatgatctaggaccccatacagtccagcaagagccatgcaatgacctgaaaccccatacagtcccgcagtcaagcaatgggttgggaaactcaggtggtcttgtgggggtcgtgcatgcagcccaaaggcgccctgcgatgggtgaaaagatcctggcagtccatcaaggatcttgcaatacgatggggacggcactgaccccgtgtcagctcggttcactgcaacacacccaaagaagaaccgggcccggtaccttgcacccgtcccttcctcctcctgtcccatccctggggcctgagcttacccggccaggcccccaaacaggaacttgacggacttaggggaggtacggggcttcccgtccatcccagaagccccgggactcgccgtcgccgccatcgccactcaatggccctcggctcgcggtcccgtgcgcgcgcggccccgctcgcgcccaaggtgacaccgcgcgcgcaacaggggcgagggcgcgcgcgcacgcccctccggctctcaggtccag

SEQ ID NO: 57091 - DNA, 621 bp, Bovine  19866880959949
  misc_feature (1)..(1): n is a, c, g, or t
ntggaggaggggccccgtggtctgtggggcacagcccccagagcagggaggctgaggacaggggctgacgttcattttctacaagtgtgcgtctgcccctgggcacagcacccctgagggtgtgctgcttcctcgtctgcaggaaagagaagggcctgagatcctgggcctggaccctgctgccgggatggccggggctctgtctctggccctagaagctgactccccagcctcctcctctctctccccatgatccagggcaagctggcctcgtttttcctctcgcgggtggatgccttgagccctcaactccagcaggtaaggggaaggagggagacagtggggagcctggggtctgagctggtgcttccccccacctcttggtttcttgtttttctatttttctattcttgttttctattgccgcttttctctgcattttcattcccctccctgtcaacgcgcagtacacaccagtaggggcttctgcctcccggtctctatctgtgtctttctgcctcttccattccatctcccctcctagtgctctgacctccatcttcctgggcgctggtggggttgggatccacggctgggctgattcccaccgatcgggacccc

SEQ ID NO: 57092 - DNA, 1077 bp, Bovine  19866881034081
  misc_feature (1)..(1): n is a, c, g, or t
ncgcccgccctgcaccccccagggcggagcggacagtgaggatgacaacgacgatgaggagctgggggacgaggccatgatggccctggacaagagcctggccagcctctttgctgagcagaagctgcgcatccaggcccggaaggacgagaagaacaagctgcagaaggagaaggcgctgaggcgggacttccagatccgggtgagcccagggccctgccctccccctcaccacgcccctccccctgccctcgcccccacacctggctgagctcaccttctcactacaggtcctagacctgatcgaggtgctggtgaccaagcagcccgagaaccccctggttctggagctgctcgagccgctgctgctcgtcatccggcggagcatgcgcagcaacagcagcgccaagcaggagcaggacctgctgcacaagacggcccgcatcttcacgtgagggcggcagggtgggcccggacagccgggccggggggctcccggagggaaggggtgggagccaggggcccgcatcactcaggagcctacatcactcaggagccttcacccatgtgttcctgcagtgcttagcacagggcccccagtcccatcgatgccctcagggtcactgtagttgggaaagcagacttggtgcccagttgtgacaggctggggctgtggcagcgagtggacgggagatgggacacctaacccagtcttgagggactggggaaggcatcctgagagaggtgtcagcagtgctgggggccgtggagctcgctcatccacccagagaccacaggcagaacaggaaggcgtgtctgacacagtcagaacataagcagcttgtggcctggccgacctcagtgttgaggggccacagaggcctttgcagcaagagcagaggtggggtgaggcagggtgggcgcagctggagcagggagcccagccacggagacatagatagcaggtagagtcctgcttcctggggaagggtgggggaggacagtgtggagacaaaggcctgacaagaacttgagacgggggtgtgcccccagtgtcctcacctcaccggcccaggt

SEQ ID NO: 57093 - DNA, 787 bp, Bovine  19866881035341
  misc_feature (1)..(1): n is a, c, g, or t
nccctgcccgccccccacacccacaggaacacgctgaaatacaccttttccttcctccagctggggcagggtggatcctgtcccaaaatagagccgatcagagggaagctgcagccacaatggagcctttgagctgaacaaaccgccagaggaggccaggtttcctcagacacacctggaaacccaccccaagccaccaaacccttgtctccacgcggcagctctgaagggcaaagagaggcccggctagggagaggccacctcctcaccccataattacagagcctcctgaggcgccgcctgggctcagggagggtcactccttcagagaggtgtgaccccctaagagtagacagctcggcccaccctgccacacggggctgctccgaggagatcaccacccactgggtcttgatttccccagccccacaccccaccaggtgcctccatgtgccaagagcttgtgcttctaaatctgggagagggacatccctggtggtccagtggctgagactccatactcctgggttcaattcctggtcagggaaccagacccacatgctgcaactaaaaccggtacagccaaataaattttaaaaaacaagaataaaaaataacctaggagataacctcagtgggtgctgtttgtgttccccacaggctgtgtgcaaatcaggctaatcaccagcaaactgcccagggggctttgctcctggatggcccctgtccccccatcacctggtgagacacagacagggggaggtggggtggggtgtctcctccacac

SEQ ID NO: 57094 - DNA, 827 bp, Bovine  19866881083677
  misc_feature (1)..(1): n is a, c, g, or t
ntaaaataggcttgcaagaacagggggagtttgtgattggtttgtaaatttgtgataacagctttgagcagaaacaaaactcaagtaccactttcaccagagcgggtgacacgaaaactactcaagtggctgttttttctttttaagtcggaatgacacgaaaagaaaaggcaagttgactgacgaacaaaactgaactttctttagttgctatgttgttctgttgctatgtggtctaatagaacctacaaacataatcaaggcgatcacatttcctctgcctcagccattggaaaagcttcatacccctaagagtcttcatccgcagttgtgcccgaagcaacaaagtttgcccgagggtttaaattgggaacgatagtaagagttatagctagctttttttgaacgctgagtgctaggctgggcgatttgtgtggatcatctctttaatccccaccgaagcgttatgagttaggttctattattatcagctccatcagacagatgaggagactaagcccatggaagactgagtgctggcccacgggacaccgcaagccagtggcagagctgcgatttaaatccaggcaggttgaatctagatccctcatccgagctaattctatttcctagtctattaggggcaaagccagaactagaatgcaggtctctttgttacaaattaaaaagtgactttagtgttgaaaaagacatgtatgggcacgaataggtagaaaactttagaagagggctgactcacatgtcagcaggatgattctgcctgctgcgttgagaataaactgtagcgggaagacaggcagaagatg

SEQ ID NO: 57095 - DNA, 729 bp, Bovine  19866881096134
  misc_feature (1)..(1): n is a, c, g, or t
ncgggtttctgatttttagtgattgccgagccctgacccataaaggtagcacctgtgctgaaattgcccttgtctccctttccccaaagagcagtgctgggaccaaaggctggctctgaaatattgacacccttactccctgcctgccaatttttcaattttctcatctaataaaagaggaatacaacctcacaagattactgtgaagactatatgagaaaatgtaggtaaaagcttagcatggtgcttggcatgctgtggatgctcaaaaattccattctagctttgtccttcaaggcctaacgctaatgttgcctctgtatgaactttctataatacctcagccccagctggacagagtccaccctcctctggaatctcagggccttttgcttattgataaaagtggctctctctctctctcacacacacatacacactcactcacacacaaaggaaacagtttgatgactaggaagagcctgtgagttgtttctcagttgttcaaagtctgaactgtgactgctgaagttaacatttccagtcaacagggtctatttttaaaaaattgtttatttcagggggatcaaaggagactgatggataatgacactgttatactcctggcacagttaaaaatgcacttattcactcgcttagtcaccccacttgtttttcacacatccatttgactggtgtgtgcacatgagaaaagtctggagctgaaag

SEQ ID NO: 57096 - DNA, 1166 bp, Bovine  19866881124078
  misc_feature (1)..(1): n is a, c, g, or t
ngccccggaggctggggagtgtccgctttcagcccagcaaaaggccttgtcactcagagcgagcggtgggggtggggaggcccgccgaggcaaggggctggactagggtctaggcaaggagctctctggagcctcttccggtctgtagacaagccaggctccctcagaagcattcttgaggctccttggggctggggtaggcatgggaggtctccgagggcacgagaccttccttaggaaggcctggagagccgaagccagcatccggacccaccaggcggccactttccttgcaagcccccagagtctcctttctctaacaaaactgtccccctgacccttggatctgctccagcaacaggtgaataactgaggctgccgaggcgcaaactcgcatatttctgccattgtggctgctctggtcgccctgcccaaagcatcctttccacttgccatcctgtctgacactctcctgctcctttttcagatcttcagagcccagtttttggggaaggttgttttattttttttggccatgcagcctggcatgtggaatcttagttccctgaccagggatcaaacccatgccccctacatgggaagtgtggagtcttaaccactggaccaccaaggaagtccagagcctggtttaaatgccaccttctctgagaagtcatccttggtgaagactgtcagcctgcctggcttccactctctgccccactgtgtccactgcgtgctccactcctgccctggttccctgctctaatgcgggatttgtgcttctctggagcagtgatctcagtttggagctcccgagagggcagagcccagagtcgctcagccctcaactccatccatcgcccagccccaggcactggatgaatgagtgcaggaactagtgattgaacagtgaatggagatggagagaaccaggggggaaggaaagcaggaaagaccccgtctgtgtctcctgagccctggagggactgcccggtgtgccagtgggcaggaaggtggcaggggcagcccaggctaggtttcagggatgctgtgccgccctgggctgcagccagctcggtcactctcattctttccagatcaaagttcccccagggagcagcctggaacctgacactggcccagcgtggaggggaccggctggt

SEQ ID NO: 57097 - DNA, 921 bp, Bovine  19866881127069
  misc_feature (1)..(1): n is a, c, g, or t
ncccactcccatgtgcaaactggagtcacaggtcacacacacacacacgcacatacacacataggggagtggctcagagcttaggactttgcgtctcaataatgtcatggctcactaatctttggacctcagtttccttatctgtaactgaggattttaataataataatacggtatctgtatcctagaattgttgtgcatgtgtgcgaagtcacttgggtcatgtccggctcattgtgaccctatggactgtagcccgccaggctcccgtaagggatttcccatggaacatctgactcaggatcaaacctgcatctcctgcattgcaggtagatttgttaccactgagccaccagggcaacccccctagaattgttatgctcagtcactcagtcctatccaactctttgcgaccctatggactgtagtccatcaggcttctctgtctatgggcttttccaggtaagaatactggagtgggttgccatttcctactccaggcggaattgttaatatgcattaaatttattcatatttgcaaggtccttaaaaacaaagaccttatatctggctcatagtaagcactctatttatctatctattagttaaataaaattaataaatatgcatgattgcatgcttcacacttgactctcaataaaaattacaagttgctttcacctttatcctgttcccctgggttgagccagaccctggtcaccagcaggtccaaacaagcctgatgtgagaagttgtgattcaagtctaggaagaacatacagctctgggcgtgtgcatttcgccagatctgctagtggaaccacatgtcattaacaggatcacacgtggagaaatcatttcgcttctggttaaagacagttgaaaccatctccctctgctccaaacaagtagacatgagga

SEQ ID NO: 57098 - DNA, 904 bp, Bovine  19866881160808
  misc_feature (1)..(1): n is a, c, g, or t
ncagggcagtcccagctgtggactttctgtaactacctgggcttccctggtggctcagacagtaaagaatctggttcgatccctgggttgggaatagcccctggaaaaggaagtggcaacccatccgagtattcttgcctggagaattccttggacagagaagcctggtaggctgaagtccatggggtcgcaaggagtaggacacgactgagcgaccaacactttcattttcacttgtaactccctagcgtgtggcttaacaaggtcttcctggctgctgggatgataacaaaatgaaatagataaagataagagataggaaagcccattagcagactttccaataatgcaggcaagagatgcctgtggcttggattgggctggttgtagaggaagtgtaaagaagtggtcagattctgggtgtgttttggaagtagaatcaacaggatttcctgatgggttcagtgtggggtgtgagagaaaaggatgagagaaaggatgactccagggtttttggcctgagccattggaaacacagagttgccatttactgagatggaggtgctgagttgtttttttgttttttttttgcttttgaaaagagtaggattaggagttcaattttagacattttgaatttgaggtgccttttgggacattcacctgcagatgttaaggggcagttggaaatatatgagtctggagttcaggagagaggtctaggctggtatttaaagccatgaggctgaatgaaatcagcacgggcctgaccttgaatagagaagaggagaggacagaggatgatactctggggcccttgacacatcaggggatgtggcagccacatgctaccacagtgaactcaaacgttgagaccagcagttcaatccagcacactctatca

SEQ ID NO: 57099 - DNA, 637 bp, Bovine  19866881241898
  misc_feature (1)..(1): n is a, c, g, or t
ntgaccctcacctgcgcctttcgctatggccgcgaagacctggacgtgctgggcttgtccttccgcaaagacctgttcatcgccaactaccaggccttccccccaacacccaacccaccccggccccccacccgcctgcaggagcggctgctgaggaagctgggccagcatgcccaccccttttttttcacagtgaggatgcccccaccctctgtagagcaaggggtcccggactgtgttggggggcaggggtgaggcacctgttacaagaaggtctgggaataacactgtgggaccctagacccccagatcccttcagggccaccctgcactcttagcctctctgcctcttccctgggtccccctctgttttcctttctcatccccaggagtccttctccagcctcttaagttgagattgggaggaagatttggggactttctggaagaactgaactcttttcctctgccacagataccccagaacctgccctgctccgtcaccctgcagccaggcccagaggatacggggaaggtacgggaggaaaagtgtccagcaggagccaggggcacacctgaggcaggctggggtgctgaggagacattagggtgggactcagggcagggaaatatgccc

SEQ ID NO: 57100 - DNA, 654 bp, Bovine  19866881256620
  misc_feature (1)..(1): n is a, c, g, or t
ncctcattaccctggggactctgcctccccctcccagtccaagtcacaggcacagggtcctacctacccccacccacaggtgctggtcctcccaacccatcccctggaggtccaattgcctagcaatgcccccttccccaggacctaaagcccctgtccctcattgcttagctcttcccccagcccagcaacctcaccgaagtgtgtgaccagtaggagtaatcgaaagtgaagcttttgggggcatccttgctctgtttgggattgatgatggctgagagcaaaggaagtaaggccaaagtcaggtactcccaacctctgcccactccccacaaacctctagaatccaggtatcccattctccacctctatcctaattcatctctcccctttaacactccccaccccctccaggcaccaaagctaattttggcttcccaggacccgccccccctcccggctgcctccctggattgggcaatggagggcttcaggccaacattccccctcccagggactgggagcatggaaaggccagcccctgtccttacaactagcacctgctctgtgcccagcacagccctcctcccggttcggcccagcaggcctggccggtatagtgggcctagcctgccctgcctgtgcccagccggg

SEQ ID NO: 57101 - DNA, 835 bp, Bovine  19866881279847
  misc_feature (1)..(1): n is a, c, g, or t
ntagccctgtggatgcccagcccaggcccagaggaggcctgccgtgccctcaagagttccccagtttgtggagggccaaggccttgtgagactgggagaagacccctgctgcgtcccctccccagtgggtcctgccctctctctgcagccctggccacactcctgccctcccagcctggcaggtaccttctggcctcctcgcctctgctcaccggcttctctgcctggcgtggccttggggctcttctggtcacatcccgatcctgcccatccttcagggctctgctcagtgccacttctacgtggaagccctccctatcctgagctttcctctgacttcccttgtaccagcctcgccctgcgctgcaacttctgggacctttcagagtctccccccggccccctgacagcttcctgtccctcatcttgtcactggggtgaggggatcaccagaaagtgatttgtgacctgggcctgatccttctcatctgtaaagtgggagtcatggtatgtgtcttacgaggtggctgagagttggttgacaaacggagacaggcccggcatgttgtcagtgggcaggtagtaacccttcagtgcctctgtcctgggtgcttgtaggcctttgggtcccagagcctgggctgccctgggcagagccccgtgactccaggaatgactaattccactccagcaataagctctcaggagctctgagaaatgagactttcccctccttcctgcctcattaaactcttcttgagtgagtggaatgaagattgtcctaatcctttggcatgaggtggggggggttcaagggagctgggggagacaggcc

SEQ ID NO: 57102 - DNA, 1459 bp, Bovine  19866881365775
  misc_feature (1)..(1): n is a, c, g, or t
ngccgttatgattgcccctttttataggcaggaaactgaggcccaaggccgttcagcaggtctgtggctgagcctgggctggagcccaagtctcctgtctggagggaggaaaagagaagagccgacagccttgcagctgatacactcacccgggagtcacagacaggacagcgctgtctataccccgtagcctgggtcaaagggagggccagagtatctagacagagagtgagcctcctgtccacagcagtattcaagcaggttttgttggctagttacatgactacacttccccacaaccctttcaaactcagattccaggatgccaggatttctttaggagatggaagatgagaaagtaggaaccgctgatttattaccagaaccccagccagcattccctgccccaggcacagggcacaagctttacagggatcatcttgtttcaccctcaccataatccaggaggtcttttcatccccattttccacacagggaaactgaggctcagagacacaaagtgacttgcctaggtcgcatagagttagtaagtggcagtaacagggctgacacctaggttcgtgagcccggctgcatgcccctgcatggaccaccctcaggacagctctggttccctaatgcccagtgcttgaccatgctgagctgccaggaggtaggaagagggctctcagggtgtcgctaggttggggacctggtgtaatccacaagggcacagcccttcagtgtttaacaacttccctgcaatctccaagaaggaggcagggaggctggatggagagtgtgaggctcagggagggtcgtgctagactctggacctagcatcatgtggtcaggacagcatcaggactcactgtagcctgagccttgcagcccatgatatgggaagctggggcggcccgaacccacctgggctcggtgcccccgaagtccagcatccctgactgcatgcccagtgtagaggccaaggagaccacttgcttagaaggatagcagtcaagaaataggggcaaagaaagaggcctggagtcaaaaagcctaggtcccagccctggctcagtgcctctgcgggctgtgtgaccttggtccaggcccctgccctctctgagcctccatgtgcttacctacaacacaggagtgatggccagaggatatatttgagagtgtcagggaggcccctggtccaaggtaactgcttgctgacctcagtccctgaccccatggtctctgaagccccacctgacctctgggccactcaacagcagaagtccggccctggagcaggacagaaccccagctgcccccgttcaacgccccaggaccagccctctgccctgacccccacacctaccagcaggatgtcggcaaccaccgcccagttgcaggacaggagcagctccccaagggccaggaacacctgtggacacgggggtcaggatga

SEQ ID NO: 57103 - DNA, 1541 bp, Bovine  19866881390010
  misc_feature (1)..(1): n is a, c, g, or t
ncgaccccatggactatacagtccatggaattctccaggtcagaatactggagtgggtagccattcccttctccaaggattgaacccaggtctcccgcattgcaggtgggttctttaccagctgagccaccagggaagcccaagaacactggagtggatagcttagcccttttcaagtacccgaagggctcacctaccgctgagcattgaagaggatgtagttgtgtggtctcctaacccaacggggctgtcctggctcccctgggcccggggcctggccgaggctgcccctcttgggtgagggctgcttcctcaaaaggcacttggtctcttgctgggtgatctgagcaggtgggctccgccatgggaccctttccccaaccctcaccccacccctgaaactctcctttcccatgcagttttcatctgcagcttcatggtggccgcccccatcttcggctacctgggtgaccgcttcaacaggaaagtgatcctcagctgtgggattttcttctggtcggcggtcacgttctccagctccttcatcccccagcaggtgaggcctgcccgggcttcccacccggcattcctgtgcatcccgtccacgtgtcctggttcctccagggggtggcctgtcctagtctagactggggttccagcctgttgggttcaagtgtactgcgatgaggggggtctttgggtacttcgatacactggccttgctgatgggctttccctgtgctgggcttgagctgaaggactcgtagcccagtgggacatcttaactctccctgagctggttctgatttgcagagaatgtgagaaagagggggaagcaagtcaggccaaggagtcaggaccttgggttctagtctcggctctgctgtcgtcttgctgcgtgactctagatacatcgcccacctttctctgggcctcacacagtttgctctttgtccaatggccagccagttccctggatcaaagtcctctggaaataaacatcggtttaacctaaggaagatgtttctgacttggctcccacagttcagggtttgaagatcccagttctgtggcccattcaactttgtgatctggagaaacttgctttacttctctgagcctcagtttcctcatcttcaatagggggataacacttctctgtttgaaggactattgtgagaaaaaactgaacgggtggatgtccacaccctgacacatacatggaaggtgttcagcacatttttatttctgttctttcttccaaagaggagatatgttgctctgataggtagtgagtgtcccatcactaggggtgttcaagcagagaaaggacaatcacatgatggctattgtagatggagatagaggaagaagggggaaaatcagatcttatcctcagggagttttcagcctaggggacaaaagaggagaccctggccttgggagcatccaggctaggggtgggaagatgtgacaggagctcccacattcagactttcaagatatgcaaagtgctgaaagtcctcactaagtagagacaa

SEQ ID NO: 57104 - DNA, 1072 bp, Bovine  19866881525497
  misc_feature (1)..(1): n is a, c, g, or t
ntgtgctggtctccgttccctttccagttttattactattccagaaaaggattatttttagtctctccctcccagctccaatagactagttgggtacctcactccccgagtcggaggtccttccccgagcccccatgtagctgggaagtgggacctgggggtggttggacccctgggatcctgaaggagggccagagagggcgcagaactccgtttctgttcctgttatccggacgcggccccctccgcctctcctcccgctgccatgcaccctgcggccttcccgcttcctgtggttgtggtcactgtgctgtggggagcggcccccagccgagggctcattcgagcggtgagtcggaggggccaatgggggaaggacgctgaagggagaggttgcagactaaagtgccaacacggactcttgtccgcagatctcggaccacaatgccagcatggactttgcagacctcccagctctctttggggctgctttgagccaggagggacttcaggtgattttttccccctttttcctgtgtccttaaattatctctcctgggtagaggttcaggagcctttcttggatgaagctgttagtgggaaaagtgtcaagttaggaactaagtgcaagagcacgtttagtgtggtggaatccagaatccggaggtaaaagacaaaagtctactcctagaactctgggccttggaagggaaactgaaagtggactaagataacaggtagggctagtggtgcttatcagtagggtctctagagccaattactgcccttatgatcgtgacaagtaattatctctctgagccttagtttgttttactgtaaaatgggaaaataatagaagttatcacaggattattgggaggattaaattagaaaagcagttttgtaggactttttcacagactaccatatagcaagaactcagttgggccatatataccggtattgtttgtaaggtgggtaattggaagattaaagggaggtgttaagagagaaaattcagcaggactgaattttaaagctcttactggcttttaatgacccaggaatcggg

SEQ ID NO: 57105 - DNA, 694 bp, Bovine  19866881669178
  misc_feature (1)..(1): n is a, c, g, or t
nccgccccacccctgcccccgtgcctggcaccatgctgaggcgcagagctgagtcagacctcccacccttctagccacgggctggtcaggggttagtcaggagagacaaccctgggtgaagcagatttgcagggaagctcaggtgaggcaaggaaggcttcctggaggaggagagatggcaggggcccgacacccaggccgaatctgacctcctaggctgacccgtactctgacagcaaaccccaggtgccctgaaggtggcccctgaggagtccttactcctccctgccccccagggtcccacccccagcacctcccagacactctccccaccaccagtcaatcccccacattaccctcctctcaaccctctcctggccccaacttggaggatccctgagatcaggaccacctgtcaccccatctcaaaccaccacccccagactgctgccacagtcaaggccacaagcccctccaggtccctcctagactgctcctgtccctgctcaaggacacaaacccctgccaccactcagacagccctttgtccctggctggctggtctggagcccattgttggccctgtgaagacagcctctgtccacccagcccagccacaggcatcgggcaggcacgcctgggacccatgctgagccagagagggcagagtccacaggagctcagaccctggggg

SEQ ID NO: 57106 - DNA, 778 bp, Bovine  19866881806224
  misc_feature (1)..(1): n is a, c, g, or t
ncacacacacacacacacacacacaccccacatacatatcctagatcgaacagtgacacacactgtgcctgagtgacagctgttagaaggtggggctccaggatgggttctagtagcagcagcctcgtccctccctgccccctgccgtgccccgggagctggggtgcctaggaggtagatggcaactcttccccgctctgccgcagacgcttcttggcccggatctcgttcatggcctcttcaatggagcgtgtgtccctcttgttggccacgggcactaggggcagatgggaggatgggaggacctaggagccctgtgccttggtctcccctctccttccccccaacctgtgctcctcttccctgccccctcccagcccccactgtggcctcaccacagccgtaggtcttgttggcctgtagcatgtgagctgcatccttggctgcccccttgccaataaggtggctgtatttgtctttgtaatcgctggccgggctcaccaccacgggtccctgctgggccgcttcctcctcctgtcgctgggccagctcctgagggtgcagagggggtcaccggagctcaaggcctgacctcagcccctcccagatggtggtggcagggtcccagggactgccaggcataactcaccttcagcctccgcttctcctcagccttctgggggtcccactcctcgccacgccggtaggagtccagctcttcatctgagggtgcaaactcctgggagagaagtgggtgatggggtcaaggttccacata

SEQ ID NO: 57107 - DNA, 3526 bp, Bovine  19866880193656
  misc_feature (1)..(1): n is a, c, g, or t
ntctagtcaaggctatggtttttcctgtggtcatgtatggatgtgagagttgggctgtgaagaaagctgaagggcgaagaattgatgcttttgaactgtggtgttggagaagactcttgagagtcccttggactgcatggagatccaacaagtccatcctaaaggagatcagtcctgggtgttcattggaaggactgattctgaggctgaaactccaatactttggccacctgatgtgaagagttgactcattggaaaagaccctgatgctgggagggattgagggcaggaggagaagtggatgaaagaggatgagatggctggatggcatcaccgactcgaagcacatgagtttgggtgaactccgggagttggtgatagacagggaggcctggcgtgctgtgattcatggagtcgcagagtcggacaggactgagcaactgaactgaactgaacatgttacaaagaatcattaacagaagaaacacagtgaataattaaaataaataacaatataaaagatgaaaattacagaaaaaaattgaaaacatatttagtttcctttagaaaattgtaggaatcattgaattatcattcattaaatttggaaaaccatgcatattataaaagagtgatcaaacagtaaatgcaaagtggtatgactaaaaaagagcgtactagggaagcataaatatattgctaatgtacactatccttcagtgcaccttaaacccatcactggaaaatatttctttgaccttaacctaatttaagtagttcaactcttgaaggtaccccttgtggtgggccaaaagcctggtctcaatgtagacagggaacccactataaatttgcatgtttctcccaggacccttttgtttcttttgtcttcctaatagttcaactagtattttaattcgtgctaatttttaaatgtattttctttatgaattcaaataaaattatgttaaattatattttaccttcaatgaaaaccatttttagaattgtaagcaagaaatgctgtggtattgaaaggttaatgctttcttcccaatccagtttattcttgtaaatagcataagttatatgtcacaataataaactgtctataattataaatagaaaaagacactagagaattgaaaaactgccactaacgtgctatataacatgcaaaatccactaatatttctggtcattaattaccctagttataaattaatgatataaactagattatctcagtgttacatgttatgtgtatgatttcaggtaaatttgcctcccacgattatcttcagtacctaaaaattatctttcctgtttgagcttcattaaatatattcaaatactacaaaatcagtagatatagatttttagtaaatagggctcatagaaataccagtgactaagtatcataaatattcctgcttctagtaaatacatattacagagcagatgtacaaatttatctttgtataatcttttaaaatatagaaatttaagtacataataatcactattcagtaagctttaaattgcaaagttaagggcagtcattctttttctccaatactattgaaagcccacatctggattttaaatactctttttccctaaaagcccaaagttataattcattacaataatattgcacctgtgaatgatgcatatgaattataaaagcatatcattcataactctttatcacttcatagttttcattggcagcctgatcttatgtgataaatagagaatgatattgaaatggatataagagttggggaaaaaaacacagtgttcttaaaacaagtattaataactacttaaccatttcagtcttctatttggtgggcatataaaagtaaaccaaagtccctaacttcaagttcattttatagttggttagagaaacaagcaaaccaactcgggtttcttttatctactttttgattataggttttgtgcttttggatttccaaatgtgtgaaaataactgctttatttaactgttactaagatttaaaaaataaaatttacagaggcattcaaagatgtcaatgttaatgcaaatgatagtatctgccacttatttagtatttatgatagcacagaaagcttatgggttttttttatacattgtattatttaattcttacaacaactgtataagttctatagtaacagtggggaaacagaggataagaaaaaatattcaacttgtctaagaatacaataaaaataagctgcagttacaatttgaattttgatcttttttgcctgccaagttgttgaccatgtgtccatatagtctttatgtttaattaatggaaaattacatataatacattggaaaagaccctaattctgagaaacattgaaagaagaaggtgaaggggactacagaggatgagctggttgaatggcatcagcaactcaatggacatgagtttgagcacgctccagaagatggtgacagggacaggaagcctggtgtgctgcagtccatggggacacaaagagtcaaacatggctgagagactaatgacaacggaccaatatataattcgtaatcttagtataattcttctgcatgttatccattctttcatcttgaagcatacatgaaatgaagagcagaggtagaaaaattgtcagtatactgtgaaagaaattgtcttaaagttaagttccacaactaaatatttaaaatattttatgattaacttaataaaataatcctttgattcaggttgcttattcattatagcatttcatactgagtcaaaagggacatgcctttttttgtttaacataaacttgaattgggggcttatataaggaaagcagaaataaagtattttagaaaatttggataatagccaattaccagatattgtttttttattgaagtacagttgattcacaatgttgtgaaatatttgctgtacagcagtgactcagttatatacatatatacattctttttaaaatattattttccagtatgggttatcataaggtagtgaatatagttccctatgctatacagttcagttcagtcactcagtcgtgtccgactctttggaccccatgaatcgcagcacaccaggcccccctgtccatcaccatctccgggagttcactcaaactcaaggtccatcgagccggtgatgccatccagccatttcatgctatacagcagaactttattgcttatgcactctagatagaatattaatagcatctggcaacccccaattcccagtccatccttctccctcccccttcccagatagtcttaaagaaatagactgacctgagaattctcagaaaaataaactctgttctatgttttctaagtaatctcaatttcagtgataattgactttttgagaacagatttataaataaccagcagaaaaaaaaaaatgaaataggtataaattccctggtggctcagacggtaaagcatctgcctacaatccgggagacccgggttcaatccctgggtcgggaagat

SEQ ID NO: 57108 - DNA, 1977 bp, Bovine  19866880510710
  misc_feature (1)..(1): n is a, c, g, or t
ngtcttgatccctgtctcctgtacaatgtcatgaacctctgtccatagttcatcaggtactctgtctatcagatgtagtcccttaaatctatttctcacttcaactgcataatcataagggatttgatttaggtcatacctgaatggtctagtggttttccccactttcttcaatttgtctgaatttggcaataaggagttcatgatctgagccacagtcagctccctgtcttgtttttgctgacggtatagagcttctccatctttggctgcaaagaatataatcaatctgattttggtattggccatctggtgatgttcatgtttaaccttcacttaataacgagatgtcaacttcagcattccttataacaataagatagagagttgcctaaatacaatatatttccaccatattcttcaatagtaataaataataaaagagtaactttgaggactgattaaaaaagaattctgtgataaactgcttaattaaactgcaaggagcagaatgatgcaaacattataatgccatgaatgtagttaaactatggggataaactgattcaatttgtaaaataccctaatagtttacacaactttataatattcattaaacatatttgtacattttatatttttatattacataattttatgataatatgttatccatacaaaactactagaaagtaagtccgtattaattaatttcaatttgctaatgaggaatcatattcattggagttgagaggaccaaaaccacatatagatggggtgaaggttttggctttaccacttaacagcatataatactgtaggtaatataatactgaaaagatttcaaattctatctgataaagggcctccagagaacaccaaatctaatgtatagaatgccacattttgaaatacacttggatttttactgtgtaacctaagaatatcaaccaccactacttctttagaacattagaattctagacataattatttgctaattcaagcaaaagtgaaggtgtccattttcttttggtggtagaaaatacacctccagaataatatggatacaacttacttccattgatattctctattaccttgactccagatagtaccatctttctcaaaacagggggtagaggacacacttttcctgagccatttgtgtgattctattcttaatgttgcaaaaggaatgctgttttgaaaataaagaggaaaagatagtggtgaaatttcatctacacagatcttagaaaaaatgtcatattgtttgaatatttataggttaaaaaaaaaccacaagtatataatcttggtaaaaagtatctcttaaacaacagaaggtcaagatttaagatttagacttcttcttgatggcctcatattgttaccacaggctgacagaatagctggaaggcatttctacagcttttgaacagatgattacttactctgatatcccaatattattattttacaccttaatggcagatcttattcttaaaagccaattccatttaaaaaaaaaaaagtgaatgtctgaacttttgacaaagacattttaaaaactcggtaaaataattattgctataaaatctagaagtcctctttcttacaatttttacaagcttgcttactttctttgtatagaaaatcctttcatattatctagcttcttttaattttcattaatattagttgtaccagggcaatacagtaatatcttttctgataaaatatcaccagttgtgacaagtggggagtgaccacaataacctaaacttgtttcccaaattgattttgcttcttgtgtcttccgattgttatgactatggttggcacattttatacattgacagtaatcattaaaataagaagaaaataatattttaacacatgcattaattatactttatggttacttgttagtcttgtatgtaaaaagaggtaaaatttattatgatttatttg

SEQ ID NO: 57109 - DNA, 1509 bp, Bovine  19866880812629
  misc_feature (1)..(1): n is a, c, g, or t
naaaaatgatcctccaagaaattggtccctggtgccagaaagtttggagactgctgccctatgacactcaaaaaagaaaaaaaaaaaactgtatagtacttttattctgtttgtgaagaaagataaattgccttctggtactattttcatctgtttatgtttgtttcccattctgcctcatcacatcttctctcagggcttctaattttatttccttcaattaggccaaatagtatatcaaatataccttatgtttaagtctctaaatatcccaacaaatctgatttacttatcatgctgcaatgacagttgttcatattgtgtgatgcaattttaaattgaataaattacatataatgccactcattagaaagtagatcatagcagaacaaaagacctactgcacattacttttaaatataatttgtgcttttgttcttgcttatgttttacattagttgaaatatactcaacttcaaataatatgtaatctgactcaaactgctccaaaaaatgtattgggtcatgttgtagtacgatggctgcagtaattttgctctttattttcacatataatgtggtttgttgaaccttaatgagaacaaagttttgccaatagttcttagcaaaccactgctttggacccattgttctgggtcagatgatcattgtaagccaaccactggcaagatgggtggaattacctgtacaccaatcagagccaccttagtagctgaattgcagtcgcctttaactgaatacatgagttaagtaacacagaggcataaagttgagaaatattaggtttctatagagaatgaataaggcacagcaatgaatattggcacagcaaccaataatatacactttaacatgttttaaaatattctccattactcacctcgttgagttcgaattatgtcttaaatgctcctattgtaagggagagttgtgttatatgaaatatatccattcagatattctgtagtgtaaaaggcagttaggtacatttaacaggcccagattttgtcattgggagtatctgatttctgctgaaaataacttgaaaggagcagcccatcagccttttattctgtaccagaagaatgaacacctttcaagcagtgtcagaaagcacaatacaaacacataacactgagattagacaggtagtaatttttgcaatggtaattacacagactctgtagaactattttctcttgtgtttcacacacacacacacacacacacaaatccactaacacctgtctagttcagctatattacttacttctcataagacatgaattgtgtcaagtaaaaataatcaaaatagtatattcttttttttttttttccaatactagacatgttcagggccattttcattaattgggaatacatactacatactgtatatatgaacactctacatatttcaaagatatattaatcacaaagttatttgctaaacattatgtggaaactataaatataataataatttaa

SEQ ID NO: 57110 - DNA, 1172 bp, Bovine  19866880955952
  misc_feature (1)..(1): n is a, c, g, or t
nagtcactctcccaaagaatattgccttctggataagtgtggctgtctttatagtacaggactttgatgaaaggaagaagaatatgtaaaggatggagatattatcatatcacagttatatgctatagaaatttacagtaccatgaattacttcatcctgtctttctcagagctctaaaatgtattttgcttacaaaagagaagttgagatctggagagatataactttccccagataataaaggcacaaatttattgaccaggatgggaaactttatccaaaatcaaagcttgcattctttccaccaaaccatgaggtgttaatctagagaccccaaataatctaaaagtatgttaaaataattccaatttcctcaaatattataatgatagaaaattatttataagctaattctaggtaaaattgaaaaatttagtttttcttctgctttttttagttatttttttctaaaatcatttaccacttaaatacccttgggaagaaattttttattctatgccaaaccaaaactagcaaacagacaatgctacatttttttggattcaagttgcattcaaatgtttataggataaactaatattaacatattttaagttgtgtcagcaaaagagtcaaaaattaataaagataaaactttgtatctactcattgataatttaagagtgcttcagggatgagaggactaatatcataccacagtcaaaataattcaaactggaaaataatcaaggatcaagcttgctgagcctcaaattgaaaaagacctgccaagactgatcttttttattttggaagttttaaaatgttggatctaattacaaatgaaagcaggatgcaaagactaaagatgaaagcagtttaaaaaaggtatctttttctgtaaacttcaaatttcaggaaattataagaaacaatatgaagtcaggtctttgctaagacattaaatcaaacctatgcccccaaattgtgtgccagttgaaacagactgaggtggtaaattttcatgtttattatattaaaataagcagagactgggatatgtgtgtatgtgtatgtgtgtatattaaatagagaaaacaatttgagtcctctaaacccttaccattcaaactacaacctcaaaccttaaattaaatgtttttgttttgtt

SEQ ID NO: 57111 - DNA, 729 bp, Bovine  19866881390711
  misc_feature (1)..(1): n is a, c, g, or t
ntaagtgctggattcttatttatgagttgacatatgatatttttctaatgagtttaagtgtccttatcatagaatgccagatagttttaatcttcattctagatacacaaaaagaagtatagtgtttttagtaagtaatttcccatattctcactaatctctgtcagcaatattcacacatgcaagaaaatgaaattatatttcatatctaatctaatgttctggtccagagtaactaactaggattattgatatattccccagaattataaatcttctgaatgttataaatactttaactgaaattactttaaattataattactttctccttcaatctaaaaatgagaattttgaatatatgtagatgggtctaaatgtatttacttctcaattcaagctaaatttataaatgttaagtttatataatttgctgaaaaatattaaccattttagatttctttagagggataccagagacttttcttgcatataacagtgatgactggctagtcagcagcctgttactagtagcttttaatttcaaagtagactaataagagttgactggtgggtgtctgtgcacgttcttgagtgataatcagtatagaattaatcgtcagtagaggcttatgtcataagctgactgtctaaatgatgaatatataatgaaattaaacagaattgagacagatggttctaacttttgataaatgtgcatatcttcat

SEQ ID NO: 57112 - DNA, 2445 bp, Bovine  19866880153225
  misc_feature (1)..(1): n is a, c, g, or t
nctggaagcaacctagacggcatattcaaaagcagagacatttgtcaacaaaagtccatctagtcaaggctatggtttttccagtagtcacgtatggatgtgagagttggactgtgaagaaagctgagcgccgaagaattgatacttttgaactgtggtgttggagaagactcttgagagtcccttggactgcaaggagatccaaccagtccattctaaaggagatcagccctgggtgttctttggaaggaatgatgctaaagctgaaactccagtactttggccacctcatgcgaagagttgactcattggaaaggaccctgatgctgggagggattgggggcaggaggagaaggggatgacagaggatgagatggctggatggcatcactgactcggtggacgtgagtttgagtgaactccgggagttggtgatggacagggaggcctggcatgctgcgattcatggggtcgcagagtcggacacaactgagcaactgaactgaactgaactgggaggtgctgactccatcattacagaccagacttagtcctgtgggtctatagtcactcgagaacagtcctaggagaacacacacctaggagaacagaactttctttctaacgcacctgcctctgccttcttcctcttggagcagcagctccggtgctggcctggttgacggaggaagtgctctgtcccacctacaacttgtatctgaaagattcgcccacaccatcattccacagagtcatcttctaaagcctgtactagaaatgtctgtctttcagcaggtgtctcctctatattcagaaataatgaactagtgaaaaaggctggatttctttaaagtattaaatttaaaaattcaagctacacctgtgtataaagtatgatcctaattttagaaaatgtatatcttcagacacatagattcaaagaaaaaagacaagaaggaaataaggagaaatgtataattattacctgaaagtggttgaatgatgtaggcttgtttgtttgtttgtttttcctttatgtgttttggaaatacttacaatgaaaaataagacctgagtattatttatccctcggagaaggcaatggcaacccactccagtgttcttgcctggagaatcccagggacgggggagcctggtgggctgccgtctatggggtcacacagagtcagacacgactgaagcgacttagcagcatcagcagcattatttatccttttgcttctctatgcatccctgaaggagaaggcagggtggaggatgtttcttttctttttctcttttatatacattctttttcatcaatcttcttttccactatggcttaccccaggaggttggaaggttggaatacagttccctgtgctatacggtaggaccctgtccggccgtcctgaatgcgacactttgcatctgctaattacaaacccccagtccagccctcttcctgctcccctcccgcttgacagccaggagtctgttctctctgtctgcgaatctgtttctgtttcatagataggtttgtttgtgtcatattttagattccacctataagtgttatcatatggtatttgtctctccctttctgacttactgcagtgggttaccatttcctcctcctggggatcttccctacccagggatcgaacctgcatctcctgcattggcaggcgggttctttgccactgagccactggggaagccttgtaaaaggacttttaatacactgttttcttttattccagctgtggcttcagagctgatttgcattcctagtctagaagtcatttttgatcacaaatatcaggagtgatgacagagttgaaagtcttacttatcagaataagagtcccagagaacccctgattgactccaaagcttcccccttttaaacttgggatgtttgtctctcttcgtgccgctatgtcaggggaaagcactgccaaatggagtttttccatatttgactcaaagcgggtgtagggttgaagttgatccttgttataacgttggtgccaacagttggccaggaataagcattcacagccagatttttgaattcctgtaaccaggagcccataataaaaagactcctacaaacccccacctctctctctctctctctctctctctctctctctctctctctctctctgaggcctctggccaagaaaagcaggaacctctggagccaaaaggatccaaggatggagtggagagagatgagagtcctggcaaagaactcgacggggtgcacttattccaagcatgtctgagacaaagtctctccattgctggaccggccaggccactcccacctcaggcccgggcaagctggacttcagaacggttgctgtttcgaccacatcgcactcagttggtgaccagccagcggtcattgcccaaagaggcccaacccaaccacag

SEQ ID NO: 57113 - DNA, 1510 bp, Bovine  19866880413497
  misc_feature (1)..(1): n is a, c, g, or t
ntattggagtttcagctttagcatcattccttccaaagaaatcccagggctgatctccttcagaatggactggttggatctccttgcagtccaagggactctcaagagttttctccaacaccacagttcaaaatcatcaattcttcagcactcagctttcttcacagtccaactctcacatccatacatgaccactggaaaaaccatagccttgactagacagacctttgttggcaaactaatgtctctgcttttgaatatgttatctaggttgttcataacttttcttccaaggagtaagcatcttttaatttcatggctgcagtcaccatctgcagtgattttggagcccacaaaaataaagtctgatactgtttccactgtttccccatctatttcccatgaagcgatgtcttctagaggtgcttagtatggtttgctcatgaacgaacctgaacatattctgtgtcctagcttgaccaccctttcacatcttggattttcagtatatgctcgaagctcaacttgatcaaaatagaattaactgacttttccctctctgttcttgccccaccaacttttctaagtaatgcaggctttgtcgtaactgatttctagaggactaacttacttatattagcaataagtgtaggatggcttccttaacaataatccctcttccagttagtcaaaagtcctggggaattctcagcctccatggttccaccaaacttctgaatggcaagagaaaggagatgtcttatgcaccatccaaagggccttggaggtagtgatgtcctggctgatgttggttttttcataaccctcccaactctttgctctatttcttaatttctgtcatggcaccaccatctacctggtcttccagaaagctgatctttattttacatgtattcttccatcccaagccttcctctagctactgtttctcttttttcttatttgtagtcatttttcttgaaataattgcttatgcgttactgcttttactacttcatctcaccagtgagcaccaactcctaatccatggaggattagactgtgggcttagtctcatcgactttctgcaacactgcatcttatctgatagttcttggaaatgtgactaattatcatacttgcccaccgataacctacaagtatgaaaagcttctctttgccctcttttgtcaagtcagaattccattatcaggcttcctcacctaagtttccctttttttttgctataagtgttgcttaggcctatatttctcgataaacaaggaggaatgagatggccaattttttctcctcggtgcccccaaaacatctttgtgaatagatacacatatttatatcttgtttttaacaaatacattggcttaaaattctgtcaaaataaagtccaaaagcgcttgaaataaatggaacattatttgtgattgaatgtctggttaattggaaatatttgttttaaaggactttaggttttatttgtggagggtagaca

SEQ ID NO: 57114 - DNA, 2419 bp, Bovine  19866880461474
  misc_feature (1)..(1): n is a, c, g, or t
ngtcctaagagcagagatgggattcaaaccaaggaaacttctagattctgtgctcttcatccatcatctataccaggggattcctcgtggggcaggagtggacaaggattcactgtcttaagagaaaacgaacatggcggtggggtgaggaatggtggtagaaggccgtgtaattctactggacacacgtgaacaaggaaagcctccttggctaaggtcgcatggtagtccctgaggctgatgtgaatgctgtctctgtccctgagctgcggctctgggttcaagcatccttccactttgattccccacagataccacttctaggacatctcctttaacctcccagtcttgcggccagcatgctccttttgggagcctttcctggccatcatgagaaccattttgtgcctgattgatgtgcatatcatctcaaacaggagcagtctgcatcagcttgctactgatgagacataaacctggatacgcaagccttgaaagtgcctctgagaccagcagaaattcctaggggtcaagcttcttccaatttccctggaaaactatacatgagaaaggttatcttacagggaatcaggaaaatacttgcttccctcctgcactgtttccctgatgccttagtggtaaagaacttgccggccaatgcaggagacacaggttcgattcctgggtcaggaagattccctggaggaggaaatggcaacccactccagtattcttgcctgggaaatcctatagacagaggagcctggcgggctacagtccatggggttgcacagagtcagacacatctgagcacacccacatggtggagtccagggtgttacagagtgcaaccatgttccatgttttctttgcagaactctggaatcgattttggagacatttcttccagaatggcactccggaagaaactgaaatgcaaaacttttgactggtatctgaaaaatgtttatcctctcctgaaaccagtccgcagcgttgtggcctatggaagagtacgttttatgaaactgcattgcaggttttaaacatttgcctgtaaaagatgaagagatctgagtctcatgactttccgaacaagggttttcaaaacccattccccccattctcttcctacccccaactctctcctccaaccctcttggttttctttcctctctcactctccagtctccttttccttccttctgtctctggttccttagcttgtaaacatcagcccttgctctgaccctcacagttcctcgatccaccagggtgtgtggcctcacccctctcaatgcgggtataagagcccttcctttacctgtgctataacggtctgaggagtggatgttcctgttgtagctacgagttctgggaaacaaactcactcagaaggacaatgcagatagtggagtgcagtttattacactgtgggcccaaggcagagtctcctcttagccaaggaccctgaccagtttttgtgaaaaccttacataccctaagtgtacgtgcccaaacccccctccccaaattccctgaaactagtctgaacaaaggaaaagaaagatacaatcaaagttaatccgtgatccgtatgccttaagcctaggtagctaacagtggacaattatcaataagcctgtggtcatactccaataagcataatagagtttatgattctatttggttacacagataattagggtattttttttaggcaatggggagtctaggtacaagccgtgggtctcttccatccggggggtctggttttccagttggtatgttgtttccatagacactgggcatatagctcatgtaagtccacagtctggcccaagatggagtcctgctttcaagatggagcctattctgtctctttcctgcttcattcccaggaagcgcatcacagcagagtttcgctttggcatttgtctagtgcttagaaagtggctgccaggatctcaaacccttgccccttttgggtactcttggagtgctggcaaaggtgcagggccctgggagggtcggggaacctccttctctggctctttccaaccgtgttgctgtgtgctttgctccctcagatgaaaaacacgttggatgaacgcgtctgcctggaccagggagctgttccaggcaacacccccatcatgcattactgccatcaatacaattcccaggtatcgtcctgctccggccccctggtcagtccgttgtagctcggcccctggcaggtttggacttggtgttaggtgatggggagacaggagctgagtggcctgggtagtgggtcaaggagaagcccaaacttgtgcttgtaactcagcccttccgagctcacctgagaggtcattccatctcaggtacaggaagggcgcttagaaagactgcactctctatggtaataccttca

SEQ ID NO: 57115 - DNA, 1221 bp, Bovine  19866880461669
  misc_feature (1)..(1): n is a, c, g, or t
ntgggtcatcatctcggggcttctggtctcatgtcctcttctaagacacatcttttttttttttttttcttctcacttgaggggctgtgaggctcctgtgaatcagagagtggaccaagctgagctgggcgtgcagtttttcttggtggtcctcctgcttgctatctctaaaggccaaggaggtgccttcattcctcctgagactctaaaagcccagccccatctgcgggtcttggtggcgtggctggggagtggaggagatcacattcaggtgcggtgagtcgcaggtgcacaaccgtgagagctgtgcgcatcatggtcacagggtgaaggaggcccttctcgtgggttatctccatcaccaccaccgccttctgaagaggaacaattatgtgtgtgctaagtcacttcagtcatgtccgactctctgtgaccccatcaactgtagcctgccaggctcctctgtccacgggattcttcaggcaagaatacggaagtgggttcccattcccttatccaggggatcttcctaacccagggactgaaccggcatctctttcgtctcctgtattggcaggcaggctttttaccactacaccacctgagaaggtgggacaagcatcatcatccccattttacagataaggagactgaggccccaggacgcctcggtttcacagtctcattgggccttaagtgaagtcagatgtcaggccacgagggacaggcatgtcccatcggagaccgcacgacccactgaggggggcccaacagagcagaggtgaattattccccaaagggaaagccttgctttaaacctcagagaagctctcctggggtcagctttgaacacctacgatgggaggaccctccagcaggactcaccttcctccaccttaagccagaggggctgctagagggctgttgcatgatctgaggaaaatgttttcattttttcacaagcatgatgctgaatgttctgtgtgtgtggggggggtgggggggtggggagagagaaaggtttacatggaggaagagagtatacctttgtaggaatctctccctcctccctctgttcatttctcccccctttctttctttccttctgtctttcttttgcaaaccacagaccagctacacattctttggcagtttcctgaagatgaacttcagatttttgggagagagggaaaaaaaaaacaagaaagacaaaagcaaagg

SEQ ID NO: 57116 - DNA, 1373 bp, Bovine  19866880509021
  misc_feature (1)..(1): n is a, c, g, or t
natcgcttctgcttacagctcattgggtagaactactggcctggtccaaccataagtgaggtagagtgtacaattccccaccttcctgaaacggagagagttggagacatttggaaaatatcactgatgatgccacagtagggaaatgggatgaaaaagcaggctgcaaacttgcagaactaacaagtgctcttgggatcctccctgcatgataaaatgctctttatagatttatttcttggcagggttagtcatctcctagggctgttgatttgcacgactcagatgtctaatgcatttcttttccaatatatagcttcactcagctgaaaactgttagatttttctctggtggattctggagcatcactatctccatcaccagtctgtagctgatatcatcaccatcatcgtcaaaaactttacctaagcagctaattataaatgatccttatctataagatgtatttgcgtttgtccttcctcttgtcactttggtcccagggaaagcccagagggagggaaatggtcatgggccacggtgttagacttattattcctgtcctcaacaatctacggtgaaaagctacagagagaggtgattcttcttagggagagtgtgtgtatacacacctatagacaggtaggaactgagggagttgaccccttaccactctcctttcactgaggtctgtggctgaaagggcagtggagaggcccattcatagagattactcagagaagcaaggctaagtctccccagaggaaaaccatgaagatcccactgctggggtaacgacaagcgcacatgttcctacacacacgcacacacacacacacccatgacctgtctagctcacagctttggaacttgtctgcccagaatgatcttccctgcttgtagcaagtctggttctttctcttctttgaaatctcagttaaatcactacctcttcagaaggaactttcccaaccacctgatgcttcaaagcagaattcccaggttcgtgcctaactcagcatccagtttattttcttcagagccttcagtacaatatataaatatcttctttattgtttactgtgaaaattttctatctagaatgtcatatatttattgcaagaaataaaagcagacggtctgtccaggctgctcctaaaaccccagcacctggcacatgatgagcacccaataacttctcaatgcaagattaaataaatgaatgatagcgaccatcagtgaaaacgtctggctttagacagagttaggaaagcctatgctgtcgtgaaattggggctccgtgaattctggagaaatgttcacttgtgcagtctgaggatggggttattcctcttgtcttccttcacgtggg

SEQ ID NO: 57117 - DNA, 838 bp, Bovine  19866880592066
  misc_feature (1)..(1): n is a, c, g, or t
ngactccctgtttccttctcgctcctagagatgcttaaaagagggtggttacaatccccttatgtaatgttgaacttaacgttatcgaggtgaaaaattcatcaggaagaccttgatgggccacgtgaagaagtctgtttcctgcccacaggaacaacagatggagaactatttgccctgttttccaaagtcaaatggtaaatctggaaggataaaatagagctaaagactttggaacattaagctccttgaagaaagctgttgcataaataatatattatatgcacttaaaaatcttacctgcttgcaaaattgtctcgcgttctctcagacacatccaacatagcaaagtactatttcctgtctcattcattcagtatttattgaacactgactgtgtaccatacatgaatccttccccttgaggaattcagtgtactaggagcaataggggaaaatcagaattaaaatgtgtttttcaaagtagtatggggatacagcagtgctgatgtcaagtgggagggcaaagcaatatcaagcatggggcagccatgcaaaggtgtaatgacttaaaaataaatatagcaggctgtccagtggttgagaatccaccttccaatccaagggacatgggttcaatctctggtcaggaaactaagatcccacgcacctcatggccaaaaaaacaaaatataaaatagaaacaatactgtaacaaattcaataaagactttaaatcagtccacatcaaaaaaattttttttaaatatatcattaatacaatttttagaaatggtgagcagtcctatgaggttacaaggaaggatgcaaaagtgaa

SEQ ID NO: 57118 - DNA, 1029 bp, Bovine  19866880666551
  misc_feature (1)..(1): n is a, c, g, or t
ngctgtatggcacacatgaaaggtaagagaacaatcctcagcacaggaggaaacattttactttctatttctttaactctgtgtctgtatgagatgacggatgttcagtaaatttgttgtgataaccattccctgatgtatgtatgtcaaatcatcatgctgtacaccttaaactcatgcagtgtcatatgccaactacattcccaacatctcaataaaactgtaagaaaaaaacccaaacaaacacatcagagtccagaacatccctgaaatttagggtcttatctattttcgtacctctgcataggctttggcccatgtgcttgccagctgatggaggtcaacttcacctgacttcacagcttccagggcagcttcggcctctctgtcataatctctgagggattcttcttcgataaactggctcagagcttcttttaagtctgtaatatcgataacaaataccaccattggcagacataatttgggaacattttacctggctaagcattccagtgtgacactcctgtcaagcttatacccttaagagcatgtctaactaagataaattcagcttagaggatcattcaactaatctcacacttatttttctttataaccacaggttactgaatggtcaaaattcttaactcttatgtaatataaccctgatactaattaaaaacattaatttctgaagtcctcatctgaaaccgactagagaaaagcacataaagaccttctacagagggagggtatgaagctttctgtatttaaatgagtttcctatataactttcaaggatattattgttgtgtgtgtgtgtgctcagttgcttcagttgtgttgaactcttggtgaccccatggaatttagcccgccaggctcctctgtccatgggattctctaggcaagaatgctggggtgggttgccatgcccttctccagggaatcttcctgacccagggattgaacctgagtctcttgtgtttcctgccttgcaggcagattctgaccccactaagctat

SEQ ID NO: 57119 - DNA, 1837 bp, Bovine  19866880717600
  misc_feature (1)..(1): n is a, c, g, or t
naaacgtttttgttttttttttatttacatctcaagaatgcaccaaaaaacatgcagtattgcacctttgtttgttggttttgcttgtgtttgtctctagctataaagaatacttgtccttaggtgttgctatatgtaccttgatctcttggtttttcaactgagcttcccgtgaagggatgggcatattggtcccctctctgtctaactctgcacagaaacctgacatttccctgagcaaaggcaggaaaattgactaagtgctccccacccccacccccacccactatttcttttgggtccttcatcccacaaacataatttttattatttttttaacgtttttacattaaatgaatcatgcactaattaattcaaggtacaccttaatcaaatcagccataatgctgaataagagaacatgcttggagctccgaaaagtactgttcctggctcactaacataggtacttaaatacagtactttattgactaataaaaagagttaataaatgaaggagtgcacttttggtgaatgcaaatgaagaagaatctatttgcagaagaatcgattcctaactaagcttatcccctattgtctgagttaacgttctcagcatgcggttataaaataaatcaggatcagattcagacatgcttacacttcgctccatttgtgctctcttgcaacaaggaggctaaggctttacgttcagttctggaggcgggggtcagggtgcgggacttgtgagcaaagaccctctgggcgtatctgcagttgagaatcttagcagcactgcagacggatcaacgaattgcactcagtgatcactgtttcttagagaagagtttgaatcagaaaagaatgggggcagagggaaaaatccctacagaaccaggaccaatatcagatttctaaggtgcttggtgaaccagtcttaagtaattttttttttttcaccttggaatatgcagttcggtggatcaaaataaaaacatctgtccgttgcccattttggctggtgtatcatgttacatacaatacatctgatgctctgtcttaaatatgttgtgcagtttgccaagatttcatgttagagtcccatgcaaattttcatttgatatttctaagcgatcctctaattctcattcagtcacatgaaagaaaaaaattaaagaagccagcaagaattaaaaatgggaagcacgtgattcttattttacctagactagttcgtggactgagtgattttaaaccagttttagaaaatacactttcttttcccattcttttaataaaatgaaaatattttttttttcatggttcctgaagtcttcgggttttccacccccaacacgggcaatgcccagtactggcaatgcgacaatgcattgacagttcaatggaacgtccaaagcttacttagcaaagtatctacacagagagtgactttggtcactcggggtttggtttgatttgggttttgttttttttttttaagtctttcaagctgctaagtgggggctttttaaagtttctttgcttggctttttaaacatcagtcagtagcttgctcttattaacacagttttggttagctgtggtacaattgccagttctgatattggcctgtctaaagtggcctatgctattattcatatcctcttcgatctccatgtattcagatttgctgagagtggacgagctgcgccgactgaggtcactgtcagaggctaagttaggggcgctaacgtggagcaactgagcctgctcttccccctcagtttctcggtggtagaaatagttgaaattggacacaatgacaggtacgggcagg

SEQ ID NO: 57120 - DNA, 1973 bp, Bovine  19866880769077
  misc_feature (1)..(1): n is a, c, g, or t
naaaaaaaattttttaattaaaaaaaaatagtttacttacaatattacattagtttcaagtgtaagacaatgatttgatattgattccttctgtattgtttacattttttcatctctaaaattgagatgaatcaatgcaatggcaggtcataattgtcgatgttccctcttgcttgcaaatattaatatatcaaacatctttaaatcaatggtgtattggattcaattagttgaatacaatttttcaatcatctggtttttttttttttcaattatctgtttttaagttggttcaaaagactgcttttcagttctgcatcatgaccatgctgtcttatctgctttgttgttgttcagtggctaagttgtgtctgactcttgcaactccatagactgtagcacgccaggcttccctgtccttcaccatctcctggagtttgctcaaactcatgtccattgactcggtgatgccatccaaccatctcaccctgttgccccttctcttcctatcctcaatcttttccagcttcagggtcttttccggtgagttggctcttcccatcaggtggacaaagtattagagcttcagcttcagtaccagtcttctgcttaggattttgcaatgggacacactctgcccagccccaggggggctcaccttacctccacactcaggcctggagaggctccacagtctagactgagggcagaaagcatcagccagcttccctccccagtgtcacggtggttgggctcacattgcatcagccctctgctgcttggcctcccttaaaactgacctgatgtcattttgaagctctgtaaacaataaatttgcaaggagatccaaccagtccattctgaaggagatcagccctgggatttctttggagggaatgatgctgaagctaaaactccagtactttggccacctcatgtgaagagttgactcattggaaaagactctgatgctgggaggaaaaggggaccccagaggatgagatggctggatggcatcactgactcaatcgacgtgagagtctgagtgaactctgggatttggtgatggacagggaggcctggtgtgctgcaattcatggggttgcaaagagtcggacacgactgagcgactgaactgaactgaatgtagtttctaagttccaaaacactgtgatgccgctgtgacccctgctctcttccgcactgacctagccactctctttgtttgttaaagatccctagtttggtgccttcattcaaagccctgctttcttagttccttcttggtttcagtgatctttttctcttccctactgcagccactgtaacttattctttgtcaacaaatttctgaaacttcaatttaagtccaccatattctagcctttctgatctagtcggggggcatttttgtccccactggttaaagctttcctcaagaaatgtctatggagtccttgaaaccatttaattgtcttcaccactccactgaactgtgatagagcttaatgtcaaattcagagatcaatttttgatcctcctctaacttgaattttcagcatggtttaccattcccttctgggaatattgtctttcctcagccccccacctccctggcttcccttcctcatcctgacttctaaatgttggcatgttccatgtcttcatctttgaccttctatctacctcctttccctggatgagctcattcagcacatggcttcagataaacccactgtactctagaattcattcctctgttgatgaccacaactctatacaaacctaaactcttcatgttgcccatccccgttgacgtctatttattctctagtcacccccatctttgcagtctgttttaactgttttgctcagattaaaacccactctaccctgaagtcctaagcagagttgtttctattttcctaccttcatatacccccggtccattgttcatgcttctagctgctcct

SEQ ID NO: 57121 - DNA, 783 bp, Bovine  19866880808451
  misc_feature (1)..(1): n is a, c, g, or t
naaagccaaaagcaaagggtgggaagaagtgaggcggaaagcgacagagcgtgtgcattcacacgcacaccacgcctggcaataaggaagtgagaccagacctttttcatgaatgggctcagctcagcccggtcggacttccggctctcccattcaccagctttcagatttcacctctgaccgtccaagggagctggctgcgggcccaggaacgaggagcagttggagatcgtcccctgaccacagacaactgtgtgctcacaagaatcttcctttgtgagctggtaaatgcagttgaccagcgtgttggtaggacaccgggtttggaggggcactgacctttgggtcccccacaacagtggctccctccctggggggctgctattactgcccaggaaactcagaaaggagagcaggcactacccgcagtcatgctccagcggggggctgcacgctgggagggttcgcctgccttaaatgatgctggcggatgagcctcatggtccagaggggatgcgtcgagttcttcctgccagggctgaggggcagtaggctgtggcttgtggcctgagagggtgttgttctttcacttcggatgggagatgcttgaggagccgggcaccactgaagctgctgtcagtggttgaaaattggttccagagggttcgcctcggtcctaggaagtctggctgcagatcttgaagaagtcattgaaatttgctagtacttgggaaagatgggatgagaacacctcccgcaggggtgctggcatgactcagagag

SEQ ID NO: 57122 - DNA, 667 bp, Bovine  19866880879785
  misc_feature (1)..(1): n is a, c, g, or t
ngtgtgttgccatttcctcctctaagggatcttccaaatccagggttcaaatccacacctcttgcattggcagatggtttcttacacactgagcctccaaggaagcctatacattgtaataaccaagatttattgagtatatatttaagtaccaaacattggaataaacactacctaatttaattcttacccaaatcttataagagatgtattaccatttgctcaactttatctgtgaagtaactaaagcacaaagaagtcaaacaacatcccccaggtcacacagcgtatccaggattcaaacacagaatcatatccattgtttttgcctcactgcttgggaagtttgattcttaaagggagaaaaatactgagtgttggttgaaaaagatggtagagttaggagctttttttcccttctcgaatattagaacatttggatatatttaaagtcagtaggaaaggaatctgccaagagggagaaataagagaaggatgttagacaggaagggtgtttcttcagcattagggatggctgggctctgagcacagggaggctgacagcagagacagagacggggcagtcctctgagaccacccctgagattgctcatggcacttggggtggggctagattggctggaagcaaggtcttttgacaaaggaa

SEQ ID NO: 57123 - DNA, 1175 bp, Bovine  19866880933640
  misc_feature (1)..(1): n is a, c, g, or t
ncaagctagaaatgcctgcaggaagaaaatgcctctgtcctgtttaatgctcttcattcattcatgcttttcaaaaatatctgtagagcaggtgccaggggctacgttgggcacttcagtcatgaacaaaaccaaaagtggactctgctctcatggggtttatagccagatgggaaggcagatactaacacaagacacaaactaatgagggtgtagctttgaacttggggaagtgttacagcagaaaggggacaattctgtggaagtgtatgtagctgaggctactgattggcccctcagcagccagcctcccatcttgactcacagaatccctgatttgttggagggactaatgggcccagctagaacatgacttttcctaacctctcctgaagatggctcagtgggtaaagaaccagcctgtaaagcaggagacccaggagatgcaggttcgattcctgggttccctggagaagggaatggctaacccagttttcctgcccggggaattccatggacagaggaacctggcaggttccagtccatggggtctcaacaactgagcgactaaccctttctttaccactgagccacctaggaagccccagagagatgtggggaggctacctaagggaagggacccctctccaagcttcactcctctggtcctaccagatgcttgacattccagcctctggcccttggggagcctttgtttaaatgcagattgtatctggtactgtttaattggccttcattccagttattagcaccttagctctaatcagatggccctcagctgaaaaagaagtcttgggccagagcaggggagtgaaggaaaacctaggaaaaggagagaggtccttacccttgggtggtcttggcggactgagaggggaagtctgttaggaggcccatgaggcgggagcacggcgtcactgcacgtggactggagggcgggcagctcccgcacgcggaggcacaatgctctttcacgcagtacacagttatgcaaaaacaatgacagctccatatcttggaatattacacagcagtttcaaatgaataagacagatctgtatgtattgatacacaaggtgatggttaaaaaaaccccgcccatgcttgaacatgggaaaatctgcacgaatccgtattacaagagtacatttcaa

SEQ ID NO: 57124 - DNA, 1065 bp, Bovine  19866880967548
  misc_feature (1)..(1): n is a, c, g, or t
naaaaaaaaatatatccctgatgaaatatattaaccagagatgtcggcagggccaaggaggcaaggagtctcgcagtctgctatggacgagcaggaagttccattacccctgatctgggtttgctgagccctagaattaagatgtcagctggagatgtaggctttgttcacatggaaaagctgctgattttcagcaagttttatacacatacacacccaagcatgcacggctgacacttgcctgctcttgacaagacaactgggccatatggtgacaatattaattagacaattgctgctgaagaaggcatctgtacagctctccacctgcttccccaccatactcagttcatctacaacaaacagccaaccggggctgacagccccaaacggtacagctgtagttttctccagggtagtagctccagaagaaacgcaagatgcaggagacctgacagagtcttgggatggaatttgccctctagaccttctttgcaaggctgccagatcattgtccagaggttgaacaccaaacccttagctcaacgctgagggctctctggcagttttattagggaagtcaatcagcaacatggccttaggctcagcaaccatgtagagctgggttcaaattccaggcatgccttgtgctagctgtgcgatcttcaactatttaatttactatttgaacttcttcccttacttcgagaacattatcaccttcccagtagactgtcccttacggccttcataagagttaaataaaataatatacatgtaacttctctatatcggctgttttcccctctccttaccctctgaagtgctacccacgccagtcgatgaaccatggttagaacagttagtttctcacacagaggcttcactccatcacacaccatcacctggagcatgcttccagttcccacctccaagttagacacatgccagaagcctcagctcagagcctccatttctgctgagtcttccaagactccccagctgaaggaggccactcctgtttctgaaacgccagaacagtattgctagtgagctttccaatgt

SEQ ID NO: 57125 - DNA, 1518 bp, Bovine  19866880985929
  misc_feature (1)..(1): n is a, c, g, or t
ncaatctcccttgatctttttaaaattaaaaaagaaaaaaatcaaagatctcccacgtaccagtggtactgttataatcctttagctgagaaaagtacatagtgatgaaaatctactagggattcagttatgcttctcagtgattttggttttattcagaataactgtgtctccatccttttcatcaatggcatcatgacaaaagggaaacacagcatttatttcatccacagaggcctttggttattacctggggcgttaacatgcagggaggggaggatcaggtctttctcttgctcttaactgcttctctcccctagcgggagatggagtctgagcggatggggcaaagggtcactggtgctgacaatatgtggaagggtcagagatgggaccctagagctgggggcggcttgcactgcagccaggggcctgaggagccctgcagacggtctcccaaatggctttgtctgcagcctgcctgctacccagggcgatgcaggaacgaggagtgagaagcacgacaggcccggtggaggcatcttcaaacgcttccaagttgcctatgcaattgtgtgttaggaacggggattagaaaggacaggcgtcttcagagccaggaggtgctgtttctccatttcagctagggactgagaaagcagcagttgggctccaggaggagagggtcttgggacaaagagttctctgggtttcttcttacctccccactccttatccatgcaaccccctccccaactcccatgcccatagacaaccaagagtaaagggggaaaacggcctaggcagccctagaagaaagaactttaaagacaaggagaaacttccatcagtccggtgacctagtgaacaaagaccagagtctgggatggctgtctggtccacctcagactctgaggggcatttccaccagcagtaactcatgccaagacccctgtatgtcccacccacccatgcaaaatgccccctctccactgccagagctaaatgctttagagctcgggtcctcagaagtccgattagacctacgtggaatttaagacattgtcatgctggagcttggggcctggcaggccccggcaatgtgatccaggggaattattttcatttgttcaagtaataatatacggtagctgcttttcttaacacggcgtttgcttggcttttctcaccagagctgaggagccaacattcctgagccatgagactcggctcagggacacgaatgatgagatgaagcgaggggctggtcccgatgccagcctgagcatccgtggggctgtggagcatcagctggagggaagagttcagggccatggtcttggcctcctgcccccagccacagaggggctcagagaggaaggggccagggagaggcagagaggctttcaaagcaacttcatccatgtccgcacagaattctggggaaggcttcagagagtaaagaatctgcctgcaatgtgggtcaccccggatttgatccctgggtcaggaagctcc

SEQ ID NO: 57126 - DNA, 2766 bp, Bovine  19866880998606
  misc_feature (1)..(1): n is a, c, g, or t
naccggcccatcacctgcaggcaacaatgttgctggagagttttaacatcccccgaggcaaccttggatgtgcgatcacatgacctagctgtccaggttgctcctgaaacatgcatcaccactttgggtagggttctattcccaagtcacgcacgctgtgcaggtcagccctaccctgttgtttttagcctattattttagtgcacacttttgcagaatgcaagggttttcaggaatgctcaggctatgttacagcgtagaaccttgtggtaatttaatactactgatctttaactatatgtgaaactgcagaacgatcatacccacaggatactaagctgcggttaaaattttttaaatgtagagctatgcggggaaaatccccgtagcagagtaagtgaaaaaaaaaaaaaaaagcaagttgtagaacaatatatgcggtgtgatctattcatgggatggggggataaccttcaaaacaacaccttttacccctatgggtacatgtattacatatgtctgtaagttagagggaaacctctttctctctgttttggcagcttcagggtttagttgcagtgtgcaggggctttttataaaattaattaatgtatttatttatggctgtgctggctctccactgttgcttgggctcttctctggttgcgacgagcaggggttactctctagttgcggcgcacaagtttatcattgcggtggcttctcttgcagtggtgcacgggctctagagcatttgggcttcaggagtggcagctcccgagttctagggcacaagttcagtagttgtggcacacaggcttagttgctctgccacacacgcgatcctcccagactagggacggaacccacgtctcttacattgacaggcggattctttacagctggaccaccagggaagcccattgattatgtatttaacagctaattaaaacataataaaaagaattcaaatactccctcttcatccagagattggaattaacaaagtctttaatgataaaccttgatgatggctcctggggcctaggtggggaggagaagggggaaaaaaatgaagacgtgaggggagcagaaggggcttccctggtgactcagacgataaagaatctgtctgccatgcaggataccagggttcaatccctaggtcgggaaggtcccctgcagaaaggaatggcaacccactcctgtattcttgccgggacaattccatggacagaggagcctggtgagctatagtccatggggtcacaaaaaggaggacacgactgagcgactaacacaactcaaaggggaacagagctctgattactctgagtgacaggtgacaatgacttcctaattttacagaaaccaagcatattttgatggctgtaaagggccatgggggcgagggtggaattccccagaagaaaaggccacagccattagtggactttccaccccgaagccacctaccgcccaacatccaactcggggatgagcgagagaaggatacaggaagttgctgtgagtggccctggatctcggtgcaggggcagatggtcagagcgccttcggaggggccacagaccaggggatttcctgggggtggagtcttgggtgaggcccccaggctattctgagtgtcccccctcctcgctgccccagctcccccacactggttccaggaagcctgcctgggattatcagaagttgccatcttcagctgtgttcagcgggtgcggagggggtggagggcacaggccacctggttgtgaactgaaagagcccagaaccaggaagcaggaggacagccacccgagggggtggtgtgtgtgtgtgtgtgtgtgtgtgtgtgactctggacagtgcactcaaccccctgggcactgctggcccccccttccatgtgtaacatgtaaaagtgggataatatttcatctcagggcaacctccaaaggctgtggagaaaactatgcaagataaggcatgtgaaagtgatctgtaaactgcaaggtgccatgaaaatataagtgactcatttctgtcccagatgcaactcatacgtcacctcctccagaaagccctccctggttccctagcctagctttcctgttgttgttcggtcgctaagtcatgttcgactctttgcaatctcattgatggcagcataccaggcttccctgtccttcactctctcctggagtttgctcaaattcacgtctgttgagtgggtgatgctatcccaccatctcatcctctgctgcccactcctccttttgccttcaatctgtcccagcatcaaggtcttttccagtgagtcagctctttgcatcagatggccaaagtattggagcttaggggtttctattcttggagctctatggctcaccatgtgaactttggttttaacccttcatttgtcctgttatattgatggacttggaggacaaaatcatgtttgttttccagtcccagcttccatcaccacgctggacacacagtaggaactcgagaattggcttgaaagagatgtgtatgtggatgagggatggttgtcttctccaaatgatgtggagtacccaccgactcatccttgccacaagccctgggatgctgacaattgtcatgtagtctctagatcgcatggactgcagcccgccaggctcctctgtccatgggattctccaggcaggaatactggagtgggttgccatttccttctccaggggatcttcctacttaatctgtgcttctttctgtccc

SEQ ID NO: 57127 - DNA, 1081 bp, Bovine  19866881060302
  misc_feature (1)..(1): n is a, c, g, or t
nccctctgccggcagcatattcctgcacatcctccagtcctcagcaaattctggccactgccttttcaagagcaactgatggagaaaaagtaagacctgcccttcccctccgggagagcttcacgtctcctcataaaagtagagctgataaggagcatatgaaagagaagagctaaacccacgggcttcgcagctgagtagagatgggctcaattcccagctctgccatttgttcggcgtgcaagctgggaaggatttcttgatctctctaaggctcttcatcagtgtctgtaaaaaaggcacagtgatagggctgggcacaggcggctgcgaggattacgggagatagagcggctttcatgatcagagccctcagaccagcgggcatttcctcacatcactgccgtcatagcgcacactcctcagatcctctgcactgcatgtgttggctgggtgagtgcgtgggggagcggcaagcagaggagggagagggcaccaggagaatgggtcaagaaggatgctccagttatcccaggagaggtgccccggagccccacttgatcacaggagaatcccagcagcccctcctggggtccgttggcatcagtccacactccactgtgagcagcatcctttctgtgctccagggaggacctagtgacagggacactccagctgcaggggagttcctagaaagtccaatggaatggctgtcattcctccgccgtgagtcatcagccccaacaaagcccactggtatttccgagtctgttcccagtgcccggagctgggcccagcggctcggcagctgcagggagtggaatgcggctccccccagcactgtgccctgggttttcgttttcgggaaagcctcatggccccggaagtggggaggcaccctgaaggtcatctcgtccaggctcctgcctctgggcccaaagatcttaagaccttgggggtgtctggggaccccctctgacccatccgagtgtgaggaccagggctaccagggtggggacaggagaatgatgtccctttctcccgttgtctccttgatcttccactacaagggctgcaggtg

SEQ ID NO: 57128 - DNA, 1096 bp, Bovine  19866881140365
  misc_feature (1)..(1): n is a, c, g, or t
nctagagaggcataaacttattaacacaggtgatgaggtacatgctctgatggtgtgaggcattgtttggaggggctgagaagaaagaacagtccatgcagatgagggagattagaaaagtctccataaaatggtgacatatgagcctggccttggagcatgagtgacctggatacacagaaaggagaggagaagattcacacagaaagggtgctgactgccgcctcgccggctccacacagctgtctcggtggaggatcaggctccacgtacaatctggattcctgaaagacatctgggcatagatttcaaaatcacaaaagcttgggagaatgtgaccaccatggcaaacattaagcagtatgagccaaggacttccctggtggtccaacggttaagattctgcacttccaatgtgtgggggaaggggggacacaggttcgatccctggacagggaactaagatccatactgtcaaacaataaaagtatgagccaaacaaaggggacaacagagtccagggagagagaaacgtgttggcacgggtagaagaatgctgggagcttggggtgctccctacaggcaggggagaaacaggaggcaaggcggaggggaggggcgtggggaagtgggagtcagaagaggctgaacagggacaactgtgaggagagttctgtgaagtcctcaccctgccccttcagatcaatcaaggcaggcttcttggaggtggggaccacatgtgaagccaggtttggacctgaatggttttctccacaggcgccctgatgatcaggtcggaggatgccggcttcgtggtgataacaggtgtgatgagcaggcggtacctctgcatggacttcacaggcaacatttttggatccgtgagtttctttctgtgctgggttattagttgcaaatacttatcccacagctctggcaaaacatagaaccttatagcttaaagatttccacctgcagtgtatcttggtgatcttttcactgaggacttttacccatctaagtatcagatgctctggtttatacaactggggtctgaacccagtaagtccagctcatggttcctgggtctcagctt

SEQ ID NO: 57129 - DNA, 788 bp, Bovine  19866881181522
  misc_feature (1)..(1): n is a, c, g, or t
ncaacctctccaggtttcaccaccaggccctggtggagctgaagatcctggaagctctcagacggaaggacaaagacaacacctacaacgtggtgcacatgaaggactttttctatttccggaatcacctctgcatcacctttgaactcctggggtcagctgcttcctctctttagttcactttgtgttgataagttacgtaagtgacgaaagggagccttggaggtcagagcactagatttgtctttatgtgactatttaatggggggggcttccccggggcttaggggtaaagaatcattttgcagtgcagaagatgcaggagatgcaagttcgatccctgggtggggaaaatcccctgcagaagggcatggcaacccactccagtattcttgcctggagaatcccatggacagaggaacctggcgggctacttacagtccatggggttgcaaagagtcagacatgacttagtgactaagcacccatgaactggcaacccacacataagcttttctggttaacatgctttatattagctttcaatatttataagtcagcgtatttcacttaatatagcaggattctataggattcaatatatattctctctctctctctctctctctatatatatatatataggattcaatatatattctatatatataggattctatatatatatagagagttataagattcctgtatgtatatgtatatatacacacactcaggattacttatatataaggattctatatttatcggcaagagccagccctcag

SEQ ID NO: 57130 - DNA, 1760 bp, Bovine  19866881202769
  misc_feature (1)..(1): n is a, c, g, or t
ncattgcaggcagattgtttaccagctgagctaccaggaaatcccctgtagggctagagatgcggtcatcgataaacacgggtctcttccagcctgggccatttcctgctatgttaaattcaaaaagtctgtattttctgtcaaatggtgagctgaggaagtgacattcctaagtggaacactaggctgaaagcattaggtcacggccttggatttgaagaatttgggtttgtgggcccagggcatgtgtctttaccactcttccgtgtttgtgagtggatttataaatacaggtgacaacaagatggtctatctcagtgatgctatttagctgactcgaaaatgccaaagtattttgacactttttggagaggggtgttttacccaccaccaagcctggcaacacttctaaaatttggaagatggaagacttgtcataaatgaatgaaaatttaagtgatatagtaacacatgaaaggtgtcaatattatttcaactcaagccttagtgagcttgaaccttctagctttatgtaaactctaaatgtgcactgttatttattccaggtacaaataccacataattctatggtgtcttagttaaagggcaagtataataagtgttattttatgtcctttgcaatttataaggaactttatcatacattattctatttgactcttacgacagcttcttggggtggcaggtgaggtatagatatttcttgccagttgtgggttgagtctgctgagatgtctgagatggagaagatgtgcaggaaggtgttggggagtgtgattgctgttatacctgaagggagaagagaacagggatgaatggggagaagtcgggctgcacctcagtcatggcagaagccaagccgtcctgcaggatgctctgaggctgggctggcccttcagcgctgtcctggattggagcctgggaaccagggcttgacacgttcttgttggcccatctgtggacgaggctgccctgggaaggaatgtgaccttggctgaggtgactctcgtcatcagagaggcaattcccagagggttgatggctgagtgctctcctgggagctgggaaagagtgctctaggcatgaagagctagggggacttccccaatggctcagcaggtaaagaatccacctgccaaatgcaggagacacaggagacatgggttctatttctgagttgggaagatcccctggagaaggacgtggcaacacactccagtatccttgcctggagaatcccatggacacaggagcctggtgggctacagtccaatgggttgcaaagagtaggacatgagtgagcgactaagcacagcagcacaggcacaaagtgggcttagttgttacatcactacaagaggtgggggtgatcagctcgcctgtggccagaggggaggcactcagagggagaaagactaacagtagagcagaggaacgttttaaggaggatcgtcagtttctaatgatcacgatttgacggcagttgatagattcacttgttaaatggacagactgctcggaggcccctggagatgctccttcctaatgcacgctagcaggcatcttccagactggcctgaactctcctgtatggatcgagttcaattattaatcaggagggctgggggatgctgcctaatggcatagactgggtaattgagcgcctttgtaatgtgtgttcagagcgcaggttcggatggtatcgacatggactgctcctgcttggctgcacacccggg

SEQ ID NO: 57131 - DNA, 1250 bp, Bovine  19866881316952
  misc_feature (1)..(1): n is a, c, g, or t
ntttctcgagaggtttgtacaaattcttgaagcaactggttatagctaatttggggagtgggaaagaaaagtgggtggctagaataggtttactattaatccacttccctaaccaaagcttggcttgtagcagccacagggaaaatcaggagagtggaaaggtcagaggagtatattttgaaggagtcaggagtaacagcactcattggcaaaatctgcagtgggattcacttccaagacagatatccgactctgtaagaatcccaagccttatgacaagaagccaagtctgatgactggccatttataggccctcaaatatgcaccgttcgtttgggggattatcacgctgttcttcactttaaaagacattttattttgttagttctggtttatgctcgacagcgcttctctagaaaccatgtaagagagcttaatttcctaatcacatccttttaaataattcaaattcagcagacaagtacttgggtttgccacaggagagacaaatcatgggacattagggtacaactggggcgagttgtcaaagtagatgttctggtatacacgagaatggagtgtactctcccgctattcaaccatgaatatacagccttacagtgattcctccacaattaattcatttgaaaatagcgaagtttccaagggctaggaatgtgaggattttcactggatggttgggtgggagttagggaatgtgaaatacccaattcatgatacatttgtatctacattagattagtcctagctgcacaggctcttccaattaatcaatcctattcccagaaaacacacatcacaggaacatagcaattacatgtatctttataagagtttacagatgatccaatattcaacttgcctgctctattagaacaatgattagcattcagtgaaaactaagtaactgccaaaagaggcagaattaaaaaaataaaatcagtgttgctgtcaatacctatattaattaatcatctttcaggaattaaaagtaaattagtttgtaaaaatgtttaaagaactagctaaaaatgggaagtgaaatggagtagtttggcaggcaactaactgcaaacacctacaagaacgtttcgagggaaccagaggcttttctgcattattgggggttttcaacaatgctgttctaagaccatgagaaactacagctcaatcagattagtaactttgaagtctgaatctggggtatttctgttccacaatgatacaca

SEQ ID NO: 57132 - DNA, 783 bp, Bovine  19866881390985
  misc_feature (1)..(1): n is a, c, g, or t
nagcccagataaacggggcagggcggaagtccatggggttgcaaagaattggacacgacttagtgagtaaacaacattcagagcagaataaaaggtgctgcagaagcgacattaacccaggattcctcatacacaggtcacctgttagattattatcttgaagtcctcaagttcaagaaaccataccctggccatccagcttgttttccatctggcccacccagacctggctctgccccttcccctccccctgtcaccagatatgctaagggcacaacagtcccactgggtcctgagtccccaaaacttcacaacaaaacctgtcttctcccaaatgaaatgcaagggtccttaccttcacagaggcgagattttgtttctttgttgctttcaacatcgggaaggatgtcaaactgcctttccttggctttttagcatccatttcagtcctgcagaaggagatgaaaaggtaaactggcattagaagtaaaacacagcaagtcccctacacaggaaccttcaagttgcgaattttcaaagatgcaagcgtgtgttcacacgtccagtcacggaagtgagttcacgtgtctggcgtccatcgtcacgtgcatgcgtcctctagagctgggtgtgcttctgtggactttaccttataggactattgctgtacaacatgagaaccttactaatgaagacctgatggaattggaggcccagagaaaggacaaatgtagacaagaggaagatgaacaaactgaagaagagacacacgacgcagaagag

SEQ ID NO: 57133 - DNA, 1189 bp, Bovine  19866881409841
  misc_feature (1)..(1): n is a, c, g, or t
ncaggctgagcaccaaagaattgatgcttttgaactgtgatgctggggaagactcttgagtcacttgcacatcaaaccagtcaattctaaaggaaatcaacactgaatattgattggaaggactggtgctgaagctgaagctccaatactttggccacctgatgtgaagagctgactcactggaaaagactctgatgctgagaaagattgagggttggaggagaaggaggcaacagaggatgagatggttgtatggcatcatcgacacaatgggcaggagtttgagcaagctctgggagatagtgaaggacaaggaagcctggcgtgctgcagtccacggggttgcaaagagtcagacacgatttagtgactgaacaacagcaacaatcttctctctgggggcttcccaggtgacacagtggtgaagactctgcctgccaaaggagacgcagatttgatctctgggttgggaaggtcccctggagaaggaaatggcaacccattccagtattcttgcccggaaaattccatgtacagaggagcctgttggtctacagtccatggggccacatgacttcagacatgactttgtgagtaaagaagcaacagcaatcttctttatatgttgtggctgtttctgttaacccatctcttcaagggtctaatgaaggaggacaccatggcacttgtatgtcacagaacgcacctgtctccatgataccaaggactggtttccaaagccaagaccacagacagttttggagcctgttcctcacgtgatgtttgatagcctgcagacagtgaccgaggaaccaacgggaccatctcagcatcgtaatgccgagtaacagcacagacggttgcacacttcccacgcccaccgcccgctgcccttccggcagcaccttccccatcccaggctcacaccagctggttcaccattaggtgagtaataaaccagcccttcgggccaatccccgagaaaaagcaacatgttcaaacaccttgttattattgctaccaatgataataagaggaataatgagcaagaattgcttttattaaataaatcaggaaaatgcactttacaacatgttcctggggcgcgtcaagaggctctaaatgctgggctgctgttacagctcgcgctgggctccgacaggaagggaggtcctctccaattacttgt

SEQ ID NO: 57134 - DNA, 866 bp, Bovine  19866881419118
  misc_feature (1)..(1): n is a, c, g, or t
nagttccttgtgctctacaataggtccttgtcggttatgagatctgcttctttttttctctatatcctgtccttcaccccaactcctctgctcctctcaccccactcctaagactaccacgaaggacaaacaaagcccagaccatccatccctgacttcccccagactaatcaagtttcctgagctcatgcagactgacctcacaggagcagtgacatcgtggaaatcaacccaggctttcggcagtgcatcatagcggcaccagagttcccagttaaacccgtcaaccgccagtgcatatttaatcagttcaaaggtgtcaaaaagaatgttgtcaaacacaggagatacgatcacggtgcggtcttcctgaatccgagccaagatgggctcagccctgcaagaagggtgtgtaacagacccaggtgggatttgaggataatagtcaaagtgagcagacaaagctgctccatcccatccccttgtcctgaccctgaccaccttcttcactcaggccacactggctagtaggcagaactctccagagttctgagaatctgcaggtttgagaaatagctggggctgctggcagctgaccccagtcaagagcacatttgaaactggggtacccaagtaccaaccccaagccactgtggagaagtgctatcagtatctgcctgaatttgtcttacttcttgagtctccctgcttccaaaataacatctctattactatctgattccccacattctttgagtaacacagcttcttcgtatcatgtaacttcatgggaaaaccttaagattaccaaaaggtagtctcttcatgcatggatgtgagagttggaccataaagaaagccgagtg

SEQ ID NO: 57135 - DNA, 2351 bp, Bovine  19866881546910
  misc_feature (1)..(1): n is a, c, g, or t
nctgaacgcctgcctggagattctgatgggctggcccagcagaagtccacctgcctgagcgttgaggggcctcccgagacagaatccatcctggaggtgaagagaactcagtgtctgggcttgacccatatcaaatgaagagtctggaaataaaaccccaaagaggaatccccagggtgcagggatcaatagttctagtcgggcacttctctaacaagcatcactatatggaggggacccagatactcgtcctggtgttgaaacagaacattggctccttgagggctttgggtcttcagcgttggaggaaaaagaaatacccattggctgtaagcaggaggtggaaggctgatggatgggactcccgacaggtgccctgcagtggtcccaggcaggagcagccacgtgctcacccacacatataaggcacactctggacttccagaaataactaggggccacttacagtgtgctgaagctccacttgagctttctgcatgtggaatcttagctccccgaccagggatcaaactcgcaccctctgcattggaaggcaaagtcttaaccactgaaccatcaagggatgtccctggaaatgttttctctctcttgaatcttcctatttgtagctagtgtcacaggccctaaatgttggctttgggcagggttcctgctagtccctcccctcagcccaagcccacctctgacccgccaagccccctgagctaacactacctctgcagagcaggtgtgagcgcacaggtgtctgagcaagagggagggagaaggtaaaggaggcggcagtcccacagcccaggtaactcagaaagaccaccagaaatgctcaacatagctgtgtcattttatacctgataactttctgtgttttccaaattataaaaaaaaaggcaagtgttaacttttttcaaaatcaaatgtcaaaagttcaggtaaacagcacttttgacagtctaggtgagctttctgggctttcccttatggtcactcctagggtgtttgaaattcatgaagtgataactaggaggcatagaaggcaacagggcttccctgatggctcagcagataaaaaatctgcctgcaatgaaggagacactggagacactagcccgatccctgtgttgggaagaccacctggagaaggaaatggcaacccactccagtattcttgcctgggaaatcccatgcacagagaagcctggcaggctacagtccatggggttgcaaagagctggacacgactcagtgactgagcacacagcacacagaaggcaacccacctggttgtgatagaaggggttccaccaggcaggtcaaacttgatcaatgtctactgcgtggtacctgccccccaaccccacccagggacaaggactgtcatggaaggagatggacattagcattttttcctctgctcacctctaccaactcttggctcatccagagagagtgattgacagccccagaggctgctgggcaactatttgaaagaggggtccacggagaggcctcctccacctgttactctttttctctatcacttcacatccataggggtccctaagccccaggagaagggtcaggtgcaaatctggtaaaccaagaagccctagcagttgtcaacttaattagccttcaggaaaaatctatggctatatgagcacagcagggttgctatggagacaggcccaggagggcgcatttagaacagggcctcatcacatcacgcgataaaaataagacccaggctttttaatagaatgaattacttaagttttatatttaacaggggacgataccaaagctattactggttttcagaatattttaggaatccgagctgcctgcttctgcatatgttagcagccatcacaatatatactcgggtggccggcagttaggaagtagaagtccacgtgtctctcccatccttgagctgagagatggtccttctcactttgggtctgtcctccttgaattggttgagcaattttcaatgtgtttctgagaaaagactgtactgtgttctgcacccagccctttgcatatatcgtcactaatatataataaccctgcatggtaatggtctcattttgcagacgaggctcagagatgttcagaaattttccaaggtcacacagctaacaagtggtggagtcaggatttaaatccaggcatcccgcattccaaacccctttgctttgtaagatgccaaccaccatctctgaacaaagaatctgcaatgaggcgaacctaaagagattcactacttttgttgatacctggcaaacaccttgtgaggtgaatctctcctccaaaggggtcccaaagcg

SEQ ID NO: 57136 - DNA, 2844 bp, Bovine  19866880458669
  misc_feature (1)..(1): n is a, c, g, or t
nagagataggacttggtttctggttggaatcccatgcataccaagcttggagaaggtcaagtctgacagcacacacacttgccataatgtctgtttcctttggaacgggcagttaggttctcccaatgcagctcccaaaccagactacatgggagccatcctaggtctgtcagagatgacctggtgtttaaaaggcaacgtgagtggttagtgggaaatgggttctattctgagtgatacttgtgattcttctgggctactctggcacaggtcctggaaggttgtgggcatgctaagtcacttcattcgtgtctgactctttgcggccatagggactgtagtttgccaggctcttctgtccatgggatcccctaggcaagaatactggagtgggttgccatttgctactccaggggatcttcccaattcagggattgaactcacgtccctttcatctcctatgttggcaggccagttctttaccattgagctacctgggaagccttcaaagttttaccaaggcaattatgtgctaggagggaacttttaaacaaacatggaaattgacactctaaccattcttagaaaaagtaaaatggcagataactctcaatctctcagtcttttttattaattttattggaatatcgctgatttacaagttgtgtttccaggtggacagcgagtggttcagttatacatatacatgcatccctcctttttcagattctttcctatgcaggttattatagtctgtagactagtgttccccgtgctatactgtaggtctgcactggttatctattttatctatagtggtgtatgtatgttaatcacaaactactaatttatccctacgcccaccccatgttttccctttggtaaccatatgtttgtttctgaaatctgtaagtctgtttctattttgtaaataatttcatttagatcccttttaattagattccacatataagcgacaccatgtgatatctgtctttctctgtctgacttacttcacttagttactatcatctccaggtcaatgcgccactctttctctctcctcatttggatccatacttgaatggactgtagccatagctatgagcactgcagttaactcctcattaaatgccagggactgtgaaagcaggtttggggacatagctcattcactcctcctagcaacctgtgagctgccgcttttcgagagggcaggcagaggctcagggactatcaagcagaagtgcacagtcttgctagtgatcaagcctctgagctcaatgtcatgtccgttagaacccagcgtctcagttcttgaagtttcaagacagtagagctcagtcgtgaaactatatggcagttctatgtgaggactatatgagggacctgagtcggggatggaagcagaatgatgggggtggcacccagagatctgcaggtgtaataggcttccctagaatctcagaaggaggtggttaatagactacactttaaagaacacatgtctccatctctgctttgcaaatgggttcatctgtaccatttttctattaatggagtccacatatatgcattgatatatgatgtttgtttttctctaatgggattgatgtatgtacagtactacatatataataggtaacttgagaacctaccatatagttcaggaaaccctactcaatgctctgtagtgacctaaaatgaaagaaaaccctaaaaaggggggatatatgtaaacatatagctgattcatgttgctgtacagtaggaactgagatgacattgtaatcaactacactccagtaaacactgaaacacaaaagtgaacaagaaacagccctcataccctcctgcttgtaggggtatttgaaggagattttaggttcctgaggatgagttatgaagaactggctagggccagctctttaggccaatcaacaaggaggtcaaagcagtcaatcaatcctaaaggaaatcaatcctggaaggactgatgctaaagctgaagcttcaatactttggccacctgatgcgaagagccaacttgttggaaaagaccctgatgctgggaaagactgaaggcagaggacaagagggtggcagagggtgagatggttggatatggacataaatttgagcaaactccgagagatagtgcgggacagaggggcttggcttgctgtagctcatgggcttgcaaagagtcagacagggctcagcaactgaaccacagcatcataaatatctaattgccttcttcaaattcacctgtctcaaagatcatttccttgtgtcttaaagatccattgacatagaccttaaagtagtcaggttggaaaatggcacaatgtttaacattttctttccaaaacgattgcaaatattaggatgaaagaaggatccttaaaacagacttgcaaacaccaagctgagcagtgcaggcatcagcagcttagtaggtttgggagtgggtcggggagggaaggcggccctgagggagaggaatcgcttcaaatgcctgttgaacttgaactccgctgtatgtagtcctcatctgtggccagctgcttgcatggtttctccagcagccaaatctgacccaactctctcttcccccacttccttgttttaaatgagatctggttttacttagatgaattaaatgtcactgtatttgtttctgtgaattgttccagcagaacttacagcatcagtgtctgactttgaacgtctgcaagactgtcagcctctctgggctatttttagttgccttttaaaagttctaataaatgcttttagagagcgattggtttcctttccctttaagaagcctcagaatcg

SEQ ID NO: 57137 - DNA, 3930 bp, Bovine  19866880506973
  misc_feature (1)..(1): n is a, c, g, or t
ngaattctaagatctcccaggtttgcaagaacacgtccacatcgggagggtgacgcaccccacctcctcggggagacaggagctcctgcactcaagaccctcccgaactggtcctgagtgtcttcatccgactgtccatctgcaccttccatcatatcctttcatcaactgtaaaagtaagcgtttccctgagttctgttggccgaaagtaagcaagcgtttccctgagttctgtgggctgctgtagcaaattaattgaacccaaggaggggtagggctttccctggtgactcagtggtaaggaactcacctgtcagagatgtaggttccatccctgggtcaggaagatccctgggagggagggaaatggcaacccactccagtattcttgcctggaaaatcccatggacagaggagcctggcagcctacagtctatggagttgcaaatggtcagatgcaactaagcgactaaacaaggacaaaggagggctgaggggaccttccatccccaccagtgggacagaagcacaggtgacaacctgggtctgcgtcctaagtggggggaggggaggcagtcttgtgggaccatctgtggggtctgtggggtctgaagctgtctccaggtagactgtgttagaacccagttagacggtaggacccccagctggggccgcagagacccgcatgatgtcgggggaacctgaacacgtggtgagcagaagtgtcagaagcacagcgttttgtgtgaggaataaaaacacacagaaaacagactgaagtgtgagatgtctccctgtgacggggggaaagactgaggctttttttcacataggattttcacagctgtgacaaacgtgttaacatttgtaaagcatttagaacagtgcgaagcactccgaaggtactcagtaagtgggcttatacacggttcatacagagatacgaaaggtaacattcagctttgcacgcgtgacctgagtgctcagtcgcgtccgactctgaccccagggactggaacccgccaggctcctctgaccaagggattctccaggcaagaacactggagtgggttgccatttccttctccaggggatccagggatcaaacccaggtcttcctggtccagggatcaaacacaggtcttctgcattggcaggtggattctttaccatctaagccaccaaggaagcccaatggctgagtagcattccattgtatgtatgtactgggttggccaaacattcatttgggtttttctatacacgttatggaaaaagctgaatgaactttcaggccaacccaatactacatttctttacccactcatctggtaatggacatggaggttgcttccatgtcttggctattgtgaatggcacggctccattcccgtctcatatttctcctgggcaagcctaggcatgttcttctcgtgatggtagatgacacacaagggagaaagcccagttgttcaagagctttttaaacctttgcttaattcatgtcctctaatatttcactggtccaaggagtcatgtagataaactgagagccaagtttataggaagttataccctgcctacttaagtaggagaaacttcaaagtaatatggcaaagtacagggattcaaagaaaagagaactgaggtcgtaaatgcaatttatcataaggagaacatgactggtcagatctttggaaaccctctcctgagttttgccatttgtatattttattggtttgtacctattggtaagatttaaggtggcaatacagtttttgtgatgggttgttgttcagtcactaagttgtgtccaactctttgtgaccccatgaactgtagcacactaggcttgcctgtcctccactatctcccagagttcactcaaactcacatccactgagtcagtgatgccttccaactatctcatcctctgtcatccccttctcctcctcctctcaatctttcccaacatcagggtcttttccaatgagtcggctcctcacatccggtggccaaagtattggaggttcaccttcagcatcagtctttccaatgaatattcagggttgatttcctttaggatggactggttttatctccatgtggtccaaggatctcaagagtctaaaaggtaccccagctaaaaaaagatttggacttagttcagagcaatttatgtaactaacaagtactttttggacagtgtagaactggcactggagaaggataagctttgatactgtggcctgtggggaaagtggaaaagcccagagccctggacatcaggtagacaagggcagcagaggaggaagccatgctgaaacttagaggtgaatcggcaataaagaaaaagttctcctacatctaaacttggctcaaagacagcctacaggcagtcagtcttctgtcaaacctgtctattgccattaaaatggaagcagcagtgatagtctcagagggaaaaaatgtccttctgagataactacatagctaactctgcaacagccgaactttattaaggaagtgtctatgaaaactgatgcttacagagctatggttttctccgggaatgtgcccaatagtgggatcgctgggtcacataatagctctgtttagctttttaaggcacatctacactgttctccacaggggctgcctcagttacattcttactaacagtgtaggatggttcctttttctccacactctctccagcattccttgtttgtagattttttgatgatggccattatgactggtaagagggaggggtatatgcatacatatgcctgattcacgctgtttcacaataaaaactaatacaacattgtaacgtaattatactccaactcaaaaaaaaaaaaaaaaaaaaagatgcttacctttaaagttgacttgctcatatttacctattttctctttgtggcatgtgaacacacaaaagctaaagtaagtcaaaataaatgataaaatgaagactggaccaaggaacttctgttcattcagagtcttgaaaatgccttgagctggattctaaatatttgattcagaaaaacctaaaccctgtttgtcaactgcattctttttcccattaaaaaaataaaataaaaaggcctcccatgagtataatggtggaaattcaatcccgtatgttttctgattcatttacacttagctcatcaaaatattttgtaagagctgagctttttggtggccagagacactttgtggtccttttcccctttgaaacagaaaaactgcagtttatcatcagcttgcataaatgaaggctgaagcacactccttaaatctgttatcgcataaggttggactgaacttatgagcccagaaattctgtcttcccgagctggcttcctcacccttgtaatttatcctcatactccagtgctacctgcctggtgctgagcctcttttcaccactcacatctagcatcactgctctcactgataaggacaaactaaagaaaaaaaaggatcagcctcaggagtgatccaggaaaggcaagagtaggcttcaggcaaaatgttccgagaaatgttagaggaaaatgaatgtttgggagtgtggtgtgattctgtagccagatttcaaaggtaaagagcacagtcttctatttatcaaaagtcgaaaggaacagctgtgcccagacagaatgccaaaaccaaatccacatttatcagaagaacagaggaagctttccttttatgtaacagatctgcagtcctgatcgctgaggtgagcagcttttgctcacagcacatcaaggacagatctggggaaaatacaaagtcagaacagaaatcactgtatcgatagaaatactaaaatcagtaacagaacaagggagcaaccagtcagcaaactcaggtcatgagatgctaaattatctgaccttcctggataca

SEQ ID NO: 57138 - DNA, 767 bp, Bovine  19866880558239
  misc_feature (1)..(1): n is a, c, g, or t
ntaaaacgtcccccgaaatcctcaagggatgtcctgtaacattttccatggaaatgccataaaatattccatgcaattagcttcgcttaaagaaacatttgtcaacgtgcttcaccttcgtataggtgacttttttttttccctcaaaatacatgtcatttacaaaagtagtatgttgtttaacaaaatacttagatgttattatcactgtgggattctgatggacagaaagctaatcagagcaaaattacattctaaagctgaagtcgaatttatcagtgaggagcgagttggaatagagtagagaatgcagggggagggggaattatgaagagatttttgtttaggtaaatcaaactcctaccctttcaggggcccattttccagcctcagaaaatatgaaatttccttcgaaagactcactgtaaaccatgtgacccccgagaattcacaggaattgaagtgaactcccagggtccccatctgacgccaagaacctaggctgcaaatcaaccgctattttccaaagcatggaggagtgttaccacgaatcaccacgtgctgacgatggaaaacaggtgtgtgggtgaggcttcctgactgcagcaaggccacgctcagtccccagggggctcatctacaccccgccagacggctacaccatctaagccactcccgactggtgtgcagggattttccacggggaccccaggcctttcacggggctgctcaagtgcaggagtatcccatcacactttccctccctg

SEQ ID NO: 57139 - DNA, 1918 bp, Bovine  19866880579086
  misc_feature (1)..(1): n is a, c, g, or t
nacgggggagcctggtgggctgtcgtctatggcgttgcacagagttggacacgactgaagtgacttagcagcaacaatctggaaggcttgctttgtatttagaatatcgtggactttctggcattcttcactggcacatggaagcttggggagagccagccccgtccctggcatgttcctccttctcttctcacctgtggccccctccccaatccccaggagcccccacgctcacctgtggaccctgaggccatgcatctaagctctgtctacacccccaccgtctgccatcatctgatcactccttgggccaggagagtacacttcaatattttcaaccaacctgactttactgagagtctcccttacaactagaagttctggctataatgctcgtgagctatgactgtgattgggatgtgtcagaaaaaagcagaaagttcagggtgggcagtgaacattcccccactgtagtggaaaggtattgagcatgatctgctgttcacatctgtttgtctcgtgtgggcatttccgtgtgttacaaagatgcttgaggacttcaaggcatagtttccaatcattcatccctgctccaccctcctggaaagaaagacccccgactccaacagcaggtccctggagaaaggagaacccgctgtggtttatgggtaagcgaatgaagctcagtgttcagtgggtggcagagtagaaaagggttaggagcacggagactgattcgggtcctgagtgtcctgtatgctggttgtgtggctttagataagttcatatctttacctttagttccatctaagaaatcctctagtccatggtgataacgacagtactcatcactcagcgtcatggacggaagttaaatgagctgacatacgcagtgcatttaacagaaggccttgcccgtcatttatggtcaagaaacttggatttgttttcattattacttcaactataggacaactacttctgctatgattatttactcagggctgtgtgggtcgcgtgtgctaagtcactcagtcctgtccaactctttgtgaccccatggactgcagccctccaggctcccctgtccatgggattctccaggcaagaatgctggagcgggttgccatgccctcctccgggggctcttcccgacccagggatcgaacccgcatctcttatgtctcctgccttggcaggcgggttgtttaccactagcaccaccagggaagcccattactaagggttacattaagcaaattgagagaacttaaatgtaggttttctgattcaaagatttgtaccctggaaagccttcagctatgctcatttcataaaaaaataaacataaagcataaaacaagataatccaacagcaccattacttgcagacacccaccatcgtccacaatcacagaatgaaaggggctgaggtcagggcagcgacatctcgtcgtcttgtaaaggcagagctatttcctttcctgtacgatcacactcactgcggtgctggccccagaccagcagctggaggaagctcttgactgttcacacaaatggagtgtgacagctcggaaaatgcagaacaatgggccgctcaacctaattacagcttggcttttggctttagggctggaggttctaagtctctctgtctgcccttctctgcccgcctccctctcttttctcctctgtctctttctctgtctgcctctccgtcacgtgcacacagaagcacagacacacacaagcacacattagacatgcgtgcagcttcccctgtgttcacctctttgctctttgactccccttgttgcccttcgactatcgtagataatccttcctaaccaaaagctgtacgcaaaatgctgacgtcaccttaaacatcctgccgtgttacgcatggcatgcaatcagg

SEQ ID NO: 57140 - DNA, 1762 bp, Bovine  19866880631800
  misc_feature (1)..(1): n is a, c, g, or t
ncttggcaggagccgttcaggcttcgctgaagattctctggatccagatctctgtggtatgaaaacaaacagtaaacattttccttgcagtttacatcccagatctaaatatttccaagcatgtcaaactcacttttctccaccactcccctgcggggtccgtgtacacttcggctgccaaggaacccagttgaacttgccttgggaggggctccttcccggaggacgggtggagctgggagcagcggccaggagctgagagcctgcagccggcccgccgggcctggcagaggccccgaggcaggagcaggtgtgcaatctgcctgtctctccgcgcaggccgggggaagacgctctggccctgctgtttgctccttgagctcgaagtcctcccgtttccctggtacctgttcgcagagaagcactcaccagggacacgtgctcttctttcactaactttttctgtccaagccattctgtgtgtgtgtacgtgcgcacgcgcgcgtgtgtgtgtgtgtgcgtgtgtgcgcacgcgtcggggtgtgtgtgtgcgttaaggcgcttcattcatgtctaactcttttgcgatcccatggactatagcccgccaggctcctctgttccgtgggattctccaggcgagaatactggagtgggctgccctgcctcctccaggggatcgtcccgacccagggatggaacccgcgtctcccgcgtctcctgcactggcaggccggctctttacgcccagcgccgcctgggatccggctcacttcccagcttggcgctctcacttcagcgcatctgtaagggaaggggattcctctgaagaagcgatcaaagggtgccaccagactgtgtctctccgtctccccgctctttctttaaacgcttttaaaattggagtatacttgctttacagtgctgttagttaccgcagcatctttttttcaaccttttattttgcattagagcatagctgagctgattaaggatggtgtgttagtttccggtgtcagcaaagtacttcagcgatacacataggtgtgtctcttcctttttcacactctgttcccatttaggttgttacagtatatgaagcagagttccctgtgctataagtaggtccttgttccctatccacgttaaatacggcagtgtgcacttgtccgttccaaacttgggttttcaattcagaatgtactgatagttgaagttatcttagaaaaagggaacaattgcaactgagtttaagtcccatctcagtccgagttgccttagaccacatagcatcttgaggacttagtctggaagtgtcctgagtcgcttagtcactcagttgtgtccaaatcttttgtggctccgtggactgcagcccaccaggctcctctgtccgtgggattctccaggcaagaatactggagtgggtttccatctccttctccaggggagcttctcgatccagggatcgaacccatgtcttctgcgttggcaggtggattctttaccactgaggcaccaaggaagcccaaaacagtcctgacatagtggcaaaggcagtgtttgagttttcaaaaacgtgtttcttttctaggtgctgacagcaaattctaaaactgccataacaaatgtaatttaacttagctaaaccaggaaatgatgaacatatcagcagacactgaaacccttgtctgtggcctcagagatgtactgcatagcagaggaaataaataacccctacctttaaagggagcacttccgt

SEQ ID NO: 57141 - DNA, 1364 bp, Bovine  19866880731802
  misc_feature (1)..(1): n is a, c, g, or t
nactattaattattactgcaaagactaatgagtgattcttgctaccaggaagatgcaaataacaggagctgctcttctcttctcattataaattggactgcagtgacggttaatggacccttgaaaataaaactaattgctggtggtctttacttaagcacaaaagagagatttgtgttcctggcagaacaatgtccttctgcgtcacacgaccattcataatctgactgcagatctagactgtgactaatatttggctctaatattataagtggttactctggagggaatcagtagggacatacttgtcacttccttggaaaaatgtaatctacagatggatcccaacaccccaactgtactggtgtccaactgcattggagatttttttttgttttttgctaaataaggactgattcagccaaaaagatatactctcagagaaatctatatcacatactcgctccaaaaaagtacacttatccaagcactgaatggtttggaacactagaattttcctaatagggacatagtgaaaggtctcattcattaaaatgcacatttatatttttcttataagatgaagcaatagagttaatcaatgctctcctgcatttataaagtttcagttataaacaaaatgtaattcttcatgtttccttatttagctaaataactaagggaaacagtctattcagattgggaagcttcctgttaaaagtcaacctgtctctaatttttggtttcaataaataaggcttgatgcatatcattccatgggaggtgaaagtgaggttggtaagaaggactaggatacacgtatttatttgcaatttatttctcatcagtaaatttatacaaacaaccatcatctgagaactttgcattcatttttttaaaaaagatttttcctatcctatgcaaccatcctgacctgtggtgtattcaatttacttagagtagcatattaaaataaaaccatttcaatcgtaatttcagagaaatggtatccctttctgggtgactggttttcaaaaagagctcattacctggaaataagagtgttggatttttgtggcttggaaaatcctcagccatctacagatgcatagattgaatcacagtaacagaagagatcatctataaacgatgaatttcctctttccatttaggtttaatatgctttgaaggattcatcaggcctctccggtccaattaagaaatccacgaggaaacccgtctgagaggcagctcattgcagcgcagtgagccgcaccgcatcctttgtccactggtcacgcagacttagcttgtctgtctccaggctctttcagctttaggctacggcctggcttcctatacat

SEQ ID NO: 57142 - DNA, 2661 bp, Bovine  19866880790703
  misc_feature (1)..(1): n is a, c, g, or t
naggggatcttcctggaccgggatcggaagacccatgtctcgtgcattggcaggtggattctttgccagtgcgacacctgagaaaggcaggctgctctgcacccttgtccactcctttgtccgtcagcaatcactatttccttctttcaaaagaactttatttagagaaatgccagatgttctttacaccaccctactgtttgtggaattttatgacatgtttcctcaggctcattgttactgacatttggggccagatctttccatcttagggaggacattcctgtgcatcgcaggatgtttagccacatccatggcctgtgcctctagatgtccatggtaccaaccctgccccagctgttacaaaatgtccaaaatgcccctagacactgacacatgttgccccccacacaacagatcaagtcctttccttgttcatggccccttacatagatccagtagattttggaagggacatccatggacattcttcaagctgaggatgcatctgactctatgagtcagtacatccccgtcatttatgcatttatcaatagagtttgaactgcagtccatggagttgtaaagagtcagacacaacttagcaactgaacaacaataaagtccagcccagtaactgtcaaactgtaaatactaagtactggttaaaattttaatataggaattatattaagtatacatcagcatgaaagtgtggataagttgacattaaaatggaaagagcatatttatctaccataaccagcttcctgatcaaaggtcagttaaaacacagattcctatgtgcaggagaggcagacctctaaagtagctttggttacctgtcagaattacccatcccagagctgccggaagcatacacacaattttattcctaaaccatcataccagtttccatgattcagagaagagcagctgtccatctgaacagctgtcagtgtttctggacagaatcgctgaagggaagggagagaagctggtttaactatttgccacatgtgtgcatttctatcctggagacttgagtttaaagcaggaactggggtaaactaaatcacagtttagatgggctttacacccatctaactggttgtttagcaattagttgatgggagatgaccagaatacaccttgaaatatcattacacagtgattgtactacctccccgcccccaattcttggattgattggctgaattatcatgaaaattgagccaaacattccttccctcctgctcaagaattttgtacaatttctctctagtcagaaagtgactgggtatttgatcaatgttcaagggacagggagaggaggaagaaagccatcagatttgttatcatgagtcacacttgatgtgagctctgctctttttcagcagttaagaaattagaacagattccttttttctaaagaagacaggctgaaacatttgcagcttttgaaaggtaatctaacactgtcaagcttatgacgtgtcaggattcaatttaagcattttgtttttataatacaaagatcagagagtcaggcaggttttggcaaaagaacaacaggaagagtccctgtctctagagagagctgccaaacttcaaagtaatttacatcaacagtgtaatcatcccctacaaaaagcgcccccctctgcaaagctagttaataaagcacttgctcagtcataaaaatgttttgaggaaagcggaactgaataccttaggtaagtgatgatctgagatataaaaacccacctgatagtcttgagatttggttctctttgaaaacaaaagaaaaaacatactttcaatttctcaggatcgagtgtgctgaaatgttaacacatgatctcagtaaaatgtgattcatctagtgttgaaactcaaagaattacagaatgacttgtaaagaagtgtatactgaacaaggaaacaccaaaatccatagaacttgcattttgaatttggttagaaacgacactctaatgtagactcaaactccattcaaactctatttaaataacctcccattacctaactattgaaagtcacttgcatgcccaagttctagtaggcatgtagggaaagtaaatacttatagattttgttgttttaagataacattactctatagattcagaatttcaaacatatttgaacccaaggtggctcatcatactgtcactgtgcttcagggctatggaaagaaacggaaaccgtgttggaaaagaggagccaggatgaaaatcatttctaggcagagtgctttttccttctgtgcactgaataaattccacacctacatcacgagacattcactgtctcttacaatttttccctcctggctccaagaaacctgttcagtgtggttcctattcaagctccatcttcaaacttgttcaagctcccttttccagagatgtttatattctagatccatcctgccctcttttctttcctccccatccaaattaaatcctattttaccatctcccagcctcccaaggcaacagtagataatttgataattctactggctgactttattttggggggctccaaaattgctgcagatgggtgattgcagccatgaaattaaaatatgcttactctttggaaggaaagttatgaccaacctacatagcatat

SEQ ID NO: 57143 - DNA, 1121 bp, Bovine  19866880805809
  misc_feature (1)..(1): n is a, c, g, or t
ntgcaacttttaagtacatattgttgactgtccgtagtccacgcagagttacaactcccacacttcaacaacaacatgctgacagttcctaaagaaaactactcaaaaaaaaaaaaaaaggcataacccagatgttccctcatttgaccaactccatctaagtttagatgtgcagaagggcttagatatatccagagtaagccacatgcaacatgttacttgatcaattttctaaaataaggtttcaggacaatgacagtaagataagggaagaaaacatggaggaatgaagtcctaattactatacatgcatatttttttttgacagtagggggaaaccttttacagataagttacaaacaaagaaaaggcaaataaacaattttgtacaagaaatttaacacattctgtacaatgtcttcactttgctgtcatcatttgtacaaactctgaaaaagaagaagtatacaaagatgttgagtcaatgccaaaagtctgacaaaaccaatcacatttactcaactactgagcagttcccactcccctgtcttttgtcaaaactataaagtacagaggaaagctaatttactgctaaagctagattcttcacaaatcaaaaattatttatgattattaacaaataaaccaaatcattgctttagtttatcatatataatacttctgaacagaagcatgaataatttcagacttaaagctaattgaagggaaggataatccaatgaaagacattaaagtcaccttaattttgaggatcctgaaataagtttaaagaagcttttcaaactgttccacaatggtaccaaaaatggtaaccaaaaatggttttatcctagtttggagtgcagtgcttcttttaaaagggtaggatctgatagtaaagcacaggatacagctgtgacagtgcaaagacttaccttcatagtttacttgaccatcaccatcaatatctgcttccctgatcatttcatcaacctcttcatctgttaacttctctccaaggtttgtcatcacatggcgaagctctgctgcactaatatagccattaccatcctgcaaaaaatttagtaaaatgtctgagcaatattattcgatgtaatgag

SEQ ID NO: 57144 - DNA, 2280 bp, Bovine  19866880808150
  misc_feature (1)..(1): n is a, c, g, or t
ntatttgtctatgtatagggtacaagactgaatggtccagatgaaaaagatggacatatattattagttatactttatggaggaaatattttccagggcagcaattcagactctgcagtaaacaccataaatcaaagactctataatgctgttgacaaactctccttaagccctgttgataggttggatattgtagggtggattaatttcttgggccggtgctatatttcagtcatcccttctctatgtttaaacagacagggctcacgtagttcaatcaggagtgcggtggggagggggcaggagtatattgtattctgtggactcggcccatgaaaagataggaaatagcagacctttcttttcgatggaatggctttccttgaacctatgtatgcatccaattaaatgaattttcatttgattaaatacaaaattctgggaaatggtgcttcagttaatataattttaagcgaactgatttacagacagggagtatacctagtccatggaaaaacagagactcatgctaccagattaatagcatttactatgtagcattatcaagataatttttatatgaaaggtaactcattttttaaaggaaagattagttttcccatttgatatgggtgtgtgttttctgatttactcatatatcctgatgttaggttagttttgtcaagtttttgaatcattcctgtgccttttccatgactcaagttgatattgccacagaaagtggggtctactttctcgtccctcaaaagccagtaaataggaaaggttggtggacaggaaagtctgctttcttctggatgctgtcagctggggttggggggagagggtagatgcctgctcaaagaccagctccatccctcccccagcgatcagtgggcaagaggttttacacgcaaagggaggggcccacatgcagaagcagcagggtcagctctgaccatcacagtgaaattggtcatctggtggtcttgattcttttaagcagagttagtcttcagctccaggggcagtttgttcccagtttctttgaggccagttctcaggactgtggcacctgatggggggctgcagtcggtcgtcattctcaggactgtggcagctgatggggggctgcagtcggttgtcattctcaggactgtggcagctgatggggggctgcagtcgatcatcattctcaggactgtggcacctgatggggggctgcagtcggtcgtcattctcagaactgtggcagctgatgggagctgcagtcggtcgtcattctcaggactgtggcagctgatggggggctgcagtcggtcatcatgtccttaacttccccgcccaatgggggtttcacagtagacagttcacaggacgtggctcagagtattatctccagcccttgtttaatgactgcattattgttgtttggtatcctttgactgttttcctttgtttctgctgttctcacttctttgattaaaattactctttgactaaaggtttttaacagacaaaaggtaggcagaggacgtggagggtggggggtggtcaggcaccacagggtccgggcccatttcagcaccgcatgtgcccctgctcagaagatgctgaacacagttaacacgtcaggctgagttcacacgagaaggaaaaaagaacaccttactattcttttccaactcacttcctatggtggaatattaaggtctccaatagaagacatgattgagaaaaacacgttttttaaaaaaaaattgtagtggtccttggtcctgaaagcacatgtcgagcaattttatgccattttggacagacatttacaaaaggctgggctcttaataaaaatccaactgctgccctgtatgtctgagaagagaacggtacctggcatttcttttcatactttaaaaaattgaatctatatcactatttgtgccctacccagttgtttgaaggaagatgtttctctgtgtttttttccaaattgaagtttttccactggtgaaacatgctcatgcatacacccttctgaaatttttttttttttttttgcttatactcaatctgtatttgccatgacaactatccttggcttttgaagaatggcattgagcctgttactgttgaagttcattgtagatgttatattattttgtgtacgaatatttttgtttttcttccattttttcctactatatagacatatgtctgtcctcaaaagaaaatgtcaagaacaatgtcatcttccaggtgattattattacagagtactat

SEQ ID NO: 57145 - DNA, 1196 bp, Bovine  19866880830299
  misc_feature (1)..(1): n is a, c, g, or t
ntggagctactaagtgctggactcaggtttagaatcccagtcctgactgcccagctctgcttcgccctcccgaactggagctgtgacagggggcttctctgtgggacaaccaacagggtctaagtccttcaaagatgcacccagggagcctgtggttttaggtgaggggggaaatagaaccattctcattttcccctgacaataaatccttcagtcatacaaactccaaatataaatgcttgggaactcagtggaactgtgtttttttgtttttttttttaagggcggtgggggatggaatttcaaaccaagcagcttctggaaagagtctcgcctccgaagcactgctcgtagctctggaggtcccgccatattggaacaggtcctaattggcggaaagaaagagcaagactcgcagtgaacataataacagggcgagatggaaggaaaaggactcctttctcttttccttctaatcaagggccctggtaaaagacacgcagacacatagcaagagccttccaaggttgaatcacatttgttttcaaacctgctgtcctttaaaatggaggttcagaaaaataagcacccgacaatcaagaaaaaccctctcatcctgggccaggttctgagccgaacaaaggcaggatattttctagaagcttattaaatgtttgacccacgtgaaacagtcctgtatttgttataaaatgcttctcaggctcccacagctccaatgatatggatgggtttaagcagagtgacatgggagagaatgttcatgactgctgctcacgttgactaatgggagatacagggtgggactgcctgaaccatcatttttcttattacaggcacccacatctatggctttgatctccactgcagacagcgttctgctccatctcagaagaggttgccggtgtgtgccccattagctggcctttggaataaactcacaacagaccttccggctagaattccaccactgaccattcgcaaagaggtaagttgtaagtgctttgcatcacttccaaatatttctttcaacagagaacagttgttttttgcttttaatctattagctaatattaccatctgctttggtcctaataaggtttagagtttgccccttaatcatgaagtgttttgccaaagtccccttttttcttccagtcattgaaggaattgcaatt

SEQ ID NO: 57146 - DNA, 1689 bp, Bovine  19866880840262
  misc_feature (1)..(1): n is a, c, g, or t
naaagggaaaaagtggaagaaatggcagattttattttttgggggctccaaaaacaccagggacagtgacggcagccatgaagttaaaagaaacttgcttcttggaaggagagctatgacaaactagagagtgtattaaaaagcagagacatgactatgacatttacacagtcaaagctatggttttcccagtggtcatatatggatgccagagttggactataaagaaagctgagtgtctaagaattgatgcttttgaactgtggtgctggaggagactcttgagagtcccttggatggcaagatcaaacctgtcaatcctaaagaaattaacctgaatattcactggaaggactgatgccgaagctgaagctccaatagtttggtctcctgaggcaaagaactgactcactggaaaaggccctgatgctgggaaagactgagggcaggaggagaagggggtggtagaggaagagatgattagatagcatcactgatacaatggaggtgaatttaagcagactccgggagatagtggctaacagaggaggctggcgtgctgcagtccacggggttacaaagacttggacatgacttagtgactgagcagcaactacaactgtttgaggtgcccatgaaccaactgtcaccaatgcaaacttttaaccatagaccttctattacagtgcttcttaaatatggcagtttaagaaagttggttacattatgataatcctgttgagtatagtaactctaccacaaaaacgtttcagaacaacataactgcccgtcattcaaagaattgtagaatttcattcctcatgaatataaaggcctgggaaaaagttcatttactgtcatttcagtattttgagttttcattaacattttgttcctaaagatgagtggtaatctagcaaatgtagttagatgagatgctaacacttgtcacataaaatctcctaaaaaaagttcaagttctaacaccttgtgtcctgaattctccattctgtttttaaaagtagcagtgattgtttcttgagcataggctcagatgtgtttaatatatcttaagacaatatatttctaaacgcaagatatataataacaaaaatttaaaatgcccacaaagaggatattaccacacaacagcttatttttcgatttggcaattttctgctaaactcatagcagctggagagagtagcaagtaacaaaataagacagatgtatggagcccacacatggcaatatttttgtataaaattagtcaaaatcattatacttgtagatgaagaaatggagtccaacaagtttgcattctttaaagagcagtcatatttggtcttagtgaactggaagatctgagcaatgtattggattagttgatcaccagccttgtaactcacaataaaacctgcagaagcatgccaagcatcggcgcttggaaaattaggataataatacatcgattttcaataaggagaattcaacccacattgaggtctatcttcctatccaaggaactgagggggaaataagccattaggagaattttccactggaatttctttgtcttgctcttatttatgcctaaaattttctgatagcgaagggcgaggcaggcatacatgggcatcattttcagaaaatcgaatgcacaatatttcactttttataatgtaatta

SEQ ID NO: 57147 - DNA, 1170 bp, Bovine  19866880906378
  misc_feature (1)..(1): n is a, c, g, or t
ncctgtgataaaccttaatggggaaaatatattaaaaaaaaaaatatatatatatatacacatataggaatcactttgctgtatagcagaaattaatataacattgcaaatcaactatacttaataaaaagttgtttttttttttttaatgtaggaagtaaaaatgaagagcacagcatacccttaaactgtgaagtctcaaaattgtcaccaatgatgctaggtgaaacagttccaagagtgaaggagaaaatgaggatttgatcagaaagagaagcaaaatgaagatgctgcaatcgaggcatgatgggagaaaaatacgcccccagagaggcaggacatatctgtgggccgccgagaaggataaagggaggatgttggcacgaattaagtttttaaaaaagctcacaaaagacatagctgatatttttatttccataatggaaaattatggcagatattaaaagcccaatggaaaactaaaaatcttacaagttaataaacagaacttactctaggttttgagctgccattagacaatggaaatagaattaaaaagaaataaatctgggggaaaagaatcccaatcatagcggagatagtcctataacacttagctggagtccaaatggcgcaaaatctcaatattggaaacatcagggcatggaaagaacgttgtcggaaactatgtatagcacaagctgaaatgaaggactatttgttaggactgtggtacgtttaagtgaccatatcatcaaatggtaaattgataactgtgagtttagacagagcttgtggaaaaataaatgagggaacaaggagatcactgagactttccaaacctttttgtcattttttttctttaaaaaaaaaaaaaaaaaaaaggcagtacctttgtgtagtataccttccataagcaaaaacatctactaagattaccagggattaggctggtgtataattatgagctagtttgtatataattaagagaactggtttaccagctgtgtagtcccaataagcacaggtttcaggatactgaaagtcttatgtaaattctcttccttgaggctattttctgcttatttactcttaaaccaaaaatcttccatcaaatgttagaggggagaggctacatgtagacggtggtcaactctcttcagaagaaga

SEQ ID NO: 57148 - DNA, 1839 bp, Bovine  19866880922177
  misc_feature (1)..(1): n is a, c, g, or t
nccaaggtctcctgggagggaaaacgtgttctagtgaatttgtgggatccaaaggcaatgagatcacagcgtgcataatgctgatataaaacgaccatctgtaaagtcagaataaactaatcaacacccacgctcatctctttgactcattttcctttcgttttgtgtatgaattttcctttgttcttgttctgctgcatgttcattttcctgtttgcttgtttttcctttgaacccaaaatttgtttcaaaaaattccaaggcactggagtcagcaccttctgatcatatcttatctgccactaaccatgtgtcagggccaatctggatgccttcaacaagcctgatgccttactcatcaggaacactttttcctgctgtggctctgataagccatcaacaccaccgtttatcatagactgcttgaggtcacttgcatacagatttctctacattcagtaactgaaaagggggccatttgactcagagacactgagaccagaccaaggcctagaattaagtgcaaacctgtggagtcatgcggtcacagctaaagacctgctccccatcactccaaacctgccacatctattttcggatttcttggttttcttttctgccaaaggactaagacaacaaaggcagaatagaacgggggtcaggtggagccttttctctgaacaatcctcaagcgaaaattataaacaaagttattaaagcttttctatctactaaagaagcagcaatgtgacattccatttcagtccacctctaatcttcagtccctttatcccaaatactgaaatttcattagagatgaccaattccaaaatcccagattcttcaattagtgtgcactttaaattattaaataggaaacttgaatatagactcttttctcattcaattttctcagcttatgtactccctttcatggtgcataatttaaatttataaattctatggaaaagctaatattctactgagataaagactcatctaatttttgcagccaaggacatcacagcaagcacctacattctgtagaagagaagtgaaactttcacaacagtctctagaagcagcacaggggaaaaccagcctcatggaacgaactccacctgctccagaaagagtacaaaccactggagtttggtagcagggatcaagaggaaatgaggtcaagtccaaggtactacagtggaaaatgatagaggaattctgaaaattccctggttgtatcagaagaggacttatatggccctctttctagggtggaaaccaagtgcccaggttcccagggtctccatctgaatacaacactctgacctgttcccatccccactgcacgcccttccctacccatttctaggcttctaacccagccaggtttcttcgaagaatgaaagtcattcaggaaaagtgagaaaacctaaatctctattctctcctgttgttgttgcttagtcactcagtcgtgtccgactctttgcgacaccatggactgtagcccaccaggctcccctgtccatgggattctccaggcaggaatactggagtgggtgccattgccttctccaggggatcttcccgacccagggatcgaacccatgtctcctgcattggcaggaggattctataccactgagccaccagggaagcccattctctgacatccccaaactaaatcctggcttccttctctcccccagaacactgtcaccacaggcaatgctcagacttcacctggtctcactcctggctcctgagtggccacttgctactgtccaaatcgcccccaggtcaggcagtgaggtccagacccaggatccccagcgg

SEQ ID NO: 57149 - DNA, 771 bp, Bovine  19866880933438
  misc_feature (1)..(1): n is a, c, g, or t
ntaacctctcctagcttcctctccttcacagtgactcaggccattctcctattgcccaactcttgttgcgacttgggaggttgttgggattggtttgtttttaatatcttgcccaatctttccatttttagttccagactgttgcttttaaccactttcaactatcccattctttaccgaatgacacagtcctggatacaatctcctcagagacttctgtcactctggttctggggtggctgcatcatacccatggattgtacaaaaatggccagtgggaggttgttaggcagtttctacttattctcttaggggtccagcacgaggggaaccgcccccaccccccgccagtgattgctgcattgctctcacaatggtctggcatgtgcactggcatctgaggaatgggggtcagtcaagagagccaagatcatccagttagtactcgatggtgtagtagcttgcacccaagcctgactgattccaaacccattttctaaaaaaaaaaatttctttctctttcttttttatttttttaaattatgagggtatgataacacatttacaggaaacatggaaaacacagagcaaaattacatatagtttttattatatattacaattatttttaagtattttggattttagaattatttttaagatttttagttggagtttcaatatcaaactctcaaaaattaatagaatgaatatacagaaaagtggaagtatgatataatagacctgaaaactccatgaaccaattcagta

SEQ ID NO: 57150 - DNA, 1685 bp, Bovine  19866880999546
  misc_feature (1)..(1): n is a, c, g, or t
ntagctgttgcagtgttttgtttgtgaggggccaatttgaacacctgggaaattgaattggaaagactctcaaggaaaacagaagcaaatcgttaaccctttccatcttataggaacaaatagtaacctgagattggtgacctagaactattttaaggaacagggactgttttttgaggacacagctgatgccatctttccagagtagaatactggccttgcagaagtgatgggcaaattgctaaaaatggattttcaccacttgctgccatttcaaacgagatgatacgtttccaaagagtcttccatggaaagaaaaaggacgttagtgaaaataagaatttccatgtgtttatgaacaaaaaacatgtttttttgcaaggaggactggtaaacccccccctcctcaccaaaacaataaaatcaaaaaacaacaatttttcaaaagatgaaaggtaaaatggggggaaagaaaaagaagaagaaagaaaacagcagaagtgtgagccccattgaaagtcaggcttagccctgcctggaagatctaaataaagtcaggcttttttcagatgcatttagggttttgtgtttgtctgtttttttgtgtgttctttctgttttatatctgttgcttacaacaaaatgaacgtcaagaaactttaaaaacagttgatagtttttaacccaagtagagtatgctactgaggcattttaaaatctaaaggtgttttgtaagaacccgaggttttgacttcggtgtgccttggaatatggattcaaatctctccacctctgtcttcctttttgttcacttatcacagtgaccagtgggaagagcatttaattacatatcagtagaaagtcatggggcttccctggtggcttagacagtaaagaatctgcctgcagttcgggaaacctgggtttgatccctgggttgagaagatcccctggaggagggcatggcagcccactccagcattcttgcctggagaatcccacagacagaggagcctggcgggatacagtccacagggttgcaaagagtcagacgtgacagagtgactgggcacaggaagttgtgagttataattccactgtatattacttggtcacagtttaatgacccagctgcatctgttaagtgtctgcatcccttcaggagaggaagtcttcctgtggattccttatcttgcctcatctgaaacctgctgggtgggattagctggtgtccagggtccctccagttttaatttctgacctaagacttcatcttggagagaggaacaaactcacaaacaggactttatcttcacttctttacactgcatcgattcagttctaattcccaaactgtgtgcctgtcttgagatttcaggtgccccagagataggccttggagaggggacacagctaaataggtcaagggaatacggaaggaatcggatgaccaaggtttgaattcttatctgtgctactctgagctctgtgaccttggtcagttaccacatgtctctgagtctctgttttctcatcataagatcctgccggggaccagccccggctgatccagggtattcgaagcggggacggcgtcggcgacctatttatttaaatattttatcaaagatataaagagtaataggatgaggaagctcagtaggaaaattcagggagaaaagagg

SEQ ID NO: 57151 - DNA, 1344 bp, Bovine  19866881008081
  misc_feature (1)..(1): n is a, c, g, or t
ntagccatggttgcctggattgtagtcaccccttggtcaagaccaggccaatcagatactctccttgaaaaatctggatatgtatatattatattgggcttacctgagaggtcagacagtaaagaatccacctgcagtgcaagagacacaggttggatccctgggttggaaagatcccttgaagaaggaaatggcaacctattccagtattcttgactggagaattccatggacagaggagattggtgggctatcaaattgataataacctgcctagaaaagagtccttgctttttaaacttggccacaagtattttttcccagaatggaaattataataattagctttgtttcatatgtctattaagtaaaaagtggtgtacccatttcaatttttaaaatctaccttatagtcacttggtagcttatgttagcccgtattaattacttccatggttaaccttatctatgccaaaagtaatggctaaaatgagtttttggacagcatctatcccttttaaaacaattttaaagtaaagatactgaatgatcagtgaattaaaatagtttgagcctgtagctgagaaaagaatgatgaaaaagcaaatcgtgcataggaagggatggtaacagtaataaattagtgtaaacagatatagaaaaatgtagttgatgccaaaaatacagatgggagtgaaaccattattttcaatggtctagagccaaaataccatataaaacagacttcccagattggcagatttatgagagaatcataaaaactagtgatcataaagttgttagagggaaaaaaaatctaaacaccgtctactttgattagattcagggttgaactgaactaaatctcagaggaaaagaggcatttcgcggtctagtaaatgtctccgtattattcacaggctgtaccagcctttctgagaaagacagccagaggagatgtcaatgtatcagctacttccttaacatgggagtaactaagagctgatacttaccgagtgtgaatttcaggccaggctctcttgtgtcagttctcggtgtgtatccccaccttgcactggacccctatcatccctggcttaaatcacttagctttcaacatgttccctgcttctggtctattatcaacaaaacaaccagaggaattattgaaaaccataaatcgtgcctttctagaacctcgtgattgttttgtgcttcgcttggagtgaaatgaaagtcctctcccaggaaaggggagcagaatacatgagtccaaaatgccccacttgggcaggtggattgttctgacctgaaggcaagctagacccagcagacttagaagaa

SEQ ID NO: 57152 - DNA, 1969 bp, Bovine  19866881011548
  misc_feature (1)..(1): n is a, c, g, or t
naattgtgccttttgcagagatgtggatggacctagaggctatcatacagagtagagtaagtcaaaaagaaaaaatatatattgtgtatattaacacatatgtggactctagaaaaatggtatggatgaacccatttgcaaagtacaaatagagacacagatatagagaacaaatgtatggacagcaagtggggaaggggagtgtggaatgaactgggaggttgggaatgacatatatacactagtttgtgtaagatagatagctgagaacctactgcatagcagagagaacttgactcagtgctctgtggtgacctaaatgggaaggaaatccaaagaagaggggatatatctatatgttatagataattcattttgctatacagcagaaactaacacaatattgtaaagcaaatgtactccaataaaaatttacttaaagaaaattcccttagtatgctaaagggcaagtttgaaaattttcaaaaagtatcagaagttatattctgaaaggtgattagaaaatgttctacattttacatttctctagtgagtgtatgtgtgtgtgtgtgtgtacatgaacaaagaaaatgatgtatttgggtagagtgagtgagtgatagtcactcggccatgtccaactgcttgtaaccccatacagtgtggcctgccaggctcctctgtccatgggattctccaggcaagaatactggagggggttgccatttctttctccaggggatcttcctgactcagggatcgaacccacctctcctgagggtcctgcacgcgcaggcgggctcttgatcactgagccgcctgggtctcccgcttgttcggtctagatgcgcgcgggtagtgacagggctcacaacttttcatcctgtgcaggcgctttccacacgtcgccttgtttaaccttggtgacagcctcgggaggaggttctgcaaagtgaccccactccacagaagacgtggaggcacagcacgtgcttcacgtcccgtgtctcctgagtgggagagcacgcctggagactcagtctgccctctcctgataaaggctgaggctggggccttatttttcgcatttctgattgaggcaccacttttcttgccaaagcccgtggctccccgtcccacagtctcctgtgagctgcttacacctgggatccagtttattcacatctccattcgcagggtgctcagttctgcaccttactcatggaaggcattcactaaaagcttattgaagtggatttcttatatttaaaaaaaaaaaaaaaatcctgtcctctaagcttgaacccagcagactctgaaagtgagttggaaaggagaagagctaaaaatcccttctcgttgaagtgctgacccaaactaccagtggacagtctccagggtctctggctgccccgggctccagggctgaggcctgactgaggaaacacggccccgtccagggaccatcctttgcccacactgggaaaatgataagatggggtggaatgcactttgccctgcgactcaacagacctggcatccagcctgccagacacttactccgtgacctccttggagtttctgaacccctcggggctccagcttcctcacctgtaaaatgcgggggaaggaccctggccaaactcggaggaccccaccagctctcacatcctgtgattttaggtgtagttatgcggttcctggaagctgggctcatccacacagccttttggaaaaaaggaaaggaaaaaggaaaagaaaaacacttccataaaagtatttatagcacagccagtgactatgaatcatggcataattaattctctcttatgcagttgcctggctctctgtcttggtggggtcattcccaagcctgccccagcagcagcttcattgacagacatggcattttccttgtcatctctcaggaataagttcagagcacccagactagtttctgccagttcca

SEQ ID NO: 57153 - DNA, 1371 bp, Bovine  19866881023001
  misc_feature (1)..(1): n is a, c, g, or t
ntccagcctcatggcaaggagagcctgccacgggcactcttggcatacaggatgattcaagaaattgcggccgaatgcatcaaagactttcaaagaaatgcaagaaattctgtgttgctgaagtttaaaatatcaggagagacaggcggggagactggagttgtttacagtggcttccttgtaaaaaagctagcatatacagttccttaaaggggatgtgagttcaaaacaagctggagatgtatagggaacacagagcggtgcctccatttctgagcttccttgtggagcttgtatagatctgaggtcagccaagtggttgtcactctggaattttttaggtaaccgagaggaactcattggtgaacttcaggtacaattattgtcgtctcttttatcactcaatcaaactccccatttggcagaaagtttcaacttgcccctttatagctgtcctattgcaaagattagatcagaggtccccagcctgcaggaactatgcctgatgagctggcgtggagctgaggaaataattacatgaagccagtccctggggccaaggaggctggggactgctgggttagagggcggtgtttatagatagatgtctgcatacgtgtttctttctctctcatcctttcctcggggtgtttttgaaaccccaaattgtctaaggaccctgaagctttctcttaaagagatcattcccaattccgaataccgaatcaaggccaaaaaagagatctctttccaaagtgatctctgtaaagtcacccctctctgctgttcgacacagggtggccccttgcaagaccagcagggatactcacacagtgctgaaaaatgggggatctttaagttcccacattcatctcatccttgttattcctgagcactgtgccagccaaagtggaggggctcagagaagcttcgagtctcagctctaagctgtgcccagaccagtgctttcaaacccagccacgtgctgaactgagactagccatcatcagaagtaaacaagacccttcaacagattcaagggtagtcattttccttgctaggcttatataagaaactgtataaacactgcactttcttatgtgaaatgaattgtgaactgactgcgaagttgtgtctttgaaacttgaataagcagccgtgatgtaaattcacattatctcccccagacacctgacaataattacctcagtgataaatttgaccagagaaaattgttctcttatctagaatgtaagcaacggataaagaatgcatttaaatagaagatttattcttaggcattctggtgctttgaccacggaagtgcccatgtcacatgacaaatccgtgtcttcaaaacagagaagccag

SEQ ID NO: 57154 - DNA, 1710 bp, Bovine  19866881070651
  misc_feature (1)..(1): n is a, c, g, or t
nttcctctcattcattcctgtttctcctcggactccctgaatccagatgatttctccccgagaggaagcacgtcaggacgacgttcaggctcatgcttaatgactaaggccttctgagacacctcgctggaaagctgccctatggtttgctaactgaacgagcagggtggcagagaaaaggcctttactgttctttttagatggcctcacacatttaccctcagctcttggtaaagaagaatcgattcatctcacaacctccgctgttgccatggcacccacctggctgtagctggagagaagcacccactgttcttgttcagtctctaagtcacgtcatactttgcaaccccatggaccacaatacaccaggctcccctgtccccgactatctcccagactttgctcaaattcacatccactgaggcggtgatgccatccaatcatctcaccctccgccaccccttctctttctgccttcaataattataaaagcttacacatatcaaccatacaggaactatttgttaataaatgatctgtcctaatacttacaaatgcaaagcataactccatcctggtaaatcaagtctgggaagacatagccgttggcttgaatttttgaggaaggttttgcggagcttgcacaggtcttaaaggaccatacagattgcgaacagtgcagcaaaggtaataggaagtcttggaaagtggcaggcaagaagagattaaaatagggaaattcataggaattctaggaaagctctgttctgtttaagaagatattaagctagaattggcttatgtcataacctgttcatgataagaggaaatctttttaaaattcaatcctctaagcataggccttgcagatgtggaaaaaatgtcacaggaagctatgttcaattccctcttggctaaactttcatacttgtggccaatattaaaaaaagaaaaagaataaagaaatcttgtttccttatgacttagggtaaaagatttatcccagtgttttctcttccaataaatggtgacccaggagtataaacaggtacctcctggtataatatattctgcaggactttgaagcctgcatagagtgaaaaaggaagtgtgtggcatagtgattaatgtttgtaccaatctaaattttatgacaccacctgagttactgttaaaatgacaacagaactctacgtatataaacatctttccctcagtcttctggaagagaaatttgtcccagttaaatcaacttaactttgtggtctattaagacatagcatctttgaattagatgttatcattaataactaagcaactgaattcaaagtcttatcacttttgaagtagaataaagaaacaaggagctatattagttttcaccatgtagtatcatctacaaacagtggaaaataggttatggacttgaatttaaattaactctttttatttgcaagttactagtcaagagagaccaatatcagagaagccaggacttaaaacaagggaaatcactcttctggaaaatttaacacctggaaaatagattccactaaataaaagatgttttacagtagaaataaaagcctacccaacattatggtgattgcagttagagacaaggattatatgttgtctttctataaactctgagagcaggaaatttcagggtgtatggattgagaagaaaaagatagctttaatgtg

SEQ ID NO: 57155 - DNA, 721 bp, Bovine  19866881239644
  misc_feature (1)..(1): n is a, c, g, or t
ntgcttctgctttaggctttggcttttagccgcaaggcatgtggaacctcagttccctgaccgagatggaacctgcaccccctgccttggaaggcgaagttgtaaccactggactgccagggaagtccccaggccccaccaccttgcttgtgagccctgctaggagcctgggggcatggaaaacaacgaggaacttgtccgaagggatacaaacctcaggttcaatcatttacaagagcaactataccttctttgagcagagcaaaaagtatccaattaagagacgtttagtaggacattttaccgggtttcctgaaaccatccagtctcctttttgcctgtgaatcagtacatgtttaaacagtaattagtacaagtggcttcacagtttacctttgggtagccttctttatgtaacaaaagcccaactgaacaaactgacggcggttacacagatcattcttcttctcagaaggaaatgtctaaaattcttcttctaaccccagagaaagagatcttaaatttgatacgatttaaatagcagattttgtgaagtgattcatgcttttctagtgaagaaaagtaaacttctcctcgataacttcagcatgtcttctttagagaaaggcgcttgtttcttgttttcttctcctgtgtctttctgtacaaaagccagtgcgttcctttttaaccatcaagagctgactttcggaatgtaagt

SEQ ID NO: 57156 - DNA, 2594 bp, Bovine  19866881281833
  misc_feature (1)..(1): n is a, c, g, or t
ngacgtggtttgctagaatgtttgcacatttttggatgttgaccttagccttgctatttggaatattttacacgtcagtttaatcatactttgtcctactctttttcctgcaagtctatcatttctaatatgtggcaaatatttacttgtatcaagagtgaattcattttccctctgtatctaccttaaggtctgttgagtcgatgatgtattcgtttataagcactgtgtgcaaagtcttgcactgcttccagttgcctcattcaggcaaggtatctcattgaaagaaatttcacatccaatttttggagaaaaatatctcctggttccttggaatcttcttaatcaacccttcagcgccatgaagaatctagctttacctttttttaaagttggtttgcaatgatttatgataactcaaagagagaccattttacaagtgaaatattaaatattattcagcatttgcccaaaatcgatgctaccatgagaccctaacataaaagaccatgcagccaaagtggatgaaaaatacttgtaaaatatccagcatgatacaaataggaaatatcccaaatatcccacaacagcaaaagtctcaaatttactttgaaatgtcattctcagtttgaaatcgaataagcaaaattgagagctttacttgaaaggtgatatttatttttcttttctttttttgaccgtgtggcttgcagaatcttagctccctgattagggatcaagcctgtgcccttagcagtgaaagtgtggagttctaacccctggtctgccagggaattctcaacactcttgagattgcagtgtgatttctttcagttaccttgattcaaacaatgataattggatacatgtccaagaagtaagttggatttctgtagatcatctggttttaactttgatataaacttccaaatttgataattaaattaatacagcagaaacttcacttgttaggaactgtatctaaatcagctgtgctctgtttgacagaaaattgagcattttactgttcaaaagcaaagcctaagggcttaaaggttaagctcccaggcagcctgagatatcagttctacaagatagctaagtcaacgttccaagctccaatccacaaagccccaaggtcccacaaagccactttaaaggtcctttattgaacaagtgttcaatcctgctttcagaatatggcaagaactgcagcttgtgagagagtggaaactctggtgtgcttatccatcagcactgttctctgctcttccagattcattcttggccttgttttccacccaaggagcttaactataggaactgcaaagcccagggtctctccttttggctccaggctctgctgacttagtcagagtcgccagccgaagacggtcctgcagccgtctgccactttcttgctgggccgtcactccttaaccgtggcttttgcagggcaaccctcttcaacatccaaatctctctgagttctacatcagagccttctcctccaccctctccaggcttagagggtttatggtgagctccctactgttatgagcccctgggcactgggccattgctttatgattctgttaatcctgcccttacatcagcaaaacccccttctgtttgaactctcttcaactaaccccttgaattaattcaacattttacctactccctgccagaactctgcctgacaccattggtttggtcttccccattgccaccaccatataaactgttcactctactcaggaccattccagagttttcagggacttccctggtggtctgtgcataccctgaagagggtgtaggttcgacccctggtctgcaaattaagatcctgcatgccacatggtgcggccaaatttttttttttttaatttaaaaaaaagagttttcaacctgagcattttaaaagatctaacaagaatgatccatttgttgggtgaaaacaggatattttaaggggtgccctacgatactctaggggtttccctaatgacttcgatggtaaagaattgcctgcaatgtgggaaacccagttttgatccctaggtcaggaagatatcctggagaagggaatggctacccactccaataagcttgccttgagaattatgtggatggaggagcctggaaggctacagtccatgggatcacaagagtgggacatgactcagcgactaaccctttacaatactctaacgtaacttttaaaattcattttttcctttcaatttttagttattgtctattttttcctcccactaattcatttattctctcccttttcggattttcctcctgtgaactccgtcagatggtggtttccggaatcaggaccgcgttgcccttgaactgttcacccgtgacaactctcctggggcagaagcacctggaagatgcctcccagccccggggagtaacactgtcccccactgtgctccctgcctttcatgctcccttctcttctcgggaaacaatgtttctcattcaattttataagtcaacagattagaaaggagtcggacaaaagcagaactgtatgatcgtgcggttctaactaagcttctacgataagc

SEQ ID NO: 57157 - DNA, 1401 bp, Bovine  19866881310245
  misc_feature (1)..(1): n is a, c, g, or t
nacatagagaacaaacgtgtggatacaaagggaaaagggggctgggatgaactggaagatgggggtgatatatatacactattgacactatgaagaaaataacaagaaccaactgtatagcacagggaactctactccgtactctgtggtgacctaaatgggaaggaaatccacaggaggggatatatacatatagctgatttactgccctcaatctttcccagcatcagggtcttttcaaatgagttagctcttcacatcaggtggccaaagtattggagtttcagcttccgcatcagtctttccaatgaatattcaggactgatatttaggatggactggttggacctccttgcaatccaagggactctcaagagtcttctacaacaccacaattcaaaagcaacaattcttcagcactcagctttctttagagtccaactctcacatccatacatgactactggaaaaaccatagttttgactagactgacctttttggcaaaccaatgtctctgcttttcaatatgctgtctaggttggtcatagcttttcttccaaggagtaagcattttttaatttcatggatgcagtcaccatctgcagtaattttggagcccaagaaaataaagtctgtcactgtttccattttttccccatctatttcccatgaagtgttgggactggatgccatgaccttagttttctgaatgttgagttttaagccaactttttcactctcttctttcactttcatcaagaggctctttagttcttcttcactttcttctaagtactggtactcagtagctggtacttagctccataaatgtgaaccatgttcatgaatattgagaagagtccatcatataatattccctttcttataattgcaataaatctagggaaaactaaatgtaggagtgggtacacgcttttaattctcactcctttgtaaggacctggagttacatgtttcaaaagagaggcttatcaagtgattttcttgggtacttcctccccaggacacagcagaagcagaaccaggtccttgttttaattaaggcttagtcatgcaacgagtcggactttccaagaaaataatgtctctatatccttaatgtctaattaaatacaaaaagaaatgcaagacgttagccaagcgtttgattgtagacatgaagagtttccaactcactcaagggactggcatttcactcctgcacatttatcaacaggaaaaggtagtgggattaggaatatttttaaaaaaagaaattgctgaaaaaggaaaacagtccaagtagtgagctttttaagatatgtttctactttgctacatttattttgctttgctaaaccacttagctagtcttcagttgaaggatatagtcttataag

SEQ ID NO: 57158 - DNA, 1264 bp, Bovine  19866881392044
  misc_feature (1)..(1): n is a, c, g, or t
ngtggcccattgtgaggacggagactctgcctacagccaagatgtcctgggaggcacgtccaagctctccccgtctatccgtctgcttctggccgcttcatccatcagccttcagagctgccttgattagccacatgtctttggtcagcatttctgtctttggtcagctcttcaactgcattttggggagacagccacatactttcaggatatggcccatggctgagcaaacacatcctgaaatgttgaaggtaaaataccccatggcttgtgacaacctagagggtgagatggggctggaggtgggaggcgggctccggaaggagggtcatgtgcgcacctacggccgattcacgctgagatatggctgaaaccaacacaatactgcaaagcaattatcctccaattaaaaatacatttaaattaaaaaaaaaaaaaacaactatttccacaaatgttgcccacaggatacggggttctttgtaggtttgtctgatgtgtcttggatggacatcttacaaacaggaagctattcaaggttgtcagtttctactccctcatctgatccttggaggcatgagaatgcaacagtctcatcagaggcccacaggactgcaaattaagaagccgattcagagatagggctattctcttcatccatgcttccttctaacccagttccttcaagggaactgcacccgttgtgggagtcataaatcaagagctgctgtgagacactctgctctttcctgctgccaaaagggaaaagagaggtttttctttgaaatggcatttacttggcatcgctcggagtttcggtagtgccaacgactgttataaacaagcccttttaaaaaataccttccacagtatactaattggtgaatgaagtttcaattaatacaagctacaagtgagcaaatgtgaatctgtggaaaaattatttctgcataatgtaacaatgtcagggatacaagttaaaagctgtgagaattctattccagaaaccatcaggtcttctactgtggtttattatcctgatcattcatttcaacttgtccagagaaaagtgttcagattctgcttaaatgtgtacagtttattcatctatccttcaatttccccaccacgtaaatgatgcatttcctaaaaggcagtttcttttaagctaaatgttagatcatagccaaactgattaatttagtgtttaccatttctcagcctacccatgtgctaagatgtttacaaaggtcctgttgtcaaa

SEQ ID NO: 57159 - DNA, 792 bp, Bovine  19866881410267
  misc_feature (1)..(1): n is a, c, g, or t
ngtgatccattttaaatatagccgtgtgcacacgtccgtcccaaagtcccccactgtgccttcctccaaccttcgcacccccacatgaggccttctcttgaagggacatcatagtgggtggtatcaatgacactgcttttcactaatttagaaaatacacattcctaccctaggctttcttatgttgcaaataaataggacagaaatcattatcctagttgttgcagaagaaaggagtgttggagcgttgaaaatacatgtttcagttcgcaggtctgtttgttgaatggatgggtagtagaacccaggggtccacactcctgagtctcagataccgtcccctgaccagaacagagggatcctctggggaagcttttgaaggccgccagcgtccccagacgaggctcgccgtgagcatcccctggatgaggcttgccctgagctctggggcctggtctcctggaggcagcgagtcccccccacagcccggggtcccccgagcctgtgtgccatcttctttgttcacatggtggcacgtctccacgatgccacagtaactaatcagttcaagatattctctgaagaagtaaaaccagtagtttttagtgtcatggaaacaaaacagctggttgataggacttttatccattttcagttagtgcttttagagctatgaagaacttgcctgtcttgtttcattttatgaggtcttttccttccctctcctgttccctctcctcacccacgtctccctctgcccctctcttctccttcctttttattaagagacat

SEQ ID NO: 57160 - DNA, 696 bp, Bovine  19866881669390
  misc_feature (1)..(1): n is a, c, g, or t
ntttctgatcagtgggcagcatgaacaaacacagactgaatgactttgaataaggacaaaaacagagccaggcttacctgtgtcctttctcccgaggatctaggagctaggaactcacagctgggcaagagtgaaaatgttctttagttaataatacaggcaagaaaagctccagaccccaagaacctgggttaaccattgacactggcttgttcctacagttgcaccctgggaacacgcataggtagcccgtggcatcttaggaagccggcgccaaccggtcagctgagaccacggctggggccccgcccctgcacccctggaggaggtccggggagaaggtcacccaggcgtcccctgactcactgttcacttgcttgggaacacaaaggaggaagatttcctgggccagaaatatgttcagcagtgcccgtaagtgactcaaatatttacagacagggctattggaggctcagttttcagactttgagcaatgcaaagaagctctttttgtcagagttctttgcatacatctgagcaggtcagagttgaaaggggatgccgatgaaaatggagacgagacaacctgcaatggctaagcagccactcgtccctttactcagcgtgccttcggtggtcatctaccctgtgcagcacaattccaagtgggcttcccgggggctcaggggaaagaat

SEQ ID NO: 57161 - DNA, 822 bp, Bovine  19866881892452
  misc_feature (1)..(1): n is a, c, g, or t
naaatccttgacaaacacacgggtaggttttggggtagttcatcaacattgcagtgcattggatcttagcaaggaattacggctgtgacataaatttgacctctgtctgaagtttgttttgagctgggaaatcattccatgacaaatgggttcacaaagatgacaccgcagggaagtataaattactggcaattgggacagaatttgagcttccaaataaagtttcaaattagccaaaacaaaaaaaaaaattaaaagtggggaagaggacccatggcctctgtcccagatatgacatttatgatttcaaggtgacgttctgtgtttggggtgctgggttcggaagtcatggtctgttggtaaaatattgtcagaagtcccaaggagaggctcatcctaaagatgagttctttgggaagggaaagttttaatttgttttgtagattctgaatccgtgaaaccaaggtggggaatctgggctgttgttccccacatcggaattcccctccccgatctgagttcagtgtttctctaggattggttccacagtggggtaaacatcgggacagaggggctgcttcaaagcaaatgaggcccttaatttatcataaaaaagaagactggttgttaaggttttattggattacaataaaggctcctagcactaggagcctgtggttttattcccggcatcactcagggaggttgaaatcataaccacagattatagcagtgaacttccaaatttccataccctaagcagagacgctgccttcctggagctaacgtggaattacatgctctgcgattttaggggatgta

SEQ ID NO: 57162 - DNA, 1216 bp, Bovine  19866880590953
  misc_feature (1)..(1): n is a, c, g, or t
nttctttagcataacaggccttatataattctataaattttatattaaatatatttaaatttatataatattttatatttaattctatatttataaagataaatttccctgtgaagaacaataagcagatgggggagaaagtaaaggggtagaatttaccaatttgaatattttcagcacggaaactgcctaagtttttctatgaaactgcatggaacatgaccacagtactaaatctgtacaaatctaataatcactgagctctcgggctcctggtttattttttcttcaaagtaagatttgagttactttatgcagagtcagcgaagtgtgtgtttcataacgtctcttcctttttgaacttttcaaagtctaaagtcgggggaaacaagcctgctggtggtgatttcggagaagtcttgaattcgactgcaagcgccagtgccaccaccacggagcctcttccagagcagacgcaggagggcctgtgagcctcccacctttgttctgctgctcactgccagatgctgcaagcgagatccaagcacatcttgtcaacattcattgccatgaacttccaccagatgtgcttttgttgagctttacatattcctttgaccaaatagcttgtgggttgaacaatgtaaaagtatcttcacttctattcctgggaaacaccctttagtgtgcatttcagcccctttatttagcaaatgtcacgatgaaaacacatctagtacctggggatcctcactagaatgaaatgagaagctgtgggttatcataattgcttacacaattgctctgggtgtgggctaccagtttgatctttttcttctatacaggtttctgtttttcctctttgaatctctgtatatttgattcctagattagactcttctttaaaatgctctgcatcctgcttattaaaaaagttttggcgaaatgttctttacctccgagggaagaactaaacagctacacaaaatatttttgagtatcgtttggggataaagtatcttatatcttgggtgtctgaagacaccagactaagtaaatcttctctatattcagtttcttatagttttgtaagtgacattatgtacagtaatttcaaatcctaggtgacctgagagtggagccctttgtttatcaccatctgtgacagtaaccatttcagtgtcatggttattatgctacttatagctacttattt

SEQ ID NO: 57163 - DNA, 1719 bp, Bovine  19866880591737
  misc_feature (1)..(1): n is a, c, g, or t
ncttgtctaataggaaccctcagatgatttattagtggagactgaggacaggctatttttctttcttgtgttagaagcagtagctcttggataattactttcacatctgcatctaatggtttactttagaagcctcatgcgtctttggcattttccctggggaggaagcaagagagaagataagtgagggaaagagagattctctttagtcatccatcattttaattttgctacatttgtggaggaagggcactcaccctactatgtatcttgggctttaggacagagtctatgaaatggcttaaaattcttcctttctcttttctttctctcccttccttccttttacttctttctttccttcttgaatatgagaactgggcttaaaatacaccatgagtgaagcttgaaaagcttttactggtaacattgtagtacatcattatgatatcattaggagtagatttttggccctttgaaaatagaaaaaattctgagtcaagggcctaccatgtggtcaatgggacatttttcttaaattcaaattttattagaaggcaggttttaattcttacttctttgcttggcacttgctaagttctgactttattactaatttattcagtgggtagcaatgcccaagaagtccgtagaatatgatggagaggatgcggagcggtcccacccaggtgctccctttagaactgggagtgttagtagctgctgctttcagcttagtttctctaggagaatggccctcatcaggagaacgccaccttgctcaaaatcatttcctgagggcagcccactttctaggatgggtcaacatagggatagtaaggcagggctctttgcttcaatttgggacattctgaagaagcatccccgctgcagagctcccagaggtggggaatgaggtgtctattatgacaatctcaaggtttgctcttagcctcatcttgcttacttctctaccccaacaagttcactccccggaggactcaccaataagcttccttcctggggaatctgtaacaacgaccaaaacattttgtatgaggaaatcatattactctcttttccttgttccctcttcagaatcaattacctcttaatttccctaatctaaggaactgaaaatatattttattgagataaaattgaaatatattttattgagataaaattaaaatgtattttattgagataaaattaaaatatattttattatcttccccagaaggtaaagaatctatcttcagtgcaagatacccaggttcaatccctgggttgggaagatcccctggagatgggaatggcagcccattccagtattcttgcctggagaatccccatggacagaggagcctggtgggctgcagtccgtggggtctcaaagagtcgggagtgactgaacgacaaaccctttcacttttttcccctaaaggaagaacaactaaaatttatttcatgatagaaactttggagttgcatcacatcaaggactgccttcagaaaacatggattggtaaacagattttatagcacttggtatctttctcaaacttattcaacattttctctgtccctccataatagtcaactattatttataatgatcagttagaagtgaaaaaagtacaagtgtgggataagtctttttttttaattgtcaaaaatatacaggacatgaaatttgcaattttaaccatttttaag

SEQ ID NO: 57164 - DNA, 1973 bp, Bovine  19866880750174
  misc_feature (1)..(1): n is a, c, g, or t
nccttttatttccctcacaatctacccttcctgagttatttaggacagggacatatacaactgttttattcaaaagtaggtccacatattaaaaattccttttatctatagacctcaaaaaaatgaggttttatcttaggttagccatagttataatgacttgttagaaactttaaaaatactaatttttaagtattttaaaaacaattttaagaccagcttaattaactttagatgataaaagcatacaaatagtggtctggtattgcacagagatgagttttgatgaagtcagcgaatacgctggtattcttgagaacggttggataaattcacattgacccataacaactctgactccaggcctagaagtactggtcctctcggctttgttcacagaaattttatgaaagaaactagtgtcacaggaccagatggatacaaacattgcctggaattggtcatttagccagaaatttggggataattctggcattttgagactcatcttcaaaatcccagaaatgtcacgccttcactttgagtagaatcagttcttgaacccaagccatcctgaggtagctgcaaagcacagtttatgctgttgaaaatgtatggctctcttgaaattgtgaccttacctttacccatcttccaagtgtattgcttccttaggtgcagcctggcctggccaggggagtcagtgtaatttctgtcatcatctccttacccacttctctatgggattagaaaatcaaatgttctcatttttacccagataaaaatttttaaaatacttgtttatttatttgactgtgtctcaggtcttagttggagaaggcaatggcaccccactccagtactcttgcctggaaaatcccatggacggaggagcctggtaggctgcagtccatggcgtcgctaagagccggacacgactgagagacttcactttcacttttcactttcatgcattggagaaggaaatggcaacccactccagtgttcttgcctggagaatcccagggacggcagagcctggtgggctgctgtctgtggggtcgcacagagtgggacacgactgaagcaacttagcagcagcagcagcagcaggtcttagttacagcacgcaggatcttctcaggcttctctgggtgtgcagacttagttgtacccggcatgtgttacccccaggttttaaggtcaccattctcagacatcttgtcccctcagtaagaaattctgtgtgcactagagagtcttaggttgagtctcagacctccaggtgctttatctgatgtagcttacttactaacctctttaacaaattttcttgccatctgaccacattaatccaagttaaatgcacatactacacttttcctttttccatagcagtggtcaaagtaattagcatgagcgtgaacgtgaaatacatttttcaccttaatcccttttgccctgctgtccaatactcattataaattcttgtggtggatagtataatggaagatatatctatcttctctttagatctgaataaattgttgacagttttctccttcttttgcaagtaacactgaacttaacttttcaacatttaaaaccaaacttctcaaattcattttcagctcattagttaatgccagctaattttgacttttaaagaaaaaaatagaacctaaaatcttggaggagctgtatttcaggctcctgttgatttagaatggctgtatacatccttttgatttaggaagaccaagggcaggaggtttgacttggtgacttctcagagcctcaagaaggtaaattttatactatatttagtttgttctgttctgcagatgcctttcttaatcagtaatggcttagtgtggggaacttagtgtgagcttagtgtgagtattgaacatctctgggtttgagattgtacaaacacaacaacaagggcctactgtatagcacagggaact

SEQ ID NO: 57165 - DNA, 1273 bp, Bovine  19866880785652
  misc_feature (1)..(1): n is a, c, g, or t
nattagaaggagttgtgcaaaaagcaggtagaatcatcatccattccccactgctaataaactgataataccaaaagtgatatactcagtatataccaaaaatggaaagctggtcatcaatttgctaaaatgctccagccagcagaaatgtttgcattttccctctttatataattttcattctgttaactagtagcaaaccctttccgccactgtcaacatctccactgcccttctcaatttaactgaaagaaaactaaaatgtatcaacaccatctgtgcctcttaaattcaggatacattagaagcaaataactacttttgatgaaatagcatagaaaacatttaagaaagttacttagtgagcactacatccaacttcctttggagaataaacatttaatcagcactgtctcctcctctacttgtaaatgtatacataaatactcttatgtgtacactggagaagtaaagtaccaatttggcttctatttacagatcagactttcagtgattatgtataaaactaaaagcacatttggaacaggtattcttgtctccctgccaaactattatctttccctgttaactgtttctatctaatcccatgtgactctatatacgctagaaatctttctaatgaatatttgtacaataggataaacatttatggagtaccaaccatgtacacacttgaatgagagtctggaatacaaacagaacagtctcctactgacacttcatttctaaccaagtacaaatcttaatgggttggataaactgctatctttattcctacagccctattcattacaccataagctcctttaccacaccacaatgcctccaaaaagctcagaatacaaggggtgaagtttaatcctattaagtaaattctcaatccaaaactttatatggtgatgttttatatcatttttaagctgacatttacatttgcatagctgtaacatgaagtacagtcaccatgcctataagccaaagcatggaaactaatagtcctacctagaaccactactttcagtattgattacaaaagcatctaaagagaagacataaacacagagaaaaaagtattgaaggcaactgagagccatgacagttactctaaaaactgtcaccaagaaaacatctgctcttcataatgtcttctgttagaaaaataacatgaaacataaccaaaaccaaaatagaaaaaataaatattttcctcaaaacacaaaggtttactatgaacaggggagaagggtggcag

SEQ ID NO: 57166 - DNA, 838 bp, Bovine  19866880896937
  misc_feature (1)..(1): n is a, c, g, or t
ncatggtttccaaaattgcaggcatgctgatttcataggactaatcccgctgccctcctctcccttatcatggcttctaaaggaaagtccattgtttgtttatattaaaggcagcattttcccaaagttgctatacagtgcagttcacctcatttcttagcccaaacaatacatgtggtgccacagagtctaccgtcaaatggctctagttagtcctttataaaacaagctcagagaggtccttgtcactgccgtgttagtcagaggatcccagcaaataacctcagactttatttatagcactgtatgttttggatttataacattctatctgttatagacgtagtatattatttgcttggttactttataattgtgatagtttcatgccacccaccgtaggtttttctgcagtggttattctaaccacaaattaaggagttatttttctgtgggttcagttatacacaagaattatattgcaagagttgctggagcccaagttctgtaaacagtttttttgggaagaagtctttgtctaacagacttgactagattgctggtactcagaacgttagaagtcagaacttagatgcgtaaaatgtaacttgtcaataaaatcgtagaatattgtgctataaaatgtcagatgagaatctaccagctgctgtccacgttggtatatgggcagcagtcttttcagtagaatagaattattggaattttcctgtgcctaaagcagtgatggtttatacttcggggggtcataggccaacttgaaaatatagtgaaagcacattgtgtgtctaggaaagtttacacttgtatatactacaca

SEQ ID NO: 57167 - DNA, 1645 bp, Bovine  19866881157992
  misc_feature (1)..(1): n is a, c, g, or t
nctgctgagatgcttaacacattatggcacatagtacatactccaataaataataggtattatgaaattcattacactgattcttatatataatataaagtgtaacagataactaaaaggataataatttcagatataaactagaacattgctcaaatggacaagtctgacagcagccttcaatatatacaaaagaaacaaaaggaagacaaaactgactgaagacattctttgagtctgagtttggggctgagggaagaggataataaaatccagaagttactttataatttacagggacagacttgataactctgcagggagtcagagctgagaggcaaaacacaatcaattggctgtggaagctttttacagtttttttctttcctttttttataaaaatactgatgcctggggtctaacccagacctacaccatccaaatcagtagggtggagctggagattcatgcacatttaggaaaaacttctcaaatgagtctggtttgaaaagcattggctacagtattcgtaagttctctgagtatttatgagtattcatgagttctcagacattctctgagtctctgtctctgtcaaactccagataaatggttcatggcagtcaagggaccgagctgaatcttggtcagttcaagctttagttgccctaacaagtgcatgcagtgcagacattacatagaaagtcaaagttagacctgcacattttacatatcaaatatgagataagcaaagttgctttcctattatgaaactgaagagattaataatatgtatttctctctaaacaaggggcttccctgagggctcagatggtaaagaacctatctgcaatgcaggagacctgggttcaatacctgtgtcagcaagatcctctggagaatggaatagctttttactcactccactattcttgtctggagaatttcatggacagaggagcctgaagggctacagcccacagggttgcaaaagagctggacatgacttagcgactaaacaacagcaaagcacaggttccacattatatttcccacataaaaagtccagtctcctttcacttttctgaccacatctagggaattgtcatctgtttggaaacaagacagtcaaagaatcttgtagtatgtaaatgaaaaattaagggaaggagcagtttgaacaaaagtagaaaaggatcttatacctgtctaaagaatttggaagtctttaatactaaagaggtcacaatatttattttgtgcatctattttgtatgcctccaagaaagcagaaataagaaaaatagttagaagttataggggatggcagatttatggaagattcagctttaatatgaggaagaacttctaacagggttggctggaaggggaactggttattttgtgcattactagaggaaatcacagggaattttcatgacagatgagcactgtggtcagatgagcatggtcatctcacgatggagtttgaattagtaagggctgaattagatgacttccaaaattcctttcatttataaaattttatgagtctatgactcaaaatacttattaggtctcccaccatcaggaagcacaaaagctgggaagcaagttaaagaaagagcagccaaacagaaggtag

SEQ ID NO: 57168 - DNA, 782 bp, Bovine  19866881194139
  misc_feature (1)..(1): n is a, c, g, or t
ntttttttcctaagtatactacagttagatttcctctaaaattttatttcagaaccttaattttggacctaaaatagaatactttgtgttccttttaaaaatgcaaattagctatgaaataggtataattagacccttaattagtactgattgagcatattataattttcatgtggattttatgctgttgcctgtgtcattttttaatttattaagcaaatgattctttccttgatgtattttccttgaaggcatttaaaatatacagtccttctttgaaaatgtggttatcgagtatttgttatgataagtagtggagagagctgtccgtcttccaaagtggaatatatgattgaaagttatctggcttccaaaatacgttgctgtgaaggtatgtattttgagacttaacatttttacttgagttaacatcacctcaaaacttctattttactcaccatcatttagtttcagccttcacctttattttttatttactggaaagacatatgccaaactatttttgaatgttaacagctaaacataaactcttaaagtctcaatctgttccagaaactaaatatcttttcctaattgcaactggaaatattttagcttgcctatttcttgaatgtaatttatttagaaactttaattttgaattttgcttgttttccaaatactataccttcagcatgaattttttttgaagttggtatcatttatttcaccaaagaaaactttcggagttgaaggaaaatgttcccaaagtggtacctaaa

SEQ ID NO: 57169 - DNA, 1408 bp, Bovine  19866881299309
  misc_feature (1)..(1): n is a, c, g, or t
ntgtatgttgtatgtgtctaagtggatagttatcatcccactggagccttgaggagagaacacccctggatgcccgagcgcttggatggtgctgccttttgagccagagttctgtggacccggcttagcccgtgccctcttgctgcgcactgctcccgagggtgctagggctgggtgcgctgccttctttgagactgtgaggttattcagggagactgtttttattcagggatgacagatcatcacaacctcctgtatcctaggtgctggagctataatgatgaataatataaaactcttaccatcagggaactcagattaaatgcctttttttttttaaactatcctcaatataagcacgattttggggggaaaaatggcataatgattaaatttaatagaataaataataaaaaatcaagtgttgaatatattctgcctttgaaaacattgtccaaaaaagaagaaataatcttttcactttaaaaattatatttcctgttgggacttacctggcgattcagtggtgaaggctccccacgcaggtttgatccctgatctgggagctaagatcccacattctgcatggcatggccaaaaaaaattttttttaataaataaaaatttaaaagttatatttcctgttaatgttcctaagaaatgttggtatattctacatggaacaaccactatgtgaaattaaaatatttgctaaaatgcatactggtcactgtcttaactcttagaaatgaaaactatttccaaattcttataatgacatttttttttgcaaataatatttaaaaatttttgtacagtttcatgtatagaattattttgacagatacaagtataatcacttcaaaaggctttacatatttgtaagaaataaaccatatgccatcttgcagaagccttgatttggaaagaatgtggctctcagccagcaattaattaagccactcttttgttttgaccatattgtggtgtgtataggtgtgaaattttctgtctttagcaaataggaatattcctgtgtatccatgatagttaatagggaaagcagttaacttctggtgttattctcctacaaagtaatggaaattttaagtacagatatttgaagcacaagaagaatgggggaaatttgggggataaagtgaaaatatgaatttggccctggatagctgacaagtgactcctgtcactttggtcccttaaagatttcctcattgttatcaggaagatggaagctgagcatctatcaagtctgttgctagagaatacagaatgagagaagatcacttaattatttggtgtgtgtagtgggataccctgttgtcaaaaagagagaataattagcctgaccaatcaatttcctgcatttctccgaatccaattcagatat

SEQ ID NO: 57170 - DNA, 1825 bp, Bovine  19866881382709
  misc_feature (1)..(1): n is a, c, g, or t
nggcaataacttggagttctgttttcaagtataaaagtgtgttcttgaagagttgttataactgaaaaagcatacaagttgaattagtataagtgaaaggtttttgaatgaatgaggagtatttattacattaaaagactagagggaattctgtcactcaaaaaatctctttgagggaataccctggtgggcctatggttaagatgctatactttcacagttaaggacacaggttcaatccctgggtggggaactaagatcccataagccacgtggtatggcaaaaaaaaaaagagaatttctttgtaaaaggatcattaatgtccttattttccttctgtgcaaataaacacatgcacttcatatagtcctgggaccaacatagttcacacagttttctcatctgtaaaagaagaaaaatactactacctttacctagaaagttgtgagggtgaattttttaatttcatgtgaagaattcagctccttgtctggcacagagcaagaagtcggtaaatgttactctttttatcagctattgccaacgctgttctttatggagaagtgatgtattatattaagtaaagtgttaaataacagtagtaacaaaacactcttggacctcatgactttttattaccctacggatttttttgtaattgaaaacagagaatgaatatatttaatgtgcccaagtgggcagtgttggggcaaaaattgtatcaaaaagatattaatagttaaacaaattttgcagcctcccattaattcatgcagccagccagccagtcaggaagtatttattggatgccagtgcgtgcaagccaggacctgcaccactggacgtggcagagctcgtgacatgtgggtaggtgattctggagcaccagtaacggtcacgatattataatctttgctttggtggaattaagaaatcccggttcaattataattcttctcagtaatcaggactatacctttccaccctggataagtgattttccacaggctttagcaaggagcaaagatgtttctgatgtgcttttcacttgtacattttctatgcctggaggcttaatacagcctatgaaaaatcgctctttcgttcttttcattctctctcaaagcttcaagcctcggggcccttgaaataaatcaatactgaattcattgacttgggcattccaacagaacaaaaggaacttcagagaccagacaaaccattaaaaacatttggaatttctttttccccaaagtgcctccttttttccttattggaatagcaacagttaacagtattctcgaagcaggatggccattgttttgcctgcaaacaaactaaaaaccttgtcaatcatcaccttcccaaattcattttataagtaacaaattaccatttaaacaataaccatgaattttaaaaagagtgtaacaataaaatgcatgactttatataacctgctttcaccctactttataaatagttttcaaacaacatatgtattcaagtgtatttctgggtcatcaatatatttaataagctttcctgaatatgcaaaataaacactttgacctatttctggaaagcttagagcattgcagaaaggaggatcaggagacaataagccaacacctgtgatattatagatccaatagctttgggggtgctaaatattctcttttggtttctagatcaataaacagcaggaagctctggcttctgtctattagcatgcttttagttgtaagaaagctcaattctattaataatcagttaacaataactagaactacttaacaataaaataactaatttagagatagg

SEQ ID NO: 57171 - DNA, 1755 bp, Bovine  19866881111554
  misc_feature (1)..(1): n is a, c, g, or t
ntatacccaatcttgttttaaagtcagtcctggacatactgttcctaagaaggaacatatattcctgaagacattcaaaaggggggactcttcgctctgaaaccctaacaatatcactttaatcatcgcttctgtccctgcacgtcacaaggccatacctctaattaattccatacctctaattctgcttctcttccccagggcccagtcatatatgcgcagctagaccactctggcggacaccacagcgacaggattaacaagtcagagtctgtggtgtacgcagacattcggaaaaattgagaagaccgccatcatatcctaagcaataaacaaatccaaactggactcttgtgcagaaaatgtagcccataagtatgtgtggccttggaaaccagaacgtggagaagcacatgtttagtcatagagggagaaaaagatgtgtataaaggatgtgtataaatgttctatttaatcttcctggtgcaaggagccagttgcatgatgaagagacggtatgattctatgtgtatataaattgccttgctgtttttgtactgcccttcagggtcatttatagtcgagaaaattcagacacattcctatcaccatcgtttagatgtggtttgccttaatgaggaaagtggcagatcttttagtattctaatagacatggccttttaatataagggcttaccccgcctttgtgtgtatcgtagttggagagtggagatgctgtgatggaagcatgttcaggatggcctttagcccagggtatatcgcctgtttggcagttatttttagaaagcatccatttgctatgccacttgaagaccatgtgatttctgttgctatttttctctctaaaataccgggcagttttctgctttcagtgttacgtagactataaaattacaccctgtagcatatcatctcgatttgtggattcatcatagcaagattagcaaaggatcaatgccagaagtcatttctttccaggtacttttggatccgtaccataatcgatacataattgaaatagagaacccagactggcttgaagagtactgtactatttggagagcaaaaggtatggtatattctttgctgaagtccttcatgcttgtaacaagtccccatatagctgaaggagcagaatttcatttccttctaagtaggcagaaatggaataattagattgccagtctctagtatggcagagctctctctagagaatctttataaagcttcagtcatgcttccagcagcctggctcctataataatatcttcaaggactttgaggttaaaaacagttagatttgtaaagaatttttttcatttaaaattgaaaatactgatgatatagtcccagaacacactggggggtaaatggggtgtgacaggtaatgttagttttcatctcatttagtttgaggtcccctaagagctgcttcctttttttcttcccgtcttgttctctttgtgagagactttgaaggccaagttctaaggaaataaagagtaatttagatttaaagatgtttaggaggtggttacacaaagaaaaagtatatgagctacaaacaaactctgccccatttgtgcggtcttttattttctgagagactgctgtgaatcccatggtactccagctcacattctgttgacatgtatgtcagcaggactgggtttttgttgtcacgcgtgcctgccgtctctgagcctggcgtgtctggtctgtgttgcacgcggg

SEQ ID NO: 57172 - DNA, 1040 bp, Bovine  19866881392487
  misc_feature (1)..(1): n is a, c, g, or t
nagcatcttgctttttaagtttaagtgttaatttaattgtattcaacataattttagcatgatttgagggtctactgtgcctgatattatctaagtctccttgtatacactatgttatttaatgtcatttttaccacataattatactctacattgtgtttattattcccatttagcaaagttaagaaccctaagcgacttaatgactgaacagcaacaaagaaagctattccttcttaatttaggtttgttttatttgtttaatgttaatccatgctatatttcagtatgatacagattctgtacctgtgactccagtcagatatccagcagtacaaattagcttcacattacacatattgaacaaaagacagacgttgaacgagcaaggagtggaggggcagggcccagggggagaggtaaagaaaagaaacaaagaattgaacatgcatgcaggcttttccataccaccttcaatgctaacctgcgtcagagggagagtaaaagtaggcaagaatgagcagccatggactgttgaactgttaccagcaccatgcttttcagcaacatttcagcagagtttgaaacacagcaaaactattacaacaaactccgcaaacaaccttttaccacctcaagttaacatccaattaattttaaacactggtataaaattcaacttaaacaattagaaaaaggggaaatgataccacataacctctatagtgcaattaacctttctcttagatacgtgcatcaggtaaaattctaatggctttcgaatgaatgtaatttccattctaatggtgatcttgccacgtctggcaggagacaacacagtaatgctgaaaaagcctctatgcagtcctgttagtgttcttaacctaaaagctggaactagtaaaatccacagaaattcactcttgcttttaagaacttttgtacccgggggtccagccccagttggatccagggattccctcgggaggacggtgttggtgattaaagggatatcacagcagagagatcagaggcctata

SEQ ID NO: 57173 - DNA, 2958 bp, Bovine  19866880097189
  misc_feature (1)..(1): n is a, c, g, or t
natagcatattgaaaagcagagacattactttgccaacaaaggttcgtctagtcaaggctatggtttttcctgtggtcatgtatggatgtgagagttggactgtgaagaaggctgagtgccgaagaattgatgcttttgaactgtggtgttggagaagactcttgagagtctcttggactgcaaggagatccaaccagtccattctgaaggagatcagccctgggatttctttagaaggactgatgctaaagctgaaactccagtactttggccacctcatgcaaagagttgattcattggaaaagaccctgatgctggaaggaattgggggcagaaggagaaggggacgacagaggatgagttggctggatggcatcactgactcgatggacgtgagtctgagtgaactccgggagttggtgatggacagggaggcctggcatgctgcaattcatggggtcgcaaagagtcggacatgactgagcgactgaactgatctgatctgatctgatcctggatgatgactggagaggcagcccccggtgtggggcctggggagagtcatctccaaggcgagtgaaggaggtgaattcaggttgagaacaagatgtgccctgaaccaactgagatgcccgggcttggctccagggactttttcagcaccacgaatgccagacagctccctggcctctcacttcccacctcctcatggtctcctcttcagagagccaatccctgctgagaaaggaggaaccatggctgtcttttccttagagctctggtcagagtcaggcagacctgagcttgcgtctctgttccccacttggctgctgtgtcccctgggacaaaggacagcccctcttaggttctgcggcctccactgtagggaggggatgatggcccccacctccccgggctgatgtgggctttaagttacttattcactcagtgactatttattagccacacactttgtactgagcccttttctacactctgttagattgaagaatgtttctgaagtggcttaacaccgtgcttggcacatagtaggtgctcattaagggttaatttcctgcctgagttattcatctgtaacaaaaagccgggatcaatgactctaagagcaaccaaccagttacaggcgtcacaaagcgtacccccaaagttcccgtgctgcaggcaaacttcttttttcatcctgtccttttgatgaacttttccagtaaggtgttatgatcttgatatacaaccactctcgggactctttggagttttaaagtggccctaaagtcagagtgtgagaggtgggtccaaactcttcttaaataaggtagaattcattggaatcctttgcctaaactcaggccacttcttctgaccctcagttctgtggccaaccccttgactttcagctccctctgggaagaaaacgatgcttaacacaagaacactggtggggtgaagatacagattcactcagttccttcactgaagccccgctgggtgcttggtgctgcccaggacacagaggacagacctggcccttgccgcccgggattcaataaagggtgggcagggcagccaggaccatctcctccaaccctaactcggagtcgccacttggccggcagccaggctcctggagggagtggatagcccagcagtgccctcgctgctggagacagtcggctgggggaagggagttggctgtaatccgtgtttaatttctctggggcctccattataaattccataactccaccagtcacaacatgactaattcctgggactgcagcctccaccggggagtggaaagccctgtgctgttttgccgccttttatcaccactaataaaggcttggcagccagtaatttagcggctgtgggtggttttcttatgcatgtgagttcctccgcctcccctccccacagtatcgctctagaataaatgcttgcttgctttctgggctggttttctaccagctttgtaatattctcagcctgaaaatctgtgggtctaggggaagtttacaaagaaggggccacagtgctcagggttaattgggtctttgatgattctgacaagggcagttcactgtgtgatttaggagaaaagaatgggtttgttggaagtaaacagaacagaattgcaggtgtgatgttttccctgctggcgcaccccctcacccaaccagcttaacgcccctgtgagaatgggctgtgcaggcagtgctgcctcgtgccccctgactgtgctgccctgggcaggcggcttcaccttcctgagcttcaagctccttatctgtaaaatgctgcagacaagccatcaaccctggctgtcctctaaggcttatgtgagtatggacttagtcaagtgcctggcccatcggaagaaagccagctaagcaaggttggaggaaaaaagatcccccacggtcgtgccattttatctaacaccttagtaattatatattcattaaaaacgttccccgacggccttagtaaggtattagtttgttgtctttgcaataagcaaccaacttggctttcatctccaaatacagagcctgtttccaacctgctcgcccccctacctggagttaaggtggtctcactgtaggtaggaaatggttgatgggtggagtttgctggggggagtcaggggggcacatggatggagtgttgagagctggccccgcctcagaggagaagggtgagatggtggtggtggttcagtcgctcagtcgtgtccgactctgtggccccatggaccgcagcacaccaggcctccctgtccatccaccaagtcctggagtttgctcaaacccatgtccatcgagttggtgatgccatccaaccatctcatcctctgtcgtccccttctcctcccaccttcaatctttcccagtattagggtcttttccaatgagtcagctctttgcatcaggggccaa

SEQ ID NO: 57174 - DNA, 1910 bp, Bovine  19866880486148
  misc_feature (1)..(1): n is a, c, g, or t
ngaacatcagacctggaggtgcccactggctccaggaagacgaggtgcgcgtgtggggcaagtctgcaccccgtccgtggctggtggcaggccccaccaagcccaggctagacgaggctgcccccagacaccccgcaggtgagtgagtgaggatacacggttgctgtgctaaggcactgggtggtttgctatgcagtgttattggcaatagctgactattacagcttcctgttgaaatcgggagaatcctgaactacttactctgactcatgaggctctacatgacctggccactgcctaactctcttgggtgttgggcaggggtggagtaagctcaccagggtgaaggaaaagcaagaaaaaagaccctgacattgagtggtacaagctgtttgtattatatatttggggacctagagattatctttactgaatgaagtaagtcagatggagagaggcaaatatatatcgctgatatgtgaagtctaataaacagaaatgaacttgtttccaaaacagtaacagactcacagacatagaaaacaaacttatggttaccaaaagggaaagggagggaggggtgagttaggagaagggattaacatataaaataaacagcaaagtgttcagtatcttgcaatcgtctgtggtggagtcttaaaagacacatgtatgtttgtataaccgaatcgtgttttgctatccacctgaagctattaataacacaatattataaatcagttgcaaaaagaaggtcctggagcaggaccgagatggggccttcaagggacagaaacgtgcccagtgttaggcagcgaacagacctccttttggagacctggcgggctacggtccacagggtcgcaaagactcagacatgactgaaacaatttagcatgtatggagacccgtcttaagcaggttttccatggacagaggagtgtggtgggctgcaatccatggggtctgtccctgggattctccaggcaagcattctgcagtgggtggccttgccctcctccaggggctcttcccagcgcaggaatcaagcctgcatcccttacatctcctgcattggcagctgggtctagtcagagttaaaatccaggccattatgatgatagattccgggcgtgtccttgtcgcccccaccacagatgacgatattattgagtaagcacttcttctggaccagacgctaggctaagtacttagcatccagaatcaatcttcccatgctaatgagggtagttcgattatgcccattttgcagatggggaaatcaagttcttacttgcctgagctcacactaatagtggtaatagagagagaattcaaactcaggtccgcctgaccccagagctccagctctccagccactgcctggtcttcccctgactagcactacacacccagccattttccaggacaaattttcccttcagggagcaggagagacgtgctgcctttcaagtgcatgacaccttccggagacaagtgtcactgcgctgccatcagagtcttcggtgactctcaaaggcctgctacgcgctctccaggttcacagcgccagcaccctctccttcagcagggtggggtgagttgctggcttatctgaggacaggtctccgggtgcacattatggacagactccaggggggatgttcagactctgtagtctggtcccacggttaacgggcaacaccagtagagtgaggcaacagatagggcaaggtaagagactggttttgcgggagactggccggggcaaaagggtctccgggagggcctttggggcttaggggagctttaaaggatacataagtctggactccaccccaacctgggatttggagcttagggctgtatttcttttaagggttcttccatgcccagctggttccgatttg

SEQ ID NO: 57175 - DNA, 2616 bp, Bovine  19866880528344
  misc_feature (1)..(1): n is a, c, g, or t
ntgtggctgccttgtggtttccgcactggtgggaaaggaggagccctggggccagccacagtgggccgggccccacctcaccatgtccatctgtcctccccatctgtctcctccacagctctgcccccaagggctacacgtccttcagcatcaccgcctccccaggagtggttgtgaaggtcgcccacaggcccccagccaagaagagtcccacaggcgcgtcccagtggcgcctggagcccggactggacgtgagcctgaagctgagagcggccagcgagagcacaggggaccagcaggtgagggcagcacagggctgggaggcggggcggccaccaggtcccgacaggcctgcccctcggcccatccggggtcagcaggtccgacaggcccgcccctcggcccgtccggggtcagcaggtcccgacaggtcctaacaagacagagcctccttgtctttggcagagctcatgacagcttgttccagccatagcatactcacactgagatgatgttgggggcttacggaggtcaagggttttgactaaatttattcacccagcaaatgtttaataatcgccttctctgtgccgggcactgtcagaccctgaagattctaatgaacaagaaggtgagatcgcagcccgcgtggcgcttgcggcctgtgggcgagcatcagacaagacaaacgactggaaacggtggtgcggctgggaagcgctcagcccggcagccccgggacactggtccttgccctgtatttagcttcttcggctgctgtaacacaggaccacaattttaaagcaacagaaacatattctctcacgtttctggaggacggaagtctgaaaccagggtgtcagcaggaccgtgttgtgtggcatcagttcgttgaggagaatcagttctttgcctcttccagcggctgctggctgtcggcagccctggactgatggccacgtggctccaggctctgccccggggcccgtaccccctcctcagtctctctcggcctccttcttagcaggaaacttgtcactgcacttaaggcctgtctggataacccaggatgatcacaaggtccttaattacatccgcaaacatttttttcccccaaatggggtcacattcacaggatccaaggattaggatgtggacatatcttttgcggaatcaccgtttaacccgctgtactcacattgactatagatagataatcagggccctccagagggtctcacacacagatctgggccaataacctcttgttcccagcaggggaggccaagcagtctctccgcgggggcagagagttatttcctgttgtaggaacagaccttgggcatcaaagctggtcagcgagtgagtactcagggaaagcttcctggaagaagcggcaagctgaagggtgctctgcacgacctatttgagaggggtaaagaggagctagagctcagcacagagggtgtggcccgagtgcgcactctggataagagagggtgagatgtgtgtcggggaagctgaaaaaggcttgtatggaaagaaaggagcagggagagagggagccggtgtcagagggttggcatccgggacctctttctcttggggaaacaggaagccaacgggaacctttcatgcaggagcagcgagaccgtaaatgtacattagaaagagccactggctgcagtgagtgcgtcgattagatctaggcagggcgaccggtcaggaggtggacgccatggtctagacgcaaggtgacggaagctgcgtttctctgggtgcccgccatctacagggcaggtccagatgcctcagtgtggcccgtgggagctccgcttcctctgggggcatcgcttgggttttgccctggggaactcccctccgccctcttgcttggaagcgtggttcctgatgctcagccaggcggggcccatcggatgggttctccctggacttggagccttgggagacaggggttggtgtctcttgatctcaacagcacctgccctgaagaggccaggcccactcaaagcccctgctccccgatccctgagggctggggcccagcctttcccagtctgcttcctcaggcctcctccctgcccctgctggccagcgttccctgcggctgtcaccccagcatccatctcatgcctctcccatcacacccccaactgctggactcctgcggtccctcccggaccccccgacaccaggcaggcagactaggccctggccaggctcctgaaggacccccttctacgcatcacggtcacctgagtgtgttgctgcccctccagcccacgcgctggggcgttccccatgggctgggggccctgtccctgtctccttggcaccccgctctgagccagcacgcagcaggccgcgtggagcgtgttgaatggctaaggacgccattcacggctcgctcctgttccgcaggttcagatttcataccatggacccgcgcccaccccggctgaagccctgctctacctcactggggtcggtaagtgatgcctagcagctcggagctcagccccctgccctccacacaccccacgcaggagagactacaccccgacgctacttagaccaagggagaaaagaaaaatt

SEQ ID NO: 57176 - DNA, 1009 bp, Bovine  19866880547603
  misc_feature (1)..(1): n is a, c, g, or t
ntatccgattttacaggtgaagaaactgaggtacaagagctaaagagacttggctaagatcacacagctggttagccagggagccaggacgttctggccaccgagtgccgtgcgctctggcccagcactgacacacggctgtgtgtgtgtttacaaggtcatccaggccagtctcattctgtgacctcataaggtcaccgcacggttatcactggaatggtcgtgttgccgagtgctctgatgaggggagcatgtgctttctcccccgtgctgtgtggacagagcagctatgcctgaggctgtgctttgtcccagggtgcacagaacggaaagtcaggtgggacacaagcagccactgcgccccctctgcaagctcacggggcctgaagttgcggccagaggctcctgtgaggggcaggtgtccttgcaggagctttgcctcacactcccgttggggtggctgggaactcgttctgaagccctggggtggggggcgcacgggtctggttggcatccaggttgtggcatggcctcccacccaaggaggatgcctgtggtcaggagcccctgcacttctgtctgaattgcagccagacttcttcttgggggacatggggagtcttacaccctgtgtctcctctgaaggggaggcaaaaaagccttcacgcaggtaagtctcctggggaaaggactgtccgtctggggccagactaagtgccccacccttgggctggtatcctcaccaaccctctcctcttattttctgggatttcagaaatctccctgagtgcagacatcagccgcactggcaaaatgaagcccacgggaagcctgaaggacaaggtatgcacagcttgaccttggcggggccctgaatggcctccggactctgctgggctcgcgtcacacgccccctggtggtgatggatgaacagcagtgtgcttcatgtaccgtgttaataggccaagaaacacaagttcagaaagaaaaagaaaatttaaacctcca

SEQ ID NO: 57177 - DNA, 2744 bp, Bovine  19866880557504
  misc_feature (1)..(1): n is a, c, g, or t
natgaccttggccgccaacctgggacgatgtttgcctcagagtctgcccaagttgggggtgagatgctaggtctctatgccagtgggccactctggggagggggccatatgtgggagaggtgactcagccgaggacatccctgagggcctgggagtcaaggactgtgagtgagtagccttcccaggagctggagccagccctccatttcttcctgaaggacgttctgggtgttgccttacacagtctgccaccgaatgtctcctgtaacctagggctgccctgaccttcctctaacctagtcctgcttctcctggctctggacttccaggccccactccctgtgtgcggcatcttttgtcttcagggtcctggttgctctccctcagacccaacccagcaatcagaggtggcttctaggtgcctgaagatttcttatccttatctctgggctttactctgactccagggcacccttttctagaggaagaacataagtccctttcttcatcagccagtccctggatttttgcacttatggaagggagccatgtcaccaatcatgcaaagcagccgataatgcaaaatcgtttacacctgtccttcagctgcattgcgtgattacaaggggatgggaaaagtgtgatggaattaagtgtgtgctctggattcagcctgcctgactgtgtatcttggctctaccacttactacacaaccttgggaaagattctcaaccctgctgtgcctcagtttcctaagctgtagcaaagaggtttgaggatggtacctatctcataaaactgttgtccatgctacataaaccattagatgccatgccttcagagcaatgcctgatacacagtaacagctcaagaaataagctttgatgtttgccctgatgtaaagtttgatacagagttttgctaaaatgtacttgttacttggtgtcatcctcacttaattgaggttggtctggaaaagtttctgtggcagaagaaattgtcctgaccttaaagaattgccatggatgtcctgccaggtagatcagctccagacaggactcccagtaggcagggcagctaagaagagaattcagcaccacggacagaccccatacctttccctcaatgctgttttcttcctccggaggacaagaaaacgtaccaactcagtcagctgccatttcccaggcttcttggctagctaagggcccaagatgcttttagtccagcgaatctgaggttgcctgtcttgattcccgcaggagcagtagacagagaactgaaagggcccgcgaggtgggggggttctgtggccacatgtgcttggcggtggggacactgagggtgggccttcttccctgctctgggatgccctttcttcatctgtaaagcagagtgtgactcctcagaatccggcaggccttggggcatggtgggcctctggggatggaggtcatggatccctggggccagcagagggcagcctctggcctgtgtccaccctcagggcaaggttttctaactggcacctcccgggacaccacagaggatctctgagagcaatggagtgagtggagtctttgcatcctgaacatccctgctccagacctcgttcctcccttactcacttctccaagccctgggccctctggctctcatcagagcaggtggggctgatgctacgccttggagatggaggtttgtcctgctgttctctctgaccttgagctactgcctgtttccgtggcacctcccttcttcccctagaggactatgctgcagggcttggggagcaaacacaaggcctttcctccttccaccacccctctagtctccgcttcagaatactctgagctggcacccagaataagcatggcagtggggtaggatggaaggtgatgctgtggcttggttctcatcctgtggttctagttctgtcctggaggagcttgtgcttgctgggagcaggagatacaattcttcgagtcacaggagatgaagaagagtggaagagagtcccaagacatgaggcgcctgggcagctgcatgattcctgttgagcacctgccctggaccaggcacacgttgaatgtacagcctgtgatgccagtactgacactgttactgtgagaaagccagtggagaggctgaagcttctactgaaggtcacgtagctaagaagtggcaaaaccaagcttcagtgtctggttgaccccgtaggtgacttagagtgatgtctaagtggggaggagccttgggcaggagtcagccaaacggggctccgatttcagttctgcccctgaactgcagttgtgtgaccttggacaagaaattctgtctccctggacctcagtctccccatttgagaatggaaggatgggactaggatgctctctaaggatcctccagctttaagtgtctatgaatagactctccctgggcctaatgctttttaaaaactactggcaagaactcacatatgcacaagcccagccttatgtataaatggagtaggcggcagcctgtatggtgtgaatgatggctgctgggaagggtccctgcttaaaatatctcagtcgctcatcccgctgccaaagagcctggagtctcatcactctgcagtcgtgccttccgcgagtccctatttcagaatgccaatatgtcgggaggcctaacagaattatgttctttctttctaggaggaagggaacttttgatgggtattgaaatttgtttgcatttc

SEQ ID NO: 57178 - DNA, 1580 bp, Bovine  19866880699143
  misc_feature (1)..(1): n is a, c, g, or t
nttcccctcgggggacgggttaccctccggggatgggttccccttgggggatgggttaccctccggggatgggttcccctctggaaatgggttaccctgagggtatgggttaccctccagggacaggttaccctctggggacaggttaccctcgggggatgggttaccctcgggagatgggttacttcgggggatgggttaccctcgggggatgggttacccctcagagatgggctagggtgctgaagattctccgtcacttctctcgtggagacgcttcctcacctttctctgaaatctgagtctgtctttctgtccgacagtggagcacgatggatgcgacactatgccggttctgggcctgatagtttcttctttcatgcttttgggagccctgagctcccgtgtggaaagtccagctcccctgatggagacacagctgggaagacccagagtcagagaggccctgagagagtcctgctgaccaactctacacacacaggtgagctgtcttgcaccctgttgccggatcaggtccccagatgacgacagatccagatgtgtcatgtcgagcagaagactcacggaactgagcccagtcagcccacagaatcatggcagatcatcacagaggatcttgttctaagacgctaaacgctggggcagttcgctttatgtgaccacatgcctcctccccttctggtaatagagcatccttgggagatgccctttcacctgctcaccgggggggtggtaccaaccctattaacaccttgttccttcagtcccaggaagggttgggacccaggcccagtcaagataatattaaaccacatggcagtagtgattggcttggcgatggtatgtgaccctagaagaaccagtcagggcccttcctggggttgatatgttgttgatgggcgagagaagctatgtctcctgcgtttgctgagctggggtgatgtgaacccagaagctgtctgtggtcctgttccccacctgcctccgcatgccagctggaagtaggtcgattccagctgtggtctgagaggactcgaaggtggtgcagtgactgctgggccagctctctccctggactttatcgtttcatgagttacatgttctttctcctttaaactggtttgaggaggtttccgtcactggaaccgatgggacgcatcacactgactctatttcttggctttaaatggcttacgcagcgttgttctatctcagaggctccatcctcacgggaaaggaaagaaaaggtgagcctgttgtgtccagggccctggtgctgggcgctcggctctattctggcgctgagcgctcaccgctgcctgcaggggaggtggcccctggccatttggcagggtgggggcgggtcacaggccgagtggcagacccccaaccatggcgtcgcgtggcagctctgctcaggggcagagcaaggcagagaccaggcggggaggaggcgggaggtgagggagtcccattaatttttccagccttaaatcaatttaatgggagcctccgatgactctgatttcatttttcattttcaccattacaattatcag

SEQ ID NO: 57179 - DNA, 1601 bp, Bovine  19866880817625
  misc_feature (1)..(1): n is a, c, g, or t
nttaaccggaggacctgagacagggccaggaaggcagcggggtacctcctggccccactcctgctcgcctttgctcagcccctgcccgggctctgcttcagtgtcctgcctttcccgccactccagcgcttggcctcttgcacgcctccacgcctgtttctgagtctgccctgtctttctctgactttgccaactcttctctctctctctctctctctctctctcacacacacacacacacacacacacacacacactgacccagatcccggcactgatcacccggaaggctctgtcctgggcttctaacctcggggaagagagccgggcgtgggggtgggggcgagtgtcaggtggccggggctgtgacgtgccctgaatggccaggctagtacctccacgtatgaattgtgttctctcagtttcttgtctgacagaatgtcctttattttctgctgttttttttctgtcatggagaaaaagaaaaagaagcaggtgaattcagagatccactttgctcttcccagaaggtccagtagggactcagttttcccatctataaaatgggggcagtgatgattcagaacacacaggtttgttatgagtatctgggaggtaaatgactttaataaagtagtttacacggggtaagttcttaagagcattactttcagtcccgtaaattctctcgtctccagagggatcctgtttcctgaggggcaacacaggcctgaccattgcctgacactccaggacttgtacagacactacgtgaaaaccctcagctgtagtgacttcaacctctgactccagcctcagtctgtgcacatcattgaaaaaaatatttcattctctgctccatctggattaaactttttttcaggtcctcttgctttctcgtgcctctgagccttggctgttccttctgcctggattatctggactatctttagtccccatgccactgccccgtttatctggccaactcctgctcacctctcatactcaggcctgatctttgcctcctccaggaagccttcctggggctcctcccagacacccctcaaagcccctgtgttgctgcctcctgaactcactctccccggactgtgagtcccgagggcagggacctccccctccctgttcacgaggcacccccagtgcccggcacagcgccgggtgcccggtggctgggcggaagatgccagcggcctgagtgattccatctggggatgggagaccacgtgcaggcagaggaagcttcccggggaaggaccaggcgcggccgacttactcttgacccctggaaacagcagggcctccccgtggccctccttcagctgctcctggaacagttggtagcaggccctggggctggccaggagaagccggaagccctgggggcagaaagcctgcggtcagaggttagtttggtccctggggctcccgggaggaaggctctgccaagggtgtggggagtggggggctttggacctaggctggctgcttcttccatgcccccttctgggtgagggagaaagatttgggaagataagggcagtgtcccccaccctccccggcagaggcagagctgagtctgg

SEQ ID NO: 57180 - DNA, 1547 bp, Bovine  19866880835789
  misc_feature (1)..(1): n is a, c, g, or t
ntatctacagcacaggataagaagttaatccacgtgcgacattttcccgtgaacagctcagcagactggtggcacggagtgagcgtctgacgggtgactgctgctgctatcaccggtgtcgttactatcaccaccgttgagctgcgtgctgggctcagtcgtgtctgacactttgtgaccccgattcgaggtgtccatatctattcagtgaattgagttgcagtccatgccaggaccccagagggccatttggagcatgtcctcagccacagagattaccctgagggtcagcagcactgacctctcttaaatccccctctgaaccctcattttgggctgaggagatgctctgactcatgattagagaatggagggtctcatgccttgagtcagatccaaggatgagactgggtttgcaggctgggctcctctcatagggctgccaagccctccccctgtccacgcgtggctggtgtgggttaatgagtctctctccctgtaataatctgatcaatggctcctccctacgctgctcctcgatggaacctctaggtcctttctttggctggttccagcctagtggagacctctgcatagaccattattgcttaattactggctaaatggtctcatttgttctccatttgtcagcggtgagtcccgccagggcagccaagagaattttgaaatttctcatcaagctctggctttaggaagtgaagacacctgggtctccttcctttctgctggtgtctggcaacactgggcacagacttgggggagcagctcctggagctggtgttggtgcctcttcccacactgtctccacagctttctttgctctccttgctttttgcttatccccccccaccccatttttgccttggcctctccactctttcagcccagcatggtagaatgaacttgaaccctgcaaccatgaaacctgagtttgaagtccactggccacctgtgtggctgaaagtccatatttccatatgcagaatgcacacttcacagaggcacaccgagcgtggctcgagagtgactttccaccgtcggctgccgttgtgtatgtcgcacacttacgagttttaattatgcttttgtagcatacatggtacatctcatacttctgtggccctttcatagggcctctcacaaagctgaggagtctggctcaggtccccctttcaagccggcattatcttttgctccttccccaccactcatcttctttctcctgcagtgttccacatggacgctacgggtccagagcgggaggcttttggatttcaataatgttgttaaaaaatcttctctgtgctcttttttctatgtgaaaaaatcaacttgctaataaatagttaatctgaagtgcaagtgagtacatggcctgggaaggggctggctggtcacccccattatgtaaagctgggcattaaagcctgtttacagttggtttccataggaggccgactccacgattaggcttggcatgcagaatgtgtgttaaggaagtgctcttgggaacagtgcccatggag

SEQ ID NO: 57181 - DNA, 1373 bp, Bovine  19866880856810
  misc_feature (1)..(1): n is a, c, g, or t
nccctgtgacgccgcctcctctctccctccagcgcggcccctgcgggggcccagaccttcggcctgaagcactcggagcgcgtgcgggtggaggtggtgcgcgacgggcaggccgaggaggtggccaccaacggcaagcagcgctggcccctgtcgcccagcaccacgctgcggctcaccatgagccaggcaagccccgaggccagcagcgacaaggtaccgtgggcggggcggtgctcctgcgcgggcctgggggccgggggccaggccggtatctggacgggccggatccgcgcgggcaggaaaagccgagcatggaccacacatgtcggtttcagttttctcacaaccacattaaaagagcaaaaagagagacctccccggtagtccagtggttgggactctacacggtctctgcagggctcatgggcgcgatccctggtcagggaactgttaataaggttcccctatactgggcgggatggctgataagtaagtaagtaaaagagcaaaaagaaatagatggacttaattttgatgattttttttacttaactccatatatccagatactgtcatttcaacgtgatatcaatataaaaaacaagaccaaggttttctccacgccgagtctaaatcttctgtgcatttcacacctgtagcccatctcagttcaaaccaaccactttttaagagctcagtaaatcagctcatggctacagccacagaaggatgaattcatggcaggttaatgtcacgggactcttagcacagactcttagactactggaagcgaccgccacgaacgtccttggtttcattgtgtatcagatgggatgctgggcgcccatgcccaagagatagagccgagaccagaccctttgttccctgggttctctaattattaacatgaacgtctcatgtgtcccgtgtcagagatggcactgggcgtcgtccagtgagaacagcctaagctccattgttgctgagtgggagctatatacacaccccagtagaagtgggggccggcagcaggacgcacaggggggcaagtagcagacaacaccctggatgccctctgagagaggggagccccctgtcttcttagatattctgagagaaacagcccaccaagccaggagcacttcctggaggagagggtccagctggttagagcggattggcttgacagactgtgaggtggtccctgcgggtctgcctgcctgtgacctgtcacctctgttctctccctccctgtgcccctcccccacccccatcaaggtcaccgtcagctactatgaggaggaggggatcacgcccgtcgaccaggctgggctcttcctcacggccatcggtgagtctgcgggctccag

SEQ ID NO: 57182 - DNA, 1375 bp, Bovine  19866880884653
  misc_feature (1)..(1): n is a, c, g, or t
naatttttcccccatctctttaaaaagaaaggaacaaaaggattattgtgcttttacaggcactgggactgagtggaagaggctgagggtcctatggagagtggggggcagcgctccgtgctgtctgtgtccagccctctggacatgggtgtccatcacccctggtggttgttttgggagaactttgagactacatccttaagaaaaagagctgctcaaactgtcctctcccttacaccaagggccataaattagtagctcaggaaagttatttccttctctacttgagcccctggaaccacctccagctgtggctacgcctttgacttcagcatgtgtgcatgctaagtcgcttcagtcgtgtctgactctatgcgaccccatgactgtcgcccaccaggctcctctgtgcttgggattttccaggcaagaatactggagtgggttgccatgccctcctccagggggtcttccccacccagggcacaaactggcatctcttgcatctcccgcaatggcactgcctgggaagtccaaacgcaggtgttgccttgaaggaacctagaaggcagcggggggacggctcagggcatcccagatcccttcgaaatgcctgtcctactgaacagggacagcagtgtcatgggaagaggtttcattctggtaagacagaccccatcgtcctcattcataatcaaaatgtgatccagcgtctcttagagaagagtctgtttgtgattgctttgatgacacgggaaataagagctagttcctttacgcacactttgcatttacactgcctgtgccagggtggtatctaggcttgggaagtccactctgccgtctacccacttctcttctgacctgctccaaggccaggctgctggcagtgggctgggctgggaggcagcggcgggagccctgggctctcaccctcgcagttccatcagcttgctagcagccgtggccaggtcgctgagcttcgctggccaacagaaggcagcactgtgcctggtcctgccccgtcccccctgggcagtggagcctagggagaagagtcccagtcccacccagatgtagcatttgtgattatgcttacacaatagatcctgcaccaccagaatgctcggccagtgtgaaattttggttaattgaatgttctgggacatggaaacagtcccagaaatcctttttgttccttttgtggctattgaaagccattcgctcatctatttagcaaatatttgtctcacgcttccactccatcgggctctgtcccaggtgctggggactccagcgtgagtgaggcagcagagtctctgctcccgaggactcacgtgccagggaggacatggggcaaatcccacacaaaaca

SEQ ID NO: 57183 - DNA, 1461 bp, Bovine  19866880901907
  misc_feature (1)..(1): n is a, c, g, or t
ntctacccgggccccctctgggtccagagagactccccctggcttcctgcaaactcctgctccaccctcaaaaccctgctcaggcattcccctgccttgggggctttccctgaccagtcgccctgatgagtcatccaagattcttcctcctctcgtctccctagtccatgaacagacctcgctggctttatttccaaaatctgttcccagcggactcctctctgggactgttcaggtgaagccacctggggttgacggcctcttgcctgtatgactgcaagaccctccaatcagcgtctcttctgttcttgtcccttcctaaggttggctctatttctcaaccagagggtctcttcaaaacctaagtcaaggacttccctgctggcccagtggttaaaagactccacgcttcccctgcaggggcacaatcagggaactaagaccccacgtgctgtgcagcacagccaaaaagaaagttttaaaaccctaagtcagagtattcaactcccctgattcatatctttccgtgtcaccttgcttgggattggtttctccccttccttaacttggcttaatatttccccaataaataaaactcggctcttagctctgacgactgttgggtctggtctggccacaccagctcttctgttccacacggggtggatgtcagctgtttctgtgcccgagggcctcctacttccagcccacccccaccgcaacctttgcacagccagcccctgcctcctcagcttgaggatcgtcgtgagcacccacagccccgaggctgatctaggaactcatccgatcctctcgctttcccgctctcacagcacttagagttctgctgaggtgagatcggggcagaggtcggtattctttcatctctgccacatagagcggggctcgtttgtgagcagagaaccgggcctcaaaaggctgggctcgacacttcgtgctcagccagggctgagctggaccctgtagctggagatgtcaggtcctcggaaacctggggcttagggctgtgtgtcctctggtcccgaacatgaacattccggaaggggaggaggctggaccctaagctttacccttagtggctagggcttgggcaggtcgtttcatctcggcccccgctgagcacagggccgtccctggcttagctccgccagggggctgagtgaagctggcggggcctgctgtgtgtcgctcctgggcccgcccccgcccctcgccacagggctgttacctggagccaccggcccaggcggttggggtcctcgtagacggacgccacctggctgttgctcctctcgctcagctccgtcaccgtgctcacgaagccctggacctgcagctctctgccacgggagacgcgccggtctggggaggccgccaaactctcccacctgccgtgacctctcagttccagaggaaaggggtgcccctgccctcgagggg

SEQ ID NO: 57184 - DNA, 1028 bp, Bovine  19866880992650
  misc_feature (1)..(1): n is a, c, g, or t
ngacgagagcgagaggctggactgatgcgaggaagggtcccgaggaaaggagagcaagtggcccctcgaagcgaaaggaggcaggaagcgtctccccagcttctccagaaagagccagccccgctgactccttgacttcagcccgatgaaactgatttcgggcttcagatctccagaactgtgggagaataaatacgtgttgtttttagttaacacgtttgtggacgttcattaccgcaacagacggaaagtgaggcagggaacaatgatacaacgcgtctgaaaatcataaccaccaggactcattcaacaccgcactcgtggccccagggttctgggactggaccatgagaatgaaaaaaaaaaaaaacaaaaacaggctaacaagatcttagaagattttatgggcttgtgccgaatcataggagttaggtaacgcccaaaccaagcctgagtcagaaagagagactttcacagagattgtgtgggcttcaaaattgcagacactttccaagttccttcataccgtctccatctcccccagtacaccactgataccacccacggccatagcacagactcagggagctggaaagggaagacacttcaacctctcttctgaggcatcttccctcacagataacattccaaatagttcaaaccagactcctctggctctttgtcaaaccagaaagatcctagttctagattaaatatgccaaaagccacagagggaatgccaggtctcaccaatttagatcatttcttctagaaggctatgaccaagcactttatttgactaacagaggaaatgaaatgtcactagctatatgatagctgtctcccagggtgtgctcaaactcacgtccatggagtcagtgatgccatccaaccatctcatcctctgtcgtccccttctctttctgccctcaacctttcccagtatcaggatctttttaatgagtcagctcttcacaacaggtggccaaagtattggagcttcagcatcagtccttccagtgaatatt

SEQ ID NO: 57185 - DNA, 1454 bp, Bovine  19866881049708
  misc_feature (1)..(1): n is a, c, g, or t
ncagcgctggtgacctgctctcgactcctcatatacactttcctggggaaatggcaaatagcaagaatgcgtaaattgagaaagattaatataattacctgagctatttcttgtcatcttttcatatcagcaataatcacaaacctttcctggggagaagcctggccatgatggactgtctccccgaggcaggcagctggcttcttctctgcaggaagcagagccttgcagacgccccgttctggaagccagccctgacagatggcttggctgtgtggtggagagggcatggggccttgagtcaccagatgtggattcgagtttgggctgtcaccactctgtgtgtgacttggaggtccccacctctctgagctcgagtcctgcccagtacgaatctagaggcactgatcacaagtccagacaccgtggtaagtgcattataaccttgatggcaaggaatctgggaaacccctcccctctcaacgatgttctgttattatccccactttacagatgagaaaactgaggctcagagaggtgacgtcactggcccagggtcgaacagcacagaagaagatcctagggctgtggccttagtaggtgctttgtcattcagtcgctcagctgtgtccgactctttgcgaccatgcagactgcagcatgccaggcttccctgtcttcactatctgccagagtttgctcaaactcacgtccattgagtcggtggtgccatccaaccatctcaccctctgtcgtccccttctcctgccttcaatctttcccagcatcagggtattttccaaggagttggatcttcgcatcaggtggccaaagtatgggagtttcagcttcagcatcagtccttccaatgaacacccaaggactgatttcctttaggatgggctggttggacctccttgcagtccaaggggctctcaagagtcttcccccgccaccacagttggaaagccttgatacccacaccctgccgcctggccccgccctgtccctgtgcccccagaggacagaggggtgagggcaggggcccagctggcagtgtggccgcaggacgtgtgcgggactttcgcttcagtttccgcttctagaacgtggggctaggaagggcaccgcctgcggcagctgatttgaggatgccaagttaactggtgcaaagcgctctgagcagcccctggcccgtggtgagcccgttagctgggctgtcatcctttcgcacaggggccctgcccagcacctgtatctgagacgctcctctttagagcgtttagcgcccaggcacgtcatgggccctttgcacccctcttagagacgcggagctcagagaacccagcagtgtgcgcagaaagtgctgtcggttctggtgtctcagttcacacagaccctggtacccgcaccaggcgttttgggaaaacactgtaagagcaaagtgtggtgaa

SEQ ID NO: 57186 - DNA, 1612 bp, Bovine  19866881073664
  misc_feature (1)..(1): n is a, c, g, or t
nccgctgccctgtgtctggcttcccagacctagaagacatgtctgtgatgattctgcggacacaaggccccaatgccctgtttgacgaccacaaactcgtcctccacacttccagcgctgacgccgagcgggcgcgggtgttccacgcctgcggtgagttgatgccctccttccctgcccggggggtgggggatgctcagtttccctacccaggctggggtgcaggctctgctctggatccagggccgccttgagggcccagaggaagaagcatcagatgctcgagtttcacgactggttgcctggtgtccctggcacagccgtgcccaagatggttttagcagatgaatgcatttttaaacatattttaagcacgtttaaaaattttgattatcaaaactttcgagcatacccagaagcataacactgtgaagaacccttatatgccaaccactcagattcaacaaggatcgctattttgcttctcttacttgatctgtcctttcttgtttgctgaagtgtttcaaagccagtcccagacaccctggctcctatgttcagtctgcatctcccgcccaccccgataaaccccaaaccattgctttacatagctacagtgtcattatcacgaatgcaagcaaggatatataatacttcaaaaaatacaaatatgtatttgggtttttctgtaagatgtaacttttggggcaacacaatacgagtagtaatatgctcattttagaaatacggaagtatgtaaagttaaaaatgagagttctctacccaactccaaaacctgagtcttaacacgtgtcctctgttggccatttcgtgtgtgttcttccggacatttttttatgtgcactgatcgtgcttggtgcgtgcgtccacattctgcggtccacattctgctgtccacatggtttctctcaccgagttatgcatccttcacgtctctctgtgtgtttgtttagctctgctttgccttcctccacagccgcgtcctatttcaaagcgtggaggtgctgtaactgatctggtcccgtgaacgtacggtttttgtggtgttttgattttgcagaaatcttggttcctggagggcagggaccgtgctcacagcggtgtcctgagccctgaaccacacctcctaggggcatcgtaggtgctcagtaaataatctgtgaacaccttccacttgtattttataggaaagacacttacctagacagggacttgctgcttaggggtaaacattgctttgctagatgccaccgaattgccctctgaaagatctgagcgccaccttagaaaggaacgccctccctgccccacccagacctgcccgcactcgggtgtgagcctctctgtcctctgcgagtgggaggtgggaagcgggggtggttgtgttggtttccatcgtgttggggaggctgcgtgatgcctcctgctcccgggcccctcgcgaggcccctctgcccccgccaggccccagggactcctgcgaggcgtaccggcacgtgctcggccagaacaaggtgtcctacgaggtgcaccgcttccacggcgatgaggagcgcttcttcgtggagggcctgtccttccccgacgccgg

SEQ ID NO: 57187 - DNA, 880 bp, Bovine  19866881120705
  misc_feature (1)..(1): n is a, c, g, or t
ntcagtcactgttgtgcaggagtgtggtctctttattcctagacaaaacagaatcaccaagactgctcccgccttgttcttctcaaaagaacagccaccaagttccagggaccccgggcggggcctctgctgccatctggcatggagacagaaacaccatttccacatccacaagctcgcgtcctcaaagagcggaacaaatcccacaggggtgttgattgaaaccatcatggatccgtggagacagcacgccggctggagatgggagtcagctgccgctgtctgtttccataaggtaataataacgcgtgcctctgccttatgaagtagaatttgttacagccgatgagccgtaaaaattgccgagtgggggagaaaaaagaaaggaaaaaaactataaataaatttgtaattttaacagggattaccatgtaattgagaggggaagactgctaatggcagaggcaaaggccaactcaggccccacagccttagccccacggcaaagcacggtgctgaagcagtttaggggcgatgctgggagggaaagtcaagagacacaaagccagggagcagacacaaggaaaagggccgagaatccgtttggtagctgcttactgagtgcctgccacacgtgcctggcacgaggcaggaggacacagagggggacgcccagtgcccgttagtgggcaccatggcgggtctcagacaaaagagccatgtggttggttttttgctcgaggactctcaccctggctctcatatgcaaaatggactggaattggcaagagtggggactgagagatgagttaggcaaccgctgccgtgacttaggtcagaatgagtggcggcctgaattaaagcggaacaagaggagaca

SEQ ID NO: 57188 - DNA, 1000 bp, Bovine  19866881156656
  misc_feature (1)..(1): n is a, c, g, or t
nccacagttcgaaagcatcaattcgtcagtcctcaaccttctttatggtccaactctcacatccatacatgactactggcaaaaacatagctttgactatacggacctttgtcagcgaagtgatgtttctgctttttaatatgctgtctaggttaccacatatcaaacaaaacaaaattaaaaagcaacccgcaacccaagtactgacgttattcttgccttttattccagcatctcccagagctccaatatgtacaaccttcatttatacacatataatatacaccatatatacgtatttatatatattcacacaccagcccacacgctctcatacactcacacgcacacacccctccaggagggtcgtgtggccgcccttgagccccgcttgggcccagacaagaggcgctgggcttgccaggcagtcgtgaggttttgtgtttttttttttttttttttgcttttaaaaagaaggtcatctcctccggaggtgtcctccatctccccaaacccaaaccactcccctaaacactgaaattgtttttttcttaaaaaggaagaggtttccctctgctccgctcaggtacatggaggagttccaggcccgttctcgtggccccgtgcaagccccttgagggcgaggccacccagtgctcctggggaccctggacccccgaaagggcccactgcaggccgagagtcgggcgggctgcagacaggcccgccgccacgtggcacgggcggggctacggcgaggcctgggcggggctacggcgaggcctgggcggggctacggcgaggcctgggcggggctacggcgaggcctgggcggggctacggcgaggcctgggcggggctacagcgtcaagggcgcctgccagatgaggagggtgctgtccgtctccccgcacggggccggcttcccggggctgccagcggcgctgccgaagttgcggtagccgcgccctccagagatgatggccacggagcagatctc

SEQ ID NO: 57189 - DNA, 1532 bp, Bovine  19866881177631
  misc_feature (1)..(1): n is a, c, g, or t
ntggacgctgtaggaagtaaagaggccagtggttcctgcctcgatgtccccgtctctggtctgggaaggcggcttctgacagagaggtggagaggatcccgtggggcgcccctgccctcctctgtgggaaagcaggactggggagagccgcacacctgggagcaaggtctggggctggcaccacgcagccagctgtctgtgggcaaacagctgtgctctctgagcctcagtttcttcatctctagaatgggcacagcagtggcatcgccaactattgtaagtgctactagagcacttacgcaaaagtgctctgcacacagtaggtgctcgtgaccgttagtgcacctcgctcccctgctctgcacacagtaggtgctcgtgaccattagtgggcctcgctccccttcttggagtccaggaagccctgtgagcagagccccagcttgcacgccaagagaaggcaggcaacggggagtggcaggctctgccccttgccctagcagagctctcgatcccagggccaccccaaaccctgtgcacagcgagctgcacgcgttggccctcaaggtcattcccttgtgtccattcctgagaggcacctggggcctcacttctcagagagtgcctgtggaccaggagccccagcaccccctgggatcctgtaagaaatgcgcatcagtgtctgccctttaacaaggtcccagggggttcacgtcccccagccatgtttgagaagtgctggatggatcctcgtccccatggtcccagctcacctttgctgctgtctcctgggcccagaggtcaatgacaggaaggaacggatgtggtcatttcagacccgcagaggagggaggagatgctctggaagggcgcatcacttgggatgcaggtacttcttctgggatggcagcctgcctgtgcccccacccccacttgcccggtccagggggccgcaggtataggggactgtgtcatcacccagcgagcagccctgggaggtcagactgcaggacagagcctttgccttcccaccagcctcctcccactcccctggccccgtgtctgagggggcgagcggcggaaactgacgcagctggggccagccagccggtaatgaggcagatccaccaagcagctgctgcagaaggcgcattaaagatgcttgatcccactttaataacctgccagcctgagcagccaaacgtggctcagaagttgtggaacaagagggtcatttcttattatttttaataaagagcttttcataactgacttcataggtgctattaacatgccgcatgtttaataagatgacatggtaacaagggggcttcctcgttcctcatgtgccgaagaggcaggagcatctgtgggcacgtccacagtcacatgccagcatgcaccacgcagctgggagtggtccacaggcctatacacagggctgcctgggcacctgtggacacacgcgtgagcgcatgcgtgctctcacaggtgtatgcatgccacacacgtgcaagtgcacgagcctgcag

SEQ ID NO: 57190 - DNA, 811 bp, Bovine  19866881220533
  misc_feature (1)..(1): n is a, c, g, or t
ntctatttttgaacacattaataaatctcagcacaagtacaactttatatcactgctgtaaatagaaactcaggatcatatgccatcaatataaataaataccatggaactaaatcactgttaattaaattctgcctgcagctttggcaaaggccatgagtatgaggctctcggtgaaaaagggaaaagttaaaaataaaaaggagaggtgcggaagagcagcatcaagagaccttctcctcggtgtcatcacaaggactggaacagaactggaaatggttaggttgctcctcccgtgacttgacgttattgagggcactgtcatctcgctttccacctgtggtcatgctgaaatcacactaaatctctcaaccagagagacacatcccacaccttggggagcccaacgtaagagcttacttttccccataccctctgttaatctctcctctaaagttttattatccatcccccggcatgtttatcagagtccttctgtataactcctccatttttgacactttaagctttggaatctccgatgaggtcaatggatgttcaaagacactccgcattcctttattaattaaccaacatccagaaaccagtgaaattcctatataaatactttattcaccaaataagggcagagacagctcacgtttactctcccatcttgtgaaaattcaagtttgttttttaaaaacatcattttaatgattaagttatgaacagttacttataaatagttacaacttgcctgtcatctgtgtcaacatttatgacttaatgacacggtttttatgctatt

SEQ ID NO: 57191 - DNA, 831 bp, Bovine  19866881390837
  misc_feature (1)..(1): n is a, c, g, or t
nctagcaccttcattcccggactctgctgagctgcctccttggtctgcctcccacagcttctctggtcctggatctgactcttggtcggggcccagggcagctcccagaaccccccaagacatcctttaccgctggtccgagggtaagcggcgagggtgccatcctgcaggccggccaacaggtggaaggggctgtgtcgcaggcagagcacgggctgcaggcctgggctccggcaggccgccaggcactgggtgcctgtatccacgctgctgtagagcaggatgctgcagggagaggcggtgactcactcagccccccgcccttctggcgagagggtccagcccccacctccaccagctcagcctgcctccccctgtgtgaccaggccatcgctcagacttctccatgggcagcctttagggggcagagccacggaaaacagggggctctggacacagcacagccagggggctgggagaacggttttcagggtcacatctgagggcaaatcctgctgactgtccccctccagctggctggcctggaccactgagcctcagtcctctctgaaaaatggggccgtgatgcttacctcacggccataccaaggaacaaatccccagcgtgtggactgcctggatgaagcttgaaaacgttagggggaacgagagaggccaggcacaaaaggccacacactgggtgggcctgtttggatcatgtgagcagaagagacaaatccagaccaatggatggggaatgtgaggtgatgcagaggttctgggggatgtgacgagaatgttataggaacaagtagtggtgaggatacgcat

SEQ ID NO: 57192 - DNA, 1189 bp, Bovine  19866881392698
  misc_feature (1)..(1): n is a, c, g, or t
ntcagggtgccctggccaggagcgcatctgatccttgtcagttatcacagtgaatatgtttgacctttaatgctcttgtaaagcagcaggtcggctttgcaatgccttctaaaggtgaggacgccaaaggggggaaggggcttgtccgtggctgacccagccgtggcctccccagcccttctgactcccagccttgggggtgagtggccctgtcacctggtgaggagctgcccgaggcttcgaggagccagctgtctcgccctcctggctcacggccccgtttctcggcctgcaggaggccggccgccgtgagcaatggggacgctgtggacgcagctttctccgaggtccagcgctccggctggaggcggaagagttcccgtcgcagtaagtccccctccctaccctgccccccaggtctcagccccaggaggctggtgccaggagagccccccttctctaggccaagggagctgattcgggctcatgctccctgaggggctgtcctcgctacatgggcttagtggcagctctgaggcagacgggccactgcccacccatgagacttgccccctttgccaccctggagccatggtcccggagtagatcacacatccagctgttcatctgtccccttccccctcaagctcctacaggtcgatctgggtggtgggtgttccccagtgcccaagatgagggggtccctctgacagcagtaccagacacatgggtgggctcttacggtgcagagagcaggtgccaggaggagggtgggagctgagagagcccacgaggaccgaggcagagtgcagagaagcaggcgtcagggccagagtgttcagattgagggcgaggggacccctggcaccggggaagcagtgagccttggtgtggtggaggggagggtctaggggtgagcagggcccggtgaggctgccatctccccaggtcctcccagggtgtgtgggggaggccttggaggccctgctttcccgaaggtgccagggagacagccatgcggccatgtctgcatttcagtcacatcactgatactctgggagaaggtagtgggctggaggctgtccaggggaggcaggtgacatctggagctagggacctggagagaggtgggcgggtctgagggccactttgggggcagaatctgtgttgatggggaggggcagtgagg

SEQ ID NO: 57193 - DNA, 1194 bp, Bovine  19866881493943
  misc_feature (1)..(1): n is a, c, g, or t
ncctagcggtcaagagcggggaccgtggaggcggcccctctggctctacacctcagtgccgctgctacctagctctgtggtctcgagtgcttagcctctctgagcctcagtaaggagggaataatcatagtactcgctcacaggagtccatgtggattaaatgagcaactgtgagaagctgcggggagggcctggaactcagggcgtggtcgctggagcggctcttgccgccctcctgtgcccagcaggcagcgtggggtctggcacatagtaggtgttcagaaaacatcaattactgaggagaggccccggcacccaagcagaagctgtgcgggtcctgaggatgcgcgccctccagagggcggtttgctctcccaggagctgactcgtctgttcacagcccctggggggagaccagggcccctcccagaacaggggtgatttgcatttcatctacatactcctccccaagcctccccctaactcccgctcgccagagcccccctcctgcgtccctttgcagcccctgaaggactggggccaggcaagactgcgcagtgggtcccgcaggggcaggcacccacggtggctgcactccgccctttgccacgtaccagtatcctcttataagggaaatccttcaggcctctgtttcggggggagtcgaagaccacggggaaggctttgtgcggggcctcagtgtagccaaactccatctcatcctgggaaggcgagagaaaaaggcctctgtgaccgcctcggtctcgcattgagaaggggctagcgccccaggcccggggtgggcagggcagcagaccttccccaagacctcgagcgggcaggaggtccctgggggacccagctgggggagggctctgcctgagccagaggccccggtggggagcaggacacaccgagcgatgccggccgtgggaggagagggctcccccaagccacgcgcccaccccgagtcctggtggccggcccagcttctctagggagacggaagctgggcgagagccgcagaggccgctccccgaagccagggtgggggacggggcttgggctgcccccccgcgcccagggctgctccttgcccacctggatccagcggtcatttcggttctcaacccgagggcagatcatcagcttgcagctggctttcagcgccagatcagacatgtcactcagaaa

SEQ ID NO: 57194 - DNA, 1414 bp, Bovine  19866881531935
  misc_feature (1)..(1): n is a, c, g, or t
ncagccagaaacctgggctcctgcctccccacgagaaggctgggttagaggaggctgtgtgtctgggagaagccatcagggcgctgccaacagaaggaatgattgtcacaggttcatttcccgaagtatcatcccctcttcttggagattgcagtttggtcattaataagggctgtgttccccagccttccatccccacctccagttttggagcttcctccctctgctgcaatttaaccaagtaatttattagctaatatgtgcccagaaggtatttatatcaaatgtgcatttggaaatccagctgcatctgaagcgtgggtaacaagctgctgacctgcctggagatcaggttgcatctgagacacctgatccggcagaactcacctttcctcgaccctgaatgtgaaggactgcagcctgctgtctccagactgggagcctcttggaggcaggggattgacagatgtgagtattgccattcccactcttaaaacctttcagagcttccctaccatctactcaggcttctccttccttctgtctacccatccatccatccatccatctatccttccatccatctttccatccatccatctgtccatcataatttgctcattgcttcatttaatgacagcttaacttattgggatctaatttcttatcctccaaagcacttacattttaatatatgcagtttctctctctaatacagtccatctatatctatcatctactgtcattattatttattgcctttcaataagccaatatttccccctgtcccactagaataaaagacccacagaaggagaatcttggttttaattactggtactctaagtgccacccagtaggcacttaataagcaattgttaagtgagtgaatgaacatagatataacgtgaagaagatacagatttacaggagtaagacaaaactggaaacttcaatgcatattaagaaatattgtctggactcctactcacgatattccttccatctgcctttagtgctccttgtgaggaaaagtttgaggtcacaggccagttgggaggaatccaggcaccttacctggcattctgagctctccagcatctgaaccctgccctcctgtcctgtctctgttcacagaccatccagttggttccagtctctcacgctttgcacacacactctgagctatctttccatacctcagggcctttgcacacactctttgccttacaggaatatcattcatcctcttgtccatttggaaaacattttgcatgctgcttgggactaggttccgattacacctccttttgaaagccttcctagtcttcattcttcccgttcggggcaaaattagactcatcctctgcctctatgactcccgctatggaagaatatttcgcatgatgaattt

SEQ ID NO: 57195 - DNA, 1014 bp, Bovine  19866881736190
  misc_feature (1)..(1): n is a, c, g, or t
ngacatactggaacccaaaacctgttggaataagggaggcgttcaagagaggagggaggaagaaaagagagaagggggaaaagaaaggagggaagaagagaaggcaggagggaaggtagggaggagggagagagcaaggaaggaagcaggctgtgggctctcaggaccagggagccttgcttctctgtgtgctgacccagccaggcctggccctgggatttgcacttgtaggccaaacactaagtatctgttgaatctaaatgaaggcacaatcaacctaaaacatcagggaatggaatcccaccgaaaacttcgggagaaggcctgatgatgttattccagtctcctccagctatgactaatggagttgttgttttaaatacagcttatcctggcaaccccataattcaaaatcatgtacattggtatgtttgtatgctataaaaataatcacattaggacctgcagaggtgggggggaaagctctgcactctcttcagaagaaaagacaggagaattagaagaaacagcagtaatattttcagttgatcagcgagtcctgctggtgtggttgaccagatggacagcccaggcactgttccataccaggaactgcaggggtcagaggtgccagggaaagggcagtggagggtggagggttggcttctccacagacacaggcagcagaaatgagactgcagcaaggctggtacctgctctggcctcagttttccaacaggaggaagtggaaccccgcgacagaagcaatgacatgccgtgggtttgaccatcagctctgggatcagacaagtctgagttcaacctgagttttgaggcttggcagcctgtgaccttgggcaagtgacttgacctctctgagcctcagtttctttctggaaccatgagggtggtgatagtatatctacccctacggggctgctgtgagaaataaggccgtgtgaagtccatcacttagaccctgacactggcaaatacttcaggaatagtatgtat

SEQ ID NO: 57196 - DNA, 806 bp, Bovine  19866880207325
  misc_feature (1)..(1): n is a, c, g, or t
nattttaaaagtacatagattaaaatcttagagcttaaaagtaagtgggtatcttaaaattcttctagtcaaggctatggtttttcctgtggtcatgtatggatgtgagagttggactgtgaagaaggcttagtactgaagaattgatgcctttgaactgtggtgttggagaagactcttgagagtcacttgaactgcaaggagatccaaccagtccattctgaaggagatcagccctgggatttctttggaaggaatgatgctaaagctgaaactccagtactttggccacctcatgcaaagagttgactcattggaaaagactctgatgctgggagggattgggggcaggaggagaaggggacaacagaggatgagatggctggatggcatcactgactcgatggacgtgagtctgggtgaactccgggagttggtgatggacagggaggcctggcgtgctgcgattcatggggtcgcaaggagtcagacacaactgagcgactgaactgaactgaatctaatttgcaggactcatatcttcagaatatgtgataaagaatcatctacctactgtttcgaacattccacggcagagagcttactagttcccccaaagaagcccattattttattgtgggaaagctttgatcgttgggagtacagtctaacttcttacagtttcactagtaggtcataatcattacctcaaagcaacagtaaagaagcctgtgctatatactacataaaggcccttcaaacatatttaaatgtgcagattcaggatatggttcaaaggaaataaa

SEQ ID NO: 57197 - DNA, 1081 bp, Bovine  19866880357873
  misc_feature (1)..(1): n is a, c, g, or t
nataaagtaagcagagctggcgaagttcacaagcatgaacagcatgctgcaatcacaatactgagcaggatgcaaaacacgcccaagacctgacgagtaaatcttttaatctctctgaactttagtttcatcaactttaaaataaaaatatcctaccttgcctgaagagttgcgaagatatataccctttataagggtataaagtacctggcatagaatgtggggtatagtaggaattcactgaatgggagaggtactgatggtggtgatgatgaagaagaagatgatggtaatacagtccctgtatatgcgctgatgggtagagttgttgagttaaaatatagagctgacctctttctctaatccttgaaagaagtctgaaaactttaaagaaggtcccttttgacctatgactggatctatggtttttaccaggaagcccacatcccatccctgagattctaatttattcctctgaagacggggccctggctcctgtctgtattaaatgttcctctggtgacgtgaatccactgtcagcgctcagatccgctgcttagcagaagaattaattcatagctccctgtgtgagactttgccattctttagttcttcgaggtaacagactggctgcattacttttatgttcttctctctgctgactgtcaccctagtcgcatctgagaccctgaaaccatctttgagatgtgtgtcttattggtgcgcttcctcgcctccttttctcttgtttctcttatgaatctctggctgttgattgcacaagatgtgcttttgttccgcatttgttgcttggcttcagtatgccggctcagtcttcttaaatgtcaccttctcaatattttcttcctatttctcccagtgtttttacttttccatttaaaacaaacacaaacatggcaactcctgcagcctctggcagctggcagtctgcgtgcctggctgctcccaccttggaggtacagattatcctggcagactgctgaaagctgttgcggcttaaggagcagcggtttttcttctctctctcttttaaaaaatttaaacatagttactttctctt

SEQ ID NO: 57198 - DNA, 1167 bp, Bovine  19866880417847
  misc_feature (1)..(1): n is a, c, g, or t
ngttcctgcagctggctgagggaacaggagccagcagaggagtatgttagaggcttagtggggggcagtgggccccgctaaaagttaatatattgagaacttagcttgagtctgtcccttcccaattccaaaagtaggaggagtgaagaatgggggtgggttagtgaggcctttagtggaacacctctttcaccacctcagccccatcattttagaaagtcaagaccagttattcttgccagtctcatctcagtgcttcctaaagaggctcttgagtgtttaagagatgaaaaaaatgcaattatgccaaacagtattgagcagaataatttatttcttttgtcgtcgttgttcctttttcttcttttgtttgggttttgttttgtttagaacattaataaatcccattctggaagaggtaggtcccagcacccagcccagatcttcttttctacaatagttatttaagcaaatgttttttattttcttccctttctctttctgaattaaaaataagaaactgtatattcacttgttcgttttgaaatgtgtttgatggtgggaagaaggtcaatgggaagctgtgaccaagtaatggtgaagactgttgggggcattgctggaagtggggaagggacgactcccagacacccatcccttatacatgaagcctcccagccaccagctgtgccctctgggagggtggccttcaccactgtctgctgtgtgggcccagtgcagcatgcagaccccacagtcacctggatggggctttccctgctctgtttctgggttctgtgcaacttcccatgatgccataggtgtgagttggcagggaattggcaaaatggttggagctggtgccacaggcgtccgaggtagctgtgctgtttccttaggctgtctggatctacttgactgtaactcccatcacgggctggaatgcccctgaacgcatagctctgctgtccggtggatgagatagctcacaccagctctcttcagagtctgtgctcagcttggcgtcctgctgtccagtttctcccagtgcccaagagtgagctgagtgacttttcaaatggaagatactttttgttggaggagggcatcactttttggaagtggtggagggtttgttctaaaactgtaggtctctgggctgtagtt

SEQ ID NO: 57199 - DNA, 662 bp, Bovine  19866880444382
  misc_feature (1)..(1): n is a, c, g, or t
ncagtttgttgatattcacaactgctctaaaaaataaagcctattttttaaaataaaaatctgatggaaataaagatatctcaaagtatgcctgattctcatcagaaactagacaacttgctttccccagtaagttcctatcctccaatttaggtacaatcctaaggagaaatgagcagtgaaaaaccttgattttggtagaatttaccctgaaatgagtaagtaaatttagaatagtgtgagttcattccaaaataggaaaattaaaatttctacttttgggcaaaatatgattatgacagaataaattaagttatgcaaatctgtgcattgaaaaaatttaaacctgttaacagtcaatctgaaaaataaaaaaaggcgaccaaccttaagttgaagttgcccattttggggaattctttcaaatatatagtaaatcttctccctgggtgagtcttcatctatggctgagagaactgcactagaaataatacgagtttcgcccatatttattgtaatttcagccttcctgtaaaaaagaagatatctgggttgataccgaaacagcagacattgctttaacaggggacactcataatgactattacagtgttcacccttcaaaaattagggaatggttttcagtctccaaagtactaaaa

SEQ ID NO: 57200 - DNA, 1588 bp, Bovine  19866880541333
  misc_feature (1)..(1): n is a, c, g, or t
nacactgggttttgaggatctctgatgaagagaaagagggaaagtagttaacattttcctagtgttatttctgaaggcaattttatcaaaggaaagcagaggactaagaagcaaagtttcaagctttaagcagcgctgaatatggtgacatcacttttccagatcagaaacctgtaaagcatttggatctcctgctcaggtctgtaaaatagtcctgaagaggttaatatctccagcaagattcccaggccataaactccaaccagcccccggaaatgctctttttaagcttcgtaattcaaaccacacaacaagactgcacacaaccattgaaaaaaaggagaaacaaaacttaaatgccttgaaaattatttctgggatccagatgacaactaaaagaaatcatttactacagcacaaaagtctctaggccaaatccagataaagagaagaaagagattaaaaatcagtaagaaacttcagaacaatatgatttctttgcctctccaacactggctttcaactccataaaaaaagaaaccatactttaaatatatatatatatatatataactaaactaaagcaaagctatccaaaaatcatctcatccaaacttttgtatctttataccatgaagatattatctgttttgttaatttttgcattttttctctttgccattttgtttagctgaaaagaaatattctgatttggggggcggaggaaggggacaattcagaatgtaaaaatgttttttcactggtgaatgctattgggggatggattgagaagagttataaatttgtattatgtaataaagagcctcccattggggacatagggctctttaacactgcaatttgccaccttgtgagcttatatgataacttttgcaagcagacttgatctacttcttgtatcattactcggagttaatgctaccacacaaataacctctggggcattctagcagaacgtttacagtcaagaggagaggaaatacataaagcagatacttacaggtagtggttttccgtgccaagtcaaaagctagaaacccttggcgcaggcaggcaggataagagtcactgacccggtaatctctgatttaaagggctttgagaggaagggggaggaaaaatagcccagcgaggggaagagctgaaattccagtctttcaggtcagctgagttttagctctctttgtagtaaaaatccattaacccaccccataagaaaatatagaattgaagttcacatacacactccacagtctttgctggtcttctccgaggctgcagtcgctgctgaagctttgaaaacttcccgattgccaagcccaggactcccagggaaaagggcataatgagggatgcctgcaactgtttgcagggagcccgacctccctggcagagagccacagctctccagtcccttctgccggctggatccgcagggacaaaactgagcttttgttaaaggtcggtggcgtctcttcctagtctctcctcagctccctttctcactattagttctctactaactgctccgccactggctgagcccaagctgcctctcccgctgcag

SEQ ID NO: 57201 - DNA, 1304 bp, Bovine  19866880624143
  misc_feature (1)..(1): n is a, c, g, or t
ntatagttggtaatcaacacaaataagtgtttaaaaatcatttctacaaacacatgatgcctttaaaaagatgattcatataaggttcttttcatggacaatatgaaaggtgagacccactttcttttcctttttcacttgagtatagtgtacgtataaaggaaaaagctacactctacccttctttattttaccataatatagaatacgactgacaggagcaactcagaatttatttgcaaacactgctctctctcctctataatcttcatgagattcttcagttctctcaaaactaggtttgcatcttctcttttctcttttcttattgacttaagcttatttcccatgataaaaaaaaaaaaaacctcccctagttgtaaagagatttataaaagctacggatatttctttttccagttcacttttcccttggttctctggtacccagcaccacattcagaaaattggattgggagtttgttttgttttttttttaatctaagaaaccattgatccatgttaagaagattaagccacatatatataaacttctttagcccaggcacataaaaaaaatcaccttttcatgaaatgtaactgttaaagcttcattaaaatttaaatcatttattagggtaaatgtctattatcttagttaatttactttgctattactgacattaaataatgtgctctgttaaattaaaatttcaacaattttgctctttactattatttgattttatattaatccttttttaaaaataacactgattcagttcagttcagttcagtcactcagtcatgtccaactctttgcaactccatggactgcagcacaccaggcttccctgtccattgccaactcccagagcttgctcaaactcatgcccattgagtcattgatgccatccaaccatctcatcctctgccgtccccttctcctctcgccttcaatctttcccagcatcagggtcttcttcaatgagtcggttcttcgcatcaggtggccaaagtactggagtttcagcttcagcatcagtccttccaataaatattcaggactgatttcctttaggattgactggtttgatctccttgcagtccaagggactctcaagagtcttctccaacaccacagttcaaaagcatcaattcttggcgctcagatttttttagaatccaactctcacatccatacgtgattaccggaaaaaccacagctttgactagatggacctttgttggcaaagtaacatctctgctttttaatatgctgtctagggttggtcatagctttt

SEQ ID NO: 57202 - DNA, 664 bp, Bovine  19866880629181
  misc_feature (1)..(1): n is a, c, g, or t
nactaacttatttaaataggaacttttaatgaactaggagggtactcttactttataaaatagtttgattttaccttattgtgctgattaatgagctcatgataatagcaatgccttggaaattaaaacaaattattgcgacagattttgaaatggtttaatcataagaaagatttactttctcttttttcgctttgtccaggaatgaggttggtgtatgtgcatgatgattcagagagtcttgctgatgactttacaatccaggtgtcagatgggaaacataagatacttaaaaccatttttgtagaggtcaccccagttaatgatgagaaaccaatgctgagcaagtaagttacctgaaaagagtccatttgagattctataggaagttctaaggtctagaatactagatgcaagtgtaatgtatttcctccagagagaagtctttaataactcctgcctgttgcaactttcccacggacttaagcacctaaaaccttccgtgcaaatgttagttaacataactcctccttaaaatttctcaaattagcctttaattattgggttttcctctaaaagttctatttagttgtcagtaattcacaatactatacatacaatacagaagaacagtgtactaaaatttaagcacatgcacggtaca

SEQ ID NO: 57203 - DNA, 1013 bp, Bovine  19866880720851
  misc_feature (1)..(1): n is a, c, g, or t
nttttcactttcatgcattggagaaggcaatggcaacccactccagtgttcttgcctggagaatcccagggacaagggagcctgatggcctgcggtctatggggtcgcacagagtcggacacgactgaagcaagttagcagcagcagcagcagcagcagcagcagcaaagatgtgactgtagcccaccagcctcctctgtctgtgggatttcccagacaagagcactggaatgagttaccatttccttctccaggggaatcttcccaacccagggactgaacctgcatctcctgcttgtcaggcagattcttcaccactgagccacctgggaagaccaaagatatgagaatacttgtttccaatgctctttgccaactctggtcattatttatcttttatttttccagtatgatggctgaaaaatgataatctaacttttaatttatattttccaataaaaaagccttcattagtcactcatatatctttttctctgatttcctatttatatctttaacgattttcccactgatttgtcttttttagtaaaattgttgtatgataagtgttaattctttgtcggttatgtatatagcaatatcttctcccagtctgtccattgccttaaacttggtttaaggtatatcttaccctctggaagttctaaatttaagtcttttcttaaaggacttctgtattttatgtcttacttaaggaaggaactttgctactcccacattataaagttccatggccctctcacaaagttaaataaggagacagaatttaactgcattgttggcatgtaaggaaaggagcgtgtcatattgagtggtttaatgagtcatgattttgttctttttgtacaaagtgttttatgtatttttccattaggttattatctccttgtctaatatctggatgatcagctttatgcaattgacttataggcacaagagatatttcgaaaatgcatttcagttcaagaagaatggaaacagtttcaccatct

SEQ ID NO: 57204 - DNA, 1255 bp, Bovine  19866880740914
  misc_feature (1)..(1): n is a, c, g, or t
naactgctctctagaaatttaacttctccttcattatatcatcatcttgtcaacagccaatataaaatacattcacttaaatataaagcaaaaatttgtaaggtatctaaacatgaagaattacagataagtgaaaggactatacttgtgtacttttttgttcagtcactcagtcatgtctgactctttgtgagccacagactgcagtatgccaggcttccctgtccttcactatctcccagagtttactcaaacgcatgcccattgagtcaatgatgccactcaaccacctcatcctctgtcaccctttctcctcctgtcctcaatttttcctggcatcagggtcttttccaataagctggctctttgaatcacttgtctaaagttttggagcttcagtccttccaaagaacattcagggttgattttctttaggactgactggtttgatctccttgctgtccaagggactctcaagagtcttctccagccctacagttcaaaagtgtcaatcttcagcactcagccttctttatggtctgactctctcatccataaatgactactggaaaaaccatagctttgactatatggacctttgttggcaaagtccatttagaaaattattaaaaatagaataaaaatagagactctttggacaccctcaaagcttcaaattctccaaaagcagagacctgggattatcaaaagtatccacagagtagctaagaaaaatctcactgtaaaactagcctaaaacagttttatatttacaacattaatcagtttaaaaataagacattggggcaagtaagcattttacaagaaaaatatcaattctgagttatccaaaaacaaatcctaaaggttggcattagacatttcctcaattgagtcaaaattgacttatcaagaatcttacccacaaaaatcactgttacctagcacttcttcatacctagaggcaattaaaatgtttttagtgatgaccacagacttttatagcatcctaaagtgacttctaaatgatttttttaattctaagtatatttagaactttaaccctgttctaattcttttctaataggctatctacaaacacatattaaaaatgattatataaaatatgattatactttatgagtcttctgcctcgaaaacaattttcagcacaaaaaacaagctaaaaatattacttaaaatataatctcactttcaatttttttcctttagccttatataaaataagaccaca

SEQ ID NO: 57205 - DNA, 773 bp, Bovine  19866880822695
  misc_feature (1)..(1): n is a, c, g, or t
ntgatttcaagactgactttataactacatgtaatccagacagcgtatgtttggtacaggaataaacaaatagatcaatggaacagaatgaaagtaaaagtgaagtcgctcagttatatccaactgttctgaccctatgaactacatgtagcctgccaggcccctccatccaatggaattctccaggcaagaatactggagtgggttgtcatttccttctccaggggatctttgcgacccagggatcgaactcggtctgccacactgcaggcagactctttaccatctgagccaccaaggcatcagaaatctctatttctgagagttcagaaatagacccacacaagtatggcaaaccaattttgaccaagcagtggagaaaagatagtcttttaacaaatggtgctcaccagactagttcagactttgtatgtgatgcccaaggatcaactcaatacaaattacagatctgtcacttgagaaggtcactcaagtaactcatcaaaatgtctatgtgattatttgaatgcttaatttttaataaaatgtagacacagcctgagaatagcagcaaggatttattctgtgggtaacagcttgattgtcttagattgtgggcaccatagagaatcgaagtgaagagaaatcactgatttaaactgaggtgcagctgtggccttatttcatttcagagagtaatgaagcagaaatgcagtaagagctcacacatttgggtggcatgggagcgaaagtgttttggttatgtaaaaatc

SEQ ID NO: 57206 - DNA, 1671 bp, Bovine  19866880828731
  misc_feature (1)..(1): n is a, c, g, or t
naatattacatgagggcctttccccaaatcaaaggatgcagcatcctactggatactttctactcttttctcaatgtttcattttgggtatctgggttttcttctgtaaacagccatttgcattcttttgattttgcagaagggcctacactttaaaatgcatcttagtaggtatctggtcattcatactccacattatttgaatgatttggtatataaaatacataacagagaagaaaagcatacatttgcttaacaacaatagcaatggcagcacagcaatcatcagccagctatacgagacacagactgaggtcattcaggaacttgaggatgggatgaaatgccttagaaagtccccagctcttctattcacagcctgtaaagaccagaaacacaacttacctttgtaaatatgagtgccaggtaaggtctactagaatgtctcgtagttctttgaaatcatgttttcagggctcttaataagtaagtgtctgaactacaacccagaacaaagaagcacaacctcagtggctgttccaagagacagcgcagaagccaagcctgagggcaatcgcctgctctaacagtgaactacctctgtcattctgaagctaagtgtaagacaaagatgggaaagaggcagccttagcctaattgccaggtcctctccaaggaaggggctactgtcagaagagctaaagtggctggagaatcggggattgcttgcaactttcatgggagaaccaccaaaaggctgtagcttgaggacagttggtagctagagggctgctagggttttctctcatctgggagagaaatcactgaaattggaacaggagacatcttgctttgaactaagctttacaaacccttccttcagagggcaaaagtttactcaagtcagccagaaaccaattttatgacgaaacaagtgagaaaggaaaaggtgacatcaaatcagtcatgcttctgaagatttgggaagacttccaggaatcacttttaggggaatgaaaattgaggatcaagtgttgatgggaaaagtaccataggggatatggaaaaagttcatctggaaggaaagatgaaatagttgctgagtttgagttttcctttggcttgaacatttaataagagccttgaaaacagattctaagatagaatcttagaataagattagaataagaaaatagaaaaggaaacaatagaaaatgtatagaattcaagatgcggaaatgtgatagccactacactgaaccacactggggccagtactccacacacagattgctgaatatctaagggacagcttctagtcctgaaggcaagtgaaccaagatgtctacaagaacatcacatcagtaacgatctttattctacagatgggctgaacctctgcaagtttccaaacataagactcctttccaagagccacggtttcattgacagtgaacatcttacagctatttttaaaagaagcattcatctttctgatagctagtcagtaagttacctttcaaggccaatttggccctgggaagaacacctggttgagaaacagtggaagaggaatgtgtcctgtttttactggagaagagttatacataagtctctcacaaggactaaaaaagtcaaatgcctcaaggaccagaaatgtcatgtaatata

SEQ ID NO: 57207 - DNA, 2537 bp, Bovine  19866881086744
  misc_feature (1)..(1): n is a, c, g, or t
ntatgttatcttttacggaaaagatctaagacaagaggaaagaaaaaaagctggctccaggtcataccaaaaagacaatctaaagctacaaataaagaaaggctgtcacagatgaaaatggcaacgaataagccatttcatcctttgcttttatgtgtaacttaaaagtttcaacaatagacgcagccatgcaaactctagttcattgatcggtcgtttgaagtcctccttggaaggcacaggctgtaagaaagcttctggacagtccggcgtgccctcttggcggccagtcgtgtaaaagagctggagcttaggttttgttttgttaagggctacatttaccacacagtattagttgccagaagtttctcgacattgaaaagatgggcaggaatcttagcccgccaactccaagatcttccactattgcatcatttgaaatgaagcctcctcaggcaacgacttgtaaaattcaagtcaggtaaaatggcagcagctgctgccggccggcagcttcaacttcaagagcgaataagagagcgtgtctctgcggagctgccaactgctcacagcaagtcaataaatctacaggtcctgcgcgcgcgcccgagggtgctcagaccccggcgcgccagccacaggaggaagtggctaattacttaaagacagtacagagaccgcagttgaaggtcggagtcggttctccccgcgccttccctccgtctaccacccactctggaaatctgatggtgaaagcaccaatttctaggctgctgctccaggcccctagccctccgacccaaggacagctctgccttgcccgctggtgcagacaaccggagggctccttcttcctcctgctggccccctcctctcatcgactgcaagcccttcgattctgccaccgaaaacttccatagaaggtgagattcccagatcaggagacggttccacaaactccaaagcgctagtgtcggaacttcagggtcagaccggtaatgcctaggcgtccctagtaaagctcagaactgctctatactgcgggtcctgcgttccgcgcgctcgcacccatccactagccgcccggacgcggtgccctcgcttcccacgatcctaggcgtgatgcttggaacctcagcagcgcctccaatccgagcgccgcagagaccctcctcgctccagcagggacggacttcccaaggtcgggtgtccccactcgcaacccccgtctcctccggtcgggagactgtaggttccagacgggcaaccaagggggcggggccttggccgtccccgccgagctcgctcaaccctgcagagctcgctcacccctcccgggctccaggggtagtgcccacactccccaccggccagtacctcgtccacttccaactctgctccgttgccgacgagcgccatgttcctcctccggctgccgccgcccaaaaaccaaacagggtgctcggaaccaactcagtttctcagcccggggctcagcccagcgccagcaagggaggaagagggcggcccagggcccccgccgggtcccgggcggggccagcgcgctgctgagcaagtgctttccccgcccccggcgcctgcacatccgccgagcatccatttctcaagccggcgccgggtggccccctcgacataagctccgccccttgcaggcctcgccccaccctctacgaggctctgactagagaagccaatcagattcttgcaacgcgtctccacctccaggcagcatccacttcggatccacttgggcggggtcattccatgggcggagtcactttgtgggcggagtcactcgggaacctcgcaggtctctcgcaccctgtggaaaggtattgaatacctaggagtattctagcgctctgtgcggaggctattgctcgccaccggccaagagagcacaaacttagcgtggccaaaatgaaagccacggtatccccgaggcccatttgaagtgtccacctggtccctgagccaatgccaagtcccttcccccgccaagtgggcactgcgtctcgcaaatggcgaggcaacctcgcgtcaaggtcaccagtcacccagaggtttttgtcattccacctacccagacactgagggacatcgtcttctcatacagggatgatatgtttgcttctgtgtatgtctgataaattaaaaatcatgggacagatacttatgcaacttagagttctcttcttccaatatctgtcacaatgaccccttttgtaatcccaaatatatgtgcataagtcgtgtttaaactatatacccatgagggtagggatgctgtgtcttcttgaaagttgtattcccagcacctagaacagtgccttgcagtgggtgctccaaaaatattcactggcttcctttagaaattgattcctgtgtctaacacaactggaaaattatatgctgtattttaggggtattgggggggcattagtcagctttgttttacatacaataaaattcaccaattttaagcttctaacttgataaatgtttacaaaacacca

SEQ ID NO: 57208 - DNA, 661 bp, Bovine  19866881099278
  misc_feature (1)..(1): n is a, c, g, or t
nctttctttagcttttgctcagggtcactttctccaggaagccctccctgaattcgcctgcccgattccataggcgctaataatgggcgtgagccactgtggctccatggtaaagaatccgcctgccagtgcaggagacatgggtttgatccctgggttgggaagagcccctggaggaggaattcttgcctgggaaatcccatggacatacagtccatggtgtcacatgagtcagacaggactaaacaacaacaagaacaaactaggtaggtctttttttgtgttctctgttgtccctcattccagctagacaaactcatttttccaaaataccttcattcagttgctatgtattccccacactgtgctagacaggaagagttcaagagtaaacagacagacatggagtgatagtccagtgcagggattgttgattcacaaaaacgggcaggggccaagcccagcctctgcctgtttttgtaaataaagttttattggtgcacagccacacccatttgtttacatattgtatgagactgtgggtttgagtgagaacggcagagttgagttgttgtaacagagaccatatggccagcaaagcctgaaatatttgctctctggccctttcagaaaaatgtgctgaccctgctggggaatacaa

SEQ ID NO: 57209 - DNA, 946 bp, Bovine  19866881154186
  misc_feature (1)..(1): n is a, c, g, or t
nttttatttgcctaaatggccatatttgaacaattttgcttggtggaaatgacatggagtttcagttttgtgtgtatatgaagcctctagtagaagccgttaattagcattggtgaattttaacagtgaaattatgccctcttgtaattatgtctctagcccctcaaatgaagagagtttccaaacactgcactctaactccatttttaaccagtggtgaagtgacccttaaccacaaaaacactgattttagccatagagatcagagaaggggcatgacagagttagtattgactgttggtttggtttaatcactaagtcgtgtctgactcttacaaccccatggactgtaccctggccaggctcctctgtgcatggggttctccaggcaagaatactggagtgggttgccatttccttctccaggcatcttcctgacccagggattaaacctgggcctcctgcactgcaggcagttcaccagctgagctcccaggaagctcccagtactgactgttatatgtaggtttgtccacacacataaacatgttcagtgagcttggattaaatgcccacagggtgccagtgcttggcactgggtgtgcaggtttcaaaatggtgatctctgccctgcagactttagggtttagaattctgtttctggtgaccctttgttgtgattacagctgaaatggatatgaaatgaaaatgtgcttgatttattacttttttctttctacttctcatctcttctacgtacttcctgtgcagatacaggaagaaatgcacagttgtagagtctttctcaagtcttctttcaagaggatctttggaacagctgactgaaggtaaggggcatttaaagattgggtattttcctttctttgaaaaattaaagcatggttatgctcataaaatccaacattgaagtgaataagataagtaa

SEQ ID NO: 57210 - DNA, 751 bp, Bovine  19866881178103
  misc_feature (1)..(1): n is a, c, g, or t
ntagaattaggagacttaaatgagatgatgcttaaaaagcttttaatatggtatctgggacagaataattgtttagctgctgctgctgctgcatcatttcagtcgtgtctgactgcgaccccatagacgtcagcccaccaggctatgagtaaaagaaaacatgtgggtttagttggattcttgccttttgttagggtagcttttattaaacttttttttttggcttttatatttatcttaaagctttatccccagaagaagattcactgtatcacaatggcaaagtgatgacttcttcttttgcatcactttagagctttatctggacttctcttgtggctcagtcagtaaagaatctttctgctttagagaccagggttcgacccctgggttgggaagatcccctggagaagaaaatggcagccctttccagtatttttgcctggagaattgcatggacagaggagccttgtgggctatagtccatggggttgcacagagtcagacacaacttggtgactaaatcaccaccacagagctctatctagtggcaaaagagcgagatttgaggtgtttgtgaaggagagcttgtatcattatgagtgtttaccacttccccttctatttcatcaagaattgcctcatttgcagccttcatcagaaatgccataatttggagctctagtttctgaaaatgagaagagaggttgattgcttatgaatctcagagaatagttgctagagcttctaa

SEQ ID NO: 57211 - DNA, 2149 bp, Bovine  19866881241045
  misc_feature (1)..(1): n is a, c, g, or t
ntgttatttttgttttatttaaggtggtgacaaagcccctttcatggggcaggcttggttgtcccagtggataaaaatgatgttggatacagagagctccctgaaacggatggtagggtatttatgtggccatgagcatgtgttaatgtgtggggggagtttccttgtgttgaataggtggatacagttccccacccacctgcagtgacgaagggctcaggctctggggtcagggaggcttgaactgaagctgggtttgcagctgtgtggccttaaccagttgtgtaactttattaaacgacatcttccatctgtcacatggtgagtggcggtgagtaccgtccataggggtgtctgggagtaacccgatacataaggtgcttattattaatgcactgcttgcctaacagcacttggaacagtgtttttacaagtttaaacagtacgagcctatggtctaggtgactttttctactgtttcacaacctttgacattacggtcacttacactatagtagttactgaaacagcatgtgtttgtggacagttttccatctgaatgtaggtttttttagcttttagaagcccatcctgagttacttcttctgtaagtataagcactctttgcaaatggacttttcatacacaaaatctaactgttgctttgttgaaaaggatacacaaaatctgatgctttgttgaaaaggaggataaaatctctcctgagcgctctgcctgtcccctgcccttcccctttccttttctcctgggaacacgccttcatctggctcccttgggaggggaggagtggggcgtgcaaacaagagggcatcgggatcagaaatgttaaagcactgttttttctaatgtggatacatgttaagcagttttctctattttacctcaaattgcatttgtgctgtggccccacacccccatgttggtaaaggaattggtaaaggtttaattccacagtgatttgtctctcgtatttttctgtactgctttttaaaagtaagttagacaaaggcaaaaagagcaaactttactattagggtttttttttttttttaacccagcttctggtgtggatgagcctagagtggggctctgtgtatgctcggtctccatactgtttttgatttttttcaaccatttaaaaatgaaaacacattcttatcttgaggacagttaaaaacaggtgggccaggcttgtgcaccctggactagcccagggaaaatctctggaagctggtgtgactcctggttgtagttagactcatggagagaccactttgctggaacaagaaatggtttttgttaagattcaagcataaaaatggctaaagtaaaatggctgatgtgttacagcaccaaggcaggaggccccagggacagtgtcacggggaggcgtgggtgctcacaggtaacgctgcggccctgttctctcagccagcctcaggagaatctgcgggacaattgtggaggccccgagcgacgccgacagactgcaggcctttgcccccgtccaggagatgatgacctacgtgcagtttgctaacgatgagtgcgactatgggatggggctggagctgggactggacctcttctgccatggctcccacgtgagtgagcaccccctccacacacacacacacacacacacacgtgcgcgtggggtatggactcagctggaatttcaaaatgaactttttgaaattattttaagcagattcttgaaagattcttgagttctaagaatatttcttatttgaggttcatcttatgtttctggccaaggtgaacgaccaagacttttttgccttcaggtatatgttaacatggggcttcccaagtggctcagcggtaaagaaacccgcctgccaatgcaggagatgcaggtttgatccctgggtgggggaagatcccctggaggaggaaatggcaacccactccagtattcttgcttggagaatcccatgaacagaggagcctggcgggctgcattcctctaaagagttgaacatggcttagaaactcaacaacaaatgttcaagtgatctattagctacgtatacagctttcggtgtgacacatacaccttcctgggctccatctcattctccatagggggatctgttctgtgtta

SEQ ID NO: 57212 - DNA, 762 bp, Bovine  19866881285922
  misc_feature (1)..(1): n is a, c, g, or t
nccttgattaatgaactggcagggtaagcctcactcagatggaagtggtggaagcacctgcaatatagatttcagaatgtgttcatttgaagtattggggaaaaaaatccaaggaccatgaaattactgttgactgaaatatgaagtctccagaataaccaaatttataccacataataccttgaggatttatttcaaaatgtactgagatgcaaaaaatttaacttttcctctaagaaacattcatttatcaatcttcctggaactattgtttttctttactagatagaatccttcaaacactttgatagaagaaatgtacttcatcagtcgtgacactctgttttctattgagtactatgcacaaatcctggaaataaatagataaaaacatcccaagtggatacttgtagggccagttagagtttcctggagcacacataactgtgagattttcccttcctacagtcctttgtgtgccattttcctggcctttgaaccaaaacacagtccttgccatgccttgaacgttgcgggggccctctcctccagttggtgaaggtcacaggttcaccgccaatccactcccagtggccagcacgcacttggtcattcaaacctgacatgaaccaaagaagggtgccaaatgatttttattacttttacaactggatgtcatatcaacccactgttctaagctcagtaatcacatgcaattgtgagcctacattctaaagcgtgggactgggacctgggaatcct

SEQ ID NO: 57213 - DNA, 756 bp, Bovine  19866881296475
  misc_feature (1)..(1): n is a, c, g, or t
nacaatatattgaaatgcaaagcataatacttggtgcatgtatgtgctaaaatgtcttatatattaacagcgctgatatattcaatcacagttctgtagcttattaatgagagaaccttttcaatgacttaaactgtcaggcttctctctagtaaagaatccacctgcaatgcgggagacctgggttcaattcctgggtggggaagatcccctggagaagggtatcgataccagatcagtattcctgcctagagaatcccatggacagaggctacagtccatggtgtcacaaagagtctggcatgactgagcgactaacactttactttcaagaaattgtagggtatgtgtatacctactcacacatgcacatacagacatgtacgtgaacaaaatttcggtctacagtgatgattaatatataataaagtgctttcctggatcctctcactttttattcattctttcaagtagtatttctggtgtggctgccatgtgtagaccctgggcttgatgcctggggatatgcctcatgcaacttaaaggctggagggaagacagacgagatacgaataaccacacactcaactttgcacatgagatatatggcatgaagagaagttagagtgtctccatagctctggctcagcttgatgatgttcattttgtcaattagctcagtttgttgaatttaaaaaactgatttctcaaaaacagtttaaaaagtttaatgagtgtgaatatagatcacagatt

SEQ ID NO: 57214 - DNA, 2245 bp, Bovine  19866881303722
  misc_feature (1)..(1): n is a, c, g, or t
ncccaggactgatctcctttaggatggactggttggatttccttgcagtccaagggactctcaggagtcttctccaacaccacagttcaaaagcatcaattctttggtgctcagctttctttatagtccaactctcacatccatacatgaccactggaaaactcatagccttgactagacggaccttgttgacaaagtaatgtctctgctttttaatatgctgtctagattggtcataacattccttccaaggaataatcgtcttttaatttcatggctgcaatcgccatctgcagtgattttggagcccagaaaaataaatcagccactgtttccactgtttccccatctatctgccatgaagtggcattcttttattgacataaaaagaaataagccaaagagttagaaatatttttttatctctggttaagaattatagctaatcctaattttatcctttttttctaaagttttaatattttctacaattttaacagtagtcacaaatcttttcaagccactttagaaacagaattctcaggatgtactcaagtaaatattctcaccatctcttcaagatactgtatttaaggaaataataataaacccactcggcttcttaaattctctgtgatactcagtgagtgtgtaattctgaagtcatctgagagtattatgtgaaggctggaagataaatcttctctatgtccacaatgactgatgtcaactttctaatcccacaaagttttggggcgtagcatcacctgatcagtaattcacagaaacaatccagaaggagacaagtcattcccaatcaagagtacttcattttattctaccccaaaatatcaaatgagaaccagtggggagaaggttacatgttgcataacaaagaccattttcacagtcaaatttggtttgtgagctgccaggtaatcctattgcacaggattctttttttttattcttattctattattttaatctctattctaaaagagagtgacgaggggaaaattttttttattatttttaaattggagtgtaattgctttacaatgttgtgttagtttctattgtacaacagcatgaatcagctgtgtgtatacatcccctccctcttgagggacccccattttacccatctagatcatcacagagcattgggctgagctccctgtattatagcagctccccactagctagctattttaaacatggtagtattggcaccccactccagtactcttgcctggaaaatcccatggacggacgagcctggtgggctgcagtccatggggtcactaagagtcagacgcgactgagcgacttcacttttacttttcacttttctgcattggagaaggaaatggcaacccactccagtgttcttgcctggagaatcccggggacgggggagcctggtgggctgccgtctatggggtcgcacagagtccaagataaataaagacacgactgaagtgacttagcagcagcagtatatatatgggggcttccctaatagctcagtggtaaagaatttacctgtaatataggagacccaggtttgatccctgggttgggacgatcccctgcaggagggcatggcagcccactccagtactcttgcctggagaattctatggccagaggagcctggcaggctacagtcccataggatcacaaagagctggacacgactgagcagctaagcatagcacagaacacagcacagtatatatacatcaaatgctactctctcgattcatcccaggaatacttccttaagaaaaattttaagagctttgtaacattgaagtgtaattaaaaaaaaaaaaattgccagtgggagtagagaggcaaattgagaaaagctgctttttattagaactgtagcagattaaaaaaatcttaagctccagactaaaaataatacttaataagctactttcaaatatgatacccaagaatcacaaggaagataaatagacaggagtatatctgtttccctgtgacacgtattctgcctgtaggaagtatgaataataagtgccatttattaacacttctatgtcatgagctttatgtgcattatcttatttaatcctcaacatagagctagttctacttagatatacatttctgagatgagaaaactaatacttggagaactcagagaggttaaataacctgcccagatatgttcacctagcaagtggtgaagctaggatttggattccta

SEQ ID NO: 57215 - DNA, 1221 bp, Bovine  19866881354559
  misc_feature (1)..(1): n is a, c, g, or t
ntcttatgggacacggtaaagtcagccatgttttagttttacaccttttaacattataataattgaataaaataagtaagcctctttttaaattgtagtgcttaactactgtgttttgtgatttttaaagcatcaactggccatcttttcctcttcccccctcaaagcataacacagtaggcagaggaaacagcagtggacagggcgcctcctctccctctcctggcttatgatgggacttgctacaagaaaagggatgtggctgctcggcctgtgtcccaccttggtgtgggggctccaggatctccaggcaattccatcgcacttgtacagtttttggaggctttcttcaaagtggaagagtccctttaattccggtgtgcagttctttgggaatgagggcaacgggtcctatgggaaggaaaggtaatttagatctgacaccctgtaaaccgatcacactgttacctcttttaggtcatcatttgctgaatagtgttttaactgagaaaactatccccaaacttgaaggctgtttttcagctcaggaaacagcttattgtaaggagagtaggaagtgaagagattttcatacctgtctggggaagtgtgagccggttgtggattcctccttatcggcttgaggcggttctgccactttggttgtcttttggggctcactaataaaggatacattggccttccttctgcgagctggggagccgtcatcttccagtttcagggaaatcaccccatgatacttgaggaaatcagcaaacaacagtgaagacaaaacaaacaacaagacagaaaacaaaaacatttgttgtaaaaacaggcaatccaaacactggatcaagataaagagataaaaggatgttttcctgaccacccaagcctctaaacaaaattcaaacaggattgtaaggaaaatatataaatataatagttatgaaaggtagtttcactagatattttgcatccataaaatacaaaaaatttagcaatcctctcagactcagacagaggagcctggcaggcctgggggttgcaaagaattggacatgactgagggactgatcacatgcattgcttacacagtatatacgcttacgttatagatgatgtctgttctatttttataaacagaggatggaggaacctgaaatcaacagaggaaataaacaggaacaaaattggcttgaataataattcataata

SEQ ID NO: 57216 - DNA, 710 bp, Bovine  19866881359946
  misc_feature (1)..(1): n is a, c, g, or t
natgttcctgtgaaggcatttgtttttagattgatgagtatttcaaagaatagactttgagtaaagcagattaccctccataatgtgggtgggcctcatccaatcatttaaaggccttaaaaaaaaaaaaaaaaaaaaagactgaagtctcttgaagaggaaggaattctgcctccaaactgcctttggactcaagactgtaacatcaactccttccgtaatcttcaggctgctggcctgcctcgtagattttggaatgtgtcagactccacaattgcatgagccaattcctaaacagaaatcagtctttctctcttcctctctcttttatcatttatatgtgtataaattatataatcctattgattgtttctctggagatccctgactaagacagagatgaaagagcaagggaaaattattattattttgtataatcagaatgtattctgcattaagacagatttacatcttttatgttattggtggaagtatgtagaaaagggtgaactgtatccaaggagagtggattcaaggcttcgagagccagaatatacttgatgtgttttgactaaaaaaagaaaaacacgttatgccctccaagaatcatcttaacagtcaacataactgtgacagcacagtaccacagaaaggacacagcatggggatcaggaagactggagctctttatgtgcgtttgaccaaattgt

SEQ ID NO: 57217 - DNA, 1270 bp, Bovine  19866881376512
  misc_feature (1)..(1): n is a, c, g, or t
ntcttctaggtctgcagtgatacttaggcaccatgactctttcttagtggattgttaaaccagcagtcactaaaatggcaagaacagaaggtgtggagtcagaggacctgggtgttggtcccagttctgtctccgaactgccttatgatctgccatgtttctgaatctttccactctaattttcttttctttaaagcagggcaataatctttgtccaacacaactcccccatatcttgtcatgggcaaatgaggaaacaaacaaaaaaatatgtgaattgagtgaattagccaaattcagcctactcagtactttattggatgggcttccaatgatcagccttaagaactgagcctattaaaatctcacaaagaaaatacaactgcaaaagagtctgggctatgaaatttctatttggggcaagaaatgacactaagtattaacaagcctgagaaatatcattggcacagctaacctgccccatcccgggaatctaccatccatgctgctgagtaatacttggggggttagaatggtccatgtacgcattgtctagtgactggtttaaaggacagaatggtgtcctcctgaaagatccgctcttgagctttccttcacatcccaacacaatatgtccttgagtaaaggtgtgtattgttatcatttcattccaatagatggtgacacaagaatccatgttgaaggctgccttgcctctctttgccagattcatcgtcagcaatggacttcagaccaagcctggggtttttgagatcacactggagactgtggacacagccttacccgtggtgaccaggaacaaggggttgagactggttgaaggggccacgggcctgctctcccctgacctcctgcagttgactgaccctgacactccagccgagaagctcacctttcttctggcccagctcccacggcatggccagctctacctgcgggggatggcgctgatcccacacaatttcactcagctggacgtggacagtgggcatgtggcctatcggcacttgggaggggattcttggactgaccacttcacttttgtggccacggatgggacgaaccatggctttcttgtggatgggagagtgtggcaagaacctgtatcattcaccatccaggcaagtataacaaatacgcatttcatggccagagataaggagaacacgacttccgggagaactgtttcctttccttccttctttcattcaaatgtataaagtgtgtccacagcatgccaggcactaag

SEQ ID NO: 57218 - DNA, 1196 bp, Bovine  19866881392874
  misc_feature (1)..(1): n is a, c, g, or t
nggctgtagaaagaagtgaatgccctgcagagaaagatataactctcccatgggccaaggtggtgtgtgtgagagtagagcccaagatccaagccactccatttttctgagtctgaacaattctagcaaagagaagtcagtgcggatgatatacgtgaagttttaaagtaatctgtgaatttctaattcccctcctgacattgtcacatcataattattgactaaaccattgacatttgcctgtgagaattggagtaagtttgttgtcagtgttctttcatgagtgtgtgtgtgtgtgtgtatttaacttaaatttttttttgagggggtgaatgatcatattcaccttgtttatacgaggttgcctaaaatttccagtttagaaaaggagatcagctatttaaaaatagttcacaaatttttttaagtcctcagcataaccttcttgctgtttgggagaagtacaaaccttgctattcaaagtaggatttttagaccaccacctggaaacttctagaaatacagaatattgtcatccccccctccacccaggaacagaatctgcattttaacaaaatccactgttatgcatagtgatgtttgagagtaaataaagaatgaaggtgagaagaaggagaggagggtggtggtaccctggtttataaaggaattttgacattaaaattttattgttttctgtctttagaaataactacaaagattactcgctggagtcaagactacacttcagaattcaggcagctcttcacctctggaaaaaatcgtcttcagattgatcagaacatgaaggatggacttttctctcaattcataccggcgtatactatagattaggccttgtattaaagtggaaaaatgatcttgtgaatgagagacaaaaaactaattttactgtcaatattttctataatttgtgtggtttattcttggtctacttaagtgtttttttttttttttctctatggaatgatgatcagtaatatcttgaaaacttatattttgcatcttcaaaaggaatttcaaattaatttgaattggagagtgaagaagtcttttaaaggactcacaggtacaataaagtctaaatagattatttatttttttaaatgtggaaatgaatatcatgtaggtagtaaatggcttataacctgagccatatttagatttgttgggca

SEQ ID NO: 57219 - DNA, 992 bp, Bovine  19866881397015
  misc_feature (1)..(1): n is a, c, g, or t
natttcctatctctttaatgtgaacacataattcaaaatattttgatcatatgaaaggcagtaaatgtatgttctgctaagagaaatgtgataactataaatgtatgtgaaagaacatatttaatggatgaatgattatcacaatactaatattctcaagtaaaatgtatgtttggttttaaaaaatatgttttggagattatgaataattagcacccatttaacaaatacaacttgatattcagtatgtaataatacaacataaataaaagcaattattacttcaattatttaaaattatctcaactgccattaaaaatacaaataaaacagttacatactgatcacttgtcattttaatcataaaccatcattccttagataagctgaaaaaaaatatttattcaacacacaattactgaggacctactatgtgccaataagcaactcaggaggtacacaaacaaagcatggtcactgcgttcagctctcaggaagcttaaggactaaagaagattaggtaagtgtgaaataaatgttctagctctaaaatatctgtaacaacatattatggaagaccagagaaaagagtaattattttcacctttaaaaggctttaaaaggtgtcccaacagaacagtgttggaatttaacaaaaacagaaggaaaatacacagtttacatttgactgtcaataaattacaaccagtattactgttcacaggcacttcacaagttctatttcacctaattatctcaacaacccttaggaccagtgttcacaaggagaaaccaatgatgtacaagataaataacttgctgaaggccacataccttgtaaatgaaaggaccaagaatgagtccaggtctctgtaattcgattttttttcactacatcaggctacctaagctgagctttaagaatgagtaagatttaaatagagaaaaagaagaaaacagagaaaaaagacaacagacagaagagacataca

SEQ ID NO: 57220 - DNA, 873 bp, Bovine  19866881580272
  misc_feature (1)..(1): n is a, c, g, or t
nccaagattcgataggatgatgacctactcttctttaccccttctttttctctttcctctattccccttctctccttctatatctgccttttgcctacaagatatcaaagctcgagttttattaaaaaaaatacaaagtattttctctttattttaattttaattgcccttagatgcttggaggccatctcagtgatgctgagattatctgaattattaaaaagtgagttactttgtctgttgcctctctatcctagctcaacccagggtctcctcctaatggggccagctctggagctgtgcctgtgggccccttataattatgtctcaacagcacggccagtcaggcctacagtgaacagagtcatttgaggctctttctgtaatgtttcaaactgttgtgttgttgacattcagtgcatgtgtttgtcattgacacacaggctcccattccagctggaaagcttttcctttcatgttgaaactcttttaaggaaatgtccctacttatctccaagccagagagtggatgggagggaggcgtgtgtttaaacgccctgcatttcggggatgccaacaggactgttttcatttgctccccacaatgggagatctctgctgctcttcctgagatcctgacagaagcgtgtttgtctttaatgtcatgaggtgagatagagcagctgtgtttatggtgggagttacctgtaatttatgttctaacttaaacatctgggaagattagctgtttcctttaatttaaagacctgaactctttctttctttcttttttttttaaagctcaactcctcaaaaattttttaagcaccaggaaggcagtgaaaaatcagacgtttggtgtctagtacagag

SEQ ID NO: 57221 - DNA, 1443 bp, Bovine  19866881587197
  misc_feature (1)..(1): n is a, c, g, or t
nttcctaaacattcctcaaagacgtcttgttattaaactgaacctgagtttagagaagatctgtgcctggaaatgatcttgttgtaccattgaaggaggtcaaaatataggagagaagtttcatatcaatgtcctttccaaaaatgaacgtctcccttgaacttaaccacctgctcctttcccttccaaacactctcaaatttgagtcccttcctttatcatggataactgcacaccttggatagacttttaatcttatttctacattcataaaatagaattctaatacatgctctgtctacctcacagcagcactgagagtaacgaatgagataatgctagtagatgttctttgtgaactaaaaggtaccaaacatatgcaaggagtttgcagcactggtgtaggttgatgaaccacttttttctcccagtttggaccagtggttgctttatacccagcagaggagccccacaggcttccactttgcatttctcatgattttcttttttcttttcttacatgcctagtttggaactgaattggtcttatattgagtggtcgcggactgaatatgaggtctgtgagaatatgggcatgctacccttggagattaccagaaggggatattccatggattcagcctttgtgactgtacaggtaacaactctaaactatcatctttcaagctaaagcctaggttgctggttggtgcctttgactatttccttaaagaaactcagagtaactgaggaaacttcaaattgcaggagtgttgctctgttccagaaagtctaagtacaaaacctctttgtccctccatcatttatcaagatacattagctcctacatattctatttctaacccatctttagttttaaaatctggtctttaactcttgaagtttgatttcataagatctacccaacttagtgaacttgggccaaactctgctttggaaaggaaagttgtctgcaaacttcagtccctgtatggctttctcttagcatgcaccaagatcacctatggtctcagtggatgagaaaaatcagggattacacctatcttaagcatcacccaagtcatgcaaaattaagaggctatgtagcaatagaggcagcctgaaatataagaaattttcaataattaattttggactagtcacctgctatttctttccactgacatggaacatggagcacaaccatggcttctagaatggaaaggtttttaagaagtctctagaaaaactgcacattgggagaatgagagcatgaaaagcctgtacatactaatgctggtaaagacttcctcctcaatctaaagggggaaaaaaaagcagtgatattaggttctggggggaaatgccatctcagtaagtctcagttacagtaagttcaaatcagcttcagaaccttgtgcacgtagattatactatatacca

SEQ ID NO: 57222 - DNA, 1219 bp, Bovine  19866881994752
  misc_feature (1)..(1): n is a, c, g, or t
nctactcttgtaaaccagggaaaacaagtgaggagcccacggataaaatcataactgatggaatttcaagtctgaagatggaagggagaaaggaaaggagggaaggaggaagagagggagagaagatgggagaggtttacagcagcgcacgtcagccgtacgagttcgtcccgataaagcctgacagaaatgctctacctttccccatgttcttgatggtgatgtgacagtcaaatgccggtgacctgttgtcaccgtcccagaggcggaaggtgaagctgtcttggttcttggagtccatggccccggtgtgtgtatatctcagcaagttcaaatccacttcttcctgagtgcatttcatgccagggtacagagggacccagtccctccctatctgaaagatgccagaattagtcagcggcccaggtttcccccgcctcccaagatgtgttagtggacatcttccgtatcctctgaaaacttccaaatataaacgatttttcagggaaaccccatattccattattttgccattctacctcatattttccattgaaataaatgtattaaaataatttcagaccttggggaaaaaactagctctaagcaaagaatttttggcaaagtcatgtgataattcaactgcagtgctactaaggtatttatcataagccatcatagctgattaaatatttcaattgatgagagcaggtgggtaattgagctgttggaattaattctttaaaaattaaatgtgtttcacttgggatttccttttttctttttagatcatttagatcataccattgttcaattaataaaacctgtatttcaaaccagtttgtcactggagttatctgaagtagataaaacaaaatagaatgggtgtatttaatgtccctatgtttttcaggtttcctaaagaccaaagaaaatgatcaaaacttctattattccctacatttatatcctgagtcagcacaaaaataactacaaatatcatatatttactgttaattatactcttctaaaaataacccagcattagttaagcatatattctatacagaactcagtgcagaaattgtgccattttcaatgaaaagaggtctttatgctgagggagaacaactgagagtattagaaaatacagtaataataaatctgtctcgattaataattctgttgtattctcttaagatgtaagctttccctaaga

SEQ ID NO: 57223 - DNA, 1652 bp, Bovine  19866880447347
  misc_feature (1)..(1): n is a, c, g, or t
ntcagtgtgtgctgtaacataggtgtagtaatactatctaagaaaattaatgatattaaaaatgtagcaaaaataaaaatcaaacttctttttatgaggttattcaattattaatgattcttatttatttatattttagaacacaaatcaatttcacagtggctattgattttactgcatcaaatggtgagtattatgactgtcttataataagaattatcatctattacattaaaaataaatattttcatgaggtttagatgttttctttccacatatacatacttctgaagtgcttcataaaaattcagataatttttctttttttaatgttatgaaatagtttaggtatataacactataagaaatacaagagttcataatagtcccattcaaatgtattaactattgaaatactgtctcttttgttttacatgtttttaaaaggaaaactttaaatttagttaagcttgttgtgtacccttccctttttctccatacatagctgtaattctgaagcatgtctaactataatcctcatttttatagtacttttttgtacattaatttatataaatgtaattcaagtacttgaaccttcacagcttgcttttcttttattcaactgtttttaataattacttatgctagcacatttatattgaattaattcagagggaccatcaactaaatcccatactgagtttagaaaagaaagaggaactagagatcaaattgccaatattcactggattatagagaaaacaagggagtttcagaaaaacatctatctctctttcattgactatgctaaagcctttgactgtatagatcatgacatattggaaagttcttagagagatgggaataccagaccatcttacctgtctcctgagaaacctatatgtgggtcaagaagcaacagttaaaaccccatatggaaaaattgatgggttcaagatcaagaaagatgtacaacagggctgtctgctgtcaccctgtttatttaacctatatgctgagcatatcatgagaaatgtgggctggatgagttacaagctaggatcaagataggcagtagaaacatcaacaacctcagacatgtggatgataccactgtaatggtagaaagtgaagaggaactaaagagctgcttaatgagggtgaaggaggagagtgaaagaactgacttaagactaaatattttaaaaactaagatgatagcttccgcccccattactccatggcaaatagaagggcaaaaggtgaaagtagtaacagatttcctcttcttgggtgccagaatcactgcagattgttgactgcagccacaaaatcagatgattgtttctcagcaggaaagcgatgacaagcctagatagtgtgttgaaaagcagagacattactctgccaacaaatgtccatagagtcaaggctatggtcttcccagtggtcacgtacagttgtgagagctggaccacaaaaaaggaagaatgccaaagaattgatgccttcaagatatggtgctggagaagactcctgaaagtcccttggacagcaaggggatcaaaccagtcaatcttaagggagatcaaccctgaatattcactggaaggactgatgctgaagcagaagctccagtatttggtcat

SEQ ID NO: 57224 - DNA, 840 bp, Bovine  19866880514625
  misc_feature (1)..(1): n is a, c, g, or t
ncctggaacttgttttccattttcattttaatttaaaaaagagaaagaaagcaaatacaatgtctgagcactcataataacaaactaacttagtgattaaaagaacagaaggctgtgcaaacttaggggacaatcatatgcttaaattcatgcattttgagctcattttgtttattattggaagttagagaattcaatatcttaacaatgaaaacaacgcagatatgatgtacagaatacgtaaagacagtttgggaacttaagcgccttaatctttttatctattttaggactttctgggacaagtgttttgtacattgggggagattgttggttcacagggaagtcgcctggaaaagtccatagtgtaagtatttttttttttttaattttagacaatgaaatgtcaacttttcattttctattttggaagtttggaattgatgaatatgtggttgtagaccaaaactgcattttaaaatcttgagtttttttacttccaacaaatcattttgacatttttgtaaaggataatttgtatttcagctgtcatatgccatgctacaaaatgttcacaaaatgaaatgagaaaatttaagcaagaaaacatgttgtcttccttttggttttaatattatttcttagatacagtactttttaaagacaagattttacttctttgagccaatgagtatatgtagtgccaccttttatgtttaataaatgcatgtttaggtgattgagattttaataataatttttactgaaaaatttgtctgaaaagaaggcaatgtattaaatgttaagaaaagatgttcactaagaattatactttttcat

SEQ ID NO: 57225 - DNA, 1512 bp, Bovine  19866880653090
  misc_feature (1)..(1): n is a, c, g, or t
nctttaatatattttaagagctgtattttaatttttttcccatatgtattcttgatttttctgttccatcacccccattttgggaaaggttgctggaggttttaattttcttctgtgaaatagcccatatactaccacccccaatgtcatataaaaaatgaatatctgttgcaattttgttgtgtcctagagaattaaaatttcccagaaatttataagaccacgaaaatcactcatgtgatcctatgtcttgtgtgcctcaggaaaaaggtcctgactattttaaagcttaagaaaggaataataaaaaataataatcatgctaaactaaatgatattaattttccttccacaagtttttcctcacctttgtgtatgatttttttccatttgttatctaattctctccttttctgtttttcctgcctccatattcattccttacaaccaaacctatgcaaaggagagactttttattctttgcatcttaaatgattctttgaaccgaactcaaatatttatagaaggtcacactctaaatttatgaaaaatagtttctaaaattgagaaagtgatgatgataatgcttcatctttaattttacctaataactatatgactttaacttttttcaaagcacttttttcttgaataagacagacaaaggttaagtaggtctttggagagatagtactccatttaatttttgtgttaacctcatcctaaataactacaatatataactgcagatgctgaaaatggcaaatagaaaaacttcagtccatgtcaatctggcaattagtgtactacctaatgttaccaaaccttcacatttccatggtaagaatttgtgatatatatattaacaatcgttaatgtttatcaaaccgaattcaaataatctttcagatagcaagggaagtgtctcactattcacactgttcactgaacctggggtaggtaaggtgcaagcaaggaaactggaagaagattcaaggagccacaggaactgcagacacgtttattctctaatggctggtgcggcagccataatgcagccatgctgtattctctgatgattgactcagcagacacagccataacacagctgcaagggcttttcaggtagagcttatacagttttacagaaaaaaaaaaaagtggtccatgaccaaatgagtacatcatgacatgcaggcacagtgctataaatgatctcagatgttacataaccatggaaagtcattgtttatgaaatgaggcaaaagcaagaggtcctggggcaagagaacctgaccattgccatcatggccaattgctttttccctacaagagctctttaacaaaaattttgaatccctaattggtgagtttgaggctggcacaaatgttgaagttgagctttaaacaatcaaaaggatctaaggtaaaccccatctttttatttgaaatatgtgtaggaataggtattgggaaaaagaaagggtaaatatccccgtattaccaatttag

SEQ ID NO: 57226 - DNA, 1054 bp, Bovine  19866880712640
  misc_feature (1)..(1): n is a, c, g, or t
nctttactgtctgagtcaccatggaagctctttggttcagagaaagaataataaaaatatatcttccaacagctgagcaagaagacactattaaatcacctccctggtaacttacctgtaaaaattgaagcaagaagtactcttcctgctttagccctgaattttctctaagcctgattttcccacggccatacatttggttgttctgcagtgtctgtagctgattaatgatatgatcattttaaaggatttagtttagtttcaaggggtaaacttcccaggctagataacaaaattaaattattgactagcttcataggtttgtgtactgcctgttcattgaatcaggagacaaaaaaataaagccactgaagttgccctaactatgtcacaggcagcttatttcctaggaaactcccaggcaagaaaggaagcagcttattagagatgggcaaaggcgtgttgctaaattagagttttctaatccttccctcttctcccactttgaatttcaagaacactggcaagctctgattataaaatgtcactggcactttgctgctaatctattcaataatgtctatttggggctcccactttagcctttcagggtaggggcactactttaaaaaatatttttacttaaaatctgctttgaaaggcaaattcaaaaaagcaggctgattaatagatccagttggtagcaaactaagctttggtttgcttgcccaaatcactgcagataggtgactgcagccatgtaattaaaagacacttgctccttggaagaaaagctatgacaaacctagacagcattttaaaaagcagaaacattactatgctgacaaaggttcgtctagtcaaagctatggtttttccagtagtcatgtatggatgtgagagttggaccataaagaaagctgagcactgaagaattgatgcttttgaactgtggtgttgaagaagactcttgagaccctcttggactgcaaggagatccaaccagtcaatcctaaaggaaatcagtcctgaatattcattggaaggactgatg

SEQ ID NO: 57227 - DNA, 1148 bp, Bovine  19866881213717
  misc_feature (1)..(1): n is a, c, g, or t
ntgagaaagctgattgctgtgtagaaatctgactaccttgagatagtagcccacaaaaccacattgataaactgtatgtagaaagaaggaaagatgcctagagaatccaggtattttagccatcctagctgtaggcattagtcatgagcaaatgagacatcttagtggatgtactagctccaggagatatgacatgaagaaaaccgaggaacccaaccaacagtcagaatggaacacatatatggctccagtagaacaattccagccatatctagccaagcaaggcatcccaggtgtggcccaggtatcttgaacaaacgtaccattctcttgtattatgctcaaattcttgacccacaaatcatgaatataatggaaggtgttatgtagcaaccaaaaaccagaataggttttaaatcatatgcactttaggtagatttgttgctaatttatttgtgttttttccattaatatcacacttctaaatcagtcctttactaaaacggagctgattgtatagttataagaagttgctacctgagtaattaagcataagcagtgaacctatgaaaagatccaaaatactatttttttcccaaaatatcaattatttccatgtattcttaccaaagcaaactcatgagatatccttccatctggaggcagttttgcaccaaaacctaaagctgggaacattttatcactgtcataatcttgaacgatttctcccactgctttcagtgccataccataggcattcagttgataaggattcatgtagtggagagaagtgggctgggcagggttgcctgataacagaaaaaaaaatgaaaacatgagagatcaagctaaaggtataatttttagacatttttcttgatatctatttcacattgaaatatcaataatatgtttttctgcccacattcataacgtgttaaatattgggttggccaaaaagttcattcaggtttttaaataacattttatggaaaaatccaagcagacctttggtcaacccaatagtttcttttggatgcacatgacagagagatatttattaaattagatcagacatgtataaaatttcccaaagatattcagacttttttcaaaaattatttctcatgtcaatgccataggcaatt

SEQ ID NO: 57228 - DNA, 1385 bp, Bovine  19866881261104
  misc_feature (1)..(1): n is a, c, g, or t
nctccccggtccctgggattctccaggcaagaacactggagtgggttcccatttccttctcccaatgcatgaaagtgaaaagtgaaagtgaagtcgctcagtcgtgtccgactctttgagaccccatggactgcagcctaccaggctcctctgcccatgggattttccaggcaagagtagtggagtggggtgcaatcgccttctccagctaaagacgttagtaagtaaataaatccataagatgtgaagacaccaggttggactatatatttttaaaatatttcagtataaatcctaacattgtaattgttttatctgctctttaaggtgataaatcccagaaagaaaggaaaaaagaagaaatatactaattcaggaacggtaagtcaaattttatgttatacattaaggattcaaatagatgaattaaaaaatatatacatatatataaaatatttggtatcaaatagaagcaactaaaaactgaactctttcattagggttttaatatgaaggtatataatacaaaattaactttctatgggaatgattgtatagagaacacctcataggacatagcaatacagcttcctgcaagttgtttaggggttgaattgtgtctgagagaagaggaagtttcattatgaattcttcatttaatgaaatcacacgagaaaatcaagcaggcctgaaaaagtgaagtaaccctgtgtccttgtagataatttgcatgttgttcttcaaaggaagtaaattggtcatagaaaggagttacttaatttttagccccttttcttctgataattttaaatataagaataatcagtcctagaagagtttgaaatagattatctttattgatttacaaaatgctaggaaatataattttctctctaacacttagaaaaaagtccagttgggattgcaattagtactagtactatatattcttcttgtttttattttcttttgttttctttcttcaggtcaccttgctgtctttcttggtagaaacagaagtttcattccttgactatattaagggagggtaagtcattatctgaaattgtttcattgcttaagcaatgctgaaaggcaagtttgaatgtgtttagaaacttcatgacaacagctgtcagagacatcacttctgtaaacctcttccaaatgatgattaagagggtttttgttgttgttcttttttgtttgtttttgccaatactgatttattgctagagtattgtcaagccaaagtggaggcaaaggaacaaacacagtttcctccaaaacagagagcttaacccctattgctgtttgttaaaaaaaacaaaacaaaacaaaagctatactagcccaaatgggcattctttgctacatatgggcat

SEQ ID NO: 57229 - DNA, 3196 bp, Bovine  19866881279121
  misc_feature (1)..(1): n is a, c, g, or t
ntcctcttgcccatatcattatgggtaaaaaatgttacttaaaaaattcttaataagtcaactatgctttggtaaatacacatttacattggcaaagaagccatcttaattttaaaaattcaacttagactattggatacaaaatctacagtgattaaaactctcagacaagttgacacttattttacctgtcataatcgccattacataaagctcttactgagatcttgaatgcttgccatacaggatttagagtgtttttgacaacttctgttttatgacagattgtaaaactgtaaaaaaaaaaaaaaaagttttccagttattttcatgatttagttctaatatatgccttagcaatcatttctttctttatattttgttcagaatacaggttgcctgtccctctgttactgttatatcagtcaataaaaagatttgctgtttcaaaactttaaagattagctcatcataacatatggcaactcactccagtattcttgtctggagaatcccagggacagaagagcctggtgggctgccatctatggggtcgcacagagtcagacacgactgaagcgacttagcagcagcagcagcatcataacataaagcaatgagggaatttcctggtggcccagtggttaagaatccaccttgcaatgaaggggacaccagttctatccctggtctgggacgatcccacgttgccatgggccagctaagcccatgcaccacagcttactgagcctgcactctggagcctttgaactattaactactgggcccatgtgccgcaactcctgaagcccgcatgccctagagcccgggctccacaagagaaaccaccacagtgagaagtctatacaccacaactggagaatagcccctggtctctggaactagaaaatgcccacgtgtagcaacaaagacccagcacagccaaaaataaatgaaaaaatattaaaaaaattaaaaattgcaattgtgcaatgagtttactaaaaatgacctgaacattcaataaatcctaaaactgctgtgtaaataatctccataaaaattgtagtgacatgttgcagtgaaaagtatctatcagtcactaaacatgaaggttatcagtaattttgagaaatttattggaatgctggacacaaaaatctggttagaatgagtctaagaaagagaagagaaacagccagaatgtgtaaacatttttgagcagtttagctgtaataagaaaaaagagaacttgaggataacttaaaggggaaagattagtcaagtgaaaggtgtgttttttgtcactttttaatttttttttcaagatgaaattaagaacaacaagagtgtatgctaaaggaaaaatacattagagaaaagactatttgtgatgtatgagtgaaaggggaagaaggctagtaatgtcctgaagtagatggaagtggataggacagagggcatcaaaatggagtagtaggccttggaagcacttggattgtcattttgcagagcatttgggaagaccaaacacaggggtagatattgtgatgggatcttaaggaatttctccatttgcttgcattgtcttattaaataggaaacaagataaacagtaaataagaaagagggaaaaagtgcataactgtctgggagagaggaacattgatggattaagaaaaaggaatgatttctgaggagggtcaaaggcttatttaagattaacataatggatttatagtagagaccattcaatatgtggttctttttttaaaatctaaactgttgcttattcctagagggaaaaaagatagcaattaaagaatatataataagcagtagaatccatgaaaccttaaactagttttctgattcaaatttcagtattgtttccaccaagccatttaatctctggacatcaatcaggtcctggtaatattcttgccagtggcaccccactccagtactcttgcctggaaaatcccatggacagaggagcctggtgggctgcagtccatggggtcgctgggagtcggacacgactgggcgacttcactttcactttcatgcattggagaaggaaatggcaacccacttcagtgttgttgcctggagaatcccagggataggggagcctggtgggctgccgtctatggggtcacacagagtcggacatgactgaagctacttagcagcaatgcaaatttatgcagcagttcaagagctataaaatgttttaaatgatcttggttagaacaatacctaaattcaactttcactaaacccttaggcatgtagtgttctaaatgcagggatccctcgtatagtcatgatcatgagagtattatataactacaccatgatgaacatattgcaactagaccctataagaaaataattccattttgaaagggcactgagtccattttcctcttcacggtcaagaaagggtctctcttcattacgagatcaaagagaaacataatatgaatggatcatgttttcagtttaagatttatggcgttagcactacactcttcctggtagtagccttacctgtcgaaagaaactcatgttactaaattgacagagctcaagagaatatgtgtttgtataatgtggtcaaatgctctcaaagttgaatcacccaaagcaatataggaatcacccagggcaaaaaaacattaaaagaaacataaatgatagagaaaactctaaaagattaatcaaaattactttgaaacttctcttaataaactgactccaccttcttagtgagctacttataaactaagtggtcatctgtcattctcatttgtaaagcacttatggcagaaagtgaagaagaactaaagagcctcttgatgaaagtgaaagaggagagtgaaaaaattagcttaaagctcaacattcagaaaactaagatcatgccatccggttcagtcacttcatggcaaatagacagggaaacagtggaaacaatggctgactttatttgtgggctccaaaatgattgtagatggtgattgcagacatgaaattaaaagacgcttactcccaggaaggaaagttatgaccaacctagacagcatattaaaatcagagacattactttgtcaacaaaggtccgtctagtcaaggctatggtttttccagtggtcatgtatggactgtgaagaaagctgagcgctgaaga

SEQ ID NO: 57230 - DNA, 2002 bp, Bovine  19866881394569
  misc_feature (1)..(1): n is a, c, g, or t
natgtctggctctaggtgagtgatccaccatagtggttatccagatcttaagatatttctgtgtaattcttcagttattcttgccacattttcttaatatcttctgcttctgttaggtccatactgtttctattttttattttttccatctttgcatgaaatgtttccttggtatctctaattttcttgaagagatgtctagtctttcccattctatttttacagttttagataaatcacctaaccctttcagtcctggtgtcttcatttatgcaacaaagagacaagtctaggtattttctaatcttatgcttgttactaatattacacacatttctaattattattctcaaccatgcaaaggataaagcttgtaactgagcctgtttcttaaccttgtgccccctcaagatttgggcacactaatatttagacaaagaagcacacaactttcatttttttctgatcaattcaaaaagaaacaactgatgttttacaagagggaaagaatattgattttatttatttttatttttgaactgaagaatgacggcaaataataataaaattgcagggtaataaactatgctggcataaacatttaggaccagtaaaggaaatcatcagattctatgtcatttatacataaaatttagagagcaaacagttatcctttcaaagattttaatttatattccaaaatgaacaattaaagattgcataattatataacattgctattgttagatatgtgaatatatgtatattttccttttctgtaaaataatttcatgcttataaaagtcacctttagtcaacttgggacaaatagaacaacacatagtagaaataaaccgagtaataaataggatataagtaaggaaaatattataaagcaggtacactgttgacataaaagaaagaaataaacatacttttctattacttaaaggaaattcacaatcatttccaggaattctttaagaatttaaggccatttgttctagagaaatgctttaatttagacacaactgtcattcttgccacaaaactgtaatcctcgtaaaaactgtacatgcaaaagctctttacaatttttaactgtgtactatcagatcagaacataggagcagatttttttcacaaatgtgtcgagtattaagtcacgcagttgtatatatttaatgtgggaatttcacaaaaaacttcttgcctgtacattctgtgtggcaacttggaaaggaatacaaatcaaaagagccagtatccctttgaattaaaataatatctaagcaaggtataatgaaaaaaaagtgtttaaaacatctgctgcacagttaaatactctgaattttagtctttctacatagtattgcaatataaagacattactttttacacaaagtattttctgtgcatttatagtacacaatgtttgactttttattatttctacttattattacaaaacataaacaaactgcagtttaaatttagaacccaaacttgatgaaaaagtgcatgttctttcaggatacacagctgctaagtgtaaattcccatacttgacaaatagcataggaaaactgtttactaaacagatgcagcttcataagacaactcactgagaaatgtgaacttatttttactttcccttctttgcaattgcacttgatcagacagtcattcaaagatattgctcttgtgattatagctattgcaatttagaagacaaaggattcaatattcaaaacttgtattcttaagaatagttataaaagtactgtaatttaaaaagtagtaacatgtaaacattgatacagagagactgctttcctatacacatagcagtctaagacaatatctgagttaaaaacataggttgtgctttttcccgacaattcactggaattagctgtttttccaaaaacttttaaagattcatacaagacatcatattttgcgtcaagcatataaacagttttttctgttgctcatgcaa

SEQ ID NO: 57231 - DNA, 885 bp, Bovine  19866881573513
  misc_feature (1)..(1): n is a, c, g, or t
ntgcataggctgatctattttctctagttcctataagacagtaaacaaactatagacattctccctaatcttttcctcttctcttcatccttcttctcccatccctaaattttgatgttttggattcagttaactgtttttaaacatcaaaagatctaggaagatctaaggcaactgcagactgaaccacagtgtctaaagatttggggagttttgaagtctctatcttcaccaatcttttaagaatctcaaactcataatataatgatgtcaaaacccatcaaatgtattcacctttgacatcaaaaattgaaatgattaaagcgtcattctcacattctctgtatataatgaaacgttatacttaatgtgtttttcttcagttaataagaagtctataaattctaacttcttttatttataacttgattttcttagaaaattattgtgaaatatcagtaggaaagcttttgcataccaactgccttttaaacattattttcacatataatttgttttttatatcactgtaggatttggaaggattataggatttggttcacatatatttatgctcacttaaataaaccaatgataaataatctataaagaaaacataaatatttttattaagcatatataattcttactgcattgtctagactagtgagataggcccataagcattcttagaaaattactaaaacaccctttcttttgctaaaagaaataatcagtattatctattcaatgccaccttaactatgcctttaatattctctgagagaaaacaaaagaagtaaaaatgtaaaatttttatttcagagtaacagaacagagatttttaagatttcactcatatttttaaattgctagttttattaa

SEQ ID NO: 57232 - DNA, 1140 bp, Bovine  19866880395015
  misc_feature (1)..(1): n is a, c, g, or t
nccccaccttactgactgaacaccaacaaatacagtagatatgagtctacatagctgtcttcctcactagacatccccaagttaaactgtcttttctctttccctcctggaacaccctcttcttttctaacatagaacttactataatatataatcatgaatttctttgtgtatttatttcattaatgtctgtcccctaatcacaatgagctccaagaagacaggaactaagactgctggattcaccaccacgttaccatcacatatcctgtagccagccaaataatagctgtacaatttgttgaatgaatgaatgactgaatgaatgataaaagaaaatggagattttactaatgaaacaaataccaatgaaataatctaaagaatcaaaactgttactttctgactacaccagatactgaccctcagattcttctggcattcagatagtccaaaagtttgaataggcataagtatcgttttgatgggggtgtttggaatacatagccctttttatgagttcaaattcagacctcatgaaactggaataaaggtatagttttatgtcactgagtctacattttcactgaaccatacagtatcccaaccatgacttcctggaaaaagacatcctctactccttttctactaaggaaaggtgggcaaaactactgcaacttcttctctctgtccctaaggagggtatcctatctgtgcatcacaccctcatccagctaaagtcaccacactccatacagatgagaggcctgggtgggaagggttgggggagactgccagcctggaatgatccttccctgactccaacagaggaaatctttaagctcagagtgtgactcttgaaagctgtattgttcattcttcctaagacctgaagctcaagatcaagcaaataatccagcttagttgctgcttagtgtagggaaaaaaaaatatcccaaggccatttcctgtgtggcctttttgattttggacagtgtctctttgagagacagccccatccacaaaggctttctgtggaggtgtgtgcatttcactgagatgtttccaaggagagcaaagacacctttttcaaccaaggcaaattaatgaagctggcagtcaaactctatttctagcctg

SEQ ID NO: 57233 - DNA, 1421 bp, Bovine  19866880417101
  misc_feature (1)..(1): n is a, c, g, or t
ncagtgaaaagggtttcttctctgcatttcttttttacagaaagaaaattgaaccaacatggtcagtcttgagtttcacagagctctcagtctgcagggaagaaagaagaagaaagaagcaatttcagctctgtaggggagcatttcaaaaagggagtatgaggggattgggctcaattattcataatatacgtatttctctcaatttccttaaaatctggaggtctggttttaggaagttactaaaacttgaaaaactgcaggcactgcatagatacttgatggacagttataacataagatatgtactcaccacatttagaagaattataaaggtaagagttgtatagtaggcagaaccctggtcttggggagagaagagctgggtgtgcattctggcctacttgctgtataacatagggtatgtcactaaaccactctgagcctcagtttattcacctaaaaatggggatgaggacatcgaccacccaaggcaatggaaagaatacatacaattgtactgaagacaactgtaaaatgatgaacaaatgggaaattgtttatctgggaatttaaaaaccagaatcttccaagcaacaaaatgctgaatatagcaaaatctagttcaggtttaacagactgacatttgagttcttactgtgtaagagccaaagtagacctatttaatttaattctcataaataacttgtgagataatgctgttatcatatctattttacagatgataaacccaaggcacagagaagtgaggtaactcatcccatatcccccaaactagcaagtgtcaaagcctgaacacacacttgggtgatttgagcttagagcacatcctcttttttagtagactcactgcatgcactcatgatctcatctctggagtttcagctttagcgtcattccttccaaagaacacccaggactgatctcctttagaatggaccggttggatctccttgcagtccaagggactctcaagagtcttctctaacaccaccactctaatagaatggctctaaaattgtttttaaaataagcattcactttcaaaatcatactatcagggtgcctgaagaaagagtcagtatggcccaagaatacagggcaatgagataacccactgggctgtgaagtacctagatgatgaccattggtatgtcacagggggcatcctgagcaatttaggcagggcagagccaactgtgatggaaatcacagtgacatcatggtggtggcattagtaacacaccagctctgacctatgtggatccattatgtgctttggtggtgaacatctgttttattgcactaaactgcacttgtgcaaatatcagtcccctggaaaaagaaaccaaagagaaacttccagaggacccgggagcctagaccaagtcttctgtcaa

SEQ ID NO: 57234 - DNA, 1912 bp, Bovine  19866880574166
  misc_feature (1)..(1): n is a, c, g, or t
natctggagacgaaagaaattgcatgctcacctgctgtgaccccaaaactgtgttaggacacgaagttctcctggttcatgactctttgttgaccgactcttcttctttagggtttattgatcattctacctcttttaggcaggaggtcagcaaagccagtggcaggaaggggagattcagagcctaaagagagatgtaaggtggcctcttccctcaaatgtggttgcagggcacagcctcctcagtcattgagcatctgagcacatgcctaatgctagtataaagaaaaatctgcatgagtgcccctgccttaagataaccaaaaggccagagcagggagcccacgtgtttgtctttcccagtggtattctctagctgtgagacctagcctgctaaggcctgatagagagatgcaagtcttgacacaaagtcctctgctctgtcaaaggcaaaaatctttcaggagaaggaaagtactcacagttccaggacaaatcagagaatgtcatatgtggatattaatacatggtctttagcagttgctacatctcaaagagctgggcattaagtcactagacttactgctcctattattccgttttgggttaaacaaacaaaaaacacatacaatcattgaaccgatgaatgttaaaatttgaagggacacctagatgatgtcattcagcctcttagttttacaaataaggaaagaggatcagattaagtgttgcacagttctcctgagtcttgattcataacagacattaactagtatcagtggacatattctatttgcattggtggctcaggagagtcaatggggacataatacagatgaatctgaaactgtcaatcccatgatacattgatttactgagatgccaaaaggggcttcagaagtataccttattttcattggtgcttagaagagaaggttaactctttcattcagattttagctggtttctccttttgtttacattatcaagcagaggctgatgcagtgtgagccaccagctaaaggaaaataatctaagcaagactgagaacacctttattgaagtaagacagggtcttacttcagatcagtttgatttgtttctgcactgcaggaatcaccctgaaatgagcacatgcaattgaaattaattctagaatcttggaatggattgtagagaaaatcaagtttaaccttctcattgtacaggctcagagaagtcaatgattttttggggtcacgcagcgtgtgtgtgacaaagatatagaagaatgtaggtttttaactccagaatggaatgttttactcaaactattctcagactttcacaagccccaagggtgtttcttatggattttatactaaagatttatccatgcatgaagtgaaacaagacaaagatagaggtggccgtgcctgctgaaagccccggggtctaggagagcatgttggagtagaagctgaagctctccattgtggtcttagagtcgctgtgagaggggtcattggagatctggtccaaggacgagggcacggccttggggccttcctccaggtcttcgtcatgggcccccaccactgtggagacagtggtctccaggcggctgactttatagatgctgccttgggtctggaggtacctagtggatttcatttcgaacccttcatggtcaccagtactgatgaaagggcagcaccgaaaggcatgcttgaagcccagacggaacctggaaagagagtgaatggacaagtaacgcttgagtatagcctgctatcaggggtgttcccaccattgcagaagctgtttaatatgagggtatacccaaatgagactctgtcttcttattttttttaataaattgataactggagatgctaagggcaaagtttcaaaggtcagtcatcaaggtcaa

SEQ ID NO: 57235 - DNA, 1453 bp, Bovine  19866880714523
  misc_feature (1)..(1): n is a, c, g, or t
nctgtgctttgaccagatgtggctgaaagcagagccaacatgtaactatataaatgccttcctcatggtttgaagaatgcatgcacaagtcctgcgtccatcgtgttgaaggagaacagtggtgcacatcaggtttacagcccttaccagctgtgctggccctagccctgctagggcattggcaggccaggaagaagctgtatagcaatagtagaagccagaaggacctgacagccacattcgccaaagcagaacaaggaggattaaactaaggaaaccagctcagtgtaaacatgtggatggaatacttaatttaggggcaacaaaagtcagtgcccaaaacattttagtcatacttctaataaagaatcaggccatgtatggattattcacgtcagagggatgtaaagaactggcatgattatgagaagtacccaagaagaaaatgctaaggagtagggggactttctctctatggaagaggttagagttgaatttaacaaggactgttgaacacttaatctggacttggccctgagctggggacacacagcttcttctgttcttgagaaagcctatcagacaggccattgctaattcaccagtcttagttggtctaggctgcccagcaggcatggaggcagttgagaagcagattctccacaggattctaaagacccacactcaacatacataatggggtcaaagtcaaagaccttaagatggccttttgcaatggacattctttgagataattccaaagagagcatcagccaatctagaggaactgaagggatgtggttggacagcatcatcgctgcacattgtaggagggggcagtgtcaaatatggcagaacgtttcctctgagagagagagcccatcaagccttcccctgacccaccctccaacatccacttacctgataaaagtgctgtcttctcccctgtgaggaacaccatgatttgtactgtgcatgggtctcactcttatagaaatgtgtcaccctgcgtttatctcctaagtggttttccttgatattctgttcagtagggataaaatagaaggcatctttgggccatctttgttatgttacttccaaaatgtgggatccaattgctgtccttgagctatatatactgtgccaattcctccttgttctttcacagacagaaattaatgtatatcatagacacacagtagaaccatagcaactgagggatggggaaggaagactaaatgggaagaactaaaagacaagagttcttatcttcctcacctcccactaaagcactgggacatagtggaatttcctttttctcagaaagactaggtggaaccctgggaaaaggggacttgggagctaaacttattgacctggctttcaggaagaaccatgtaagcaaagacaggtagttcttaaggtttctatactatccaacctgggatcctgg

SEQ ID NO: 57236 - DNA, 1555 bp, Bovine  19866880956812
  misc_feature (1)..(1): n is a, c, g, or t
naatctccaaaatatacaaacagctcatgcagctcaatatcaaacaataagtaactcagaaggcagaggatctaaacagacatttctccaaagaagacatatagatggccaaatagcacatgaaaagacgaccaacatcagaaatgcaaatcaaaactacaatgaagcctcacctcacacaggtcagaatggccaccatcaaaaaatttacaaacaataaatgctggagagggtgtggagataagggaactctcctatactgttggtggaaatgtgaattgcaacagccactatggagaacagtatggagcttccttacaaagctgaaaacagaactaccagataacccagcaatctcactcctgggcatataacccagagaaaaccataactggaaaagatacactcaccctaatgttcactgaagcattatttacaatagccaggacgtggaaacaagctaaatgtccatcaacagaggcatggataaagaagatgtggtaatattccattatataccatggaatattatcacccagccataaaaaagacaaaaaatgccatttgcagcaacatggatgaacctagactgtcatactgagtaaagtaagtcagacaaagacagacaaatatcacgtgacatggtttctatgtggaatctaaaaataaggctacaaacaaacttatttacgtaacagaagtagagtcatggctgtacaaaacaaacttacggttaccaggggataaatgtggggaagaattaattgagagattcggattgactagacacactactatatataaaacagataactagtaagaacctgcaatacagcacaggaaaatctactcaaaactctgtaatggcctacgtgggacagggatctaaaaaaaaaaaaatgtggatatatgtataactgatttactttgctgtacacttgaaactaacacaacattgtaaatcaaccatactccaataaaaattaaaaaaaaaagaagaagaaatgtaaggggagaagttaagggaaagacatacacatagtagagatggaagtgtgccactaataaatgacttataaaagtaactattaaagtaatgtgaatgtcacaaatactaaaggtccaagagtatcaggagtttgatagccagtcacttgcacaaacaagctgtttttaatcagcttaaattataaatctgttgatttctactgtatattacagttgtgttcaaaaacgaaaaaaatttgtgactgtaacagaaatgactgatcttatacttagctaaagaacaatttaattttatcaagattacaaaacagtacctataagtcgaggaataactgttttgttgatgacagtagacaagattttcttatcagaactatcttccttctttgaatcttccatactgcaatctataaattcttctatagatgtaaaccatggcatctgttttaaacctatggaatcaaacttataaataaaattatccaagttataaataaattcttaatttttatctttatatagttaactttttcagtaattaccagag

SEQ ID NO: 57237 - DNA, 1195 bp, Bovine  19866881391070
  misc_feature (1)..(1): n is a, c, g, or t
naccctggccttcgcagaggcctcctggctgcattcaatacagtggtgaacttcacctacgcagtccacaatgagtggtactatggcctgttctactgcaaattccacaacttcttccccattgctgctgtctttgccagtatttactccatgacggctgtggccttcgataggtgagcttgacctttgtggaaaaagggaaaaagtatctttaaaggaagatagcattgctatggagcttcagggtggaatagtgcatggttcaaggtggagattgaccacttgcaccactggatttgtactgacagctagccgagtcagttgttgatgggggattttaatcttatctgatgcttttcttttctgtctctctttccttttctactcctttccatttttctgtctcttttccattacatgtacatatgtgtgtgcaatcactcagtcgtgtccgactctttgcaaccccatggattgtagcccgccaggcccctctgtccatgggattttccaggcaagaatactggagtgggttgccgttctcttctccagtgcattgttcccacatagggagtgaacttgcatctcctgcattggcaggtagattctttaccactgagccgcctggaaacatccccccccccccttttttttcttcatttaactctttttttccccttccccactcatctccctgacatttttcctttcaactcctgctttgcttctttccatatattccttctgtcttctgcctttacagcctaaaggggatacctagggtatagccaagggtctggcccctgactggggtactgtgaatccttgcagggctgctcttctgctgttcagcctttggatgctttccaattttgagtacatgtaggcaaaattcctcattttcactttttcctgaagattcaggggctttttgctcccgtcttacccctctaatattatttggatgttaagagcattccattagaatcataaaatgcagaattctaattaagctctgtctatgctgctaggagttctcattcaggaatgagaggcagctatgttgttcttaaggaactccacatatagggatccaggagtttttcaaaatttctcttgccatgtaaggtcaatgtttttagactgtctgtatccatagagaaacatgcttggcaaaggcaatcaaaggcaattg

SEQ ID NO: 57238 - DNA, 889 bp, Bovine  19866881394637
  misc_feature (1)..(1): n is a, c, g, or t
ntgtgcctgatgtgcaggttatcaacggcatgctcagggttagagttcaaggagagttagggatgctgcctcaaggctgtgtctctaggttctccaatgctccttctgtttttccttgctcagcctcgtgagcagagtgaattaatccccttaggccctccagtgaatctagctcccctacaggcatggtcatccattctttccctagagtgttttagagaggaagaggcctccatatgaatgatttcttctttactccgccatggcaatgcagacttggaggaaatgttaaattacctttttgtatgctccttgaatttttaacaggtcatctttgaattatcttaaaaaataaaagcaacatggttttcctgattgtaaaattaaaccttgttcatgaagaacatagacacaaaaatgcaaatcacccacgactccaccatgcaaaagtaacacctgttaacatttgaatttctctttttatgactatttcattacattactgaggtaagattctaggtaatttggtaggttatttttttccattgatattaatggaaaacatgaataatattttctcatgttattaacactcttcagtaacataatggtagtggcttcctcttaatattattccattacatgaatatgctattactactttaaccatctccctactgttgagaatctgctaattctgtatgataattttattttgttttcttgattgtttccttagggtagattcccagaaataaaattactgggccaaatgaaatgagattttaaagaatgcttcttcctagttttaaaggattctaaaccctgggcagagcaaggagcgtgtcttttctgtttgttactttatctcctcagaataagaagagta

SEQ ID NO: 57239 - DNA, 1014 bp, Bovine  19866880289695
  misc_feature (1)..(1): n is a, c, g, or t
ngagataagccctgggatttctttggaaggaatgatgctaaagctgaaactccagtactttggccacctcatgcaaagagttgactcattggaaaagactctgatgctgggagggattgggggcaggagaaggggacaacagaggatgagatggctgaatgacatcactgactcgatggatgtgagtctgagtgaactccgggaattggtgatggacagggaggcctggcgtgctgcaattcatggggtcgcaaagagtcggacacaactgagcgactgaagtgaactgaactaaactgatgcaatgctcagaggacacaaagatgacaggcacagtctctgttttccaggatatcatctacagtagaggaaacatcagcaatggtatcaagagttgcttaggatcgtcatacttcatctttccccagtattctctctgagcttccctaaaaccatctcaagtaaatatgatctaaataaaacactgctctgccaatgtatcttagagacaagtctccttggcccccttctaccagattacttcccctaagccctctgcagatccacttaagcccaatgatgggaaacagacataaactttcagtggcaatatcatgggataaatgacataactatgaagaccactgtagcccagagtgatgactagtaagggattaggatgtcaggggataatttcaggaaattcttaaagggtgaggacacattacccatgcaaataagaggaaatttaggagaagggaggcagaaggggcagcctttgagaaggtatacgcaagttgactgtacaataactacaaagggcttcagcattacaagagctcaatgtgtcaatgggaggcgtgtcaaagattagcttgggctgatgaacaaaggaccagattatagaggggatgcatgtcttattaaaagtccaaatataaattttatattgaagatcatgatacccacagaatactaagcaagagagatattttaatgggagaaggaagaaag

SEQ ID NO: 57240 - DNA, 907 bp, Bovine  19866880345925
  misc_feature (1)..(1): n is a, c, g, or t
ncttaggccttatatttgatatgcagtccatggggttgcaaagagtcggacacgactgagcgacttcactttcactttttactttcatgccctggagaaggaaatggcaaccctttttcccaggttcttgcctggagaatcccagggacgggggagcctggtgggctgccgtctgtgggggcgcacagattcagacatgactgaagcgacttagcagcagcagcagcagcagcagtgagaaacgttggaattcagagttacatgttgctgttgtcacacttccccaggtgttccagattgcgtatgtgattgtgaaagcagctaactcccctcggcctggaaactggattttggaacgctcactggataatgttgtttacaagccctggcagtatcatgctgtgacggacacagagtgcctaaccctctacaatatttatccccgtactggaccaccgtcatatgccaaagatgatgaggtcatctgcacttcgttttattccaagatacaccccttagaaaatggagaggtaagatgagaaaattcaccctcaatacatttaagatggcaaaataggcctgtcagaaagacttgaatatatcagtcactgatgtcagggagattttaaaataggatttagcagaagtacatttaaaataacttattaaataaaaagaaaagactgaagggtatgagaattttaactgccttcatctagtatgtatcttgtgtgtccaataaagatcagagagaggaaatgggtttaagttggaaagtcagtgattaattttaaagaaacttttctgacagtgaggcttgctaattattgaaggattgagaccttagaagaaaccttaaatctgtgtgtgtgctctaagtctgaagatagggacaaaagagataaat

SEQ ID NO: 57241 - DNA, 1260 bp, Bovine  19866880356029
  misc_feature (1)..(1): n is a, c, g, or t
ntttatttgtgatgattaatacttggaggttaagaaattagatgacaagaggttgaactttatagtctaccttttatttaaaatgttgaaaactttcatgaattaaacctcttactgccctgggaaatcataaaatgcactctaattcctgcagcgcctcctgccacgttctatgctggacagacatttagttctattttaagtcctatttaaaatctatttatgtataaaacaatttagattctctgggcatgtctaaaatgcaagcactctggtacaagattgtggagtattaaaaccctgccaacttgggtcttattcaaattatattgaatcagtttgtgattctttgatttattatctatagttagattatccctatttttttaaaataggaagtcacacttattagcatatgcatacacatagaaaaatgaagtgtaaaactatgacaaggtgctctaaatcttgtagcatctgaaacttttaatgttatacttgccatttttattttactccatatggtttatcttaaccatgaacacattaaatggattccattgtgttaaatggtattttcagtgtggataagggtggaactgtatgaggacattctttgggaggtggggctgttgtagggttctgttttattttgttgacagtaatatatggtcctgtgattaccagaatctttttttggtgatgtcatgtgggaaagttagcatttattcttctttaacattttactagatctttagagtgttctaaaacaagcattcactacttagtagttaagcattccctctctttgtttgtttaattaatatattgatcggaaccaaatctataggatcaagcttattgagacagactatctgtgcctctttcaagagatcgttgctccgttccacacttttcagtaaataaaatatggacaaaactgaaacatgtggagactgaagcatccattaaagactttggcaatagcaccttaaagatatttcagaaataattccgctttattacttcttctgggccattgcatataacgagggttttaaaaagaccaaatacagctctctgatttccatttaatggaagaagtaataaagtttaattgtatacttgagcacagggcatcatttccagtacatctgatcaataattcatcgattgcctttggctcaaagtaatatttgaaagaaactgcagccagtgggagcttatctagctgtagcctcatcatctctattaattatg

SEQ ID NO: 57242 - DNA, 1332 bp, Bovine  19866880389195
  misc_feature (1)..(1): n is a, c, g, or t
ntagttaagcacacttaccgtataatgcattgtacagagttacacgttccagctgctgccagctttgttccagtgtcatgattgctttgcaggctgacgttcctcagggagtgattcgagtacaagctccccatctttcgaaagtttccatggcaatacagctaactgaagaactcaaagccagtgatgtacttgccagatttctcagccaagaaaggtagaggcctgttttgttttaattattgcatggtatcactcacttgctctctctccctccccgctttttttcttttttttctaaacgatggctggtgtgaaggacttaaaatgttagcagaagagaaaaggagacctaaaaataatactgttggaatgagtcgagttcatcgcgtgtagtttgtgttcaagttgagcctgttgcaggcaggcggtctgagcattccttcgctctgtctgcagtggacttggcacatgacactactcagtattctttccagaatatggtgattggaggttaattactatgtgtagtctgttaggaaaatcactaattaggatacagtgggattaaaacaaaagatacaactttttcaatgaaatataatgaatacaaagaaacgcttaaattttaagacagaaggtataaagaattcagagggaacagatggccaaaggagttctgaagtcacaggtcaaagcacaccctcctcagtagagaccaccacgtcttcccctctgttatggggctgatgaggcaggaggagtcttttgaaagccattggcatcccttttaagctggagaataattgctttacaatgttgtattggtttctaccatacaacaaacaatgtgaatcagccgtaagtatacatatgtcccctccctcttgaacctccctcacaccttcccaatacacactttttgagacatgtttgagatatcttttcttgaattttggaggttcaaacagggtatggatatttcagtgttcaaattcttatttttagctaaaattatattttaatgctttcctttctcatttccacttattgaaataaataaatctaacttttttttttaaagtcagagacctcagaggcattagctgtttagcttctttatactgatttcatctccaatagaatttaatctcttcattctttcattcaagttttctgtcaaaatttctccagttttaatacagaactgcatgtatttaatatgtctctgctctgtctatggccctctgctagatgttgaaaagggtataaaaaatatcttaaagtgtgttccgttgtggtttgtaaattggaagaagacatgagcctgtg

SEQ ID NO: 57243 - DNA, 1422 bp, Bovine  19866880395879
  misc_feature (1)..(1): n is a, c, g, or t
naatattggtattttggtttctgttagtctattattaccatactataggagggtcttaaatagcaggttcaggtttgcagatcagcatccagtttaccctgatttaaaagttaggaaattctgctaaagtcatagtgtcaactatcctgacaaagagggtttctttggtgaaagtcatagtcatagaaattatttccataattatatcttctacaatcctagattatcaaaaagggcaggaaaacctatactgacatttaaagtgaagtaagatgatatgattaagtttttaaatatagaaggtcctacaataaatgagttataaaatcaaaatgacccagaaaaataataaatctgctatagagagttcaggcatatagcaaccttcctctgctccctgcctctccccactattccttgtggcacattccattctttggataaaaaaaatgacagtcaaaatttgctgaaaatacccacgctttcctgtatttatgtacattttcctccccttctgaaatattccctggtatccatccatttttcaaggccaagctcacatacctcaaaccccgtggaacactccatagatggtttctgacttcacagaatcaaaaggaaattcctctttccattgaaattcccactgaatctcttttataatggagatcctaatttatgacacttgcattctagtaacatgccacatatctgagtcacatctgtagccatctttcaatgtttattgattaaatgagtcactcaaaaatatttttcactagggacttcccttgtggggccagtgcttaaaactctatgctctcaattcagggagcatgggtttgatcccatgtcagggaattaagatcctacatgcacatagtatagaaaaagtctcactcaaaatcatatgctaataaaagtaaaatttctccagaataaaactatagcaatgagcactttccttactagcaaaacatagtcttaggaatattgtctaaaataaaaaagttaagttgcctctatctaccatatgatattactattccccttgctactgagaaaagacagggagggaaagagaacagaggatgcagtcactttccccccaaggcatctcatgaacagctgaagacccctaataataggaccatggctacacttcccaaatgagttcggggatcatactgtggagagtatggccaagctttcttgcaaaacacaacagtgagatcaggatggtgtgagggagttgtacccaatagacagcaccgcacctctcatgggcatccagactctctttgattgttagtttagaaggaagaggcccaggtaccagcatctgaaggcacttgagagttctcaagtgtatgtgaaaagtcaggtaattgctgtacttttggcttttgccagtatatggga

SEQ ID NO: 57244 - DNA, 1249 bp, Bovine  19866880414738
  misc_feature (1)..(1): n is a, c, g, or t
ntatagcagttttaaggaaacaatttaagggggacaatagtactggaaacgagttatttgctgagatagttttaaataaattaacagttcataatgttactgtatttaaatcagagctataactatactaatagtgaatgagttacaaaaatcagtaaatttatcatctacattctgtgtttgagaatttcaaataagagcaaaatgtaggtaaagaaattttaaatgtcgcctaccgagaaataaaaaaacccacattacctaagagctgtggatggctgagttttgaactacaatattatctttgctttgcagaaagacaaggtacagtatggtattgcatgaaatgactaaaattaaccttgaaagtccatagttgggtcctgggttggaggaagtaaatggagaacataagccatagtctaggagcttagtactgccttgcccttgttcaataaatgttctgtattcaacaacattaaacctactcacttttacaacttttgcatgttagataaaatttacaggaaaaaaaaaaaacaaacagaatgataaaagagcctcagtacatttagaattctatctactcattatccccttccctttaccatttaaaatcaattaccaggcacatgtttaaaacaaacaaacaaaaaaaactaccaaaaaatagttttgtaaatgaaccagattgttaaaaagctttcctcctaaccctgaaagtcctgaagtaaatggtaggaaaaacaggtgttctcagaacagatttcaagagtatatcttcgtgaaggtcttttctttgctcagtcttgataccaggcatattactgccacctctgatgctcagaaagacacagagatggatgaaccacctgggcagagaataagagcaacttctctctgttgctgctgctgctgctaagttgcatcagtcgtgtccgactgtgtgcgaccccatagacagaagcccaccaggctcctctgtccctgggattctccaggcaagaacactggagtgggttgccatttccttctctctgttaagtggctgctgctgctaagttgcttcagtcgtatccgactctgtgtgaccccagagacggcagcccaccaggctcccccgtccctgggattctccaggcaagaacactggagtgggttgccatttccttctccaatgcatgaaagtgaaaagtgaaagtgaagtcgctcagtcatgtccgactcttagcgaccccaggactgcagc

SEQ ID NO: 57245 - DNA, 1774 bp, Bovine  19866880428094
  misc_feature (1)..(1): n is a, c, g, or t
nactgggcagtgtacttgtaaggtatgcgctgctgaaatttaggaaggaaaaaaaaaccttactcagttctatgtgcattgctgttttaacttcagttatttattcctgcatcattaagctgaaaagaaggacatacgaaaattcattgccagacgcagagacttttcctgatatacagataagcactgctttttaagaacttattttcaaccagaacccaattttttttttccctagctcaaatgaatgatgtattttcgaaagtaaagtttagtttctctttacgtatttacttttcttaaacaagaataatctggaagggaaaagaagtcagttctcttaagcatcactagagaaaaccacagctaaatgataaagtttatttttttaaaaaattactcttcaaattaacccacaatcactgtacactgaaaaatatatttactgctgtggaagttcagtaaaatttcttcaagtataaacactgacattacaaacagtgactgtatgcaaattccagccctcattaatactgctaaatgatgtagaaaaacagttgattaaaaatgataagaaggattttttccccctaagatatttctggaaaatcaatcccaggataaatgcagtaaagactgggtcagaagcattagtatattttcaagaaaagtctatgcaaagagggtccaaggaaacaggaaggtgaaatctggaggggttgtgaagagtcttgagaatttaggaaaatggaagcttctgccattaaaagtcctagacaaaacaaaaagtatgatggtgcattattacatattatggttatatattatatttaatacatgctatatgtgtgtatattcagcattccaaaataactatatgaatctatattttaacatctttcttgcttttcacaactttgcatcacatcaaagtttgggaatcagtggaatttcatttcactttcaaaattctaatgactctttcataatcctcacagtggaatagtaggaaatgtgctgcttaaatgtaaaagaaaataatatgcaatattcttaataatgtatgtagttataaataaagtgtttttttagaccaatgacatgctaacaaagagattacctactctgctatttgagatgtgaatttaatattcagtgttcttttatttattttttgtttcattttctttaaaacattctcctgttatttattcttgagtttatttctctcacaacttccccatatggactctgaagaactctcctctttcttcaggtgaatgtggaagggatccactgtgacaggtgccggcctggcaaattcggacttgaggccaagaacccacttggctgcagcagctgctattgctttggcgccactactcagtgctctgaagcaaaaggactgatccgtacgtgggtgagtaaggacctgctgagccatgtaatggtataacgttagttcctgctggtgtcttttagccaggcaccaaggggcaggaggaaatggcaaaacgtttaagtaaccttttcccctgtgctcatttagaactggtagaggggccatgtgccattagatgattggagtagacaccttttttattctttctttaaaagtattcatttactgtggataaggaaatagatgccaagtgagcaaggaaaacattataagggaaatgttatgtctggggatgggaagaagctgccttctgcagagtgagagcattagagcaggaaagtagatgtgtgcctcatgtagtgaaaatctgaa

SEQ ID NO: 57246 - DNA, 1223 bp, Bovine  19866880532291
  misc_feature (1)..(1): n is a, c, g, or t
nagaggctgtgcctgtgacctcagggactcaggcacgagggaaaggctgaactttgtctcactcagctatagcaaatgaagtacactttcagtgaaattgaattttctcagggaccttcgttatgaatacctgattagcccttaaaatagcaacgtgattattctaaaagttcattgtggaaggcgatattgtgatttgctgctgaacatattaaagagagaagtttatccatctgaatcatatagcttcattgaaagtagttttaacatttaatctgcgcttccagggttggggggagggaacgaatgtatttcagttttggtagagagagacttttttggatatattagaccatgtgtttgtgtaaacaatttatatttgttatcagcaatggatattttctatgaacatatttactactgaagaagtgacatgaaaatcagtaaagttacttaggctttttaatgtcaaaaaagtaaaaaaatcattaaggttttaatagttcctgttaggtatagatgtgtttccttcaccataatttttataaaaaatgtacattgtacatatatttatgtgcctactaatatgttgtggattagtggttaagatcacagcccctgaagttaaactgtgaggttggaatcttacgtctcttttaacaatggccctcagtgtcccatctaagtttgcctgttgtaaaggggagataataatgctgttcaccttgtaggattagtatgagggtaacatacacttgacataaacatgctgaataagccttgcttaataaatggtagcaacttttgctactgttgtatcatgctattaaaatataaaaatagtatccccaaaacaagagtgctttcagtaactaataacaaacattaactccaaataacaggtaatgcataacaagatattatagacatggttcaatcttaacatcttaatgtttttgccaagaaaaatgtgccgaaaggcagctggttctcacctattactgtagatactgtgtacgtgctaaattgcttcagttgtgcccaactctttctggccccatggactatagtctgtcaggctcctctgcccatgggattctccaggcaagaatactggagtgggttgccatgtcctcctccaggggatcttcctgacccagggatcaaacatgaattttttatgtctcctgcattggcaggtgggttctttatcactaggccac

SEQ ID NO: 57247 - DNA, 1578 bp, Bovine  19866880595996
  misc_feature (1)..(1): n is a, c, g, or t
nagaagacacatgaagcagttaagtattctgggtgggaggagggacatggctccagcttttgcaatacttaagtgcataagttttgtgtgtatttagtcactcagctgtgtctgactctgcaaccccacggactgtagcccaccaggctcctctgtccaggggattctctagacaacagtactggagtgggttgcaatttcctactccaggggatcttcccgacccaggaatcgaacctgtgtctcttacgtctcctgcattggctggcgtgttctttactactagtgccacctgggaggccttaggctttagtaaattaacatatttgaaaaatccatatcagaacaccacgtagatacacttttaaaaatcatgtttcattacccagtaattaagttgaagagtcaccttgtcaaaacccacccaggagagactccataaagggagccaatgacaaatatattaccatctatgggtagtggtgctagactgtaaaagtggaattcacaaaaatcagtttcctccaggacaggccattgataatgtgacagatgaatgctaactaccacatgataggagctatctgcccgattccgtttggctcttcttgcattttattaaattatcattcccatcccttagtcagcttcctccttactcactattatcttgttcccgagtatctgacaaatgtcttctcatttaccctaatatgtacaatcttcctttcattctctacattagactttcttatttttacattctcttacctctgttctacaatttttccagtgttcctttgtaaatgatgccttatacactactttgcaagtatttctctttcctttgattatctttttacatttaagttcactcaactaggtattttttcctttttcttctattttctttatggttgtttcgtgtgtgttttttttttagagtatttatatccaggcagcacgcattaccattagacacacattcatttacttctgaacaatgtagctgttacttcttgctttagctcaagcagttctcactgtgcctcttgaaacctgcacataattttcttggttggatattactagtgtctttcattttctgccttctttatgttaaaactagaatctaatggagcaaatctaactactgaacagacaacattgcttagttgccgtcctcctttgcatttccaggcttacacagtttcctgctgaaattaaatttcagatctaatcatttacatgatattctcaagggtcatcttcagatactactggttctgtatatccaagggtcagtgaagtgccaggacaagctactaggagagacagtgcccaaggacagagacggtcaactgaccctggggaaaaataagtcagttctatgtgaaatttctccttaaatatttcagggggtcagttttgaaagttccaaataagtatgatttgttatacgttatctctctctctctctctcttaaatataatagtagaaatgaaaaaacattggcaacttaaactttttggagctggcggggtacagagttatttgtttaatgatcatgggaaata

SEQ ID NO: 57248 - DNA, 1081 bp, Bovine  19866880619090
  misc_feature (1)..(1): n is a, c, g, or t
ntagtttttgtatttattttctgtgtatatttcttaacacaaaagaaaaggcactttgtctgaacacagaaaagctgaaatctagtctttttaataggattctcagcaattgaaatcaaatcagaacctatacttcacctacttggggaagagattactacttcagcagatttgagtacatttgctggtttgtcattttctgagctaaaggttccccctctatgcaccctgctccaacatactcatgtgctcacaaagcagtacagctagagcctatcccttctccagcgggtcttcccaatccaggaatcgaattggggtctcctgcattgcaggctgattcttttccaactgagctatcagggaagccctgagtagtaactaccccaataagacatttgcacaagcagactgcatagttcagactcagaaaggataacaaggaggcaatcagagctggagatggtagttccacgtgaactgggattctctgatctacccacaatgattgacttgtctaccctccttacttttatgactcctggacagtcatgaagaagataatccacaatgaaagcagaagaagcacttctttgtttagtgagccatttggctagcacctttcaaacatgaaattggacccataagggagctgttcaaaattatcagtgcatggcattggacaaatggtagtcttttgcatctaacaacatggtaaattagatgctaaatatattttaccaagaaagcaatcaaaatgtaggcagctaaaaaaagaaaaaaggatcgtgatgatttccaggcagttcataatggcaacttttctggactttgtgatgtttgtggtcttgtcagcatttttcactctgcaatgatttcttattctaaatattcactttattaaaagaaagtatggattaaacaccaccaggaaactaagaaacagatcttccttatatgaataaatgaatataaaatgaaagtttggaatgacagaggttttggagacattgaagggacataaacaagagtgaagataatcaaaagagaagtttgggaggttttacatccatttttgatt

SEQ ID NO: 57249 - DNA, 1275 bp, Bovine  19866880628294
  misc_feature (1)..(1): n is a, c, g, or t
nactgaaggaaaagcccttcctatcttccaatttgggctggaggaaaacaatgcaggaacaagctctgcaatcttatccttaagcaatgctagacccaaggctgagactcttaaagctctttggagactgagtaacttagaaacaacctgaggtgcaaagttcagactccaatttgcatcatccactgagcagtaatatgtttgctttcctgggtagagaatcgagtcttcctccttgaaacctctgcaaaccttgtgctcttgactggcagggattcccctacattcttgagcatgagagagagtttttctaaatgcctagcaaatacattcatcagacattgctcagtatagattcttctggtctcctcagcacagtaccagacacaggtacatggtcacatgtaccatgaaaactagtcatggtatgtctccaagtttgacttatagcaagtgggtattcatgcaaagcaccggaggtcaatctaatagagcccatacagatatctggctcaatcaatgaatataaaaatggatattgactgttatttgtgttgttatttgataactttaaaaacaattcttttcaagattgatttcattaatattttctctttttattactgtttgatcatgtatgttctgaggaatggtagagagcttcaatctatgctcattaacattcacaaaaatcccactgggcacgcatggtaaggaaagctttcctcatgctgctgtctatctcagtgcaaagagcctaaccctcaaagctctgcagcatcaagagtgaatggaggctgctgactcctagctacatccctggtccctatttccagtgaccttatgtaggtttctctaaaaatctgcataaagtttgggagcacattttcccacctacactcgagttagtcattgaaatttggctcttcactagcttgtgtaatgaggaagaattttgcccgtgaaatgtgtttcatgcaatgcttctacaatgaaatttaattaatcagttctagattcaaaacagaaggacagtttccctgtgtactgtactttcattattccaagtaccttatttgccaaactgatctttgctctttcaaaagagcacagaattaaccatttgataaagaaaagctcatttctcagcacattgacctactttttccttaatttatctcctttttaaaatgtgagtgaatagatactttttatgaatatttagcattgagacaacaattgaaccattaatcaaaataataaggatttttccat

SEQ ID NO: 57250 - DNA, 1101 bp, Bovine  19866880638665
  misc_feature (1)..(1): n is a, c, g, or t
ntttgtatgcaaatatgtacattcagaaacctatacactttaaataacttctcatttcctttagagaactcagcccctctgagctgaaagaataaatgaatgattcaaataaataagaatgaagataggagtaaaataaaatttgacatatcccaactttctttcacagtgttatctatttaattaattcatatttcaaataattaaataaatagaatagtttggctgatgacattattaaatctgattcatatcgcgaggaaaattttcctcaaaatataacagagtttgtgttttccaaaatataaactaattttatcaaatttgcacaagagaaaaataaaatgatactggtacagccgtatgacacccaaatgtcaaacacagcaaagtatctcactcaaagcaagagatcactgccctgcctgctttatttttctaatatatggtccactcagtacttctaaaaaagtatataaactcttctttccaactgttatttacaaaatatatatatatgtatatacttggagtaagattaataaatccttgaaagtatatatatattttttcatgatttaaaggaccttaacaacgccctagtcaatgcagttacttgtgctgttgctgaatctcactttatgatcctctcatataaattgttcatgaggggacttcctcttataggctcttgaaacaagaatgtatcttgtacatttatgttacgggtttatgatgatagattgttcttgccacagaactggaaactaccaagccagtttataaaatctgttgataaaaatagtgctcacactaaagcagactcatttaccaagcaacccaagccttctcaacaaatattcaatttcccaaataaaattagaaatgttctgctacatgagaatatgtgtaataagagcaaacatgtttttaatttttatttttcttattaaacttaaatgaagatgactctgatgaagcagcatgttttttgaatttcaggtgatacacctgtgactcaaggttgtattttttcaccataattgaaagagacataaggtttatcctacaaagtgctgtttgaatgccaatgttcatcta

SEQ ID NO: 57251 - DNA, 1794 bp, Bovine  19866880692020
  misc_feature (1)..(1): n is a, c, g, or t
nggacagaattcacagttcttacatctccctgcattggcagggtcctttcccactagtgccacctgggaagccccaaccctatgcttcaagggtcctttgtctcagagaccctttcagctcttgccatttgaagcttctttcaagggtcaaaaaggccgtttccattcttcctccatccaaacctcctttctccctccttcagcttctaattcccaagaagcaacccagcaaactcttataattaatactatctagagacaattaagcaaatattaaaccatttagctagagaaacatatagtgagatggaggattttaaaatcatgccataaatactgttgtgctttcaatatttgtagtcaccagaatagtttttaaagttgttctaaaagaaagaaaaaggcacaaaatactgtatttcaaattaggcttctattttttaaaataacttcattgttagttttgactcaagaattataaagttctgctgagagaagaaaaattataaaaatgtcaagctctattattatcagtgtccttctctgtaccgctatgtctttgagccaaagaagaggtaggagcactgcacaataaagaaatcatgaatcctgctctcaaatgagctctaatgtcctgggctcattagcacacgagccaagctattaagagatctgtaatgtcttacaaggactttgatttaggattgccccacataaaaatgacttcagctattagggcagcgattgttgaatcaccagtattaattttttttctactgccatatagtaacttactagtaaccacctttaaattaataagctagttgattacattgtatccattatttttctatgtattctcaactcctgtactcagttgaaattttgtatttcaacagtgaaagtatattaatactaaagagatcattaaaaaagacacagagacatagacaagaggcacagagatcatttggaatcagagctattctcgaagtatcactaaaatcatctcattattaatatttttacctttgcaatgaattttatggatgctctagcatatcaataaaccattcttgtcaatgtaattttatctaattcagcataaagatttacttttcaatgatgaggtgaggaaagtaccctatgacacaaaatttaagaaggcagatgcccaaggcatctcatccacctcaccttggtcagagtctttgccaataaagccccagaaagaatcaacagaggctccaaatacccagtattgaaagaataaagtttttattcactttattgaaagaataaagtttttattcactttaagtaataaatggcattcattgaacatttactatgtaccaggcattctctcagagaaggcactgggcaacccactccagtactcttgcctggagaatcccagggacagggggagccctggtgggctgctgtctatgggggtcatacaggagtcagacacgactgaagcaacttagcagcagcagcaggcattctcttgaatgcttcacatggattactgctttaatacaacaaactggaggcagacataataacccacacattacaaatggaatctgaggttcagcatagttcagtaactcacctaaagttatttgtacagcaagagctaagccagggtttaagtaaaatgctcttaatcaataagccattcaatctacaaggaagggaatgatatggatcttttacaaagtaaattttttttaaaactctcatttcatcagaatgcataagggaacagcaactaatgtttaatat

SEQ ID NO: 57252 - DNA, 1046 bp, Bovine  19866880699355
  misc_feature (1)..(1): n is a, c, g, or t
nttagttcttctctttctcagtagagttcttagaattgctgaatacaaagtgtgtgacccagcaatcaaaagcaagatgcaccaagacttttcccacagaaatgagtattttaaagccacaagtaatgatgacatcacttctctttaaaaaaaaaaaaaaagaacttgtaacaaggctgctgtcaggtgaaaaaaagaacattttaactgttcagaattgtgccattcttcataactctccttaggaaattcccttcctgggaaattccttgttcactttggccctggctggaggggatcatgacttaggcagagatgacatgaaaactgtcattttgtaaaggagatgcaacagaagacagaactgagctgcctcagggcaatgaggggtgaacatcaagagcagtaaggacagcagagtggaactgcttgtttgaaagcttacctgagctgctttggttaggaaatcaagacgtgaaatctcaaggtaaaaaagctagcttgtgacaaagccagagtgtcttggctttagcgggaaagatcatagaagaagcttttcttgcaaacaacctggttctcttacacagtatgcaggtacgtgtaaaaaaagccaatggaacctctcaaagacgtcttaagtcttaaagagttaaaaaaaaaaaattacatggagggaagtgggttctagtgtttcacatgaaaccctttctagcagatccaagttatgccatgcaatactttaggacagaagtagagaaaaacaaaaaacaagcaacaacaacaaaagcaccccctccccaccaaaaaaaaaccctaaatgccaaatccagattttaagatatgagactaactggaatggaaattcttattgctatatttattaaatatgaaatttgagaaatcaaagactcagaaaagtaaagagaatgtagtgggacctctgtctgctagaccagtgattgccaactgaagatgcccatgaccatcctagaagtgaaaaaggaaccaaatacagaaaataaaccaaataagagtttgctttcttc

SEQ ID NO: 57253 - DNA, 4165 bp, Bovine  19866880727269
  misc_feature (1)..(1): n is a, c, g, or t
ntgagttttagacctatattaccaaatcctttttttttttttttcaattgttcttttagtctttgggaaagctggaatagtaaggagctaattttgtaagttgtctgttagtctaaaattccctccattccattccattatccctctttatcgggacatagtcattgtttatttgattaaggaattcttgctactctttgtttttgctgtgtgtgtgtgctcagtcctgtctgactctttgcgaccccatgggctgtagtctgccagactcctctgtccgtggaatttcccagacaagaatactggagtgggttgccatttcctactccagaggatcttcccgacccagggatcgaacccacatctcttgtgtctcctgcattggcaggtgattctttaccgctgcgctacctgagaagcccagtcctggttagtctttcaaatagttacagaatcctgctttcaagtttttttgttatgtttcttcttgaaaacattaggatttgaagaaatatgctaatgctagttctgactgagttgtacatagtcaaatgtttccagaggaaaccactttttatgagtagctatatttataagactttatttacttgttaattttcaagtaggttttttaatgtttacttttgcaaagcagtttttcaaaaaatactgcattttggctatccttactattctgccttgactttcctgtcattttaagaagagctgtttgttttatttgcttcctatcagtttttgctgatatttgataaatattaacgtcagtagtatttttcttcttactgaacctctgactctagttatctagttatcatatgagatatttttatgtcttccatgagtacatgtgtggtgttcatcatgaaagattttgttttgctgaagccatttgccactggttttgggcagaggcagaaccaggaggcacgaggtcacagtgacataaaccctgaaactctgggtgtggggccaggctgcatggggtcgaatcccaattctgccagtcattagcagcttggccttagaaggattctttaactgtcttgtaaattgaacttcatggtagtactcacttcacagggaggattacgtgggaagatctgtgtaaagcccatagaacagggaagagtttatggctagcctctgctttttttcacagtagatacagaaaaataacttattgagctttgtggtgtacaatatattctttttcatttcagaagtatttttacaaataatattttgtcatgtgttaagaaacatggccatgatccatatgcttaactaaaaatgacataaccagcaattaatgatgtaaaagttcaggccttggaagtttaaaagaccctggagatgtccttttgatccaaagcaacatttacaatttgaactagtgacagccacttataacaggccctgccttggggcattgatgggccatgctgaggtctgcaaacattgacttttatggcaggctggaatgtggggtgggtcctcttttggcagctggactaattgctgcctccatgcttctgtcctcctcctttaagaattactgcttccggtgtgccaaattaaagagggctgccaccttcttatgtctttcaagttgaatttgtaacattagaaaaaaagtacgctaccacagatagagttctttccttttgaatttatgtattatttgaaattatatatttttggtgacagaaggaatggtgaagagtttttataatgaaattatgtaatatgaggaccattttccttgaccttggagtttaagggtgatttgtctttctgattttgcaggagttagtgaccaaatgcatttttaacctgcccatacggataattgttttctagatcaatctagtcctcatttcctggtgtaagagtgctttctaaaaactgattttctttactgtgtcatttaaaagtcctactagtaattttctcttgagttgttaaaagacacagccagtattctaactagacaagtcttaccttcatttagaattgtgtggtatttgccttctaaccatcctcatctgtgaggtctctgatttttgtgggcctctttaaaatatcttcatgggacttatattaggtatatgtcttttaagtataaggatttataaatctcaagaaccccacctttttttttttaaaaaaaaaaaaaagcaaaacgaaaggaacctgctgaaaactttcctcaacttcaatggcacacttaggtttttcactgtttaccctcatttctcttctgagtgaggctagtgctttgcaaggtttatggttgctcttttaagttcttagtatttgtcatgtttttgagagtgttgtagcaaaacaaactcacaaagactgatgcatttaacagtgctcgtgatggcttctggattgcctggcaattagacctaaagagtttttaataattggcccaccaaaatgaattacttttttctcttgttttaaaattcctcattatctgtacacctgagtatcatttacagcttagaaaaaggacccggcatcctagaggcctaggctacacttgtgccaagcagaagttcccagtgtcccatggttgtggatctgtaaggtctcacattctttggcagcctctgctctcctacatcttgtctgaatgctacccagaagtccagagaagcctctctacttgttaccccgtggtggccctgtgagaaagcttgcaacagcagaaacttgaggcctccaggctgtggcttcggtggtggtgcggtggagggtgggcatgggaagggttagcagcgtggcctccaagcttggtttggggaagaaggtgtcctagaccaggtgtgatgccagtcccttcctgaactctcccctctgggtgatttctttcctgacctaaacctttcatttcatacaaatactccaagataaaatggcttgttgtcaaagttttagtcagtactgatatttaatgtctttgttttacttttgataagaggagatagaaagtaagaagttttcttacaggaggagactgggctttcccagtctattcggtgaagaacccaccctcaatgcaggagatgcagaagacaatagttagatccctgggttgggaagatccctggaggaggaaatggcaactcactgtcttcttgcttgaaaactcccataagtagaggagcctagcaggctatagtccatggggtcttaagagagtccgaggcgactgagcacaaagcatagatagggacaagtcaaggtgttgggtggattagggcagagggagcagacgggatgatgtgtggataattctgaagacacattcttttgacttctgcatttgttgctgggagctggccaagtttatccccttttttgaaagaagtaaacagaaaccatggagatctgcatggtcagttactacatctggagtcgttactcaagtccaccaaacatctgaatttttgtgttgggaaaaaaaatggtgacatgtcacccctttgacacatgctctttcggtagtcacttttgcaaagaacacttgtgtctccagggaaaatgaggtttattgcaggcatctgggtcataaggaaaagaccatgtcgtcttccctcaggactggtcacatgataagttgctctcttttggggactctattcttttctgtccactggctgtataatcatattttgagcttgagcttgtctcttaatggatgccccacttgtgtagccctctaagatcttacacctcatagcatatgagctaatttcaaatttttgaacagggatcagttttgcccagttaatttttttgagctgtctggggaagcccatgatttgaccatctggggtctttttagagaagcagattctgtcaatggggcagcttccctccaaagataacttggcatctttcgtaagctgtttagaatttgatttcattcctcgtctatgaaatgagtgtgttaaagttctgcttcacaaggttaattataaagatcaactgtgtagcttttgaaagcattcaaaaaaatgtacacatcaggcatataattgctgaatcattttcaatactctaacttttcccaggacagttcatttaaccagaattgtcatactgaacttttgctttaatttgcactttc

SEQ ID NO: 57254 - DNA, 2289 bp, Bovine  19866880770935
  misc_feature (1)..(1): n is a, c, g, or t
naatgaaataaatgtaacactgtttccacattttcctcatctatttgccatggggtgataggaccagatgccatggtcttcgttttttgagtgttgagtttcaggtggaacctagcaaatgttaacaaggaagaggacaactgacagatgatcactgaatttagcaacatggctatccttggtgatcagggggagtggatttgatagaatggcagggaaaaggtagggttgaagaaggtttaagagagatggggaagagaattgggaaaaaaaatatgaaaacactttcagagagttttgcttataaagaagagcagagacatgggttaatggccgataggagatgtggggtcaagggaaggttgtttttctttcctttttatagaaggaaacaagggactggcttttgagaggtatatggctgtgcacgtggggttcctttgcagtactaggagagacctcaaaggatgttgagtgctgacactggcaactgtaggtggtggtggtaggaccctgagaagttctttcctggatgcttccattttcccagtggaaagtagaaatcaagattatcagctgagaatgaggctgtattgggggtttaggaggtgagtaggtgtaaaaaaagtcattcaggggagtagagagtgaatggactgggaaatacagtatgatcagaaagtagaatggggattgccaggggctggggaaaagggggaaatggggaattattatttaatgggaacagatattaggtcagctgaaccaaagtctgtgaagttgtgataggagagagtagatttttgagaagatagggcaagaatcaaccagacctcaggaagaaatgcctctttgatcagaggctgtgattctggtgagctgctctatctgttccaaccacattccattctccatgctggagaaaggtcatttgttgagaggatattgagtggctgctttgtgcaactctcccaggaaggggatgggattagacaagctaactgaacaaatctgtccagaggcttttgtggaaatggagtcttgggggtagaaaactgaatgattcacgggaggaggaccatatacccgtccactggaaagctgagcatgaatgagattattcagagggccaaaaaattggggaataaccaaccttcattttttaagtgaattgacatgaggaaccaaggcagaacctcctctgtccttaccttcctcagctgcagctgcttcctcctgttctgtgcccctgtatcaggccacagcacctcctccctctcagtcctagcctgtgccttttgcttcaggtacgatcatcccctctgtgagactattatagtccttctgcaactccacaggctcttgtgtgtgtcctctgtaaatggtgtatttggcaattatgtcaggttggaccctgtactttgggcctgtgcactgtcaaaactgaacctcagtataatatcagtactgacttcaggaactggattttctaccatactcttatgaagggacagcttctcaaatatacaaatgtgactttgcactttttgcagaatacttgtggaatagaatatggccatgaatacataatttttttcgtattttatgctcagattttaatttttcagatgaatcacttgctgagattaaagtaacatacaactagagggatacctggagcctgtttctattggggccaagagattaaaggtcagtagaaaaatcagatcaaaaaatagctagtgcttatttcagatcctctaactttaatgtctaacttgcctatagatcactacagtgcactagactagtcttagagtacatttcttttatttacagtcatcatgggaagtcaatttgtcactgctctggtcatgcactggaaaattatttaatgaacactgattttctgtgtgtcatagtggagacggattatagtgtcaaaatcaagccactgtggttgtgattctgtccagtgcattcaggaattcctgattgaccttcacatgatgaacaaattcttgctgtttctcatcatgattttccaagattttcactaacttggcagtttgcagtattgatcaagtcagagttgtattcaactatttgctgcaaaatatcaacttgtgaatttttttttaaaaggtcaggttatggctattaccacagtacaatttgtgtagaaattaaagtggtgcttcttattcacattccttagaggtgtataagatgggcagggatttgggaaaactactgggagtgagggagggggagcctttagagggatag

SEQ ID NO: 57255 - DNA, 919 bp, Bovine  19866880786081
  misc_feature (1)..(1): n is a, c, g, or t
natgaatagagtgtttggttgttttcaggtttcactgaggttcttttgatgaaagttttcctttgatgtaacatttttaggtcttttaaaagtaaacaaagcacttggtgaaaaatactcagtgaattttacataacataggatctaaagataaccatatgtgaaagatctcagtcatatgagagactattttaattacatttcgataactggaagtaataactgcctttggagaaggcaatggcaccccactccagtactcttgcctggaaaatcccatggacggagaagcctggtaggctgcagtccatgaggtcgctaggagtcggacacgactgagcgacttcacttttttcactttcatgcattggagaaggaaatggcaacccactccagtgttcttgcctggagaatcccagggacagaggagcctagtgggctgccatctgtggggttgcacagagtcggacatgactgaagcgacttagcagcagcagcagcagggtaagaaacaagattttgtaaaaaaaaaaaaaaaatagtacttatcaccccagaattttctacatatatttttatagtaataatgtggccatatgatattatttatttgcatactttcaataatgtgtaccaacaattttatccctaggatgcaagccagtttgacagcaagagtcatatcataatatcaaaaagagaagagaggcaaaaacacagaaagggagggaaaatggaaagaaagggaccttatagatcatctagtcctacagttatctgtggtcacacatcagggactaaatacatcagctggtgaaagagctatccctgaaatggccagctatttctcaggccaatatttttcccctaacagaatgatgtttcttaaaaaatatataaaaacactaaaagtaattag

SEQ ID NO: 57256 - DNA, 1399 bp, Bovine  19866880794569
  misc_feature (1)..(1): n is a, c, g, or t
nccctgcattggaagtgtggagtcttaaacactggacccagggaagtcctggtgatagatacttttaagaaaagggagctcttatagatcagatatagtgacaatacatccgaagatgacgttctttcagcaaagcctaggctaacattttattaattttatgtctatacacataacattctaatatcctaatagtagtattttgattaactttattgcattatgcacactacctttaagtggtttattacctaaactctgtaatttatgcttgtaaagtaagacactgttccctgaataattattctggtctctggaacaaaattaaatattttttccaaaccttaccaattaatcttttgtcctcatttgagacggtattgtttctacataagcttattcttggattacagtttaactttctgagcactggatcaaaaattagatacatgaatctcattgttagatagtaaggctatgactttagtttgtttcaaactttgagggtctatataacagctaaaccggattcaggatcaagcttttagagcttataggaattttttttccctaaaaattttgtgagagaagaacagttttttgttgttgttgtttttccattttggcatagtttatttggccttttttacgtaggaattttaggctaaatatgaaaacatgcttcttttaatagttaagagttcagaaacaaagccaatagataggtaattaagttacttcgcccccatttgctcactctatgacatcacgtaaattacatccattctcttagattctgttttctcatctgtatgatggaagtcgttacagcttcgatttccaatcaggattaagtgaaatgatgtctacgaagttcttaaaacaatgccttgctcatagatatcattgactatctgtgcagttattgttgttaatggtttagaccaaaactgatgtgcagaagaactggaagctttctgtcctggcagaagggtggtctaagctgcctgtggttgttgtgtaggaggggcttggaggagacttaagtattggcgatagagatgggaagtgggtggcatcaaactgagcataaactagcttggtctggtgaaaagcttcttttcatttttttttttttttttttaattctcttctttttgtctctagctattccccttcctccccatcagagtagatttcatgtcagccagctactgaatcccttaaaacaaatgcaactgagattgaatgaatccttttaaggtttttcttttctttttttaaaattttaattcctaaagtacagcacttcctgcaaagtgaatatctgtttgatattttaactattttttcagtgctccatggcttggtaggcatgcagtttgatgcttctccattc

SEQ ID NO: 57257 - DNA, 1530 bp, Bovine  19866880800997
  misc_feature (1)..(1): n is a, c, g, or t
ntttgtttatgttcttaatacccgcacctggggtgttctggcattatcagtgtcatgtttggattggaagtagtgaaggaagagtgtcaggtagactgcggaggcctgggaagtgttcccaacctttctataaaaatcagagttttgtccaaaattactgttgttgttcatttgccaagtcatgtccacctctttgtggccccatggactgcagcaccccaggctcctctgtccttcattatctcccagagctagctcagatttttacccattgagtcagtgatgctatctaatcatcttgtcctctgttgcctccttctcctcctgccttcaatctttgccagcatcagggtcttttcccataaattggctctttacatcagggtggccagagtattggagcttcagcatcagcccttccaaagaatattcagggttgattttctttaggattgactggtttgatctccttgcagtccaagggactctcaagagtcttctccagcaccatagtttgaaagcatcagttcttcggcacgcagccttctctatgatccaactctcacatgtgctcatgactaccggaaaaaccatagctttgactagatggacctttgttggcaaagtgatgtctctgctttttaatacactgtctaggtttgtcatagcgctccttccaaagagcaagcatcttttaatttttcatggctacaaagtcaccatttgcagtgactttggaggccaagaaaagaaaatttgtcactttgggacattttggagtcttggagcatctaatatctttatctttccttccatgcttttatctcaaaacttctctcctgtacccctgccttcaaatagatacatacacataatatgtgtgtgtgtgtgtgtgtatgttcatatgtatatatgtgtgtgcatgtgtgtgtatagacacatgagtctatatatttatatttgtattcataaaagcacctgctttttactattctgtggaaatttcttcagttacataagtatatcagattaaaatgattgggtgtttccccaggcctgtgtgcctgctgacactggaatggcaggcgttggaatagcccttgctggctgggtagagaactgggttgtcaagagagacagatgaaccttttgtgccagtgtcaatatgttttgggctttggagaagagcgactggcaattgctaaatgaatactgaggaaaacattgtcctttcttggtgttttcctcctttgctggagatgctgatatagcctatgtaaacagaagttctggaaggcaggctcattgtagcagctttttccagcctagcttgcggcagccaagtggaatgtgacaagcttgctgcctgatttacatctgcttttgctggaatactatgaagtgggcagagagcctccagtgagaataataagataatgtgtatgacgccatccaagtcactgaggatttactactgcacctgttctgggcaataccgtgctcttttgctagccaggaattccccagtgt

SEQ ID NO: 57258 - DNA, 1141 bp, Bovine  19866880906102
  misc_feature (1)..(1): n is a, c, g, or t
nttgatgagttcagacatcatttatggataaacagggaattaagggttttattcaatactagacacacagtgggaacttaacaagtattttatagtcaatactgagttgttataaaggagttgttttcactttggcagttcttttcttcttttagtccactgaaaatctaaatgatcaattttgcgtccatatcaatgcactttgggggacatagggcacctctattagtgactgtggttctactaactgactcagaaggtgggagtgcttcctgaaaaagacagtttgaacttcaagggacagtggttttacaaactagctgaggataacttgtgtaaaacaaataatcaggtatctgaaaaggagcaatagccttacttgaattcctatctcactactccatggattctgaccttgctaaaacccacagtgtcctccctacatccaaaccctatcctttggtccttaccttaatccaaatctgtgcagtatgtgaggttaatatttccatccttctagaattttcctccttcgacttccatgataccaacttctcagtttctcttgcctttccaacctcattctcagtctccttccctggaaccctacttttctgaacacttctgaaatgttgacagtcaccagagtgctttcagttggctatttgtcaggtttcagctatctgggtagcctcaagtttatatttccttactatatgctgaccactcagaaataaacatacctggacctgatttttgcctaaaaatccacattcagcaggtgattcattatatacctccccagctgatattctgaattaaaatggttatctttttactcccagatctgtattatttattttatctggtaacactaagacccctacccaatctcctaattagacagtcatcttttctcctcaccattctatatcttaccaatcaacagccctactaatttcatctaaataactctattatctgttctctttaaatgattatttattttatttttcaatgtgttgcatggctttatgagcttccctggtggctcagtagtaaagaatccacctgccaggaatttgatccctgggtcagggaagatcccctggagaaggaaatagaaacccactctactatt

SEQ ID NO: 57259 - DNA, 1761 bp, Bovine  19866880922042
  misc_feature (1)..(1): n is a, c, g, or t
natagtagaaacagtgacagactttaattttttggctccaaaatcctgcagatggtgactgcagccatgaaattaaaagatgcttgctccttggaagaaaagttatgaccaacctagacagcatattgaaaagcagagacattaccaacaaaggtctgtctagtcaaagctatggttttgccagtggtcatgtatggatgtgagagttggcctataaagaaagctgagtgctgaagaattgatgcttttaaactgtggtgttggagaagactcttgagagtcccttggactgcaaggagatccaactagttcatcctaaaggaaatcggtcctgaatattcactggaaggactgatgctgcagctgaaactccaatactttggccacctgatgcaaagactcattggaaaagaccctgatgctgggaaagattgaaggcaggaggagaaagggacaacagaggatgagatggctggatggcatcaccgactaaatgggtatgagtttgtgtaaactccgggagttggtgttggacagggaggcctggcttgctgcagtctgcagggttacaaagagttggacacaactgagtgactgaactgaactgaaggatgtttgttcaagaggcaaacagagaaggaagacaagagacagtaggagatttaatccaaaagttgtaaacactagccaaataatcctggaccatctttagtggcctagaactgtagaaatttgcacagctgactgtgaatgttaattcttcctgtgctggttagaaaaagcaaagtgagaagaaaattatctgtaacattaggtttttatgcatttatcattttaatattttatttccaatgttctattacaaatgctcaataaagtatcattaaataagtccacttaaattgtttcttaacatttgctggtgaaagaattccattccaaacaggttcagatcgattaaatgttcaaagagtttattataagagtaacagagataaagcatgggtagtggtttctatgatacagggacactcaagacatttaagcagctttagacctgatgagtttgggcaggtcataaggtgatttaaatcatttaagatgctctcagaagtgaaacaaatttatttggaaggttacaataaaaatttaagcaagacctttagtttaatttagctgaataaaagtaatttttcagggaaatacagcctgatcatttatatgttagaaatgatgaatgtggagtgataacaacatttgagaactgcaaaaactattcaagccattcccatttgatagcatataaccctgctcatctctatgctatacaaactgttaactcttattgattaaacatttatggataataaacatataaattttctataatcactctagctaaggacaataattgtcacttcagcatacccttccaatctcttctatatacgtgcttttatagatagtggaaactccaatttataaatgtagctatagtatcaaacttttttcataaattatgccagataatcctcttggtgtccagggatgcttttagttgtcctcctgctggtgtttactggggcatgaaatggatattaggctaagcatgaatactacagcacattggtggacatgaaaaaaatatatatatattcaaattatgtatatatctccacaaaaaatagcaatattttggattttgcctgcttttagttatttcattgctactaatttctgtgcatgaaaattgtgaatgtt

SEQ ID NO: 57260 - DNA, 1121 bp, Bovine  19866880946777
  misc_feature (1)..(1): n is a, c, g, or t
ncaaaattcctgaatatagcacagtgtttgagcaagcaaatgtaatctaaaaacattcaaataaaaacagtgaaaatttggcacatttataactgtttaccatatgatagcagaatttctatttttcacattacataaacttagcctttttctagattatttactaaatgtatatattacagaacagagtatgttttttattctctggtgtacatattctaatctctaatgaaatataaagcatagtgaaaataaatattatttgttttctgtttagacttggtttttaaagctacaaatccatctaaatttacgtagtctagatactattcagaagaaaaatgtcagtcataattgtgtgggtaatgatgactggcttttatgtcattaacattacatgacctcaatttgaattgaggttgtaagtcgatactctataaaggttcaccatctacttgtagttcatttacacttgaaatgtttatataatctttaagtaacccatattgcatatagcagtaaatattactctgctgcttttgaatggaaataaataggtacagtctaacagatttaacttataatgaagtgggctgcattctataatatgacctgctgaagattcaataaaagctcagatatcgactgactcttcaaattggtcattagcaactaactggggactttccttgaccagtacactttactgatttttaaaaataaacaacaaagtaactaataaaatttcaaaaggccactgttccttgaccacaaagcaaggcaagtaaattatgaagaggttaatttcaagtacatgatcaataagtgtaacagaaacaaatcaatggaaagaactgaaagatagtaaatgtaaattttattgatgtctttagtttatgattggaaaactctgaaacaacaaaggggtggaggctggataagttatttcttttaataagtatgtaaattgataagctctgctgagaaccaggttttggctcttctttaagccccaatgagaattagccttctgagttaaagagctaaattcaaatcttagttattggtcttgctaattcataacggtgcgtatgttgtcttcttgagctgcattttcttca

SEQ ID NO: 57261 - DNA, 767 bp, Bovine  19866880968658
  misc_feature (1)..(1): n is a, c, g, or t
nttttcctttaggatatcaagtatcagatcatcctttttttatgtctttgctattgatgttcaaatttaagaatcctcatatcctgaggcagaaggaacatttccaacaatacacagcacaattctatattctttattacctcagtggtttctctcttgtttccactctcagctaggaaaaaaaggccttttcgtgatatactgagttgtagttaaccatccagaaatatagtaaataacccacaaaatgcagttttaacttgagggagatcatacgctcctgcagggcagcagtgtttccccctttgttttgtaccctgtccagctgagagtgacccctgcagaagggatgcttaaacatgacagtgaactgaaagccagccctgacacacagatgctctgtgacccaaatatcctttttcaaatcagaattctattcttgtatgagaaagtgttttacactttaaaaaggaatgatggatataactagagttctagtagaataaaaccataaaataaaatatctaaggaatgtatggtaaataaatcataaactattttgtgtaaatttgagaaggtaaaatagggtggaggaagttgagaatgagaactataaattatatatgtgcacaagtcagccatgtaggtgatcaaatgtaagatgagtgctaccttttttccagacaattgcaaagattttctggaagtgacggagttaagggcagtttgcgtgtgagaaagggaagacattccagaggatctacact

SEQ ID NO: 57262 - DNA, 1532 bp, Bovine  19866880986060
  misc_feature (1)..(1): n is a, c, g, or t
nagagaaaggtctgcatttttatgtctagtagttagggatagattaattcaagaggtgtttttcttcttctccctcagggggaatagaagttgctgttaaatggaccagaaagcttatgaagttttggtgttgccatttacaaagtatatggggtgctatacgtttaattggaaatgttttatattagtcattagtagcctggagatagccttctgttttaactgataatacaagtcccatgcttttctgcataccatgatataaatggtggttcactgagaaaaactgatgaggagcctaaaaattaatgagacataaaagcttttgactctgaccttgagatgcaatttggtatttatgatgttaaatcacttgccttcttcagagtagagaaacagctggtctgtgtgggagggatgttcagttatgattgagaagaaagaacagagatgttgaaacctttagaaacagtatacatatatataaaaaaagaaaatattacaaaattcaatgcagtgtgctgaagttcaaagactgcataaatgttgcccctcacccaaaacagtatacagttgctgtgctgatgtgaatttgtgtgaggaaaatgagtgtccaaagctgcataaatatttgcacccctgtgagagtgtgagaaagtgtgtgtttcatgttgtgattgatgggactgcttttatgccccctttgaactctgagcagaaattttggagtatcctgagggtctgtctgcctttgtatggcaggaactctgttttcttagaaaataataaggaacactgtttgtactccctttgttataaaagggtacctacagtttatgggaactggggaacttgtagaaaaatcacaaactttcttctatagcttacaaggaatactaagctttattttgaaattttggctattgtgtttccttgccttctggagtttttttggttttgttttgagttaaggagtccatagtttgacatactttcgatatatgtgtgatgaaatttgtggattcaggtgggagtagtttaatgatttatctactaaaaacaaaaagaaatgagggcaagcagatctaaaatattgtgtgattatgtttacttgaatgcaatcatttctgcagattagaggctttcactattgaagcaagaagtctgatatatcagatttccctggtcattttaagtcagaattttagaactgaaagtatcaaataataaaagtgttacatatgtgaggtctccaaaatatactaataactattacttcatagaaatctcaaaataatacagtaaaataggaaaaccattaacatttgcacaggaaaaatgattctaaagctctttcagataaatatttgtgaagtcatacttctgtgaaatactcatgagctgacacattatgtcagctcttcttgcttccatattcagaatgtggttttgttcctcagaaacaaatgtttttaaattgtacatctggttggagcagggctagctaacactcaagactcctgacttctttc

SEQ ID NO: 57263 - DNA, 731 bp, Bovine  19866881057974
  misc_feature (1)..(1): n is a, c, g, or t
naatgaacactatatattgtgtgctgttccactactttcttcctactagttctttgattcccataacaactcaatgagataggtattcatattatcattacaatcatccccatttaaacaggtaaaggaattgaggcacagagttctagtgactggattaatcttacacagtttgcagatgctgaagccatcatttgaacatactttagagtcagaaatattaactccaagagatcctaaagttcccacacagttctaaggagattcttgcttgttcccataagctttgctcacgtgctcacctacagacacctggcctctatgaaggatttctctcctatatgattcatgctccatactgatttctcatttttctcagttctttccacttataggctgtacagtacaatttggaatttagtcatttacttctacatctctctgtaatatatgtgaatcttgtcttgaacataagcccttaaggcagggattatatcccatacttggtattctctctattgatagcttaaggtctgagtatcagtaagctctcagtgaatacttgttgagtgattgactgtcaggctccaaggcatcatttctggaagaaacaactagagagatttgcataaggcctggtcattcatactaaagatttcacattaacaaatatgcagtcaatgacaaagagctccacttgtgaaaatatcaccaaagcattcatagagaag

SEQ ID NO: 57264 - DNA, 1031 bp, Bovine  19866881059649
  misc_feature (1)..(1): n is a, c, g, or t
nccttaatcttgcttctggttctgtgtctcttgttggggaaatggtggtgataactcacaccaggtgacctggatgtcattcttgactagtcttctatcatcacactagcaacccaacttctaaatctttcttgtctgacatctcactgatctttcttatagactcgagaagaagaaactaacttggatatttattatagtttacctgctttgtctcatgatatttccatatgtagccttgataagaatataatggatatcatatagtacatccaggaagtcttcacgggtcacagttctgctgattcgaggatcatcaccataatatttccattctttctgttaacgagaaaagaaaccactgtgaagaaactcagtgcaaatgcattggcaacatggcacccaacacctaaccaccttacctctgtcatttcaatttcatgcctagtcaattggccaatcagaggagcagccatatgcctgatgataatccttgcatgagcaggagttccacctcgaatgataacttgtgggttgtatgtagagaaacctgtctcttccctagcctcaaaatagatggtgtaccctgagtttaccgccataggccatcaactgacaaaataaaatgagaaatgatgagttagataaatctctgaatagccttattctaaaaacatgtttcattttgctctcatgtgacttcaacattcttgtccttaccttctttccttcaaattgttctggaagtttccaataaaaaggttccaaatggagctcttgtctcaccagatccatgtgtgcaacgatctccggatgctgaaaaatgatgccttttgtagttgtgtgctgcagggcctcatccaccagtggcaggatggtctgctcaggcttcagcgttacctgtgtgggggtaaaaacacagcagggtgttaagtgtaagtctttggaggcctcctctaaaaggactgtgtgtctatctgtggccctgtccccatatgatgaagtgttctcatgagaaacataactcatgg

SEQ ID NO: 57265 - DNA, 1100 bp, Bovine  19866881061001
  misc_feature (1)..(1): n is a, c, g, or t
ntctgaaattgcattttattgatttaagtaaattataaaccgagaattagatgcatgctatatgtaacatagcttatttcttaaaattatacagtaaatgcacataattctggaaataaaaatgttcaagtgctacttggtattaaggggtgaaatgggagtcccactggaacaccagcagcttttgacatgggacctgtggttcccagccttcctgtcaccgtcagtgcttatcttttggctggctttctgtggtgttttctctttctgtcttgagtttataaactggttattcaagttattgtaatatactttcagaaaagcacacgtgttataagtgtatcttttgcaaactgaacacacccatggagcttgtacttggacaaagaaatagaatatagagcagggcggcatgccccttgcatcccctcagcatcgatgttcaggtgctaagatactctctcctgttgttttgtcctttttcttccatttgctacacacacggacacacagatacatatagtatatttagttctgtagccatagaattagcagcagtttgggagagaaaaggtgagagaaagaatgccctgagcatccttttgaatagctcaggcaagaacaggtgttattatcccaggaggaagctggaagtgacttttttgtaattggaagtgtgtcctgccctgataagaacttgtggatcaggaaacaagaggctggtaaatagccaaagggaagaaagccagaagagcttgctgtgttcctccacttaaatatatgtcatttctttagagactgcaggttttacaaaaagatagggactaatttgggatgctacttacctctatttccaaaagaaaaatactcctctaaaatatgattttaagtaggccatggaccaaaagtaggccataagggcttgtcaggcaactttatgaatttcaaggttctaggaaatttcctccattgggagagttcccctcagtgtttgaaataatattagaaagaaaggcagcagtgaaaactcagccactccagtaaaaacctctcccacaggggaattatggggtggtagaatcaaagtagtctcactgctg

SEQ ID NO: 57266 - DNA, 736 bp, Bovine  19866881163633
  misc_feature (1)..(1): n is a, c, g, or t
ngaggctccatgttttctcttgtcttcattctacctttcaggagaaacccctcatttatggttccaaagaatgctgaaatatgcttccccaccctgcccccaactttttttctttttttactagaaatcccgctgtgaatgtgagcataacacgtgtggtgatagctgtgaccagtgcgtgtcctggattccatcagaaaccttggagagcaggcacttttctgaccaaaagtgaatgtgaaggtatgttccagacagtcaaacaccatgtgtaagtcttcctttcctggggcacaggtggtgtaaacacatgctgatttcaggtgaactcgtatgtcaaattcatatgcatttcatccaagacagtagctgtaagctcttttactctcctgttttaaagttttcaagattttatttttttgacaaatatttacaaaatacttatgaatttaccactatgtgagaatgcagcctaccaggctcctcagtccatgggatttgccaggcaagagtactggagtgggctgccattgccttctctgagagaattatgagatgtagataaaagcataatatacacttactgttatcaggtgtgaatctaaagtttatagcataacatatatgaacttctgaaagtgttagtctctcagtcatgtccaactcttttgtggccccaggaactgtagcccaccagactcctctgtccatgggatttcccaggtaagaatactgg

SEQ ID NO: 57267 - DNA, 2558 bp, Bovine  19866881169756
  misc_feature (1)..(1): n is a, c, g, or t
ngtgacatagtggaaaagcgggaaatggaaagcaatctgagtaagagaaaagggaaagtgtggaagagccatttaataatttgtcacactatgaatctaactacctcatttttagaatgtttgatctagaaatcataaatgaaggtcaatatacaagtttgaccatttttattccatttgactgggaaaacaatctactttaattcagtagagatggctgtgggtccagtgaccatatccacttgtatgtgttctccaaacattcgctcataatgagaaagaggtcacgggattactatttacccttgagacaggtttttaatatctgtcttatgctctgggagttggtgatggacagggaagcctggcgtgctgctgtccatggggtcacaaagagtcagacactgaacttattgccatgagaaaagtactttattaatctttcagaaatacattagaatgaatcaattatagatcttccattaagataattagatttttttttcatatttgcactatgtagatggcaataaacataaaccaaacattttgagagttacagagtcatttagatttattaggcaggtgaagttctttaaaggcagggagaaaaagaattttaaaacatttaatcaatgactaaatagtttttggttgtggcgataaaactttcaaagcaagtactttgtttagaaattcatttattatctgattttttgatggattctaagagacattgtaaaattctctttgggaatatcaaaaatgctgtagtttcaacatgccaattcatttttttttcaatgtctgttgttacatactttatgaaaatatgatactgtcattcatcagatcactttctataggagtccaggtttcagatctcccctgtttggattagcttttctttactggaagtcccttaaggccaaattcaagtctgggatacagtgatttatggtaagaaatataatacatatttggtctttgtccatttctggcacagagattctaaatcccttggaatctctcagttgtgagagcaataaaaaagggtcttttgttaatgagatgactttggagggggttgaggatggggagcagcttgggatagagattggggcaggttcctggagaaactccagtctcccgtctaagtataaccgtccaaccctgagtagcttctgagatcagacgagatagggcatgttcagggtggtatgaccgtagatgaaacttcagtctcatagccaccgtccttgcctgagactgagtcactagccaatggccagcgatttaatcagtcatgactacgtaatgaagcctctattaaaaatgtaaaatgatggggttcatggggattcagagcttccaagttggtgaagcctaggagatttggggagtgtggcatgttcagagatcatggaggcttcataactcttatcccacccattgtcctatgtatctcttccatctgtctgtccctgaattatatcctcttataataaactgataatctagtaagtaaaatatttgagttctgtgagttgctctagcaaattaattgaacccaaggaagaggtggttggaacctctgagtcataggttagggcctggatttgcgactggcattttacgggggcaggagtagtcttgtatggctgagcgtttaacctgtgggatttgacattatttccaggtagacagaattgattcagttgtaggacacccagctggtgatatggaggaaaaccccacactctggaattgggtgctgagttggtgatcagaagttggatcaaagtcagaatttcaccagggtctcaaaacctctcatagtggccccacagcgccccttctccccttaatttctatgtactctaaagttagcactgactttggcttgttttgtctcgctgctatgctctggccagtcttttgagtttctatgagtcaacattcctcttctctgggaccacctccacctctctgccgctggggagggttatacaggtatatttgttctatccgattcttcccacaaccacttatacttacaaatacttatgatttgatcataagtattcaacactggattcatgctcagccaatcatactttctgtttaggaaatttaaaatttggatcaagaacagctagtccttcctgtgggagtccttgaaaatgacttctgtaatcagaatttgtctgtttataggcagccactgcaaggtatcccatctggagagaggtaagaatgaagcaaccacatagtggggagtagagatgagcacagaatagctgatgaggaacctgagggtttttagtccctgactgcacatacttatgaggggtcagatttctgttcctttcctgggttaaatgaatattatattcgtgataacatacacccttgtgttgatttggctggtttgatggatatacttacgcactgaagaaacttggataagatatatgcttctcatctcaacagtgcctgcatattttaggcgtgaaaatatttgggaaagatcaggaagataacttttattctctctt

SEQ ID NO: 57268 - DNA, 1459 bp, Bovine  19866881260341
  misc_feature (1)..(1): n is a, c, g, or t
nctgagtgtatgttgtcctgggactgaaggtgcttttttttcctttaatttttattcaccaaccgtaagatctctggaatcttagtcactgaattcctctacctgtataggtttatttttcttactctttatttattgccttcacatgcagtttcctagccaaatgactaacagttacatcaaaattacacttacaagaatcttatacttacatacatttggtataaaagtttgagaaaccacttttacatctcaaatacatatataagtttacctctacccaaatgcctcttcatcttaactttgacaatacgtccaatgaaagttttaaatattcttacactctttgagtcagtaataatttttctgggatacatcttagaaactgacaaaatgaattaccaaaacagttgggtgacaaatccatataaaagtcagattgtttcaaattatttgctttcaataaatgtaaagaaggacctattagttggtagatcattagaaataatctattaatagaccattatgatttttggcatgagatatccctgggaaagggagtggctacccactccagtattcttgcctagagaattccatggacagaggaatctgcggggttatagtctatagtgttgcaaagagttggactaagcaactaacacttttccacaaacttttaaaggagttaaaaaactatcactattacaactaatttttaaattccaatttatatttgtatgtaaacaagcttctcagtgcatatatatatatatatatgaaaaatagaagatgctaaatgtattaggaataagcaatacctatacatagataattaagctgagaaaaagctaaaactccttttctcattaagagccccactttcaataaaacaaactttgtatttattatcaaattttatgatatatttttgttgttggatcagctataacttcagtatatataattttatgtttcagagaaatggattaatctgtatcattgactagattactttaggataaatttgtaaggagaaagtacaatggaaatagaggttcaaagaaaacacagaacactttaaagtatcttaccattaatgtagactttttaagcagttcttttttttttttttttaaactttacaatattgtattagttttgccaaatatcgaaatgaatccgccacaggtaaaatagataacagggtatcaagtcactatggtatcaaaattcctcttgaaacattttaaagtattataatgtcctttgcaattatttatacttatgaaaaattttgcattttaattaaaatatgcaagatattttaaatttcatagtatttcaaacaaatacagtttgtaaaaattatcttagaagaatgtgaataaaaaaacttggagaattacaagcatttcagtacatgctgtttacctctccataatcaaaatttagaaac

SEQ ID NO: 57269 - DNA, 879 bp, Bovine  19866881346603
  misc_feature (1)..(1): n is a, c, g, or t
ntggagtgggttgccatttctttcttctttaaggaaaactattatttatacttctgagaaaactggaatttccttctcacttctacttcacttatgaagagttatctgcttagaagattgaacagggaaagtgacaagctagccgctgccgggttatgagtggaaaaatatgttctttcttcccctccccgtttctgtctcccactgtcttactttttcttgaaaattatcagtgctagaagatttctgtgaatttagactttcaagttggtgtttctcaacttgcaagtcagccattcagtcccttagcttgttgctaggcaacccagcacagtttttaatgtaacccaccatataccatttcaactgccactgttcaaagatcagcttcctagggtgcttacaagggagacctcgctgcagggctagcttaagaggccggctacttgtgcagtcactgagcttaatgccctgctgtcatcattttgaagttcttaataatttttgaacaaggtgcctagcattttcacttggctctgagctctgtcaattataaagccggacctggctgggtggaccttacttggctacagtaaccctcagctcaatagataatcaaggcttctcaagttaccaaagccacctttccctggtctctattttcacaaaataattccaagtacaagctgcttaagaagtcttttagaacacgaagtacacaagaaaataaataacccgcatgctctcaacagcacatctgtttttaaagatcttcacttaatagcactggatgggccactgccccagtgcatgctgagtcagcagagattctcaaagagcccaaggtgggctctggatacagaaagcttttcccagaga

SEQ ID NO: 57270 - DNA, 762 bp, Bovine  19866881395560
  misc_feature (1)..(1): n is a, c, g, or t
nttattaataataaagtagctgaaaaacagcatggagaattgcaagttgcctagtgatttcagatctaagctaacctttcagaagtggaggcatttctcctccatcttccccaatggatggacctctattcacatttcagggctatgaataccctgcaaggtagatcatcctatttcactaaggtagttcatttcattttctagatattataagttattatattatattatatctatataatatcttatatagatattataagtttctagatattataagttaatttgtacacataaccaagcagtactccttcccctcacttccttatgtaggctcaagttccatgctacaaacagcaagttttctacctgttgtacacaccagaccttcaaccatttgtgaaaacaatcatgttttccctagtattttcttataaggtcaaacactcccattacctttctaaaccttttgctcagcttttagagccatcaacatcccagtcattcctctttgaatgaactctaatttgtcaactactctcttaaacggtgatgtcaagaatgtgctctgactggctatggtcacagctggatcattgcttcctttaatctgtatgtttggtatcttcttaatacagagagtacattgtttgccaatatatcagagcatattgaaaatgtgtttgtggcttataaaatatgtatttgtgggcactggagattgcactattatcctagcatatagaagctaatgagaagtaa

SEQ ID NO: 57271 - DNA, 696 bp, Bovine  19866881547276
  misc_feature (1)..(1): n is a, c, g, or t
nagaatgcgctcttattgcaatgttctaaatgtattaagcaagaacagaacaagtcctgaagtgggacacttctgttttgaaagagatctctgtgaatgaatgaagtaataacacttaaatgggaggccccttttccgagtttaaaactctggggcttggaatctagaaagataaatcacctgcccactttgtgatactaaattgaaattgacaggtatgtttcatttatcttgctcaatattacaaagcctctccctcctttgattttagtatgttcctcctgaaatatttgctgtggtaagaaaagcaaatattgggttttacgccccacttcgtgaagtaagaattatgatgttctaatatcagagaaccaaatattccaggtttatttttctgaaaaaaaatttccttgcagatagattgtcctccatagagcatccattcttcacccctcaattcattcatatttcctggattgggggaaaagagaacacacaaaacttaatacaaaatactttcataaagcttagctttatgaattaacttcagccttttccactcatgagggaaaactttcctgcctcattaaatctttaatgcaatgtgctgcctgcacactacattattatgtgtgacatgaggttatatattgcatagtaactataatgttacttgcaatcaagctgtttctttcc

SEQ ID NO: 57272 - DNA, 922 bp, Bovine  19866881626621
  misc_feature (1)..(1): n is a, c, g, or t
nacagcacttacaacaatagtgttgctaactatagaaaatgttagaattgtctatgagcaaaaggaaggctctgtttattacaattgttgctatttttgctataagaagggaaaagattatacaatagtcatatactatccaaagtaatgaatatacttataaggcaaaatacttaagcagtaagagaaagattaactaaaattctcattcacataggaaatagcaatgttgataactcctttttacagtgttttcataaattttccacaatgattgtatgttttattttcattcgtcttttatgtgaaaagagtaagtatgtttctctttaacttaatggaacttggattaaaatgggttctgttattttaatcacatcagtgttgcatatcgtgaggaaacagttttctatttccttggcagagaactttaaaggaaaaaattaagctctagtcaataagaaactatgtttatataaaaccataatttatggtttatttgattagatcaatgtttaattatgtattacatgtattttttgtactgaacatttacttataaattaatccaacccgcagcaggaatgctaatagaagcttccatccaaacataataagtaaacagaagacaaacagctgttgcaaacatcctatttttgagtctgggcctgataacaaaaaatagtttggtgaattggctgctaccatacactcacatctgttgagactgtactatttcaactcaattcttgatcactgcatgtcacatggtagcaagtagttctcttaagttagagaacttagagaaaacactaaatgctaatttatgtttgggaagttgaacttctaagctcttcatcttctatgtaatgtttagtgaatttattcatgagatgtttatatttttaagtgtactcaatgg

SEQ ID NO: 57273 - DNA, 839 bp, Bovine  19866881845170
  misc_feature (1)..(1): n is a, c, g, or t
ncttacatgagtctcttctgatatttttgtttgagggacataaatacaagctcatgctctttgcatagcaattaatttagagatttgttacacttttatactttggattgtcaacagcagacacagaggttttaaaatttgtttttttttttttttaagtcaaagtattttatttggtgtagtgaaatgatatatttcatttgataaagatggcactttaacaatacaataatttatcaatgtacctttagcaactacatagatcaaatcatttttttggagatacatttttttcttttgtttctttatcttttctttgctcattagcccatttaaattcctaatatattcttgattaaatttttacttaatgtatagaatataggtaaatatgagtaaacatattcaacactttacttttcataaaaataattcaatttttctaggcttgtaaatggattagaatatatatttccaaatatattgaaatagatactgtcacattaaaaaacatttttttaaaatctcctggtctgtagttatgtcccctttctcatttataacatggtcattgtccctcctttctttcttcctccctttcttccctctaccctccctcctttccttccttccttcctttctgtctttcactccccccactttatttccagatttaccgaagtctattctatcttttctatcggacttctatctattctatcagacttccctggtggctcagacggtaaagcgtctgtctacaatgcgggagacccagatttgatccctgggttggggaagatcccctgggagaaaggaaatggcaatccactccagta

SEQ ID NO: 57274 - DNA, 1343 bp, Bovine  19866880411360
  misc_feature (1)..(1): n is a, c, g, or t
nactgacatcttgatttcccttgcctatctctatgagttcagaactcagctgggaatattagaaaggggcttatgaattgaccccaccaaacaaaacaacagcatccaaggaagaactttgcgtgtatactgatttaattttatttcattaattccaggttggtttgtattgctaataccaagatggcacatgatgttaaatctgagtcaacatctcaaaggaatgtcaagtaattggaaagcgtccagaggaaacttaatagaatggtgagagttctggaaaccaggccatggtagggaaaggtaaaatgaatcagaagatttagttcaaagcagatttggctatgatatgacacagtcttcacatttttcaagggctaccatgcaaaagagtggtttaatcagattatgtgacttccaaaggcagaactaagtgcactgatggatgttccaaggaggcgtattttggctcattataaaaattatatatgcaatgactagcattggatagaagtacagttaccacctacagatggccctttatgtgtattatctcatttcatcctggcagcagtcccagagagatcagtatatgattatctccatttaacagataaagaaactgaggttctggcaggtagattaatttgccctaggtcaaaaaactaataagtggcaaggcaggagttagtacatgcatcagtcattgttctatgtatgtggtcttaaccactacacgctactattcaccctgaatgacagtgaccagacctgcacttagatgtacctgtgttgtttcaaaagaggaacagagttttggttttgtttctgttcttcttcttaatgatgcccaggtttggtttgactttctaggctacaggacctcagtaaatgtaagtgtttatagaaaataggactcagggcttccctggtggctcagtggcaaagaatccgcctggaaatgcaggagacacacgttcaatccctggtccaggaagatcccacaggctgcggcttaactaagtctgtgcaccgcaaccactgagcctgtgctctagagcccaggagccacaactactgaaacccacatgctgcaactattgaagcccacacgccccagagtccgtgtctgtaacaagagaagccactagagtgagaaccccacgcactgcaacaagagtagcccctgcttgttgcagctagataatagcccatggggcaacggagatccagcacagccaaaaatacaattagataaaattattttttcaaaacaggattcaatgaaacccagatcctttcccagtgtttcaattgccctatctaagcctttgacccataaa

SEQ ID NO: 57275 - DNA, 2044 bp, Bovine  19866880704508
  misc_feature (1)..(1): n is a, c, g, or t
ngagacaggtaagatggtctggtattcccatctctttaagagtttccacagtttattatgatccacacagtcgaaggctttggccatagttgatgaaacagaggtagatgtttttctggaattccctagctttctctatgatccagcgaatgttggcaatttggcctctggttccttttccttttctaaacccagcttggacacctcgaagttcttggtttgcataatgctgaagcctagtatgcaagaatttaagcgtgaccttatttcacgggagatgaatgcaattgtccgatggttagaacattctttaagttctccccttcttaggaattgggatgaaaattgaccttttccagtcctgtggccactcctgggtctttcagatttgtagacatattgactgcaacaccttgatggcatcatcctttagggttttgaatttgaatttcagtttcactggaattctgtcacatccactagctttattaacagcagtgcttcctaaggtcctcttgacttcactctccagaatgtctggctgtgggtgactgagtgcaccatcatagtaatccagttcataactccttaaagaatcatgacttggaacagcttttgcttcaggttggcttctactgtcaatcagtacacattttagggttggggggggtacataaagaaatgtggcagtgtacctcaaaaccataaatgttattcttttacctgataattcaagatttggacatttctcttaaagaaataatctgaaatgtgagaaaaagggaagatgcaaaccaaaccagtacatttacaaagttatttaaaattgtgaactatcaaaagccatcaaaatggtgacaacattgtaaaattagaaagaaagcaacaaatgtcattaaaatgaagaaaaaaacaaaatggtgacaaatgattggtatagtctccggatgtaaaaagagattttggaaaactcctgtaaaatgacctgacaactgtctagaacatggaaactgaactaagggaaagcacccaggggatcctggtgtttggctaagactatatccatgtcacacgaacatgaaaagcactagaaggaaatagtatgtgaatggttggatcagagtacttagatttgtttttccctcagaatttgtctaatgtagttatattacttatgtaaccgtggactttaaatgtattcataatctaaaagttgagaatcatgttttatttggtggaaatttttagggcctcaagccaagcctctcaagcttttactttagacagcatctcaagtaaccctgagaaaatcgctcggaggaggtgaggagaggggccaaggttatccagaacttttgaaacaaagggcaggtagtctgaacctcagaaggttattgttaaataaagaagatcaaatattctaagttaaggaatttggggcttttctctgtatgggaagatgagggctcactaagatcattcctttcatatgcgcctcggcttcctgggtcccgtgttttcacatcctgagcttcctttcctcagggctcactgcagggagtggctgcagtctgatggctgctaggtggcagatattcttttccttcctgagtgcccttagggttcaccaccttactttgaagggttgcaatccttgatgactgtgatattcttgtttacggatatagcaggaaatattccatttctcataacaaaaccatttaacaaagagatcatattcccttgttgctgaattggggcttggcccactacagtggaccaagtgtctacttaattatggacccaagtgtaagataattacaagttcaaaaaatcttttcccttgaatcccttatttcactttgttaaaataaagggcttttgtctccaagacatataattatagcacttagggcattcaaacctacgtttgtcttcaaggcccaaaggcttatggcagtcagtcaattttcttaaatggctgtgagattactgaagagcccaaccaccctgcaacagcgtgtcaagcaccatggaggcaaaa

SEQ ID NO: 57276 - DNA, 2956 bp, Bovine  19866880724330
  misc_feature (1)..(1): n is a, c, g, or t
nattccttggcttttggcctgtactccgtccccatcgctgtggtacgttgccttctcttctctgtagtcccatctccctcaacctcgcaagtgcaaagactgtggtttcatttagggccaggtgatctccccacttcaagcccgccatctgccaaagtccctttgaaagaacatagtcacaggttccagaggtcaggacctgggtatctttggaggcctgctgcaggagaattcaaaagtggatctttgaccacattctccaaagcagcaggttctttgcgctaatagtggtcctagtcacattttctttcccctttcaagtggctcctgtggttgcttgtaattccagggcagagagagaggcagtcctaagccctggtgttcgtggtcatcgggaggctggtccctgggcacctctcgatgtccagggcaagaggctggagctcttaaccagagtcggccaggcctggcgagtttaggagctgtcctacctagagcagagctttatccaaacagttcaagaattgtttgcgtttccctctatgctgcttcccattcattgtccctccacaggcaccccgtctcctctctctatccctgcttcctgcaggtgggcggttctccttccatcaagatgctgggttcactcatctcacgcctgcgacaccttcgctgaggaagccagggccctgcctgcgtctcccactcctcagatctcctccctgctgaccccttcctgcgccacacctttctataactgtatcctgtatcgctttggtggtttcctgcacaaggctactggtagttttaaacaaacaaaaaaaacagattatattaatcctagactaagaggcaatgggaaccctgggctgccttttcatctctgagacttccacagagggccagagcccgctgcagaaccagttacgatgggaccgtcacagccacgtgaacttctccaagagaggtttcgggttgcctttgacaacctgcacatcctgccggtggcgttaagaaaaactcgcaagacacaggataaatgttgactccctctctttgtgcagaaaaccctgacttccgagaaatccgctccttcgtggagacgaaggctgacagtatcgtcagacagaagcccagcgatctcctgaaatacaatcaaaagggcctgacccgtgtgtaccccaaaggacagcgggtggactcgtccaactatgaccccttccgcctctggctgtgcggctcccagatggtggcactcaatttccagactccaggtaaagggggccgactgtggccagtaaacctgtgctggggcatcattccaggcacattcttctggggccactggtgcgatgcggtggccggagcacgtagtttttcttaggagccatcagagttcagccagcatgctagcatgaggtcccatcccttgaatggtgcggtggagggaccactgggcacccaggcctttgcgtttggcaggcttctcgatggtaagtgacagacatggtcagtctggtttcagggagaaaaggaaatgcatttgctcccgtaatttaaaagtctaggagtggagcttcaggcacagctgcatccaggtgtccagtggctatgtcggccccctcctctttggggccatccctctctggcggctttctgctggggctctcttctggagataatcctctgctggaaaaagccagcatgcccaccttcttcgtgcaaagggcagcgttaactacagcgcacggcgcagaggcgccgtggtggttctttcagcctctttggaggcctgctcatcggtgctgcctcctttatatcgtctttgtgcctgcgtcacactccactgagtggagccatcatgtcctcaactggcgccctgctgcggtggcccgaggtgactcccttcattgctgttgcagacggcactgctccccgtaaccttgtgtgaacctcccttcacacgtgggagcacctgtggtgcagggcggatccaacagctttgaccaacttggccccgagcgaaaccactgcacccctgtatccaggagtgtccgggccaagatactccgccagaccgcactccatggagactgggcgggaatgcaaacgggtgaaactctttctggcttcacttcaccaacttagtttcagcaagtgcctcagtctttgatagtgaaaactggtgtcacactgtagtcggagctttccttattggtaacttctctgagtaacagagaagtgaaccaggttttcatatccttaagaaacataggcattttcttttctgcaggctatatttgtgcttcttatttttctaagggggtgtaggtattctcagcaaacaggtatcagatttcttaacaggttaaagttacctgtcagtggagtgaaacagatttttctaaagcatgtcagattctatggaaattttgtcctgtgtaaaaatgtttagctttgagtacattctggactttgtatcatactcggaaagttgtccccagtgtgaatttttttttttttaatccaattttcttccaataacatgagtttctaatgaatttttaaacccatagttttaagtcagatacctattttcacagccagctcacattatttttatcttccactggggtatagttgctttgcaatgttgtgctagtttctgctgtatggtcaggtgagttagctccgtgcacacccctccctccctcttgggcctcccatcccagccctcccggtcagtgcagagcgccgcgcagagctccccgggctacccggcagcttcccactagctgtctgtctgatagatggcagggagcgggcatcagccctggcctcccagtgtccatgtgtcccttccctgcatctgtgtctctgttcctggcctagggccctcagtgccatttttctagattccacatgcatatatgtgatgcccgtttttctcttttgg

SEQ ID NO: 57277 - DNA, 858 bp, Bovine  19866880760355
  misc_feature (1)..(1): n is a, c, g, or t
naactgaacaaccgctctttctgtacgacacccaccagaacctgcgcagcgccaaccgcaatgccctggtgagagaattcaacgtcaatgagaaccagctgcagctgtaccaggagaagtgcaaccgcaggtgggtcacagcctgcagccactgtgaggtcaggcctgggccagggcggagggcaaggctcccccttcagaaagcctgagccctgacccctcttctcttggctccatcaattatttacagtaagagcttaggtggtactagtggtaaagaacctgcctgccagtgctggagacatgagatgcaggtttgacccctgggttgggaagatcccctggaggaggacccagcaacccacttcttgcctcaagaatcccaaggacagagaagcctgatgggctacagtccacagggtcacaaagagtcagacaccactgaagcaactgagcacccacacaggctgaggagtctgcaccttccctgggctgaactgtcctcacgagaaggacacgtccatgttaagagtgaaaataagcaatcaccattactctttaaggagcccttctcaccctcccaagcacggactagtccaggggtcctattgaccagaatctccccacctccaacaaggggtgctctgagttgtgctaccgacacataaggacagacggccaggtatgccagagtcctgctccaccaaaactatctgcaagaaaatgtcagtagtgatctccctgggagatggcgtggagatgccttccccacgttattcccgtttcatcttggcgacacctgcacagtagcagtgaccccaggacatgaacagtgaggagacagatttgcagaagtta

SEQ ID NO: 57278 - DNA, 1776 bp, Bovine  19866880869672
  misc_feature (1)..(1): n is a, c, g, or t
ncctccacagaggctggcggtggccttacactcacacctccaggggccgggtggtcccacatcacaataaaacaatcatttaaaagactacacacagacccacactgggcagagagaggcgctcgcgtcagaggataccggagtgtgccctcccaccacacctggaccccgggcgcgccggcgggcggaggcagcacacaggaagcctggcccccgacgccgcttggctcgtttctcttcctggtggagagaggaagcctgtctgcagcagctcccccagctcggggtgggggggcttgcggccacctgaccacagaggccaagaccgggccccggagaggccggagcatctcaagtcccacaggcccgaccaaagcagtccatcccagtcagaaagggagatgcttacacatgggcacggggccaccacctcggaggccgccttcctacagaaccatcacagcacgaacccggcgggctgtgcaagtctcccacggctgctgtaacaaatggccgcagatggagcggcttgcagtgacacacattgactctctttctgtcccgaggtcaggatcagcctcactgggctaaggtgggctacccaagtataggcagcgctggtctcttctgggggccttcggggagaatccatctacacacactgttctcagcatccaggggcctggccgtctgcactccttggctcatggccccttcctccaggacatctctgcaacctctgctcctcccacatctctatgaactctgacctctcacttagaaggacccttgtgatgacactggacccccatccccaccgcgccgtagacagatcatctagaatgacattcccacggcaagattcttaactcaagcccatcagcaaagtcactgctaccacagaaaggaacacgtccacatgttctgggacatctgggccactgttcaagccccgcctttcaactctccctatcagtgacctgcagaggaggaaggtattacttcaaaggcacccttgcaaatactttcctaggaaagccaaagcttacccctccccctcatacctaccacatttacagacaccaaggcacaggtactgggacacttttttttattgtttatccaaaaaaaaaggatactttttatttgcagcagcccaccacgtgtcaaacgcagggcaaggtgctctgcttacacacttcagagtctggtctcatcgttgccagtgagcacagaggaaaagtgaggctcagagaggttaaggaacttgcccaagaacccacagcttgcgaatggtgcatctgggattccaattcaggcctcttactcttggcttctcagaaaaaacttggctcttcttgagatttttttttttttcttttggtcccaaaaagttgttcacagtaaaaacctttcctttcgggtaggaaattatgcaaagcattcaccactgcctccactggcttagagactgagcagagaaagatctattttggggctttgcgctccagtgatctgctttcttggcctaaagctcaccaccacccactgcttatacgttttttttttttttttttctacagaggccacttcctgaggcccaaatgaggcaagctggtgggtcggctcagcaaggccagagccaggctcagggcaggacgcagggcaagaagcacggccagtgctgagcagatcagagcccccaggacccacctccaaacaaaaccggcctgtgttcaaagtggcggcatctgcctgtaacctgtcaccaagatg

SEQ ID NO: 57279 - DNA, 1676 bp, Bovine  19866880927854
  misc_feature (1)..(1): n is a, c, g, or t
naaggaaatggcaacccactccactattcttgcctggagaatcccatggacggaggagcctggcgggctacagtccacggggttgcaaagagctggacaggattgagcatctccactggatctagggcatcctgtcctcccttcccttgccctttgtatcaccctgcgctgcattttcagagcacaggcctgtggctcagggtggtgagtggggaggggactcaggtctgagttgagcctcagctttggccgctgccagctctgtgaccttccgtgggctactccgcctcaaccagtctctgttttctctcctgtgaaatgggcagaacgggagtagcaccccagaaagggcgacgaggattaataagatacagtgggatgtgatctgcttagagcaccgcctggcagatgagcccagggatcttagctgaggggattatttggcggataatttttccttttgtagccatcattttctctgtctagaacaaactttctcctcagagagaactgattccatgcctagcttcttgggcctgccggccatgcgtgccctatgcccatcactccagtctctgtctctatcttcgatggccagctgactccctggtgtctcgggctcccttttcctctccttcctgtgatgaggatactggttctcaggtttagggtccacctggaaggcagggatgatctcctgagatccttctgtacatctgcccagacccccatttccagataaggtcacattcacatttaagacacgcattaaaacccagaccgctacctgatccaaggtagattttccagtcagcgccgacatccacagtgatggtcggcttggggtcctaagagaagtggcctgggacctagaagtctggtcatcttggccttctgtcaggctgatcaggacttttgttatccttttcccaaagtaaaagccccacatgggaagaaccagaagcctttcgtctttatcttggagcccaagaagcagggcgaccctcccggtagagtttgccacggacagcgtggaggagctgtttgagtggttccagagcatccgggagatcacctggaagatggacgccaaggtaagcctgggcacctgggctccactgagcctggtgtcctccggcttccagtcctctgccgaggtgcgggtgggtccaggccgcagccacagagaatttggggggtggggcagggagggagctcaagacagcaggagcggagagaaagggggcgctgggtcttcctgtgggggctgcgtccttgtgtgaaacctttgaaggttcagcgtgtgcgtggtgacccttgatgtttgaggcctgttcagccccgtgtatcttaacaataaagctttgccatcctcttttaaatgttatcttgctctaaatactattctctaatactctaaataccatctaaatacttgggataaagcagcctggatccttcccgtgcattcactgagctcatctccctggactggaaagggccctgggtgtactggaattcataagacccagccccttccttccagaagtttctgttcttgtgggggaacctccactccagatgggcatgagcttttggggatttatcctgaaaggtctttattttgtttcagtttttactctgggggccgcccccgcggcaggtaggatcttcga

SEQ ID NO: 57280 - DNA, 1295 bp, Bovine  19866880936394
  misc_feature (1)..(1): n is a, c, g, or t
nacaaggggttgatttgcagtaattttcaatgtttatttttaacagatctggttgaagcatgcaagtaattaaaacattcttcattactaatatgtggtattttaatcctggcaaatattctagatatatttttctccagtcctccaggggagccatattacagatctaaaagtaaaatactttcttaccaatacatatttttagtttgtgttatgagaattgagttgccatgtgctgttcaccatctctaggatctggtgtcctgaatagctaatagggctctgaaatgctgcccagttttgaagaagaattacttgtgttgctggggcaattgcaacaccccacacttaagttgtcatcatgcaacttcttccagggttttttgcttctaggtatgtttatcactgggataatgatggatgtaatccatcaccctcgttaactaagttattcaaagaaggtcattctcaccagttaattgctactatttgttggacatttactgtgtgtaagtctctctatattttctaaactcatgtaattctctcagtgctttaaaaagtggggacttttatatccccagtgtacatgtgaggaattggtggtgttgggaggtaaagcatctggcccaggtcacccaagtcacttgaccaggaagtggcaaagcttggatttgagactcgttcacttgaatccagataccaaactcttaaaaatcacagttgatttacaatgtgttaatttctgctgtacagcaaagtgattcagttttatatatatatattcatattcttttccattgtagtttatcacaggctgttgaatatagtgctgtgaagcctctaagagtaagaccctgtttatccattctataggtaatagttgacatttgctaatcccaacctcacagtccatcccttctccacccctcttctccttgtcaaccacaagtttgttctctatgtctgtgaatcagtttcacagataagttcattgtcatattttaaattgcataaatattttatattatttgccttgctctttctgacttcactcagtgtggtaatctctagttgcatccatgttgctgcacatggtgtgatttggggttttttcatgattgagtggtattccattgtgtatatatatgtactacatcttctttatccattcttctgttgatggacaagttgcttccatgtcttggctgttgtgactagtgctgctgtgaacataggggtgcatgtgtcttttttaattatagttttgtctggatatatgcccaggagtggga

SEQ ID NO: 57281 - DNA, 1225 bp, Bovine  19866881781816
  misc_feature (1)..(1): n is a, c, g, or t
naacactgaatatatttaagcacacttgttacagactctgagggcacgtcacaaaggtattccagaaaggtcagtagcaacagcaccctctgaacagaataccctgaggaagaaaaccctcataaggaatgtgtaataataatattaataaaaataatggcttgtaagtgtggtgagtggcactttatatacctgatccaatttaaccctctaaagaatcctgggaggtaagataaaggtctattcatttcaatatcaaacattaccatgtggtcacacaggtataatacctttatgtcatgaagggcaaaaactcattcctagaacatacactgtgactagcaaccacctcccctgcaaaagtgaccatctcctcagaggcttgggctgcggggaagtagctcaacttgttgtttttcacacaagtgcaagcctgttagcattttgccattcccatatcagtgtttcaacctctgtgaagtcaatgcaaaacgtatggaatgaagataagtacatttttggcttctgagaaattcaagtaagacatttcccatctgagggagtttagctctatgggttttggaatgacgtctactgtccatgtctgaaggaggaagacccaaggatccgaatctcaaacttatcctggtttctgttttctcccttcaggatctgtgcaaggaggtaggaaatgaagacttaatccaagaatcaattttttttttttttttggctgtgctgtgtagcacatgggatcttaattctacaaccagagatcgaacccatacctcctgtgctgaaaactcagagtcttaaccactggacagccagggtgaagtcccccaagaatctattcttaagtagcgacttgaagatccaaaggttgacatcaggtatctattctctatttttaaaacgtgtgtttcatgaaaaccacctcagtatatataacaacttcagtggtgtactgtaccacctcagtacagctcctccttcacatcgacaggatcacggaaggcagcagccacacgagaaccactgtaaccacgagtaagatcaccagcccatcccaaacaagacacttggagtcacaactcccaggacgtcttgccgtgaccatgggctttaaaccactcgactgcctcctggaggtcaaacggctgagcctcataccccagctccttcctggctttctccaggctaaagtaatgtgtgacgccagttt

SEQ ID NO: 57282 - DNA, 1124 bp, Bovine  19866880167089
  misc_feature (1)..(1): n is a, c, g, or t
nccataccctccctttgggtcgtcccagtgcaccagccccaagcatccagtatcgtgcatcgaacctggactggcgactcgtttcatacatgatattatacatgtttcaatgccattctcccaaatctccccaccctctccctctcccacagagtccataagaccgatctatacatcagtgtctcttttgctgtctcgtacacagggttattgttaccatctttctaaattcccaaatataatgctgaacattaattttaattacagtgttttggtttacttattcatgcacagaaatgttaagtttatgatagatagttactgtatttggccaggcatatattgcaagatgttgtttactcatactaattttataaatttcctttatgtggtgtacatccaataacttcattataagtaaaatacaggtttggagaaattacttgaaatgacttcaatcaatgataacttttgtttttataaaggtcacctaataaagctgtagttttttaaggaaaataaatttaacagattaattattcctacagtatgatatcataaatggaagtttctcaccatcttttaaagatgctttttaagaactattacaaaggcaatataatgagtgatttctctgtgaagatcatgaatacatatctataggatggatggaaataatcagtggtcctaagaccatgcaaatgaacactttttgcttgggaaaaaatttgcagtacagtctcacttgaaaagtgtcatatccccaaacagtttatgtgacctatatgaggaaagaatgtaaaaaagaatgattatatgtatatgtataactgaatcaccttgccgtacacctggaactaacacaacattgtaaatcagctatatgccaataaaattaaaataaagaaaacaaaaacagtttaggtgacactgcagatagcaagttttggaaatctgtgttgaatgatttaaaaagtgcagaacgtacacaggtcaaaaatgcatgaaaggaatgtaaataaaaatggtttataaaatgtgaatgtagagaaataaaatggactaaatatacttaagtatgatataattgataaatagaatgactaaattggaaaaatagaagt

SEQ ID NO: 57283 - DNA, 1590 bp, Bovine  19866880462780
  misc_feature (1)..(1): n is a, c, g, or t
nttggctgaaaattaattattcgtaagcatatgacaatttctactatttgggttaaagttgatagttgtagcatcctcagggcctggatctagccctgatacatatacgtaaggatgtggttgggaagattgcctggagacaagattgtaaccgactgattaataaactcagaagtaactgcagtcacggttggggttactgctttgtctctgaagacactgttgataatctcagatggctcacttgttccctgtcacctgagttcaggttctcatatctttaatgagatgggaaagacagaaaaaatgtgtcccccagatatttacatatgcatagtttgagggactgtagtagggaatgtgtaacgccatctggataaagacatggaatggcttctcttctgattgtcttaaatattttttaaatttcccccaatttttcatatccttcttctccctctctgtcagttaacaataatttgctaagtggccagaagataagccatctgtagccaagcccctcatcatcagagatgataaggcccctctgggaaacagctttgggttaaaggctcccatccaccgtggcagatccccatagtgtagtgaaaggagcccagacaactgggtggatgactcggtgcacacgggctgaaggctcactcaccttggcaagctccagtgcgtatgttggggatgaagccccgtcggcagggctgaggctgggctgggcacatctcgcaggggtgaccccaggcccgcccagtggtggcgcagcacagagtctttgtacacacgatgcctgtgagctgcccctggcacatcttggttgttgacctgagtgaaacacggacctgtcctgtaatctggaatgtgaaagaaggcagagagacaggttttatagccacgcaccaatctcaaaaccagcacctccaaattcataaaacaagagactttcttcccatcaaaatgctgaatgacaaaaggccagagaattccatcatgaaaactcagcatttgccgataatgagaagtgccttacaaaacttcaaatgtattctaccctagacattgtaaataggtggctcaagggctgtgtctgggacacagatgtgttttcttggcccgtctaatgttttaaaatgagtagccaacattgtaaattgggaaatttcacatgaaatttgtacttctggcttttcttaaaaagctggatgtcctggccatgctaggtctgtcacgttgcatggcggtggtgaagagtcccttctatgacaccacagcccagccacccagccctctccactcactgggcttccccacctgtgccctgagggcacctgctttaatgactcctctgtacctgtcaatattctgaagtcccgagaaaagttcagaaaatcaaaacagaaccaatgacgacacaccctgccataccgcatatatatgtatatttaggcggtctagattgattataatcatttagtactaacagtttggttttcgtttccttgtcagcctgtttagttctctgtgtagctcacctagaaagatggtactaataaggcccagatcatgggttctttccaa

SEQ ID NO: 57284 - DNA, 992 bp, Bovine  19866880558287
  misc_feature (1)..(1): n is a, c, g, or t
naaaaaaaatgacttacagatgacatcattgttgccaatgacagtaacatgaattcaactcaagccctctgatctgccaggttactctcgggcaatatgcgctcggagatttttgacatcctgaggattactcatttggcaagaggctaattttcctttgtctactttaattgagacacagatagcctcgagctctgtcccaatcaaaccactgtatacaattccaaatttttggtttgtacctttaccaaaatttcccatgaaacttatcttggtccatgtacctcagatgaccaaatgaaatgcaaatgagtcccaaagttggtggtgctgagggtggggggagtcacatcattattttacaaaacaaaacaacacaaagactttattgtttgttgtttagatacttacctatacagttcttgccatctggagtaagttcataaccttcattacataaacacttgaaggagccaacttcattaaaacatcgtccatttctacacacctgaccaaaaaaggaactgcactcatctatgtctgtaagtgagtaagagttagcttttcagagagagctctcacatatattttgtatcacaagttgcaacttaaaaacatatttattggtagacattacattacactccctcatcaacagagaaaaatgtcatatatcataaggatcaggtgactaataatgtcaatagacctctcctgttggtttaagctttccattctttccaaccaaaaaatacctcttttcctggatataagaggacacatggatttaactggcttgtccagtttgtagagaactgtatctggagataagctgactgtattcaaaggacaaataacaaagcatataaaatatagaaaaatcaattttataaaaagcactctagaattgctgacatgttttgcttacaaaaaacagaatctgaaaaaacatgttcttaactgttaggttttcggttaagcttaaggatgag

SEQ ID NO: 57285 - DNA, 951 bp, Bovine  19866880702062
  misc_feature (1)..(1): n is a, c, g, or t
nataaaacggcacctcttccaaaaagaggtgttgaaaaattcagtccggttctgatagtcatgaaacagacctgccacaaggatggttcaaaaacgaacaatattcaaataacattccccatgggaaatgctaagtgaaacaaccaaatccccaaactctgcttacaaatccagcactctccacacatgtactttaagcacagacccagcactgggaatgccagctgcacttaagctcgagcagccaggtgactaacccaaacaatcccccactaaaagcttactgatgggaacggtggttaaaagggatggaaaagcacagcagaagtgctcgagtcaacagacaagagtttaaaaataaaactgcacctatcaaaatgaaggatgagacacagataagaaaataacaagaaacagatgacaatattattttctgttgtagcattgccttttttttttttttaagatttgagtttttgtgttctgaaagaattttacatggggctctgaacacttctttgtgcattctatctgtgtaaaacagtagaaaacatccatcaaactctgagagaaacaattgattgatgtactgatatagcaatttgactgcatgctaaactcatcaatgaaggattccctcaaagtcatgggaagacactttggggagacagtcagagggaagaccttctgtcgaggcttggttagagatcagctttgcaaattgtaatctctaagtaaggttgtggaacacctgccataagactcctagatggttttagggttttctttcttcctccagagttaacagttttaaaatgatgcacaattccctagcaactctagggagaagtcaccgtgagactgaaataagatacacgaatagctcccctttagccatcacaaggtctaaaagaatgttatctcctgatggtagaggaaggtaaaattcat

SEQ ID NO: 57286 - DNA, 1808 bp, Bovine  19866881233758
  misc_feature (1)..(1): n is a, c, g, or t
ngcttttgaaattaagagctgagactttgcagtctttgttctccagatccctcctgatgttcctcctgggtctgagggacaatgccaggctctggtctgatataattttcaggccagctggcaagagcatcagggtggaaagaggtgggaaaccccagttaatacttcacgtcctcttaccacattcattttatgtgacgtacaccttaggtgtgatctgcaatattccagttttcattaagacccgaatggctcagtgtcccatggcagctggccctgagtcatcttacagctgtgggtctgtggtcaagtttatctgagcacattaaggccatgggcacaggccacaaaccccaggcctgagacaagctgtttggctcccactgggagtctcaaaaacccaagcctactgcacagcaggggagcaggaagggagagcaagagtaaggggaggctggtctcccatgcctgtccacatcagggcagaaaccctgccaggatcaacagcctgcctcctggcaaagcctctgccaggctccctcaacactgcggtcaccaaaggactgtgtttttcctgagatgtggattttgaaaatgacctcctgaggtctggcaaacaactgagttcttagaggaaagaggacagggaggtgacgcctcgctccaagggggttatgaaagcagagcaggctgttcttgcatgggaatagcgctacagcagcatcagtgaatgctcagtgttcacctccatggggcaaaactgcagccaggtgtgaaatcaagtcacagaaatgtacaccccaaaggagaccactgggacaagttccaaaatgctggttccacagttcagtggtcgatactattcctcaaaccacttcatcgctgctctcctctgctggagcatgcaaactcattaccttaccaatctcctgcctctgcgtcctgcctttgttcctactctttgtcttctatctcctctcaagaccgtttcttctacagaggaagcttacctttacatatgcgtgctaagtgacttcagttgtgtctgactctttgtgaccctatggaccgtggcctgccaggctcctctgtccataggattttccaggccagaatagcgcaacaggttgccatttccttctccaggggatcttcccgacatagggatgaaacctgcgtctcattcatctcctgcattggcaggagggttcttcaccactaacgccacccgggaagcccacctttacatatgtgctgtgtatgctcagttgcctcaatcgtgtctgactctttgcaaccaatggactgcagctcaccaggctcctctgtccatgggattctccaggcaagaatactagagtgggttgccgtgccctcctccaggggatcttcctgactcaggaatccaacccttacctctggcgtctcctgcactgcaggcaggttctttacccactgagccacctgggatgcccacttttacacatacttaattatggagtatctgaacacttggtgcattttgctccacagcagagagccccagccagctgccatgggacactgtgctttgtgtgtcctgccctgaccatcctcggctgtgctcctctccatgcagtggaaagtctgctgggtcaagagagcatgatgacccagagccctcaaaccaccaaccacaaacatggtgcccagatttcccactccactagctccagacagcttctagaacccacactagcttcttccctgggtctttcctccaaaattcataaggccctgggggtagagggcaaggggaaggtgtctat

SEQ ID NO: 57287 - DNA, 959 bp, Bovine  19866881312689
  misc_feature (1)..(1): n is a, c, g, or t
ntactggagtgggtagccattcttttgtccggggatcttcccaacccagggatcaaacccaggtctcctgcattgcagccagattctttaccagctgagccatgagggaagcccaagaatacaggagagggtagcctatcccttttccagcggatcttcctgacccaggaattgaaccggggtctcctgccttgcaggcggattctttaagagggagttcgtttacattttaaatacagtgctgcaaatttctttttaagaagatttaaaagatgatagttttgtgtttttaaatgaatgacctaaaacatttccccaaatttacagttctcttacttgaatctcaatttttaatatgtagtgttctttttgggaaatagtcaatgagcttatttattatttattttaaagttaatacacttttggaaatatgagtaaaagcaagcgcttttcagtttagcacagacgtttattctccatggtttatcaaagcagagttggaacagccactaatgacactgtgccaacaactttcatgagtttcatgagtataaataaatatatttgttgtcagaaatcccaaacgactaaatcctgtggtaatggaacaaagctgaagactcttcagaataaattgcaaacaactatttgacatatgaagggccattgaagggaaattttccaatataatgatgctatttttctgccttccatttaagccaggaaagaataactcaaggaatgtcagagaaggtatagtgtggaagaggagatcatgtaaggacatccggtacctagttgtgcttatccaagtagactgaagttcaaatttacattttttgttatataaaaaaaatgtggacagtattctgatataccctttcctatcatattgacgtgttctacttttcttcatttaaattagacagatttagatgagtaaatctttgaaaagagta

SEQ ID NO: 57288 - DNA, 1694 bp, Bovine  19866881318275
  misc_feature (1)..(1): n is a, c, g, or t
ncagtaacttgggcactaccttggcaatcttagtcaacttccagcaatatttcatatggagttactgaagtgacatgtctcccttactttcaacctaaacaaaatggttttcatggaaagttgcacatggagttttctatgagagccgggaggaaaaagagttctttatttgaggcatgatgggtaacatcatcgtcataaacatgaagtctgtgaaaaattcgtattccaaaagaaaattatttaacaaaaagagattctgtagcttgtgatctgggttttggatcagaattaggaatattcaggtcttaactttcatttaaaagaaatttagtttttagttttcattctgagaacaagaggaaaattgtagagagaaatgacaattttagtttcaagtagaattcacagaataaatgtggagcaagaagagcacctggttgccagtatcccagatttggggcccacatgtcagggtttgtgctggaggtgcgtgtggggattgcatatctcaagcaaataaatggatgcctgtatctttaacagtagagataaaaatggtcttttctacataaaggttttatgagtattatataagataaagaaagcatttggcccttctaggtcttcgttaaagaaggcagggatatatatcacagacaatttaattatgaaatattcaataaaccatgtgatttcagatcttaaaaaaataattgtaaaagagttctaatataacatttcagttatgacttttacagtttcctataaataaaacttttttaatcttaaacaaacaaaattgacctactggaacatatatttgcctcctccaacgagagtattagcaagcaaagaaagggacccaaattcatcatcttgatgaagaaacatggaactggggatttaagattatctataattgctgacgagtctcagcctgtttttactcctccagccccagcttcacccaaattatagaaatggacgtttgagaccaagaggacttgatttatttagcataacacagtggtcaggaaattgcattttagtggattcaggtacattttcccaaatgctgagaaccagtgttgttttccccagtgccattgaatatttaaatccctttaaaaaatactaaaaaaaaaaccccgtggtgaagtaattaacataattcttgtagttcagtttctgctgaagatcactggaaaaattgagagcctccaaaacacctttctcagagactcgaaattagatgtgtgttagtgatagaaaaatctattctaccctggaatgaaagaaccaggtgaatgttttaaactttgacatgagaagaaaaagatataaactcaaatatattccttatttcttcattttacttataaaatcattgctgtttcatagtgaaatgtaaaagcaatgttacaggccaaaataaacaaaaatgctggttttacaatattgttgatatatctgtagcttcaactaagtgagagagaaagaaagaaaagctgtctcacaaattaccatggctcattgcctgaagaaaattagtctactctgagcaaaatcctgctgtagttaggtaaaaatgcaacaaaatttgaaatataataccctgatccctgactgcatttcttacaagtgttgtcagttactgactgtgtatatacttcattcaccatctaggtatg

SEQ ID NO: 57289 - DNA, 1232 bp, Bovine  19866881344001
  misc_feature (1)..(1): n is a, c, g, or t
nttgacacacaggaactggcaattgtgctgtttggtttgacattcatcaaggtctgcaatgaaagacaagccagtgaaaatccgagcagagttatctggctgtgcttcccttctcatgaagccacagagaggtgtgcattttctaccaggagtattttgtctagatttttgttggaagctttatagatttccatatgcataaggcaaggaggtttttttcccacatacttaagcagcgtaaatactatgagctactaagacaagacggctaaggtgatatataacaaaaatttttttaaaacaaaaagctgaaaggatgaattatagtgatgttcatgagctgttttcaaagctagtattcaaaggttaaaatacttgtatttgatgcaccattgagtacatggctggctacttaatcctattaagtcaaagtgaaaattgctcagctgtgtctgacgctttgcgaccctatggactatacagtccatggaattctccaggtcaaaacactggagtgggtagcctttcccttcttcaagggattttcctgtcccagggatcaaacccgggtcttctgtattgcaggcagattctttaccatctgagtcacaaggggagccacagtaaaaagtgaggcacatggcctgatccccgataagctgattctgaatctgaaaaaaaggagagggtcacacatatagactcctcatcacctttgcaggtcttcccgtcctcctgcaggacgtagccccggggacacgagcactggtaactcccctctgtgttcttgcagatgaagttgcacggttttggggactgcgaacattcgtcgagatctgagtaaaagtgatgtgaggattaaattactggttagaaggaacgaccagtctctttcctccctccatattctcactcactgttttcttcttcaacttaaaatggaaaatagccagagagaaatgaggcacacaacaattttctctaaagtaatttaccggtttaactttgtcaggtgattcttgggcaaatattgaaatatccagacaactgggttcaaaaaaagacactagattttttagattggtgttcttcggtttacagtttgagaatcataaacctgaaggttagagtttcttctctttgacatgcagatgtggcggatgttctcagtctctgagctgacacttccccaggaattgtttggcatcacagattgtgtgggagaccttcca

SEQ ID NO: 57290 - DNA, 1154 bp, Bovine  19866881395807
  misc_feature (1)..(1): n is a, c, g, or t
naaccagagagaataatttgaagcaccttaaaaaactgtccagtgcatatacactcgggaccttatgttttaaacttacagatgatacgtctgccagagacatatatttttagtgacaagcactgcatcatggcttcctgcctagttcttaagtttgagggctgatgatgacagagaaatcatttcaaaacttaccgaagcacctccgtccattatcagacaatacaaacccagggggacagatgcactggaagcccccaggagtattggtgcaggaaccaaaaagacagatgttgggatcttcatcacactcatttatatctgcagatcagcaagataatttactgatttaatcaattcaatacactgcttaatatctgaaaataatttgtccacattgtacagttcactagccattggatattcaatgtgaaacaatatattacattgtctatataattaaatatgtttaaaataaactgctactgcttcaaaagtcaaaggttatatccagtttcaatgatccatatgacccagacttttaagtcggtctccagttctctggacttgactcctaggaggtgtctgcatgtctgcctgcaggcctgagaggaccacttccatgcctcaggggcatcgcatcctcagcattggtcctcttctctgatgcccctcgccctcagcaatccacactggggagctggggtcacattctttcctctccttaattgttcaactttcataatcaagcaatatgtggcctcctcatttacactcaaactcagcatcatttgccacctggattatcacgtctcccaactagggagacgtgcttcacttccttctccccactccataccgccaccagggtctgctttctaaaacatgtacctatttgagaatctgtgcctacagaaccagggagcttagacgttgggatgagaattttatcatttccaccttaccccagaatgatctcttgaaacagacaaggattccttaccagtgatatctggccccttttcactggaagtgcttattttaatgggtggtttttaactaaatgaatgaacactacatgattccaggcacatcagaacataagtcccatggggacatcatgtgtctgtctagatcactgctgcaccctcagc

SEQ ID NO: 57291 - DNA, 903 bp, Bovine  19866881679543
  misc_feature (1)..(1): n is a, c, g, or t
ntgcgaccttaaaacaagtcactgcacttctagggccgtggttctcaagtctgtgagaggaggatgtgggagcagatgtctcaaaaattcctgtttcaaaatatgacttggaagattagcagaataaaactgaccatgtattttggcagtctagtttacttcaggtaaaagagtactactttaagttaattgtagcgaatgctcatattacagttcattatcaagagagtcctagtatttaactctatgtgcttctatctgttggtttcatagtgcttttacttaccgacacaccccacaccggtggggttcagctggaaatcgggtggacagttacactcatagcgaccaggagtgttgacacacaggccgttcacgcagtttattgggtctgcacactcatcaatatctaggaagaacatttagaatgcccacatcaacatctttactttccttgggcatgctgctgttccaaaggatttggtggaaattctgaaagtcagtagactaaaaatctttaggagggactcagcacaatgaaatccttgtacacacctaaagcagtttccatatatcagacagtattcatgatggtatcatttaatatctttaataaataaataagtaaattatatcaaaatcttgcaattctgaagaaaatcatgctatcatttcttgcttgaattaaacttaaatatatgtataactgtacacatatgtggacatcataaatatatacagatattttactaatttcatgttgaatatttaaaattaagctgtttacattacaaaaaatcaatctcacagttagaaatcaatgtatcagaatgtaatttcctttttcaaaaaaaatgcataacctgaggcatagcaggctaagcagaaatttggggaactttt

SEQ ID NO: 57292 - DNA, 717 bp, Bovine  19866881899517
  misc_feature (1)..(1): n is a, c, g, or t
ntcctttctcctactattgagtttttctggtcctgctctgggagttactagagctattaagatagactcatttcaggttgagctcccaggtcctgatacacgaccctgggtcttaggagccagcctcaggcctattattcatgaatgcacaggcctgagggggtgtcccaggtggcactactggtaaagaacccacctgccaatgcagaagacacaagagatccatggtcgggaagatcccctggaagagggcctggcaacccactcgagtattcttgtctggagaatcccatgacaagaagagtagtctggcgggctacagtccataggatcgcaagttgttgaacacggctgaagtgacttagcacacacgcatgcataggcctgaggctctaatttcaccccagcatgaatgagttccctcagtacagggtgctgaagtccgataggggaaaggaaggtggtaaacgcaagagcagaaaactaggcagctcgcacgggccaaggggctgcttttttgacacagtttccaggaattggccattcacagccttcactgctatttcattaatggaactcacacatgtagcagtagttgtctggggaaagctattaatgctaacttttcctatggtctgctctaaaaagtcatgtaaagcgttttcctgttttccttttggaaaatgtctacactacatcctgacatttaatctgcag

SEQ ID NO: 57293 - DNA, 1403 bp, Bovine  19866880153848
  misc_feature (1)..(1): n is a, c, g, or t
natgcctgatcttggttttctgaatgttgagctttaagccaactttttcactctcctctttcctttcatcaagaggctttttagttcctcttcactttctgccataagggtggtgtcatctgcatatctgaggttattgatatttctcccagaaatcttgattccagcttgtgattcctccagcccagcgtttcccatgatgtactctgcatataagttaaataagcagggtgacaatatacagccttgacgtactccttttcctatttggaaccagtctgttgttccatgtccagttctaactgttgcttcctgacctgcatacaggtttctcaagaggcaggtcaggtggtctggtattcccatctctttcagaattttccagtttattgtgatccacacagtcaaaggctttggcatagtcaataaagcagaagtagatgtttttctggaactctcttccttttcccatgatccagcagatgttggtgatttgatctctggctttttcttttctaaaaccagcttgaacatctggaagttcacagttcatgtattgctgaagcctggcttggagaatgccttttctaaaaccagcttgaacatctggaagttcacagttcacgtattgctgaagcctggcttggagaattttgagcattacttactagcgtgtgagatgagtgcaattgtgcggtagtttgagcattctttagcatgacccctcaaatgtggtagctattattacatgtaccctggtactaattttccctaaaaggacttaatggaatgcaaccaagcattggtgtaaataatcagatctacatccctcttcttgagcttaatcaaagtgtgtcccttctcctctgaccatcactgcttgagccacaggacaatggggtctagctgcattcacctgtgtcctccatcactggctttctctacctctttggggtttaggactttctatctgggttgggaagatcccctggaggagggcaatggcaacccactccagtattcttgcctagagaatcctatggacggaggagcctggcaggctacagtccattgggtcacacagagtcagacatgactgagcacacacgcccgtgtcttctcaggagtatttgacaacaagaaatcccatcctccttctcagaaagctgtatgattttaacccaggattgatgaaatagagaaactgcaatccagaaatgaataggcccaagaataggggctgggatgcggggcgagctctgcaggtgaggtggtgacgggaatgaagacatctcaacacacgtcttactttgggtccttccatgcccttgtctattgtaaccacgggcctgaatgaactcacaggcctcctggaggaagccaactttatcacccttttgaag

SEQ ID NO: 57294 - DNA, 1046 bp, Bovine  19866880451716
  misc_feature (1)..(1): n is a, c, g, or t
nacgtttttttctcgagaaaattataaagatcagtccatggctccaagtttaaaagaactatgtattttatctagcaggtaatatgcttatttatttggttatttatatccatatttgatatttttctgatacttgaagttttatatctgtctatatccactatgaaacatttgaattataggaatgtaaaaattagaaaatagaagaacttagtatcctcaaaagaccactctttggtgtacatatgtaacatcttttaagacctttctctacacgtgaacagatgcatattaaaatggggagagttccctggatatccagtgattaggattccatgcttttgctgctgagggcctgggttcaatcccttgtcaaggaacaagccatgcagtatgtggcccaaaaaagagggggagtgggggtggaaatcacactataaatactataaacactataaaacttttgcaatttgtttttttcatttaacataatacttcaggtattttgtgcccctatattacctcagtcttcttatggctacatgttactttacagagatacttttaattcttttagttagttttacattgtaaaatgtttgtgcagttttaaacagtaacatttataaatttcttgtaattatttctataagataaatttatagaaattgaattatttgggcagatactataaacattttgtattttaatagataccaccaaattgccatagatgtcatacgtccaaatttctggtatgaaaatgtgtattgtgacagtaataatttccccttctcactgcttacctgcctataacagctcttctttcctttgtgattggctgcttctactctattgtggatgaatcttaaagttgagtcatgaagtttactagaaagaagtgataatatgccagatgaagaattggggagctcccttaggagagctcaatgtctactttcatctttctccactccttttgcaatggaggaaacatatttccactctctgcatggaatgggaccccatcttttctactttttcaa

SEQ ID NO: 57295 - DNA, 1063 bp, Bovine  19866880456676
  misc_feature (1)..(1): n is a, c, g, or t
nctttttatatacatgctgctataaggataagttcctatgaaaggaagaggcgtgtgtgattttaatttttatagatattgccagattgccattaaaaacattaaacaagtccttttttgattccatcagataaatagataagttcaaataaaggcaagcagaaattgtattaataagacattttcagaattgcgttaaagaggcagtttcaggagcaacatttcttgccaaagtgcaagaaattattgtctttgcaagtgtcaactacaaaaggttaagactgtaaattccttatcagtgtgcatctatgaatatttttcagaagctatttctgttatccaacttgtaccatttcttggagataactaacttcttaaaacttattaccagttaaacaattgcctttgtttatttgaatctaagaatgcctaccaatactcatgtcctgagatttagtgcacatatatctttactcataaaaaaaaaactcacttttattagtttttatctcagcctcatctttcgagactaaaaatttccagtattagtcttattcattctgcttcttaaatattttatgattctttgtcaatctggttctgttcagcatatcccaagtgtgggttatagtctgaaatatgtaaaggagaggacatattactggaagctgagtacacttaactcctaaaatctttttttcttatagtaagaatgaattttcagactatatttaattaccagttttcttgatggaaaaaaaactagaaagaatgtaaatttattagtcctaattttgcaattttttatgttctataaataacatatttgggaaaatagtgatacctctgtttatgctactttcaacaacatgaggtttttattcaacgcttctccctccactaaaaggtaaaaatttgcctttaaaaaaattagtttctggttatagatatttataactgagttttaaggcagcaaaagggaaagtagcttcaaatacaaaaaaagaagaaaaaattttaccatgtttaatgtacataagtaaatcaaattcagtgggtacag

SEQ ID NO: 57296 - DNA, 1550 bp, Bovine  19866880485903
  misc_feature (1)..(1): n is a, c, g, or t
nccgccccccgctccccacccccaggtctctgtggattctttctcttgattctggctgctgcttctctgacaggtgtacttcttagctccagggacctggaccagacagccctcagctctcacactgcctggtgtgccttgggactctggatgttgcaaaaatacatatggtctggagaatgcaaaaggtcacaggcttatttttagataggaagaatagactccattttaagcataaagaaccctataataggacgtgccctcttactgtgttgtttgaattctggtattggtctctgtctttgcctctcccccttcccaccctgcctggcccctcccctccccctttccctttctctgactttctttccagcaaattacactttcccatgacaagaagtgctgtcagtaaagaaagcaaacacataacaaggaatttaaataatagaaaaaaaaatttcctaaacctcgaaacatctttttgtttgcaaattgacagggtgagaagggtttttcttgctttgcagagttgaaacctcatctcctctgagttcccttcactctgggagctgaaacctgtgaaagaattccctcttgcttcagatcctccatgttgggatattggtttctttcccccctcccctcaaaaacttttacttttgacctcgagaaaaggtgtctcatcttttgagaggttgatagagagactttcagcctgagtctgtatgagagagagccggagacagagagatggggagaaggagaaacctcagccagagcaaggcctgggcctttctcctaccaactcctctgtttgatttccttcccaccagggacagaggctggaccttgttagccactgctggagtgaactgaaactattatccataccttttctcacatttcagccatttctttcttcttctaaaagcaatctgggataaggataaagtcttcctcagagctggcttttttctcctccgcctcccatggtgaccttgttttgcattttgtagttgaaaggacatgaaataaactttaaaacttgcctgattccataaataatcatgggcttcatagatacacaccagcccacaatggtcagtaggaccacgctcagcacatgaaggcaccaaagataaatctagtttgtctttgaatttcaaaagttccatctcccagatggaaccctcaagcgggcctgccttcatatatattcaataccagcaccaacgggatcctaattaatgagcttgttaattctccttgccatctggggacaaaaactattgtctggtctctagccattgtgtatatgtgtgtgaatatggaatctccagatttcaaatcacagtatcagcagattatatagtcttttctatcccttaagatttttttaagggtagatattctttcttataatggttaatcatcagaaacaaccttttataaaggctgcctgctatatagcttttcacaatggacatgcaatgatagatgttagatagttacgtccttgtattttcaagcgacttacagaaaacccattt

SEQ ID NO: 57297 - DNA, 1469 bp, Bovine  19866880528984
  misc_feature (1)..(1): n is a, c, g, or t
ntcttacctggaaaattcccatggacagaggagcctggtgggttacagtccatggagttgcaaagagttgaatgcgacttaacacacacaacatacatgtttaactaatagattgagagctctgactatattaaaatgaaaacttctgtaaatcaaaattcaccattaaaaaagtgaaagataagtgagactggcaggagatatttccagtgtatgccactggaaatctgcatcctactaatttgaaagcatcccaaatctagaagaaaaagaatttgaaagaaccggaataagagggagaaactaaatagcggatggacaagtgtgaaaagatgggctctcttactggggactacagaaataaaacacaagttaaaattaccaggggatatgatttcaaacacacaagagtaggaaatattcatatactgataattctaggaattggttaagatgaagaaccaggtgaaatgacatttctaagtgtaggagggtaaattatgtgcgacttcagggagcagtttgacaaaatctcttaagtggaccatacagattctctactacccagcaatccctttcctgagaatgttctctggaaaaattcttgcatatgtgtacaagttggttttcacaggaaagttgatagcagcattattggtaactgcaaaatataggaaaaacctaaatatgcaagtagaatgaatttaattaaattatagtatacccatgtcatggaatataagactgaactgaaaataaataaactagagatttatttatcattaaaacaatgagataaaaattttaattgaaggtgaaagtagcaaaaggatactgtgtgatactattttatgaagttaaaaatatgtaaatcaaccctatatataatttggaagaatatatagtcaagtaagggactgaaaatcaccaagttcagcacagtgtttatctctggaggtaggcggggagaggaaattgcccctgaaagaagatacatggaggcctcagaagtatttgtaatattttattgcttaagctgaataaaggctatataactaccaattatagtattctttatacctttttgtatgcctgaaatattttactataaaacagtttttaagtgttccagacttgataaatcaggaaggtattgttaaaggcaaatgcttaagtgctggctgagatcaccttgacaatccagggcactactgagacactactgtgggaagcaactgttgaaaagaagctaaccgtaaaaagatatgaagcacattaggaagccgtctctcataagagacaagcaacagacacagtaaatgagagagttttcagttgagatactaaagaaagcagagcagtttccaaagaacttcaaaataattaagttaaaaaatgatcaaagagataaatgagtcaactgaactcatgttagaaagaagacacgaaaacagaataagtagacttgg

SEQ ID NO: 57298 - DNA, 1720 bp, Bovine  19866880567973
  misc_feature (1)..(1): n is a, c, g, or t
nattcccctggagaaggaaatggcaacccactccagtattctcgcctgggaaattccacagacagaggagcctggcgggctacagaccggggtcacaaaaagagctggacacaagttagtgactaaacaactctgcttccaggttctggcccacaaagatgggccctcctcctctgccacagaaaccaccttttggaagcccacacctgctgagaccattggcttcactgcctcttccttataaataaaactccaacttcccagccaagcttctactgacaaagctctaactgtgtgccaggcactcttctacaccctttgcccatattaactcatttaatccacataattctatgcagtaggtactattattatccccattttagaaataatgaatcccacagtgagccctcaggaaatattttctgaatgaatggataaagggacacgcataagcattgacaccatgtactacaggaggctgtttccatgccaagggaagccagcagaaagtgaggaactggcttgccaaccagttatttgttcctgcactccaccaaataacccgtttgcctgccattggctggatattctggctttgtgtagacatctcctggctgggaggaaagccagagttaatccctcacaaagggttgtttaataataaccagaaactggagaagagcagaaaggaacacaatgatcccacacaatctgaggaaaatggactgttcaggcccccagtgcccaccctgtcagcaagggcccctggtggggcctgaggtttcttaatttttattacaaaaatagaacatgaatatgtctctcctgattatcaccaccaagtgcgccgggaaaaacatccacagatgcatattactctaatgcagcactaatgcctgcatcggaacagaaaaccaggtcatctttgaaagtctataaatggacagccctctctgtctattacttatttatgtttcccgccttttgcttaaccagccttcaggcccaaacagggaaaaaacaccatacataaagctaccagtatagataaataaaacatcagactcacactggtagcttcagccctcactgccttggagggggtggccttcagcagctaaatattatacaaatgaccagcaaaatgcaatcctataagaggaggcaggtcattcctaaggtatgtcttcttccccaaggatattcagctttgactttctggacaaccttcttgttggctgtggatggaagacgatgattgcaaagtgagtctgaacccaaatctccttgagttgaatgaactgcgcttgatgttgaattcatcaccagctgaagtttctggatcgcctccaaagctttccccactggccttccctgcagtcacccagcctcagagttcaccaggtttaacacagtcatggggaagtccatacatgagagaagtcatcagagtctccctgagaagttccagcagaaagacaccaatgcctgtttcaagcctaatggatgtccctgtgggacctatggcactggaggaagaccttctggggaaagggaaaacgcatctctgggagcaacatcacttgccttgcctctggcttctcccaatagccctccatgagctggaacagaataggttttactctcaccccattctcagggtagcctggtgtgtagaatggcttgtctgcagagatctggtgtgatgagcagcaca

SEQ ID NO: 57299 - DNA, 1300 bp, Bovine  19866880608431
  misc_feature (1)..(1): n is a, c, g, or t
ntggtatagcacagggaactgtattgaatatcctgagataaaaaccattgcatctgcgttcagttgtgtccgactcttcgtgaccccgtggactgtagcctgcaaggctcctctgtccatggaatttttcaagcgagaatattggactgggttgccacttcctactccaggggatcttcatgagccagggatcaaacccacatcccttgtgcctcctgcattggtaggtggattctttactgctggcaccagctaaacaataatggataagaagagtacttttaaaaaaggatatacatataagtgaatcactttgctatagagcagacatcggacataacattgcaaatcaactatatgtcaataaatatatacattgggtcaccttaaagagacactatattatgaagcactcagtgacgggccaagcaccagaaaggtattatctcatttagtcctcaaaacaatccactgagggggaagttattattagccccactggcagatgagagctgagagaggtcagtaacccgttttcaggtcagggagtcaaattcctctcttctggatatgtctgctcagtgccaagtgttgatcttgaatccgtgaaggagaaccaacctgagaggcagctggcaatggtatttactgcttcacagttcgggcctaagtcctgactaacacggattcgattaccaagtgtatctttaaataaacgtgtgctccagcctcttgaattcaaacagcaggcgtccatggcataattacgctggctgtgacacgagcctagctgcgagtggatttttattttaacaagcttgagtaggtgcacgcgtgtgggctgggctttttgcttgctagtcaatacttgaaagcgggcttcaacctttaatttaagcattcgcttgtagcaccaacagggctacagggtttccagtatcaaagacacgctcctccatcctttcatggccctgcttctgtaagcagcgtgattgaactgcagcaccacagaaccttgttttccctcctcccggcaggcgcaaacactgctgccccattcatcttggcgacatcataatgaagtccccgaatcaatttctaacaagcaaagcgcaaaaatccaccgaaggagtcttgtagcagatgcctttcatatatcaacagctcatgagaggtgaagtgcctgcacagaaacccaaactgtaccatagaagtgtcttttgctacatctgaaaagtgttttttttttttttttctccccttcactgaaagattaagagaaaggaagatactgagaaca

SEQ ID NO: 57300 - DNA, 3186 bp, Bovine  19866880626922
  misc_feature (1)..(1): n is a, c, g, or t
ncagaaggtggtagtttttttggagctggttccttagcacaggtgtccccaacctccaggatctaatatctgatgagctgaggtagagctgatgtaataataatacaaatagagtgaaagtgaaagttgctcagtcatgtccgactgtttgtgagcccatggactatgcagtccatggaattctctaggccagaatactggagtgggtagcctttcccttctccaggggatcttcccaacccaggaatcgaacccaggtctcctgcattgcaggcgtattctttaccagctgagccacacgggaagcccagtgcacaatgaatgtgctatacccgaatcatcccaaagccatcccttctccctgctccatggaaaacctgtcttctacaaattggtccctggagccaagaaggttggggacctctgccttagtagttttttcctgaaaaataagatgggaatgggactggaaaatattgcctctcaatgtcagtctacatcagaatcaccaaaggagtgtgttaaaagtcagattgccagaccccttgccccttgactttctgattcaggtctgggggtggtgcctgagaatctgcattgctaacaagttcctaggataccctgctgctgctggtctgagaccacactctgagaacttctgggctggaaagaccccctcaggcctccactggggagagacttcattacaaaatggaagacaggattcgaggatggaatttaaaaatccattcacaggtgcagcaggcaggtgggaaaccccagcacatgcgtgcgagggtcccactgtcatagcattggcatccagcagtcccttttacaggaggcgggcattccagctttttgagtaacctctaaaaagataatgcccctctgagcaaaagcaaacaccaggaggcttaaaaacctggggtccctgtgcccgctcctcaagccagcagaaaatacatatatgtcaagaaagtgcagtgtaaatagaaagcagggcttgatttccaccagcccgagtcaaagaatctgctgaggaggccacatgacacacgaaatgaaacccaggtccttgatacccagaggacagaaagggaatggaagatccaagaaaatccaaacgttcctgaatctctacagtaaacacttctgatcggatcctcttgctattttggaacatacatgaagttcattaactggtacacattaaacaggaaaaggtagaggaaaaaaaaacatggtgctggaggacaaatcagtaattgctccttcagagcaaaccaaagttactgagaaaatctcctataaaggctctgtcaaaacaagtcacttaaggattagtgagagctaaatcctccgtcagagagatttttctcaacagtcgtaaatgggttttagtatcagaaaatcttagaaaatatacttcccctgcccctaccctcctctcgtaacggctctttcaatactttggcatcttctggaagcacagtgtttccttaggctgagacttctttaaaaaataaaataaactctgtcatttgcagcagagtcagtggctggaaataaattgttacagacactgtatttcagaggcttgcccatacaacacacatgttcaagtacagtcctttcttttcttggcaatttccctgagaaaaattaatatagggctgttagaagctaatactcctactttatcttttttatcttttttttttttttttcattttggactccttccttaaggtttaactgctcaatttgtttgtttggtaatggcaagagctgaaatttaaatttcatttttgaacatgagtagctggttacttatttttttaattagaaaaaggcaaaccctgaaagcactatatgttttccaatggtagcctatgaaaagcacacattttaatgctatcagtaaagggtcatcttatttactctctctaaaccatcaccaggacttgtgttctatttctgaacagtctgctctggaactcctattgatggattatggaggtctgtctctttcattaagctagtgtgtagaaaagacgtacttacaccataagctcttagaaacactggcatttatccccacaagagggggatcaggcaaaggcattttcctatctgcctcttagatggttacactccattttttctgaccaaatctttgttcttatatcagctctcagagctaatgcatctagatgtcactagtgccaatcagtggaaagctaacacacttgcaaaatgctccctgtgtgagtcaggactgatttcactctttggatacagactatgtttcaaatttctcatttctaccattagatcccttaaaaacattcatctgccatgcaaaaatatttttcctgacatccaaatggcaaatcttagttacaaacctgttttgaggcattaatatactcggccatccctcagcatagtgtatgtgaggaggtgaccaaaaaaagaccccaaattgttcccatcccaacacaccttatgtctaaaattttgccactgaaatcctttatgatttttaatgtctgggactatccttttcatattaagttattccaagagaacctatttaatctatcgaatcagtaagactatagagaatttagcaagtcttttattttggtggtaaagccaagagaatttaggcttgggattatacagacctgagttggcatccaggagccgtggttttctagctctgggaacttgggcacgtcatttcatctctaagaggctcagttttatcatttataaaaggggaataataatacctaccaccaggaataaagaaacaggaaaagcactctgcgtggggtctgcccccttgacagtgctcactaatgtgaattccaggggccagttgggtggggagagtgaggtcagggtagattatcctcctcaggttgaccagcggtaacagaaacagggcacactctggaaagggagctccaggagggggccactccagtgtgtgtgtgagtgtgtgtgtgtgtgtgtgtgagagagagtgtgtgtgtgtgtgtgtgagagtgtgtgtgtgtgtgtgttgttgttgttgtttaaccaaccagcagcagtggacacaagtccacttgagagagcagactgcagagctgaggaaacagccacagaggagagaggacagcgttctgccca

SEQ ID NO: 57301 - DNA, 1153 bp, Bovine  19866880674560
  misc_feature (1)..(1): n is a, c, g, or t
ntgcttaagctcctctttaatggccgatctgttccagagcctcacttatagggaagaactctgaacagttgggttaacttctaatccaagagagaagagccaacttctaacattctgcatatagcctaagcatctacatactgtccatcatttgcctgtattcatacaagagtaaaaccccatgatgaaatttcttgtataatcaccattaagttagctcacctcgaaatgccagacttaggaaacttctggaaccaaccctcggcatcaagatgaggctgggataacctcacactgaataaagggaagttctacactattctcatctgaaattcatcactgttcccaacttgtcactccactaaggtatccttaaagaaatggagatcttagattgggttccctagagaatagactcagagaaactgagatttatatacagaaagctgatgggggaatactcttaggaacaacagctataaggggtgaaggaacctggattgggcaggagaaattgaactgtcatgtagctgcaaccggagttcagcagacaccacagacagatcagaagcaggcatacagtttttgagagagatcctagattgaggcaaagggactggatattttactctaaatcagccagccactggatgccagctgtgcccagagaaaagcatcatcttgggcaaggcagctccctttagctaaagacaaggctcagaaaacaagtcagctgtgagccactggcagtcaacactctgggccccgggggaaataagggcctccatcctgcagggaagaatctgggtggcacaccatagcatttgcaggggagccaaaatggacattaaattttgtgaaaacatgttttctttatttaaaatgacacacattttattgcttagctaggatttaaactaataaaatatatgcttggcctcagcattatggtataccagaattgcaaatgctaaagaaaaaaaaatatttttttctgttgaataaggttcttcattagaatttctggtcctggatatgtgcattataaatcatgtgtgtgcaattccacataatgcattatttttccacacatggacattccagagagttaacacatttttcttaattaaaagaaatagataacacatttcca

SEQ ID NO: 57302 - DNA, 1527 bp, Bovine  19866880703876
  misc_feature (1)..(1): n is a, c, g, or t
ntaaagaaagttccatctgtttatctgtcactgccaagtgccaagtttctctatgaagtgcaaggaacaatttccatgcaacagctcaagagatgcaacgtgtgtttgcccaaagccatggcacagtgacatgcggctcctttctgatctcacaggctaccagccatttggcggggtgtatacctggctgggaagcctcccaggaaaccacagctcctgcaaatgactcaataaggtggttcgactcctgtgagtcaggaccaagcccatggtccctgtgccaaggctccctgtcacggttgagatgctctgggcttggctgacatgaaatactgaggacctctggtgttcacctacagaaggatggactctctttctgacaagtgaccaggacggcagctgacatcattcagtggcccttctcttggagagctgggccttctatatcaagcccgatttgagttttgatggctttctacattaggtgaccttttaatttaagagctcactcttgggactcccctgaaagtccagtggttaagactctgcacttcaaatgcagattgagggtttgatccttagtctgggaactaagatcccacatgtcgagtggtgcagtctaaataagtaaatagacagatagataaaagttcaattttccttcttaccaagggcttccaggttgcctcctaaagtcatgaactggtggacacaaaatacctagttctaagttcctacggtgaggaacctgaggaagacactcactggaggccttaagttctccccatctgaatttaatcatcagttcaattgttctccagcaccatgacaatcataccaatatccaacttaactttccacaggctctcccaccgatggaatcacgtccaaacttcctggctcggtattcaaattcccatctatccttcacatcttctctttctctatgagtctacctgtaacctatgttttgggaaaactggaacactcactcttctctcaagcaactgcctttcccatccgtcatgctgtgccggtcccttaacttgaaatgtcttctctctgcctcttgaaattctgcccacccttcaaggctgaggtcaaatgccacttcctctcccacacacctttccccatcattttttgtgcagcccctttgatctcacaccacaccatgttggtacttccctatcggcccacagcacctagtcttgaagtgccagcctttgtatgaatgacttgcatctcctcctggatggcatatgatccttaggaaatgatgggcgtgaggagggaggatattattgttgttgttgtgtcactcagtcgtgtccaactcattgtgaccccattgggactgtagcccaccaggctcctgagtccatggggatttcccaggcaagaatactggcatgggttgccatttccttctccagggatatcttcccaacctgtgtctcttatgtctcctgcatggcaggtggattctttaccactgagccacctagaaagcctaggagaaaggat

SEQ ID NO: 57303 - DNA, 1749 bp, Bovine  19866880722931
  misc_feature (1)..(1): n is a, c, g, or t
nttatcttggttttgaagatcttttttgtacagttcttctgtgtattgctgccacctcttcttaatatcttctgcttctgttaggtccataccatttctgtcctttatggagcctatctttgcatgaaatgttcccttggtatctctaattttcttgaagagatctctagtctttcccattctgttgttttcctctatttctttgcattgattgctgaggaagggtttcttatctctccttgctattctttggaactctgcattcagatgcttatatctttccttttctcctttgctttttgcttcccttcttttcacagttatttgtaaggcctacccagacagccattttgctttcttgcatttcttttccatggggatggtcttgatagaatatggcaaagacgtggttactgaatcaggagatactcggtcacacaggacagatcaggagcccagtgatgggaatgaaggttggcaaagagcctgccttgattccagttactgcacaatccatcgaaccaaaagatgtaaaaccttagcatatctaagaatgatatgaggagaggaatattcttattctatttgcataggactttttgaaaacagattgctttttcaatatttggaccccttttttgttaataaaatcgcccctatgtctataaaatgcaaatctatggttaccaaaggtaagagggaaggggaaggaacaaattagagtatgggattaacagatgcaaactactataaataaaatagataagcaacaaggatttactgcatatcacgggtatttatatccaatatcttataaaaacctataatgaaatattatcagaaaaaataattaaatggctatcctgtacacctgaaaccagcacaatattataaatcaactgtattttaattaaaaaaaaatccctaatgtctgaaggtcttggtttatatctccttagatccatattaactaattgcaccaatattgaattgggactcttttcttcacccatttctgtatatagtgtatcatgtgaacatgtccatgtgcaatcacacacacatacacacacacatttcagtccagatatgtatataacttaaaataatttaatctaggctttgacttaaaactgaatcatcttttttataatggcgaagaatgtacagcaaatgtaaaattcacctagtggtcaattttatgtcccttgtttgcaattaagatcacggggtgagcaagtttgcttgtaactgaagcacagactcttggctatttgcaacattttaaactttaacaagtgagtgatgcaatataaatgatgctttaaacatttatgcattgggtgggaatctatattaattataaaacaaagggccaagtcctagaaacaaagaagcattagttttttcttcctgagttgccttactaagaattagatccctaaagaaaaggcatgtacacaggaaaggttctgtctacttaccagcacttgatttgtgtcttacctgggaacccaggacaactcatccgagaacttcccgcggtctgttcacacagtctgttctgtgccttgctcatgccctccagccatcacacactgtgcatctgagaatgctgctctctgcacagcgctccttctcagggtccctatggtaaaatctcacatattcttttttttaaccattaatttttttattggaggataattactttacaatatcatatatgtttctgccatatatcaacat

SEQ ID NO: 57304 - DNA, 3560 bp, Bovine  19866880785255
  misc_feature (1)..(1): n is a, c, g, or t
nctgagaaagagcagatgatgctttacaggaaaggaggggaagaaaggtgggactgtaggcgcgccagccctgtttgtgtgcccctggccacacatggactgctcttcctcctcttgctcactaacagggagactttttaaaagacactgctttatattgccccactcccatttcctctgtatctccccaccatctatttgcagcttctgatggcattttcaggacttcattttttttcctctcaaggtctctttttcttcatcttttgccttgttccccgatttcttagcctccgctatttttcctgtctacccaccacctgccccaaacctctgtttttctggcctaagggtggctgggtggggagttgcggatgtctgggagtgaatgccaggagacagagacaatagttgtgacttttgttctccacaggccatgacgtccctttccctgagcatttgcttctgatttagaaaaatcagctttatgagtgtatgtttttatagctaacgtgatcagacattccagctgtgtcgaggattttaggtctagaaaaggaatgaagtgcagagttgggatgcagagcaatcctttgtcagttctctggttggccaaacacggtcgtgcgccctgtgccgcagggcctgccttgccctgtcctcctgctctgctccacctcccctgtctaaggcctctcctctgtgcttccccttggatgctctgggtaccttgagaggcccggagaagcaacctgcacagtttggttcctttaagtcctcctcttctgatctctgctttcttgcttctgtgaagttattgagagccggcccttagcttctcagtactgtgattatcatttacctaggaggtctatttacagtcttgctgccaaaccagagagtctggtgagagatccaggatccttaatttctgaccagctcctaggacctagggatgtagagaccacagtttttcttaagacctgatactatgtgcctgctaaaaaaaaaaaaaaaaaaggtgattaatctgacaagggtatcaatattaatgagctaaagagaaagccaggagaggaccttcccttctcccccaagtgttctctgtgcagctacttcctagagatagctcatttcctcatttaacaaatatttcccaagtgcctactgagttccaagcaatattctaggccctagggcactgcttctcaaactctaaagttcatacaaattacctggggaatcttgttaaaatgcagattctgattcagtaggtcagttgttgttgttctgttgctcaatcatgtcttactctttgagaccccatggactgcagcacaccaggcttccctgtctttcatccagagattgttcaaactcatgtccattgagttggtgatatcatccaaccatctagtcctctgtcatcacatggatcacagccttgtctaactcatgagccatgccgtatagggccacccaagatgaatgcgtcatagtggagagttctggcaaaacgtggtccactggagaagggaaaggcaaaccacttcagcattcttgcctggagaaccccatggagtacgaaaaggcagtagatcaagaggtggggctgaacattctttgtttctaacaagctcccagttgatgatggtgtttctgttccatggagcacatcacagctgataagggtctagaccagtgcttttcataggaaacatagcctgagctacaaatattagccacaggttgttgtttagtagctaagttgtgtccaactcttcaccccgtgaagtgtagcctgccaggttcctgtgtccatgggatttcccaggcaagaatactggagggggttgccatttccttttccagaggatcttcctgactcagggatcaaacccatgtcctaccttgcaagtgaattctttcctgctgagcccccagggaggcctgattagccacagaggcaactttaaatgttttcatggccatgttaaaaaaaaaaaaaaaaaaagtgaaatggattttgaaggactgtgttgcttaacccagtgtgttcaaaataccgtcatttcagcaagtaatcaacataaacgttgagagacacacttgaagtcttcaaacgcaggtgtgggttttgcacatcttgagcacatttcaggtgggagtagccacattccgagtactcaagttcacgtgcagcatttggctcttgtgtgccccagggcaggtccaggcactccccttatccctggggagcgcagcacagtgactcagaaaatgcagatggtgctaccattgggccagaactccagttgtagggctatgtgatctcctttcatgaggagcagcctcagtgatacgaatcgtagaccagcttgtttcccatccccatgtgaataagtgaaatagaaatcccagtgcacaagcccattgtcctccaatcagagaatgctcgctgtttgtgggtgggtgggatttccttccctcttacctggtaagcccatcctgctccattaaaatggactcttctcaaactgctgctgagttaaggggacaggagaagccagggccgcattctgactctgtccaggtttgtgtctgatgtccagtttttttaaatttattattattataattattttttatttgggtgtgttgggtcttagttgcagcacatgggatcttcgttgcattgggcaggatctttcactgcagtgcatggagtctctagttgtgataaataggctcagtagttgtggctcgtgggcttagttgctccctggcatgtggagtcttagttccctgattagggactgaacctatgtaccctgcgttgcaaagcagattcttaaccactggaccaccagggaagtccctgctgtccaattttttgaagacagctttactctgggtaccataccttgtgcagcattgtaggttgtcttgacaccctggccagcgtggtaaaaacgtgagctgagagcacaatgcatggtgcttatgagtccccgctccacctcctggttccaccagtcagagcaaagggaccaggttggaggacatttaaacagaatctttaccttgctcacctgctctcttttctattccccgtcccccgtgctctgcttctatagtgttttgaagggactttatccttggtgacaatgcccgggatgtggccagtatggctgctctgggagacctgtgttataggcgcgaacctagaacatgatgcatttccaaggttaggtcgagttttctcaggccctgtgcctggtgcttgactttaaatgcctctatttgattaaaatgaattctgaaatcaggtttcagggctgatgcaatgatagcaatttagcgtttatatagcactttttgatttatgtaactttttaaacttctctcatttttacaaagttcatgacaggtaagtgtataccttgattatgtgtggttaagtcacttcagtcgtgcccgactctttgtgactctatgggactgtaagccgccagcttcgtctgtccatgggattctctaggcaagaatactcgaatggg

SEQ ID NO: 57305 - DNA, 1791 bp, Bovine  19866880788710
  misc_feature (1)..(1): n is a, c, g, or t
ntacaaattcaaaatatttactcttctgaccctttacagagaatttggctgaaccttatattggaatggaagtctataaagctggggactttactgtgtttactgctgcattcccagcagctagaacaatgcttgattcatagtaggtgcttgataaatagttttgaaaaaaataaggtaaaatcttttgtttgtaacttcttctactttgccctagacacagcttcagtctgcaaataaacagaattttcatatgagctatcccctaaagactaaaacctataaagtctaatattcaaatatatgaattttatgagtagtgaactcataagatgagattttttatcaattttgctcagtatttactgaaggctgggaaactctagatgtataaaataagcagttggtttaggtttttctgccacctctacttcaggacctgatgctttggcttactaaaattagcattgattaccactgacattgaaaactagtttgttttgaatccctataaagttaattggtaagtcattggtaattgtctagaatagacagacttctttgcattttatatttaccccttcctttgtgaattactctgcaaaagataaattccctgatattttacacttgtcaattacctgcaaaatgtgtttgtttgtttgttttgctccagaatgtattatttggggatgtttcgaacagcagttggtaggtatctctagttgtaggtttaatagagctaatacagctaattggagataggagttgttcagtggaaggtactttacattccagagcaaacttagaaacataatagctactgtggctttcttcccccgccccccacccagtccttacagtcatttatctttgcagtgaattaattaatttccttttattatctggtacttagtcataaaatgttgtcattctcatgttattcagcgaaatgctctgaacacaagtgttagtatatctgaactatatcagctcattgctggttgcatgagcatatttggaaattatgccagtagaaataatatgtaacattcaataccaaagttctcctggccttagaaatatgtgcaattattctagagagtagatctaagtggcttgaccagtttattcactgatatatttatccctataacctagtttgtgctgaaatatgtggctaaatgattaggatactagaaacacacagatcctttacccatagaagattgcacattggtgtgaaagattggaagacagtgagaaaattgggtgaatagttaaatcaaagattaggaagaggcaccagcagacattggaggaggggaaaaatcagagaagaaacttttaggatttgacacttgatgtgaaacctgaaaaaccaagaaagaaaaatgggaaagcctatgagaccacaaaggattatgaaagatagaaaagaaagaaaagatgaagggtattcttatgagaaagtggagaagggcattccagggaaaaggatagcaggtgaagggcacatagcattgaacacttgagaaacagcaaatgggagataatagctgggtgtaaggaggagagaacaagacatgagcaggggagaaggaccttcgggcttgttaagcagttgcactttgacagtctaggtggggggcaccctgaaagaatgcctggatgtcctgccagagggaaagaactgacttgttggaatgacaattcaacaagcagtgctgctagagtttggggcagcaggagtccctctgcctgtgaaggagccacgtctttcatcactag

SEQ ID NO: 57306 - DNA, 1050 bp, Bovine  19866880797970
  misc_feature (1)..(1): n is a, c, g, or t
naaaatcctggttgcttgttgggtattctctatgtttgcaagtgtcgctgattctacaattgatttccttctggtaagaagggggaaagatattttaaatgaccaaactcttgttcttgctttattctgtatactttgcagctttgaacatcagattcttcactacaggataagttgaaaaatgccaaacatctttagctagagcattcttggagggaccagtatcacatcctaatgttactgtgtttttatggatgagcatcagtgtttgttatttgtatgcttctgttgctaggaagcttagctgaagggctacaggttgctaattttgtttctgatacccatccaccaaaggccacattaagtcatacctcgtatacctgttatgtgccttgatttatttttcttcttgtgttttatgtatcattccacctaaatagttgtgtgtgtggcatctcctagattccatttaatcatcaacaacagaaaattcctctctcctaatttgtatctaatatagaaaagcagccttatctcagagtgtatatgaattacctcagcatggacattatcactagctaataataatgacaactattatttgtatttgtattgtacccgataatgtataaaggacatttccatcattgaatcttcactagggccttaagctgtagatattcagatcattccaactttccagatgcaaaaactgaatccataggaatgataaaagattatacaaattgcctatcaaatgtggacagtaattgaggtttgaatgctgatctgtctaactccaagtccagcgtccttccaattcattctgcatttaaattcctggaatttttctagtgggataggggtgtttgttgcccattctgggccatagcgattggactcttgttggaagcacatggcaaatgccctgcactattgtatcaaaacctatccagctacattgtgagcttgttgccacaccaaggtgctgtcatgagatgttttaatcatcacttcctcctccttttttgacatcttcttgttggcaat

SEQ ID NO: 57307 - DNA, 4374 bp, Bovine  19866880811545
  misc_feature (1)..(1): n is a, c, g, or t
ntggcaggcagattctttaccctaagccaccagggaagcctggatattctttaagcacaaggaaaataatctcagatggaaagaggatggtgaaagatgtgaaaataaatgaagataatgtggatggactctaatttgtaggtgagtgcagggacactcaggatctcaacgtagttttgagatgacgtgggccctaagaactcgagaaactaacaaacaaaagttccttccgagacagaagccttcactcgggaaaaatcattagtggtaaagtctgtattgagcagaacaagacattaaaggtaaaggaaaaataagttttcagacagttgtggtagaggggaaaagaggaagcagatagtagaatgtactaaagattttatatgcacacacgaacaaaaaccaaccttcatacatagatacatatctagtggtaacaatgaaacatgggcttagagccatgagtctatgaatgctgtcctgggacagtcccacacaggattgttatcctacaggtaacaatctaaacagataaacccatctcaattaaacatgagaagcaaaagaggattgttgatggaagttcttacaaagttattagagaaaaaaaagatgattgctgtaacatttctacagtcagaaatagtaagaagaaagatgtaccaacagaacagaggaaagctaatatgttcatcctttgttctagaattctcacttctagaaatgtagctcaaaggtgcactaggaaaagaatgaaatgtttgtgcaggatattcatatcagctctaaggtatttattggaaacagtcctcatgtcccttaatagggtatttattaaataaactgtacatcttcagtagcctactatgcaacaattataggcacacattgctttactgcacttcagagatgctgttttgggtttttacaaatggaaggtttctggtaaccctgcatcaggtaggtcactcattgccgttttccaacagcattttctcacttcatgtcactgtgacacattttggtaattcttgaatatttcaaaataattatatttgttatggtgatctgtgatttttgacgttactgttacaacttgctgaaggctcagatgattgttagcactttttagcagtgaagtatttcttgattaagatgtatatacttttaaagacaaagtcattgcacacttaatagactataatgtaaatatatctttatataccctgggaaacaaaaaaaaaattgtgtgagtcacttttttggtgatatttgctttattggggaggtttagaactgaaatatacaatatctccaaagtatgcctataaaaagaatcagaaagctctaggtatgcaactataatgtgatatccaatatatattaagtgaaaatggtcattcagataatttagtgaccaaaaatttatatcatgttcagaaagaattgccaaaaaatcttaaatttcatttaacaatcacattgttagtaatgatattgctgttcttactttgaacgtattagatagtatgataaaacacacaagtacttatgtttgtattagataccaagaattgtagcataggaggtacaaatgccaatcaaagaagcaaaaatcttataataaaactgcaattgtgtaaaaaagatgcttgaaggttttcccgttgacccgagatgtgttagcttgactgtcacaaaaaacaactctgcagtagctggaaacatatgaaatatgttaaaatccatgaatttaaaataatatctttttaaaagagtgttagtcaccttcagaggatgctagtgtatcattattctgaaaacttttaaaatttcaaatatctgtcttttccagtacaaactgtatttcacggtaatgctagaattttactgttaccattttgcagcttctaggtgattgtgaaaacattagtcactcagtcgagttcgactctttgcaatcccatgggccgtagcccaccagaattctgtctgtggcattctctaggaaagaatactggagtgggtagtcattcccttctccaggggatcttcctgacccagggattgaaccctggtctcctgtattgcaggcatattctttaccttctgagccaccagagaagaccttgcaactcctaatgaaatagttaatctaggcagtgatcatcatcaatgactgctaaaatcattaaaagatcagtaaggaattttgatagaataggttgttgacacttgatgaagcaacagaacaattgtagtatcacaagaagaaagataaccaaacatcattagcctcctgattgaagtgggaggtatactttaccacatacaacatatgaagattttttttaaaatgtgcctgaatctgattaagctactagatcatttaataggaattgtaggggaagcatgtgttcaatgatatcatggggatgcaaaatccagaatgtgggaaaattccacaggataactgatctagtttcttctacaaatatctggtggatatcggaattggcagagagtaagggagaggtgtgactgagcaactgaactgaattgaactgaagggagagttgttgacaaagaaaattgagagacatcggaccaaatgtagagtcaggatcttggtgggatccttattccaataaacagttgtaaaaagaaatgtatcagattagaaaattttaacaccgattaggtatttcatgacattaaggaagtgttaattttattgatataattaatatgtttaacagaattcttttataagcacatatttatagataaataccatttttaattttacccaaatttgttctgtcaggaatgagagcattgtttttcagttcattaattttggttttatatttatgaaatttcattattttgaatatgttatcctttacctatttcttgaaaaggctatgaatgatatttctgatttttaataattgttctcatttttgttgcttttttaaataatcagtaattatctctctaatttcttcttttatccaacagtttgggcagttttaaatttccaagtgcttgcatttattattgtttgttgactttttgcttaatgatttctaattttatttccttctaaacagtcagaccttagtagattctgctttgtactttattgatattttctttgtgtattaatttgtagtccgtctttggaaataccccttcgatccttgggcgggaaaaggtatatctttgtagtctatgtgtatgttttcagtcattcatgtatctttgtttcagttattaaatattcatactttctacatctctttctttacttagaaatagtgtatcattgaccaagtacagttgtttctttcaaatttttcttttatttttcagttttgacaattttaatgttatttggcatgtcacaaatcataatctattcatcatggatttcatctttttccttttaggtttttttttttttttttaattcagtcaagccatgtggcttgtggcttgtggaatgttagttccctgaccagggattgaacccatgcccttgacaatggtagtacagagtcctaacccctggactgtccaggaatttcctggacttgatcttttgttcaacataggattcctttttctatccaatgctttttgcattgacttttctctaacacttaatattgttaatcctttatttcttgatgtcatgtcccattgtttctctttaaacctgtttgtgtaagaatgcctcacgtaaacagtgtatagctttattttattttttttttactaaatgtggtattgtttaatgagaaactactatgattgactataccaagaaattttctatatataattgcacttttaatgcttagaacaaacctaagatgatgaccctattatcattattttactgatgaggaaattgagtttcagagaggtgatttacacagatagatcttactcactgcctgaggctatcagagtatttttctctcaaatcctaagctgtaagacaatttcatggtgtttatccaaaatactctgccagactaaggagaaattttgctacttgacaagacagtttattcctgaataaattaaaactgtctggagttcttccacaaccaaaacagtacgtaaaaactataaccttcaatggcttcatgtcccaagatacagtaaaaccatttcctatccatttttcctcatactgctgagagttgttttccctgagtggatgtgtgaaaaaaggtactgattgatgttagaggctggtgactcttccacagttgcagtttccttagagtggcaagaggctttcttcctggtcacctaagtctctgcgagagcatataaagtgtgtggaagggaaatcca

SEQ ID NO: 57308 - DNA, 1007 bp, Bovine  19866880820919
  misc_feature (1)..(1): n is a, c, g, or t
ntgcaagtatggcgtggatctcatcttcagcttttcccctcctcaaagttactaattcataccagcacgctaatgcctttggaatgtttattctcttcaagttggaggctccagggtacacaagaaaacaggcatagagcatgatgagaaacacatggcaatagtctagttggttcacaaaacacgttaagcactcaagatttactgtgggcaggagggaccacacctcattttaggaacagaaatatttttgtccaataccacaaagtgattttgctttaaaaagttatcttaagatatcaagaagagaaaaacataattttaagttgacacacagtccatcataggcttgtatcatcagtgtgagactaggagtacaggtgaggctatgaggatggaagaggtaaagcagggccttgacttcctttatttagggaagtcctgaataagttctgtcctgggttctctttcattgaatgactggcttcctaatgtggccataggtgttttcactccttaggtcccatcccaccccaatccaatcttctttggcttgtagtttgacagtttttgtaaagcaaatttgaaattctgattaggagggttttgcgtgaaaaaccaaccccaatatagccaggacaaagctagatgacatgtctggcagagtggaagtaaatgatctccccattcattggccacacctgtgttccatggtccccaccctaaccccgacacatcagctttaggactgatatccatctccaaatagtgttgggcacacagcagaccattttctgaaagctgtgctagggtgctaactagctagttaaagggatagtcctctccagagggcagggttgaggcaagtactcaatttcctaccatggagtcttctagaaacatgcagctacatacctctgacaacatttaaatacaaaactctagatccatatgcttgtcctcacctcatttagttctttagaaattaaggaaaagacacaccaccc

SEQ ID NO: 57309 - DNA, 1934 bp, Bovine  19866880865892
  misc_feature (1)..(1): n is a, c, g, or t
naataataagatattgcatgtaataaccagtgctactcatacaaagtatagttcatggttcagagctgatctataagcttgttgctaccagttcgagacaagataaatatagaacttgggaggattgtttagaaacttacaacattttgagaatgtgatagatcccttcaaaaatgaaaagtgttaaggaatttggtaataataaatctaggtttttatattttacatgtctttttatttcatttttctggtaattcatttttatagtgtaattgagtcataaatgcaggagataattttaataagggcccaaaatgtaaaccaaaattttgttaaataaaattcctatgtctacacttattcctagacagagatggctgagctcaaagagtcagagaaggattttaaaacctcaaacgcaagaggttgtcactggggagaaaactgaggccaaattgtacgtgagtgtataaagccacatttataaatagttcagggcccaacagaagtgttttaggtagcaactggggagttaaaaaaaaaaaagtaatgctctgcgatacattagaggaaggtaggaacagatccttcactatagaaagcttaagaaatactaatttaggcaatctatattacttggtttgggaaatgaaaggtttgggtgatatctgctatagagtacctaacactatataacaaatgcatatagcaaatgtaccatatagtacatagtatatgtaacagtacattggaggaacagagtggaccaattctgttcgtgttggaggaacagagtgatcactatggactatggtggtttgagcaggatttatggagcaagcagcactttaaattgcaacaaattataggtgaagaataggagaaaatcccaggattgagctgcctaaaattgggaaataaaaggcctataaattctcctaaggttttgcatctctcttttcttaatataggcacccctttccattacgatgactaagatcaggaagtggattaaaatcttttcatttcctccttggctttgaagttccttaaagaagggatttagaatataaatagtatgattggtagaatctatgagtgaaggagaaaacgtaaattaaatgtcttctcattttcaaaattaaatagaagagcttgctcctgcctaaaagaaagaaaaactaaattaaaatgtttggcactaaaagtaatcagaatatttgatcaaattaagaaaaactaaacccatcttaaacttcagtacctttattttcaaaaggcatacttttatttgaaaacatataaagacagtgtttgggctcatgtatgaaaaattaatcttgtgctaaaaggtagacaaggggctcagcctgatatgctttcttaaatcaaggagttattcaaaatcaagaatttacataaagctaaattaaaacctctatagcacatgaagcctatgggaacaggactgtactatggctaagccaaatcaagtcacttaaacctagagatgaagagttccagtccatgagaagctaagacttcccggggggcccagtgtaagacagatgtaggtaggactaggacacaggaccctggattgggacttaaatgccctgagatcaccaaatttctaacccgtgacacttccttgtgtaggcttctctcactgaaactagacattgcaaatcattcgtttccagctacttgccttctcacattcctgaacaatttaaggtcttctcatcaactacaagaagcaggcaattgtcaatgggtaatggaacttcagacttgggatcaccaggtggcaatacaaggctgttagggggagggtgaagtcttctgctcaggttcactttgcccagcaatacataagtcctgagtcttcaaaaggctctgaaagtccttagatcataaagtccatcacacat

SEQ ID NO: 57310 - DNA, 1489 bp, Bovine  19866880880659
  misc_feature (1)..(1): n is a, c, g, or t
ntggtaagaaactgcctgccatgaaggagacacaggttcatcccttggtctggaagatcccttggaaaaggaaatggcaacccactacggtattcttgcctgggaaattccatggagagaggagcctggtgggtcacaaagagtcaggcatgacttagagagtaaacaacagcaacaaaacaacttctcctgaaatgtcctttctgccttctctgttaactgaatccctaaatttctttaaaggtctgttctattgggttagccaaaatgtccattccagagtggattgccatgcctttgtccatgaggggactcttctatacaatttttatttattacaaactatatattggagtcacagaaggcaatggcaccccactccagtactcttgcctggaaaatcccatggatggaggagcctggtgggctgcagtccatggggttgctaagagtcggacacgactaagcaacttcactttcacttttcactttcatgcactggagaaggaaatggcaacccactccagtgttcttgcctggagaatcccagggacgggggagcctggtgggctgccgtctatggggtcgcacagagtcggacacgactgaagtgacttagcagtagcaatatttgagctctcttagtattttgcacccctcttaaggcacctggttcaccttgtgctgtggttggttgaagatctgccttaccctctctggtggaagatccattcctagaaaacaggggtttacccttgcacacagtaggcacacattagacttagtggatttgagaaatggtcttaatcataaggtagaatgtccacacagtgattccattacacaacatgaatgaaaacctaagtgtttcaactttcaatcacttgaaataagcctttctttcttgggtaaaggattagttgacatgtatgggctgttaaaatttatatatgcaaaaattttgttgacacttattttctttgcgtttcttagagagaaagacaaggaaaattatggaaatatatagattttccttgggcaaggggagctttctacaacatgcctaagaaaaagaagacagaaaattaaaaccaagtgcccaggcaacaagtttcctttctttcaacaaagcctcaagaaactgaagctggacatgatgcacaaaatagaagaaattcaaaagaaaatgtagcagctcttgggcatgggaggggctcccctatcctgctgcaaggtttgtagatttatagtcagagccaccccaactagaaaagtccagattgagaagacccctttgttcaacctttattttttgtacagttattgccacctcttcttaatatcttctgcttctgttaggtccatactatgtctgtcctttatcgagcccatctttgcgtgaaatgttcccttggtatctctaattttcttgtacagatctctagtctttcccattctggtggtttcctctatttctttgcattgatcg

SEQ ID NO: 57311 - DNA, 1561 bp, Bovine  19866880894100
  misc_feature (1)..(1): n is a, c, g, or t
nggggttttggttaaattgtgtttgaaagccttagagtcccccagacgaactatggcaaattgaaacgcaaggagcgctgttagaagtcatacccgcaaactctgggaaattacagccgacagttattagtcatccttacgggcaatagagactgttgtttaaaaaaaaaaattcaaatctgatgctatgagtaaagagctgttcttccctaggccggataataatattgccaggatcgatttaagaaattaataggagactttgctctgggctggcagaaagcttcctttcttgtcaagttcagccagcacgcaggtgttttttattgcactgggaaccatcaatacatagaatcccaaggtacttacttatttaggcaaaaaatgcaggcactgagggggatcgttaaatttgctactgagaaaggtgattggtcccattcagatgtttttaactggggagcctggattttttgatcgctgacttagatcgggttgattatcttttgtacctctctgtttgctttaaatgtagcaacctagataggacccttgtttaccatctagctctggggcagcagggtttgggccaccattatagtggaaaggacatggatgtgggatgcttttcccgtgtcccagagacggcatggaagcaaggtcattgcctaaagattcacagtagtgcactcagaggggaatgaattctaggttcctgcttcgtggttagtccatatacctgccttcaaaaatgctgccgctatccaatattatggacagaaactgggagaggaaaaaataaaggaaggagggtttgtagaccaacagcactccaacaaggtggtctgtcctgcattaggtaacaaagctatgccccatacattcagagccatctctctgctctttcccaccatatgacacagctatctgacctgtgaacatccaccccacccccaaaccaacgctgccagtacccaaccaacccttgaagcaggagtctgcaaggtgaatttcctaacaagctgacttttcaaaggtttttcagctcttgaaaacatgaaagccgtgtttaaaaatttaaggatctgatatgtaccagttctgtggagcagcagcaggacatagctctttgcagtgccacgattccccaaaccccaactctttaaattaagatgtttgtgacagctgcttgggcttaatggaatgcacgtaggattggccattaattattgctcttgggtttttgcacttactccctgtgtttcaccacaaaagatggtattattgtgtaaactatttttagtgctttttaaagaaaccctctttatttggggggcttccctggtggctcagacggtaaagaatctgcctgcaattagggagacctgggttcattccatgggttgggaagatcccatggagaagggaacgggctacgcactccagtatttgggggtggatttttttttacttttattgtaaaaatgtccccacatactcaagagttgaaagacaatgcagtgctctggtggacccatcatacaatttcaatagcaatcaa

SEQ ID NO: 57312 - DNA, 1532 bp, Bovine  19866880913641
  misc_feature (1)..(1): n is a, c, g, or t
nggggttgggagtggtgggaagtgggagggaagatgtgtaggtaagaagaaaaaaaatcactgaaatattttactggaagtcttcttagttttaatgctggccttgatcacattattgtaattgtaattatgtccttatcaccatctctacttttctctgtattcctcctgcctccttggagatcctcctccctgacatattgcaaaagcccgaccatgcttatccagttctgatgcattcctcccattcctccttcattgttcttataccccgctggagagtagcagattgaatcaatatatgttaatattcagtattaggaatgttggtggtcctaaaatccttagcaactcaggggagttgtgttatttaaaaaatagcaaggcacctttttgaacctaaacattgcaatttataacatttgaggctatggaatcagagagccatataatatccaggcagcgtgaaggaagatctcagatgaggccaggttcggtatccttattggtcaggggcgttaagatcactgcctgtggaactcgcctccctaactccatctgttatctcaaagcttaagtcaaggctttccccagaaataaattgcaactgccatggaagggtgtgaccatcaagctaaatttttttagttggagttttatgattgggaaactgcctagattttgtgatttcctgtagtgcgaaatggcttgcctgttgtaaatgcccaggaaatactgctgactcactggctttgatcatgaacttggtttgggactggggtgtcaatatttaacatcctttgagctattaaaaatactgtatcgattgatacgtctgcagtcgtggccattagtttcctgactgatttctaatttaagtatttttcctggcaaggtagatatcctcctacaattgttattgattttggggtttgtaggctcttcctgcaccgatgcacctagaatctggcctttgtccttcctttgtgtggggctgtgggcctgctgaggcatatcttacaaactgagggtgtgtgtatgccagatgaatatcccaggctctcctgggctgccttaaacatctctacattcgacagtatttattaagcatctactatgttccactcaggtattccatctactatgttccactatggcttccctggtggctcagatggtaaagactctgcctgcaatgcaggagaactgggttcaatccctgggtcaggaagatcccctggagaaggaaatgacaacccactccagtattcttgcctgaagaatcccatggacagaggagcctggtgggctacagtccatcgggtcgcaaagagttgcacatgactgagaaactaacacctcattttcacttcatgttccactcactagtataagcacttagggatacagcagtgaacaaaacagaccaaaaaaaaaaaaaagcaccactctgctctttaggttttaaatctagtgaggagaaaaacaaaaatgagtgaattgtataggcagtaatgattgtaaactttacg

SEQ ID NO: 57313 - DNA, 1660 bp, Bovine  19866880921635
  misc_feature (1)..(1): n is a, c, g, or t
naccatttcatctggtgatactagagtaatatttgcaaatagatgcaattctcatcttgtgactcagaaaattaaagctgagagattgtttgcattgtttgggatggactacagaactatctagttttgttcctgctctgctcaaagagaacttgggatgactgacttgtaaatacaaaaatcaaaatgcttcccaacagcagtgcaacttgtccaaacaggatgaggctgaatcttttggttctcctaaaaaacagtaatcttggcaaactagccattacttcagtatttttcaccagtaatttaatatatggaaaagggtctgcaaactatggatgtgaattgaaatcaacagcatttcatggtggctcattcctaaatagagccctttattactatccctaattattctcttagctcaccaatgatgagaggtattagaagacattaaactgttgatgagaatgacaatggacatatcttctgatgttaactcatcctatgaaagagtaataatccttgtatttaagattcaaaatggctgaaatgatgtcatcttccagttaatacacttaacccggcagtgataccacagcctgatgaattggctttccagctttgtgatcacagttctcggaattgatgcaccaacccctgccaaaaaaagtgctcaactggcaagaaatttacctcagccgagacaagacagatcattcagcagcagcctccccaaaataaagaaaatagagcaaagctgtgtcctcaaatagtggaaatgacctctgaactacagcaactcctgttttgctcttttattattatttttatgtttttatatatttgcaccaggtcctagtcatggcatgtgggatccctgatcctggggaatgcaggatcttcagctgtagcatatgaaatctagttcactgaacagggcgagaacctgggccccctgcattgggagtgcagagtcttagccactggaccacccaggaagtccctgctctttttgcttaatgttctctgatcaaggaaatagtttccatgcaattcagctttctgttttcttccaatagttggcttagtttacatgttttcatacaactggcttggagggagtattttgacacagacattttctcatttatcagaaggctctgaactaggcagattccaggctctgtggggagtgagttataagaatgtaagagaagaggatttgcctttatttgtggttatggaaatatttctgcaagactttcacaatgaactttgtcctacaccaactcttctctctcgactgatgcttatagaaactttttgagcatggcaaaaaagaaagtcacaggtattccaactcctccattcccacaactctcagacactatcacatacactcccaatccctgcaatataccccaccactgggatataatcttaatttgtaaagttgtcctccataaataaactgtggtacatccagacaatgtagtattatttagcactaaaaagaaatgagctatcaagtcatgaacagacacagagataacaaatgcatattactaagtgaaaaaatcagtgtgaaaaggctacatattgtatgattctaattatatgacattcatgaaaaggcacaaccatggagacagtaaaaggctca

SEQ ID NO: 57314 - DNA, 1745 bp, Bovine  19866880924782
  misc_feature (1)..(1): n is a, c, g, or t
ntgagtggtttgcatgatgtgtttagaagctttaatcttgttaaccatcatctaaaagtgccacacacacacacacacgtatgcacacacacataaacacgtgtacacttacacacacaaacgtgcatctatgcacacatacacacaaacacatatgcacaggtacacatagacacgtacacacactgctgatcattttttttaaagctcaagaaaagccagtccttgagctctgacttccacacttcactttcagaagggatccagagcctgtactaaacagaaactgccttggtgacgacttagtgccctgtgtctattgtggaaattcctcagctttgtgacagacttattattttattgcaataaatatttgtacagttccttttggtgttcatcagtgacaggcacatggtcttggtgagcccccttttccaatattaatgacttcccccccggctgtctgccaggctgtgtgctttgggttagaaggaggtcaagacatggatgtttaggtgaatttcctgcaacccaagctttgtgtgttaagttctcactcttccactggggccccagttatctttttcaagtctgtttgcaacatggtggcagttttgacaggaaagtccaacttagaaaaccaccactattcatccgaatgtgcttaaacccaagactcgcattcacatccagtcagaaaaccctcttctaaagtggtttttcctattcaatttgtaaacccaacttttttttcatttaccgggctccttttataagtggggatcccctatttttaggtgaatgtctttacttctctactgtcatgctcaccttaaattccagagcaagagaagagcatttagaaaattggtaggcagagcggctgcatctgaatgtcacatcaaggatgaggtgagaaacctgagcactctagaaagattcttccattggtggctgatggatgagcaagataaatatgttttcctagtgatgttcagaccaccgtttatttcttcctgtacgtgaaactagttttttttttttttttctgaaactagtttttaaaaatgaaggaggacaggagcctgatatttgttgaactcttaatttgtgcaaggcactgtttgtacatttcctcatttattcacaataacaagtgcatgggtgagtgtctttagcctcataatacagatgtggctcagagatgagaattgtctggctagtaaagggtgttgctgaaacttcaagcccaagtcttgcatcatcttttccttgtgccagtgtgattgactgcctcctttgggttactaactgcaagtacagtcagaagagagggaaggaagatggtactgaggaggtctggcaaggagggaagattctcagggaacatagtagttcatagaagcctgctcttctgtaattgtgtgtggcctgtttctggccctggtgagaacaatgttaagtggacttcatctagaattgtgtttcccaaagttaagtccttggactagaagttgtggcatcacctaggaacttgtaagaagtacagaatctcagagcccaccccagacctactgaatcagaatcagcatttttaacaagatctccaggcaattcgtatgtgcattaaactttgagaagcactagcctaaaggcttgtgggaaatgataattaacgatgctgactgagtagttctagtgtagcgtaagatcatttctgggtaaaggcgattctcctgcattag

SEQ ID NO: 57315 - DNA, 1007 bp, Bovine  19866880965593
  misc_feature (1)..(1): n is a, c, g, or t
ncttttagaataaagtagaatataaagttgtgaatgtgtaaatacctagtaataccatacatcttccaggtcatcttagcagaactggcttttacagaaactccgcagtgacactggtctgtaggcatatcttagagatatttcaaaatatgctgtcactgaaattaaaatacaaagcactcaagtgggtcaccagcagcctgggtcacgaggaacagaatcctttgcccctgatgtttaccaataaaatgttccgatgatgtcattggtgcaagcacaagtcgtatggcgtatacagcctccctcattttcatctttcctcttggaccttgtgcatactgttgctggcaaccatacaagtggcacactgaggtccagacaagtctaaataatttttttcttaatggagtagatcattaattcgtttttagtatcaggtttcataagagcgcttttcatgtggcctttgaaattcctcaggtatgatgtgtttcttggtgtgcagagatgggactgcagcagaaaatgtcatgtattctctagcacattgagagaagaaaaacattactttttccttcttaatttgaatttcgggtaaatgaattttataggtaattgcttcaattgcccatttaattctatttccagagatataaaaatatgcaaaacgtttccctactcaccgttgtttttgaaatgagatgacatagcacctgctatacgaagccacatttcatatggctcaatgactagactgcctgcctttgtgaataatggttggaattgttaataaataggaaaatgtgttcccatagatttctttacttgttttgtagccactctaacatatctagtcagtatttcagaataatactctgtccttaccttttcttgattgtctgctctatttccattgagttaattactgaaaagtttagtgaaattataatgaaaaacaccttgataatccactgggtttcagttatatatattaactggatttactg

SEQ ID NO: 57316 - DNA, 1939 bp, Bovine  19866880981837
  misc_feature (1)..(1): n is a, c, g, or t
naaccctgaagaacggatagaatgacagagtgctgggcaaactgatacaagtgctctctcaccagaagatttttctggaggccaacttggcagttatactaaaatcctttaaaaacatgcctatccactgaactagaaattactctttaaggaatatattttaaaggcatgataagaaaggtacaaggatttacctacttggatgttcatcacagcactatctgtaaggtaagacacatttataaacatgctaaatgtccaacagtagtgaactggaagagtcatgttggatatctgtatattcagcaaccactaaaaatggtatttcagaagtacaattattgacatacggtggtgatagaaatgtactacttaataacaaaaaaacagctaaagaactaaacacaatataatccaattttggagggaaaatccatatatttaacacagaagaaacctttggaaaattatgccctcaaatgaaaacaaatgctgatcttttttttttttttttggtttgtttatctgtgctttttgatttttctatactatgtgagtggaaaggtattcgagctacacaagaagaactattcactacatctgcttttttccctgacagctggggactctgtggattaagtcatggttctgatggatataacctcggtttccagttttttccttttggagaccaacctaggatgggaggggcaggcactgaccttttaccaactctctgatgtctaccaagctattcactaaccaacgtgggcaaggttaggggcccaggatctcaatctctctactatacttcaaattttcctgatatcaagtctgatctctactgtgaggcaatccctcttttctcaaaatatctaaagctgtttttatttttttttccttaatgtgtttcttttctctgtgacaagaaagtgagaagtaaaactttcttggcacttaatagacttcaagaaaatataaatggtaacagaggcagacgatccttaaaaagagataccaagaggtcacctgtctatgtattcggtcgagtcagggacatataatctctgccaaggctgaaaggtatttcgttctttcttgagactataccactccatgtttgctgtcactgcaggggcttgtttgtttgatcagttgctcagtcacatccgaccctttgtgaccccacggactgcagcacaccaggcttccctgcccttcaccatctcccagagcttgctcaaactcaggtgattgagtaggtattgccatctaaccatctcgtcctctgtcgtccccttctcctcctgccttcaatctttctcagcatcagagtctttgcaatgagttggctctttgcatcagatggccaaagtatgggagtttcagtttcaggatcagtccttccaatgaatattcaggattgattggtttcatctccttgcagtccaggggactctcaagagtcttctccaacaccacagttcaaaagcatcaattcttcggcgctcagccttctttatggaagtggaagtgacaaacagattcaagggattagacctgatagagagcttgaagaactatgtacagaggttcacaacattgtacagcaggcagtgatcaaaaccatccccaagaaaaagaaatgcaaaaaggcaaaatggttgtctgaggagggcttacaaacagctgagaaaagaagtgaaaggcaaaggagaaaaggaaagacatacccatctgaatgcagagttccaaagaacagcaaggagagataagaaagccttcctaaatgcacgatgcaaagataagaggaaaacaatagaatgggaaagactagagatctcttcaaaaatgagagataccaagggaacatttcatgcaaagatgggcacaataaaggacagaaacggtatggacctaatagaagcagaagatatta

SEQ ID NO: 57317 - DNA, 620 bp, Bovine  19866880983480
  misc_feature (1)..(1): n is a, c, g, or t
ncaagtcactggcattggctagagtggtggcaagaccggaacagggtcttccaacaccgggttccagaattttgccagaattctcttgggtctcatttcagatgggagatagaattgatgagagtattatttagtcatacagtgagaaggtattcaccagcaaaggaaggaaatattccttttccttgtacaagaatcccagaaaaactgcctgtcttctatcgtgcttattttcaaatgaggtctgaccttgtagctaagactttcttccgctgctgactctgctcaccctccttctacttgattcatttgggccccagtggccctgtttggggaaaggcccatctgggagcactcaatacattcccctgtcagggagaggaaaagagctacccttgcagaataaggaaactttcaggagggctctggccagaagtcaacttgcagtctgagagcagcacttgatccaacactggcatacatgcctgttgctcattacttcacaaacgctgctgcatatctttttactcttgcccattgccatgaatcctctgaatcagcacgctgctcaaattttcaaccattcaacatgcaggcacctcacatacaattattgagca

SEQ ID NO: 57318 - DNA, 1047 bp, Bovine  19866880985537
  misc_feature (1)..(1): n is a, c, g, or t
naaacgtgcccagcaaaagtgctcagtgaatacacagcagggagacttaggttctttccatttatacactgcagaagacagagtcttgttaaatctttattaattgattcttcccacttccaccctctgtaccttttcttagacctccaccccccacctcaacacacagctgttcctaagtgtctcagcaaccaagtgtattttcacacctgaacccctgcaatgccttgatcctggaccaccctgttataatcatttaacaattacatattactagagaggatgctaatggggtaatgaggaagggagcagttcgcttcgactgggagcagggtaccatcatgttactcacgtctggtagctaaacgacatgacatcccttttgggaaagtgatggtgtccactccagtttccaggaaagaagattccacgacctcaggcagcccatttctatgttaaaaatgcattgtgtcccctatgaactgtgggatggtgttctcttccacctgttagccacaaagaccaattgaaggctgatgtctagaccagggcttctcaaagtctggcccctataccagcagcatctgcatcacctgggaactagggagaaatgcaaattctcaggccctctctcagacctactgaatcagaaactctgggggtggggtccagccactggtgctttcaagatacccaccaggtgactgtgatgctcagtacagtttgagaatggctggagtatggactgggagtagggaggttcaagtgtacatactgttcatcaatgcagaaccaccttttatttgacccaagtttcctgtgtttactgctgcttgtcaggaagaaatattcactttaatttcacagtttgtgtgaactgtcagctggagaggatgggatacattttcataggccactaggcttgtggaagctcaggctatttgactcccaagaagtcaaatatgtcctaccacaacctaattaatgaatttgtcaagagctgttcccctttgtgaggattttagccaagatttcaggacagccctc

SEQ ID NO: 57319 - DNA, 934 bp, Bovine  19866881002660
  misc_feature (1)..(1): n is a, c, g, or t
nccaactaaatgaggatttctagaggaagggtctggggatcttcagttttaacaactttggtggattcccatgcatactgaagcttgagaaccattaagttaatccattttaccaagaaataatgtaagcataaacctcagaaaattgtctccctgtggaatgggcacatcaataatacagtaggaaagaaaaaaaaagaaaactaataaagcatctctttgagaaaatacagaggaatcttggaatatttgagattttcatgatgaaatctgtatttacaaagaatcgctgaaccaaatgccttgcaggtttttgagaagtccgagataactttgctaatgtttgaggttgagaagagcccaaatatatttgccaggagcagactgccccctcaaatttaacccagcatctttaaggaaatgcaaccaatgtgttcatgatagtcctgcctgaaattcatcaaagtgtaatttttgtaacaatgatttggtagccctttagtatttaaacgtcttttgttccccgtttagaaactggaagttgcctttggtcaaggactaactaaccccaaacagagaggcttgagatgattctaaaacacaagccccacaagtatcctgtgagtctcctgcaggctctgggcactctatttagagctggaacctcaccttcaaatatcccacttgccttacaaaaaaagaaggcatttaataacagcagcctgacatcctgaaagagcattgggctgggagaaagcgcatgttttctctcttgggttttccactgtgtggctttgggcaggtattttaacctctctgatcctctggtttttttaggtttaaatgagaggattaaactctatgacctttggggctaaagtacttctctatctaaagtattgtaaccattactgcaactgctgcctagaagctc

SEQ ID NO: 57320 - DNA, 732 bp, Bovine  19866881007425
  misc_feature (1)..(1): n is a, c, g, or t
ncacacaggcaaaacctgggctgctcattaaaagaggaaacaggaaataagcatcaaagaacaagtgctctggacgatgtgttcatgttacatgtatgaatcatctctgaataggagggacaaagactgtttttttttttttctccttgcaggcttgttatgtccataatgcatccaaagtggtaatgtggtgtttgttaaggctgcctgttgaaaagctctccaggtctccccagaaatgcaagccagtagcagagctgatggggtgcataatgaacagtctcttgtgaagctcaaggatgattttcccccatcatctatttgtatgtttataaatgagtaatgaggtcaatttgggacaggcaggttttgtgccatgatttggacagatgttcagtactctgcaaagcacagctgcctggtctaagtggtgcctcttgccaaaagtatcgagcattcaaaggagaatgtgtcaccagggactgttcagaggagcccactgatcatcagggaattggcttgtatcgatcctttgcaatcacatttacacttgtagaacctgtggtgctaagagcaaatgcacaaaattaaaagacttttgcacttggcaaataaatatttgatcgacatagttgtcagtcttcacttgttaatatccaaagatattcatttgtcttctgttaaattagcaaaactaagctttgaacctgtcatgactgaggtgtctgagct

SEQ ID NO: 57321 - DNA, 1225 bp, Bovine  19866881040679
  misc_feature (1)..(1): n is a, c, g, or t
ntatctaccgagtccttactgtgttctagacattgggtacagtgggtggtgccaccatggcctatacctgataagagttttcattctactaggggaggggggaagagtgagcagctgtgaacacactagctaaccatgaagatacattctgtagcataagatatgacatatataagcccagggaatatgacagagtgtgactgaggggctacttctacatagaaaacggaaaaacaactctttgaagaggtgacatttaatcaagaacagaatgacaagaaggaccagccatgcatagatctgggcaagagtcagatcaaatgaacaagagaaaagggcatgggttatatgatggagacagcaaacaacaaacagaaggtagccagaagaggcagccaatgggcaggagaggcagctgggaaggagcctgctgattaagaaagtcctctctctactgggctgctgaggtgggtcatctggtttctcccttgttttttaatagaagcaaggggagggacacagaagccatgtccaaattacaggggcacctgcacctatgaaggaggaggtcgttgtaggaaggctgggtaccacattttagcatcctgaaagcttaaagccacattctgcttcatgtgccaactttctctctcagctttcatgtcccagggaaaggtgcctcagtgtgttggagttgtagcctctgatcctataaaccactcctaagtaatgcagaagcaaggtaggaaggaaaaacatcccactgcgatctcagctgtatttcttccacatggcaagtttcattttgtttaatttaacaataaactcattatattaactcaattcaatagaagcagcagggggatttctcctaatttaatcttgggctttgaggagccttgctcggtgctaaaacaatgccatgcagagagattaaaggacttgtgtcatgttgaaaaaaataccttagagtttctgagcacagcccacctgtaatttaggaactggtcagcccacttcttactttatccaaagcatcatctagtcagagagctaatctctgcaagcaaatcattctcgtgaacgatgtcactgtagggtttaaactctgagaagagatcttttcatccttagagctgatgctccaatttgaaaaggagttattggatgcacccagccagggaatataaatatcttgtgcttaccaatgtcacaaaagggtttt

SEQ ID NO: 57322 - DNA, 1742 bp, Bovine  19866881043726
  misc_feature (1)..(1): n is a, c, g, or t
nataagacctgacaattgttactctcacatcttcattcattcacctcaatattcttgagtctcagcttaatcacaaagtcatgcaactgggaaagcaaaaccacacataagagagagatgaagacctctctgtgaaaagaacagacaaggcccatactaagttcagttcagttcagttgtgcagtcatgtccgactctttgcaatcgcatggactgcagcacgccaggcctccctgtccatcaccaactcctggagtttactcaaactcatgtcctttgagtcggtgatgccatccaaccatctcatcctctgtcgtccccttctcctcccgccttcaatctttcccagcatcagattcttttcaaatgagtcagttcttcacagcaggtggctaaagtatctctactaagttagagaaaggatttgatgtttcccctcaacccctatatccttcttatcctggataaacaatgttgaagatggatcttaagtaggagtcaagaaactataagattagaaaaggatgctctatttcttgttcatattagtaagtgacagaacgcattcaaattgagttctagtgactccaaaacatatgtgggagagggccaggatggtctgtaggctttggagggttctgtttcctggaaacatgggcttaaggaataggagtagacagaactggtgaatctctgtgtggctcatgtcctctgtggttaaaatggaagcagtcagggcagaattcttcagaaaataaggcaatacattttgagaaatatcacatggggttggatgggggaagtactactaaaacaactattcaaaattaatgtgaagaagttttactcagcatatagttttcagggatctgataggagggcatagggagattgggagggagaggacaagccacaatcataagcttactgatggatgagaccatggtagaaatgccctagaaacatttagcaaagagtccctgtgggcagcgacttaccctcacaccattgttaaccaatataagggtcaagggtgatccacatcctacttaggagaacaataagcagcattttgtctccaggctatcatgggttgtccacagtacaacagaaaccctgcctgaacttgagaggtcggccaaatgcaaacatgtttcacaagcactattttcctacctcatcttcatctatccagctttaggatctcacagacaagatctcggagacgtgaatatgaacacatcatactcagaagtcctcaacacagaaaatagagaactctgcattcagccacctgggctgaactcaaagcatatgtcccaatatggacatggtaccttcacagctcttatctgattgctgtgcacaaacgtggattagaaatgacatgatcactaactttctgagggggaaaaaggggaaatccagtagagtaactgggtaaaaagttagtaatgaaaggtaagtaacccagacagggagtttcctgagcaagcataccctggcagttttagccatgctcctctgacggcgcccttttctacttcagttgatagatatctgacccagtgcttgaccatctactcaaaccacctcctgccatttcaccaggtagggacgtcagcaaaaagtcatttcagtggaagtagcaacccgctttccaaaacaaccctccacacttcaaactaaacaaacgactaagtaaacccagattacatacagctttatcaggaggagtttgt

SEQ ID NO: 57323 - DNA, 1997 bp, Bovine  19866881100649
  misc_feature (1)..(1): n is a, c, g, or t
nctcagctttctttatggtcaactctcacatccatacatgactactggaaaaaccatagctttgactagacggacctttgttggcaaagtaatgtctctgctttttaatatgctgtctatgtatatatatgtgcatgtgatctatatgtgtgtatatatacatacacaaatatgtccacatatatgtacctgatgacattgtataaactgaagtgcatcagtgaaaagcagaaattcagcaccagaggtgcccatgaaaacagccctggtgcctccatcttatgctctcaaaccttagaattttcagagatccgacaaggtcttggctttccatgtgacctagggaaagtgaattaagagctgtctcaaagggcagagagagcttatttgacatcacagttgggagctgagcttactatttcagttttagactgtaggtaatagggaacatgatttgaatccaggggtggattctgaagtcatgatttatcaaacctctaccacagttgcccaaatgctcttttcccttgtttccaactagcacacacctactcatctttttagattctatttaaatatcacttatctgtgaagccttccctgacgcccagggagggacattttcttcctctgaatttccatctctctccatacattatctttctctagtacaccatatatgacatgatatcacatgggattgaacctatatacaaccaagtagaccacatggtaccacttttgaatccccacagcccagcaagacatatgggtcatttacagaatacaacctggtgatataagtaagaaagggaatcttacaagtagacacacaacttcagaaagagcagaactccaagcccctaaagagagtaccactctcttttccatctctttgctattagatgccatttgtcttgccccttgttcctattttgaataaggacccattgctcccagaagtaaaggcaatgtaatagtcacttgtttgtttatcccctgagccaagacccagggtgacgaggctggattgcacacggggtgtgggcatcagaaactgggaagtctcaccctgcctggcctgtctagcttgtatgcttgggcaagtcacatagctcctgtgggactccctctcctcaccctgtggtaatgactggcttcacaaggtggctacaaagcttaattaaggattgagaaggaggcagaaaatacaaagtgcttcatacatgcaaaggatttttctccccatatttatttttggcctcagtaggctgcggtaggaaatgttgatgacctggaagaagagtctagcaaaaactgtgactactattctcatcctaaatggctcccgtggtactggttgaggcatggacctcatacttatttcttctattccagtacattctgtgacccttactgttaacttcatgtgtacagttttctacctactggcctcagttttcctgactccaaggactttctttatgtttcctttatgctcagatgtattgttgttgtttagttgctaagtcacatcctactctctgtgagccaaaggactgtagcctgccaggctcctctgtccatgggatttcccaggcaagaatactggagtgggttgccatttcctcctccagcagatcttctagacccaggaatcgaacctgcatctcctgcattggcaggtgggtttttcaccactgagccacttgggaagcccctcagatgtattatgatgccttaaactttaatctcagtctctgcactatcaaaccactcttagaaacaaggttcagtgatagtacaccagagtttgtgaatgaatccataggggctggtccctgagccagaagacacaagggcttgtgaagcctttcacaggtgaccccccaactctgcctggcttcgtaaatgcccacctctcttctgagcacttggaggcctcagtagagtcacagtttccattgctgccagcgcctgaagcctcattgccagtt

SEQ ID NO: 57324 - DNA, 3636 bp, Bovine  19866881134660
  misc_feature (1)..(1): n is a, c, g, or t
nttattcagaggatgctgttcaagctacatacacatatttaatggcatcaatgtggaacacaggcacaactttaatgaataaagaaaaagcaaactagaagcagctcatttatatttctggtaaaatggagttagactaagaccaaactatggtcagagtagcttggttgtggtttcagctgtcactcatctagttttttttttccagtgtagacaatatttactggcagatgttgagtacaagaaaaatggtagcaaatccagaggggctggaaaaggaggcagggtgttctcccctcccttaattaggaggactctgtaatcagatcagtggggcaagagcatgtgattttggccgctctgggcccagcacccctcaaagctcccaggaaggacaactttcaacatgtggaaagaaagcaacactctggaaatggaataggctgtgtcccagtccagatacttgcccctgcccacagcatacctcaaaaaccttcacagctcagtgtaggggtgttaaagaactgggccaagcctacccctctccaaacacaggtatctgccatatgcctcagctcccttcctctcagtgacctacaaggttggactactaggtcctgctaggggcccagctcaaccaagtgagtagtttccatagttccctgagcctagttaaggttaatctcacctctcatctgttcagttggaatcaaagactgagatctcttccagttccaatactgagacctctaatatgactaaaatagccaacttaaccaaagcttgagcaagtcaatctcttgctgttttgaaaaactgtcaatgatgcatcacttaccacacactggccttatcattatgtatgtgtgcaaagatatgctacataacaagattactagtcaagtttctaaaaacctagacatgtttaccctttgagaaatagaacgtacctgtttagctttctgaatgaaccaagaaagcctcgggttatgaccagtttccaaataactcaatctccaaataagacaacctggaatccaagtgttactaaacaagtggaaatctaatttcttgtattatacttctgagtatgtgaacaccatgtcaatggtctggggaacaaaaagaaatgcagccaaagatcagtgtgtacttctgcactgaaaagtgttagttgctcagtcatgtctgactcttgagaccctatggactgccaggctcctctgttcatggagttcttcagcaaaagtatagcaatgggctaccatttccttctccaggggatcttcacgacccagggattgaatccgggtctcctgcgttgcaggcagatgctttactgtctgagccaccagggaagccctgaattaactataggaacttataattactagaggcccttattgaatataactggcctagaacacaattctctgccaacacaggccttagttgacttaggaagcacagaaatcagtcaatttcctggtctccatgtgttcccacactggtgcagaactttcttagaagctaactgctacactgacctggataccacctgaattatagcaggcttctgcttccccaaattgtttttgcccatgttttcagactatcttctttgctttttcacacttctccaatgactgaaaataagattcacaagttacacagtgctctatcaggccttacagacctaaataaacatccccatcacttttgacaaggccttctcccagttcccttactgtcacagaaatggctctcaccactggtacagacttatttcccacactgagaatttctctcagtattctttatggcgtagttcaagttcaccattccataaaatttctagggactacactaaacatgtatgacacaaactgtgtatgaataatttagcacataaactataaccatacgctgtacatactataacactatgatcagaaagtcttctttctacatttggcataaatgttgcagtgctcattctggccagagaaactgagtggttgactgaggtgttgttctagggcaggctgtcctagaagaccaagtaaacacgatctactattatgactagtaataatgctgcctgtttgggctactgtatttttcaaccatttggtatgccattaaatcaagttagaaaaatcatgatctgtgactttgttttttaattctgaagccttatatcagacagtttacaaatctgaactaatgatatagcccctctaatcctgctgagttggcaaaagcatgattaccaaccaccatatacaagtagttctacagttgcatttctgaattcctgtttaagacaaccttgaattataacttagtctgactttgtgaagaattaacaagaaaagtttgttaacatatcttgtcacagggaatttaaaaagcatctgatcttaaagatcatctacagaatgtgaggtgctaaatacgctttatttgatgctatacataaaccacactaaaatgcctttcattaaaaggctaaattttagatagagaattttaattaaattggcatagtttataaaaccaaaaagataaagtggactttgtcagtgtattttcaatccttgccttaacaggctaatgaacacaacttgaaacacatgtgactcctcctctgtttatgagacagtgaaggcaccttttcagtatttaaatatattaatataaccagttatagaaatctaaatataaaaccaatctcttataggttttgagaagcaatgcaccatctccctaaaaagtttaatattccttattcaagttcaatcatctctttagaatgggaaaaatgatagtacttgttgaaccggaattactatcaaaattaaaaaagctgaccatattcgtttaaccacaaaccaatcttatttaaatcaggactgtccaaaagaattattccatcagccgttcatgatctgaattctagtatatgagtcaatttaaatatggtacacataaaaagtcatgagacacttctgattcataataaataaggcagtggccaactattactcattggtagcttttttgagataagctatcaagtcttccctctctcccttcttcttaatgccagcaaagatcatctttgttccagggatgtacttcttgggattctccaagtactccatcagcgtctcctctccccaggtgatacctttgttcttgttggcgtctgtgtaagagaatccaggagcctgacctgactttcgcccaaacagaccatggaggtttggcccagtcttgtgcttgcctcccttttccacagtatggcactgggcacacttctgaacaaaaatcttcttgcccttctcaacatcacccatttttaaatcgttcttcctctgtgcgcgaccgagaagttcccgctcacaagccgaacgtcccgctttctaataatatgttcttaaattttatttattttgatttcttttccttgagcatggtggatgagttgctattatatcaccctttactgttcttcataactttcctggaagaataagaaactgaaagaaaggattgcattttgaatatagaaagtaattcatgtttttgtcatcttttctttggggagattactttactatcattgtataa

SEQ ID NO: 57325 - DNA, 871 bp, Bovine  19866881139098
  misc_feature (1)..(1): n is a, c, g, or t
ntgctgactcttctagaatgggaaaaaacaaacaaaaaaaaacgagaaggaaggttcaggacagtgtgtggcctcttggacagaatctcatgacacgggcttctctgagacttattagtaaccgaagcggctgtgcgaatatctgtatgtttctctcaccttcctgggaagttactagaataacatgggaagccatcaggaattttttttcttcttcttaaatgattcattttgaaaaactagtttcacactgctttgaaaatgactgggggacaggactagtttgagaaaattccttagagccctttgcaaggttccctgtagatggcggatgagggagggagaagaggatgattttaccaagagtttaaaaatatatgtatttgtttgtatttgtggctgcactggctcttcagtgctgatgggctttctctagttgcagtgagcagagctacgctctagtggtggggggcagtggcttctcttgtggagcgtgggctccacaacatgtgggctcagtagttgaagaacatgggttctgtttccccgtggcatgtgggattttcctggaaaacagatcgaaccgatctctcctgcactcaaaggcagatttctaaccacaagaccaccagggaagcccctcatcaaggatttttaagagctgggaacacccagtggacaggtatgggagtttttatcatgggcctgtaatgatttaatcacattacaagagtctttgtaagagacaaagactaccagcaacaaagatttcttgtgaaacgaggtttttgcctcttgctgataaaattccctgggagcaggatcctgttttggggggctacaggccctctctttggaagagcatcatatt

SEQ ID NO: 57326 - DNA, 1250 bp, Bovine  19866881244800
  misc_feature (1)..(1): n is a, c, g, or t
ncatttgtaaaataagaaatgtgcttgtataaataacaagtttctattatatagcccaggaaactatattcaataccttgtaataacctatgatggaaaagaatctgaaaaagagtatatctaattgagttactttgctgtacaccagaagctaatgcaacattgtaaatcaaccttactttagctttttaaaatgtgcttctaaataacatatggattaaaaaagagatctattgaaaactagaacgtgtttcatattgaataatcatgaaaatactatataccaaaactcatgggttgctaccaaaatgtaactaaaaggaacactgacagctttaagaaaagactaagcaatgaacattaatgagctagaaagaatctagctcaaggagttagcaaaaatgaatgaatcaataaataaatgagtaaatgaatggaatccttgaggtcagtactccttatgcatcttattacaccttcttatttacaaaacagtgcttaacaaataacgtgggacttgatgaacatcagctcagatttgttcaatctgaaagtccttgattctgaaaagatggtttttccaaactctcaagggtagagtattcccagtctggttgatctgccaagataatccacccacgtgtcatttaacttcttagagcagtagattctgacttggggaatgaaagatacctaaagagtggtggatttatttggtctagttgagactgccacagtgtccgcttaggttagcactttctcgtctctgggcatacggagaagcattctgtttattctactaaaaatgtgttggaggtgaaggttaaagatgagtgcctttgtgccactgttattaagcatatagctttcaatcattagaagccaagaacagggcctggtcctcttccttctacataagcaaatgtctattgcaattaaagaaagttttgcatgtgtaagggacagaggattgggctctggggacccattttactcaaggaaaaagaagtgactttaatttcattaatggtttccaggatgattgtgctacaactttaattctccattaaatattcatgccgacgggcgcttcctttcctgcctttagtatcattcagctcaagctgacactaacctgttttctatttcataactgaatcacagggctttttcaggagaagtcagcaaagcaatgccacctactcctgtcctcgtcaaaagaactgttggatgatcgaaccagtagaaac

SEQ ID NO: 57327 - DNA, 1033 bp, Bovine  19866881286956
  misc_feature (1)..(1): n is a, c, g, or t
nccacctaaacatctaacttcattatatggatgataaaacatacaggagaaaaaaatgtacccatttttttcactcatctaccaaaaatatttccaattttactctttgatgttttatcatatgcatataggtcagttttatgtttttgtaattatagtatagattcatagtggtattacttttttcctatataatttccccatatcaggcttcacctgtttgtctgaaggaaaggctaatggaagttacagaggcaaatttttttgtccccctagtgctgccttttcataagttatcaatatgggaatttgaaggtgctcctttaataaacagtaaaaataaagggaaaatatccttctctttggcatcctcttttcagttgtgtttaatgaccctgaaagtgcaagtgaaagtgttagtcactcagtcatgtccaactctttgtgaccccatggattatagcctgccaggctcctctgttcatgggatatgccaggcaagaatccaggagtgggttgccatgtcgtatttgatatgttatgactaatatgctctcttccatactcaaacgactctgatcttttcaaagatcagaaagagacaatcgttgaacaccatgtccctgacatcctggtgggcacattataataagctgagttccagtcacacagcaactgggggaaaagtactgttactctcatttacagatgaggaaaccaaggttcagaaggatggtgctccctgccctgctgacaggtgacaggacaagattcagagctcttttcaacttgccacctgactttcctcttcgaaaaatcttcactaaaaaaatattagtccatgcatcatttccaaggcatatgagaggaaaggcaaggaagaaaaggaaatggacaaggttttacagtcagtgacacatacatatattacaggcacacagagaatatgaaacaaatgtaaatgtactcaaaaattatgagagaggcagctgtagtgatacatgttaacaggaggcctattactcataattga

SEQ ID NO: 57328 - DNA, 2100 bp, Bovine  19866881300012
  misc_feature (1)..(1): n is a, c, g, or t
natacagacgctctggaggcctttatcacttccttcacttttagagctatttattaattgaaataatagttatgctaccccttgcctcagacctactttcatctgtttagcagttgctttctacgaaacacaaaagagctcagcgatgacaccggtgtcttaattaaccattgaacaccttctagagcagctgtcacaactcttgtcacttgaaagaaagcacagtggttcctgtttaaaaaaaaaaaacacacacacacacacatatacggcgggctggggggaagttgatctaatgagctgtctttgacgtgcgtgaagaattacattttttatcatcatgctttgcactcacagagcaatgcaaattagggaatatcaggccactctgaaagaaacctgtgaatttacttttctccctgcctttcagaaaaagatcacattgcacagtggctcagggaagtggtccaagatcagagatgataacagggctaagattttgtgtcagttaaaaaaagaggaggggctgatgtaaacttatgtaactacaatgtttccaagcctttccagccctggggtgtgaatgaatcttattaacatcaagatcagagcctcaagccctcacctgttagtgcaggtaatacaatcccttacaaaactcatcccaacctcaccatttctttgagttcccaaaggggtgttttttgtctgttaaggaattagccgaggcttccactcaggactagattgcttgctattccaagttccactagggtcagcaccattgtcttggcccaccccaaaccacaccactcttatttttcttgagtgttacttatgtgcttctgtttcttcttatgattaactgctggcccagtgtaccaacctgttcagatctttcattaccttgacaattgaatagcagtctgtgttgaagtgaggaatatttctgtctctgggcttataggagtacatcaccatagtaaagtagtttgagcccggagtgttctggaaattgatgagagaattctttaagtttgtacacataacccttttctcttcaaagtatatacagctcctgggaagtaggtctaccgggtgggtttaaacaccagccaccatcatggagggcttccctgatagctcagttgataaagaatctgcctgcaatgcaggagaccccaatttgattcttgggtcaggaagatcggctggagaagggataggctacccattccagtattcttaggcttcccttgtgactcagctgttaaagaatcccctggcaatgcaggagacctgggtttgatccctgggttgggaagatcccctggagaagggaaaggctatcgcaaagagttggacatgactgaacgactttcactttcacttttcaccgtcatggagtgggggaccatcttcccaatatgactctcagaactgtggctgagtctaattggccctctcagattttcccatgatgacccttatttttcatctccatctcctgaccttcttccccactctcttcttcaagccatcatatttgtaggtaaacacatctgaatctccagtgttcctaaagatcaagtacacctcccttcttgaggaagctctttaaccctcatgcaaattaatacttacaggaaagacttgtctgacaccacataccatgtatctgcagctccatcctgtcccagcgagtacctccagatcataaaggtaaacctagtaagagaggaagctgttgggaaaatccagagtgaatcttgggatggataaatgtgcagatggcataatgattgactcatttcaaatatattactacaagttacgtaggcaacatggacaccaagtaactggtctgaaaattcctcaagagccaaacaaatgctgttcctgacactgggcctcaagtccagacttggcacataatctgagaatgccaggaacatcatggcaacacaagggttgttattattggcctcttgtttttcaaaacaaacaagatacttgattaacactatatatgaatgccaaaggcttatttaatcagcggaccaggaaagcattttatagcaggagtttgccctggaaatg

SEQ ID NO: 57329 - DNA, 2962 bp, Bovine  19866881404532
  misc_feature (1)..(1): n is a, c, g, or t
naaacattttgtgggaaaacacccaggggtaaatgacatatggctggtgctctcagtcagaaaaataatgaaatacattttcattacagtggggcaagggctctggcaaatggaaattcaaggacatatagaggaagtgtgactgcagacagaacatgttggggaaaactttctagataaggtggcacccatgaggcttgaagggaaagaatgagcagagatttcaaccatagggggaggggtgatcatggagaagtcaaagactgtaattctctttgctcatgcccccatcatggaagtaatgtgtcatatatgtctttgctctcttcaccttgagcatcccatcgacacaacgtgccaggctttggaataaaaccagcagtttacattcagccaaaggttacccacaatgctttctgggaatttgtagctgaaggtatgcccattgctttccagtataaacagagaaactaagctggcatcaggacagaacatggtagcatggagccaaggagaaggcctgcctggctgctgaatacgccctgcaaaatggcacacaggtgctatcatgcagctatagacttcatcagtgcgacaaactgaagtgtgttgacagctgcggtaaaacacacttgaagttaaacataattaagcaaaatgattagcactaaatagaagctggcagtgaagaactctggtttctgaaactcaatggcatgatcacagcctattacagctgggaaggggtctcacagatcacacacattgtatctatttcacaggagagaaaataaggcccagggaaatgaagtgaaggcaggcctgaactgcaggaatgatctgagcagctcaccttagcttcttaggaatcaccacttaggaactgtggcttcctgggcctcagttttttcccctgttaaatgggggtgaaaatgctagttccttcactaactacttgccagtgcaaggcttgaaaatgagacctatgtacatttctaagcaaactgttgctgtaacttgtacggcaaggtatgttctgggccagtctgctggttagtggacagaaacgccagatatatgccttgacagagaaagatcaggtgagatttttttctgagtaaaaaattgttggattgcaatgcttggtctctccccatcatatcagagagtttgataggagttcatgtatgaaaagagacctgcaaatacgtgcaatgcaaacagttctcatttctgggaggaattccagagtgggactggagtgaagcagagatgggcagcagaaaggagagggaaaatcctggggaaacggtacactctgcctgagtttccctctgaattttcagatgaggatggaagggaggcaggcaagaggttaagaaggaaggaaggaataaaatatacccccaacccccctaaaaaaagcaaaacctcagttcagtcaatacacaagaaataacagcaaggttgtaaacagtgctgagaatgggactgcaggactttttcatagctttggctggctcacaatcccctcagcgtggtgcttctccgggttccacgtctcaaatgctctaattatactgtgcagcaaaaagaaggcctggtgctcctagatgtgagtgattgcttacttgccacaggaatgttctatgctttcataggcttcattccctggccccctgcccctcttcccccacaccaggcctgggaatgaactgggcactattttagatgtcttctttgcaggaagatgacaagcttgtattaggtctcgcctcttacccaggctcttatttgtgcctgagatactctcttctggcttccctacctgtttgtctcctgttcacctccaaggccaagtttagagcctacctggactccattcaactcagcttctgccctgagtccctgtggaatgaatactgttcaccggccagtctcctggccaccatgtggctgcctaaaggtaataactttgtcttcacatctgtattctctacatgcttcaaaggtggggctttgcttctcaaaatgtttatggtccagcagaatcagcattacctggagcttgtgagaagagtcacaggctccacccagacctgctaaatcagaatcttccactgaacaagatacctgggtaatactaatacacggccatgttcaagtttaagacgctggatggaatagggtggggaacacttaatcagtgatcctggaatttacttgaggcaatcaattattcctgatgacgttctctctcttccaagaggacaccaccaacagttaagggaatgcaaaccctccagcccttctcctagccctgcagtggctccctgccgtgaactctgcagagcttggtggccagtttccacgtacctaccacctacaccttctactttcaaagaaaccacaacctggacctggaacagaactggatgtgccaaaaggcctgaggacatttcgttgaactgtggctggcctgatgggaagctggcatggccagaaatgttaagagtctttgctcttggggtttcaggctttgagttgcaaattcaatggtccggatcgagatcagatgagtcagagaaccatccaaacctttagctggggactgaaaccaaatctgtgttctcaaaccattctaaatgtgttgatcaccggttagagtctgctgtacaatccaatccaaaagagtatagttatttctctaacagtggatgcattatttgctcatcaatggaaaatctaattgtagcatcaaaggtcaaaagttgcgagagaaacttgacacctttgagactatgccaaacctcaagctttcaataatatgcgctttcaggtcaaactatctgaggaaaatagaggctatttgccccaaagtccagcataaatacacatgaattatactgtccttcaaaaatagtggaactgtttgacagactgttaacagcctaagcagttg

SEQ ID NO: 57330 - DNA, 2488 bp, Bovine  19866881420988
  misc_feature (1)..(1): n is a, c, g, or t
ntccataaatgtgagcacagatgtagtccataaatgtggccatagatgtagccatggtctgagagtccctccctgggagccaatggaccttgggtctgtctgggctcccctggccactctgacttctgactccgcccttttcctgtcttgcatgacatcacagcgcctgctgaacttcctctcccatcagtcggtggtcacttcctgggtttcttgctcgttatgtatgcttgtccatattcttcttgctttgaatcatttttgttttagttttgttttcacagtaagatcgttatgtaaacctgctgaaagggtaaatttaactcattttactgttactataattattactgaagtgagagttaggcaatgccaatttgtgttgctatcccgtagtaaaaaggttcaggaaggtgttcaaaactgctttctctttatactcccagagggcattagcagttatggtgcagaaccttatatatattatttgattgacagtattttgcatacatactaataatttggaaagtacttcaaaaaaagaaaatgtgggtttggggataggaaacaaaactttcttttatacgtttcctaatattttcacttttgacgagtttgccttttgaagcatgcttagttactatcaaactattgtgatcccatagttggaagaaaatctaatgaaaagtaggctatttttattaactgtcagatttcacaacagtggagtgttccattttgatccaaagagatatatagcaggatttattcagcaagttcttggtatttataaaagtgtcaccaatgaaaacagcacacatttatacaggtcagtcctataactgtacccggcaaatgacggtaccaaacgtatggaccgtgtttccccctgccagcagtgcaattggactttatttatagaacagtaggtaaagtcgacgtttgttctttcaattgtttgcatttctgacagcagtactgttacaggcaaatgtatctaaaagccagaggaaattctatgtatgtttataatcactaaagaacaagtccttaagtattatacttcattttcaaagaattataattatagcacattgaaatttactttttatcattcatctttcaacattacttattgcagtaccatgagattattaaagataatattgagaagaaggaaaagtctgaactggaatgtttgatgcctataaaacaggagcaaagatgattatactttactatgggagacaatattttttaaacagcagtaacagtctaacataggagacactttgtggaatcatttttcttttgccatgatggaggtcatggtttattgatcattcaaacatccgttaagatataaaaaaattaatagttttcttgttgacatgtatgtatgctagcatttaatgtggttatactttggggaaattaagatgaatttatttttctggaatggcatggtttctataaaccactctgaattatgcatttcactgaatttctgcttccattttatacagagaatcgacagatcagtgagcaaagtacttcttttttaaaggcttgaatgcaaatctgatttctcttttgtaaaaagagggagggcaggaaggggagagagagaggcgatggggaatgcccagagggacatgaagtctgcgcatatgttccagatcctctagtaatcaggatctcagcacccaccccccagttccagttcagtgctgtttttccaaatgaaaacttctcctttgccaatgatgacattttactgaacaggaatgacacttagaaccattcggtggcaggaatcaggagtcaggtctgctttctctcaatcatcccatgctccttccctctgactccgctgtgagcactggaacttcgggctcaggctgtttatttgtacactgtacaaaagtgggacttggattttcaaatgttgactttcattgtgtgattaacgtattaatatatcaaaagtctttggacaccatctaacagatagtaaacagtatagcaacattggctattaatgctattgtttttgtagcattagtaatttgaccccggtttctggattttccaatgaatgatcaaagctgccatggcacccaacactaaactggcttctgaagagattgcagctgtattccctccagagaagctggagcactgcccctgccagtgctgcttcaatctgctagaagtttccttgacaaacagtctagattgacttctcccacatgtggatcaaaaacttcaaagacaactgcattaacagataaatacacaaatagtggaaacattttgctgagacatgaacgggatctggtccactagaaagttattgaaataggcccaaggtaaagcaaagtgggaatgtttgagacggtcatgttcacacctagtgttcaaagtggtctgaccttgccactcaagcagaacgcgctaattcttcccctaaaacacactggtgagg

SEQ ID NO: 57331 - DNA, 1131 bp, Bovine  19866881435724
  misc_feature (1)..(1): n is a, c, g, or t
naaaagaaatgagaaatgatgtgaaatcttctccacttccttgtgggtttataaggttgttactttccgccagagctgagtcagagacactatcaccaaagagaaatgttgttttaacttagtcttcctggcatttctttctctgcttcataaccaaatcctaaggtttgtcatcctgttgttgagaacttaacagagggtatgctgtgggaaggggctgagaggtgctggaaatgactgcattaagtgggacagcttgtcattcttcctgtgtttatttaacaaatatttatggaagacctattagcagtttgctgataaatgtttaataattggctctccaagtgggtgggggcagggaagtcctgattttcagtgcctgccaatttctgtggtgtaaacacttccattgtaatcggtttcaggcaactagtataaatattcttgcatgcagcattgagaggaattaggcagaattgttgcagaccctagtccaggtacgagagatggacctgtgcatatgacagacatgattcctattcccataagaaatcagagcctatcattgggaagatgaaatatggacaatattttccacttgatcctagcgatcattttaaagggaaagccagagtcagaggtactgaaagacagagacaaaaagactgagatattccttctacacatcttgatagattccgaaatccttcggccatctgtctattcctgtgtccctccatccttatctgcctctctgcaatggcagtcccagcacatgggtatttaaaagaacatcagatggcagaaggaagtgaaaaaagaacaaagaaaagtgtgctacttctcggtgcattttagcaggaaagcatcacaataaacttcgtatttcaggggtgggatcttcttagcataagaccttgtttcctttagagattcagaactctcctccacaatgtttttgcaccaaggtaaattagaaataaagtcactgtgaaccaatccgaaggagagctatgatgttttgaaaggatacccatttcactctcactctgataaggaacacaggtaccttcaggatccaggtcttaaaccttttcagtgcccccagactccttatgggtaatgttttag

SEQ ID NO: 57332 - DNA, 1398 bp, Bovine  19866881441733
  misc_feature (1)..(1): n is a, c, g, or t
ngggcagatgacatttttcgggttgcagtcccaatgaggcatttgtgaaaaggaaaaaaaaaaaagttctacaaaagatgtgagaattatattcatgggtctgggttaatgttggtctttttaggttgtcccagaagctagcctctcatgtctgtgtcattttcttcttcttctctctctctctttgggatacttttttctgttctattttgagccccacagcacagctcttttattccatttgtcagccacagacgcacatccagttgaaaagcattcccagcctccaccgccacaatgcctctgatcctgtggccactggagcctctgaccacacgagtctgttgatttgtggcttctctgttgttttagttcttggtgttaccagtgggagaaaagctcaaatgaaggaggaatgctgtaagagtaaaccagcgctgagcaaggggtgctgcccgtctagtcgggtgtacacaatccctgtgttttgaatccatggcggctgtatcatggtgcccctcaggtgcgtcatggaatcggcttcccaagtgccgaatggtctttctaatgaccttttctgctgccttctcttttcccccttttgtccttaagttttactacattcttttactttgtgcataaacaaaacaatctaaatactgtagggatgtactatccaaagtgataaagataattaacactgctgtatgttatatgtgaaagttgttaagagagtaaatgctcagagttctcatcacaaggaaataaatatttctatttctttaatgtatctgtaatgagatgatgaatattcactaaacccattgtggtaatcacttcatgatgtgtataagtcaaatcattatgctgtacaccttcaacttgtgcagtgctatattcaatcatatcccaataaaactggggggaaaagagaaaaagtaaaataagacagtatttttatattttacaaaacagcctatatatatatatatatatatttttttttttttttgtaaaagtaacacaggctcattggagaatctttgaaaaatagaaaaaaaaaattaaaagatgctgattatctttaatactgtcactgactggtaatcatattcactgatgcattgcaatcatttcacaataatgattacttacctactgtgtgaattgctttggataccaagaatgcaggaggaatcaaaagggcaggatccttggactcacagactttcgttttttttaagtttatttatttatttttggctgtgctggatcttcgttgctgcacggacttttctctaggtgcggtgagcgggggctcctctatttgcgttgcacaggcttctcgttgtggggcttctcttgctgcagagcagaggctctaggacatgcaggctt

SEQ ID NO: 57333 - DNA, 1407 bp, Bovine  19866881694898
  misc_feature (1)..(1): n is a, c, g, or t
ncgcacagagtcggacacgactgaagcgacttagcagcagcagctgtgtcatatctttgtaagaatgagaactaaatggtataatatgtatgtcaataacttctgtgtgtgtacatgtatgtgtgtatatacatacatatatatatatgtatatggagagagagagatttatgccagttttcacagtctttatcatcaaaacaaggtgacggtttcttttttatctaaacaacatggaaagttatcctaaattttgcttttccatggggtaagaaaatatgtaaatcttcttgtaaaaatgtactctaggtgtggaagaatcaaagcgaacaattacactgaggttcactgaggttatggaaagtagcatattgaaataattactttcaaaatgtttcaaaaacataaaatgttaccctaaaagctagctcatgttgctgttacattggtgggttttgtttgtctttatagccatttgctcttatattaactcaacagattacaaatgtggaagtaaaagacagttaaaatcccccccaaaggaatttttttgtttgtttgtttctagaggagaacacagtgaaaataggagttacttgctggtatttgaaaagaaaaaaaaaggtttcatcttttacctctctcactgcactgacaggcagggctcttatctcatgactgcttctaaaaattgttatccatactatatagaatttgaaataccttttaatatataatgatataaataaaatatatcaagaatattttaattattagagaaacggtgagtaaagtacgcaggactgtactttgaatgatgctcttggttgattatgacctattagtttatcttttgaacatactggcatcactttatactgctctggaagttattcaatgtttttaagcacataagactgaagaacatatacattttgaacaaaacaaaatgaacaatagtgaggtttacacacacgcagttctacacagttcacttgtgccttggagggatagtattatcataattattaacaatacaaaacacaattttgtcccagtagtactggccaccctgttttaagagttttagaagatccctgagcacattgtttgtttcttataacccgaactccaaaatgatagggcttctattattgatatcaagatggattgtcattcacagtaagtcaatcgtaaggtgcttatttaccctttcttttttccaccaatcagcacaaagaactgtcagaaaataatgttttattattattatcttcaaataatagcattggaaggacacatgatttaaacaatcaatgttggaaacagtggctttaggattattatctggctgcccctcaacaataactagtgattcaatcgacattccttagccaaaaacaaaag

SEQ ID NO: 57334 - DNA, 885 bp, Bovine  19866881727321
  misc_feature (1)..(1): n is a, c, g, or t
ncctccctcccttcattcatccacccctctacctctccctctccctctctctatatgtgcatgtagttgaatatacataaattaggcagttaaacttatttccttgccacttgcaacaactgattgtggtcttcaacctgaaaagtccctagaagggcattgcccaagcttgtctccataactttcctttctcactgcttccatggccagacttaatggtcataccttcttttgatgtatttctaaattcaagcaggtatcaaattttgtttccagaaagacctgtataaggtaactgcttatctctgccatgactatgtgggatcatagagtttaacctttcaggccatgttctttttacctccctagactctcttgggagatacctctgtaatccccaagtattagcaacattactctttgcactttagttaaggtttaaagatctcctgtattgaaatgttttatttcttgggaaactcactgtgattctgattacccttgagtagactcagcattaatgtgatttggcttggtgaagccttaaccatatgctgatcatacttagaagacctatgtttggcatttattttttcctctttctcatctcaatgctgtgccctgtttatggtgctacaactggcagttttactaagtcaaatcaccccaagaacgcagaaagaaaaaagattgagaaacaagtaggggaggaggttgaaaaggacattgactaatgtatttccttatttagctctatttccaaatttagggagcccttaagaagcataattgagtctcctacttataaaagttctgagccatattcctccagaggaacaggctaataccatctgccaataaaggggccgatggcacagcaggtgt

SEQ ID NO: 57335 - DNA, 1017 bp, Bovine  19866880367159
  misc_feature (1)..(1): n is a, c, g, or t
ntccaaagtaacagacattcccgacatttgacatggtgggcacgtgagcactttgcctgaggtcgggggagaggaattctttcagttccaccaccttccaaccctcgagagggtctccaggttcacacacacctgcctcagagagaagagggtttctctcccaggtccctgcactgactttgaaatcaggcatgagtctcactagggcaggacaggtgctctcctgatggtccagttgatttttcagcttcaatcctgttaaccggatgttaccccttggagtattgagtcgtccccaccagattcttacatacctgcttaacttccatgtgagagatttatatgtgagtttgggcacattatgatcctgtgcaggcactcagcagtgtttgcaaattaagattgatcacatgggcagccacttacacatattacttgtgtgtgtgtgtgtgtgtgtgtgtgtgcacgtgctgagtcactcagtcatctctgactctttgtgactccatggactgtggcctgccaggctcctctgtccatggggttttccagcaaaattactggaatgggctgccacttcctccttcaggggatcttcccaaccccgggattgaacccatatctcctgcattggcaggcagattctttaccgctgagccactgaggaagcatacaaattgcttagtgagtgaagtcgctcagtcgtgtccgactctttgcgaccccatgggctgtagcctaccaggctcctctgtccatgggattttcctggcaatagtcctggagtggattgccatttccttctccaggggacaaattgcttaaaagtcattaatttgtgtcattaacatgtttgatggacgtcattggaaacaaatcagctcatttcagggattgtggggacgtgttgcttctcgcgtttccacatgatggatcacgaagtgatgggttttccagagagtggcccctccaccacctgctccccaggaccctgaggaacgggtcaaactgcagatt

SEQ ID NO: 57336 - DNA, 1961 bp, Bovine  19866880412855
  misc_feature (1)..(1): n is a, c, g, or t
nattgacagttccctgtgctgtcattctcagatgtaggggttcattttaaagaaaatatgcaggacaaaaagacagtgcaaaaaatcagtaccacatttggactgtgtaggtgagaaaaagaaatgtttaaaatgacgcagtttaaaactccctcagatcagtttaattgtacagttgtcaaagtaatatgtgatatcaatgaagaatatttgttgcatgcaaacggttgtttctttttcctaaaaaactactgtcattggtctattaaacgtgcattttaaaattaatgtagtatgttctacagacttctcaagaaactataataatacagttttttaaaaatttatgttcaactttttaaatgtgaattatagtttgggctgcttcaatgcagggttatttgtatttgttaagcagaagtaaccaaaatcacttctgttccaagctccgctgtggtcttggagccttccaggctgttgctgggaggagagtggtgagaggaagtgagacgctctgcactcacggaagtcctgtgaacgctctcccggtgtcgcttccgctagtagcggtgagcaagccagaagtttctccattttgtcacctttggtagctgtgcaatcgccttattgctgaagttgcagttaatatgagaaccacagtagaatttttctgggtttgggtttttttgccttgtattaatttcacttataccaaagtattgggaagtatgaacttctagactgtagctgtacttcatgaaaagactgttctgtgatattttactttgttttactgtagcttcagattatctgaatattttcctaatagtctgtgggaatgctgatctgcttttgttacgcagtaggaacgtttgacactgtttacatagttctcatggaacgtagaatttttggaaagccacatatgatacacattttttgtgtatatatattagtgtgaataaaacagtaacatcagtgcatttttctaaagcagaaaacttctgtaattttcttgtcttccttaaaagtattcctttgagttcagtgttcatttacttttcattgtgagcatctgctctatggttaatgtctaactatagcatttgctcctaataatagaattaggacagtagagtttttgaactgcagctgaccccagacggcatatgttccaaccaccttattctgcatccaaggacacgacactaaatgcctttctcaggctgctggtggcagatctgggctggagtatggttccacccactcccttttggccttcatttctcgacaccagtgctattacttttcacttaatttcctcccaacttccccaactgatgaaataaaaataagagttatttatgtatattttaataaaatcctgttcgatttttcaacttacagctggttttgtctgtattattcaacctatgttttctgaacattgagcagaggagaaacccttgaaccagtgtccatagtagaaacatacaccagagcagttttaggagtcttgtgattttaacccttcagaagataaaacgtagaatttgggggcatgtatttatatccatcttcagtttcttaaaaaaaacaaacctaaagtcaaaacagtaagtaggtctgagggcagagtctctttatcagcgtgttgctcactgttataaccaccctgcctagcacagtctcgtcacaaagtgaggcacttgccaaatatttgttgaataaaacaattcagaaaatcagaagtagaattaaataagagaccttagaatgactgttcagaccaaaccctttacaaattacgtgttttctttaattttgctttctgtttaatatatttattgtttgttgctgctcttgggccttctctagttgcggtgcaagggcttttcgctgttgtgacttctcttgttgcagagcatggaccctaggtgctcaggcttcagtagttgggg

SEQ ID NO: 57337 - DNA, 1445 bp, Bovine  19866880447185
  misc_feature (1)..(1): n is a, c, g, or t
natttatcatgcgtctagagaaggttgatcaacatgttcttcatggatttaagtccaggtagaaaggactactcccctcctctatgaagtcttgcaggaagtagcttgaaaaggacccctgatgccatgttgcatgctaagttgctccaatcatgtccaactctttgcaatcccatggactgtagcccaccaggctcctctgtccataggattctctaggcaagaatactggagtgggttgcgatgccctcctccaggggatcttcctgatccagggattaaagccacgtctcttatgcctcctgcatggcaggggggttctttaccactggtgccacctgggaagcctgatgacaggttacacttcaagaaaacaacattggcactcttaatatatgcagctgctgtttctctagaccttggcttccctgagccctccttaccatatttcaacttatgttcaagtcaccactgaccattctccatgtcctactctatcttttaaaatactcattagctttctagtgaggagatcctattgggtctgttctctgtgctgagagagatattttatattagaacaacattctttcaaagctggttggtgtattatatttttgactgatgcagctctaagcttctctctttcgtttgcctggcctgacagtttaattatcagctcttcttccaaatgcaactgatcagagcttctcacttgaggattccataatcggttaggatatacctcagtaattttaactacctgcctcgcctcctgttgtagaaaaactcataagccactcaagagctctaaacagtcttgtattcaccgtgctgcctcctttactataaggataaacagcatcgctccactccgtttaactcccatcagtgacacatcttgagatttacgctctaggtagtgcccttatctcccacttcacacgcacagcctgcttaatggcgaggtgagctttctacccaaagttattaagtgacttgtttaccttcacacttctgaagaaatgatccagtattttgctcaggtgccaatcgcatcccaagaaactgctttttcttttttcccctttgaatgtggaatgtttctcttctgattgaattcagactattatcagcagaataccaacaaagtttggagcaagatgtttaagagatatggaaagcatccagaagaaagtaatgaaaatgaataaaaggttacaaaacaaaactgataaaaggataagtgaactgatacaaaatgtctgaggatgaatcccgtatgctacctggttcatcagtgcaaaaatgttgtgtgcttataaacattcatttacctaaatcacttagtgtctgttcacttagaaagcagagacattactttgccaacaaaggtccgtctagtcaaggctatggtttttcctatggtcatgtatggatgtgag

SEQ ID NO: 57338 - DNA, 3397 bp, Bovine  19866880496581
  misc_feature (1)..(1): n is a, c, g, or t
ncccagcattcaagtgaatatctgaaaaaaactcacacactctgatttcatcaactgggaaataggagttagactataatacttgtaaagtactccatattaaaaacattatatcccactataatgttcaattagggggaatctttgcaagcctccaacatgggatctctgaataacctgtgaaagggaggccactacaaacaataagattaagtggaaataggatgaaatattgtttcaccaattacacaaaatatataggaaagatatgagaggaaacattgccagcttggcaaatgagcacttctttcccatttgaaaggattactgagtttaagttaaagatctgatggacgcaaggctgtttgaacaccactagcctccttttccatcaaatctcttctgccaaccagcagtcctcaactttggcccttggcattcatgaactagccacacgcctctccttgggctttaaagcaatagctgaataagtgactttagaaacacttaagagggggtgtgcctgctggcttgtacttttcaaaaacttttcaaggtcatgatagcagaaaaagaccgagtaaactgatccagattaaaggagactaaaggcaaatgacacctgcatgcaatgctcacgatcctagaccgcatcctagaacaaaggggaaactgttctacaggagatgtggaaacgaactgtgtgtgagacagtaatgtcataaggatgttaactgtactacatcagatcactctaatgtagttatcaatgagaaggtagctctcttaggaaaacacctgctgtcatgtttaggggacaggggcatgttatttataactaaatctcaaacaaaaatatagataatatatggagagaggaaaaatgacaaggcaagtggagtaaaacattaacagtgaatatggctgaatctttgctttcatgaccttcacgtatactggacttccattctgtaaggttggaatcatttccaaatagaaaagccaaaaacaaaacaaaaacaaaagccagtaacaggaaagcactctgttagagggccctggacagtgtccccatttgtaggaagaagatgcccaccatttgtttacaggggactttcctttcaagaacagtggtcaagaattcactcagcagctgaggggccctggctgctgggtattctgcggctctaaaactagaagactgcttcccctaggaatcagtgcctgcacatctctgtgctgtgtgctgtgctaagtcgcttcagtcacgaccgactctttgtaactctatgtactgtgcccaccaggctcctctgtccatgagattctctgggaagaatactggagtgggttgccatgccctcctccagggactcttcctgacccagggattgaacctgcatctcgtatctcctgcattggcagctgggttctttaccactagtgccacctggaaagctagtgcatgcctctactgaaggttaaacgggcactgcctgtgactttcaccagacaggcaggaaggtttcccagccacccagccggccgggcatcagctgggcaacatagtcctttactgcaaagggtaagacatgctgcctgtggtcaaggtcagagcagagctgaagagagcagatgaacacttctgaaatgcatagaataatcagatgctgaactgtaagagactaggcaccctgagaaaagatcaggctgcatggaagcggcaagactggcttgtcccttggaggatgggaaaagtttagattgtgtaggcatctcgggaagtgggttcagtgtgagcaaagaaacaagagacgagacaacagacgaaagggccagcagggtgcagaaggggtatccgtgaggcaggagatggaggctgcagctggagtgtggagtggggtgtggcagggccctgaaagggtatgacgggcagaggacacctgggccccagatgtgtgacgccatgctctgcccacctttccccatcacggtggctggaactctgcccctgaggcagctgctacaaagaacaagcaaaagctatagaaggcacccagaggttcacagccctcgcccgcatctgctggtgaccagcatttttcccgggatctcggtctccccaggaagggctgatgagggcaggggacccaggacacctgcacagagctcctccggccctggagagatgccaccccagcccatctgcgacaccgactcccaaacctgaggcctgtcgaccgtggtctgcacacggacagatggcgggggtggcactggtgtgctgcttctggctggagagccctcccggctggacgcactccggacaggaggccggaagggggatgcggtccacgtggtccggggctcccagtcatccccctggatcttgtggtacacgggctggtgcgtctggtactcgccctgctgagctgggtagtgtgtcttctgggcttggtggaaggatggctgggctgccggccgggtgacattctgctcgtgtatcacagggatggaaatgtagccccgggggagctggtgaccacccaggctgctcctgccagtggaggcgggcaggctggctgaggaggaggacgaggagcagtctgaggccgctggagactgggaccgctgcaagacacagaatgcagacacatggccctgtgaacccttgcctggctctccgactctgcccacagtacgtgcctgctcagggtggcaggcttaatacaacctcccacctgttaagcctttccagtgtccacatgtactgttaagactgggaactcaggagtcaagaggcctgggctcaaattctcaacagcccgacagctttgttgttgtttcagtcgcaaagtcacatccgactctttgcaacctcatgggctgaagcccaccaggcttctctgtccatgggattttccaggcaagaatattggagtgggttgccatgccctcatccaggggatcttccggacccagggactgaaccttggtctcctgcattgcaggcagattctttactgttaatgagctacgtttaaagtacagaaaagagtaacccctcctcacctaacttgaagattctgtaaaagaatcagtgggtgtgtctggcaccagcaccacccacaggaagtgctcacgaagtttaaattattgttgtcatttcctttcctctttcctgaactctttcctgcttatccccagagaacccaggggccagtgggaaccacgtgcccatgtggaccaaggcaggccaggcccctctcccttcctgacagcctactttctattttggaagagcagaagagtgtttccccagctggcttctaaggcccctgctaggttaaatttgtaagattgtcgactacgcatcacttttattttacaacaaaaa

SEQ ID NO: 57339 - DNA, 1272 bp, Bovine  19866880541625
  misc_feature (1)..(1): n is a, c, g, or t
ntagccaggtctatcacactggatctccctgctcctgtgaatggaagggcccaggatgggtgtgcacagatgcccaccatgtggggctctctccaagcttcatgatgccagagcttattagctgtggtagcagcgaggtcttctgggatttttctagtctataattggcttttactgttgtgggttctgtgcatgtcagaaataatgaggtgacatttggatctgacatggcatcattagaggactggtaatatagattatgaacatgcattcacagaagggagaagaataaatcaagtggaaaaaatgcttgagaagtaatgaggattgtgtccaaatatatacccttctgatgtacattaacaccagcaatgaataattcatgaccctatcctccagaggcttgtaggtgcccagctaaaataacatttctctggttatcagaaaaacccatgttgggggcctttgttaagaagtctgaagattgtttgtgccacacgtggggttgggtgggatgctgaattagttcatcaggagtgggaggtatgacctagctttccaaaatggaattatcctgagcacaattttctgtgcctctacacaattccagcaatattgtgatttttgaaaaaaaattatttagcaatttataacagtcattaaatttctatgacttatgaatgagaatcattttcccctcccagaaacactgcaagttttatattttatcgcactcaggaatgaaccagtgcaaatgtttgtctctggatatagaagtccttctctcatgtgctggatatttatgacagtttgcacagctctgctcattataaaagtcagaacttttagcaccattgttcagaggaaagggaaggctgggagctacattggtggcttgccagtttcgcgacaacctttccttgtaagtagaatgccaatccagataacatgttttcagatggcgtacctttcacccccaaacctcccaccccaagccagtatatttagtatcccagtgatggtggcactagtggtaaagaacctgcccaccaatacaggtgacataagaaacatgggtttgatccctgggtcaggaagatcccctggaggagggcatgacaatccacttcagtattcttgcctggagaatcccatggacagaggagcctgttgggccacagaccttggagttataaagagtcagacacgactgaagcaactaagcatgcgtgtacgatagccacacactacacgcttttggggaagggggat

SEQ ID NO: 57340 - DNA, 775 bp, Bovine  19866880565385
  misc_feature (1)..(1): n is a, c, g, or t
ntcattccacatcacaaaggcagaaaaagactgcatttaggtaaagagaaaatgctataaaaactcatttccttcctgtcattttgtgacctgtcatttaatgatttgggttcttcctgtcatttgcattttaacactaagctcttatttaagtgcctactatgttcagaacctgtttactaaatatttggaggagctataaagttacaaaagagtttcttctccttgatgatttcttgataatatttgatatttgttgatacaattgatataattgttgatataatgaggaatgggggaagttggtgataaagcgagatgcatacattttgataaaacttggtaaaagtttttggaattgggaagcagagttaattttgaactaaagaccaaaccatcaagaaataaatttgatgctcagtcaagtgagctgttttttctttggtaactataaacaaactttttcttttaaataaattttattgaacaaaatggattgataatattccaagtagggtttaggtttcttttatgtctattaatggtgtatattacttcttattcataggtttaaaagaaggaaaagtaatcatgccctcttaaaattttttttttctttaagcttgcatcatgcttttcaaacataacttttgaagttaaaatgagaaatttgatactttgatattcttaagattttgaattaaaatgtgatttattagacaaaagtagagaaagtaaaggggcagtagtttcttcgtttttaaattaggagttt

SEQ ID NO: 57341 - DNA, 1050 bp, Bovine  19866880614497
  misc_feature (1)..(1): n is a, c, g, or t
nagcaggacacgactaagcacagcaaagcagtatgggaaatagcctaaaataaaatgcaggagtccaagcttgcatagtagaaacaccatttaaaggaattggttaagaatttgcagcattttgtttgctcctgacaaggcaaactgaagcctggattaagctagaaataatgttttccatagtgcctcccaaagactaggtaccacacaccctcagagctgaagcttgtggggctcatcagaagtggcctgggaggtcctgcagaatctgatggctagagaccctgtggactcacataacctcaaagggcttctggacagctgttcttatttagacaacattgggggatatttcccatgagtaatcaccatattttattcacatatatttggaaactttgagtgtagtcgagaatattttagtcttttaggaagcaagtctccaaatgtgcttatcacaaagcctttgagttttcaagtcactttggaatgagaatatttttctcccaaaccatgaagtctaaatccagctcgtgtttttgcactggaacactgtgtttccccaagttacccatgtgcttaaggctaaaataatatatttgggatagtaaagtgcggagtaaaaaagcataaggcatagttgaatcaagtcagtcttgagaaaaggttcctgctgggagcgagctctacccgtggcaaaggtcatgaggaaggaggcttggcatacgcaaaggcgggatcgagcctcaggagtccccctggaaattctcgagcatctacccccaaaaccagaggctgcctacctactgctttgtgctttcacctacacctctgactttacagggggctgtcccccactacctctctctgaaaaaagagttagcttacagctccagttaataattcctgggtgtgacagtgtttcaacctacaaactcatttggaagtcctctagcctgcctgaataggtttttccagccacatgtgattgttcagagcctcccaactgtaagaggcaggagatgttctaaactgtctaaacacagattc

SEQ ID NO: 57342 - DNA, 1256 bp, Bovine  19866880625798
  misc_feature (1)..(1): n is a, c, g, or t
nagctgggcacgtgcagtcttaactcatttagtctttatccttgtgccgggtgacgccgagccatactggagactgagaggcacaggaaaagtcagttataacgactctgtctttagtatttgttcattatggaattttttgcattaattttgttttttcaatatatttttgcatgaaaatctcttttatctgatgcctgagttttgtggcatccccttaaaatttgcagctgtgtccattgtctccctttccccaccttagtcccaactctggtactttttttatgtgccaggcaatgagctccctcctgagatacaagatcaagacacagaggagctttcagactagtgagagccgactgtgcaaacagtcacaacacagcagggtaattacaagactgcgcacagaaagcaatggggacgagttgccgttgattcaaggtccctggaaggagggcttgagggagatctgaaggctgcctgtgggtcggccagtggatatgtgggtggcggaaggatgtatggggagtgttggaaagtgacaagtccctacttgactctgagcctcagttttctgcatctgtaaaatggaatggtagcacccacttcataaggttgttgtcaagaatgaatgaatgaatgaattccctgtgttagcccagagagtagattctggtgtataacctgatactgtgtcttagtcacagtggtggtgatgatgatgaaaataatgctccttataagatgacagtatctttggatcacatacacagtctctgaactttgctttgcagacatccacgacagtgatgggagctccagcagcagccaccagacccccaagagcacagccaaatgggcctcttccctggagaatctgcttgaagacccagaaggcgtgaaaagatttagggtgtgcctttttccttgttgaccggaaatgacacaccacacaaagaagtttagaagcctgtaggggaaacacaggccagtttttgatactgtccatcccaacttgagagaaagaacttctcacctgtcatgaccaacatgggaatgctttcccgggtgctcatggaccagcactgaggggcttgcactgactgtgtctggtttttatataactgggaggggtggggatgggggaaagaggtactgtgcccactggcagaatctgcaaagaatttccagctccgtgacacctaggaggggggtggtcagggtctccctgacatgaaggtttgttctcttgtgtg

SEQ ID NO: 57343 - DNA, 563 bp, Bovine  19866880768886
  misc_feature (1)..(1): n is a, c, g, or t
ntttagccctgtgaacacatcacatacaaagtaatcttatttttttggaaactgttttctgtctaattgcacaccatatgcttgatagtaaattttgggtgggtaggtggggaatcttggctccagaaatatgttttatctatcttgacaaatactttctgtgaaccctcttagttaatggtcatttagaaaattggacagtgcctctcatacttttttaaagcagtagaaatctcatgtcttattatcagtgtcagcaaaactaatttggttaagtaattaaaatcaagcgactgaaaaattgttttcttgcttttgtaggtgttcataatgtgactgccctgagcaacctaataacttggcagaaggtggattacgacttcagctaccaccagatggaatttccctgcaacattaatgtttttattacttcagaggggagatcgctcctgccggtacgaggggtcattttgaaatggagggcagttattggagagagatcgggacttctgctttgtttcttggcactgcatattatcaataagcttagcttgtttcaaaat

SEQ ID NO: 57344 - DNA, 517 bp, Bovine  19866880772718
  misc_feature (1)..(1): n is a, c, g, or t
nctaaaaatacgtttttgtgtgcggtagaagaatatgttttagacacacacatatttaactctgtattttagtttgaggcattaaaaacacattaaaaaatcaaaagaatatacagaaatataaagtgaaaattaagtttctattctctttcatgccatttctgagtgtcccccccaagccctattcccattcctcaaaggtaatcacacttcctgtgttttgtttcagaaatgttttgggcttataaaaacataatatctctcccactctccccattaaaagcccaagtgggatacattcaagtctctctgcaacttggaccttttctatttaacagtatcttttttttttaaattagcttatttagaactctctaatttttaagctatttttaaaattgaaaaataaatgcataacagagaggaagtgagagacagctgtttttggacaaatatgaaattatcactgtaaaagcctaattttctttcctctggaaggagaaagacgagatacaga

SEQ ID NO: 57345 - DNA, 1851 bp, Bovine  19866880817894
  misc_feature (1)..(1): n is a, c, g, or t
ntgcctagagtctgttaaagtttgctcatgttttaagaagacatttttggggactttcctggtggctcagatggtaaagaacccaccctataatgtgggagacctggggttgggaagatcccctggagaagggaacagcttacccactctaggactctggcctggagaattccatagacagaggagcctggcaggcaacagtccatggggccgcaagaggtcagacacgcctgaacaactttcacttcactggtgatccagtggttaaggatccaccttgcaagccttgcaatgtggggaacgcaggtttgatccctgatcagggaactaagatcccacatgctgtggggcaactgagcctgccagttgtaactaccaagctcgttcactctggagtaggcaagccaataagtaagttaaagaaataaataaaaatccttttaaatgcaaattttatgaatgaattaggcttaaaagcttgaataggttgtatcaaacatccagcaatattttctgccttctttaaatcagtcatgaactcacttaagagattagaaccatacaactataaataaattgaaagtaaccttctctaaaaagattttaatacttttaagccactgtgaaacaagtttatcattaaatgcagcattatcaactacttggtaggtttttacagaaactatttccctcagggaagaactgtgagtaataaaaaagcttaagcatactctgaaaataattttctatcaccacttctatttctggtggctgagacactgaacgctataaaaccgagaggtgaaaagatttaaatagagacaatttcaaaggcgaggtgatatgttcagtacacattcaatcctttatttctaacattatgaaagcatactgtttttattaagagaaaatcagttttctccatcctcccctgaaaaaattgttgaataaatatttaaagaatttaaagtcgcccaaataacccaggtaagtgattccaacataaaccacacagcctgagtcagtgtgttgacttgcctgtccggtgccaacttcaaaggcctcataatcaacacgcacagaagagacggacgctccaagcgggagtctcctcttggactcgttcgagtctgagggaggagaagccatgtctttagctttctgagcactttcctcctgtccttttgctgaagtggccaccgctgccttcttttccgatgctgcttttttctcttcctgtgaaataccaaaatttcataacataactaagggggaaaagttatcagctatcactatgaaatacccatatcaatattaaggaatgattagtaatttcttaggcctaagaatgaaagcattgtggtcaattagagaaatgtccttttagagacacatactaaatagtcaaggaaaaaaatgccatgatgtctataagctactttaaaattcttaagaaaaagaaaattaagaacaaagaaaaatgtggcgaaacagctacaattaaatctaaatattagctattattatactctgtgccctacactttttatgtaatttaaaattttaatagaagttttttttttaaaataccaacttcttcctttatgatctcaactttagccagataattttagaagtacttatgtaactgtaaaatatatacttcctataaagaggtgtcggagaaagcaatggcaccccactccagtactcttgcctggaaaatcccatggatggaggagcctgttaggctgcagtccatggggttgctaggagttggacacgactgagcgacttcactttcacttttcactttcctgcatggagaaggaaatggcaacccactccagt

SEQ ID NO: 57346 - DNA, 796 bp, Bovine  19866880831066
  misc_feature (1)..(1): n is a, c, g, or t
nctaaatcatattaatataattagattactcaaaggggctgattttaaaattgtttacagaatattgttcactcaaaacttaattcatatttgtgagacttcagtaaactttaatttttaatatccttgctttaaggggtttttattaatttattataaaccacatgaaaccttttctgacaagttggttgaatatatagattaaatgccacagtttcatagttgacatctttagtatgtttcagtttagtctaattgggggaaaaagagaaatcaaatctttagcttagcacttcatttaaaaatactagttttagacaatcttggttacatttgggctgtcagtgtttaaagtaagagtaaagatgaaatagacactaaactctgtcttaaacatgggaaggaaaaatagattttgtatcactttttcataggtgaaaaggacacggttccctatttctgtgcccatttcgaagaacaactgaaaatttacaaaaaacaggtgggatttcatctgtagtaatgtgttccttcatatttttagaaatggttgtgcatctgtttaaatttgaagataacgacatacggctcataattaagtaaaacggcatttgtcatgacgttaagaaacacataagctaagagtattctttaacaattattgagtcagctactttaaactgttttagatgagattagtctactatcagttatcacaatctgagatatgtctagagtaagatagaaaggcatctttcaggtccacctcttgaggtaacaattagaaataaccttc

SEQ ID NO: 57347 - DNA, 4084 bp, Bovine  19866880850850
  misc_feature (1)..(1): n is a, c, g, or t
nattctgcgtaggttttagaccttggagagaccttagcagtcatctctggggcagtgctcctgaaccgcttgacgtttttgttgtccttgactttggacattgttaattgaactctgcacttattcccaccaggcttggatccagcatcctttcaatacaatacaaagcttgatttatttagggtgatgcttatttataacccagaatcaaccaaacttcagcttttgcttatggagatgtggagctcaagaaggagagatgacttggctaaaggcacagatctaggctgggattactggcatcctggctctaggctgagattttttttcttgccttagtatatggttagttttagataacttttccagaaatcctgaaaatggagcataaaatttaatggctaaaatataaattatatgaaatacagtcttttttcccctataccctggaaatttcctaaatggttcaaaaattgtaaagaactgagtatctaaataaacattgttaagtggtaagtctaacgttgggcaacctgttatattctaagaataatgagtagattctgcactatctagaatttggtgatgtaaccagcggttcatttaaaagaggggaacaagataacttgcaaatactcaagtgcctgccatttgcaaagaatagagtatgtctcactttgttgagccctcctcttccacatcatattgatcttcgagggagagaagtcttctgaagagagatcttagttccctgcccagaagttgaacccgggtagcctggattaaaaccagaaattctagctgctagaccaccagggactagaggctagaagcaaagtgtgtattagtggctcagtcgtgtcccactctttgtgacgcaatgggctgtagcctgccgggctcctctgcccatgggattctccaggtgggaatactggcgtgggttgccattcccttttccaggggatctacctgacccagggctcaaatccaggtctcctgcattgtagcaagattctttaccatctgagccaccagggaggcccagaagcaaagtagccctgttttttccttccctttgaaagtaagaatgtttaaaggagtcaaaaactataaatacagctacaacattaattattattatagagaaacagcatcgtatatgggaaagcacatagagaaacaatttgcttaagacagaagcaagacagaaatatatacacagagagaaagggtgtgggctcccccctctaatgaggaagagcatggtaaagagatgatttaaatcctttatatacgacagtcctctttggtctttgtttaactttggccaattatctttttttttttttttttttaaatcacacctgactggtcggtcctaggaccctccccaagatgtgtgttcaacattttgtaaagatagatcccactgcagaggcctgtgggtgcatgcccacatttattatggggtagtgcccccctccctttttgacccccaaggattcttccagcacttgtgaagacagggaagttttccttgacttgaggagaggtcatcttatcttttaacttaagcacagctcagttttgccactagctttgtccttggagtgtctgggtgggaacaaagcttcaatttgactccacttgacaaataccagctgtccagcccaggggcccatctatctcctacttcactatcgacacttaatgtgtacaattgcttttattcccagtgactttacagttcttacatggggaagctgcattccttatgaccattaaccagaaggatgcagggtcatgtcaaagtggcagattggcttagtacagcctagaaatcagaaaaagaaatcagtagagagaccactcatacctaatattagccaagggcattcctgttcttaaactaaatgttgctttgtctactagccagccttattagacattagcaggaagaacttaggataaattcagtggaggtggttcctactggaggcggcaggaggatgtgcttgagaatcctgccacgtgcctcccaccagctcctctgctaacctcccctttcttcaccctcatttcattctttcccctactctcctctctgtctgtggttgttatgtctttgccaagccctcaaggtagattagtttataactttaataatgtggtaaagaacctggagttattttgcccggaaaaggtgtgtaaagaaggctgcatcatttttgttcgtgttttcctgtaagcagccatctgcttactcatcattgcttttggaattttagcctttgcattggaacaagtttcagattacttttagcttcaaggataattaagtctataaaatgtatgtttgttgctttttggttgaatgtagtaaatagagggggaaaactggaaaatgggatggaaatgttctagaaaattaactcaaagtagatctgttgaaaattctgtaggggtattaagatacaatttcctaaggcagcttctgaataagaaaaaatagaatgcattatggtaatttgaaagaggaatcttcctgttgaagaaaacatagtttctgactttttaaatttattcttagctttccaataaaatacccaacatataatacacacatgtatgtgcacgcacatgcacccatacacacacacacacacacacacacgcactgagagactgactggggaaaaggctaaggcaattgagatcttacaggcagtctattaaaatttcaaattttataaaagctttgtattaataagtgtaagtggattctttacttgagcttgaataaattggaaagaatttagaattaagattggaaaaccatgcttcttcttccttttaggtagatttcagacttgcttagaattgagcagtgaatagtctcataatgtaggctttagtttatgccttgaaagtgaaagtgatacttgctcagttgtgtctgactctttgggaccccatgtactgtagcccaccaggctcctctgtccatgggattctccaggcaagaatactggagtgggtagcctttcccttctccagggaatctttccaacccagggattgaacccaggtctcctgcattggcaggtgaattctttaccatctgagcaaccagggaagccctgttcatacaaaggccttgatcacaatgagcttcttcctcctgaaagttgaccactttttgtgtctcccaaaaagcaagtgtcacaggtgcttctcgcagtcttgcagggcctcccagaagctgctcagttaaaatgtctggctggcacaaggttggccaaggggcaaggtaggacaggccaatccaaatgttgactttggaatgagaactggattttttcaggtaagaatactgcagagtgttgccatttcctccagtggatcttccagactcagggatcaaacctgcatctctcagggcaggagggtagagatattgtgaggcagaagggctggagtcctagctttaggaattctaggcaaggcacttcatcctgaacttcactttccatgtctatgaaatgggaaggttatttattatcaggctcaaattggctgtgggtgagatcgttctttaaatttcagaacactcttcaggtgtgaggggtcattaccatagtacccttagcctcctgtgcatgtgcttacatgttcccagcatgcatagtagggagttcagtaagcaggaagaaaaacaaccaggaagcagaggaaactcggtgacctcctttttgccaaaggtaaagggcatttatgggaaatccctcctgtggttgtgcctggagggcagctccacctgctcagctagatctttgtctgagcagtccgcttcctggtgggtacagcctccagaaggtcatgtacccagccccagcactgctgttatcttccacatcgaggtgtgtttccttgctgtaatcccttcatacccaggctgtccatgcctggcatcaacagggaaactcttgccaagggccctctggccacagagcactccccccacctcctgcctggcctccattacttctttcctttggtgagggggacagggcacagggca

SEQ ID NO: 57348 - DNA, 793 bp, Bovine  19866880885846
  misc_feature (1)..(1): n is a, c, g, or t
ncaagaatactggagtgggttgccatgccctcctctaggagatccttcccaacccagggattgaacccacatcttttatgtctcctgcattggcaggcagattctttaccatctgagccaccagggaagccccctagtaggtggagaataggccaaattttgtataccttgcctccttccgcatgggcccatttccagctgtgagatgtaggcttgggtggacacatttggtctgaaaatttctccatgacctattttgtattgatttttattttatctcttttaggggagttgacagttattctttggtgggtagcatttactcccaaacatctgcctcttgaattccagtgagttaatgttttaacacttgcagattggggccaattttatttcaattttactgctaaagcagagtggttatacttgaatctcctgaaagacataagaaaaaaactactcaagaaagagcaaatttggcagatggattttccacaagtcataaatagtgatccaaaaaatatatcttaaaccagaacactgctcccttcaccctcccagtgactaatgtgcttgtcagaaaagagaatttcacagtgagcatcttggatttctgtcattcataaattgttgtagttcttttggtaatctttgtcacaccatgcttctatatcttttcttttttcttttaaggccagatacctaatcaaatccccttttacacattcattacttctaagatgatagttgcgatagcatctagcatcactttctagaattttctaatctttaa

SEQ ID NO: 57349 - DNA, 1478 bp, Bovine  19866881055285
  misc_feature (1)..(1): n is a, c, g, or t
nctggtccctttactctgacccatctctctcactcccatccttccctcagactcaaagatgagtgttctccaagcttgccctgcttacgctgtcacaggtccctccagtgccttctcctggcctggaaagcctgtctcagatgccccctccccagaccacctcctgatccctcagctaacagccagttctcatttcctttgccactgtggtgtcgcatctgccttgccctgatgggtcctcttaacatgactttgctgaggccagaccctcagcatcccgtctctcggtgcctcctgggtgcaagtctgcaatgtacttacgaatcgcgtaaacaaatgagagaatccacagaccagtctttgcccttggtagcttacctggagcagaagaggggatgccagttcagcacacactagtgggtgccaggtacgcaccaggctctggacatgcagtcgtgggcagaatcagacaggactcctgctctcctgagggttccaggcatctgagcacgctgggatcctgggaccacaaagcgcatcgcggttcaggagagcctcccgaatcagggtcgagcggtgtctgatgggaacctggggtggcccagggctggtggacgtgagccaagggatgtcttggcgggggatggctcggggattcttgtgtggaagggaggtgatcacaagctctccaaagcccctcacccctcgggcctctgggcaggaggaaaggccccccacccggcgtgtcctcatggggctctccttttgcagctgctcaccaaagatgcaaagcagaggctgggctgccaggaggaaggggccgcggaggtcaagagacaccccttcttcaggaacatgaatttcaagcgcttagaggccgggatgttggatcccccctttgttccagatgtgagtagctccccagcctggactgagcctgtgcactggtttatgaccttcgactttgctaaatgtctgtgagggaccctggaccaggggctgagacccgtgggcagggggtggctcccatctgccagtagcagagcatcgcctggtctgaggaggtctctctgcacccaccctagcttcatcacctctatgaagttttcatttccagattcccaggctcctagagcccttgggagccctcccccaccgatcttgaactcccagagggcagggcccgggtttgtctctgtgagtccctgaactgcagccccagagcatgtttggcggacaagagagatgaaagagatcaccagggttacagcatcaggtccatagcagcactgacaacagcctcctgtcctagtgcctcgattgtccccattttgcaggcgaggaaactaaggccttcaggggttatgtgactttcccaaagtacctaagcaccacagctgggaccccagcccagggctgtgtgtggcagacgagcctgcatggtgacctaccgcttctgactggcctctgatgtggga

SEQ ID NO: 57350 - DNA, 1519 bp, Bovine  19866881055935
  misc_feature (1)..(1): n is a, c, g, or t
nttattatgtcccaagtaatctattcctgaattacttgtgaagagacaaactgctctgtagtgtataagctacttaggtcctattctaggatgatgcacttccattgtcctagctctcaaatttggaaatctgctcaggtttagtcttttaaacctttccaaattaacgtaattagaatttgtgatccctagatgcacatatagtacacgctctgtgacacctttttttgagggggttaaataaaagccacaggattctacgtgactaaaaactaaatctgaattattcgtgtctggcattgtgtaaacatatttttaagttcattttgctggacttcattaactacttcaggatctgcagggctcttctgaacctttgccactgcaaagtttatcccctgggttaacccagcctgggtaatgttagcaacctggaccatagaacttcgaatctttgcaaaaggagagactgctctgctgctacagctctctgaaggagaaggagttacatgaagccctctctcaagttcaagcgtgccagattcagagccgggggtcttttgagatacaactgaatgcactggttcaactgacaaaaactgtgggcctgatgcagaaaaagacacgtctaattgagaaggtcgagacggtagctgttccgtcgattcaaactgagtttcttcgctagaaacttgattggtcatttgatttccttcctcactagcctgctgagaaacagagctggtttctgatggctgggtcattttgttttgtgcatcttgaacaaatctgtggcagtaaatatccacaggcttagcaaatccagtcaatgtgtgtatgttgtcagcagaaggacttttcttcaaagaagactcgtggccttttccaagcccactgtcatgagcaatagtaacctctgaaggaacatgaatgctgatatcagtgctgctaatagactgggatcgactgcctaaccgaggtgccgaagcaataataccacaactaggaagaacatagtctattggccctacattctctgaagagttagttagctgcctgtcttcatcagacttggaatttgtaagaaattcatcagagtgatacgagtcattatctgaagagatttccccttctgactctgcctgggctttattatccatcacacttgtgttttccatggtttcaagactactatctgatttccaaagatttacttttaagtttggttttagaaagttaactttcatttcaggttttgtgaagtttcctagctttcgcagattgccaatgtttacattggatttggtctgtttcactttttgatttagagatgaaaatttgctcattaaaaatttttttccctgggccaaagagccttggttttgagatctgatgccaatgatgtcttcatgaggtttactgctcttcctacagattagaaaagaaaaaagttaatttcccatggaatccatagacagttccgattattaatgtaagtaaaactcaagtggcctcaatt

SEQ ID NO: 57351 - DNA, 1317 bp, Bovine  19866881060861
  misc_feature (1)..(1): n is a, c, g, or t
nagcacatgggtgactctctcatgcccccacccacactgggcacacacaccccagtttgaagacttttgtcacagggctgttggttaagaatatcttgggagcccaaggttttgaaaataaggaggaatggtcttgatgacatgccctccccccgcctcccacatctcccaatttatgcttttgttttgttttcattcaagtgagaagagagtcagaaaaatttccctaagggttgaaaaaagaatcctctacttgattgtttttctcttaaaaaagaaaaagaaaaaaaggcatccctccaagttctagcctttctattaatactagggagaaagagaaccacggtgcctccctggcccgaccccttgctatagcctctctgtgggtgtgggttctgtgcccactagccagctgtctttccaacctggtggtcggtggtggccgattaattgaaatgaggtctcctgcccttatttggaagggttagcacatcaaaagcatggaaattaataacaatggcaacaaaagtatgttgtaataagtaaccacatacagaccccaattatcactctgtgagcttgcatcactggattgggcacatgaaccactccccatgaggacagctgccctcagtttagtgaacaaagccagttggttgagaaccaaatcctcagtccagatgccatgtgtggcatccgcacaatggcttacccgcattacacaccctgtcctgttggttattcttcaattcacagagaagagcttttattaataaaaccagacactctgctgcctctcccccttacagtggaaaggttctctttctcatgagcatgaccatgtcttgtaaagagaagagagaccttggagacaggaggtggtggctgcgtctacagctgcgcctggtggctatgctttctcccaggctgtggctcagctggagctgggggaagtgccaggcttcccaggggccccatcccaaagtgggtctttgtcctggaggttaccattctctcccttactattctctgacccaattctacagctgcggttttgtcctcaataacttctctccattcattcccaggcctggctcttgccttcagggcatccggagacctcgaggtcttcccatccctggaggaggtctgtcacctcccagccccaggggtgctcagtgacggactaaacctttgcctaactccttttcagtcaccctccagagtcgagaggatacctatggcagacagcagcacttgttttaaattaataccgcagggagagaagtgagcccaagatggtcttgacccagagag

SEQ ID NO: 57352 - DNA, 2051 bp, Bovine  19866881106156
  misc_feature (1)..(1): n is a, c, g, or t
nttagagagcatttccagtgaattctatctcagatgaaaaataacgtacagcatgagatgctcccctaaataagaaaactgtgtatagatgtgcatgggtgtgtgtttgtataggggtgtgtgtgtgtgtgtgtgtgtgtgtgtgtgtgtgtgtgtgtttatggccagggctctctacccaacactaatgttaactcaagaatattaggccggaacttccgtggaggtccagtggttagactctgctctttcagttcagggggtgcaggttcgatccttggtcagggagctagatctcacatgctgtgtggccaaaaaaaagaaaagaattttaggctggttattagcattgaatttgaccttgaagctcacccaacttcaaaccttaaattttgcaggtgaggaagctgggttcagagtggtgaggtgaccattctaagattccacagcctctatgtagcagtgaccagaggaactcagattccaaggttttaatcttttgaggggtttccttacctagtgtaaaaagtgcatggcataggctttgttttaaacggtttcttttcaaaacgctgtctttctctgattagaatttgacttgccatctttatttgctcaggacacagggtctctggaactcaggacttcggcagaaaccagggaaattcaggaaaaccaggatgagtctgtgaccctgttgcaagggtttgcagcttttcatctggatggttttgtcctgtttcctggtgacctgtgacttctggcccatgctacatgaaaggaaacagataactctgttctgtgacaaagaagagacaagttgtgactccctctgggctgtgagcacccaaatcctgctcccctacacccagttcagtctgtcctttcaggctcaggcacctcctttcccaccttccctgaccaccgtggtggttgtcagacacctcagtgattgatagggatgatttctgtacgaaccatttcaccctatgccatcaagcactgcagtgatttactcaaggtctctgatttcacgtggatgggtttcgtcccttcgaagatcttgcaagccccttgaaggcaggaggtaaggccactgtgtcctggacaggtgaggatcctggcctctggagcccatttggttcagagtcctggtgctctgcgctttgttagtgaagtaatctgggcaagtcatgtaaaactctattttctcagtttacttctgtaaactggagaataatagtactcacttccggaggtgtcatgagaattcactgatacccacaaactgcatatagcagcacctgacacatggcacattagctaccacgagtggggtctcagtagattctgtgcttgttggctgatttgaatgcatattcacatggctaatttccttacctttaactttgacttgcaagttctgcactttgaaagtgagccttgatgacctagaggagtgggatgggagttgggagggaggctcactagggaggggataatataattatgctcatatgtgtttatggcagaaaccagtacaacattgtaaagcaattatcctccaattatgaaaaatattttgagagaaattgcaatggaatttaaaaaagaagtgatcctggtggtggagaacattccttgccacctaggctgttaaaggattctgtggggttcgttagaattctaactgcactggagcttgccttgaaatagaatctttaagcataaggccatctgagagtgtccgcttgaagattactctttataagtaatgcttttccatctttgaactgaccatttagtatcagcaagttatcaattaaaaatagtttaagagcatgttaaaaggacagctaattttaattcattggaatggatctttattttatttgatacataatttgagttttatggctgaaataaaaggttaaagctgataggtaactgaaacagaatatgtgcaaagtgggaacttaacttttaattttttatataccttggtgtaattaataaaacatttcttacagcagaattgcatgactggatga

SEQ ID NO: 57353 - DNA, 1107 bp, Bovine  19866881166660
  misc_feature (1)..(1): n is a, c, g, or t
ntgggaaaatacatgataaagaatatacaggtgtacctgagtcatcctgttatacagcagaaatagcacaatgtcgtaaatcgactatacgtcaatacattttttaaaggaataattgcaagaatacccaacccttaatgatggttttctctgagacggggagaggagtgacgatttcagagaatctccctcagccagtcagacatttcataatatgcaaatgtttaacagtgaatatatacactcccataagcagaaaataagcaaatgaggctgctagtcaggccaagagtttatgctgcagtaccagtgctacagttaaatgatgctgtgccaggaagcaccaccttaacccagatggggtcttcccaggcggctcagtggtaaagaatctgcctgccaaggcagaagacttgggtctgatccctgggtcaggaaaatcccctggaataggaaatggcaacccactccagtattctttccagggaaatcccacggacacagggcctggtgggctacagtccatgaggtcacaaagagctggacatgacttagcaactaaacaacagcatcaacaaagcacaggtggagcctgaggcccagactgtgccttcttcatttcctgtcccctccctctgcctccagatacattcaaagaacagtgctgaaacaccagctactccctggtaatgaagtccaagttcacctatgaacaatcttgccttatacctctttcccaattcaaatcaagggcaaaccattcatcattccagcagagcccagaaaactgcatacactgatcttctgaattttatcacctgctcttcaaggaatattgagcccttatgacttgacagtgatttcattacaatttaagaatatcatatataacccattttgcgatcctgtcgctaaataatcagtaatacttattattgaaacagatgtactaatgaaatggacaggtttgagtttatcaatattcttcttgggttgattttatctttttatgtcaaaataatgcaaaaacagaactgaaactttgcaaaaagacaatttttcttctttgatagtatcagtaagagccaggagtctaactatatagat

SEQ ID NO: 57354 - DNA, 957 bp, Bovine  19866881281963
  misc_feature (1)..(1): n is a, c, g, or t
nggctgggagtatgcaaagacagggtgcggccggctcggggcgccttcatgaaggacagggatgggaatgtagcctggccggagctgggggtacacggcatgaccttctctagtgggcagcagcctggcgccctcccgcgaaggcccatttgcagaggatgcggtttcctaaaagtgagaggagacacacagacctgttagaaactgggaaggaaacagccctgagcaggagaaagcataatgccatgtgctccgatcttccagagtgactctgggccccacagtgccagctaggacagctgagcgcagaaactgtgggtacctcccctgatcccctacttcttccagacctctcctcccttgctgaagctgctgttggcccaggagtttaagaatcagaagcatcaagagaaagtaagagacaagtaaggtatctgtggagcacaggagaagttccggtttcccgaactggtaagacaggtttttgttctggatgacaaggcagccttgcatacaggagagtccccgacagcctcccaaaccttcagagacccagatcagaagatgctaggagggtccaatgccaacttgctaaggggattacagccagcatctcggcttcctaaacggtcctcacatttcctgacaacgcagattcacgtgggaccctgacacaggccacagcccagaaatctgcagagaaggggcagcggcgggcaggcagcttcctcaggaatattttcagaacaagaggcaagaaagggagatacccaaggaatgcagaagaggcacaggatgagaacaaaacccggggattagttgtgctggtcttgtgatgccaacaaagcttgcttggcgaggagcggcttggggtccctcctatgtcctctcatgaagttctcccttcagtggcctggctattttgggacccttgagaaggccaagttccagatgtac

SEQ ID NO: 57355 - DNA, 726 bp, Bovine  19866881371596
  misc_feature (1)..(1): n is a, c, g, or t
nctgaagacagcagcatcatgaaggactatttgaaaataagggcagacactttgtcctctcgacttctaaacctaatttgtcagtcaaagcaaacaagtcaacacaaaaaacactaatctctccatctagtaacctgaggcttaaaatgatacaaatcaactcatgtatctcaaaatgttaaacattatgctaactgtcagcacctggatcggggaagctcttacctctgtgatcattttacagcttttacagggtccaatctgactgaataactgaagaataagaacttctgtcacatctctggagaggttacctacgtatctgtatgggaagagaaaaaaaacaactatcagcaatctcccttcagctctgactctaaagcattatcatttacacatcatctttcatttcaacttcctctctccaatcaaatttttccaattaagcctgattctttgtatgtaagattaactctcacctaggaaagcataacttcttagggcactaaagtatcacttcaaaagactttataaagagcaaatcaatgtgattttgcaccccaaagcctatatatcattttctcgtgttagaataaaaataataatttaaaccagtctcaagaaaactacaatgtttagatgtgaaacacaattcaaaataatgtataacacacacagtaccataaatattgactcattaaaacacccaatcatagaggggtatca

SEQ ID NO: 57356 - DNA, 735 bp, Bovine  19866881404558
  misc_feature (1)..(1): n is a, c, g, or t
nttatgcatagaggttaatttctcattatctcttaagtaaatgtgcttttctttttaatagggaatcagaagatactgctctgttattacttaaagaaatttatcgaacaatgaacattagtccagaacagccccagcattgattggacttcagcttaactgtgtgagtttattttgtgtataaattctgaaggcttcattctgaggcttgtttttttttttttgggtgcaccctgcagcatgtaggatcttagtttcttgaccatggatcaaacctgggccccctttgttgggagcagagtcttaactcctggactaccaggggagtcccatgtctttctcttcctctcttagtcacctggcaaaaaccataatcctaggagacccagttgtctcttactctgaacctcacctgagttgcagcacatggccagagaaaagtcaggcaattgtgttaaccatactcgcttcaaatctatgaccaaaacatccagtgggcagtaaagcctgcagtatggttctgccacacttgtgctggtaaattcccttccccacaccctgaggtgactcttattttgctcctctctctcctcacgtttcccacagcccttgaccatgaccctactctcacacactttggagagaagccagagaaccccgctctgaccaccgccaactttacccactcttctcacctttgtatctttgtgattttcccgcatccacccacccatc

SEQ ID NO: 57357 - DNA, 1367 bp, Bovine  19866881476911
  misc_feature (1)..(1): n is a, c, g, or t
naagtgaaaggtagtaattagcagtacaaattagctattaagtgattccaaaatttcaaagtgagaagatgaccttttcacttcttacctggcagtgataaattgggttctgatttgagaagaaaaataaagccctctaacacattatggattttctttaccttccaatgggaactgagccaagttaattaaaaatatggtagaaagcaggaatttcacgatgtccctgggtggctttctcacctgcctacctggaagggtcaccttcctcttcagcccatcctcagcaccttccctcatagttatgagaaggaaaaatgggaattcctagtgcataatattttatttaattactggatgacctggtaaacctgtgtttgtcgtgacaacatttcccactctaattaaaaattggctgaagatacacacgctgagtgttcattaattcctctaacaaataatttcactttacagtaaacatggcattgtagtcccagtcttggatattttccatctaaaaatgttgccaagttattcttgccattttgctgagcaaaactacacagattccaccatgaagagctaaccagacccctcacctctattagcctgcagtcatgctaagcaccttccattgctgcttctcctggaaaaggtacccttggctcaagaactgtatatttctcttatatgcctaaagtctcttgccacccgtggtcttgacgcaattgcaatctaggctacttctttacaagtcaacgtatgaaaaccttttttctgcactttatggtgaggccgaagattttgacatgagaaggcacagtgccacaggtgggggcgggggttggcacggagacaaaagtgatgatctctttaacacaaagcagcagatgaacacagtgattcatgctatacccacggggcttccacctgagagcacaactcagaatcaccaaactgcagaagtaaaaaggacctcagatgtaattaagcttaaaccaccttacttataaatgacaggacaaagactattaatgcgtatatgtggaatctagaaaaatggtacagatgaacctatgggcagggcaggaatagagacacagacgtggaggacacacatggacatgatggtggggaaggagagggcaggacaaattgggagagtgggactgacctatatacactgctgctgctgctgctaagtcacttcagtcgtgtccaactctgtgagaccccagagagtggcagcccaccaggctaccccgtccctgggattctccaggcaagaacactggagtgggttgccatttccttctgcaatgcataaagtgaaaagtaaagtaagtcgctcagtcgtgtccgactcc

SEQ ID NO: 57358 - DNA, 1435 bp, Bovine  19866881609396
  misc_feature (1)..(1): n is a, c, g, or t
ntagagtacaactgtgacaggcttcaggtaattagtctacttgtgcatactgactgcagatttctctaactagcagtaggtcagatcccattcaatgtacgcacaatacatgtgtacacacacttagatattcgtatcacactgcatttcatctcacttaagacaccattgattttttttgtcactgtcagagatgttaaaattaaattttaacatctgccttagaattggtaatgtacacttactatagtatatggaggtggagcttcccaggtggcgctagtggtaaagaatctgcctgccaatggaagagcccttaagaaactcaagtttgatccctgggttgggaagatcccctggaggagggcgtggcaacccactccagtatccttgcctggagactcccatggacagaggagcctgacaggctacagtccatggggtggcaaaaagccagacacaacacagcatctgagcacacacatacacacatgtatacagggaaagcagctacagtctaagataaaatatctaaagtagaacatcataagggcaagaaagagatttctcacacattgaaatgaaactgatgaaaggaaaccaatactcggcagtggagttcatggcctttgaaagcgttccatttacaccactgccaagggacgctctgggggcttccctggtggtccagtgattaagacccatgcttccaaggccacgggttagatccctaacataccacatgctgtgcacccaaagggaaaaaaatttaaaactgactgtgtccttaccttgatgttgtcaccaatttttgttggatgacataaatatcaaagcagagaaatatgagactttaaaactatttacaagttcaagtgtaggagttgtacaacatggataaattatgaaaggtcacttcaaacccttctaccctcaagtggctgattgtgcatataagttaataataaaaacaacaaacaacaacaaccaacaaatgtttctcaaaacactttctagtgactttccactttctcacattccattctttcctaaacacactccagtcagtttctaacccaaccacggcaaggaaattttgtgctgagctcaccaatgacctctctgccatctctgtgatcccttttcttcctcatcttgactttcaagcagaattcaacacagttgacaactctcctcctcttctaaatattctcctctagattcaccatatgctcttggttttcctatttcctcactggaaatctttctgaaggcatttttccctcttaactcaaattatcactgtcactaagtgttggggaaagcctggcgagctgcagttcacaggatcacaaagagtcggacatgacttagcggctgaacggcaagtgctgagatgcaccagggctcgcacctaggccccccactctctcct

SEQ ID NO: 57359 - DNA, 1440 bp, Bovine  19866881638069
  misc_feature (1)..(1): n is a, c, g, or t
nttttcattaatattgtgtatggcaactctcttcttggctgagcaccagcaataatgaagttaatcagacttccccccgctattctaattgcttttgtggtccccagataaatctgcaacacctgttggcttaatcaaatatctatggcccttctggagtcaactcaccagccgtgcagccagagagcttaggagaaatcttggtcgaaatagaactaatttgatgacatcttgggaagattttcagtgctatggctctggaatgaaatttttgtgaacctagctatggtggcttgggcttttaagacattttggtgaaattttacaggttgaccttagtcagacaattatgttggcaggatgtagaaaatatgagaaaagttttcttgtcccagatttttcccaagcaggagctaaagagctagattccttaaaatccttaatcattcccttaaaatccaagggctcctctggttcttaagaatgccctatttatgagcagatatctccagcaagtccagcattttaaacatctatcagctaccacctcaccaagacatctagcctcgatagggctctggtgagggagagagggcccccgaaaaagggacaagttgagaacaaacttacctttgcaaacaaaattacctctgtcattttgctcagggtaaacacttctcataacatttgaaggggttattgtcattgtcttttattgatgcactttataccttatatacatttactgattttattcaaatagattgaggtggctccacaaggtataagggaaattaaaagatgcttgctccttgaaaggaaaagttatgacaaacctagatatcgtatgaaaaagcaaagacatcattttgctgatgaaagtccatatagtcaaagctatgacttgtagtcatgtatggatgtgaaaggggaaccataaataaggctgagcgccagagaattgatgcttttgaattgtagtgctagagaagacccttgaaagtcccttggacagcaaggagatcaagccagtcaatcctaaaggaaatcaaccctgaatattcacactggaaggactgatgctgaagctgaagctccagtactttggccacctgatgcgaagaactgactcatttgaaaagatcctgatgctgggaaagattgagggcaggaggagaaggggatgacagaggatgagatggttggatggcatcatcaactcgatggacatgggtttgggtggacttcaggagttggtgatggacagggaggcctggtgtgctgtggttcatggggtcacaaagagtcggacacgactgagtggctgaactgaactgaactgactcaatggacatgagtttgagcaaactccaggagatactgaaggacagggaagcctggtgtgctgcagtccatggggtcacaaacagctggatatga

SEQ ID NO: 57360 - DNA, 1349 bp, Bovine  19866881718007
  misc_feature (1)..(1): n is a, c, g, or t
ncctagttccttctctgtcactagactacatcttcactcttcaccactggacatctgaagtaaagtgagacactgcaaatcacatgttgccgtttgccttctggtgacaagccagggagtccctatgctgtctgatgagaagcagctgtagggaaagctgctctgatcaaagctaaatgcacacatcttactaaaaccctagtgggccgtgctttataataccatggtttgatggtaagtacaaataataaaagaaaatattgtatgtactcattaaaaatgtggtgtagctcactcttaactagtgataatgaagtgtcagctgaacaccaagtgctaatacctgattgaactggagcacctccagctgtgtccatgatattctgggtacaataaaaaaaagagataagaatttccccaaatagtgctagaactccatattaggaatgctttgttgagatatatgtgacaatattcctggaatggtataagttacaccttggtttggtatgttaatgttgaaatgtgcatgactgttaattttgataatgttttctgaggtatgaatggtatgggggtttaccattttcctagcaataatttcttggtattgttaatttttaagtgattagaagattccattttggttggattagataattatgatcaaaggttatagtactatatcctaaaggaaatcaaccctgaatattcattggaagggctcatactgaagcagaagctccaatactttggcctcctgatgcaaagagttgactcattggaaaagacccagatgctgggaaagattgaaggcaggaagagaggggggagacagatgagatggtgggatggcattaccgactcaatggacatgagtttgagcaaactctgggagatagtggaggacagaggagcctggagtgctgcagcccatggggttgcaaagagttggagacgactgagcgactgaacatcagcaactgtagggtagcggctgagatatggagggcgggaatgtcttccttgttactacagtgccaagtgtgcctgcttgtcagccaggagcccagggtttaatttccctggtggtaaggctgcattcctaacttctaatacaacattgtaaacaaactcgacttcagtgagaaaaaaatgtaagatatggaggatggggatcagaattgctggagtgtgagatgtagccctaccactttttggttgtgggatttgaagccttagtgtccccttctataaaattgggataataacaaaaccttccttctccagctgtcatgaagattaaattagacagtgcatcattgcggaagaccgcaggagaactgtac

SEQ ID NO: 57361 - DNA, 1480 bp, Bovine  19866881778787
  misc_feature (1)..(1): n is a, c, g, or t
ncaatcccaactatatgaatcataattcatctttgtgaaccagtgcgtattttgaatttgtatctgccatattacgattgttcgtatgtaaatttttccctgtaagctttcataaaatgctttttctgtttctattccagtttctaaaagattttatatgcagaacattgaggtccatagacttaagatttagaaatactttattgagctgtgtgtgtgtgtgtgttaattgctcagtcgtgtccaactctgcgacttcatggactgtagcccaccaggctcttctgttcatgggattctggagtgggttgctgtttccttctccagggcaacttccccaacccagggatcaaaccccagtctcctgcattgcaggcgcattctttaccgtctgagccaccggggaagctcatattgagcttgagtatgtgcataatgctgatggcttggtccccgaagtgattgttcattagtaacctgtaacaacttgcttcccttaaacagaagcaggcgttgtaaatgagagagagaaaaaaaaaagttttgtatacttttttctttcaatctgttttttatttaaaaaaaattttttttcacttgaattaataactgctttaatttcagaataagtaggaatgcttatcaacagatttctttatgttcagattgttggttgggtcaagatcgttagtttcagttatattcaaggcactttggtcatatctaacagaacgagaattagactagctcttagaagaaaaaggtcactgacgtgtggaggagagaagggagtagtaccttatcactagcattttagagaatttaaagcaatagtaaaatcacctaaaagtctgtctgatgttttgctgtcaccgggattcattcctctttgtctgtgcccaccttgggcctccctgccacctggcccttgttcagtcgctcagtcgtgtccaactctgcagccccatggacggcagcacgccaggcttccctgtccatcaccaaactccccaaccttactcaaactcatgtccattagtcagtgatgccatccagccatctcatcctctgtcatccccttctcctcccaccttcagtctttcccagcatcagggtcttttcaaatgagtcagttcttcacatcaggtgggcaaagtattggagtttcagcttcagcatcagtccttccaatgaatattcaggcccctgttaggccattgaaaaaaaaagtaatttattttaaggctgtagaacccaaaggcagggcaagtggtttgataacccaggagactactgagtgaaattggaaagctagcagaaatccaaccaagcagcacatctcagttttctcccctaggctatgttcatttctgcgcacaaactttacctttctctagtccagggctcccagtttcacttgtcagttccaacctgcttgacctagcatctttattttttcaaaaaatattttttggctatg

SEQ ID NO: 57362 - DNA, 1520 bp, Bovine  19866881867794
  misc_feature (1)..(1): n is a, c, g, or t
ntaccattatgtggcccagaggctggtctagaccacccggtagccacctaagtgatccccccaagtgtattcttgctcctcccctatccattctctacccagccactgatcattaaaaaacatgaatcgttcataccctccctgctttcatggctttccaaagcacatagaacacaatctcaacttcttatcatgtcttgaaaggcctgtggcatccaggccctggccaccctacagtctgggctggtccagctcttccttgctttccccatcttgctctcttctgcccacactggtcttgttttagtttctctgccaggacctttgcatgtattgttccttctcagtcactgctctgtcccttctctctcccagcctcattaatgctctcctgccaggggatcttgagtgttaacctcaaatgccttttttactttctaattaaaactgctttgtggctgtggttaataagctaggtgtccttctaccatttatctccagggtctgtacccgagctgtctgagatgtttcagatgcccagctggtcaagtcatacatcagtaggagccatggaacacacagtgctttagtgccactctgatatgagcttgaaatggctccttaaggagcttgaaattgttcctttacaggtccgaatatagcaccagcctttgacctgtgcttccggaaagccttaaagcatctaaagttttcatcaactgcatcagcaccttccttgccgctgtgctttcagggctggtctgaggccacccaccatattttcaggtttctattctcatactctttaatttttccatgaggacttctagagtttttaatgatcaaatatattatacttgtgggggaaatcaggttatcttctccatgacgtgaaaagacagagctgattgcttactgagctgtttgccacgtggatcagctgtatcagcaatagcccgtattgggaggtggggggacagagtctgggaaggactctgtctcacgtattcccccaatgatgctggaaagactaccattgaataattcctctgtgcaatgcactgtttgctccagggctattcttttttttttttttttttaatcttatgcaaatatttctttgagtgataatcaagtttcagaattctgtgcttccttctggagtgagttgggaaggtgagggcagagctgtgagtgttgggggtccttaaggatggaaactatggttgggagatcagggagggaggggtgggagactcttctacaccctgagaggtggaagactcttctacagcttttctaacacccactgttctacgttatctagggtcagcctgcttatataatcatagtggcctggtggtgtttttaggagatgagaacccaggtaggtgttcttgccaatcactcactgagtttaagcatccacttcagccttgagatgcctcttgtgtctcaggtgagctgaaggtgggcagaggaatttccgcctgttatttcccaggtcatcaagccagaga

SEQ ID NO: 57363 - DNA, 1567 bp, Bovine  19866880920584
  misc_feature (1)..(1): n is a, c, g, or t
nccccagaagatatgtgaagttccatagttgtcagttctcaaaactgcttgagggccctacgttatctaggttatcatatttttttaaaggctttgattcactactgcactctatctgaaaactgaccacattttaggagtatttttctaagttaagtcttaagttatggcaactgtcaatgttgtaatatctattatttgaattcaaatgagtgattacatgtaattttattgtcttgcaaacttctaaagatttttttaaggctgaattacatttaagattctataatatataggatggtggaaaaagtgatctgctactaatgagccacatcattttggggaaagcacttaacctctctgaagttttgatcagaaaatgatagtagttggacacatgatctttaaggactcttttttaaaagtaacaattgtattgcctagaaccagaaaatgctattttgagggattatttacatggtcacaattcaactatttctgaaaatagcttggggcctcccactgaggaaaaaacaaaatttttcttctcttaagttggacaaagcaaaaggaaatctgagaaacctcatgtgctcacatatagtacacaatttgcaaaagtgctgtttggaatctgtctcctgctgaggctctaatggccagtttcttcaacagagaatttacacatgaaatatgataatgtttggcaatgaaattagcataatcatagatggagcaaatacagagtacctcaaattaactcaagaacaatcacaatgatattttgcatggtgaaatagcttgttaggcagtattaaagcactgattctttttgttcctggctttattgttagtaactaaactaactcagctttagtagcattttgaagaataatcagacttttgtatgtgctaacatatcaggtctatctgggggtttgaaatacattttatatatttatttatttattgagatatacttatttgatttattcacagaaaaaggaatttacagagatttcctcaaaaaaaaagaaaagaaaaaaaatagtaaaacatgctgttagaaaacagggcccttaccccactgcaggacagaaccatcctcataaatagataagtttttaattcccttagaaacacacacacacacacacttacaccacttcaaactccaatgtatttccttagcaacaattcaagtgttcccttattttgtaacttaagacctattagtatttaggcatatagtgaaatgtttttatttaatttttatataatacttttattaatataaatatgtaatctatagtaacataactttgacatttgataatttatttttctgttgtgtataaattttaaaataaattacaaaaggatcttattaaaaaagaatatatcacaccatcactttctcttctatcacactacttccatgtagaaattcatccaaatcctcctggatactgtttttagtttgaaaatgctctaaaaaatacttgcaactttcctctatgtgaaatttcagagtaaatttttctttatctgaaagaaaatttctaca

SEQ ID NO: 57364 - DNA, 1578 bp, Bovine  19866881223854
  misc_feature (1)..(1): n is a, c, g, or t
ntaggtttgaaattgtttcctctaaaatgttaactttttaatttcataactgtgatatgtaataaagcagtttaaaataacagattagcatagcttttgaaggcatttgcaatataatggaagtaaaactaaattgaaattcaaagtctgtctgcacttcttcttatgagcataatttatctttaagtggagatatggagatgaaacctaattcaggagaaaaaggaaggaactatggaacaatagaaatctgggcttgaaattttggttggccatataataattgtatgccttgaaattacctaggttctcaatgtaaatttcctcatagataaaataatgataataatgtctatctttcaggactgttgtgagaataaactataagatttataaagtacctagtagagggcacacataaagcaaaaattcagtaagtagtcatttataaaaaatgataattatcatgactactatagaaaattttatataatttcttatttacatttattaaatattatatgacataaatattaatttaaatatgaactgtgtgttgatgctagagtgcataatattaaagtaatgttagtcatgttattttgatatttcatgagtttttattataacagtaaccatgtctgcttaatatgctcaactgttaggataaaatactatatacaatatttctttgaaagaataaggtatgatataaatatgagttagctttacaaccagaatgaaatggcttcacattaatggatttgccatcaaaagaattgctcaaaatgtgcaaaaccaggtaaactggatccatgaaaaaatttgtaattatactctttcttatttttactacatattacacttggcactgtgagaaacattttaaaagtatgaaatgtgacccttttttgtctcagaaatttaaggaccagattcacatatgaaagaaatacactcttaaaaggtataatatatagcttataaaatatgaatatttttctccatgaatgcaactaagttttaaataaatactggactttatgggcttcccagtggctcagtggtaaggaatccacctgcaatgcaggagacttggggatgcagatttgattcttagttctggaagatctcctggagtgtgaaatagcagtccaatccagtaatcgtgcctggaatattccatggaaagaaaaccctggtgggatacagtccatgatatctcaaagaagtgaacatgactgaattgactaaaaacaatggtgacatttacatttgtaaatatgtaggaaaaaagtgaactctatggatagcaaatcattaagggtttttttgtttgtttgtttgttttgtgaaggtccaggtatctaacatttgagcttgaagtttagattcaacctagagatattgctctaagcagtaacagatcatgttcacttagctgagaatggcaaggaacatcaaccaggcaatgaagagtaaataaagaacactgcagacatgtcactaattgtagtgaaaagtagattctgagttgatgtggtcaatatcacatctgggtaggtaaagattatggag

SEQ ID NO: 57365 - DNA, 1691 bp, Bovine  19866881404680
  misc_feature (1)..(1): n is a, c, g, or t
ntggctttttcccacctggtataaattaatataactcagttataatttggctagatgtcagacctagaagaaactgaaggaaaaatgggtaaaataacaatgaagtgattacatctagagtgaactcccaggtccttgcattgttattattgtttagtcactaggtcaagtctgactctttttcatccccataggctgtagcccacaagctcctcctccaggggattttttctagacaagaatactggagtgggttgccacttccttcttcaggggatcttgacacaggaatcgaatctgtggctcctgccaagtctcttgcattgcaggcagattcttcaccactgagacactggtgaattcccaggtgcctgcatatgctatgcttaataaaaattatattttctagagctatccagtttcttggtatatgtacaaaactcaatgattttttttctcactaattgcattagtggaatcttccactttttctcaacttccaatttaaagttggttaacactgcagagccttgaattctataagcatacgctgctttcctattattttgctcctttgcttatgctattcttgcttcctggaacatctcacaagtgccagcatggagaactcctacttgttctttaaagagctaaagtgaaaagtgaaagtgctagtcactcagtcgtgtctgactctttgctatcccatggactatatagcctctgttcacagaattctccagggaagaatactggagtgggttgccattcctttctccaggggatccttctgagccagggattgaacctgggtatcctacactgcaggcagacttatattgtctgagacaccagggaaggtaaagtttcatctaaccctagcaaggcttgtttcactccttcaagaatcattcttcattcgtgaatgaatttatgtccctttttttcttgaataaaaatgaataaatgaatgaatgagcttatgccccgtcatgcatttttttgtaaaagcattcagattgtgccatggtgttaaactgccttgtttctggctcctacatttaggcattcagtttctgttgagggtcagaattttgatgatacttattcatcttaaaatctccaactttgtatataccatctgttgggtagaaagttttttctcatttcataggttcatctggctagtctatgaattaaattgacataagacacattaaaaggagaaaattgaaaaaaaaattagtatcatgtgtacatggaactcagaaaaactttaagactaagagatagcatgaacagagtgaatttatttgtatttgcagaatataatgcataaaaatgtacatatacaggtatattatatataaaattatgtataaagatgtgttttatttaaaaatacataataaaactccactatgctgagactacaacatcataaagacaatcaggcttacttcagaagaagaaaaacaacagaactatacttaaaataataagaatttaatacaataatcttggaaataaacaattcatgaattgcaacattttcaatgtttgacataatacttacatggtattccaaatctctgatgattttaatgaaatggaactaaagggttttatatcaagtgttagaatatcaattcagggattgcaacatttacactggtttggataattctatt

SEQ ID NO: 57366 - DNA, 2105 bp, Bovine  19866881580012
  misc_feature (1)..(1): n is a, c, g, or t
ncaataaggctgaaaacagcttttgtcttactgaatcccttatcatatctggggcatcttcatgaaggaaaatagaagttaggtgacacttattagataaacatctaaaataaaaacaaatgtgggacatgatagttttctctcatcattctcaggagctatacaaaaattaatgttgcttgtggtttcaaagaataaagtttactttctctccctagccttgatggaatgtgcttagcacagcatgtgaaaaaggaaaaaaaagaaaaacataggcattaatctcacaccattacattttagaagcctccttgataattatctcagtgtctactatctctgtagccaaaatctgagatatagctactgcataatgaagccaaacacaccataggaagagaatagtgtttttgctctgatactgcaagttagctgtatattgtgtgcagacatcaacgaacatctttaagcatattaaaaattgagaatacctcaaaagcattgactattttaatgataactttttttattttggaagtgaagcccagtttcttagccctttattgttgcatctatatctcaaaatgaggagcgacaacctcaatgtcctccttatgggcagaattagaatcccttgtaaagattattaagtgtttcttcaatacttgcttgaatagcaccctaagtggggggtcctacacctgaagtcatctggtcccattgtgtatagctcaatttgtcaggctatctctctctttggctgaatcttctctaagtattggagaaggacatggcaatccactccagtactattgcctggaaaatcccatggacagaggagcctggtaggctacagtccattgggtcgcaaagagttggacacgactgagtgacttcactttcactttctcctagtataccactgattagcaactgtttttacaacataaacagtgctctgtccagacattagtgcttcaaactttaaaaaaactcctctttatcttatttttcttaattttctcttttattgataattatcatttgttataattcttaatcatgtaacttgtttctagttttttatcatcctggacatcctgcttcagatttgccttaatgtatcaataatccttttacatatttcattcagaactgaagactgtattccaggtgtgagcagatagctatataacacagcaaagtgtgatagagatggtatttttgttagtgtaaactaatgctgatttttatagcaatcatattttagaacttgtcaactaaactcttgagatttgttttcagtctcatttcctaaaaaataattttagatagatacttaattttttttttttggttgaagagttaacattatttctgttaaatttcaacttctctttagggcttgaatttgctactcacaggtgtatatttataaccctaagattccaaggtctttacctcaaatggtcattacaaatatcgtaggcaattgtcatggactgcattttccaataaaatgaattccttctgtatgtcattgtcaatactcatagcacaatgcttctttctcacaaacttcttctaaccttccctaaagaatttaggcctttcagtcatgtttcagttcaagtcaggtacagactaaagggatgttttaagaattaagacctgtacttttctcctaaatgtggagcttttgccccaaattttaatttttccctaagaaagtaagattaaggaaaggagaatattaaaaaagatgcagtacattcagaaatgggatttttacacctacaaaataagcaggtctattcaaagaatcctcatcaaaataatcaattaacaagtaacattagagtcatttgtggtatagaagagggctagaaatgattcacactctaaaggagcaaatattctagccaggatatttagcaaaaacagatgaacaagtacattaaacattttacatagattattcagctaacaacacatcagaagctacagataagtggatgaataattgtgaaatgagtgtcacagatgatgaataacagggttgcatgtcagcatgggccaaggaaattctgtcaggatggatggca

SEQ ID NO: 57367 - DNA, 930 bp, Bovine  19866881755495
  misc_feature (1)..(1): n is a, c, g, or t
nctagtactcctatctggtttaaaaaaaaaaaaaaggcccagatggattttaggttggaagactcttactctctattttaagcatataacagatttatactgatatttctgcttcagttcttagccaacctcattcctatctgagactgcagggaactgaaggcttgatgaatatattaatccttttgcttatgtatcctgatttttcttctgcaaactcagtaatacctcattaatactttttatgctttaagaggcttaaagtgtgtactttgagtcaaaatacatcaatacctaccaatctcaaaagagactttgtcttacttattaatttgtttaaaatttagctccttaccttacctgcctactgagaaatctctatccaggtcaagaagtaacatttaaaactggacagggaacagcagactggttccaaattgggaaaggagtacatcaaggctgtatattgccaccctgcttatttaagctatacgaagaatacatcatgagaaattgtgggctggatgaacacaagatggaatcaagattgccaggagaaatatcaataaccacagatatgcaaaggacaccacccttatggcagaaagcaaagcggaactgaagagcattttgatgaagcaaaaaaggagagtgaaaaagctggcttaaagcttaatattcataaaactaagatcatggcatccagtcccatcacttcatggcaaatagatggggaaacagtgacacactttacttttgggggctccaaaatcactgcaaatggtgactgcaaccatgaaattaaaatatgcttgctccttggaagaaaagttacgatcaacctagacagcatattaaaaagcagagacattactttgccaacaaaggcccttctagtcaaggctatggtttttccagtagtcatctatg

SEQ ID NO: 57368 - DNA, 1112 bp, Bovine  19866880352850
  misc_feature (1)..(1): n is a, c, g, or t
natcaatacaaggccattctctgttctcagataatagcgttgagactcctggggaatgcagagtccatggcccaggtgacaaaggatcctcagcgagaaaaagccgtaaccagaagttattgcctaaatttttgttctctttgcattttaaatttcctctttagaattcattccagtctgcttgtttctctcctgaaaattcatgtcgctcttccaaagagttctgatggaatatggaatgagatgccctttgactgtttagctgtgaattgagagtgcagaactcactcttattaacacagcgtttcaatagtccatcaactattggaatataaattgaggatctgtagggggcatatattagctgattcctatcattcctttttgaccatctagacctttctctccaggagcaaataagtagaaggatgcatcaaatgactttttcagttccaagtgaatgaagcacaatgttaagtagctttaatcaaaaagtacagccattgaccatgtaaacatgaaattcagggacagaccactcttctgcctgggctggagcccacacctccagcagggcctctctctgtacttatatctcagcctggctcaactccctgcagcttcaggtgggtctcatcttcgtttgggcatcaggatctagacagtctcacagttacagcttctggccaagcacgcctagaggaacaggtttttctttcagtgtccacacgctgattgcaaaagcatctgcaagggggcctgatgaaccagcaccagtggccagttgttgttctgtccctcagtcgtgtctgactctgtgcaaccccatgggctgcagcagtccaggcaatccctgtccttcacaatctcctggagcttgctcaaactcatgtccgttgactcggtgatgccatccaaccatctcatccactgtagtccccttctcctcctgccctcaatctttcccagcatcagggtcttttctaatgatttggttctacacatcaggtggccaaagtattggagtttcagcttcaggatcagtccttccaatgaatattcagagttaatttcctttaggactggcggtttgatctccttgcagtccaagg

SEQ ID NO: 57369 - DNA, 1774 bp, Bovine  19866880510982
  misc_feature (1)..(1): n is a, c, g, or t
nttctatcatgttctttaaagggagcttcttaagcttttacaaatgaattaggtctctttcattggaaactcaccaggcagactcttgcaaagccttacagagcagccgggagcctgagtcattcaggatttaataagaatagcatttatgggcaaagcatcttatcggaacctctaggttagcgggttccagggccatttcctccggttctatttttcacattgattgtatctcggctcaagcacgtcatccagctgaaaattagcccgtgtgtttggaaagggcatcagaagcactgtgtggacgggcaagtttgtgacgatgttttctgaggacagacctataatttcagagctgggcaaaatgacactttgatggaaagtgtgcttgcaaaggctataaaacccggttttgcttttgaattatcccccagccccccaataaaacaaaccataaaatgtcagccggtctattttaaaaaaaaacagcacagaagtggctctgattcagactgcaaaaaagggccatggggacatatctgcacgtgtccctttgcagggggtctctgagtgtctgcaatcttatgcagcaataaagacaaatgaaaacctgctggaaaaggagccacgtctgtgaaatgaacatctgtggatattttacccctagggaaagaacatgctgttgacatcacggaggagtaaagggagatggacaggagaggccatgtttctatcccaaatctgctggtcctgaggtcttggcacaacgcccagggtagagcctcagtttccccatctataaactggataataacatgcactccaggtagttatggcgaggatgttttcatcctgctcactgttaaagcacccaaaagcgtcccaggtgactcagtggtagaggatcctcctgcaatgcaggagatgtgggtttgatccctgagtctggaagctcccctggagaaggcaatggcaacccactccagtattcttggctggagaatcccatggacagaggagcctggtgggctacagtccatggggtctcaaaagaatcggacatgacttagcgactaaacagcaacaaagtacctaaatctacatcctaactattacaggaacgttatcatgttctgaaacacagatttgacggtgtcagtcacctggtccagaaagttccgtatttcttcactgctctccaagggggtcgcatgtagagcattacaggcaggactggggaccgaatgaaggatggccagttctgagcacagacaagacctctatttgattagggagccaacttcaggttgttggacttaggaggcaactcttggcatcttccttcaggctggctgagtactagatgtttctgtccaatgtcagtggggatttatgagagcaaccagcccagtgccaggcccacaggatacagacttgtggttaataacatagggttgggctatcagattgggcaccagggaataggctgcaggcagtgaccaagctggggttaaaatgctgggattcaccttggctgtagaccttggtggccagctggcatccattcagcagaaagacgatgggggacgggcggatgagcttggttcttgcattttggggaaggctatggactgtccttccacaaactgggtaccaagactgcaaccaggcatcattgttaccagttagatttcacttctgtctctcatctctcccctgcttcctgtggaaagcagggaccatgtacagacctcagcccccaacacaatgcctt

SEQ ID NO: 57370 - DNA, 4244 bp, Bovine  19866880523523
  misc_feature (1)..(1): n is a, c, g, or t
ntagctgagactgaccatcctggtgcccaggagtgcctgtgacacactcacttgcctcaaaattctatttacccctcaagatgttcacagccctccccaggaagcccctcagctcccagaggactccaagcccatccccttgggagcccttatccgggatttcctgggcagcctcctcaccccacccagcccagaggttcctgggccctggctttcctcccagctcagcccaggagggcctccccagtgtgcccaggtctgtgctctctcagtgttggggtccctcactggcctcatggtggtggtggtggtttagtcgccaagtagtgtccgactcttgagaccccatggactgtagcctgccaggctcctctgtccatgggattctccaggcaagaatactggagtgggttgccatagctgtgtcttctacttcctgtgcatctgatttttcgacactgggatcttgctgaccttggaggggctgctccttccaggaccacatctaccattcctagatgagaaagcaagtatgcaaataaccaacctggagcccacacctcaacctcctcctccatctggcactaactctctgggccaccatgcccctgccttcatcatccagcaccaggtcccaggaaacgagcgactacatcccagagcccactgaaattattcaaactattagccaatcctaagcctgcttaccctgcctcacccattccttcccgtggaaaccacagtaaaggctcctgcccacacttttcctctcatgccctctgcctcctggctgacactggggcttctccatgtggccctgggggtgtgatgtgccctttccttttgagaactgtgatcaactatcatttcaatgacaatcttatcctgatctgttggccttatcgtacctcaaattttctattaatacactgtatcttaaaacagggcatacagctggtgaacgtgggtatttatactaaaagcttttaatatatttgtctttggatggaacatgagctgtctgggtgtcacagctcccaccactccctcttttatcgcatgcacactccttccagactcaggagactcatgagttggtatcccggccagtgatctcatgctcttggtggctgaaatgtgaggtggaaggaatgacgcaccctctgaagggggtaggaggtgtgtgtacccagggatggggccctggtgaactcaggacagggaggaagagtgggtttggttcttcaggccagcttcactctgtggaggctgtgaaggtgtcttcagacctcagcagaacccagaagtaccaagagagcccgtcagggcctgagaccccacctctcttgacacctcagtctgcagtgtgagagacagaggccaggagaggatgggaaagatggaggcaatgcaggagcaggagagatgcctacagagttctggaatgttcctgcctcgcatacctgaaactccacgtctcctgaccagcatctccccacttctcctcctgtcccctcagccctggcaaccaccgttctgccctctgcttctgtgagtttgacaacttctgatgcctcatgtgagtggaggtaaaaaggacatgactccatgaaatagggaccagagactgacaaaaaggacattcacttaaaaaggaaggaagggagtttttaaacattagaactgtgaaggcaaatttttaaaacatcagtagagtggcaggaagagaggaaatccctcagaactggaacagaaagggaagagatgaaaataggcgagataagatcagaggatgaggtggaatggaagcctgacaagagttcagaatggtgtgagggagaaaaccgaaggtagaagactttgaaagaagtggaagtgattggagaaatatctggaactgaaggacacgcattgccatgcaggcaaaggccattcacgtgcggacggatgaagagaggatctgaaagctttcagagaacagaacaggccacagctgaaaggctgggactagggaaggcctcagacttctcaagagccatgctgctactaagacgaccatggggcaaggctttcaacattgggagggaagacgcctttcacctagaattctagattcagccaaatagccaatcaagaggggggatggacagacaacatttcaaacagctaagtctcaaacaaaactattttccagggaccctttctcagaaagttactggagggtgtatgccaccaacatgaaggattaacccaagagaaaggaagacagaatacaagaaacaggagggacacagtcgattcccaggctgctgtggaagggagaccccagcagagcagctgagccccattctggagagcaacccacaaagccaaacgctacaggcaaagggagtcttcaaggggaaaaaaaatggaaacgttagacagcctaatatgttgacagttgccataggagtttacagttctggcgggaaatttggacatacattattaatgctacttaaaaaataaagtagaaacagcaacaaacaaaaacacttaaaattagaacatctgaaagagtggaaagtggctgccccggggtagccagaatgagggcgtggaggggcaggccggagatggctcgttttcactataagtaaaagtgtttctcactatgagccatctcatgttttaaattatgcacgtatgttagctacacacaaattgaatgtataaaaaggaagttagatttaaataggactgtgtgttaagatgcctcaaggataaattctcttcagcactggcaggggcagggtcccacgccggcagcttctcagagcctggtgtggagtgaaccaggttcagatggggctgagaagtagcgtcctgggagagaagtgaagtatcagctaggggctccacagcgtggactcaggtactcaagggatggacccttggctggccgaggaggtgagggcttccgagacctggtggggagcacagccccaggagcctggggcctagacgctcctttgtaccctctctgagatgtgctcactgggcccgggcactgaggtgaggatttagtgcagaccctgcaccccagagtctcaggagccacggcaaagtagggtgctgaacgccgcccggggcccttgcatgctgcccttccttcctggggagaggggcctccggctcggctcgagccagaaatctatacttctaatatgatgagattgtcttcccacagacatggattttttttttttccccgatagcccagccagaaagcaagtctgacttcccgtgtcagcacatttccctttcatcacgagccacgcacatgctggcctggcccccacagggagcccagacccccggcccgccccaggggtgacagccactcacgcaccctgcgcacagccctcggccggtccccaaagcttcatccttccttctctcttccctcaagcagtggacaccaccattcccatcaggcactggaaggaaggccacttcgaggatgaatgttgggggccagagaaccccaggccccctctctccacacattgcaggtgaccctcctggtgcagtgaccctggcttcctcatatgtgggccttgagtccccaactcctccaggcagtgtggccagggcctcagactggggggaccagaggcgtaggccatcagattggcctttgagtgcctggacagtcagccaagaccaacaccaggagctcccaccaccctgacccctccactgggtctgaccccatccctccccttcctaggcagacctttaaccttctggttcctcggctgggttcctcctgctccagctagcatgactattttttgtaaccattgggattgaaacaaaaaaggatttttctaatgacatttccctctggccccaggcagtggaggggctcagggaggggacttgtagtcttggaacaaggttaggagcagggaccaggccaggcggatcagggcttgcatgcacatacattcagatgctagaggaagccccctttccatccctcccagccccagaggcctgtgggcatttcccacctgcaaggtgccatcctgcttgtgtccaggcgtgcatgggcctctgtctggtacagtggaggctgtccaaggaggcctggtccagtctcagaggagcccacattctggcgggaggggacaaggagtgcagagggcacagaccaaggtgggctcaggtgagcaggcggtctgcagggtctccag

SEQ ID NO: 57371 - DNA, 1806 bp, Bovine  19866880576538
  misc_feature (1)..(1): n is a, c, g, or t
nattggaaaaaagtggaaacattggcagattttatcttcttgagctctaaaatcactacagactgtgactgcagtcatgaaattaagatgtttgctccttggaagaaagctaggacaaacctggatggcatattaaaaagcagagaaatcgctttgccaacaaggtccatatagtcaaagctatagtgtttccagtagtcatgtatggatgtgagagcaggaccatatagaagacggagagccaaagaattgatgccttcgaattgtggtgctggagaagactcttgagaatcctttggacagcaaggagatcaaactagtcaatcctaaaggaagtcaatctgcatatttattggaaggactgatgctgaagctgaagctccaatactttggccacctgatgcaaagagctgactcattcgaaaagactctgatgctgaaaaagattgaaggcagaaggagaaggggacgacagaggatgagatggttggatggcatcaccgactcaatggacatgaatttgagcaagctccaggagatagtgaaggatagagaagcctggagtgctgcggtccatggagtcacaaaaagttggacacgacttagtgagtgaacaacaaacagcaactacctccactcccctagccttccaagagactgaaatgaaacagtaggtgacaaatcactttgcagactgcaaggggctatgatggagaagccagggtttctggtgagtcctgaggtctcaggagatgggtccctgaggcagctggctctgatggacggccaaggctgaaatcaactgaggctttccaggtgtcacagtggtgccaccaaccaaggatgacaaagagtccctccccaaaacaagtcagaatgagtgttttagccattgtccataaagtgttgcaaagggatcctttttaattcatttgaatgaattcgtgttatctgagatggagagagaaatgacaactcactccagtactcttgcctgggaaatccacagacagaggagcctggcaaagagtcccacaggacttagccactaaacagaacaacaaatgttgcctgagatgctcattactggggtgaccaccactgaggggctttctggaacactggcctttcggaagaaaaatcaaaaacaaaagacgaacacggttcaaggagacccaagacaagctggtctccctaattgctgttactttaccattgctattaaatcccttaaatttactctttatatcttcctctataatccatagcccatgccatcatttcccattactagcaattctcattcttaataagcactgcatgacttccatgatagttttacagccggtacatatttagagtctctcattgttcccctgagacatgcatttgtttctggttgctctgaggcactgatggacattatatctcatccctgcactccctagcaggtgaccttgagggatccaaggtatttctgtcctcccagtttctggaggtggtcacatctctaatctattcctgggagaacagagccattagtcccaggaacaaatgacaaccacagaaaacctcctggggaaacagaaagacatgggtgccttgttctccttcacaacaagggcttgacggaggcaaagctgtaacttttacccccaaccaagccccctctccagccttccatgggtgaggtccatccaggtcacccacctgcaacaaagatgcagaatcacattgctcaatctgaatgcagactctaccacaacttcacttgatttaagtaattaaaatcatgaagatgctgaa

SEQ ID NO: 57372 - DNA, 1421 bp, Bovine  19866880592795
  misc_feature (1)..(1): n is a, c, g, or t
ntgtcattctcacaccaggatgtggacaatgatgtcttcggatgtgaaaccttcagacacgttggactcgactcaccacggcaggacacagaccagaaacttacacaggtgtctgttcaccaggattgaaacaaaaaaggctttctagtcaacccccaaaatacaactcaccaggacccgccccccgcacccacccagattcccagagcctcaaaattgccactgaaacagtctctagaaagcattcataacaggcttaccatgttcgtccagcaatatgttgtctggcttgatgtctctgcaagagaaaacagagaagctgaaaatatgattccttgagtgcatggaggagcacatgtcaaacacgacagctgtggacagatacctgacaacacccagtgtgcttgtatctcccccagcgtgaaggctcagacagcaagcaggacggttattattattacgaaagcagagccccatgctcttacttttctcttcctggaactgcaagtggattgtgtgagtatgttttttcctgaatttttaatgatgtctggccagttgactcccaggagtgactgctcactgagccctgggtctcttcggtgggtacagacaattttgcttcctggtggaatttagccctccctccttggtaggtactaacctcccaggtttaatgtcctttgttccatagacctgggaattgcagctctaggagggtcagtaacttgtccgggtcagagatggaccacagcctctgctagtttttgtatgatctcaggagatgggacatttattatacagaagtgaacggagcatgcatttctaaaatctgtgattttaatatggagcttcagaaagcacatgcatgttcatgatgagtacatcagggttgaaggtgtcaattgagtttcttgaaagatcacacccagcaatcaaccagtttttgcagtttgtgagcttaggaggttttctacatttttaaaggattgtaaaaagcaaaacaagacacacacgtagcacacgaagcaaaaatgaaaagaaatgtatcacacacactgatgtggcccttaaaatctgaaatagttattatctggtccttttagaaggttgctgatccggtttagggcttccctggtggctcagatggtaaaaaaaatctgcctgtaatgcgagagacccaggtttgatccctgggtcaagaagatcccctggagaagggaatggcaacccagtccagtattcttgcctggagaatttcatggacagatgagcctagcgggctatagtccatgggatcgcagagtccgacacagctgagcaaataacactttcacttttagggtaacagtgggccatgtgcagcaaaatctgagctaggcagtttctgaaaaattcagctctcctcatctttaaagcaa

SEQ ID NO: 57373 - DNA, 2686 bp, Bovine  19866880611318
  misc_feature (1)..(1): n is a, c, g, or t
ncaacaggcaaaagactctgaaccacatccttttctaggtctgcagggcccacagggtcaagtcagatgagtaccctggccctacggagttctcagtcttgtagggctgaagaaccatgaatggaaatgcccttgaggcataagagaaaaggaagatacttcaaagaagggaaagccaggtaccgaggggcccacagagatgctccacttgggaatcagggaaggctcctgggaggagcaatagcagaagggaggggcttcttggtggagtagaatttgggcagcagaggtgagcaaagaggcaattgggaagcaaactcactcttccacagccagtcccacgtgctggtgtctcctctcctttgcagagccttcacacccatccagagaggttgagtaacttcctccaagtcactcagttttgttggtagaggcgactggagaagttcaggtttcatatcctcagagaggccttcctggactgcttctgcgggtctccctctgcctgtctccctcacgccctgtctggtcacgccttgtctaccccactgggaggctggctccaagagggcagtgaccttgcgtggctccctgtctctagcacctggagcacagcgggggcccaaagacttctttcctggggttccgtgtggtgggcacacattctggaccaggttccctggtccctgactctctgaggtccttttgtctccggatgcctctctctcagctgccttctgactccaccagcctggtcttccaggtgtgcagggcccatcagctgaacacagctcaggcctcctggtcagggcgggcgtcccccctgcacatttctgatcgtcttaggagacgcatacggagcaagaagataattgaaaagattatccggggatgggactggtggatggttgatttatcgcgtgtcatccctacttcagggtttttattagaaattgaagaatggcttcccaacttgagcctcggggctgcgtttaacctccagccgtcatgccgacctgcactgttttccaggctgtctgcagtcatcacatctcagagctctgggtgtgatcccagtagcagcagcagctaccctgcgctgagacccagcctccccgcttctccttcttctctcctccctcctccccttcttctctcctccgtccagctccagctccccacctcctccttccacttctcccttcccttccctctcctttctgtccttgggggagttgaaggaggtggttggtaggatgggagggggctttactgagaaggtggaggacccgtaccgatgttgaagtcgactccagcctagatgcttagccattatccgggactcggctcaaatgaccttcttccatggggccagccttgattctcccctcctgtgtgtttccagaactcctggctggcccttctgttcataggaatgcattcttcccacctggcactgcagttgcctcctccctctctgtaggggcagaggctctggacgagggggtgtagtttggcaggggcttgacccccggggggagtgggagcaggatgagaggccctgaggtgggggcagctaacctgttgggggtcaatgacaaacaaggaagatcggctggggaccagtgtcataatccaggtgagactacaacctggttgagctgtgaggctttgagatccattcctttacctctctgaatcttgtcatttctcatttatattctggtgataatgacacccaccttagatgctcgccttggaacaatattgtcaactggaccagcccatatcaacttcatctgaaatgcagatctcaggccctacctttgacttgtcgctgatttggaaagtctggagtggggccaagcaagccctccaggagactcttgcacaggagagtagctgctgagagcaatacccgggataaggcaggtgaaggcgttggcgcagagaggcagtggggactccatgtcccttcttgcgtgctgtgatgaagccatgggttttgttctgatggcaagatgctgaccagaaaggagtgtgtgatccggggtctgtaacagcaaatgccggcagacacacagatctgcagagcgccttcccttcccaaggcctcctcgagcttcaaggaaggaaacagcccctggggcaggccctactgagggaatgctggaagctccaatctgagaaggaaacagcccagggttccaagcagcctgggaggaagccttgggaaggaagggcagcaagctgcttgagaatcagtgcagggtgatctgagctccttttgtgttccgcctgtttctcatcactagacctttctcttagagagaggtggattgcccgtttactacccttaaggaaggtgggggcccagagctgtgcaggtaatggacacctgcacctgggagagagagagagaggcaaggactgacagttcctactgtgggccagagatctggggagaagcctgggtgaagacagaggcagagatggggacgatacagtcacaaggaaaggaacgccatgggaagtgaaagagcctggaacaccttctctcctggagccgttggaaggcacaggttcagctgatgccttgaccttggacttctcaccgccagagctgtgagagatgagctttctgtggtttaaagccctctatctgtgatcctttgctatgtcatcc

SEQ ID NO: 57374 - DNA, 1325 bp, Bovine  19866880669206
  misc_feature (1)..(1): n is a, c, g, or t
ncatgctggacactagaaaacacagcctttagagtccactgattcccattcccttttctttgtacaaatgagaaaactaagcttaagattggttaattcactatcccaagtaagcacaactaaagcatatcagagtcagcctgcttcccagatcgaaagtgtttccactgagatatgtagaaattcatctgccatgcctcaactgtcctagaattaagtcataaaagtgttataaaactcttcagtaaattcttgctaaaaccaatggattgcctgcagctgtttactttggtgcttcactggggaagcacaatctaccccccgcatgaaagtcaaataagatttctgcaaattcacatgtgctttttcctgataaccaaggctactgtcgtactttaacagtgaaatgtctttcttgaaaactcgtaataaatgccagctatcaaacccaccaaaggctgaaagcaaagccaaagtacccattcaatagtaggaggggtggttctcttcatcctagcccagcacacttccaccctgagtctcataatagtcatgtaggctcatctacattgacatgaaaagcagtagttatttggtattttgaccagaacagagctttgtttgattgccttgaagcaaccacatcctgaatactggctgtttgtgtacgttctacatgaatttgggtgtcatcaagatactgccacaacctaagagtgacttaaacataaattctcctctagaaagcttgcatttttcttcagaacacccactatacccaaagcttgaatatatttatgctctgaaccacaggttctgagaaccaagccagcagccaaagagcagcacagatgaagacagaaaaggaaaagaaaactttcaggatataatcaagtaataactcatgagggcccaggctaacggatctgatagtactgacaggaaagggtgcaaagggctcagggccaagatcaccactgactccagggtaaaatgatacacttctacgtggtgccagttgtgttgtgggttaagggagttgcttcaagttttcttcagccacaaaacgctcaacattagggtaagtgacaacagaaagtaatgatttaagagaatttttaaaatgttttgttgttgttgcagaagttcagccctccccatgggactacaggcaaactttctaaattctctggatcataactcttctaagaaatctagagaagaacctcaaacgcagcacataaactctgtccacgtttctggctgaagtaactcacatgcatagagcagactgtaagcagtacagagcagaagaaaaaaagaaa

SEQ ID NO: 57375 - DNA, 1073 bp, Bovine  19866880699871
  misc_feature (1)..(1): n is a, c, g, or t
ngaggggcaagggggctcagattgagggaaaaaaacttcacagttcaggagcccgttcagaattacatattgcatttagttgtcatgtgtgtttctttaaaaattatataagttgctttttacttggtagtggcctatgcttttattcattcatttccatttcttgctattgtgagtcagtggcttgcaatttaaagcttttctccccctgagaattataactgttttttaaatgactaacagatctggtgatggaaaacacagaagtccacgcacacctggatttgaagcccaaacctaccatttttagatgtgggatctgggcaactgctctacctccttgagcagcaattttcttttttttttttttaaatgaaactttattattgttatttttcgtatgtacaatattacatttctacttctgtaaccaccacagcatgctttgggatcacctgcaaaccttaaatctgccgatgctgagggtcgttgaccccaggaagtgggctcatcgttctccgtcctagactcacaagtggaaatcagggggaaaaacaggagagtgactaaaacagtaattaggggagaacagttatgtttaaatctgaaacactcattagtcttgaagaatggaaaccttaaaaggcaatttatatgcaaacacttccaatgttctttctgcaccaggctgcactctgtcattagcttgccaaagaccacctctaagaaagatttttccctctgcctttttcttctttcttaattgccatgctttctccagcttccttgtcaaattaatgcggactgaagccacgttcttacccagagccttgtccggcaacaaaaccgtgcacttcattattccgccagcccctgatggctctggatctcagaatgtaaagccagaagcagccttccaggtgccatgcacaacggcctcactttcctagtgagggagccaaggtctgggcaggagaaggcacatgtccagggttagttccttccttcatcttttatctgacagatgttattaaatatttattgaacaaccagttcacacttggcacaaggga

SEQ ID NO: 57376 - DNA, 1052 bp, Bovine  19866880701862
  misc_feature (1)..(1): n is a, c, g, or t
nagattggggtgctttgagtgtttgagctgccactgattcgggctgagcttagcaagagacccttccccttgacatccctctgcgcacaagtagaatgagggcctggaccagaagctggttaagagctttttaacactcaggacagtggagctggcacatgggccatcaggacagacacccagggctccttgccagcatggtgcaccacccatgggacatggccatccgactctacccaagcctggtaggacctgagttcccccgccaacttccacagtccccatgctcaccacacagacacacatcttacccagccccgcagcagctcgtaggctgtgacacccagggaccaccagtcaacggggtaggagtacccagggcctccgtccacatacacctggaacacttccggcgctgccaaagacaggacaaaagacatcactgggcatctcacttgacatgcatcatgcccaagaaggaggacatggggccaggagctggactgtgaggctcacatcccatcgacgatgctacgtagttactaccatctgtaagtcacaagccagcttgagacaagctgcaggcaacgcaagcaaccccatgtgacacctggggcagaatacagacagggcgccccgctgcagagggcggtctgctggggagtcagggaaagcaggcagggaggagggtttggtggagcatgaatcatggtcagcatggggaataaagtctgagttaagaggaagagcctacaccgtcacggagcaggaccctgtggggctcctgggcacaaagactttctgtgcccgccgattctttgatgacaggaaatgagcttcactcagtgtctgtgaccttcccttagctccaacctgtagtttcaaacagatgcaaagcaaggatgggaggggatgcagagacaagggaggaacagactagaaacaataatgcagccttggggcagagtcctggtcccctcccaagcgatacacataacattttggagctcttctgcagatactaaaacccccaccaggtgggagaaattaag

SEQ ID NO: 57377 - DNA, 1510 bp, Bovine  19866880737804
  misc_feature (1)..(1): n is a, c, g, or t
ngggaagccgcagtatttttaaggtgatgtaattacctgttcgctggtgaaagtgattttggcagcagagcacctgatagactcattatggagtgcaagtgtgtctattccaggaaacccagtttacaaaaattccaatttaccaagaaacagaataagcaggaaaagaattgccacagacctgttattttaactgctagagctgagctgggccttggggaccatctcatccaatgtttttcccccaaaatctttttgctcaaaatccaaaacatagaacagatgcaagtgaagaacagttccccaggttgcttaaacctccagcagctggagaaatctttttccctctatgaactgttgaatcattcctgcagagtcctttgcttttaggaagcaaagcttgaaaatcccttgctttatgggaactggaggagcaaggtcagagagttcacttcaccccaggtttctaacttccagctcagcgatctctctgcttcactgagggataggaaggcagcgttcgactcaagggccacctctctcactttgctgggttaataaaccaatagatgctcgtctctgtggttgagcccaccacttggcgtgcatccagaggttcttagttctgctgcaaactgtaggccctccatgcatgtgtgtgtgtgtgctcagtcgcttcagccacatctgaccctttgcaatcctatagactgtagtccgccagactcttctgtccacagactcatccaggcaagaatactgcagtgggcagccagtcccttctctgggggatcttcctgacctagggattgaacctgggtctcccgcattgcaggcagattctttacccactgagccacctgagaaaccctaggacctccataaccctcctctatttcccatcacccccaccttctctgtctactgaaccttaaggagaaatgctgactggagtcaaagccaagggtaataccaggtgagggaggtggttgggaggaagcagagagggtagaagtcttcacggtgccatagtgtggattttagggctctacctgcggctgcatgcaaagcgcattgtgccaggtcatgggcacaatgtggcctgacgttcagaatctcctttcgctcatgcccttgagtactctggcagtggttctcaactggggataatttgtcccctaagggacgtctggcaacatttggcaacatttcagttgtgggggtgattccagctggtctctagtggttagaggccaggaatgctgctaaatactctctaatgtacaaggcagccccccacacaaaatggtatccagacccaagcaaccatagagctgaggctgaggaatcctgtgctttgcaaccaccagcccagaccattcaagagctgcagcaaaactgggcattctccagggaagaatactggagtgggttaccatgccctcttccaggggatcttcccggcccaagggttgaacctgcgactcctgcattctacttgtggggagag

SEQ ID NO: 57378 - DNA, 793 bp, Bovine  19866880746132
  misc_feature (1)..(1): n is a, c, g, or t
naactgtgagacaaccacttctgtggcttaagcacccaggctgtggaattttgtcacattggcacaagcaggccaatatggttggcttttgtcctgaggacactggggaaatacagaagggtttaaaaagtggatcccagctatacaactgtgaatgaaagaataaaggaaataacatacaaacatacaacgtggaagatatggcatttggggggaggggaatgtttttctaacaacagggtggagaggagtgtggaggtaattccaagagtgttttataaataatttattgccactgcttacgcacacagttttcctcaggagtcataagggacttgctttgttaggaaatgccaaaaggcgtcatggggacaagggtccaggaccagccctgttacttctaacccccttatcctggaatgtactctctaggatgaatcaaggttggcaccggtttataggcagagaaagtcctcaggaagctcatccagaagatggactgagacgtcattgtgggaaaatgggaaatgcaaatgagtaatgacgtctgttactaataaactggtcagtaatggatcatttgctctggccaagcttgaaagccattcacgagtgagcctgcatttcctctgatatttagctcttaaagcagtccatggaagccagcaaattcctctaacccatgcctcaagccaaacacagactaattaatatgaaaggaataagtgtgtgtgcatgctagttgctcagtcctgtctgactctttccaaccccaggactgtagccggccggg

SEQ ID NO: 57379 - DNA, 3022 bp, Bovine  19866880752530
  misc_feature (1)..(1): n is a, c, g, or t
ncatataataatcatagtagccatagtttacattgaacatctatcaagtgctggtctcccatgctagatcccttcatctgcattatcgtacctttttatcataacccttttggaagtggctgagtgccaaagaattgatgcttttgaactgtggagctggagaagactcttgagtgtcccttgggcagcaaggagataaaccagtcagtcataaaggaaatcaatcctgatattcattggaaggactgatgctgaagctgaagctccaatactttggccacctgatgcgaagagcagactcattggaaaaattccccacctgatgctggggaagattgaaggcaggaggagaaggggaagacagaggatgagatggttggatggcatcactgactcaatggatatgagtttgacagtgaaggacagggaagcctggtgtgctgcagtccatggtgtcgtaaggtgtcagacacgactgagcaactgaacgacaacaacaacattctacataggagaaaatagtttagaaactttaaagaattgtgcagagttgaaaggctaaaaagaaatagaatcaagttgtggcccctcccaaaggtctacttccaaaacccagaccatttcatctttgccccaaggacaatatgtttgttcttacttctccaaggacaatatgtttcatgttgctgctgcaaggagttttggtcaaatatgtgaattttagagactgactgcctgatgtgggtgtaacttcgcgtttcctagaaggcttaaattatgcatcattgaagcgcttccattggaaagttaaaatgtcaaacacacgcccacagctcagcacatacgtaatctagcagccatttccttgaaaatagcatcttgttacaaaggcataatgtcgctgactgaatctccagcctacgtatgcaaatgtaggttctctaagtgcatttgaggaaagaaatggagtctggttggggccaatggcttgagcgctgagacatcccccttccatagctccaggcatgggtcacctaacaaagaggccaattcagcactgcagttcagcaaagatgaacatggggtgacccctggatcactctgcaatgagccatttccttcttttcaggatagcgagcatgtcttttcaagtcatctcaccatcctggacctcagtttcctcatctgttcaatggatataataattgtgcctgcttcataggattgttgcagaggttggacaataatacacaggtctgtatagtcaaagctatggtttttccagtagtcatgtatgggtgtgagaattggactacaaacaaggctgagtactgaagaattgatgcttttgaactgtggtcctggagaagtctcttgagagatccttggacagcaaggagatcaaaccatccattcctaagggaaatcaactctaaaaattcattagaaggactgatactgaagctgaagcttcaatactttggccacctgatgcaaaagagccaactcattggaaaagaccctgatgctgggaaagattgaagacaggaggagaaggggacgacagaggatgagatggttgagtggcatcaccaactccatgaacatgagtttaagcaagctccaggagatggtgaaggacaggtaagcctggtgtatgctgcagtctgtgggattgcagagtcagacaggactgagtgactaaacaacagaaagtgctcagagcaatgagccagcattcaatgaatattagttatttatcatcatcattcattatcacagtgcagtcagttcactctggagtgatcactgactttggtgtctggtagcttgcagatcaaatgcctgctctgttgtttattagtcgtgtagcctcagacaagtccttatgctttctgaaccttagtttcttcaatctttctaaatgctaggtgcactgctaagcacttttaatgctttctgtcagctcccaacaataccaggagatagattatagattaaggttcaaagaagttagggattccctggtggctcagatggtaactaatctacctgcaatatagaagacccaggttctatccctgggtcgggaagatcctctggaaaagggaatggttactcattccagattcttgcctggagaattctatggaccgaggggtctggtgggctatagtctgtgggctcccaaagaatcagacacgactgagcaactaacactttcagagaagttaagtgaattgctcagtgtcacacaccagtagttggtggaacccgatttaagcccaggtctttctgtctccaaagttctttctcttaaccacctcactaagctacaggggttggaaaccctatgtcagagggtactagggaggtctaagcaagatctgaaatgtcaaatgccagttaacagtggttaaaatgaagtggtgctcaaatatcctagtagaaatattttatcattatgattatggacaatagccacatagctgtcccacccctcttttccccttccccttcctcatcaagcctttcccaggatgtcctaacccattgtgcgtatcttgcttttcacctcgcctgtccttacgcctgcatgacagcccaggcctgtctgctctagccttcttgtcctgggccctgctatcctttctgctccaccatctctgtatgttcgcaccttagctggtcttacatcaaaaatcccaaacccttccttttccttggagacttttcttgccctcacctcagactaaacctgaactcctgtgcttttgcattcttacaagtgtgtatcatgaactccacttggggcttgattgacttgccagtcattcccttgttagacattagactccatgaaggcagagatgggaagtggagttcacagtcatgtgcccaaccctgcagtagccactggtggatattcaacagcagataaatgggcatttaatacagtcttaaatctgttccttgggacatagtaacacattacacagtgtacaagagtgtattttgatta

SEQ ID NO: 57380 - DNA, 1516 bp, Bovine  19866880788576
  misc_feature (1)..(1): n is a, c, g, or t
ngataagtgtctaaaaccttggtgctggagattggctccaaagagcctagtacttgtagagctcaatgtgaggttaactaatttaatccattgtcaagttcagtcaaagagatgagaagagaacatttaatttcaagacgcgtaataaaatcttattaaggtgggctccactaattcggaacatgaagcaattcagagaggtaaaatgaagcttttgaggagctgatttataatagaagcaagattagagacaccagttccaaaccacataggctactaataagttttcaaatattcaggtgtgtatggtcacatagcaaccaagatatgctaataacaaatgttattattcattcattaaatagttcattaaaatattttccccatggtaccgctccctctctataccttattagactttctactccccgcacaatgttgatatacatgggcctgcctcacttgagctgtttttgcacgaatcaccgccacgcatccttaaattaaacagcactcactgcatgcctgatgttcggatgctccccggatgtgtggttgagaaaggcggatggccactcatctgcatttgaacgtctcatacagggtctctgtaaagcttgagatgcctttaagcataacatccagacctgaaactggtgactggctcagggttcctcagacatctcattattcctgatacaaagctcaagagtgctggcaaaatggaaattgttagagtgctttagactgatgttccctctcactgcacctcatataaaagttcaggattgggagggagagacaggatacaccttctttgtataaacactgtgcacagcaggaattctaaaccagttggacatcaagatctcccactgggggaattccctcgtggtccactggttaggactctgagctttcactgtcaagggcctaggttcaatccctggtcggggagctaagatccaacagccatacagtgtggccaattaaaaaaaaaagaaagaaaattaggatctttcatcgtgtctctcacctaaacacaaagagaagatacagagtttggatgcgaggcacctctccacacatggtccctttaactggcacctccttcctcttcttttttgctccctgaaaccctgcctcttcctgggaatagactatgatgttggcatggtcaatagatgatgatgctggcatggtcaacagacatgacccacggaggactcttgggctatgcggctgaatgtcctgcaatggaggtgggtggggtctatttctaccctccctcctgcccaaaccaatcagtcccccagagactgaagcatagcagctctctttcacttgtccttcaggacacaacctcatgtattcactcagaaagaatttattgaacaaatgcccaataatcttctgcaaaaaaaaaaaaaggcagtcttattgggaatcaaagacacatgcattaaaacaactataagagatcatcttgttttgcttctgaaattgcctggtgaga

SEQ ID NO: 57381 - DNA, 1059 bp, Bovine  19866880832348
  misc_feature (1)..(1): n is a, c, g, or t
nataaattcaccttttgcctaagtatttttagattcaaacagtttaactttagaaagtcttgtattattacgtataattcacacagcaattctttagcttggactatctcttataactccacttattttatagacagagaaaatcaagacccagggaaaggctatggtttatcaaggccacagggtgagtcagggctgcaagcaggtcctgctgctggtgttctgaatcagagtccaaggcctgggtgatatgtcgcctgtggattctgggcagactgcatgtgaaatacagactccagccttggtgctagttctgtggcctttgctcacagttactatgtcttctttgcttcttttagatattataaggttcttcaaaagttgaggcttttagaccaaaatggaataaatttaggttattggttatgaaaaatttcaaggttatgaaaaagatattatccgaatagagtagatagagctctatccagatagagcagagctgctgtaaccagtcatagaatgtcacgtggagaaatgcgtttggccacctttcctattgtgactcttcctttgttttctttattaactgatttgcttgctaattgcgacacacgtcctcgtacctatggggctttggctatatgagagatgattctgtgacgtgtttactccattattgaacatacaaaaattccatattcattgctaattgggtcatctcagttactaaagaggaaaacggcctcctggcatattcagatgaaattatcagtttcaaaatattcatctttttctcttctccctgactacttcagtggaggccctcacaatatttgcgtgaactaacgaatccaagatctcctgattcattcccctgctagagacgccttctaaaacaaaactcaaccatgtcactttgcttcttagagggagggaggtgggagggggcttcaggatggggaacacatgtacacccgtggctcattcatgtcaatgtatggcaaaaccaatacaatattgtaaagtaattagcttccaattaaataaaaaaatttatat

SEQ ID NO: 57382 - DNA, 1890 bp, Bovine  19866880872529
  misc_feature (1)..(1): n is a, c, g, or t
ntgagctcatagcagagacattacttctccaggggtggtggctggtggcctggcaagggagagccctggcagatggaggggctggcaaatggaggcctcggtaattgaaatgactgatggtgagtcatgcacacacgagcagagtgggaacagctgtggagggggaggtggaaggcccatctgtggaacctttccagaaacccagatctgtttctgcagagacaagacagcattcatcagaaccgttctgcccccctgaagacagacacacacacaaggaagaggctgagccagggcccgggaagaagaggaggttgggggttgggcctggggtgccttcatctttgagtttcattggctatattctctgctttctcttttctctttaattccctttatattgttcattccacctgggtcacagtgccattgcaggttcatcccattcttgatccacttgattctgaacttctttagatggttctgattttccatgttgatgggttggcaaactgactcatggaacaaatctgatgtgcctactgtttttgtaaataaatttttattgccacacaaccatgctcatttctttatgtgttgtgtgtggctgctgtcacatgaccaaggcagagttaagtagctatgtgtcccacagactgaaatatttacctcacagcccctatcctgacccctgtcatctcccatctgtctccatcttctccaacttcctggagaactaaagcctctttgatatgccccaggctgatcctgccacttttgccagctcagactagtgagagcagaaccagaataagaaataggcttttatttttctagccatgtaacaaagagaggcccatgtgatattggttgtgtatttgttgtctctcatctggatacttcctttaattccttcttttttttcctccctccagctccccactttttaatccccaattccttttatgtacatttgttcaaaaacaaaacattatctgagttgctatgagttgctatgatgttacaggccctgctgtatcggtcaggatgggctaagctatgctgcagtaacaaacagccccctcttctcacggtctctaaacagcaaaggtctgtgtgttgttcgtgctacagttcatccagcctggcctggcagagggtcctgtttttcacagggatccaggcctgtaggttgatgatatatggagatgtatcatccatggtgggccagagggaaaggaagctcagctcccaaacaagaagcatccatctctggtcacagctcagggtgagttacagggctctgtccaatcacaagggggtcaggaaacgtgtttcgaccacgtacctaggaaggaaggagaactagatattgttgagtagaatgaatgataatcaaacaccggtgatatagagataaataagaataaatcatgatctctgttctggaggagaaccaagtgtcacacatgatttattgagttcttactgtatacacagcattttgtagttgttatgacctttgatcttcacaccagtcatgagaaatttccccacttacaggtgagaaaactgagccccagcaagactaaatgactgaatcactcatgggtgggacttttaggcataattctggcttcaaactagagctctgtctctgatgctacaagagcccccaggctccctggtcaagctctgtctttgaattcccacctgtgacttccaatgcctggtcattgaggtgggacaggaaggaagatccatttaagaattcattggtcacctcatggtgggttggaaagagatgagagagtctaatcttggcttgagtcatccaaagcaatcccttccacttaatacgattgtgttgttcagtgtctgaccaattat

SEQ ID NO: 57383 - DNA, 1294 bp, Bovine  19866880901876
  misc_feature (1)..(1): n is a, c, g, or t
ncatattgaaaaagaatgcaagcagacggtatttactctaagtgaaccagaatcaagttttaaataaaataggcttaacttaaaagataacaaaagctgatctagcagattaaaaaaaaataaataaaaaaaacacaacggtttggcacagaagacatcctaccccggagaattatatgagcctcctcagcatgaccatgctacataaaattacaggttaaatctgctggagtttatagctttaaatgcaagtctggtgaatgcttaatcattctctctgtgataggagcagcagccccgagaatctactcaggaaaactgaagtcagaaaaagcatcccagttcttattttctgtgcctctatttggtattcgagacgcaacacaaaatcgtattctcaatcccttgtcagattcataggagcagccctagactgtaacttccctggtttatccacagttaaccttctgtggacagaagacagatcctctcagggcagagaagcagatggcttttattttattgatttattttgcagggagtcaaaagaccgcacaaagccttaccagcatgtgagccaggcaagagagccagatctgtaagctggctttgtctagaacatggctaacatcaagtagctcagccacgctcattcaggaggctgagtgacactccacattgtgcaggagaaaggagagtgaggtataatacttacttcagaataattcagctggcagtacaggactgattcctgcagccacaaagagtcatgaagagagtttctggaggcttcccagcctcagctgtctgatagggacagcagagtgatagagcacaccaccttgtcatctgtaccccatttccacatctggaggtcttcctggttggaaatgagtcttggtggggaggctggggtggtcagattaaacacctgactctgtctccttgaccaaaggcctcacccagacccggtaggagaatggagttcttatctgtcttctttgggcagtgggcttctgaagacaagggtccagtgaaatttcctccgtctttcagcacctgaaaaatcttttttggtaaagaatattttatggagttgtaagtaggaagagttaagagctgaccttctatgtggaatgaaaacataaacctctacttacctttgaagcatatatactatgtattagccttaattatgcatatggattcacttacatctcttctaaatctatagctgtgtagctcacataatccttgggacaaatataattttatagatatagacacagagaac

SEQ ID NO: 57384 - DNA, 1613 bp, Bovine  19866881039972
  misc_feature (1)..(1): n is a, c, g, or t
ncatttcacatgatatactctgtatataagttaaataagcagggtgacaatatacagccttgacatactccctttcccaattttgaatcagtccattgttccgtgttcagttctaacttgttgacctgcatacagattttgcaggaggcagataaggtgttctggtattcccatctcttgaagaattttccatagtttgttgtgatccacacagtcaaaggctttagactagactagcctagcctttttgtttagcctagtctgccttaaatgtgctcagaatgctgacattagcttatcattgggtgaaatcatccaacacaaagctcattttatagttaagtgttttttttacctatttgaatatctacctttcacactggagttttcctcaaatgtttagggatgtttagtggcttgtttggatgactggattaagtttatttatttattttttaaatttatttattttacttggaggttaattactttacaatatgatagtgcttttgccatacatcaacctgtaagtgttgaatagctcatgtagtttattgaatactgtactgaagtgagaaacagaatagctgtctgggtgtagaatggctgtgagtatatcggctgtttacccttgtgaacttgtggctgatggaactgcagcctcttctgctacccagtatcatgacactgcatattgtatggttgagaaaagatgaaaattcaaaatttgaagtgtggtttctcctgaaaccaaacctattgattcttgattctttttctttttctttttttgttagttgtcagatatgctaattccaagagttctttctccttctctgatggttcctttttcattgcaccttattgtgtttttttgttttatacagtatctcctcctaactctctgaggatattaattgtagttattttgaagtttcctcttctctgcatttatttctgtttcctctgaagtcctttgatgtttttattttctctctgcttttcattttgaaggttttcttcaaatggctactggtcattgataaccattaactgatagtgaagaaggaggcaataaaaaaactggttggtaggtcctgggcctggagggcaccccggtggagcatcagacagctagagctggtggagaagctcctccatgggatgatcacgctgcaactggacatgtcagtgtctgaaaatcttcactctctggggcctcttcagtcttgtgaatgggtgttgatcttagcctggcctctgaggatgtggctacaggacaagacatggaagttgggacaccttttatgagtcagacctttctttattcccctgctcatttcagccatgtgcacatgtccacccttccctgtgagtgactcagcatcataaggctgggagtggatttgtgggtccaacagcgtaggtgaagagtgtcagctctacatcccctagcacagcccatcttcagtggaccccagtctttccgtagctggagattctctgaagttctgtgagtaactggcttgccaggctcccctaaaggagcactgacataagaccttccaacagtccattcagttggctcctccttctgctggcttttttttttt

SEQ ID NO: 57385 - DNA, 1429 bp, Bovine  19866881204197
  misc_feature (1)..(1): n is a, c, g, or t
natgaagatacaaagccaccttgccaaaaagcctaagaattacatgactggaggtaaaagcaggaccaccccacataattagaggggtccagtgcaaaatgagaaggcagtggcaacccactccagtactcttgcctggaaaatcctatggacagaggagcctggtaggctgcagtccatggggtcgctaagagttggacacgactgagtgtcttcactttcacttttcactttcatgcatcagagaaggaaatggcaacccactccagtgttcttgccttgagaatcccagggacaggggagcctggtgggctgctgtctgtggggttgcacagggtcggacacgactgaagtgacttagcagcagcagtgcaaaatgaggggcttcctccatgactcagcaggtaaagaacctgcctgcaatgcaggagatgcaggagacacactttcgattcctgggttgggaagagggcatggcaacccactccagttttcttgcctggagaatcccatggacagaggagcctgtcaggctgcagtccacagcatcacaaagagtcagacatgagtgagcgactgagcacaacacgtgcaaaatgcacatgcagacgccctgttcaaatcttgttaaacttccctctcagctgtgtcttcctttccctcggtagaaggaacagagggagacacgacagaggacccctcgactcctctctgtggtctgcttctttaacctgtccctaaaaatgtaaagctcaacaacttgtagcgaggagactccagctttccgacctggtctcagttcttccgctttctatagaatttccccttctcccaaccaagattttcttatttctaaattaagtactttaaatttttttggatgtattaactcgaacttcaccatggaccaaacctgagctaattcttttgtacacatcattgcactgaatcctcacaacaaccctcagaggtagacttgatgtttgtcccactttacaggtgaggaaaactgaggctgagcaaagttgccatacccggggctagtttgtttcagatagacctgaggtcccttcagtgttgacaggctggaacgcggtgactcttacacattttggcagcacactcccttggatgaaatacttccagagagactgggccctgaaaatagcaactcttaaaatattaattctctgtaatgctccacacagactccgctttctaacgaggcctcccacattcctagtaaaatcagagaagggaaatctcctccatttgtggttccagtctgggccctgccatcagcggtggctgggtggctgtcaggtctcttttgcttccttcctttgccagctgatcagtacctgccatgtctggggctttagaacccgctaaatgaacctgcttggctccctctgcacacagatccacg

SEQ ID NO: 57386 - DNA, 1594 bp, Bovine  19866881427147
  misc_feature (1)..(1): n is a, c, g, or t
natgtggacctggggttctgttttattgagggtggaggccttggggtttgtgggttcactctttattagtgaatttaaaacataaaagcaggaatttaaagtatcggaagagaaataaatgaagcatgtggcccaaatagtcgttaccaaaatcaaccaagatctttaaacaaaggaacctcagtcaagggaggaagcctggctctttatctcgccatatggctggcaatatgtttgtttgagatagccgtctttgaagtgggtgcctttttgaaatggatgtctcagcaatcaaagcttaagtcaggcacttgcgttacaaaaaagaaaaaaatcccaacaactatcaggctttacactacactagtaaatactgcattttgacaaggctgatctatactgacaaaatctgcattttgtatcttaccagctaatgctgtgggaaaatgtgctaaaaagatgttgaattttaagttgatgaactgtgtacatggtaattacaggttgcaagatggtgatgatgataaactcggcacgtataaatctttgccatggttacagtggccacaattataggaaaagatattgatatggtaggctacttggacctttttgtaactaagtgtaggtcagaaggaagatttttatttcttcgctgtgaaattttcctgggcagtgtttttctttctttaaattgttatggaagggctgggtcactgggggaaggagggcaaggagataagggaaaggggagcttcctggctcaggcctcaccatctgcagtgatgctcttaggatgggctgctctgtctagctaggggactgctgagtttctgaactgtaccctggaggcagttgacctcatttgtgtggacttcatcccccatgtttctctctatatactcaggaactggaacgtggcatggtacaatgtgcagaagtccccatggtatatttgttgaaagaagaaatgaacctcctaccatttgttacgttgagtggctttcctcatgtcagtttatcaaccgcatggaaatttcatgaccatgaaaataagttgaatgcaacaaaaatattatgtttcactaccctgtctcaccaccctgtccacctccctcctgcacacagtcatgtccttttatagtccagccctcttgttagcccctctttatcctccaatctcaccccagccactaagatgtcattgcagtaggcctgtttgcccattcaactgtgaaggcttgtatcattaactcatcatgaaccatacccactgagcccagtcaacttcagaatactcctggaggcacccccagtagcttatctccaatgaccagagcaggcactggaggtgaagcctctccctggttgacctgttgttcagactgtgtacctcccttccatctttccaagactgcttcttgtctcttccactcaaggttaaatgatcgaaatagctcttgcctgtttccttgcctaagacacacctggcagctttgtacaacagcccaagttccatgtaattctttgcaaggatgctctgctagaaaggcaggagattgggatcccttggtaacatcacagtatcttaggg

SEQ ID NO: 57387 - DNA, 1105 bp, Bovine  19866880352158
  misc_feature (1)..(1): n is a, c, g, or t
nggggcagagtggatactttgggggacttgatggctgtgcccagatccgagccctccatcctcacatgaggacttcatctcttgtccccagaacagggagagagaagccgggaggctgtcgagcagtggcgccagtggcattacgacggcctgtacccatcctacctctacaaccgccaccacatctgagctcagtttgagggacacagaagattgagcctgagacacccgcttacccctggtattcgggcacctctcccgcacacaaacaggccccttcacagggcctcagtcacctagggccttctgttctcatggatggaaacgcccaggcttgcgcttcttggcagatgattttctgaggtgagcaaaggcctgtggggcctcttggtatccctcctagaggttccctgttgcttcaccatcgctcccacactgagactcctggtccacagaaagatgagaaatcacagtagagagaaaagatcgtgtatctgcttacagcttatgaataaaaacgctgagtcaacactgtatcgtcttcttgaatctcatgctgagtggcgccaacttgtccctcccaaatgacagtggggctcacacagacttgggtatcaggaagcttggacttgggagcatgtctcactatttcatcagcctgtctcagtagttatgtgactgaaagggacctgtaaatgcaactgtttgggtaaaaaccattctctgagcccaggtgcttctcacgtctctaaaaagtcttaaggttcaatggtggtttcttaatggcatcaatcaaaagccagggttacagtgaggccagctgtaaccaaaagtagccagcagataaggttcagttttagtaccatctcctttttcttcatagtgttagtttgctagagcttccgtaactgggagacttaaaatgaacacttatcctctcacagttgtggaggctggagtctgaaatcaaggtgttggcagggccacactccctcccaaggctccagggggaggtcctctctcgcctcttctaacttctgggggctcagctgtcccctggcttgtggcagcattgctccagtcactccttgcaccatcacatggc

SEQ ID NO: 57388 - DNA, 1934 bp, Bovine  19866880446889
  misc_feature (1)..(1): n is a, c, g, or t
naagtcctgggtttactcttaaatgaagaccccagccctcaaagaagctctcagaatgtcttacattgaggctgcatatgaggctgaagaaatgcctccgtagtaaaaaccatcctgacacagccgttctctcaggctgatgcctttgcgagcaaacttctttggaatgcggcctccagagaaggtggactgcaaagtcagctcgcctggcgctaagcctcttgtactgggcctggatgtgatactgacagtattcacagtcgttctgtgaagagaaagagcagctgtatcaacattagggcaacaggccggggacaatgttaatggacacaactcctttctcccagcctcacagagagctagtctgtgggcaaaaccctctcggctaacttctgagatcattctctatccacagctaagaagcaacttagaagttcatcctctaggtaatggggtggagtaggggtgataaattggaagatggggattcatacacacaaactattatatataaaatacataactaataaggacctactctatagtacagggaactctattcaggactctgtaatggcctatatgggaaaggaacctaagaaagagcaggtataagtatatatataactaattcactttgttgtatacctgaaacgaacacaacattataaatcaactatactcattagaaattaagaaaaaaaaagttaaggggactgaactctgaacacactattcaggtacaagaaaaagtggtacttttcactgccttcgtcctccttctacagtggaaataaagttagtttctagggtgaatcttgaaaatgttatgccaaataaaagaagtcagacacaaaggtcccatgttgtatgattccttttatggcatatatccacagagacagaaaacagattacaggtcatcagggaaatggttacttaattgctagggggtgttttttaatggggtgatgaaaagattttgaaacctgaagctggtggttacacaataaagtgaatacactaaatattactgacgtaaatggttaactgtacataatgtgaattttacctcaacagaagttacaaaataaaacaaaatcaatttcctttctgtttctctggttgactctcagacaaatgctacccttacagtgaaaggagcaaagagaaactatgaagtattgtcgaactgggtgaaacttaacagatgctgacaatggaggtttaatggtccagcatcttgtgatctgacaggtgcacttcctctgagacctctttccaactgtctccttcctccctgtttcctgctcactagttcatctgttagacagcaatgagagaaataaaaagagatgaaaccagaacctattatccagtcctttcaaagagctctaagaagtactacttcacatgcacttggatggttgtaatcaaagtcagacagtaacaaagtgttagagaaactagaaccctcacatactgctagggagattgtaaaagccacctgggaaaccagtttggtggttcctcaaaaacctaaatacagatccagcaattccgttccaggtttatagttgaggcaactgaaatggacttccacataaaaacctgtatatgcatgttgacagcaccattatccgtaacagtcagatatggaaaccacctaagtgtctatcaaccaatggataaactgagtgtagtctatccatacaatggagtgttattcaaataccaaaaggaatgaagtgctgataaaaggctttgtagcatgagcatagcacagatgaatcttaaaaacattattctaagtccaaagaagctagatacaaaaggctgtacattatacaattccactgtatgaaatgtctagaataggcaaatctatagacagaaagtagatgagtagttgccaggacggaggagaaggggaa

SEQ ID NO: 57389 - DNA, 1643 bp, Bovine  19866880492469
  misc_feature (1)..(1): n is a, c, g, or t
nctgtaaatattattttctcttcctgtctcatcgtttcacccagttcaaaaatctttactaatctggggtggtgacaagcaatgcatcagttctctgagctaatgctcccgattctgaaatgctcagaggaaccataggaagctgcattggctgctctgggggagaaggggcagaacatttactctggttccttctcctaatgtctcagaggggagccctctgcgctcctaattgtgcatctaagtgaacataagagcgcccctaattgcacatcaaataaataagtaaatgttgtctgctgaatacgtaacaaggaccagcgctgtcatcctccccccacggagagatttcattaaatatgggctggtgagggggctgcagcaatcagtgatgatttacagatattgaatattgcttctaaggtttctttggagccacgtgtttcacactgttcttttttttaatgtatatagcgtctgataaagcctgatggacggatctttattctgactcttcctggcgccccaatcagaaagcattttctgttgtaaatgataatgttttctgatgattcaatggctgggctcaccacaggattggggagtgcagactacagccagaggacagagcacacagtgccggggtccagccccggctgatccagggtatttgaaggagagacggcataggcgacctatttatttaaatattttatcaaagatataaagagtaataggatgaggatagctcagtgaggaaattcagtggagaaaagaggctgaaataaggatagctcagtgaggaaattcagtggagaaaagaggctgaataattcagccagaaggtaagagaaagaacgacatggtgagaccaagtttcagtgaacaaggcccgcactttattttccaaagtagtttttataccttaagttatgcatagaggataatgggggaaggggtagagtcatgcagcaacacagctcagcttggtgctggtgggaactgagtctcgagcgtgggagaagtgaatcacctgaaacctttggccccggtgctcccaagaagaggcagattgtcccagagatcagagctttcagaatttttcaggctctgatctaaggagtgcaaggtcctcctctaaaagagggagccctttgtgatcgactttacccagctttatttatctctgccccatgtgatcctggttccacaggagttaacaaacaatgtattttctgtatagatcatttaattttcattcaaatgttctcagcgaagtagaaacactcttgcttgtaccaacacagctgtctgagactgacatgccagctgatgcgcggcatgtccccactcatggtcacttaatgtagtggcatttactcttgtttgatgcttctgtgtctttccttggccataaatataacccaggatgaagtttgatcttttacttcgagtgtccaagtgcacttgaactgacaagttcaactgataatgtttcatgattccctgaagtcaaccggacagttatttagtcactaagtcctgtcttagtgagaccccatggactgtagccctccaggcttctctgtccatgggattctccaggcaagaatactgcagtgggttgccatgccctcctccag

SEQ ID NO: 57390 - DNA, 2653 bp, Bovine  19866880506377
  misc_feature (1)..(1): n is a, c, g, or t
naaataataggtgtgaaatttatctgaacttctctaagaatggcgctgtataaatcctgggaagaataattaaaatactggagtttaggcaataattcactacaacctgtagccatacccactctgggctgcctctgtgaaatagcttgattcagtattgtgtgaattgctttttttaaaaaatctataaacatggaagttgttcatattatatatggctagcattttgagtttcttggtatgtgatagtatttccaaaattttagagttaaatacaaccagttttctttaaatgatgctgtttttcttctaagctaaagaaagatttagaagcattgaactgaaacttccttattaatattaacataatgataaataatatttattaaatataagtaaattttttcttgaagtatagttgatttacaatgttgtgttttaggtgtacagcaaagtgattgttatacatatgtagatatgtttcatgttcttttccattatggtttattacaggatattgaatatagttccctatgctttacagtactagtctttatcgtctaaatattttatatagtagttagtgtctgctaataacagaaagaaacaaagttaacaagttaacaagaaagctatttctttctgaggcttgcctttcttcaccttcatttctaaaatgagaagaagcataccaaagccttgagaaaggattaatttataattaacagacattctgatgataatctattcagactgggtcatgcttagatattttccacagtagaacacttgaactgtaaatgaagactttgtaacccattgttcaagatttattaaagataagcataaatgatttgctccaggggaaaacatttagcatgtagcgactgaatgatcttcgtgacctgacgcgatgtgtgtcactgttcttgtttggagacgttcacaaagaactctggaagacagagcagggttctgtcatagggctgctcaatgcaaaccccatgaagcccaaggatggttcagaggaggtaagactgtttccatgggtttgtttgggttttttttttttgtggtctttataacttggctgagttctatcaacaacctttatgctggtctacctccaggtaataagtcaagcttttgtattattttcactccattttactggctttttgtttgtcgttcatttcttacctgccagtattctgaatttcagactacgctagaatattttatgagaacttatttcattatattttttcaaattcattccaagcttcctggaatttattttttagttcttgggctcaggttcccttccatctcctgtgaatatccttgatagcatcaggaaggaagggtttatagttgaggagggtttgttccgtttgttatcataatcatagctgcaacttaggaattttggtttttaaggtgacttttcaccgtcttaagcagcattagaatttgggttactacctactgattctctagtaaactgcaaacctaggtacattgtgaacactaacagtttctccacaggagtcaacaagaggctattgcttctgttatagacacattatatcaggaggagtaagagacaaagttgttgcattcattgctttcacaagagaatagcaacaaatcttcatttattggtttggaaggtgtttggccacaagtaacagaaaagctgtgctacagttctttgtaatggtagacgctgaagtttttgtttttcttggatagtaaaaaatccagacataggcagtgtcagttcagttcagtgtagttgctcagtcgtgtctgactctgcaaccccatgaattgcagcacgccaggcctccctgtccatcaccaactcctgaagttcacccaaacccacgtccatcaagtcgtaatgccctaatgccagagctggtgtccatgagtctctcagatttccctcttggtcacaagatggctttgaaaccctagccatcacatctcccactgaagccaggaagtcagccagcctcttcactctgcttttatagaaaagcagaagctttcctggctaccttccctgcagaatcctacttcagtctcattggccagagtggagttacatgacaatcactagctgcaaagaatgctgggaaaacagggaacctgctctatcactcaaggctgagcgttaggattctgatagtaaagatgcaggagggaacagagaactaaatgtcttctctctctcccatttctacaactgttttacagggcactggcttcaaatcccagggcactgatgaaaaggataaaaagcctaactcgtgccaaccgttattatatccattcttgctggtgaggggccatacctttgtttgcttttaattcccactacctctttttctacagatgtgcttatctattgatcatcctcaaaagatcttaattatgggggaagctcttgacctgggaacctgtaaagcaaagaaaaagaatggagaaccatgtacacagattgtgaatttggtaggtttaagctttgttggggggggggggtttttgctaaagaaagaaactaataggaataaattttaggcactttacctgtaatgacctatttggaactgagtttcctacataataggaagcttcaaagtga

SEQ ID NO: 57391 - DNA, 755 bp, Bovine  19866880549493
  misc_feature (1)..(1): n is a, c, g, or t
nctgggggtgaggggggaggcaggatgtgattccgcgtaaacaagtcggagggcacatcaggaaattagcaaacaatgacacttggagagcggggagccttctttggtattcctctcctgtggtttggcggccgggtgggggaggacgcgtctccatcaggccgtgcggacacccacccggaccagtggtcgtggtggtttggggttggtttgcttttttcctcccctcctgcaaaaaggagaaaaggtggtggtggctgttgtaagaccgagaaagaagctcattaggtgtccaagcccagagaagaattgatgacatgcagcatctttcccgaatatgttatttgggcaggaaagatgttttcgaatagatcacgtaacagtcagataaatatcattaaaaagaaaaaaacaaaaacaaaaaatccagccggtccctgacgatttaacaggtgtacaccgcggtctctgggcttgggtttattttatgaggggagaggaaagttgaatagtcttgcctgtgttcggtgacttgttaaagagtctttatttttcctgatttgacttttcaaaaaacgataagaatgtaagggcagacaaaaaattatgcctatcaaaatgcattgtgtcactttaaattagaggcaggtgactttttctccccgtcatgtcacaagtcccaatattgagtttagaataatcctgtttaagtgtcgtctttaagtcagcttgaagtcaaaaccaaaccagagaac

SEQ ID NO: 57392 - DNA, 2129 bp, Bovine  19866880583488
  misc_feature (1)..(1): n is a, c, g, or t
ncttgcctggaaaatccccatggacagaggagcctggtaggctgcaatccatggggttgctaaaagtcggacacgactcagcgacttcactttcacttttcactttcatgcattggagaaggaaatggcaacccactccagtgttcttgcttggagaatcccagggatgggggagcctggtgggctgccatctatggggtcacacagagtcggacacgactgaagcaatttagcagcagcagcagcagcaggtgagggagagtatggttggccaactgcattatgaaattagataactaagcaacttgccacagtgctactaggggatgagaggacagggcttctccactataattacttatctttctgaacttcattttcttcatttgtaaaataaggggtaatgatcatacccacctaatagaataagtacgtggactaaaaagacataagaaaacatgtgagggctaaaaacaagcctggcatatggtgatactcaataattttatgtatcattatagtcatttctgtaaatactcaaaactacgttcattcattcactcactctttcaacaagcatctttagcagttatgatgctaggagctggatagtttattgtattttgtcactgttctttatgtctttttaatacgcttagaaatagccagtaacaaacaccagttcctcatactctcctcaactatttaccatcctcaatgtattttatttgttccagtatcttgccaattaagcagttagttgaaaacagagccaaggttttattctttatattaaaaccaatactattgattcatcatagaatataccagctgtttgcatgccaataatgatctagaaaaatacacaaggctgaaaaaagagaaattgaaagtggcttcgttactgaaggaggtgttattgtaaggcagtcatttgcaaaataaagataatactacactggcacagattttgagagaaataaatgaaattgtatgtcaagatgcataaacttattattataagtagactcattattatagattttgtaataaagaataacatggtaccccaaaactaatatatgtcaattacactttaattttttttagtttaaaaattattttcttttgattgatgaatatttttagtaaaattgctaagagagctagagataaatattactctggatttagatatgattttttattgtattgaagaaaggaagttatccaagatttattaatgggcactagtgctacatccgtcatctgtacttcctgtttctcagatttgtatgtcttcctttgcttccaagccccttagcctttcaaaaggaaaaacatgcttttagaccagaggttgctcaaccctggcttctcagtagcatcatctaggggcttttgaaaaacactgatgcccaggccttatcccagaataactaaggcagaatctggacattggtcattctaaaagctttccaggtgatccaatactgagaatcactagtagcaaatgaaacaccacctatgctatttaaaaatcacacacttgcaacaatacactttctgatgtcagcttctctcctgacgtcattttgttgagcatgacctgcactcaggacacagcactgaatgtcgactgtcatggcatcccttttttgtatccccatcaccctttaactatacttttcttagtgtggctaatagtccaccttattgtgtaattatttttgtatgtatttaaattatcttttagaatatacctttcctgaagataagaacaatgacagtgccttttaatggcagatctttgctgtttcagttgtccaccttacgatttcactgtggaatgaccctgcatctcatttctcctgccttatacctcccttctgactaatataactatttttaaaaatttacttattttattttggctgtgtcaggtcttagttgcaacgtgaggactttctgttgcatcatgcagggtctttcgttgcagtgcacagactctctagttgtggcacagcttccagagcacatggactaagttgttgtcatgcacgggcttagtttctccacagcatatggaatcttagttccccaaccagggattgaacccgtgtcccctg

SEQ ID NO: 57393 - DNA, 1744 bp, Bovine  19866880590281
  misc_feature (1)..(1): n is a, c, g, or t
naataaacagagggtcttggcatttctcattctgcccccggagtgtctaggcttcaattttgttactttgacctgtagcctgagtcacccaggccagcccggaagccgctgtcttcgtaagtgagcaggacacactgggaagcacctgctcgccctgcactgccatcggcctgctgggggctggggagaggggaaggggggtcctggtgtcagcaggacacaacatttgcatgatttctttgtctctaaaatgagaggagtttgggacttccctggtggtccagtgcttaaggctttcccttccaatgcagagggtgctagttcagtccctggtcagggatctagaatcccacacgcctcggggccaaagggccagaacatgagacagaagcaatattataacaaattcaataaagactgtaaaaatggtccacatcaaaaaaaaaaatagctaacataagaaagagatgcacaacttaagaaaaaataaaaggagttgatatatgtataattgattcgctttgctgtacagaagaaactagcacaatattgtaaatcaaccctactccaaaaaaaatttttttttaaattagaggagtcttaaatgcatattactaagtgaaagaagtcaatctgaaaaggcatgcatattgtatgattccaactaaatggcatcctggaaaagacaaacctggttgccaggacctgggataaatagatagaacacacaggatttttagagcaatgaaaatactctgtgcaacactatatgattgatacgtatctatatgtgtttgtccagacctatgcaatgtacaatccaagaatgaattctgagggaaactatggactctgggtgattgagatgggtcagtgtaggttcatcagttactacaaaagtaccattccagtgtgggatgttattgataggggaggctgtagggacgagaatatatgggaaatccttgtaccttcctctcaattttgccatgaacctaaaactgatggaaaaaaaaaattaaaatcttttaaggcaaaatttttaggggagtcacctttcatagtttccatggttccttccagctctgacagctgatgacagtttctcggctcagaaggtcattttgtcagtgctcagcatctctcagattttcctaagtggggatggggggtgatgctgaaaacctaaattcttcggaggagaacagagaacaaggtatccgcttttgactcagaataggggagagaaccacagctgtgctgctggttaagagtggagttggctccccaacccagggcactttccaagtcacatcactgagcatcctttgatgacggggcacacctgtcaaggtaaatcatagagagatggggtccatccctttcaaggaatttgcttttccctttgtcttcagatgaaacagatctcttggctcatgtttctctcttctggtcccctgcttacccgtgcttcttttgatgtcctaggacaagcaggggataccgtggtggctgggtctgagctacaaaggcatcttccagtatgactaccatgataaagtcaagcccaggaaggtaagcatgctctccgtggtgggctagtggggctccggtggagggaggaacaggctgagaagtgacaaaaattgtagccatgcagcctcagggcctctgggctccccagtctcctgataagtgcggtgtacacaaactactccaaactcatccgttctgccttctctgg

SEQ ID NO: 57394 - DNA, 743 bp, Bovine  19866880641448
  misc_feature (1)..(1): n is a, c, g, or t
naagcctggcttagagaattttaagcataactttactaacgtgtgagatgagtgcaacagtgtggtagtttgggcattctttggcattgcctttctttgggattggaatgaaaactgacctttttcattcctgtggccactgctgtgttttccaagtttgctgacatattgagtgcagcactttcacagtatcatctttcaggatttgaaagagctcaactggaattccatcacctctactagctttgtttgtagtgatgcttcctaagacccacttgacttcacattccaggatgtctggctctaggtgagtgagcacaccatcatgattatccgggttgtgaagatcttttttgtatagttcttctgtgtattcttgccacctgttcttaatatcttctgcttctgttaggtccctaccatttctgtcctttattgagcccatctttgggagaaatgttcccttggtatctaattttcttgaagagatctctagtctttcctattctattgtttccctctatttctttgcattgatcgctgaggaaggcttgctggttaatttcatgctatgctattttactacagttaaaaccttttaggtaaaaacaagaagaagcaaactctggaggcagaaaagaagaaatggcctttgcaagattgagtggatagtctttcactggcagaagcttgaggagttgacgcaaagagattcaattttttttccttgatggttatctact

SEQ ID NO: 57395 - DNA, 2311 bp, Bovine  19866880672038
  misc_feature (1)..(1): n is a, c, g, or t
ntcctgtgtttgtgtgtgtgtgagagagagagacatacatacatgttcttaatccagttgtctgtggggcacttggtctgcttccatgtcttggttattataactagtgctgctgtgaactttggggtgcatgtatcttttcatatttttgttttttctggatgcatatgcaggagtggaattgctgtgtcatggtggttctatttttagttttttagaaactatttttcagtagtggctttatcagttttcattcccaccactagtgtacaagggttccctttactctgtatcctcttcagcatttgttgtttgtaggctttttagagatggctgttctgacttgtatgaggtgatacctcattgtggttttgatttgcatttctcttgtaattagtggtccatctagtcaaagctatggctatggtttttccagtagtcatgtatggatgtgagagttggactataaagaaagctgagccaaagaattgatgcttttgaactgtggtgatagagaagactcttgagagtcccttggattgcaaggagatccaaccagtcaatcctaaaggaaatcagtcctgaatattcattgtaaggagtgatgctgaagctgaaactccaatactttggccacttgatgcgaagaactaatttatttgaaaagaccctgatgctgggacatattgaaggtaggaggagaaggggacaacagaggatgagatggttggatggcatcaccaacttgatggacatgagtttgagcaagctctgggagttggtgatggacagggaagcctggcatgctgcagttcatggggtcgcaaagaattggacatgactgagtgactgaactgaataattagtaatgtagaacatcttttcatgtgcctgttagccatatgtatgtcttctctgagaaatgtcttttcagatcttctgaccatttttggcttgggttgttttttgatattgagttgtatgagctgtttgtatattttggatattaatcccttgagggtcacatcatttgtaaatattttctccaattcagtaggttgttgtttcattttgctgatggtttctttgctttgcaaaagcttttaagtttaatcaggttccatttgtttggttttgcttttatttcttttgccttaggagactgattaaagaaaatactgctaagatttatgtcagagcactctgcctgtgttctcttgtaggaactgtctttaacttttgacattttaactgtaatgtgccttgatgtaggtatgtttaactttttcagatattgccctaacattttccacagcagctgtactattttacatttccagcagtgcacaatgggtctgtttctccatatcctagccacgttattattttctgttttctgttgataatatccatcctgatggttgtaaagtggtatctctgtggtttggtttgcatttccctagtgattagtgaggttgagcatcgtttcatttacttattggccattgtatattgtctgtttaagtcttttgcttattttaaatcaaattttctgttgtagttaactcgaagagctacagttttatagttttaacccttacatttaagtctttgattgattttgagttaatttttatatgtggtatatgataagggtctatctttaaggcttccattttaatcaaatgatcacaaactagaagtgaataaaatgtggagtttactggtttgttaaaaacatagtgaagtctaggacgtggttgagactctggctttatactgttgatgttgccagatgttgtggaagttgaaagcagttggagttgttagaggttttcagtgaaccaggaaaatgggtggagcacctggtcactttctctaggcctcattagaaaattacagcgtttatgcagattcttaattggatttgtcgctcatattttttatttttctgtcagactagctattatatcattatatattcttttaaatttgaatatgttcataagaattgactttgaatggacagtagtgatagctgtataattattgaaatattgtttgagtttccttatggagaaaaaaatgaattatactcattatcagaaaaaaaaatcagaagtgaaacatcaatgaaatttcatacgaggtgtaactttttacctttcctcagggattgaggaatgatctgaaagcagctttggataagattgatcagcagtacctcaatgagcttgtgggtggccaagagcctggagaggaagacacccagaatgatttgaaagttcacgaagaaaacaccacaattgaa

SEQ ID NO: 57396 - DNA, 1582 bp, Bovine  19866880672509
  misc_feature (1)..(1): n is a, c, g, or t
ntttaagagaaggaatatatagggagcctggatgactaaatcatgggctattttgtccatctgaatttatgcctttaattttttttattacacacagagggattgtttgctctacagtgtcctctgaaggctactcaaaattttcttttctagcatctcctacctataacttaaatatttattgcctaaactacaaatacaagctctccaagtggtcacaggccagttacttctgtatctccagactcagtagttgatgctaaataaacatttgctgagaagcgaatatactggctttagataagccccatagatcaatattgctgctggttccatgactgccctccacgtctggacgctgctcccgccgtaactgaacaatctttgtatccaatgagaattcacctaggccaggcccgggttcccctgtactttgggaggctttgggaggaaaaggtcaggagaaagattggattcctaagaccccttctggttgcctcattcttttttctcttagctgcacacaggaagagttctgctaaagcccttttctggttctgaacagaaggtcctgttgtttgccacggcgtctgaaggtctcagcgggctgtctccgaggggtaatgaatgctgaatgccacgttcccagaagcagctattacaacccgggcaccgaggttgtagccattgattttctcctcgatcgcacagtactgagcatttaatgaatggaaatcccaaacctatttccaaataaattacattcccagggctgcaacttgtggtggtttcttctgcaattggaaaaccgcttttctgcttttttaaattgcacatcagcttgtgactggggatgctcatcgactagccccttttcacatgtctcggtccatgctggtcctggttctagtcaagggtcacaggactcaaaggtgctgctgaaccgagggttctcttcactgtcctggcattgggtctaaaacggatgcaattccagtgtgatatgggcatttaattaaccagataaataacactcccttatcagtacctatccacggctcaattaattacgacacagcatgttgttttttttaaaaaatccttaatcggttcttcaacttagattctggcttcagagtgcctgtgaaccttctaaaatttaagcactaattattctgtatgtaaacaattgtaggggtgagggaatgtaacttcttaaatttcacaagggtctgtgattaaataagaggttaagaactattcattttcctaattggtacgtgagaatacactagaactgtacatggctttgaaatgtgcaacaatggcttaactgagttttgtatctttctccttcaactttctaaatacttcttaaagtgttcttacacagatactcatttacaacatttgacaaacaatccttaaaatttatgacaggaaattaaaattaaaatttaaatatgttacaattaatcatgacttcaccttgatgggtatttgactaatagccctaatagcctaaaagctgttcagttattgctgttgatggtgggatcctctgtcaactttttattttaaa

SEQ ID NO: 57397 - DNA, 1337 bp, Bovine  19866880749597
  misc_feature (1)..(1): n is a, c, g, or t
natctgacttccagtattcaaatagtgtttgctcaataatcaaaatctgatgaaggagaaaaacaaacatttgtgtatatgtgtatatatatatatatatatatatgtacatttctaattagagtttcactaattggtctttggttcagataattggagaaatgaacaacaaatgacttctgaaaatgggcttgttgtgtataggtgcctttttttttaaaggaacattttagccaataatggtgaggacaaatgaaatgaaaaactccgtgtaccccacagcattctttgagctggttttctgtcaaagaatgcaaaatatagtgtcattaaaagggatattatagatgtatctgtactagacacacaagctcctgtccccgcccccagccccaccaagtcatccaggctggccccttggtgtgtgtttcccaattagcacacacttacatagccaccgtttaataacccctttgtatgttgccttaattataataattatacccattgagtgaggatagagatgggagcatagaatgagatgtccttttgaatttgggagaaataaagtttaatcattgccttgccataatcctgaactaaagtgagcagatggggaggtctcaggggaggtattgtgagctcttcaaagccatctcgttcttctgaaatcaattgagagaaaatgcagacctggcctcatccagaccctggcaaagtgttcttcactgctctgtcttcccttctccacactaatccattgcacatacctgccagattaatcctcctaaaatgccacattaatcatgttattcctgcacactgatcttcactgctcctaattacttagagaattaaattaaaaaccacatcccactgctataggcccaccccagcaggactcacgtcctcatatctgatcttcgccttcaggtacctccaggccggtccctgtccttctgacaaaccactcagcttagtgtttctcaaacaattcctgaacttcccccaacacaaagttttgttcacactagtccccaggctgtaattctctttgccttccttgctccagtaatcgctgagcacctgtggtgaggaactgtgtgtgaaacgtccttcttccccggggcacacagcacttgacttttttgatcatttttggcattaatttgtccattaggcatagactcctgtgacagtcacttatgccaggggtccccagctttcaagatctaatgcctgatgatctgaggtggagctgatgtaataataaaagaaataaagcacacagtaaatgtaatgcacttgaatcatcccaaaaccatccctccctgcca

SEQ ID NO: 57398 - DNA, 1007 bp, Bovine  19866880765582
  misc_feature (1)..(1): n is a, c, g, or t
nctgcgtaatagtgaactccataggttgggagagactctacgatgctcatgtagctgtgaaaacaaaacaaaacaacacacacacacacacaacgtggttattcagcagaactggtatcatacgcacattggtgtctgtgtgtacatgataaaagttctctgaatggttatttacttaaaaattaaatggaaccaccatccactggagtctctcccagaagaactgaacaaccctgacatgttctatgtgaacacacacacaacctcatcagcactgggaggggtgaggtacttacttcacgatggcttggcctctggtctggccgttgagtttcttgtagtgctcgatgacccggtcctcactagaacgagaggaaaaggagtctctaccttagtctccaggtgacagccccgagccctcctcaggaaaagactgtgagccccacatcctcacaagaagttccaaggagccaacagctcctggaagaatgatttgtcctggaagcagcattttgaaacccagccgaagtgagatgtccagggcgacagaagtaccaaaagagtccactttcccctcagaggactcactgctctttgtcttgagtttggctcaggttcggggggttagactccttgtgggagcagaggatgaaaggagcacgcatcccagtggggagggacagaggacgaggacaggcagacagccactgctgggggtccacatggatgcttcgggcaacctcggtcaggccctcctcccctcctaaactccagctgcccagtcagggggaaggaggtgctgacctcaacacgacattcatggcctctctaccctgttagcagttaatagctcagggtgtccaaggaggatcggaaagttcgggaatttggggctggttaacacaaatcaacctcagataggcagatgacaccactctttcggcagaaagtgaagaggaactaaaaagcctcttgttgaaagtgaaagaggagagtgaaaaagttgg

SEQ ID NO: 57399 - DNA, 1358 bp, Bovine  19866880773349
  misc_feature (1)..(1): n is a, c, g, or t
ncatccatccatccatccatccatctatccatccatccatccatctatccatccatccattcattcagtactacacacttcctctggaccagacactccaggctgcagaactagtcatgagctcttagtttcctgcacactcttgttgactcagagaccttgggcaagtccctggaatgtcctgaagccttggtttctgcacacctgaatggctttctccctgagaaccgtctggagcctacctttcatttgctcattcgacactttgcaaaatatttatcaaggggctgttgggtgccaggcagcctgctgggcctggagggacctctgtggacaggagagcctgagttcctgtttggaggcagcacaaagccctggtgaagacagtgtatgcgtgtgtgctaagtcacttcagtcgtgtctgactctctgcgaccctatggactgtagcccaccaggcttctctgtccatgggattctccaggcaagaatgctggcatggttgccctttccttctctaataaaaagttaattatggcaaattctggatgatgggatatgagtacatttaatgtaatgctttgtaactttctgtagtttttaaaaattgctcaaacaattaaaaagtgggggaatgtatacatctaggaactaaatgtatacttagcatgattttcaattattccattgtggattgaatttcatatgcaggaagtcatctgattagcttaagtagtgtagataaagagatctagcccagtggctagcccagtgagataactaagtagatactggcccctactttcttagcctagtgccctccaagaagcacttagggagaagaaaggtagaaacaagaacaacagttacatgtaccaggcaaaatggtgaatctgcagtcattttaactgcattatgaatgtggagtgttttaactctgcttgtcaatggctgtttttcacagatagacttcctttctttcctttttcttctttttcgcataggggaggaagatgatttgtctctgctgactgcattgctggaggagaatgagtcggccttgggttgtaattcagaagagagtcagcccttgacccaggaagatggtgaacctgactcatatgatgagctctttgatgctgatggtgatggtgaatcttacacagaggagactgatgagggagaagtggaaaaggctgaaaaccaaaaggagaatttggccactctctttggagacatgggagacttaacagatgaggaagaagctcctacatcacaatcaactaaagagagggtcatccctgctcctggtcccagtcaagggaaaactaatcaggagttgcaaggtgccctaacca

SEQ ID NO: 57400 - DNA, 791 bp, Bovine  19866880787126
  misc_feature (1)..(1): n is a, c, g, or t
ncctgaaaacgtttttaaaatgggttgctgctatcatgtgtcagagcttcataacccagccaagtcccagaatagatttagaaagtataatttagggctgaggcagccaccaaatgcctgaaatgagtaggtcctgatttgaaccctgagtgttggggtttagacctattctgtaaaagcagatggattttggattgaactggaagaaatcatgtttttgacatcaggctctgtctcaatgagtcctcatggcatttcttatagaagaaaatcttggtcttatctgccagttgggctgaggaaggtgaaggcctttagtaatgcaaacatggtgctttatgtagatcctattgatcaaagggtttctatctgggacaattgaaaatatccaccagattagcacatacatagttcctctcctcatccgctttcatcttacttttgctgctgctgctgctgctaaggcacttcagtcgtgtccgactctgtgcgaccccatagacagcagcccattaggttcctctgtccctgggattctccaggcaagaacactggagtgggttgccatttctttctccaatgcatgaaagtgaaaagtgaaagtgaagtcactcagtcatgcccgactcagcgaccccatggacgggagcctaccaggctcctccatccatgggattttccaggcaagagtactggagtggggtgccattgccttctccgcatcttacttttaggtacatcaaatttaaactactgaaagaaaaactttaaaggcagatgtgttgtgagtc

SEQ ID NO: 57401 - DNA, 2135 bp, Bovine  19866880791290
  misc_feature (1)..(1): n is a, c, g, or t
nttatcactagcgccacctgggaaggccagtagaaaagggcaagataaaatgaaaaaaacaaaaaagttataaagatttcagaggcagacatgcagataggctattagcttaaagagaaagaaagcacaggaaggtcttgaacctcagggagggtgcagtatctgaagagttcctcatcttcttggaaatcctggaccttggaaaccactttctcacttggcacatattctgattttgcgatggtgacatctctcatcaccaacaatcccaatggtttcacctcctttctgcagattctttgaaattcattcctagaaaattcattggtaaatgatgtcagtaccacaggcactaagcaccttcctggccttccatttgttctgtggaaggactcgaagacttgggagtggtttttctgcactaaatggtcctcaagccccaggtcaaatagttctgatgacaggaaggagaaaatggccaactcagaagtgcccgcctcctaactgtggagttgaaattcgctaccagaatttgaatagtccgtagcttagtggaccagtggggaaatatttgtgatttggtttcattagaacaaaaaagcaaacacctccctagcatcaccatgtaccaggccctaagaactctgtctctactttacctgtttagtcctaaaaaccattctaggacataagtactgttattttccccattctgcagatatagaaacaggcatggaaaggttaaggaaattgccctatacctacaatattaactaaagagactgagattaaagccagacactctggctcaaacccaggttctaacaagccacttcctaacaaacctgatccctgaaaaatatctgaacacacacaaggtaatcctacccatagtcccattgcacacacagaatacacattttccgttatataataaagtgttacttagcaccgaaagcgttgaatatcagcatcagacaccaaatttttaatgacaagaaatccattttcttcatagaattttctctgttctaggcttagaacattattctcccaagtgtacctaaagggaggaaaaaaatctcaaataaatccaatttaaaaatcataacctaacattatgtatcaagaacctgagaaatgtttgtactcttccaccaagcatttctaagactttaaggaaataatctgagttttttttaagttttaaatctaaaacagtaattactgtcactaagatatagaataataattaactgattatatcatatccattcaatgtgattggattaaaaatgaacatacttattaaattaaggacattgcttattaaattaagatttgatgacagtgatataaaaccaagacactatttgtttccaaggaaaaaactataaagaaatacaggaaaaatatttaacagtgatttccttaatagaatggcattatggatgattttttttacttcctcctatttctctgattttaaaattggctctgtaatgaataaatatggtttatcaaagaggaaacaaatttaatatattttgtgtttttaattgtctggttcatgcattcacagaagaaatccaagtaacaaaaatctaaatatgtgtatagcacacacacaaactcaaatcaccctatcccttcctctggtttggagttgccactctatgagaatagtccacagacatcaatgtcttccacttcaaaagtgacgtcaagataaaccaatgatgctagctggacatcagagtgaccaaataacaggataatttaaatgagatttaccatgcctgaattttacaaaataagcttatgcattttctgacattttcacttctttttaaaatttaaaatacatagaggaaaagtctttgtcttaaaaaatttccaattagaaaaagtcctgggttggaggacttgtataataaattctcatcatgcaacctgtgttttatatcctagttaccatggtcggggggcgggggaaacctttttttacattgaatggttaagaattaaaattatatctacttactggaattgttgaggatggaaagtggctggagaaccaggccttgaagccgggtgagatatctaggatgtgatttaaggcaaatcaagtgaag

SEQ ID NO: 57402 - DNA, 1279 bp, Bovine  19866880855797
  misc_feature (1)..(1): n is a, c, g, or t
ncacacactcacacacactcttgaaagccactctttgagggagtctagctaaaccagtattcctagctgtccttgctgagcacacatacttctgaccctaagacactggactgaatgaagagcagaaatcttccttttgaagaacttcaaacctagcctctccatctagtaacacctaaaagaacttcatcttcttgctttgacattttttggaagcgcattccctaagaatcagttgtctacaataaaaacctctaaaaggcaccgagtctcattctcccctggggttcaagactgttgggttcagatagacttatcacacacccctaccccagtgattctctacaaacaaagctccctttaaggccttctccattaaagcttccatgaaccaaaaatctatttgtattgtatggagacgctaaaagcgttaaataaatgcatccaatttctgttgcctagaagcaattgcatatttaatactgacccaacagtttgacctattgccgccataaaccaataggtgttatcttgctcagctttaaagatagttttcagtcaagcaataacaaaaataccttgagcatctcttgggacctttttttttttttttgctttgttacaggccaatgtactgatgtgaattctcaaatgaaaaatcaatgagataatgaaacccaagctatcaggcatctcttagttaaactgtacagagaaaatgcttcttctactctttgcttcccatcctacctaagcttaaagaaaagaaaaagaaaggttgaggaagagacctgatgttgggaacgagaggtgttacataaggaaaaaaaaatcacggacagtgaggaatccttatccttcatactgttgggtgtaggaaaatgtgaccttgaacccaacgcaatcagcaggaaatattttaatgcatggaaattggtggcctcagaagtgagattttgtttcctttttaatctatcccttagcttttgcccagatgttgagcagttatcctcagggacccagggtgggttactggtgcctcagtctttccttttgtagcccctttgtagtggagagattttacaggcacataaagtcgaagggtcgcgggactccaggtgcaggaagagccctcccagaggatttcagaaccccgtgtgtgtgtgtgtgtgtgtgtgtgcactgtcattccttgcagaagtggggttgaggaatctgagtagaggaagtagggggaggaagttcattttctctccaaggccaactattcagttacggg

SEQ ID NO: 57403 - DNA, 1751 bp, Bovine  19866880937722
  misc_feature (1)..(1): n is a, c, g, or t
ncctggttggggaactagatcttgcaagccatgtggcacagcttaaaagaaataaataaataaaatgggaggagggctttcctggtggtttagtggtaaataatccacctgcctgtgcaggagacacaggttcaaaccctgctccgggaagatcccacatgccatggaacaactaaggccatgcaccccaactactgaacctatgctctggagccctggaattacaactacagagccagtttgccctagagcccgtgctccacaacaagagaagccattgcagtcacaagcctgtgcaccacaactaagagtagcccttgttggccacaactagagaaaatcctgtgcagcagtgaagactctgtatagccaaaaataactaactaaaattatttaaaaaaaataataaaatggggggcttagtggttcactggttaggatttggtcccttcaatatttttatagattatactccatttaaagttgctaaaaatattggctatactcactatgctgtataatatatccttgtaaccattttattttttaatcttcaaaatatattaattattttcaaatggagaatgagcatccatagacaatacaagcttctaaaaacagataattaggatgaacagttttgaaaaataatgatctctattatattggcaccaatagtggaattttccatgggacaattgggttatttcttatctatacttttttattttatgcctttgagtttgtatctcttagtccccttcccctctcttgctgctccccacttccctctctccactggtttgttctctgtatctttgagtctgtttctgttttgttacagccattcaattgtattttttcagatttcacatataattgaaaacatacaatgtttatctttatcttatttcattaagcatgatacactttaggtccatccatgtggttgcaaatggcactgactccatctttatttcattcatttcacagaccccactaataatacagtataaaatatttgagacaaggagactagaagggatgactagacaggaaatgttaggcaaggaaaaaggggaactgatctggtatatggtctgtccccttaatttgattcccaaaaaagtccaggaaaacaaggtatcagtaggaattgtctgctgggggattgtctcaaccagggcttcccagggctgatatttacaaacctaccaggatacaagctctgcttctcaaattttagtgtccagaaattcaacttttcttgtgtccccagactaggatcaggctctggagtaactggtcaaccacaatcacaacaatgactaatgtcaaaactagcaggccaatttcataatctcctaacaactgaaccacaatacctatgtctacctctcaaagcatttgtttgctttgaatgcatgtgtttgtggtttcctagagatggttcttggagatgcatctgtaaggaagtgaggaaggcaggatttggcacagagagaagctggactgcagagaagttgcagctaagatcccctgtggtccttggggagctctggagctggaatgactctgtagctttgcccccaggttgagacaatggagctggaccttggaatctccaggcagtcattggtggtggaagccccctggaggagctctaaacttggctgaggcaggtccctgcagccagagtctgtgtccagtgagggaggcagctgtgtgcccccagttcagggcaggtgggg

SEQ ID NO: 57404 - DNA, 2547 bp, Bovine  19866881050305
  misc_feature (1)..(1): n is a, c, g, or t
nattacaaaattaaagacatactagaaaaagtttatatatgatgataaattaagaacaattacaaaaaaaaaacaaaacaaaaaaaaaaagaacaattacgtagaatcagtgtttataattaatcatgtttaaaggttggtctatttccaagacaaagaacctgattatgcaaataagcaggttgtaaaccctgagaatgcgctgagcttttcctgattccattttccccgaaaatattttgtatttcaacacctggccctttctaacacccactgtgcattccaacatctaaattagctttttcaaatactccagaaaccactcatcaaaggtaaaaggcccccagttaagagatgaaagtaccaagttacaagtatgaacaagctctgctccacaccatttgctaaataacactctaattagatccactttattattttttaaagtttcaatgattatgaaacctccatctaccaaactaacaatcccaatttacactacatcaaaatacttaagtcaggtgttctcagagtggagtagtccacaagagcccctggggtcgttaagaccctctgagagggtctctgaggtcaaaactattctcagtacctcaggtattatttggcccgttcactctgttacattgacactgagagtgaaaagtgagtctcctgaagacttcacaaccatcaagacaatagcactaaactgtaccagctgtcagattcgtccatgctgagcactaatggagtgggggcagtttcacttaactacctccttgaagttgtaaaattattaattttactaagtcgtggtccttaaccacatctttttaatatcctgtgcgacaaaacaggaagtacacataaagtgcaaagccttcgtaaaacgacagaagtgaacgaccagaactggggcggttcgaaaaataccgacagacgggaatcggtgtgagggacagctgggggaaagagaactgccaaagtctcgggttttcctgcaattcccacacttccatcccaaaggctcccgagtgagtgccaagggcacagtgggtctagctgcggcctctctggggccgcggcggggttctggctgagccccacccagcaaggaccctctcagcaccgttcccctctccccaggccctccccgacgcactcagctcctccgtcgccaacgcccacgaccccaaggctcctcaccaccaacaggttcctgtcctccaccagctgccgcttccggaggatctccgatttcagaacgtccatcttgctgtccgggttgaagctgtctcaagttttctttctcccgctccagctctctagaccaagacttttcacccagccagccgccactaacctacttacacacaaccagcccaaacaccggaggacaacaactgacagggcggcttccggcggaagctgaggtaagcgagaggaggggaaagagcgctccagggctcctattatttacgtagtcgctgagggccggcgccccctggcggccctctccgacagcgtgcctatagtttccgcggaaatgcgaacaaacatggaaaatacgaacacgagtcttctaaatggatgctgcattaaaaaaataataagttatatacctatgtcaactatacttcagttttaaaagaagataaaggttatactttttttgtacctgctacttgaggtgcaaaagcttcatagcggaacacttcatttatgattactgaagtcagatctttacctgctacacaagaatctcactttggagttcatgaagctaccctgcgtgccaaaattaatgtacgcaagtgagaaaacccagaacaataatactaactcataagtatagagtaaaaggtgttcgttgctggccggtgaaactacctgtaaacttagacaattacagtacattcatttacataatttcagaggtaaatttgtccctcctccctgagttctagattgctcgtatatcttagtgataattgaacatttcagttcagttccgtcgctcagtcgtgtccggctctttgcgacccaatgaattgcagcacgccaggcctccctgtccatcaccaactcccggagttcactcaaactcacatccatcgagtcggtgatgccatccagccatctcatcctctgttgtccccttctcctcctgcccccaatccgtcccagcatcagagtcttttccaatgagtcaactcttcacatgaggtggccaaagtattggagcttcagctttagtatcagtccttccaatgaacacccagaactgatctcctttagaatggactggttggatttaatgtttaatgtttaaaagtccaggggactctcaagagccttctccaacaccacaattcaaaagcatcaattctttggctctcagctttattcacttttatcaagagactttttagttcctcttcactttctgccataaggatggtgtcatctgcatatctgaggttattgatatttctcccagaaatcttgattccagcttgtgcttcttccagcccagcatttctcatg

SEQ ID NO: 57405 - DNA, 981 bp, Bovine  19866881094667
  misc_feature (1)..(1): n is a, c, g, or t
ntgctgtgatgtgaatgtgtaccttctggaatccttgacttttgttccgaccgcatccatggatgagcaaagggtgaaagaagacggtgtctcccttctccatcaccaagtgcacccgggcgttgtttttgtcatagtcctggatcccgtggaacatgatgttgactcctccctaaaatcatgagagaagccaagttcaaaagtgaagaagccaagaatcaaaacttttatcaatgattcatcagggaaaacaaagcttctctaagttcttccaagagaaagagacaaataaattagattttaaaaaaattatttataccaaagcttctcagttgactggttttagaaagccatgagttgttaaaatcagagatactttagactggatgaaaaacttggaatttccacctatggttcattactgaatgataactgaagacccagatcagctttgcattttgtgggaatgcaggagatcatctttcctggtaaacccatgctcattctttcccagcatgctcttctcctcacctggaacttgcatcagtcattcctctattactcagaagtatctcttaagaagctaactcagagagaggctcgtctccccaaataggagagagaaagtactcagtatttctgagctcaaaacccactcatgttacatccagagtaaagaaagaaagtaaattaaaatgttacattttaaaattatttcaacctctgtttttcaaagtcactgcacacaaagaaaaaaaaaaaaaacccacaactttgttttcaaactattttcaaagttaattactgcattagctagtggttatatcttttatggaaaaaacctaaaatgagaagctttcaagcctttttgggtcttgggcactatcccatttcctttcctaagactatcccaaacccaaattcctttgggggaatgactacttcccgactatactatggtgagtcttgactcctgcccag

SEQ ID NO: 57406 - DNA, 1218 bp, Bovine  19866881109908
  misc_feature (1)..(1): n is a, c, g, or t
nagcatcagctcctttgtgcatcatctagagccacagtccccaacctctttggcaccaaggaccagtttcatggaagacaatttttcctcagaccaggggtggaggaatggtttggggaagattcaagtgcattacatttattgtgcacttttattattattacattggctccacctcagatcatcaggtattagatccctgagatgggggactccctatctagaggtcaccacctctaccgtgtccaaacccagagagttattgtgagggtcacatgaaaaacagatgtcagacactataaaatgcaaaatgtttcagagactgcttcacacatggttggtgctcagtgcatgactgttgaatgaggcaactttattccatgagcccatgtatcttatagacagagagaaaggcagcttgcttcgtgtaccactgaaaatgaatccattgtcccaggtgtagtctgccttccactaaatgaaagaggcatgcaagacttgacacacagtaggcacgtgagtctgagtcgactctgggagatggtgatggacagggaggcctggcgtgctgcgattcatggggtcgcaaagagtcagacacgactgagcgaatgaactgaactgaactgaactgactgaggcagacttcctgagagtcagtatcttaaagccttgagtgcattctcacaggaatatcaaagtcctttatagccctgttaggtgtggtttcagggtaatctgtctggagacacagacaaacaagagtaaccttgcccgttcttcctcccctttggattctaaaagagcagcctggagaatgttgcaaccggggctgtgattctattagggtccagcgaagtagactgtagatgaacctctggcttgtatctatgacttttttgtttactatgattattcattcgtggaaatggctctttgcaatggaatgctgtctgcctcagaaatctaatgatgagggttattaatccttgaagccagggtgatcatcaggtggactgaggctgaaatgattcaccattgtataatattttgcacagttgtgttcattatataagatcttttctcattttcttctttccctacccaatgccctactcacatgtgagtgaggacaccagcaccctcacacaccatgtaacacatgcagcacgtaatcacaagcacctggaatatttgagatgggatgttgagcctatg

SEQ ID NO: 57407 - DNA, 1605 bp, Bovine  19866881123842
  misc_feature (1)..(1): n is a, c, g, or t
ngattaaggttataagaacctaggtgcctggtaattgagggaacatggagacacctgctcagagcctaaagaagaaagaagaatcagatatatatgggactgattggagcatcgcagggtttttagtgtaaaagcatggaagtcttttttttctagtattgattctgagacaccttctttaaccactggaagtaacagaacagttgactcttgagaattccttttggattattctcaaatctgtcatccattcactgaatcgtcccaaaatgcttcctaaggaaatatagttcccacccctccctacagcaaatcctgctgggatttttattgggattacagtgattcactggtttagttcctgaagaattgacatcattacaacaccaagcctccagtccatgaccagagtacttccctatcttgtttgaggtcttgtttttctcatcagagtattctacttttcattgtggagatccgtccacctttcactagatgaatctctaggtattcgatgtcgtttgatgctgttgcagatctcatgacaggggccccttgaaggcacaccaatccatttctaagattttgctctccatggcacaagaagcaaagtaataagcaacgtttcctttcccagggagtcaaagtgccttgtgtaaccatccaggtagaaaaggtataatagcttcactgcgggaaacctatttcagagtccaaacattgcagcccagaaacgattcttctgaactaacgtaaatgtctccagttggcatttcagcttattttccttttgtttggtttacagtttgccttacacaatggtttcctatctagcaggctgctatttgaatcagcaagcagatatttctatgctgcatgtaaaaattgggataacttttattaggagggaatttgctcatgattcagtcttgcattcaaaaactacaataaaaatctcattttattttttaactatatgtgcttagctaaaaagaccaaaagaaaatgcttattggtggttacctctgggtgactaacttatggattatttttatacctgtctacattgtcagatttttatgataaacatgcattatctttgtactaaaaaaaaaataaacactttaaattgaaagaaattaaaactatgtattaaaatgactggctcaggaattccctggcagcccagtggttaggactctgtgctttcgttatcaagggtgcaatttcaatccctagtgggagaactaagatccctcaagctgtgtggcatggccaaaaaaaattaaacaaatgactggctcaatttacttccccttcttggtgcaaaatatttatcaaaatttgctagtgaaattaaaatggatgtatgacacatcttaagataatcaaggaagagaaacttctctttcgggcatgtacatttccctgtcagtctttctgaccagttgcaaattacccagagtgctgagaagttgttcctcaagcttggagccccaagcacctgtttatttcacactccgttgattccaggggtaaatcccacatccacagcgtgggcttctgttcagttacctttgggtccagatgtgcatcccttcgtca

SEQ ID NO: 57408 - DNA, 1905 bp, Bovine  19866881175911
  misc_feature (1)..(1): n is a, c, g, or t
nacattttcccagtaatgggactcactgtatggttctctaagggcagttagtttccattcaacagatgaatcaaagggcaaagcagttggataaccataaagataacatctatatacagtttttgctttttttttaagaagcatgttattcttcaatcaaagatagtcagcccttaagtcttcatgaacaattctaaatgtgctttattaaatttaatagttcttgttaggaaaactcatcatgaataaaaagcaaattattttttggcattctgatattgataaaggaaagttctatttcactaatgtacatatagcctttatcagatctttctcaatttatctctgaagtatgtttagagcttaaaaatttttaaaagaggaagttcagtgattagaatgagattgactcattttgaagatgattttcacaactccagtgattgctcctgatacactaatgcctattacaggaaagaaggctctaaataattcaagaaaaatataaaagtattgtgaaagctgcttcaggctgaatgtactttgtgatggggtatcacctgtctctgcttccaaatgtgtgattgacatgggttttgaacctaggacctaagctacaataacaaccggataggaggaaatgaaccagctagtccagggtggaaggctgtcaccattaatgattttctaaggctaagtttttagtctggaagaacttcttaacaatcgtgcgtgtgttcatggataaaaaacaaacatgaactcttctcatcaaggaggagataaaagttcaagtgattttctagtctaataaagtcacgagacgatcattttcattgcctccctttattaaagacccaagctagcagcttgtctttttccaatgtgaaaggaatgctgttttaaaatagcaatgtatttcttatttaaagttgaagagtaggaccacacttgcatcctatataggcctgtgggagttctcagcagggttctcatcctatgccatctggtaataatagcccactcgttctggtttattttaggaactctcccaacaagttggggttcacagcatcagtgtactcagacactaaggcgagttcgctgtggctgacagaacatgtcgctaagttcgtttatggccgtgtgactctaaaatggtaagtcagacagttgtcttagatgtcatttagtatcttgggctgtgacgaccttcgagctatgatattaaaatagaaaaacctttgcagagtgttaacctatcattacagactcaatggcacggcactgcaacccaattagcagtgtggcttgcatcctcgcatctataaaatagaattagcgtgagcactgctcttttttttattattagtttgtgtttctagaaaggtgtgacttatctgtagggttctgctcatttatgtccatctacaaaggatttaattacattcttttagctctctatgctgaggaaattgaaaacggccgcttcgaaattacaaatgttaacgaaattagtgaacagaatatttactccatcaccctctcctttcggagagaatggaaacaagctgaggtaaataaggcctaagattttcagaagagaaaattctgggcaaggagagcattaagagttctcctttcctctttcccacgtgtattctgcaagcttctctggttttcttgggcagaactagtgaagggcaaagtgtataaatatggcacagtgtctgaaagttacatattagcacgagcagctagaaaacatcacttacatcggaggctggtgattcaagcacgatgccgaatcctagaatgtggctctccccaggggaggcgtgctcggccacggggagactggaattatcgggggcccctgcagccttcttctcagcttccaatgca

SEQ ID NO: 57409 - DNA, 1505 bp, Bovine  19866881210723
  misc_feature (1)..(1): n is a, c, g, or t
nggatggaggagcagttagtaacatgcatgttctgaaatatttatcagtaggcaaatctcttaattgtaaccattatattctgttatgaatgatccactaatttctcaatttcattctccactgtttctcattcaagcttattcttggtgtctttttttcctctccaaatgcctagctcttcagttatagaagggaaaaaaaaaaaacctcttgtgaaacaatctacttttccttttttcctttgtattcttgtatacacatatccttttggttccatatgaaagaaagtaataaaaaaatttaaaaaaggactttaagcaaattctattctacttacatgccctgacctaaaccaactacctactagtcttctaatcgaattttcaaagatcttcaaagagtcccactggatatatatcataattaatgatcctcaatattagaaaagtttttttctgaaagcactcctgttgtggctttaatgtatattctttgctccgttgcagtacaccctcccatagataataataacatatattcacacagcacaaattcaggttaactcttgacaaagcttccttctgggcacagaggggtcaacaggttctcaacagtggggtgaacgctcaagggatgtttggcaacatctggagacatttttgattgctacaacttgagaggtgctactgacatctggtgggtaggggccagggatgctgctaaagatcttaaaatgcacaggacagtgactgcaacagagaagtgttcagactgaagtgtccacagtgcccaggttgtcaaatcccggatttggaggaataagggctgcagggtaaggagagaacctcagaaacagctacaggaaattcaactccggtatcaactgtgcggtttaaatggttcagcgtctcatgggattagtcaatgcagagtgagtttagagacagaaaccagcctggagatcatctgaggtcttgagaattcttacccacatgcttttagttatactttggacctactctttactttatcatcagattaccaacccagtttgcctctatttttcatcaggtaaaaagctgtaattcactatttgggaattacattttggcttggccagcttcactgtcaggctcttgacatacttccctggcataatgtgtgggatttatttgtaatataaatttctggtttgttagtccctggctctgactttagaaactgccacatttggggaggagagggttggactttcccaacattaacaagagagcttgaatgtttttgtccgtccagaaaaatgtctatgtgtcaaatgtcaatgacataaaagtattcctaatttcatagcaggcatgactaaatatagaatggaacgaaaccttccaatggctttgtggagccaagaacaataatgatctgtggtactgcagagtgagtgtccttgcctgacaacttttaaatgtattgcctgtcttttcagcaggatggccacaaggggagt

SEQ ID NO: 57410 - DNA, 1407 bp, Bovine  19866881225107
  misc_feature (1)..(1): n is a, c, g, or t
naattcgtctagtcaggctatggtttttcctgtggtcatgtatggatgtgagagttggactatgaagaaggctgagcgccaaaaaattgatgcttttgaactgtggtgttggagaagactcttaagagtcccttggactgcaaggagacccaaccagtccattctaaaggagatcagccctgggatttctttggaaggaatgatgctgaagctgaaactccaatactttgaccacctgattcgaagagctgactcattggaaaagaccctgatgctgggagggattgggggcaggaggagaaggggacgacagaggatgagatggctagatggcatcaccaatttgatggacatgagtttgggtaaactctgggagttggtgatggacagggaggcctggtgtgctgggattcatggggtcgcaaagagttggacacgactgagcgactgaactgaactgaactgatcccgttcctttacattttattttttttacttttattttttggtcaaataggcatgtgatccccgatcagggattgaacccatgtcccctatattggaagcacagtcttaaactctggactgccagggaagccccagctatcccagtcctgtctgagatttgtcttctctagaccagatattcttggtttcctccaccagcccacattcatcttcctgattgtctctagtccttgtaaaaggtggtacctggaacccagttgtctgatcacagccgaccagagcaggccctttccttctcttatacagaagatgcctgaagtggaaagaaaaatttaagaattttttggcagtcatgctctgagtataatacaggtactcatcacactgaatataattctgatttaaactcctaagccattcctacctgcactgctgctaagctacaagcttttctattctccacttgttcttggacctgcacaagacctcagattgctttgtgattattgtttcctcttattgtcaggaaaaaattgtgaaagcctttgaaacaggcaaaaagatgactgtttccattcagtgaaattgctgggtgtcatctagcagattcttcttgggttgtctgattttacaggggtctgtgtctttcagtttttgattaaactattttgcaactatcaattgtagaacacacatggttctaatgagaagaattctcatccataaagaggcaagaatttggtctggtgaacatgcaattgattttcaccctgtgaaagaagctgctagtctttcatctattagcaaatttatttcagtattcctgattgcttttatatgtgtcccttctctcggtttcccttggagccaattgtaatgttttactgcctcattgttatttaataagttagttaaggacacatgttcattttatatttg

SEQ ID NO: 57411 - DNA, 1874 bp, Bovine  19866881260245
  misc_feature (1)..(1): n is a, c, g, or t
ngtggcatgcatataatacacattgtacatacgggacttaagcatccatggattttggcacccatggggatcctgaaacccatcccccacagattccagactgtttatgactttttccccttctttcacattactgtttacttaggataagtttatagacataggattaccagtccagaggaataacagttttatatgcctcgtcatatacagccatcttatttcccaaaagggttctgccagtttatgccaacagtcaaacttgcatgtgccaggtcaacacaattttatcaatattagtattatcttaatcgcttatctaatttagtaggtataaagtatgttctgcaatttaggggcttacgtgttacttgaacgttttccactttgtccatttatccatggaggcttgaagttacacttttatttgggaggagctctttctgtggtggtggatttagtgccactagctctgctcattcaaataaaaattttattttttattcaatagaaattgtttacagttagttgaatatgacattttcctctgtcctttctttttaaaagaaacctttgaaacattaaaacgatcactattttaaacatcaaagaggcagcgtggcaggccttggcctcgaggggagcaggttgaaaagtgctggggagctcagtgtgaagcggaagtgccagccccagcgccgctagtgcgaagcggaagtgccagccggagcggccgcgtgcaccgctgcacgctgtgcggctttgctcagataattgtcctgctcccttgtgtcctggcacacaactcccagagcttcctttgtgcttctagggagctcttctctaggagctgctagctcggggtgcaagaagttgactcaaagtaggattggagctttcactaagacccaactgcattgatccagtgagcgctgaggcagttagctggaatcaccatgagaacatcatctctctgtgtaattttccatttgattttttttaaagattttttttttttttatgtggaccgtttctaaagtctttattgaatctgttacaatattgcttctgttttgtgttttggtttttttgtctcgagacgcgaggggtcttagctccctgaccagggatcgaacccacacttcctgcattggaagtcttaaccactgaaccgccagggaagtcccctccatttgattttgagttaacaacagaaaagtgaaatacattaatacacttgcagaattctgtcagggggccaatggaccccctaggaagcattttctctgcccataagacacatacacatggactggagcaatcagaaaaagcagtttcagaactactagcattgatagccagtttcatttggaagcacaggatgtggtgtgcaggatgggccctgccaagctccatcttcaccaaagaatgtcatatggatttggagaatagccactgcagaactgacatcttttagaaatatactcttttttgtccccccctttttggggttatgttcctatttcgaatatgcattctcttttttcaaatgttaaacaatatttcatattttctttcagtcttcacagaaaaatattgcactgctaatcacgtggataaacttcctggcccaagagactgggttcagattctgcaggatcaaatcaaactggcgagaagaaggttaaaaagaggctcaggtatgaataagctgcaagaaaataattgcagaagccctcaactgaattcttagatgttgcaaaatacagttctttactctcggatacttcattgtcttttgtcttttgaaggagaagctttatataatgtgcctggttttgtgttttaaaatcttattcaaataattttaaatt

SEQ ID NO: 57412 - DNA, 1356 bp, Bovine  19866881263597
  misc_feature (1)..(1): n is a, c, g, or t
naaatggatggaacccgtaccctgacctgctggtacacaaataaccgtaacacagacatacacatccaggaaggcttcatggaggaatcagcaaataagcttaggggaaagtcaagaacttcagcttgtttcaggctgtacagtagtcacagctttaaatcacacaggggtggtggagaggcaagaatggcccagggctagaatctgaacatcccactggattccttggcccagtctcttcctgtgggtgggctgagaatggctcttcattgtaaatgaggtggtcaacccaggatgcttgtgttgctttgagtcccaaatatctacaagtcttttttcttctttgattagaaagaaaaaaacattctcctcttgttaggctttcatcacttatgctgtacactcatgtgttaactaagcatttccccttaaataaattgttttgacatttctttgtgttgcttctgatccatttaataaatgcagctgaggtctctgccacccatggctagacaggcagaagaaacaaacttggccaggctagcctagggagcgttcacttctcagcaagatggaaagattcctgacagcaaataagaggttgaaaaaggcctccaggggtgacatttttgcaatctttttgtgggttcagttcagtcgctcagtcgtgtaacccctttattcctagaaagcatgaaatgcttgccatttccagaagttacgcgtctttggagagagcaaagaggagctctcattttgctaatagcaaacctcaggtgaatcgttaagggacttctgatgacagaggtgcttccagtaaagatctggaataattgaccccatggaaaatgtacttagtgaagcagaaaggacaggtaaaacaatagttagcagataactggagaaaacaacttgaagtttatgtgctgatagctacaaactctttaagcagtggatgccaaaattcttcctactgcaacccggtgccaagcctttccatacatcatacttgggactttccgggtggtccagtggttaagactccacctgtcagtgcaggggacatgggttaaacccctgattcagaaaggtttcacatcccatgggcagctaagcagctaagtagtactgcaactactgaagcctgtgtgcctagaccagcactctgcaaccagagaaaccgccgcaatgggaagcccatgcaccacaactggagagtaaacctccgcaccgctgctagagcaagccctcaagcagcaacgaagacccagcacagcctaaaaaaaaataaagacataaatgaaatttaccaaatacatcctacttagggcgctgttcctttaaatgaggtcctgg

SEQ ID NO: 57413 - DNA, 2862 bp, Bovine  19866881280608
  misc_feature (1)..(1): n is a, c, g, or t
ncctcactgagcctgacagctgcaaggatctgccaccccaccctctcccgcctagtttctcctgtttgagaccctctgaggcctcagtatcttccttcttccttggctttcccctctctgtctgtcctagtggaaacaccgtgggcaggcatgtgacagcagctgccacgcttcccctccactccctgtccctccatggggactgacagacgatcatggcactgaccccccctccatgggattactatcagagacccaccagccagaggaaatggaatccccaaacaccatttggagggtatggtgttacatgaagcaaaaaggcaagtgacccaggctgatggtgccccctaggcaggggctggctctcacttttaaggtcagtcatctctgcatacagggaacccagaaacaagccgacggccacagggctccctgtctcagagaagctgtcagcctgcaggggccaatgatttcagagtaaaggaagacatcccctcacgccctgtctgggtgtatttgtggtcccttatcaagagaagccaggtcaggaccctgatgctgccttgtcccggggccctgggtactgcgtgactcaacgccaccctcccataaggagatcacgcagggcgagaagtccaagcctgtggaatgcttggggaaaatgagcagaaaggattactgggtgatgatctggcattattgtgtaccactcacaactttctaactgcattatgtgcttgtttattaatatttcctctcttaattacagtctggatttggctgctacggttagtcccattttacagatggaaaattaaggcagcagagcttcctggattgtcattaccccgcagctcagagacatggctggggtcctaaacctgctgttctgctcactaggctgcaatgccttccctggctagtgtggacaggatccctacggcttatttaggcctgaaggttgtccactgcatctgtgtatgggcacttttttttttttttaagctatgcatcatgacaatggttcatgctactggcctgtttgtgtagaagctgagctgtagaacctgggggcacctgcttcaaaagcatccctccctttgtcttgtcatcctcctaggacatttagacagtaacacggtgcctctgggtccaaaagggtgggcctggtcacagagatgcaaggggctgttctggcaggacagctagagacgtggatgaggatgaagccgttcatgctgacaaaagagagcaccagcgtgaaggaaggagtcacggctcagtggtgatgtttgcacacagagcaggctgtggagataacccagaagaaaacccagagacaggaaggagagagatgaaaggaggacttcccagctctgaaaggagcagccagggtgtaagcaacatttggaaacatacaaatgagataactgagggattcgttaggctcaaagcaactctgactccagacaagccagcaacattacagcctctgccggctaatgcatttcaccaggtaggaactaccagttttgtgaattatctccttgcagctccagtcccttcatcactggtttcctgaaaataaactgctgggaggacagagaaggtaaggcccagggagcatgaggaattcggtagagggcaatttgtttccacacaaaaggaaacaagagtgccatctggggtgtttgtatgtgcacgctgccaggctggaagtctggaaacggacacatgcaaagtctttgtgtgttaaaccagtcttgttctttgaaggcacattataaggctctgagcactgtttatcacacctatgctaccaaaaagactggcaacaaaacagttcagagaaatgaaaccgagagtgtcggcacacaggtggaagctcccagtctcagggttcagcccttttatttcctgtccagctgcccggtcacttggtctcttggcaagacatgatttatgtcctggagtttcattctgctaatgccctccacagtaacatgcaccccatgccagccaaaggagtcccctgaagccatcccggatgtctgaaaaactagtctgacaactggaaaggtgtctggtggctcagataataaagcgtctgcctacaatgcaggatccctgggttgggaagatcccctggagaaagaaatggcaccccactccagtgttcttgcctggagaatcccatggatggaggagcctggtgggctacagtccatggggttgcaaagagttagacacgactgagcgacttcactttctagacaagatgaaatgttattaaactgtaaacttcataaagtgcattagagaaatgctgaaaagtcatatgttataatgcaacaaaattgacttgttctgtgatttatatcttattatttttaaataaaagcccttacagaagcctaacaaaaagtgcttttggttacagagccataagaatgattagggaagtggcgttttcctttcaaaggatagtggttggggctcgctggccctacagtatttcaacacactacccagccatgcaaaccccactccactgtgacctgaaccacaatccgggaagagttcaaacgcctgattcattgagaatcagtagtgtagggcctaacagatgaactatggtgtaatgttacacggcagctacatcgggagatatgaaacattgtgggaaaaggaaagaatcaacctccctcttctgtaaagaggaaagccctctcatcctcccacatctcaaaatcccacacatcctgtcatcaaatgacaaggatcccaaagcgaaattctagcagtccatgaagggatctccaaggaggcaaggcatccaaagtaaattttagaagtttt

SEQ ID NO: 57414 - DNA, 1682 bp, Bovine  19866881300472
  misc_feature (1)..(1): n is a, c, g, or t
ntcttccttgaccttgttgcatccccccatcccatgaaacaataataacaccccctgggcaaagacacacggtgtgatcaagtgacttgcccagtcacatagcactgagcagacaaccttgaacccaggttggcattgtttcaaagtccatgatcttaccaacaaaattagtactgcctcaaggtagagaacagtcttgggggacaaaaagcacagctgaaggacacatcagtcagacactggtcagggcttgctgatttcaacattaattccaatcacagccaaaagggaagagaaagtgagtataaatgatgggcacctggtggcctagaaggacctagctattctagaatccatctaaatccagtatggggattttccataaacctttgttgaggggcctggaaaaagaagtttttttgttgttgctgcttgtttttacttttttaatcaagagccaaccttgattttggtggttaaatgagtttctcaaaatgactaggtggaaaagatctaatgctgggaaagattgaaggcaagagaagaaggggatgacagaggatgagatggttggatggcatcaccaactcaatggacatgagtttgagtaaactccaggagatagcaaaggacagggaaacctggggtgctgtggtccatggggtcacaaagagttggacatgacctagcaactgaacaacaacaatactcacgaaggcacattccaggacccaagaaacaccaggacagcaatacgtttatgaaaataattatttagggacttccctgatggtccaatggttaagaaatctgcctgccaatgcagggcacacagattcaatccttgttcaggaaggatcccacatgccgtggagaaataagcccaggccccacagctattgagcctgtgttctagaacccaggatctggaactactgagcccacaagctgcaactactgaaacccttgcgttttagagcccatgctctgcaacaagagaagtcactgcaatgagaagcccaagaaccacaaactagagaaagcccacacacagcaacaaagagccagtacactgcagagaagacccagcggagccaaaaaaaaaaaaagagaattatttaaaccaaagaaagcattagtctaaataggaagtaaggattatagaatctttcaaatgaatacaactgtatcatagaaatttggaaatagaacaaaataaaatcaggtaccatttgaattctatcagataatcagctatcatttgataacatttatatacatattttataagcatatttctagactttgcaataattctatgcatattatttcatatcctgccttcttaacaatattatatcatatgcacttttccattttgagtaatagttttcataagtttatttagttatataatatttcattaagtgagctataaccaaaattaatttaaatcattctgctcctgttggctatttagatcactgcaagtttttgctattataaattattctgcagtgaacatctttatgcaaatggaattttatttgcataaagtattttagattcattacttcttatatttactaccactctaggccagatcttaagcatcacatagctccatgaatgaattcacatgctagtcggtctccctagcttctgatctatcctgcataaca

SEQ ID NO: 57415 - DNA, 1783 bp, Bovine  19866881305512
  misc_feature (1)..(1): n is a, c, g, or t
naccctgggctctccgcaccggatatgagaatgcatcctcttgaagagaatgttgtcaggaaccaggctcatctgtttttacacatatggaattctgatgacctcaggagacagaaggggtgctttcctctctgaaagcagggggaaatttgaaacaaacagtcccccaaagaagaaagaaatccgttgtcctaaaagtaagggaaggaaatgaccatctctctgtttagacttttaggaagaaaaaaaaaaaagaaggaagaaggcatattcccagcagatctataaaagctgtaaggaaaagttttggcagataccccaggaataaatatgagggaaaggtctgaacccttctttatgatgagagatatttatttgcctcacaaatcctcaattatgaatttcttacagaaaagatgtcctaagagaacatgggaaatagagccacctggcagatttcaggataaatgtgtgatctctggaaagcgtctcagggaatgaaatgtgattttttgtaatgtgaaaagttcatgctcggaaaacttttcattagagtcagaaattttaaaaataaaatagttcatgttaaagagtattgaaatgggagcactttgaaaataaacaccttttggtggcagctaagagtctctgggactcagaaaaaaaaaaaaaaaaggactcactggcactcttagcaaagggtgaagagtacaaagataattaaaaagaaaaatagagggaggaggagagagagaattgagcaacttatttaaaaaattaacagcatctcaaaagaaacctggagtagcaatactcataccagacaaaataaactttaaaaaataaaacactgttacaagagacaaggaaggacactacctaatgatcaagggatcaatccaagaagatatgattgtaaatatctgtgcactcaacatgggagcacctcaatatataaggcaaatgctaacagtcataaaaggggaaatctacagtaacacgataataatgggggactctaacaccccatttacaccaaagaacagatcaaccagacagaaaataaggaagcacaagccttaaatgacacattagaccaggtagactcaattgctatctataggatattccatcaaaaaccagtaggatacactttcttttcaagtgtgcgtggaacactctccagcatagatcacatcttggatcacaaatcaagccttggtaaatttaagaaaactgaaaacatatccagcatctttttagattacagccctatgagagtagaaatcaattacagaaaaaaactgaaaaaaaccacaaacacatggaagctgaagaatatgctactaaataaccaagagatcactttagaagtcagagaggaaataaaaaatacttagaaacaaatgataaggaaaacacaacaacccaaaatctatgggatgcagcaaaagcagttctaaaagtaaaatttacagcaatacaatcctacctcaaaatacaaaaaaatcttaaataaacaacctaactttacagatgacaccacccttacgccagaaagtgaagaggaactaaaaagcctcttgatgaaactgaaaagtggagagtgaaaaatgttggcttaagccaacaagttcaacattcagaaaacaaagatcatggcatctggtcccatcacttcatggcaaatagatggggaaacagtggaaacagtgtcagactttatttttttgggttccaaaatcactgcagatggtgactgcagacatgaaattaaaagacg

SEQ ID NO: 57416 - DNA, 818 bp, Bovine  19866881342764
  misc_feature (1)..(1): n is a, c, g, or t
nacttactgatttgaggggtaaaacagtaaaaccacagctcctgtccactgacctctgatggcgggggtggaattagggtgggcggagcctgcagggggaagggggaaggatgacccttgctcacttccactcttttttccgtcttggtgcagaagactctcaggtcaccagcacactgtcccccttacagtcccctcacaaggggctccctcctcggccaccatcgcacaaccggccacctcctccccagtccctggagggactcaggcagatgcactatcaccgcaatgactatgacaagtcgcccataaagcccaaaatgtggagcgagtcctcgctagatgagccttacgagaaggtcaagaaacgttcctcgcacagtcactccaggtgagctgggccgggaaggccacacgaggtcactgtccacacttggacagaatccaagggctaagtagcatctgctagtctcaggtcccccgcaccctgcatgcgcctcccctgggctgccttctagcagggctgtgccacagcgccctctgctgcccacctgccagaggtgcagatttgtcattcgtagggaaatttgggggttttggctcacaatccatgttggcagcagcttgcttgaatgtccttaaattccatgggaattaattaggaaatcataggcagagtattctgaaatggccaatgagagtccactcataagaatcccaaagtggctgagaaccctaaaccatcatccaacagaattccaaagccaaacagctgtaatcttagctgtgtatttccagttcattactcagctgatatg

SEQ ID NO: 57417 - DNA, 907 bp, Bovine  19866881427990
  misc_feature (1)..(1): n is a, c, g, or t
ngcaagaatactgcagtaggttgccattcccttctccttttctctgcataggggaaatagtcttatcactagctcagatattgacataacctttgtcagctatctttaccagatagattttataaaaagtcatgtgaatcctaaataaaataatctttgcatagtgcagtgcctgcgtatgggatttgagaggagagaaataatgtgtttttgtattattgttaaacgttgtagtggtactagattgccatttcattaagacttggtgcgtttttgccattctcataagatacgtgttaagcatgttagtgttcacctgaatgagctcgtgggtatcggcaccaggttgcttcagctgcaggaaaacccggacccagtgtgtgttaatggcagtccatagacagccaggttgcagagcagacggaggtcgacctgtggtagagattcgtgtcactctgtaggacagaggcatcgaactcttgttcctctctgagttattcccaaatctccactaggcttaggagtgactttgagaggaataaactccggatacctctgtgggtgagaaagatacctgagaaaacatacacttgtgattctgtcattcggggagaaagtatcttggtatgctttgacttgttaactaccaccgttccttctagggcagtaacagacattacacaaacttgagccaaaaaggtatgtatggtttttgtcctttatagaaaattactttttgactgacagcctctcccctgcacctgccacactctgctttgggatcaggctctgcagaccacatttctcctctgcgactggctttgtgttaggttctaccgatcatgggccacgtgggagacaggagcccctaggagggaagggaggccctcttcctccgtgttcacta

SEQ ID NO: 57418 - DNA, 986 bp, Bovine  19866881499458
  misc_feature (1)..(1): n is a, c, g, or t
ncttctgctaaggcattcagttttggtcttggtggtggtgactcatcaaaaaagaggacatcatcctccttctgagatgcctcttccaaagcttgggcatctgcgtggttggggttcctttcatcttggggaattcagcccccgttggtggagatcgacaagggggctgctgagaagaggatggcatagctgggctcttgatttcactggagctttgcagaaagctttataaagaaaaaggcagtcacaaactatgcacacaagcacaaaacacacagactgggagattgcaggcaggccaccagctgataagtagacgttagtaaaataattttccatccttggttattcagattagcgcacagtaaaaacaaaactaacctcactaattcttcagttaactgatttttcactgaataaatgctaattgtttcaccaatttagaactgattactaattttatcaattggctttctagtggggtcggtatatggagcatcttcagccctgaaggtttgctgtgccctctggttagctgagatgcttcaggaactcactgaacctgtgtattttgtctattctactaggatgaggtaacacacacgatacatttggaagtcgtagaagaagggtgctgttaatataattcacactgattattttatatatgggcttttttttagttttaagatgatattttatttttctactatagttgttttacaatattgtgttaatttttgctgtataatatacctcctccttcttgaatctcctattccttcatatgtggcttcaagggctatgtaaaaacaacaaaggtcagaaatcacttgtccaaacctctcattgttgagatgaagaaactgaggcccaagaccccactgcccattaagtgacaggctgaggactagtaccaggtaatcctgagccagtcttcttttcactaccatattatccccacttctgtaagtttcaggctgagt

SEQ ID NO: 57419 - DNA, 1382 bp, Bovine  19866881571787
  misc_feature (1)..(1): n is a, c, g, or t
natcatctggccccacagtatcctgggaacgtggggccacaaggggcgaccagcggtgaggggggcaggcctggcctccagtaactcatggccccctcatgagcttgtggaatgccagcttgttggctgcagagaaacaaaggaccctggtttgacttcatttgtcaaaatgttcatcgaagtttgtttgtagcagcagctgtctggggtgagaaatagctgccacgggaggggagaggtcagacaccttatctaaaaggtcactttatctcccagcataaaactcacatcatggaagataggattccctgataaacactgttctccataggggtccacagttagtatgtttgagtggcctggagtttggaaccagagaagaaattcaaaattcctcgttgatatcttctgtccacatctgggaaaatccccataacactaaagtggaccccatttgatatgagatgttttagatgtccccttctcagaatttagtattggagaatggtgtttttgctattgataatgaatgccagcttctacattcttcattgtgtttaactgaatagctttgacttatgtgcatgctcagttactcagttgtgtctgactctttgtgattccttggactgtagcctgccaggctcctctgtacgtgggatattacagggaagaatactggagtgggttgccattttctcctccatgggatcatcctgacccagggatcgaaaccgtgtttcttgcatctcctgcattggcaggtggattctttaccactgagccacctgggaagcctttgatttatatacagatcctgtaaataaaatgcattttcctgagcaacatttgtaacataagatgtcagcttagaacacacggagcactttggaagccttttatataatacgtggtccagggcttcattctgagaccttctggaatctagaggatccaataaccttttaaaagaatggctgcacacagatggcagaggaactcttcatagcccgtgcgtgcgtgtgtgcaagttacttcagtcatgtcctactctttgcgaccccatggactgcagcctgccaggctcctctattcatggaattctacaggcaagcatgctagaatgggtttccatgccctcctccagcggttcttcccagcccagggatcaagcctgtgtctcctgcattgcaggtggattcttgacccactgagcctcttgggaagcccctttatagcctgaagatcatgaatctctgccattcttttttaaaaggttactttgcccaggatgctattatcctatacatttacatttcagggaatagatacagattacttttatgtagaatgagtattaaaactctacatattatgggaat

SEQ ID NO: 57420 - DNA, 885 bp, Bovine  19866881752894
  misc_feature (1)..(1): n is a, c, g, or t
natatcaaagtcaatttaaataatgttgaatgatactcttcaaagcaacaaaggcaaagctaaaatctattagcaatattcctgttcttcaaaataaattcaaacaaaccaacacacaattaatgtttcagctgaggttacaggaacaaattctgagtcccataacaaagcatccaagtcagaggatagctctgttacctgtgacgttctgggctctttcttacctcttttaagatccccgtgtgcctcgattttgcttttagaattgtctgaaattcctcagattccaggtaggcaagttgctctctcctttttttcttggcaggctccaattcatcctcagctagagcagaatgaaaaagtgtgagctgtcacagaggaactgcagagtcagtgtgcctcaccaactcagcttcccccagctctgttccccgccataagacccttcaactgaatttacctcccctggtaccaacaaagggaggctcttagaagaagtgaactgagaagtacaaactagaatggagggaggggatggaggtttaatcactaaattagaatctctttttcaccttaaaataagggccaattatgaaaagaggtaacaacaacaaaactcctatctacaaattgaggttaaagtgacaattgtcagcttcagttttaaaaattaaaatagggcaatttaaaacaaggtctgctcctttaaaacaaagtaaatctttatactaacatataggtgcaaagatccaatgagtaatctcaagattttaaattgtacataatttcattttaattcaacatgattataaaaaacaatcagttccagctgcagaaattctacttaggtactctccatagaggaaaagtggaaacaaaataatg

SEQ ID NO: 57421 - DNA, 790 bp, Bovine  19866881922692
  misc_feature (1)..(1): n is a, c, g, or t
nagagatgtctggaaatgactgaattatcgagactaactaatgaagaattttctgtaatctgtggagaagctttacccaaatctgggccaaaggttacatctgcatttggcagaccaaccaaagtccttgaagttcctaccaacagttccatctcacccgagatttgcagttaactaatatgctatccaacttctctttgatctgcatggtgagaaaaccctccctgtggtgtgtttaatttttgtgagaaagagaacacttcaaacaattttcacagtttaaattctacagagatttgcataaaacccaaagatgaaatcatgttatagtaaagaaccccttgaattgtttccaggccaaaatactggagtgggtagcccttcccttcttcaagggatcttcccaaccgggggatcgaacccaggtatcccacactgtaggcaggttctttaccagctgagccaccagggaagccccagtaaagatccccttgaattggtttcacggtatttcagaaaacagttatttcttaccagtatttctatgcaaaaggaattcttctatacattgcaagatttcatttaagtgatgcccaagacctggcaatattaaccaataatgacacacatcaaaataatgggttatttctgatgggaggagggcttagactcagaaaaggaatgagggaaacttcagggatgctgctagaaacttcctgttatctagaccttgttttacatcttgatacaaaatcacacgtacatgaagaatcactgagctgtacagtta

SEQ ID NO: 57422 - DNA, 904 bp, Bovine  19866882215493
  misc_feature (1)..(1): n is a, c, g, or t
naaaattatctccttttggggagaaggccatgctgtatagcatggggatcttagttccccaataagggtggaactcgtgcctcctgcagtgaaagcacaaagttttaaccacggaacaaccaggtaagttttacctactgaaaaaatatgggctttatactaagcctccctgagaacaggtgctttagagatttctctccataatatctcttctaacgaatttgctatagtgcccggttatctcttagagtaataatctacaaatcactggtgtcttgacccagaaagcctcgagtatcctccacagaaatgaacaagaaaatgatcggccgaaaacttatcagactgtctcagctcaaggaaaagatggcaagtgagaagctggaagaaatagactgggtgacgtttggggttatattgaagaaaatcactccacagagttctaacagtgtaagctattttattaatcagctgtttcatcacagattggcagtggagactcacgttcttgatttgttacctagagcccatcagtgtttcattttgtagtcattgctagtaagttcttaaattgccacaccatcacctggttggtaccagagggggagatatgtaaggaaggccgtacttaaagaaggtctggttgggataggtttcttgagctttttattgtccacatcattcttactcattttacttgttgtttggtgatgcctgtggatgccctacggctctgagtaatcccccttgtggaagggggagtacgtcctcaaagatcatttgaagagccttattagatgtaagatgtcagtcactgaagtcctgatattgctgacctgtgccagtacaggatggtacatttcatttgacaaatattacaagaaggtctgataaattttaaaat

SEQ ID NO: 57423 - DNA, 2331 bp, Bovine  19866880712006
  misc_feature (1)..(1): n is a, c, g, or t
ntattccactcttaaatatcagagtcagttctacataactaagaactgcacttggaaaaactgcacttttaaaaacttggtttttatgacatttaaaagataattgaagtatggaggaaactatcaggagatgaatgcaatataatccagagttataaatgcaaattcagagaatttaaattcatgattgacaaggcatacaatggttattacagaccaattgacaaaaatcctttacttttgtgatctattttccactcaagaacaacttttgtctaaatccattgttctcccttgagttttatcttttatcttgttcaacagtttatttaatttcaaagacaattagataagccaaagtaatggcactacagatgtataaatgtatcctgagatgaataaattatagacatttcaataagtaccaaatggaaactgggtagcctatcccatctccagcagatctcctgacccaggaattgaactggggtctccagcattgcaggcagattcttcaccaactgagctatcagggaagtctatgaaatgaaaaaggagcagctgtttgcttgaacacaaatgggtttgttgtttggaataatcatcttttttttttaaccaagcactttggccccttttgttacttactgaacaatttaagtgagtaattttttttaaattaatttatttaattggaggctaattactttacaatattgtagtggtttttgaagtgagtaattcttaatgtactggtctttaatgtctatcagtaaatctaatgatttttctttctcaaggtttctcaatgtttctcattgtcctttttctttctcaatggcataggtatgtgggttgactctttatatgtgaggcttaaaaccagagaaaaatatgacctcatagaaaaaaaatacatatatggcaagtttttctgcaaatgaaagaaatatttttcaatacaatcttgcctcactttgttaggccctttcctctatagagacatcagtttgaccatggtggagtttttaaaaaatacttgtggtaaataaaaaaaacagggttattggtttaaatacctttaaaaaaaattataccacttcactcctccgaacagcaatggattcaccattctacacaagagagaaaaaaaaaatttatgacattgcattaaatactttgcatgatctgaccacagtcacactgatttgggttggttactggggaccttaaatggtatgatatatacaaagatcgtttaaagggaaaccaaacagtggaggttaagagttgggacctagagtgcattagcttagggttaaaatgtagcccagcgcttgctagtttagcaactgcaaacaaattaattaaaatgcctaagctttgtttccctctctaaatgaggataatgattttaccttttccataaggtcataaagaagattaaatgagataataaattcaagtgcttggctgagtgcttgcgtttatgttcagtacgtgtcctactctgcttttgtggctacgttattgttgttgttgctgggatttttattatcttattctcatacatttgcccttgaagttccatctatctagagtgagtgctctttcatcatctctctgaatggtcaaattctatcaatcacccaagactcagctcatctaccacctatatcactgaattttgcctgtctagagaagttaattctcattcctcaaagacactgcaattcttatcaccgatgatagacatctgtactgaatttttacaggcttatttaggtatttacctttccatgtatttctcagctatattatagtgagctccctgaaggcaggtactgtagttatttctacatctgacagtttctgcatctgatacagagtccttagcaatgaatatttgttgttcatctcaagctccttccccactggatgaaatggccggagttaaagggctacataatctactgtgctggcatttattgtatgttgctgttaatgcttattatatcccatgcatttgttctaagcactttaatgttttatttcctttaatcttcacactgactctatgaagcaggtatttgcaattcatttagatctgaagatactgaggcaccgaaggttaaaaaaaaaaaaattttcctagtgtgaaataatagaaattatatatattggtctctgctggcagttcctgacacagacatcctaaaacccttgtaattttctgagtgataagagcactaagaggatcttttgttctaatacttggtctttgatcctagttcctgacccagctcttaaatcctttggaatttcctgggt

SEQ ID NO: 57424 - DNA, 996 bp, Bovine  19866880747594
  misc_feature (1)..(1): n is a, c, g, or t
nttatattgagtatcttttcaacctgaagtgcagacacagtgcatgttacctgttacactgcatccatgttgctctcatcaggagatcctctgatgaaaaataaaggaaatttgggatgcaaacttcctctcaactttttaaccagggcagcttgccttcctctctagaaagtatatatcacacagccatattaaaatgggcctagggatggggaggtaggaaagaggttctagacggagggaatatatgtatacacatgactgattcaggttgctgtacagcagaaactaacacaacactgtacagcagttatattccaacaaaaaataaaataaccctaggattttactactgactcccatagatgtgcattttggttgcacgaatagataatgttagataaaatgtttggattaaaataatatttgctttaaaatccacattcatgatgtttaaaaatccatgttcatgttttatatttcaaacaatatgatgtttcaaaatgtatataattagctttcaaaatattttttcatttaatttgagaatcagtgtgtttaataggtcttaaatgaaaaacaatttttttttcttaagcatgaaagcattgttaggtaaatgataactccaaaattaaatgaaagtattaagaaagagattgcaataaaaatagacttcaatctaaagggggaaaaatagcagttaagactggacttaaagtaagttacatgtacccacttgaagctgagtttaacaaaatatgatttatgtgcacagcatttttgctacataatttataaagcaaaaaagtggaatgtagtcagcatatggtgacttggtttggaagagagaatttaagcataataattcagcctctagtttatgccttatttgaataaagtatctgtcttctctctgcctgctcccaccctcaggactcaatcccttataaaaacacactatcacattttatgtattttctgcattgctttcat

SEQ ID NO: 57425 - DNA, 1525 bp, Bovine  19866880832201
  misc_feature (1)..(1): n is a, c, g, or t
ntgagaggtctgcttgtgttatacgtcaaggctactgtctaaaggagaagcacttagaactgcatattccttaaagaaaaactgacaagcagaatgagtgtcagagctaatactctaaaaaataaaaataggaagaccttttgaattttaaatcatctcacagtctgtaaatataggtttttcatttaattgtagaaactctcatgaacgttttacatatcagcaaatatagcaggtaatgaactgttgatttgaaagaagttcaggaaatgcagagcttaactgaattgtctattttccattggaggataaattgatgtagtaggagaaggggggcagtctattgattcactccccaaatccctctgatccctactgataaaagaaagggagtctaagcctggttttcatccaaagtataatcctgtgtagagagaagtacctgggtctcctcaaatctaatatcatcatcacaatagttggcctcgtgacctattttgagttttatcagcacctcatgtataaaatagcagttgaatctgcacatagaagcagattcctgccatgtgctaaatgaagtgctgtggattatatcttgctggtaagagacaggaatacagatagtctttcctaggatttttccctttcactcatttctgaaattaagttgaggctaggctgtggtagagattcttggttccaaggagaggtggaccactttactaacacctcagccagtcttaaaatgctaagttggatcctagccgagtcagcatagtaagcaaggagaggaggatcacagtgaactgggaaagagaagagactccattttaatatgttaccggcatacctaacacctatccattgtacacctgttatgcgccaggcacagtgtctggtgttgtcggatcagaaggtgaattggacacagttcaattacttggaagaagtaaacaagcaaatcagatccacaccaaaaatgcaatcagctctatgaccaacatgcaaccacagtgctaagagataacacaggagaatctaagtgataaagaaaggaagttcccccaagatctgagtgatgagaataatacatcatgccttttacatccaggaggaatatatggatgcttgatctgcatgactcattggacagacacaaagcaggatctaaagcaaaaattgcaaatgttgagggtaacaaagaggtggttagaggaacagagggtacctagtcagtgagaggacctgcgtgctgatcaaggagttaacagtttatcaggaaagccctgcagactcattgaaggatgttaagcagaagattgacgtgtccatatatgtgatttaaatatagcctctggtggctgtggggaaggcacatgtggggaaccaagaccagagcaggaagaatatttttatatattattttcttattggagtatggctgctttacaatgttgtgttagtttctgctgtacagcaaagtgaatcagccacatgtatacctgtatcctctcttccttagatt

SEQ ID NO: 57426 - DNA, 1450 bp, Bovine  19866880966648
  misc_feature (1)..(1): n is a, c, g, or t
ntaataagagtttcttagtaaaatttcctcccgttgaacttaaataggaagaaagtcattttaactaagggaagtgtttggccaaaaactggaagactaatactgtaaactgaaatactgaatatttcttttctttaagttaaatgaaaacgcaataagctgatacataagaacaaatagaatagattgctcatgcagcgatgtcagggtgcaattacattagacccatgcaaatcttcatttgcccgactttcaaacattttaacgtaaaatttccacaagtttataaaatgtttatgtttataaagtaacttgatgtattttttcctttttttgggtttgtgtctctgtgtgtttgtgtgtttctagtgagtagaacacagccagaagcagcgaactatttttggagaaaaaatcatttttaatttaaatgtgggctttatagacaagaagaagaagccctgattgcagttcatttcaacaaattaaaaagagcctacagggaaaacttactggtaggaagaaatgcaatcaagtgtgcaaccatattgatcttcaaacacaaagccgaatagagaataaaatacagtctcaaaaacccattcatttctgttatgaggatacagcagatgctggtttaagtacgagaataaaacaaaaagcccattgattattacagctgatactgacaacattggatatacataactctccatagtttgtaattgttcgtgtcctcaggcgaagtactaacccagagctggcactgagccacttttatctgaacagactctcacacattaaatatttaggtttcagcgagggaggaaaagggaaggaaatcaaacagattcaggggactatgtgcgggagcatttgtcagactgtaaacacagcatgttcaaagcccctcttttgctccccttaaaacttctcttgtctttctttgatcgacagaagtctcctgagcagagtttataaattaggccaaaacaatgacttgagataactgctgtcttaactcctaaacagaaatattatttttaggattaattcttacagcagaacagtgccttgtttggtacagaaggatgttgtcagctctctctgtagatcctcgtggtatgagaagcactacttgctcattcagacagaggaagcataaagggttctagaatgattgagaaaggggtgatgatttcaagaggcaaggattgaacttattgccctgagaactgttctccctccctccttcctcccttgcttctttccttccctaattcattcagtcaacagaagagcatgttgttgtgtagttgctcagatgtgtccgacttttttgcaaccccgtggactgtagcccgccagtctcctctgcccatgggattctcgggcaagaatactggagtgggttgccatttcttctccaggggatcttcttcgctcacag

SEQ ID NO: 57427 - DNA, 871 bp, Bovine  19866881157888
  misc_feature (1)..(1): n is a, c, g, or t
ntgtcctgcttgatttactccagggcttcctaacacaccttgcttctagtcctcccacctcacatttatcctgtgtcttgaaatgcacatcctataaatgatcttaaaatgactctcttcgtcctatcatcaaccgcagcttataaaattgtcttaaaagcctaagctgtcatttaaggctctcagtatgccgaacaaaactgtgattttcctatcacatctcccactctttaggagttatcttcctttggaaggctaatgtatatttttctctaaatatgtcagactctttccagacctggtgattttttttcatgctatgaatgcattcctgaaatgcactcttatctcttcttcatcgtgctaaatcctatccagttttgaaggtacaagtctttctctccatgaactcatccaagactatgccaattttagtgaatcttacttccccgaagtcctacaatgctatttaatttttttttttggtttatttcttttggtcgtgctttgtgatatgtgagttcttagttccccaaccaggtatcaaacctgtgccccctgcattggaaatgcagagtcttaaccactggactgccagggaatgacctccaatgctatttaattaacttatatggcatttatacatattattctgtcttgttaattaactttttaatatttgcctatcctgtctttaatttcctccaagataagtactaaatatcaataatcatttatatgaatattaagaaatgtctaattgaactctgtacatagtaagtacttaattaaatacttcatgcattaattgagtggtaaatgaaattagcgcttctaagacaggccaaattggagcaccttcaaaatttct

SEQ ID NO: 57428 - DNA, 843 bp, Bovine  19866881428313
  misc_feature (1)..(1): n is a, c, g, or t
ntggggtcctttagttattatcattcatgattcagcttaaatccaaccacttccatgaaaagggtatcgaaagccgtgctgtgccctcatactaagctgctttagtcatgtccgactctatgcgaggctatgggctacatgaatgcaaaagctctggggtgctcaactgggctccatctcaagtgctaaaaatcttctactggcttattttgaaaaattatttatacaaagtcatgcttgtaacattctgggctctcgtggttattagatttcacaccgaagagggctgagggctaagagtatcattacaaggagaaacatgagggaggcagatactcaaagagtctgaattcacacctccactggagatactgagagaaaatataggcctgagagctccctggaaggcgagataagagaaattatagatgagggagctctttgtggcatcatagaacgatatctgctcatactcgtagtccaggaaaactccaactctgtgcacttgctctctcaaggagacccttttgaaaggggggaaagtccagaaggtgtgatcggttcccatgagagatcctgtgagcaagaccttatttccggagctgtttctgacggtggagctcctgtacacgcccagctgccactgcgccgccctgcccacgtccacctcccagtagtgccgccctgaggtgaagctctgcgcacccagcacggtggcactgaaatcaaatctctcagggtgacccgggtacaccccgctgcacgtttctaagtctcacactccttagatcctcggacaagaccagatagggatgagctgttttagggtccaaagttataggt

SEQ ID NO: 57429 - DNA, 1373 bp, Bovine  19866881428998
  misc_feature (1)..(1): n is a, c, g, or t
ntttacctggagctccttatttaaaattgcaaacttctgctttctactagccccttggcttgttccatataacatacaatgtatgttacttattttttgtgcctaggagagcatatgctctatgaggcatattttttttttggtgtatctactcactcgtctctcaacccacaagtagcctagaatatggcaggtacatcatgagtgcccagtagacgttagctaatcaattagaaaggtctggtgacatatggggggtacccaggaaagaaatggttatgatccaagtctctacgtacttcacaactaattctcttattctcttggagaattagtcaaagatgtaaatgtagtgattctattgctataaagagagttctaggccattttttgaggtaattttctgatcatggctggaattgagactatattaattggaatacatttcatctaatgactgctatctcaaacaggtgcttgctgaaaacaattcaggctgatcactcccacccagaagcggttgatctatcctggtgtaaaccttcaaggaggcaactaaccggacaccatggaccagcaactgaagaaaaggggaacgacacctagccagaaaggcctggggagaagagctaccagcacagacaagtcactgccagcccagcaggaacctcctgacacaacgtgcatcttatatgatgaggatgtgtgctatgaggctagcttccgggttgtcaaagatgatgccttctctgactgttacatagaatgcataataagaggtgagttttctgaacctattgtggaagaggacccactccttcagtcctttgaacgtctgaaagaaggatcagaacaagacctttctcaacaggttcttgcggcaagctcacttcttgaatcttccttggaatacatgaaaagggacgcaaaacaagaatttcctcaacaggtggttggagagaatccacttcttgagttttctgagtacaagacaagcaagaagcttcctcccggaggaatacccaacatggactttccagaatctaaacagctcacaggatgcactaggaggccaagtacaaataaagaatatggtgctcctgaaagacatgcctgtcctcacaacggatgcacaagagagttccagaataaaagatccctgaggaagcatcttcgagttcataatccccgagatcatgtgtgtgcagaatgtgggaaagccttcaaggagagtgcaaagctaaaaagacattttctggttcatactggagagaagccatttccgtgcactttccaagggtgcggaaaacgcttttccctgtccttcaacttgcgcacacacgtgcgcacccacacggggagaagccttttgt

SEQ ID NO: 57430 - DNA, 1230 bp, Bovine  19866880485811
  misc_feature (1)..(1): n is a, c, g, or t
ntatactattaccatgttctgagtttgagagctgccttaattcttcacatttgctgcatttcagtacaaatgtggaaaagacaaccaagcattccttcttgtaaatgttagtattaaattcagttgtgtacaacacaaaacccatgttcagagcagcttaattaaacaaagtgttattgtctcacaagccaaatatacaaacctgctgtccaggactggttctatggctctgcaattgttagggaccagcccctttcccttcacagcttcaccttccatcctgtgtttagaagataggcagtgttaataacgggttgcaagagcatctattcagacagatggatggacttgatatttaaacccattaccatgtacattgcacatcaacctgtacttaccctcccctggaattttagacaacagcacaggcttcaccattcctagttttgccctttcaaagcattgttcacaccacagataagtagcttccctagatttaaattgtctgatggtgacctccccctttagcttcaaatatagaagccaaatactttctgacaaagaattagagacaatctcctccttttctcctccctcctccttcaaagagctcattgctcagctcctgcaggtggttggatattcagaatcgaatttcttcctcctgaaaagaatgtgagtgctttccaagagttaaggttcaagaacttaatccttgactgagaaatatatttctttttttttttttttgagaaatatatttctaaagtgaaattagtaaatatcagttgaaagccactgctacagaaataataaatttgaactaaaagaatatttaccattttctaccaatttattttccagtggggagataagactaacacagcttgtacatacctttactcacacacctttagaacagttacagttatccattctgcctgttagaactgttgctttaaactaatagaatctggataaagttccagcagtataatgtagatcatattttcccaagcattagtatcagaaccacctggagtggttttaaaagctaccaattcttaggccaaatctcccaagtattcagattttatactctaagtaattttgatagcaactaggtttgagatttggtgttctaaactgaccttggtgtttctatgctcactttgatcctatctggccataggaaatatttaaatatattcaaattattatgatctatat

SEQ ID NO: 57431 - DNA, 3242 bp, Bovine  19866880569880
  misc_feature (1)..(1): n is a, c, g, or t
ntggctgtagggatttcagcctccaggattacacttaagggtctaatagaacttgtttcccccttggctacacagaggcaccaacgaggatcttcatccctgattacattggggtaatctgtcaatcgaaagatgttattaaacttatccagaaaagaccaacaagccatgtttaggggagagaaaaaattacattttcagatgccagcatgccatcacaaatagtctctaaagtaaccaacatagcttaggcaacattaaaattgaatcattggaaacactaaaaatatgataacaagagatagcacatcattcagttttatgcaccctgtcacataaattatgtgcagctcgagtaggttatgctcttttaaatttccctctgggcacagttttaatggcagcccacaagttttgatatgtcatgttttcattatcacttagttcaaaatactttctaatttccatgacgtctcttcttttgatacatgggacacttaggaattagaaccatgttgcttgatgtccaaacatttggagatttcttggttttctttttgctcttgatttcttgatttcactttggacagaaaacattctgaaaatttcaattctttgaattcttggagattggctctaagagccaggaagtagtccgttttggtaagtgttctatatgcacttggaaagggtgtgtaatagtctatgattgttgggtaaagagacctacatacgtcaatgagaccaagtctgctaattacattgctcgtatcttctatgcctttttggtcttttgttttatcaattacacactgcgtgtgcatgcgtgctaagtcgtgtcagtcacgtccgactctttgcgaccctatgaactatagcccgccaggctcctctgtccatgggattcttcaggcaagtatactggagtgggttgccatgccctcctccagaggatcttcctgacccagggattggacccacatctcttacatctcctgcattggcaggaagattctttaccactagtgtcccatctgcttatgaatggactaaatacaagatccagtctggatgacaaatgctggagggtgagggagccttcaagaataattacaatgtgtttaaattttgatgctatataaacctagtaatactatttgtaatcattcagtagtgggaaataaaagtgtatgtcacaatagcatccaatgagaatttatgtaatttttattttgctaaaatcaaaagaagtacaaataaattgttcttggatcctaggcttccatagcttcttcagataaaaggaaaaaacgaacaaggaaaggactgaatctgtatgaaatcactatcaatgagttacataaatcattacaaagtctcatggggaagttcatgaaccatttttcacaaaaatggagagagactgctatcaccaagtacatttctattctggctaattcccaacataactttcctgggaattagcactaactcacactaacttgaaagtattttataagtggttgctattctgacccagtttcatggggtcagttacattttagtaataagatgtgaagaaggagtttgtgactctagggtacacattgactaaaactttatatttacagacatgttaatctcttaaaggtgtgggtggcaggattcctcctccctctcaggtctttgatggggtgagagactcaaactagggatcaatgctcttcctatattaaacctccacaagggcatccatggacaaatctcagtgactctggaatcaatgttagtctcttaaatacctgtacctctgttaaatcagaacactctttgatattagtgtcctttagggttagtaattggatatgcatcatcattttttaataactatctttcttcttagaatttcttccttttgtctgttattttcctttttgggggaggatctaagctcttggttctgagggtgacctgatataaccttgctgtgtatttgagctagcataaagattgtcctaaagaattccctacagagactctcctttgtagctgatatttctaaagataagatcagatgagaccctgagctgattcctgaatccacccagatatttaactaagttaacttaagggtaatttcctattcagagatttgatgtctttatgagctcattcttaatcatctcttataaggtcaattaacttcacctttttctatatatgccagctagcaacatcatgtatgaccttgaccacaacaggcctggctacataatataggattgaatatgcccaggtctggaaaaataattgacagcgcatagcccattgaagctaaaagagcaatgtcatttctgtctgtgagggcaggcacattaaaacataaaggctaatctgtgggctcacagggccccactaatccttgccaaccataagctgctttgcaaattttatcatgaacttgcaaagcttgtttgcagctctctaaaaatcacagaatcgctgaaatgtttggttggaggaccccgtaaggtcattgactaacagagttcattaacctatctctagtcgcttttccttaaagcatttctgacagagaagattctcttagtctcaaatttctcaagggaaagacagtccataacctctttcgtagtcccttctattaaaagacatttcaaagatagaaatttttttcttattgttaacttatacctttgttttaaaaaaagagcttcttaaaaattaaataaggcaacagaccactggggttagaagaaaaaaataaatcccataaagaaaaccaatctaaagaaatatgttaaactatatccacgattttttcctcgactcttattttaaatatttgatgatgctttgtgtgatggagttttatccatatatccatatccataaagctctttgttattacttccctatatttccagacttacttccaatcaccctccttttctttcaattataaaatttcaaaccagccggtaccagttgtatgatgataccaaaatttacattttttttaatttctcaatgtggaaaactaattttgttctctaagacatatttttcttacttttcaagcttctctgacctcatttcaatcctgtttgcgtaacatcatccccaaacacaatcctttctatacatatctggaatcagatcagatcagtcgctcagtcatgtccaactctttgcgaccccatgaatcgcagcacgccagg

SEQ ID NO: 57432 - DNA, 1663 bp, Bovine  19866880875959
  misc_feature (1)..(1): n is a, c, g, or t
ngaaatcccatggacagaggagcctggcagactacagtccatatgcttgcaaagagttgggcatgacttagtacacatgcaggattaatctcaaagctaccaattactatatgatggggaggggaactgagaaaacttcctgacctgattgacctgacctccatatgcacacttagaagagacagcgtatattggatttctttggtggaatgacctggttcacaaagcatttactgacccttttaatttggcttaactaatattgcatcatttggattctattacattattttcttttttcctctcctcaaattccaattactcttttgctgactgatatccaaagaggaatttgtttcagtattaatttgttcatttattctatgagcagaaacaaactgcttcgtaccaggtgctctgtggcaactgcaagaaatgatctaattcctgtcttcaaggagttcaaggctaagaaagagagcatagacatgcacacagatcacagagaggaaagggccatagcagagctgaatgggaatgagtatataaaatagctctttaatgttgatttagtcttgaaggaggcaaagggtttagcgaagtagatgggctaataaataagaatgaagggatgggactgccagtggttaagaatctgcctgccaattcagggtacacgagttcgatccctggtctggaaagattccacatgccacagggcaactaagccagtgcacgacaactatggacccggtgccttagagcccgtgctccacaagacaaagcaccacagtgagaagcctgctcgccgcagctggagagtagcccccactcaccgcactagagaaagcctgcgcacagccacgaaggcccagtgcatccaaagataaaaaaaaagaatgaagggatgaagtgcaggttgtctaagaggaacagtgactgttgaagcatcaggtaaaactgaggtggtgagggatgagagtgaccaagccaacttgagtcagaccttctgaagtccaggagagaggatttaaacctggattgtggtatatatcagccttaatttgatagtgaacaaacagctaataatatgcccatcaagttgagtgtatagggaaaaatctattcaatctccttatctataaaaatgtccaactatgcttatatgacatgaatacagccaggcaggatagttaagaagaatcagtcaaattgaatcttactacatagattccataagaaatggctggcaacatttcaaacttttatgagttgttctgatgccttgcaaacaccatcttaatttcttaggaacaaacctagctgaggcactattacgtatgagaccagctgtgtatctaatgtatatagttggctctctgtatccatggattctacatcctcagaaggattggaaaatactcaattagaaattccagaaagttccaaaaaacaaaacttgaatttgtcctgatctagcaaccatttacacagtgtttacattgtattaggtactataaacgatctagagatgatttaaagtatccaggagtacatatgtagttgctgctgctaagtcgcttcagtcgtgtccaactctgtgcaaccccatagacggcctcctaccaggctcccccatcccgggattctccaagcaagaaca

SEQ ID NO: 57433 - DNA, 1250 bp, Bovine  19866881058264
  misc_feature (1)..(1): n is a, c, g, or t
ntttactacagggttagtagaggataaattagaatcacctagatagcttttaaacttaaaaattccttaaataaatgtgtgtgtgtgtgtgtgtgtgtgctctgcttgtgctcattctcttcagtcatgtctgactcctaagtctcctcagttgtatccgactctttgccaccccatggactgtagcctgccaggcttctctgtccatgggagtccccaggcaagaataccagagtgggttgccatgccctcctccaggggatcttcccgacccagggatcaaacccacggtgtctcctgagtcttctgcatttcaggcagattctttactgcagagccacccaggaaacccatgaaggtagaatacttgtatcttatttttctttaatcaataatacaaaaattttggcagggtatatatgtttattttgagagagtatatatactaatatatatatatgttgctgctgctaagtcgcttcagtcgtgtccgactctgtgcgaccccagagatggcagcccaccaggcttcgccatccctgggattctccaggcaaaaacactggagtgggttgccatttccttctccaatgcatgcaagtgaaaagtaaaagtgaagttgctcagttgtgtccgaccctttgcgaccccatggactgcagcctaccaggctcctccgtccacgggattctccaggcaagagtactggagtggggtgccattaccttctcatggatatatatatatccatgtttgtattgactttttaaaagataacattctgtaaggaaagctatatttaataacataggggagtattcatatatccctttaagctcagttttttcatctgtaaaatagggttaatataaggctagttataggtcctttgtgtgtattaaatttaataatcccaataaagtgcagaacatgtatttcaaggcatagtcaataaatgttggctgcaattatttcatattgttattattatcattattatttgataactttcttcttcccttgcttctgtctctccctgaagactgtcagctatctataggctgttggttattcactggccataacagtaacagctttcgtttttcatagaaagttgctgtttttctcctcactctataatagtttcaagtttatgacctatatcattgatttgatactttcaatgaagataaatattctgctattttactttgtttcttttttcagatccattttcacagaagccacat

SEQ ID NO: 57434 - DNA, 1727 bp, Bovine  19866881077831
  misc_feature (1)..(1): n is a, c, g, or t
nctgatttttcaaacatatgctagatacgaggaactctcttgtttcgattttttcctttccaattgtaaaccaaaatctaaactcttcttaatgttcaaacacatctttcctgttcactgtaaactttgcttattaggttgtttataaagaaggaatcaagtacttgatgattcttgctacacagtttacctccaacaattccagagacccacggttcctttagtcttaagctttggaaatttggctgtgaagtttctggttcgctaatttcattagtgacttttagatgcacggagcttgaaaatcttaggaatattaacagttactttgttaactgtgttctcaagacaaaatgatattaaatcaagcaagagagctattgtttcccatcctgacaagaagcaaagaaaatgctgaaatacattatcttaaatgaagcattttaaaaaaactgaattgctttgactagaacaagtctaattttataacccaaaaaactgccaataagggaatttttatatacttttgagatatatattttttactggaaaactcctgagttaatttctctaaaagttctttgttaacactttctttgcaaaatcgtacaaggaaacaggataaatttatatcaccataaaataatgaaaactgtagtgtactggaaacctaattttggaggcatatagacacaaatattcatctccctgatttttaaatttggacaagttacttaatttccttaaagttgagttgtatcatctgtaagttaacactaatcataccttcaatgtaaggttattattattaaacaagaaaatgtaggaatgcttgggacttccctgctggccagtggttgagactttaccttccaatgcagcaggtagaggttcgatccctggtcctggggctaagataccacctggcatcccgcccaaaaaaccaaaacgtaaaacagatgcaatattgtaacaaattcaatgaaggcttaaaaacatggtccacatcaacaacaacaacaaaaaatcaaaaaggaaaaaaaaaaagacaaggttatgctaaacacagtacctggtatattactttctttgttttcttattacaattttcaggtgatatttggcatcacaaatgagaatgggttcccctgagcagtaggttgagaaaaatcactttccttcagttcagttcagttcagtcgctcagtcgtgtctaactcttggtgaccccatggaccgcagcacaccaggcctccctgtacatcaccaactcgtgaagcttactcaaattcatgatcatcaaattggtgatgccatttttctatggttgagtttgtgtccacaaaagcacagatttttcagtaatcatgactagtcactctctgtaattcctgccatccagttgttgaaattccccattagagtgtcatctgaccagctcagaaccccgtggatcattagcttcaccacaatatttatgacatgcagcaccatatgtttggaaacacaattctttctacccttgtttttacttaattatttctgaatcctgcactacttttgattacaatcatcatatactttactgtctagttttctcttctctagctgctctaaacctcatgagaacagggaatcaaccctttctattttaggtttaaacataactccatatttattttctttaaataatcattcctgcctagtttgttaccctagtaaatatt

SEQ ID NO: 57435 - DNA, 1169 bp, Bovine  19866881111228
  misc_feature (1)..(1): n is a, c, g, or t
ntgaaaaatttgaacccaatagtttggagacagctttacagtggaattttcctgagaagattactttaaaaagataaccttttctatgacattatttggatataaattattttgtcctctacataacacgcctcatcctgcacactattgtttggggatctctgtggaaggatgtgtcaaggtaattacagagggaggaagtgccattgccagaagctgattcattaatttccagacagattcatggcttgcaaatcaacagctgagaactcagaatatcttgggtaggagtaggagtggttgcagtaggttcagtgacaggcacctcttatgtctgtctgggaatgggtccattttgcagaatgggtcagtgttcagtgctttcattcttcatgtatttctagaattaaaggaagattctatttaaattgagttgaattagaggttttttaacagtaattgtgaccttatcatttcctatcaatattgctgatataaaaactgtcagcccaccagactggtattaatattctagtagttaaatttgtgttatacctataaaactatcttttaaactaaatcagttgtagattagttagaattggtaatatatcagctggattgtttgtaagaaacagaaagctactgtagttagcttagactaaaagataatttattagcaatatggtaggcagcctttatagtgtcaaaagaaaaattgaaaaatcaatactcagagtaaataaataaataaagagtagtcccttagaataactaagtgaaacatctctgtcaggtgacaactcctcattgtggaagagtacatatgttgaccttccctctaagatcaacagtacaggatctaaaattcaacagtacatgaactgatagcatctagatgtacaagctagatttagaaaaggcagaggaaccagacatcaaatcgccaacatccaatggatcataaaaaagcaagggaatttcagaaaaacatctacttttacttcattgactaaaataaataaagcctttgctgtatggatcacaacaaactgtggaaaattcttaaagagataagaataccagaccaccttacctgcctcctgtgaaacctgtaactcaggtcaagaaacaagagttagaatcaaacatggaacaacagactggtt

SEQ ID NO: 57436 - DNA, 929 bp, Bovine  19866881287114
  misc_feature (1)..(1): n is a, c, g, or t
nactggagtgggttgtcatttccttctccagtgcatgaaagcaaaaagtgaaagtgatgtcgctcagtcgtgtccaacccttagcaaccccatggactgcaggcccaccaggctcctctgtccatgggattttccaggcaagagtactggagtgggttgccattgccttctctgatatatactccagtatctattaaaataatttttggtatagttatcatctctgctgtgctgggaactccatgaaaggaagacttatacgggatgtattcctggttgtctgttctgagcagaaggcctggctcacgcttctcaatgggtgaatgaatgagaaagtacagtgtcggtgtttagttactatttgctgaattgacttgattaggccactgaaaaattgagctccctcaagtatctgttgttaaatgtcacttcagacttagacagcagtgatgaatcatggcttctgaaagaccatagttaaaataagcatccgttgcctgggaacagagcaagtcctcccaacagttttatggattatcttatcaggttagctcatatcagcaaaaaacctctatgagcatgggaaagaaaaagagagaaaagaggaaagataaaatcatcataatctcgatggtcatttgtatagaattttaccatttccttacactttcttcacctctgatttctatcacatgataggtattattattattaatggtgttatttgtttttgttgtcgttgactgctttgtgaccccatggaatgtagcccaccaggttcctctctccatgagattttcccagaaagaaatactggagtgggttgtgatatttccttctcccagggatcttcccaacccagcatggtgcctgtatatccctgcgttggcaggcagattctttaccactgagccaccaggaaaacccca

SEQ ID NO: 57437 - DNA, 1279 bp, Bovine  19866881328510
  misc_feature (1)..(1): n is a, c, g, or t
ntttaaatataaattgatttattttaattggaggttagttactttacaatattgtattggttttaccatacatcaacgtgaatccaccgcaggtatacacgtgttcctcatcctgaaccccccttctcacctcccctccccgtaccatccctctgggtcgtcccagtgcaccagccccaagcaacccgtatcatgcatcgaacttggactggagatttgtttcatatatgatagtatacatgtttcaatgccattcacccttttcttttaatgcaccaacaattcttctatttgctctaatcttctttgagaaataccctttgcttctatagctaatttttttcttttaaagtgaacctaaagaaatactctttatttcccctaaaaaaggtaacatgcagttttttttttaattgtggtttttatttgccaaaaaaagtctctctttaatagcaccacatgtgacaatagtgatggctactcactcaatgactgttgccctatttgtccttcagtttaagatttgtgacaaaaacagaaggccatctcctccctcaaaccgaacagttttctctgatgtcatggaaaagagcctttctccacatcctcactggattttcctgttcagtgtttagcctagcagaaccaaagcccacacgttattaaccagatgttctgcatagaattagaaaccctgaaatactggacagccaggcccccttagaaggaagtattcatgcagactgatttgctctctgctttagacccaagtcacatgaggttatttacaacctatcatttcctccctgagtgggaggaatgcttcacatattatcaataaaggcagtgtaatataaagcactctcctactctcgaacttttgggtttcagtttcccgcatcctctaaagggaaacagcaatgcctaactgaaaatttggcataacattgattctttttttaaaaagtgatggtagcaaaagtagtagcaaatgaagaaaaggtgagcaggagtgagagaggaagagaaggagggtgggagaagagaaaatatgtgagcaggagggttagcagtgtcaaatactgctgaaaaaataagggcaacaaggactagcagagaagactttcgatttgacatctcgggttcgtcttcttgctctaggaaggccttgcagcagtcatgctgaaggatacaggagcatgtcaaggggggtggaggcatgcagtctgagtgctctcatcactgggcccataccacgttgcacatctctatttacata

SEQ ID NO: 57438 - DNA, 1328 bp, Bovine  19866881578525
  misc_feature (1)..(1): n is a, c, g, or t
ncagtctaaagataccaaattcctccttgtactgtcatgatgcccacaaggcacactagaatctttcatttgaataaagcctaaagcacatgaaacaagctctattaaactttaattgctattaggaaagcatgacatttaaatctagttaccattttcccattgattgatctctggaacttggaaagtatttagaagaaataaaaatcactaattaggtaagaatagcagagtttgtgttggaagtggagctttatcagagaaaaaatgttatcctatccaaataaagagggagtccagagaactgcatgtttgtgatagaatccaagtagcaccaaacgtatacatcagctggcaggtttgactgagacccagtcgacccaatcttattccattaccaacacttgttcattcaagtcatcttctcatagaatcacataagtgtgttgatttgctcctttgtctttcatgcttggggtactatattttcaggtgcttgcagttgggcacatgttcagaggacttcactgtgtctcatttcccccaatagagagaatagtgatagaggagccacctggaaaatggaaaggagaggtttcccaaattttcttttttagtaagctactgaaatattgaatataatgtttccaattgtcttaatcttttaaaggaatttttggaaacatgttggtcagtagttttttaggctattgtttattcaatgaatgaatatatcattcatctagaatttagtacagctaaattacagcatagttcatagaaggcaattaccaattttttgttaacccagtagatgaatgctagttcttgattaattatgagacagttataatgtgaaagaatttggggtaggtgataacagaagatgaaatttgaacaatccatgtggaaagaaagtgttaggtaaaacataaggttaaaaataaatatagagtgggaaagtttggggaagagtaagtcatttagaatttaaggttcacagagaagtggaatggtgcgagaaaggtgaaagaagataggcagaaaccaggtcatcgagggtctttcttgctggacagagtagatggaatttattcattggtgagtcactgaagatttctgagctgagggagtttatgacctggcttgcactttaggaagattaaactgtcagcagtatatgtgatggattggagtgagtaggtactagaggcagggaaggtagttgggaaacaatttcaatagtgaagataagaagtaatgagaacttgaacggaaagcagctgggaatctgtaaagaagaagattggagtaataggagaaggtag

SEQ ID NO: 57439 - DNA, 1158 bp, Bovine  19866881693190
  misc_feature (1)..(1): n is a, c, g, or t
ntatatggaggtatttgctgagatatagttaacattttcattatagatgttacaaagctgaatgggtacattctagggaaagttttggaaacgtccatgtgcaattgtacagatttagcaagactatgaatgtgtgtgagaaatgtggaattgttatgtggaaacttagggacatgaattctagagttactacttagtgcctggaaaaccttgtgcataacctctcagattcttaattcattcatttgtgatgggagataataatttgcatgggtattgagaagatttgagggccccatccccccaaaagtaatttcagcgcttatggcagttactttatgattgttagctattgttatcactgaaaaatctacaatatttttgtcagacccattttcttctttaaattaacatttttgcttgattgtatttagttctgagtttatacatgggtattaatttgcacaattttgtaatatgtaaagtgcttcaagcactcagagaaaaagtattatgcaaatacaggacattattattcactgcattgatgtgtgaatgctcaaggctgcagacatattcatcttaaaggaagtattaacttctaaatctacatgaaccttacaaatgcacacttaataaacactgacaatttaaaatgtttcacttttctgttaaaattgaaaagacaaatgttaatgtaccacagaatttatgacaagattagaaaatgccagaattcaaacttttagtattaatttcttgcaaattaaatacagacaattataataagagatcctgcctatcatggccaattataaaatgttgcctgtatatatttgagctatgtacattcactattatattattatattatcatcttatagttgcattaatttgacacagcattcatgtatattttttaattctcataattctcttgtgagaaagtcaaggataaaaatttttcattataaatgagaaaacagaggcagagagagcttaaatcactggtctatggtcacattagagtctaagttcataccatattcactttattggtgggcaactcagtttagttcagtcgttcagttgtgtccgacttttttcgaccccatgaatcacagcaggccaagcctccctgtccatcaccaactcccg

SEQ ID NO: 57440 - DNA, 773 bp, Bovine  19866880500418
  misc_feature (1)..(1): n is a, c, g, or t
ntggattggtctgccaactggcactagcagtaaagaacacctgccaatgcaagagacataagagacgcaagttcgatccctgggtcaggaagatcccttggcggagggcatggcaacccattccagaattcttgcctggagaatcccatggacagaggaacttggtgggttatagtctgtagcgtcatagagtcagacacaactcaagtgacttagcatgaagcatgcaagaaaaaactgcttatctgggggatgtctcccatgatcgtaaattactgatctatggtttacaatgagtccccattttgaatgataattacaatctatttctgtacaattgtgtccatgtacatatttccactgaaatgttgcaaatgtcacccagataaactttgcttacaaatttcacagggaatcaatctataatgaggctgccctgtaaaatctactgtagagtatcctacaaatcagcattgcacagtgacattcagcaggggggccctgtcttcattagggggggatgtgctgagccctgtgtaccccggctgttgcagcttcttgctgacagatgccactgcctccagcctgctcaccttcctctgctctgtccattgtagttcttatcctctgactcctttggtgcaaaatgctccattattttcaatttgtgttatgcccatctcctgcctcagcctattaatccatgccagccacagagacaaagggaaacacatgattgcaccgtcagtatcaacacagttgagtttcaatca

SEQ ID NO: 57441 - DNA, 721 bp, Bovine  19866880835811
  misc_feature (1)..(1): n is a, c, g, or t
ntttttaagatgtcatgcccaacaggaagccaccatgtgagcaaaacttcagtcttatgaaattataattaaattaaatcgtatctggtagcttacatgcaatatgtattacagtggtgctgatcatatggaacaaaacattatcagctacaaagaggtataattagcttattcttgcaatatatagtcacttaaatttaaaaatatataaacaggaaagaaaagctaaaaaatctgaagtaccaaatttaatttaattttttaatattaatgaccaggttgtcctaacaagctggtttactattgaaattagcaaatggctatccttatataatgatggccaggagaaaagcaagaagcattgactaagcacttctcttctgaaaaatcctatagacgctgcatgtgtcatatctcatttaactgtcattcactattgtcctcaattttcatacggtttaaaaatatgataccaagaaagaatgacctggtgcaaaacagctattaagtggcagatctgaggtctgaatgctgtcagatgccaaagccaatattttgatcactgacatacaaagtgtcaattcatccttggattgtctagaaagtcctggatgaattagcttattcattgcaagttcttaaccgatttgttctgatcttgacataacacagataagccacttaagagtttaaaaccaaggagtgaacaaatgatttatga

SEQ ID NO: 57442 - DNA, 998 bp, Bovine  19866880903673
  misc_feature (1)..(1): n is a, c, g, or t
ntacttctctttgacctagttctgttaccagtaaaactttgtttttgtcatccagctaagaacaccctagttttgccctgatttgccacattgattcaatacccaaaggctttggggttctgcaagggctaggcatccctctctttgtttcagaattatccagttatgacttgatttttccgattcttggatttttgtcaaatctcactcatttctccatccatcaattcttcaaatgttcatgaaacatatattgtctgtcacatgagtcttacttcttcataactgtgtgttgtcatcttatatgtaggtaagaacctctgaattttaaggccgaaaagactatctatatccccagatccctacagatagattgctacttccaagtacacacagggggaaaagggactttttcatcatacctttctttttcttctaagaaatcacctccttaggtacagcagtattgcgctcagaattttgctcatcattcattacaagaaaaggacaaatttcagaaaaatgggaaggaaacatcagtggaataacttgatatctctttgattacacaataatgacacccaggcaaggagagaggcagaattacaggcaatattctcagcaagtgattgtgtggctgtgccgctctttaaatcatggagaaatttgtgccatcacagacaataccatttgatttcaagaggcagctatcattagagtttccatgttttaatcttgtttgatgaaataagtgtttgtaattctgtatttgatgctgtattcttaaaattttaaggtaacctcagttacttatttttacaagagttttatttttactgtggctggaataaagaaaaatgtcattttctgtaggaatatcctttatatcagcagtataatcatctgctgaattaatagattaatcttatcctctttctagtcacctgttacaagtcatttaacacctgcccagcatgtattctattccagggttttca

SEQ ID NO: 57443 - DNA, 1474 bp, Bovine  19866880911275
  misc_feature (1)..(1): n is a, c, g, or t
ncaaagtgatattttataaaaaattagacaacggattttctcttcagtatcttttattgcaaataggtgctatatgttcagcactgtgtgtccagtcctgggacttggagatgctgcccggaaagcaacaagtcctatcttgccctctaggagcttacatttgaattcttgaatcattcagtagagcctcttcctttctgactggaaaagtaacattgctgttgccattctgtctatgcaaatattttccatcatttcccagcattttcttttaaagagtttcaattatggattatatccacacatcaccatttgtgttcattcgtgagtccaatgttcccatttctgttttaaaaagccaatctttggcagaggtgagggattttgtaaagaaaaatatgttactcccgcacctagggagctactcatccttgagccctctcctcaagcaaagatggctatgacatgccttaaattgtcaacactcagggtttcacatgtgacatgaaagacagtttttggtgttgttattcagttgctaagtcatgtctgactgtttgtggccccatggactgcagcatgccaagctcttctgtcctctactatctcctggagtttacccaaactcatgtccattgcgtcggtgatgccacccaaccatctcatcctctgtcgtccccttctcctcctgccctcagtctttcccagcatcagggtcttttccaataagtcagctctgtcttggcatcaggtggccaaagtattggagcttcaactttagcatcagtccttccagtgaatacatgctttggtttctctcaaatgagaatccactttgagaggcatccaagctacctcatgacaggctgttcaaagataaggagcagattctggccccaaatcatccccttagagactttacagacaggaaactagaagactaagacagtctcacaagggccatcagagtgtgaaacgaatgtaagtgcttctctttacagtcacaaggttaaatgtgagctaagatatgcactggcttttacaatcattaaggaagcctttttcattcactttgtgcacaagagaattcaatgtctttgtaaacatgtataaaggctgaatttgcaaggcattttccccatgaaatcttcctagccgagatgttggctatttgccacaaaaatagcctctgcgaaagcctcagaacctcacagagtgtgggtgacagagcccggcacccgcccagaggtttgcccttagaatgactccactgagagcctcctacaggccatcctgttaaaacagatgctactgaagaaacagctgttgggggtgattttaatggtagatttcatcctcttagtgaggagacttcctcagcttggaagctttctgctgcttgactctaaatttatttgatctgtttcacagaatataaaggcaacaaacccatctttctttcattccttctttg

SEQ ID NO: 57444 - DNA, 1409 bp, Bovine  19866880927674
  misc_feature (1)..(1): n is a, c, g, or t
nactgccacttatatctatcgctgtgatttttctcttctaaattaaaaggaaagaagtgtgaaagaaactgtaaaatcaggctatgataagttcgaatcctgcacactctctcttgctctcgatctctcatttttaagaaaacttgtttttattattttttttaatgtcagtgatgtagtccattattaggagttattacccccaagtgcttgggttttgctatcaatatcactagtggaaggaataccaaaaaggctggtattagtggtttttactttatccttttcatgtcatggaatataaaacctagctctttaaaatcaattcctaggatgttacctgaaaggatccatcttatgccaaatacatgtcactgtagaaagaaatgtagtttgatgtgtttcttaaggtgtttaaaatggtacattcttggatcattagtgtgtgttgtctgtggacgacgacataacgtcctcatgatggccagtgtggattctgtcttgaacatccatcatctagtcgttctttgaacgaatatgcattaaatgtcatcgtgtaacttttgagccagataccatgctgctagttattgaacagggaaggaaaagaaaggaggaggaaaggaagggaaggaaggagcgagggaaggaaggaagaaatggaagaagggagaaggaggggaagagaggaaggggaaacaggagacgaatgaggaagggctggtaagtgacaccacaaaatttgaagtaacacagtcctgaattggaacccaaagttcctcacttataaattgtatgaatttaaacaagttacttaccctctctataagccttagtgtcctcaagtgtaaaatggggataattttattacctgtaatactgttgagagacttagatgaggagattatagttgtcctcaagaatattattaatgacactgaggtccagtccctgctctcaaaatactcagtctagtgacgctgaatgacatcgaatgagcaaacaggtgactgtgatgcagcgtcctgaagcaggggtgctctgggtgccagaatacgtacatgcaagtgcttgaggaatgtagtcttgatggtttagagcatctggaaggctcaagccaaaggatgcccaagaacccttttgtgaactgcctgattgctgcaagtattctgttctgttcttctgaagttctgggagcctctagatctaggcacagaaactgagtattgattattcataggctaactggtttcatcagggatcatttcagactattgtgtacagggcacaaagctacatcctatgaaattaagagatgaatgaaatgaaattcctgttctcaagtcgcatacagctatcagaaggagtttatctactttgtgctctcagtattttaacaattcaaaaga

SEQ ID NO: 57445 - DNA, 1294 bp, Bovine  19866880969079
  misc_feature (1)..(1): n is a, c, g, or t
nggttgaaatgagtttctggcatatgaaataaaattatgtcttcaatctacaaaaatttaatttacagcttagctgattggatggagcattttaacaccattttggaggtttaagaacagcaagtgccataatcctctgagtattttgatcactagcacacaggcatgtaacatactttgtgttcaagggaaacctttatccaggatgcaaagctggtgctgaattataatcacattcaaaaagattgcaagcctgtgggtattaagctttgcactctcaagcttagccaagaagatttaagcaacctactctgggatcatacagttgatctgatcagagtatttggagaccttgaagtttatttttatcagaagttttgcattcagggtctcaaacattagaccttttcagtactaagcaaaagtgtttccttgcaactccagcaatgacacttacaagcagatgggattcatgagagaaagaaaaaataaaataagagagagagagagagagggacagacacaatagtttacccctaaataaaagaaaatcttgaaggcctaaaaacaacttctgatgtcttcgatgttattccagatttctttgctgtatttgtctgaaaaagatttatcagatatttttgctactcaatttaaataacttaagtaatttaaatgacagatgccatctgtatcctaaagcagtcaactattttgctgaacttctttttttgttgttgttcagatgaatcagggagttatttatggagcaggtgttgctcatattcagtctctaataacagagacaaggataaaatagagatcaagttcagaatttttttcatctacacttccataaaatgactactgaacatttataaattaatatataactgaagaatgacatgaggtactcatacatgaatttctcttcattgtggatgtgagaaaataaaggtatacacagttcaggttctttacaataactggaccaaggttcttaaacctagcatcacgtactctttatttgttcttttgtaattagtgactatttggggagcgtttctgttacattaacatagttttgattgaaaattataaaggactatgatgatttctgacaaccagtctataccttctcatttatttatcatttgtttttccttttcttttttttttttaaatcaagaaaacatgcatataactcaaaccacagtttgttgataatggtccaagagaaaatagttttgtctttcaattataatgaagtaaaagaagtttcccaaatgggatc

SEQ ID NO: 57446 - DNA, 2825 bp, Bovine  19866880974021
  misc_feature (1)..(1): n is a, c, g, or t
nttaaatttgtacataaaatggctaaacacaaccctaagtatcttcaaatgcactaaagtcaaaccatcttcattgcgaatgttttgcttacgtacctaccactcaatagaaatcaaacaaaactaagcctctggcaattatttttctctttattttgaggcgggttaggagccatatacatatatataccctaggaattgcctgaactacctgggaatgtgctttcagattatccctctctctagtcttcacaggggtatccttgccagtgaagctctttgaaacaatgtttagctaatgactcaagaggactactcagaaccattgaagagcacctcaaaaacagatgctaaatggacttctgtcaggttctgctagtagagccatcagtagcgcaccaagttggaataaattgaattgaaatcaacaaaggcacatgctgtttatagcattacatcaactttcccttccctttagaattcagagacagtttatcataggataaacggtgtctctatgagtacttctggaagtccagtgcattctctaagcccaaaggaggatataagaattatgtgattcagatcttagttcttttaaaatgttattgcatgaatataacacattattgtgttattttggctgatgaattatcattatgatgtcccactttacattgtctgtatcaataatccatattatattaaacaaatctatgcagagaaatgtttttattgggggatgcagtgaggaaatatgagcatctggcaaccacaccttgattcattttagcccctagagtcatggtatggtgcattaatttctcagtttgtaatttgccagctgcatttaatggaaccaattttcattacatctgttctatggttcaaagagctcttttagttgccaaagggggccagcttcacacagattctgagaggggctaacacactgtttcttaaagtattcaataaccaaggatgattcctagttttacagcaaacacattatttttacagaggcaagttttatattcatgacttaccactggtagatttcaaattaaaaatatagcatgcccttttcccaggcattacatattgattttcatatctttcttcataatacccactgatctcctgtctttgcaatcggtggtagatttattgtttaccagttaaaggaaacataattatgcttaagcagatcctctttgtaaattgcaggtggttagatgaatatttcttagccaattatggaatttatgaatggtttttaaatttattatagtaagcattatttatggacaagagcaggttatagcacttcatagtgtgtagtgggagcatttttaatagtagaaatggttttgcttgggcaactttacattcttggtgtgtaattttaatctccataaaaatatgtcgctgttgtgtaataccaaatgtaggattccagttgaaagcaactttcaatgcaaagggttttctcatgggcagaagagaaatttaaaatgttctacagtgctttgaagttttaaagcttcagctgggagaattataaagcattaaacctgaaaagtttctacctgatggtcatgaaatagcgaggctatatgaaaactgactctgcctcacttcctcaggcaatttttttccttttcaagattttcaaaaatatcatgcctcatgttatattgagaagatcatcttagactttattcttctgaaatcattaaagtatacagcataattgtatttatactactgaaggttcaatggaataataatctgtactgaagaagtcaagtttgttcccaagttagaggtgatttggtattttgtacctagattcaaatgatcattttttgtacgtgcctaggagtagaaaaataagcagtttacttttagtttccaaatgtattgttctatttttacattcactttccctaatggttttgccacaaagaagtgacattacaacctttggtccaggtcccaaagtaagaaaggaacaaaacttaaactcaatgcatatgactccaaacaccacacatccactattatcgtattattaggtcttatgtcaggtttctatttctagcattggaaacataggtaaggagataatagtaactttgaaacatagtgaataacttaacattacaagactgttttccttccatcaggctcaaaatataatttcacaactagtaaccttaaacaatgcttcccaggtggtgctagtggtcaagaatctgcctgccaatgcagagtctgccaacccctgagtcagaaagattccctagaggagggaatggcaatccactccagtattcttgcctgggaaatcctattgacaaagaagcctggtggtttacaatccatggggtagcaatgaatcagacacaactgagtgactgagcaccagtatcattaaaaactatttactgaccccctaaaaaatccagcaggcattgataggagggctgtaaaacacaacagagacaaagcccctgctccctatgaaaccaggtaaaaagagaaagcctccggaatgactcagtgccattattctaagatgcatgtttctcaaattttagcatttttgaaatttgaattcatcttctaaatgatggcatcttagtaatgtgtctaacttagttaacacttacttttctcttttccagtgataatggataataaaataatgaatggtattatcaactataatttagatgtgataaaatacagaatataatttttaaaatgccctgagttacttatacggggtaaacatttacaattttaattaactttttaat

SEQ ID NO: 57447 - DNA, 1698 bp, Bovine  19866881027755
  misc_feature (1)..(1): n is a, c, g, or t
nactgcattgatatgggaaatgagccagatgcactaaccattgaaaccaaacagtgaagactatcattgtactgatgggaatgcaaaagcctgaagacctatgttaaagatttccagtttataaatacataaagattatttttaagtgaaattgtgtaaaatccctttcaagtctgagtcatcaaagaatgtcaattaaatttcaaggaagtgaagacgaactgaatacattcaaaacaagaacaattgtgattagtgtaagtaataacttttatggttttcactctgtgaaacattaaggatttgacattttaggaataatgcaggctttcttgcatcaggagtgatgctgtttcactaatttggttagcacatgggctcacttaagaggcactctgtactctaacagtggctaacccctgcccattcatgtccccacaagacctggtttggggtgcctggatggtgctccttatcatgctggtctccctgctgcagcacaaatgcttgtaatctcattaccactggcatttgctcttcattaggtgataattataccaccagtcagaggcttgcttcaaatattttgtttagtgcagtttctccaaggtcaagttgttgtgatgagtggataagaaatgttggaccactttgagcactgttgagagggctgccacattcagagataaaactaattaggacgccattcatgctacttcatcaccgtgacacaagcatgctccttaacatacatctctagtttctgctttctaatgaaatgaagagcttccgacttgctaagagccatgctgtttcagcagaaggccagtgggagagaagaacaaggaggaaaaggaaacggagaatccaactggcagtcttggatggagcaatgggaagtgaaatgatggaggtttttgaaccagaggagacgattcaaggtacgagaaggtcataccaaaaaggacaagcaatgaaaagatgtgtgggggcagaaaggcatcactgggaaagtgagaaaggaagatcatctagcagccacatcctggacagatgacagaagggaagccagggagcaaagatgatcagtacccaaccaccactcagtcatttttatcaggaagaacccgccaaagtggaagcaacacaggtcatgcaagcagagcctggccatttcatggtttatttttatttatttaaagagtagttccaaattccttctagatgaatggaaattttatcttgtgttttggcagaaagcttaagccatggaataaatgcattgcaagttcattagcatactatttcaaaggaaaacttctaccagctttggaattatgagaaacagaaatcttagaaatatattttcccttttgtgttcctgggaaaataatttttagaaaatattttttaagaaacttctgagtataggagaaaggaaaaaaataaagcacatggctgaggcaacataaaaaacaattcaacaaatagttttggggacagaaccagagcagtagaattacagagggtaagaatgtaggttatccttcagttagaggcagatcttggcctcattgatttctacttgtctgtcattaattcaattaaactactagctgtttcagtagctaaaatgtaaaatgaacacaataatggcatgctttagccaccatagtaattaaataaggcaataccaat

SEQ ID NO: 57448 - DNA, 2171 bp, Bovine  19866881040106
  misc_feature (1)..(1): n is a, c, g, or t
ncagggggaatgtatttagtgctgtttgtaatctggtattcagtcctatgaatgatgaaagacatttgaaatctaaataggagaatattattgtattcatttttaaagagagggtaaagaacgaatatttgaatagtacagctagcttacttaacattagtacttagctagttatggaaataggatattaatctgtgaaaatctccaagagggtagcagatgctggtagtgaacaaaatgactagaaatgtcagagcagtttgcttatgtggcagattatatttttaacaaggaagcaatggatgaaagacttttgactctggcttttctagggctctctctgcctggactccttcctccctccctttctcacctcccgttcactacctctctggaagtctactcattcagcaagactccaccattatcatctcatgtgaaatttccaaggttatcgatctcctctcacactgtgatagccagtgtaatgccctagcccccaaaatgtccaaatggcaattccctgctgctgctgctaagtcacttcagtcgtgtctgactctgtgcaaccccatagacggcagcccaccaggctcccccgtccctaggattctccaggcaagaacactggagtgggttgccatttccttctccaatgcataaaagtgaaaagtgaaagtgaagtcgctcagtcgtgtctgaccctcagcgaccccatggactgcagcccaccaggctcctctgcccatgggactttccaggcaacagtattggagtggggtgcccatttgccctctccgggcccctattatatgtcatgtaatgtgttaggttccatgtgggatttatagatagatgctaatcttgccctcaaggcaaagagaaaagcagttcaaaagtcctgaaatgggaatttcttgtcaaacacattagaaaaactatgatattccaaaaggggaaaagaaggaaaaaagaaaactttcccagaaactggatctataggacagatatattaataccctttattcgcatttgactccagaatgtgcttttcaatcaatgggtttggtagcccaattgggaacctaatcattgtctttatatcatctctgcaatgcaaatcacaaacagatgtacttcatatttcattactttatgaatcaccaacttctgattgtgtttgaaccacctcttgtaacaatgccttctctctcaatacatagtacacagcttagacacacacacgcaggcctctgatttggacagtgcatgcttctttgaaatgctaagcctttccataacatactgtctttacagagtgaaaggaatgtacacatactagaccagcataccacagaagcaagcacccatattcaaagtgttgaataaacatctcagcaagtagataaacaggtgctaacagtattacgtgcactacaatattagaaggtgaattttatacacatagagtttatcaacaatgtgttatagtattgtgagtgtgtgggtttctcttttgaagctttcaatcaatttctctgtgcctctctagtggacactcttcccttgtgggcatctgtccaactggacatgaagcttcttgacggcaagactactgtctttgcattctacatggaacctaagacattggatggtatgtaataggggcccacggctcatttttcaatgcaataaggaaacattttaaatatttaccatgaatttatacttatggctaaacttccagtgggtaaattcttcatattttgtgtactttctgacatctaggagataagcataatttcaaataagatttttaaagatagttgagaaactggaattgcagcacataaaataacagtgatgatagtaccttgagagtcccttggactgcaaggaggtccaaccagtccatcctaaaggagatcagtcctgggtgttcattggaaggactgatgctgaagctgaaactccaatactgtggctacctcatgcgaagagttgactcattggaaaagactctgatgctgggagggattgagggcaggaggagaaggggacgccagaggatgagatggctggatggcatcaccgactcgatggacgtgagtctgagtgaactctgggagttggtgaggacagggaggcctggcgtgctgtattcatggggt

SEQ ID NO: 57449 - DNA, 2067 bp, Bovine  19866881048362
  misc_feature (1)..(1): n is a, c, g, or t
ncgattggaatcagattgttatgaatatttcttgagcagaaacctggaccctgccccatggctgtcctgttgtctcttgactttctttctgctttccctcacttccataattgtgtgcttagtcactcagtctgtttgactgtgaccccgtggactgtagcccgccagggctcctctgtccttggagattctccagacaagaatactggagcaggttgccatgccttcctccagaggatcttcccaacccacagatcaaaccaaagtctctcgcactgcaggcagattctttaccatctgagccaccagggaagcccatgagtgggtagcctatcccttccccaggggatcttcctaacccaagaatcaagccaggatctccttcattgcagactaattctttaccagcttccctaattagtagcccttttaatctgccctttggaattcagggagggtctaggaggctgaaaaatttttttttcctataaacaaaaaatgggggacaaggaaaggctcttttgtacgcaagagagctctacagggtcctgctcagtttcagtagtaagaagcagttggatttggagtcctttttggagaaaagaagtggaagaactttctgatggattagatatgaaagttgcagttaatgcctaaacatccttacatttatttgacattagagcattttatttcttttgccaaagtttttgtctatatctataattatgtttctgtcatttgtaagcaatacaaataaatatcaaacaggtgagcttatttaacagcattaatcttataacacaattaacacaacattattaaaactggagatgaatgagcctgattaaagcagcatcagggatttgtagaaatgtagatactattgttttgttttcaaaccccttcaaaatccagatgttcttgcctttgttctttttttaggctgatgttagtacttaatagttgggtatattgaaaagaaacatgtacatcatgttttgtacatgttgggtgtataagaaacatgatgttagtacttaatagttgggtatattgaaaagaaacatgtacatcattaattatttggatcaatacatcatttctataaatttggtgaaagtacgcctctatatgaatactgttagtgcttccagaccaggtatattcttaggaacactgatttctccttactaggtcaaatttgtctttttttcaactataatgcatatagtagcacatggatgcatgatttcttccaggaaggattgaatgtttactacttataaacataaataagcttttctgtaaagatagaaaggttgacaaaactcacacttattttaaaggactgatttaatcacaaatctggtctttagcttttatcctagttcagtgtttggaatatagaccatgtcttctcagtaattaaagaaattatgattatcactaatgctccatgaacatgccctgtagtgtctgggtgagtattagaaaatttcaataaaagttgattagtttgtaaatttcaatcctaattataaatattaatacttatgtttattattgcttctgaaaggaatcagcttatccccccccacacacccatgtgtgatgaaatataagcttagaattgatccctcctgaattgtaaacattttttaagaattaagatagaaattgactccctggttgaactgaataatgttttcacaccatcagtgccttattgaatgtctaaaacctaagaagggcatagacagatgatcaatgctcctttcctttacattccgagtgcagatgtgaatttgcaaacagtaactgatcacttcccagaaaaaaagttatgattctctactagagtacttggttttagcaaatgtagtttgttgtctgcttgataaggtcagatgactagaaattacttggtatcaatagtaaagtagaaataatgctataatgtggtacaaggagacccagatttcagccttatgcattcagccctttacatagtagttgaaagtccctggttctcattctaaaatttcttatcagtaaaaataagag

SEQ ID NO: 57450 - DNA, 1082 bp, Bovine  19866881102251
  misc_feature (1)..(1): n is a, c, g, or t
ntaattcagtactctcaggaaacactgccctttttaatccaatggaaaaaaaaaaatctacgtgcctactctgtgaagacatccatttttgaataattctgcacaccagaacctacaagtaggacagaataatgaaagctatttcaaagatgtattaactactaatgctgtggaatgtcctagaagaatcaaataattcagtggcccaattgtctaaagaactaatgacatggcagaaataaagaaattgactacttcctcattggaaagatgaagatttatttctaaattgcccgttctcccatctaacctatcacccaaagggcagtcaatggtaccataggctggaatgcctttgatatttgatgtgatgataatctctgactcacatgtatttattttttgaagaggtaaatctgaattgatgaaattctagaatgttcttcctttggaggcactgcagaaatgtcgtctcagagagcttgggcagaatttgccacttaaaatgaggagggagaagcttgctcaggatatataaattatttctcaccttcataatactgagtattgcaattacccataatgctggaacaagaaagggaaaggccttccaaaaggcagcagtgattttaaaagggggaaaagagcatgtctaattgaaggatgctgcaagatatgggtgtttaggagggaagttgagaagattataaagcacttattatgtatcaggatctgtgctggcacatgggattcagtagaaaacaagtttggatatgattctttttgctcatatttcatacattctagttaaaggggacagactgccagaagttacaagtctgtgatgagatgctgtgtggaagagttttttcttattcgagaaatctggctagcatccaagtttgagaactggaggggcaaatacctctcattttaacaatagctccaggaggggtcaagagttagcatcagacttctttgtcccccaggaaggctgcaaaacctgccccaccaactcatcccactatatataagatggcatcaccgactcaatggacatgagtttgagcaaactctgggag

SEQ ID NO: 57451 - DNA, 2802 bp, Bovine  19866881111937
  misc_feature (1)..(1): n is a, c, g, or t
ncaatctcatctctcattgtgtaaaacttttgaagtcaaagggctgaaagtggagcatgcctttgttcctgctgtgttccagagtgaaatatgcttttgattctgaagttattatgtaaattctaactatacaaggtccattatcaagtgctactttctcagtgaagccttgtaacattcacagaccaccatgtttctttcattggccccattcatgatctttttcatatatgctgacagtccactaacttgctaactccttactctactgtgtaactttatgaattcctaaggctcaggtgataatgaatactcattaaatgtgcctgatgataatgacagcaatgattttgataaggattatggcctggaatgtgtattggtttggagtaaaaaatggtcgtatatttagaggaactatgttgaagaaactaaaaaacatagctcactggtgggaaagttcatttaaaaaaatatgtattggttattcaaatttttaatttttaatatatttttctgttaagatattttattctggtatttattacacttacacagggaagaggctaatggaattcaatgatgcatgatatgtatgtcatatattttacagttcaacatatatttaatacaaacttgccatgatattcatatccttaacatttcttttacaattttgttcctatgatagttgtgcttaaaatatcataagatataattgcatgtatgccatggatccctgtattaaagaatgtgaaaaaattaatatatcagtgttagattttttgaagtgttcatagtgtgggatggcccagttcttttgtgctaaatcttttagaaattatccaactccactgaggtggaatctagttctttttctcctctaatctaaaccccagggccactgttatatgagcattttatcctgctaaattaagaagcccatccttgttgttttgtgtgtactttatttaggccatcagcagacaaaatggaaattgtatttcgtaacccacagtgtggtccacaggggaaatgaggagttgataagtatacatccagtacacttactcaaagtgataattaaaactggagcacagaaatgcagaaggaaacttggaacgaaattgtcaatctaaaaattgtcaatttaaaaatcttgcctaattttttctgcaaaccgtggttcccaataatctatcacagactcacctctgtccacctgggttcaaattagaagaagggaaaaaaaaaacatagaaaatgtgtctgtatgcagggagccctgctggtgccacagtagttaagatagtattggcattgcccccattaccttctaggataaaaaattagctaagaggtcaaatacatgggtgggttcatgtttatattaattagttaatctattaaattattttttgattcagatggaaaactgtattcttccactttaaagaccaccttgaaatagttatttcaaatgttttttgctcaaatacaacctgccacacttcctccagaagctaggctgtgatatatggctgtgtcgaatctttgtctttccggtttctacatcttagcattctactttaagaaataaaattctataattattgaattgcaaaaataaagagaacatatgttgatcaatttctgccatacatttttatttcctgacttcagattcagtttttttttttctcaactgtcaagcaaatactatagaaagtaatctttgttgtagcatcccaaaacatttttttagccatatgtatactgttgaaatggagaaggcaatgacaccccactccagtcctcttgcctggaaaatcccatggatggaagagcctggtgggctgcagtccatggggtcgctaagagtcggacacgactgagcgactttactttcacttttccctttcatgcattgaagaaggaaatggcaacccactccagtgttcttgcctggtgaatcccagggacgggggagcctggtgggctgccgtctctggagtcacatagagtcagacatgactgaagcgactatgcagcagcatactgttgaaaacatctaaaatagttaaaaactgagaaatgatttagatacatatctctgggttcaaatctggacttaacactaagtggtcttaggcatattactgaaattgtctaagttttaatgtcttcatctaaaaaatgggaataaaaataatacttaagcttagacacttttgtgaaattttaatacataagcagagcttgtcccagtactcatcccaaagtaagtgcttgataaatgacaactcttaacaaaatatcaggtacccaaaaagtagttgagcaataaaacaaagcttccaaataaggcattctcaaaaccaaagtggtacaatgaattaaatgaacatgtaataaaattatttttgtccaatgtaggtatgtaagaactttgtagatgtttactcttctcctggatgtataatgtaaaacacctttagaacatttttttctgagactaactccagtactttggccacctcatgcgaagagttgactcattggaaaagactctgatgctgggagggattgggggcaggaggagaaggggacgacagaggatgagatggctggatggcatcactgactctatggacgtgagtctgagtgaactccgggagttggtgatggacagggaggcctagcatgctgtgattcatggggttgcaaagagtcggacacgactgagcgactgaactgaactgaagtacagggtaagcattaaatgggatacaccagggtcaa

SEQ ID NO: 57452 - DNA, 1234 bp, Bovine  19866881146158
  misc_feature (1)..(1): n is a, c, g, or t
ntaatttcaattaaagtatttaggatttaaagcatgaggtagttacctaatgttttccctttcctcctcatttcataactttgatttattcaaaactgaccaatccatatcagacatgtcctcatctgcctaaaaggtctgccattagaacagtagcatatttgcctactttatgtaggttttccattggtgcaaatactactatgtgatataaacagctagatttttttccagttagagtgtttttgaaatagacaaaaggttaaatgttggagtgggccaattttgctttcttttttatagaacatggacatacgcttattctcccttcagtagtagcatgacctacataagttgtgtgtggctgtgattttctcattttccccagtgagagagagaaatatcgttcccccccttccattgccctcctgttgccacaaaagggaaaaaaaaaatgatcacaggagctttgaatacaatttttgttgagcttgtttttttttttttcccccccctctcctcaccttaggtgaccagatcgatagacagtccagcagctgagaaaaaaaaatcagatgactggaatacagccagaggcagtttctctagtgtggcaagaggccattctgatatgacaaaatttaaagtaaatggcatccaaggagacactggtttctcaataaatgtacaaagggaaatgcaggtattaaagtgactcctaaaaacactaatatctgaattgctcctccaaaatatcctctataatgaaatagagttttcaaggccatgaatgatttcccatcttcagaagttacaggcgtcatgaagactaactcgtatatatacggcaagagccgcaagttcctgttcctctaccacactgtgggcccaagtggctgcgtgtgtgcccagccttttcacagtgagcagctcacatgcccaggaagcgaaacagaaaatccggcctgcaaaccagctgcccgcggtgctgcagacacaatttgccttccttgtctgtacaagagctgcagctcctaacactcgactggttctcagaaaggatgaggacacagatatgtccagcctgcttccctagtcagggaagtgtgtttatccattcaagagtatttactgagctcctgtggttggaaaggtatatagacatcatcatatcacagaaatctcagggaagcgggcgctttaaagcttgcttttgagcccaaggtatgattat

SEQ ID NO: 57453 - DNA, 1308 bp, Bovine  19866881178836
  misc_feature (1)..(1): n is a, c, g, or t
ntgtggggatattgatttataacggaaagcccagaaaatggaagcttcattttcctggccaaaaatatagtagaaaagatgtgacataaaatatatatgtgaaatgcccatggcatttatctgcaaacccattcagaaattaacttgtaaacaaagctctttgtatattatgtatccattcattgggcagtggcttttaaagtctaaaagtaattatgaaaataaatttcaactggttttggaggctgcatttttcattccatgaaaagtttgttagaaatggggttcaagtccataggctagtctataagtttataccaaatatagtggaaccagaatactaacattatttctcataaaagtcaataaactgaagtttaaatggaaactttaccatttccaagagacttggcctcaatttcttccactgcaaaactgagataatgattcagacctcatagatttattgtgaggaaaagcacttagcccgggcctagctattgtatatcatgggagatggtaggactatggccaaatgagtacaaggtggaatttccagtggaccctaagcctttagatacggctgcaaatcgacactggtcatcatttggggttagaatcatgtctggtattttcaccctaagcttctttgtctatacacatctttgctgcaaacattgttgccatgtaactggttggctataaggcacttttgctataaaagataaaaaacaaaagagagacacttttttgtttgctgatttgtatcgttgtttagcattgcactttgactttgttactaaaacatcttccttcagtaggagaggtataagtttccagctgctaggaggcacgtttgtaactgagctttgcattgcatcgtgaaagcctctacacacttgtttctctgtgttgtcacccacctctttatattgatagacgttctgtggaaaatgtgggttcaactctgcaccttggaggctcttgtcctctttctcttccaatagagtgtgtttgaaaataagaaaccaactcaggacaaatcattgtcatctgtcagctcgagaaagccacgctgtcagctgcttgaaaccaagctgtcaacccaaactgtcaaccagttattttatcttttatggcaaaattgccttacaactgattgcttatgcaacaaaaatgtggtaaaagtgctcacggcaaagacatcagtgccaaagaagcttttggttgaaatacctgtaatcacttagaataactcaacactggctaaaaaagtaggagcatactccatgtgcacacacatatgta

SEQ ID NO: 57454 - DNA, 927 bp, Bovine  19866881181698
  misc_feature (1)..(1): n is a, c, g, or t
ntattgctaataattttcggttgctaaaatgagtcgtcatcaaaagaacttagcaccttaagatctttgctgcataattgaaaaagatgatcatagccagccctattttgtactgttccaaccataagttattctcatatttacttagagtctaaaaccatcataaattagaccatatgctccttttcacccctcagcatggtcccccatttgcaatattgtagagaaatgtatgtgaagcaaaccaaagtggcctatctcttctgcaaagtctacttatttcttttttcattccgcaacaactgaatattttcacaaggaattattttcctttttgacacttgtgggcaggtattattttttctctttgtttataactttggttttaggattaaaatcatgacagaatttccagaaaattataaatttatgactgtgttccacaaattgtttcccagaagactatttcctttgagtggctgtctgtgaaatcttttaaaactaacaaaagaaaaattttatttcatatattattcttttttcctaaaatagatctaataaataaaaacaacttttttttgctattttactacctgtaaaatcaatgacaaatttatttttttttcctatgagtgctcctcatgtttaaaaaccaagcttctgttactgctcctgtacaagattttaacttcacccccttggactttataataactactcattggtcaccccatgcttggcatcctgttccatttcttcccccaatactggtgtgagggttatggtttctaaagtaactctggccacgttccttcctggtgaacacttacaaaatccgtcttcctgtgttggtacctgagtgttcttcccaaggaacctccatttgccttccaaggctcctctggtctctctgcttcgtgacttagg

SEQ ID NO: 57455 - DNA, 1251 bp, Bovine  19866881432990
  misc_feature (1)..(1): n is a, c, g, or t
ntatgtgtgtgtgtgtatatatatatatgaacagttcttcctaagaagatgcatttggggacttttttccctagaaaaatttatgtggataacagttcatcagttaccctgtgacacttagcaggttatcttaagtgaataggtttaatcattttattattattttctttttttcttttcttttctcatttcttctttggcacaaagggtctctgacagttctgttacatgtattgctttactctctacctttgatagttttgaaaggataacataataactacttttgtcaaactcaaatggagaagattcaggagctttccattttatgtaggaactcggaaaagttgtttgacaagattagacaaaaggtcttctgcttccctggtggctcagagagtgaagaatctgggtgccatgcaggggacctgggtttgatctctgggtcgggaagatcccctggagaaggaaatagcaaccccttcagtattcttgcctggaaaatcccatagacagaggagcttggcatgttacaatccagggggtagaaaagagtctgacacgactgagcgactaacactactacttctagacaaaaggtcttctgattactagtctagtggtctttgcacaatattacattacttttcacattgtgtcccaaaccacctattatgttcacagagtcacatgaagacacagaaatagaaacagcactctgaatgaagttgattacattttatggcaatcaactgggtctagaaactttaaaataacacacacattttaatgccatatgtgtctgtgaaagaataataaagaataatgctggttcttgtttcatggggtttacagtggggcccctttttgtcccataatttccctaattagtctcaattgcgttctccctctaagttcgcaggccaagatagtatctgctttattgccatgggaggaaaacttgctcttattgagctttattagatactccattctctcatttagaatcctattaagtttccccttggcattttctaaatcaattagttttagctttacccttcttaatatgctccttttggaggctcctcatttgagtccctaactctggtatttgtagttgcctttcccttttcttttgggcaaagatttcaatcaattttccccgcaatagtgcttcgctggcgtcccacagagtcgaatctgtgacctcaccattatcactgtctgctaaatattcagcccatatgt

SEQ ID NO: 57456 - DNA, 753 bp, Bovine  19866881791120
  misc_feature (1)..(1): n is a, c, g, or t
naaaagagtctttgtaaatgtgctttccttatgactttaatttcatgttggcggattcctactctcagacccctgtagacttcctggtccgggaaaaaagcttttctctggggtcccctgagtaggtttgtgacaactgaaaatgcgcaggtaaaactaacacagaatagtcatttcagagccgattttctgcagtggcaaagacaggcaagcagtttcttacccaccactggttccagggagatttttctcacagcacccacccagcccacatgaaacactagacactgttggcgagtcctttgggggataatttcattttcatcctgtttcacttccccttagtctttggaaaggagcatttacattcctctggaggagggtgtagtggcccactccagtgttcttgcctagagaatcccatcgacagaggagcctgatgggctacagtccatagggtctcaaagagttggacacggctgaagcaacttagcatgcgtgcagtgctcaaacctttaacatggaaataaaacctacccaattcagagagtgagtaaattatcatgtctttggcataagacatgactggtttcttcaattaaattcagaccgaaattaaaagcactcacacatccagataaacaccaaagcacagtgttagaaaagacagaaagaatagtgtagaaagtgtgcctggcaacaagaacagccctgtaacatattagcagcattgaagatatattacgctattca

SEQ ID NO: 57457 - DNA, 909 bp, Bovine  19866882019574
  misc_feature (1)..(1): n is a, c, g, or t
ntctttcctatgacctttaatttttccaatcagtcttaggaatgcagcgaatgaaaaatcaacacaagcgctcattctgatctttgggaaagttttgtcacactcggctgcatctggtagtttgactttggacagaatctgaaatgaagcttaatgtgagtgctatcaagtgattctaggaaaatgtcagaatacaagagaagaaaacaaaggtcttctgtgctggatttgcattcccttctgaaatctttggcacttgatatcagagagggagttgtgttatttattttcaatatcctgcctttctcttcttccctgtccgtagagaggggccatcagcttgctccccacagctcttccctccctgtgctggggcattgtgtccacccggccagctgccttcagagctggtgatgagatgagagctgtgtctcgctggagaggggtgggtggggtgtcctgactaggtctccctgcctgccacaaacttcttgttgcttccacaaggctcagcttccagggatggccagatcaatgtgatacccggtctcacgtgtgctcctctgagcagggtccctgcaaggaacacttgttgtgagtgagtaccttgaccttgacctcgtataaaacatcagagttcaagttcaggtaggacttgcccctgggttggtggagccggacttatggtgtaacattttgagcacttgaacagcattacagctaaaaaaaattaacctcaaattcagtgggaaaatggtcaggacaactatttgtcaataaacttcaagtataaagtataataatctttctaaacttaagaatgttaatcattgtaaaacagcatattcccatagaacacatctgattcgtttaaacttacacagctgtttctttgagacattttatgtt

SEQ ID NO: 57458 - DNA, 1523 bp, Bovine  19866880189346
  misc_feature (1)..(1): n is a, c, g, or t
ngaagttcaaagcatttgccagtgtatttaacaactgaatattagcaaataaaatggcaaacatagtaatgaagctttggatttcatatagataattaatttgtcttttccatctatcaagagtagaaacttacaaagcaactcctaacaggggatagaggtggtgaatggagtgatcgaaccatttattcattttgtgttcatttattcaatcagcaaaaatgttttgagtgcctgctatgctttgagcatcgtgttaggtttcatgatcatgatcagagaatactcaatgtttggggaagcaaccatttagatcttgacttggtctcactggtcttttaaacactccatcagacaacctaaaccatattgaacaagatggacttaatatacccctcagttcagttcagttcagtctcgttgctcagtcgtgtccaactctttgcaaccccatgaatcacagcacgccaggcctccctgtccatcaccaactctcggagttcactcaaactcatgtccatcgagtcagtgatgacatccagccatctcatcctctgtcattcccttctgctcttgcccccaatccctcccagcatcagggtcttttccaatgagtcaactcttcgcatgaggtggccaaagtattggagtttcagcttcagcatcaatccttccaatgaacacccaggactgatctcctttaggatggactggttggatctccttgcagtccaagggactcgcaagagtcttctccaacaccacagttcaaaagaatcaattcttcagcgctcagctttcttcacagtccaactctcacatccatacatgaccactggaaaaaccatagccttgactagacggacctttgttggcaaagtaatatctctgcttttcaatatgctatctaggttggtcataactttccttccaagaagtaagcgtcttttaatttcatggctgctatcaccatctgcagtgattttggagcccaaaaatataaagtctgacactcctctcagctgctgccctgacctcggacgtgggaacatattcctcaggtttactaaaaggataggttaaaagggcttctgtggtggctcagaggataaagaatctgcctgcaattcgggagacccaggtttgatccctaagttgggaagatcccatggagaagggaatggctacccactccagtattctttcctggaaaattccatggactgaggagcctggcaggctatagtccatgggattgcaaagagtcagacataactgatcaactaactcatttttactaaacgttagacaggcttcctcctgactttaggtccctgaactctctttacttagaacatttactttagaaaactttctatcataaattatttctctgtccctttgaataaatctttctaaaagcttcttgcccttattacaacccaagaatgtctttctcaagggcctgaaagctatccctttgaaacataatcatcaaggagacagtatgcctatctcccagt

SEQ ID NO: 57459 - DNA, 1032 bp, Bovine  19866880369681
  misc_feature (1)..(1): n is a, c, g, or t
ncaaatgtgttcttccttttggaacaggttatttgggagtctctgtttcctagcatagaggccagatggcagcagtcacagattgccatcctctgcatgctggtagttgtcaacttcagatgctaatgtggtatcagaggcaactactgccaaataatttttaaatctatatatatgagtgaacatccactatattctaggcactgggcaaacagttataagcaaaagctgattagtattgttttagtagagcttgtggtttaatgaggctttaagaagctgtgcaatggcaaattttatcctctcttaaactaattctgaatttttatagaattctggatagcataatttggattaattggggagaggtagggagtaaacatagggaaaatgagcaggtagatcagagtatcttctttctcagacacagtaaggggataggaagaaaaaagtgggtggttatttcctttgcaatacttccctttgtgctatacatcactcacccaagggattcaatctggcagtttcttcagtcatatctaattaaaggtcatgccttagaataggagaataatattaatatgtgcacaaatgagaagttgaatggggtataattatatgacttttgtctgtgccactggaagggtggatttaatatcagctcagattggggaaagattttaggggaaaaaaaatcagaaatttaggtgtcggttatgcaaagttggagacatccatttgagaaaagttgagtaggcagttgaatttgaatgtatgagttcagaagagaggactgagcaagatatataaatttggcaaacttgggcatagagatgcattactctttgagtataattccaaaaggatagattttaagaagaaaagggaatgaactagccaaggatactcagaaggagtaaacataaagtgggaggaaaagtaagagaatagagattcaaggatgaggaagtgatcgattatgttaaatgtagacaagatatgtcagaggcctcatgcctgattcctgcgttg

SEQ ID NO: 57460 - DNA, 4620 bp, Bovine  19866880424671
  misc_feature (1)..(1): n is a, c, g, or t
naacatctcaggacagtcttcacggaggagtgtaccactggaggcacttgattacacaatcatcctgggggtgctgaaggaagctcctggccactggatgttttgaccgccatatattttaggcgatgttctgtaaacaagccactcacactgcagtgtcatcaggagtctggtgctgtgacagttgcatatgctgcaaagttggtcccgtagaaagagcaggcttttcttggttttgctgttctcactaacatttcccagcttcccagatggaacaatgataaagaatccacctgccaatgcaggagattcaggagatgcagattcagtctctggattggaaagatcccctggaggaggaaatggaaacccactctaatagacttgccttggaaatcccatgggtatagaagcctggcgggctctagtctgtggggtcacaaagatttacacacgactgagcatgcatgcacattggtatttccaaataaccaaagcaattgtaggaggcaaaaagaaaacctggagaactcatcaccatgctgctcctcaagccctacttccctagtccatcttccttcttctcttcagccttcttatgctggattgataatttctttcaagttaccaattgataatagactgattacttctttccttaagtatttaacaactgtttatttatcactaactttctcagtgatataaccttcatgtttttattggttttgaaatattaatgtgacagataaaaatacaattgtggcaaatcaaaatataatttgcctacgcaactcaagttttgctaaaataaatgttttcctcatcagaaataattttgtcattcaacccaacttaggtctgcttgcttgaggtggtgaagaaagtacagtgtttattgccagacaccaagtaaggagaacagtcagctagtgttcagaaaactcaaacttgtcagtggctttcaaggaagggtttttaaaggcaaggagaaggagagggtcgtatgcaactggctcatgtacgtccttctggttggttggggctgaggtaacagaatggttttccaggaatctcaagtatcagttttctggttcccactagtctgggatctatgttctggtggtcagcatgtagtcaacttcttcccttgtgggggtttcagtgtctgcaaaacaactccaaggtatggcttagaatatgactaagagctcttgaggaatgaagtgtccttgactctgtttttttggctaagttaatactattttgtcttgcttgactgttttcctaggacatgcaggatggtgtgtctgtccctgggaaggcccagagggtgctgctcagtttcatagctggggttttcagcttcacttagaagtaatggggagaaaagtttctactccatttccctgaccaaaagtctagctttgcatttaaaagtgcttttctctaagcactgtttttctggcttttaaattactcttttgaatcattatgttctaggttttaaaagcaagaaacaaacaaaaaaaaaaatgtttttttctcttctggcacctacattggtgtttcttttttatttttttcctttcctttttttttttttttttgccttctttttttcctctcttcatctttttccctttctagttttccctcccttccatttgttcacttcctcctctgtctctctggctttcctgtccttctttccttaagtaatttaacaactgtttattcatcactaactttcccagtgatataaccttcatgtttatattggttttgaaatattaaagtgatagataaaaatacaattgtggcaaatcaaaatataatttgcctacacaactcagttttgccaaaataaatgttttcatcatcagaaataattttattatttattttaaaacaatgtaactggtagcaaaatggcacatagacaatagacagacccaaatcccatagggttacaagaactaatattgacttcatattttacttgcatgtgcaagtgtaagtaatttaaaaaggcaaccgcttgttaaaaggcttttataagtgtgtttttattttttaaataacagaaagactaataaactatcatcattatagcaagctgatctgaattctgttaaattttaaatttggactaatgttcatagtcaaaaataattattttaaaatttatgaaacaaattttttattttcatagaaaatatagtcatgtcctacctagcataaaatcctagtcttggcaactgtcataacgcaaaaatactcaatttgagatattggaggaaatagaagatttcataaaaccttacatttattcttaaacacaactgtaacaggtaaagacatggcaactcaaagaaagatcatatttaaatttcaatgtgcaaatatgaaacaagttcattaaatttattattgtcctccattacatatatgaattcaattctgccttcagtttgaataatttatatgtgaatatgtctatcaaatgtatttcacctgtgttcataacatatacacatgtataagcataccatctttgttttaagctatgtttctatttccttgtttggttaaagagaattaaatatagggtctccctattttaggggaaattcttgatgttcatgttattctaaaatgaaagtaatataaaacactaaacaaaaacaacaacaaaaaggcatttcatatactcaaagccaaattatacaatagctataatctaaactttcacattttatactttaaattttatattcacagaattatggggaatattagattttatttatttattacctttaatcttattttcttttcaatttatctgcttctttgtgtaaagaaatgataccacgtctctttctagttttaaatgttctactttctgttgaaataaaattcaaagtaaaattcagaaaaaaaaatttggaacaaaaatatcttttaaaatttttcagtatctatttcatgggaataacaacacattccaactaccttgcaaactaagctctgtgtttttcaacccgtttctgaaggggactaatgcatacaggtaagagcactggagtcacaaagggtcaacttttcttttataactgtcaaattctttatggtctgcattaaatttaaatggcagaaactaccttttctttttggccacaccacacagcttgcaggatcttagttctctgaccagaaatagaactcaggcccttggcagtgaaagcacagaggcttaaccactacaccaccagggaattcccccaagctacctatttttattgtgtatgttttccacacagtgttaaagtacagttaaattagataaaacttttgatatagcattttctggaatatgattattttaatgctaaaggcataaatgaggacttctaatgttttgaaattctttttactctataaaaagcataattatacctctattaaagtatctttctaatgaaatatactatatagatatataaaaaatgttaaagctcaaaattttaatgaaaatcattacttaacacttcagtttcaattcttggattaaatttaagtagacaaatgtgtttcaagaattttccctatgttaggtatactcttaggagaacaatatgttaggagaacaataaatatttgcttttatacttttctttgcatataatgtgtgtcaaacataaggacagggaaaatttcatgtagttaatatttattttagttggttttgatttcttcagagtaataaaacatgctatcaacatgacaaattctaaaatggatatcatatcatatgaaaaggcaacaaaaaggttaaaatgactgaagaattcatattctaaagaaaactatgatccttacacagaagtcagccacataaatttgtttatctgagtaaagaagactagacatagtatgatgagctgtttttatagaacagcaatgtaataggacatatttaattttaagaggagcaaccatcttttatgtccattgggatgcaccaaacatagatttctactttactttcataaagccttaatactttttaaaaaattggtttctacaacttgcatcattgtcaaacaaggaaacatcaggtttaaatttttgtgttctgatttaggttttcaaaaccattccattgatgtctttcaaatattaataggaagagtaccaacaagcagtacttcacatttcaaaatacgctatacttccaggagaatagatttttttaaatatgagagaactggatatattccaatatagtttatttcatgccagcaatgctttttctttcctaagatctaaagttgtttcaagcaacatccttggaggggaaaaaacaagaacaaccacaacaaaaaaacccagcttattattattatttttttaatcaaagctgagtttcctctcaagagtcctgaaccatggtgttgcagatgttgtttttttgactgggttcactgttgggtagttaagccagtggatctgggttggattaagtatctaataaaagaaagcaaatgactgcagtagcaactaaaggcaaagctcatccaccctgacactttagactgttacttaaagtttatt

SEQ ID NO: 57461 - DNA, 1907 bp, Bovine  19866880685965
  misc_feature (1)..(1): n is a, c, g, or t
natatatactgaaatagatttggaatttttttttttttttaatatctttattttccaattaggcttctttttttctcaaaaatgctgaagttggctctccatctctcctgtgagatgatgctgtataaaatatttctctaacagggcatgttttgttactgttacacatatctttagctgatagacaagtagcagtagattttatctaaaaaaatcaaggcaacaaaccataatgaaatcacttgtccagtctgttcctggattatgattttaatacttttatcttctatttttccagttctctgttatatgatgaaaaagagttttaattggtcgagtcaattaggattttccaaatttatttctcttttttaatgttaactgtaacctataaattcactataatcttttatcactaaaactattcatttttaagacctatcctaatcaaataagtgaaatatatgccacaatattagaatacacacatcacacacacacatatgcattcacagctctaacatattctgcttataaagtagttcttaaaggaatatagaaaaccataatctacttaaatctttctttaaaacttgaaaataatcccatttttctccattgttttgaattcacctatatttctattttaagtcatttgacttgtacttgactcttgaatcctgatgttgggaaagagtgaaggcaaaaggagaagaaggcagcagagatgcttggatggcatccctgactcaatggacatgagtttgagcaaactcagggagatggtgaaagacagggaagcctggcatgctgcggtccatggggttgcaaagtgtcagacatgacttagcaactaaacaataacaaatttgactcttggacccagattttctcatttttctgatatggactgttccattgactttaattatattacttatatcttaggtagaaaggtagattcttcttttctcattgaaggatagaataaactttacatacaaaatatggcatatttcagtggtgtttttccagatatgaattggaaatggaataagctctttgtgcaactctctgatgagaattgcagcctgtaaggcagtacactgcaatcctctattttcaaaagagaacaagaatgattacatttgcaagtcaatgaagagagtgacatgggaaattctttgttattaatgttctgctagatagccatttaccttaaaggaggaaagttttaggaaaattgaaacagtaaaaatgctactcagaagaatgactatttcatccaaaagttgctcaggaatgtatttatttgtagagcccagggatatgtgaaaaaaaatgaacacccctaatagaaaaaaaaaaaatcaaatactccaaaccatgtgcaaaaagtatgtttccctctgtatataataatcttttggtttcaccaggctgtatgtgatagctttaatgattagacttatttacccacatttcactgatataaataagcatatatgaccacagaagtccccttagttctcttctaatcattagtgcaataattgattccagaatatcttgttcacaagaattacaggtgagaagaacaccatgcacttggacgtctggcagaaggagaagatgaatgcttccacctcaaacatttcaaaagctttaaataagaggtctacaaaaatatatatttgtagtctcagacattagatatctatataaattttaacaaaataaaattctgaaagattttatgatatttcatattcagaacatttaaacttctcagtggagcttcttaaagtcttggggaaagattcacattcaatgtaaatattgttcaatcatcaagctgtgtccaactcttcacgaccccatggactgcaccatgccaggcttccatg

SEQ ID NO: 57462 - DNA, 2209 bp, Bovine  19866880740559
  misc_feature (1)..(1): n is a, c, g, or t
naagcgacttagcagcagcagcagtaatattggcatttcttaaatgagggaagattggttcaggtgttgccttgtactaacctcaggaaatttccttcatggaaacaaaaaatgctccaggtaaggttagcctcaacaaataagctgaactgaatttgtttgtctggcgaggctggttttgtctgagtagggaaatagcaaggctggtctccactggtttttcattttaaaaaattctaactgaactctcccttctttatgtttctgcccataaatgaagttaacctcaagccctaaacaggcttgcttgttatttgctattgatttcatgtcccaagttgcaattcctctgctattcctgaataaactcatccttttaaaaagattatttaattttaatggaaggatgattgctttataatattgtgttggtttctgccatgcatcagcatgaatcagctatagttatacctatattctgcatttcccttgtagctcagcaggtaaggaatccccctgcaatgcaggagacccaggtttgattcctgggtcaggaagatcccctggagaagggattggttatccactccagtattcttgcctggagaatccccatggacagaggaggctggcggactacagtccatggggtcacaaagagtcagacaggactgagtgacacagcagagcacagcacatacatatgttccatccctcttggtcctccctcccaccccatctcacccctctaggttgtcgttgtcataaagttatcatttggcaattttgagttgcttccttttcccttttcattttggtcaacaaagccatgtcttgtaaatacgctattaaatgcatattattaagaatctgcaagaacaaaagcttagcatttcagaattgtccctgtaatatttgtaaactttttcttaaatagaaactatccaatatgacaggatctgttgcttcataattatttggacttaacagagacatttttgcatgttaaaagaatcaaaattccctgacatgtttcaatatttctcaacaccctccttttgcttatcttttgatataaaatagctaccaaaacaattactaaattcatgtaagcttgaaggaacttagtgaagtaatttaatgtctttttgtgtcatgggtaaaattcaatattcatctgagtccaaaatcaattgtttctttgatgatactctcccaatgtcattgcagaataaactatgggatacagatgatgatcaagggtaagtaagtaatttgctttgtgtgcacaatattgatcacttctgtagatttgcctgtgttgtaattgccacatcttatgttctggtatggatgactgcacccacttacagaggcagctactttgtgctgggcatgcagatgaagctaagtggtgggaaattttggctgggtgcaaaggtgatttgtcatccagcaccagctcctcaatcttgtaacatggcaattgtttctgttcccatttcttaccaactgatatgctttgtccaaggctttgagggctggaaactactggccttggtacctgcatgatgaaattgggagaaaattgttcatatgcaaacccataacaaatcatttatttttcactattgcattcccacagagtaactcttatgctttctgtaatcatttaatacttcttgatatgaacttactttcattaagtccatgcaagcaattctcaaaactatatacccacttaaaaaatatcagtagggaatcaataacttcagatattcaaatcacttctaaatctttatttatatgttttcttttgatattaaaattaggatggagtcaaatttgaatctcataattatggtatagtttgaatttcatagagggaacacagataatcatgagagcccagaaattttgtgatagactcaattcttctgtattcagaacaagagtccttaccagcttgaacaaagtttccagaatataatcatctcagtagaaaaaaaacaaataatgggggtaacaagcttattaaaaaagacagaaagaaaacttcagtttatgtaaatttaggaatgatattctggatggtaattttattgagaatcataaactctgaagacctagccctacatgcagaccttctaaatgtttgtatgctgaaagatggagtgtaaatgtttcaggtcaaagatcctgaagtaca

SEQ ID NO: 57463 - DNA, 1593 bp, Bovine  19866880797059
  misc_feature (1)..(1): n is a, c, g, or t
ngattttgtgcattatgcacaaaatgcataatatccaaacctcttataatgaaaattcaccacacttagaaagcttttgttaaatctatagttttttttttttttcccaatacagtaatcacttataaaaagcatcagttctgaaatgttagcttcatgatgggcttatttctggaaaagaacaaagaattcatcctaggactcctagatcctggtgattctgcttattatgccacaggaatggtaaatctaagtgttgttgggtttatgtttagaaatacaaagtaacgctgccatagagttactccatattttaaactcactaaaagaaagttaagtcttctggattaaatattttaaatataggtattcttaatattagagaagaaagtgcttttgaagagtctcttgttcccaatttgggctaacagcaagtagattaccataagtcttatactttttaaagtgctttttttttttagagttacctagataatagttctaaacttgtactttcttttatgataaaaataaaagcctggtacattttaggaaatcatctgttttcttgaatttttattggttgaggaaagttgcatccataccaagtataaaatagattaaattttatttatattgtactgcattatgtcaataagaagaggaacatggagagttctacatgcttagtacagttaaagctatttcttagaaactatcttttttctttaagaagttaccttttggaagaagactaatgcctttcatctcgttcaggaaaatatgattaagtggaacaggtacttaacttaattttgaaaggcatgtgcctgccttttggatcttatttcacacttctctatgtagtgccatctctagatttatgttttctttttttgccatcattgcttttatcctgagcctatattatgtaggctcatggggactccctaacagccaatgcaacttttggataatttctctatttttcatcagctatttttaggggagataatttgtgaatatatctttaagttcagaagacaacctgagattttagaactaaacctaatgaatataactgaaaaaagacgtttatttttagcaatgagtatattgcctccctgtataattttagattgtgaaagtcagtcctcaggtggaagttcattatttgccacaacatacacacacacacacacacacacacacgcacacacgcacacatacacatgcacacgcacacaccaacagatacagcttgccaaatgtgttactttgttttctttcatcttttcctataaatctagtttccaaaaaaatatcagtcttcatgctcacttctacctggacccacccccagtccaacagcatatgtagcatttttcttagtttcccactcctttcctgctccccaagttgttctttgtatcctttaatgctttatgtgcaactttacattgctagctgactgatgttcggcaatgcctctgaaccgacacagagtaggccatagcctcccaaagccactgcccatgcataagcagtacagccggctttttgaatgtatttttcctgtttttattttttatt

SEQ ID NO: 57464 - DNA, 1406 bp, Bovine  19866880926997
  misc_feature (1)..(1): n is a, c, g, or t
natttttacttaaatattataatactttccaggtcatctcatgatattttgggttttatcatttcaggatcacccaaacattttaagagcatgggctgtaaaagattttgctccaaattgccctttgtatgtccagatcttaaagcctgaaaataaattccatatcaaatttgctggtaagtttgacctccaaatgagatcctttaaaccttttccttaaattcttattgtcattgtaagagttatgcttctgaagttagtggtagtttattatacccatgttctgtagaacaggatttatttttatcatctacttgttataagagaattaattcactttaaaatgtaaatctttgtgttaagtccttacttttttatataacttggtgattttggtaactgaacttgctgaacacccctagaagcttaattagattagctctgatagttgagtatgaaatatacacacaagtttcaaatgttatatatatatgtagatagataacactttgctatatgttattttatatacatataaacttactatagaatagaataatataatgtattcagataatttaaatagatttaatttgagggtagatattgaaaacaattcaagaaaaagatacatgtgaatttttcatacaagtgctgcttttaaaataattatccacatgagattatactttaaactattagaatattgaacaataaaatggtactgtatcatttcctaagtgcttctggaggaactaattttgatccagagataatttatgtactttttttttcttcaaatataagaaactttttaaaaaaaataaaatttaaccttaatggtctgaaacgtcaaaagtctttaaaaactaaatcattttaagtatgtatttgcaaaatgtatttccttcagaagattcacacatcttacaatgcttatctattagtatatgatatttaaatgaaattttataaacactgggcttccttggtggctcagatggtaaagaatctgcctgaaatgcaggagacctaggttcaatagctgggtcaggaagatccccctggagaatgggatggctgtccacttcactattcttgccttgagaattccatggatcatggagcttggctggccacagtccatggaattgcaaacagtcagacacaactgagtgactaacacttataaacactaagaagttttaaagtagtgatattgtaaagtaattaacctctaattaaaataagtaaatttatatttaaaaaataaattaaaaaaaagtagtgataagagtactataaaattattgctattcaatttgttctgagtcatcttttagtcttcctactaatgacatcatttttttctaaagaagtatgggaaataaagcaatgactctcaa

SEQ ID NO: 57465 - DNA, 1394 bp, Bovine  19866881137569
  misc_feature (1)..(1): n is a, c, g, or t
nttctgttatttatatgacaatcccaggataaaagaaaaagaagcacaaaaaagactcaaatataagaatccagtaaatctacaaaggtgttaaaaagccttctccacttgtgagaaatgtaaatgtactattaacaggagagtcaaggaccgtggagaaagagaaaacagcctgcctgttctctttgctgtggatgtgctaacagatttgtcagcggcagaaagccactcatggattaatgagtccctgtaaccatgtccagtcttttctccaccccataaatctgacctgggaagggaagtaaaaacatggggaaacaaagagggctccaaaagaagagttaggcaatttgcaaggtaaacctataatctttatttagaaagatagccaggctgatatcagttgacctttggagggctcaccatcgtcatttacagaaactgacaactaattcttggcaatgcaggaaggggaaaaaaaaaagattacactttatttctaggtcaaactgtcaatatcaggctagcgacttgttttaaaaaagcactacttatcattgagattgcttaaataaaagaaatcctattgtaattatataaagactgtataatgtatattatatgtgtatctatttataaaattcactgatttaggtaactactaagtacatcagtatatggcaatattttaagatttaaatattaaaatcataatattttgaaaaacaattttctctttttatattttacttatttactcacattcactgctatcatttaaatagacatttaattttacataacatgaattttctatctcatgaagattaactatacccagttttagaaactcaattcattttgagaagcaaataattcttgccatacacatatttatgtgcttttcataattttggtcaatactcacaatactgagcttaaactggaatttcaaaaatccttcacatagttatttctgccttaatgcaatttagttttacatgaatattgatttgtggcactattttcaagatcactgtcacagaaaaaaatcttttgaggagttttatagtatggactttgacaagttttattttgttttttaaaccaagtggacatgcatctaaactatgcagagtagaggacaaaatgccaactaatcaaatatgtcttaaataccaacacagaacttgattactaccttcccgagtgattcaatggtaaagaatctgccagcaatggaggagagaaagggcgttcaacccctgggtcgagaagatcccctggagaaggaaatggcaacccactccagtattcttgcctgagaagtcccatggacagagacactatcaggctacatacactctatggggttgcagaagagtctgacagca

SEQ ID NO: 57466 - DNA, 610 bp, Bovine  19866881306105
  misc_feature (1)..(1): n is a, c, g, or t
nttttgaaaagtagtgttttagaatctagtgtttggttgtatctattggctctgcacaaactcaaagggaatttggagaaaccactgagggaagtatatcgtactttataattcctttcaaagttagagttaaggacctactgctagttgtaaaacagttatgtgcagctattggtctgacatttattatttcagcaatacctctgtgtagaagactatataaaagatacattatttacttttattcattaagatcttcatttttttttttatttttcttggttaattataagccctgtttttgaaggcttataattaaccaccccaccccaccactctccgccaaatgtgggatgtgggatcttagttcccagaccagggactgaacccatgtctctgcattaaggctgtggagtttttaccacaggaccatcagggaagtcccagccttgtcctttaaatccatatgttttcatagtttgttagcaagaagacaatattttgggtaatgtctgtggtgcacttatcatatgccaggcactatttgaaggactttacatgaactagcttatttaatctgcaaaacaaatcttgaaaggagatttgttat

SEQ ID NO: 57467 - DNA, 975 bp, Bovine  19866881433168
  misc_feature (1)..(1): n is a, c, g, or t
ntgaactgaactgaagtggaaaaaaatttgtttatgtagaaatataattgtaagcattcaatgtttttgtttctttaggtactcaatcatgtctgatcttttgctaccccatggaccataggctgccaggcttctctgtacatgggattttccaggcaagaatactggggtgagttaccattattagtagtttatgtgtgatttggtgaaaatatttccataaaatggctgggaaacatagggtctaactatgctgtccatggtggacccttgtctatttatcacactcttttccagcttgcaaattgctaatgggtagatcatctccaatctcccaagtcttttcatctctaaaatactttgaatatgaaatatcagagaactgatctttacagatacttgggaagagtctattatgaaaaacaaaatgtcatttaacatgattcagatacaatatttgaattaacgtattgaatattttagcaaaactgaagaagcccttggtgtagagatgggtcattgaattctacctctacctttttcctgaattttcatacatgtattgcatttcagcttattcctctctgtcagtactctatttgaaaattatcttaaaaatggcaatttttatgaaatatttcttaatgttagaattcttcatttagcacaaaaatgaaaggaaaatcatgagtgtttttattgcttacaagagaaaagctcaaggactatttgatacatctatgcaaagtattcagttaattaacacagaattttgaggctcagaaaaaatcactacactcaacagaccttcctgacaccacatcatagattgattcttaatggtagtgtagaggtaggtgacagagaaggcaatggcaacccactccagtgctcttgcctggaaaatcccatggactgagaagcctggtggactgcggtccatggggtcgctaagagttggacatgactgagcga

SEQ ID NO: 57468 - DNA, 806 bp, Bovine  19866881514404
  misc_feature (1)..(1): n is a, c, g, or t
ntgtattttactatgagggttttttgtgcttgaattccaaaggtcactccctggtcaagcaactttgtaagagaaaaggcagagttaacttggccaggatacgagaatttggaaagaacatttgagggctgttggtgaagtagagtaggggtggggagaaagagggaggaaaagagtagaaaaagaagagaggatgtcatgttaaaccctgtaaagaagggcaacaagagtgaatggtaggaaaagccactaggtttggggttacagtattactgtatgttgggtctgggcagaatctgctaaatccaaccatgttatcagctcattctgtatggcactggctggacacagtttaaagaaaccacaatttctgccagaaacaaatttcttcttccaagaaaatcatgtgttcatgatagcaaaccaaatggaacagataagcaagaccaagggtatttgcctcttcaaataaatgccatcaactttatgcaacacattttctttagatgtagacaactactgtaagtagaaaatatttatttatttgttcaataaaatttcattgactgtctgtgtgccaggcattgggtacaacttaagcaccccatgtggccccagattcataagaaatcctacctatttctgtagtaagacagctcatttgaaccatctccaaaccacctacctagatggttccaataagcattgttgatacaaaggttaataagtcagtgactgcattttgatataatggacacagataccaaggggtcaccatttgtgtatccatccttctccctacattt

SEQ ID NO: 57469 - DNA, 1156 bp, Bovine  19866881551089
  misc_feature (1)..(1): n is a, c, g, or t
ntaagaggacagggtaatgagtagggagtgattttcgtgtatcagcaaatagcataagtcaatacagaaaagctattttgcttcagacaagatcaagaattatgtaagatttccacatacaaaaatgagtagggaatcaatgatttctaaagttatgatgccacacacttgccattaacaaattatctgtagacagacctagatactgtcacacagagtgaagaaagtcagaaagagaaaaacacctgctttcagtcagcctttctgtcagcgcatcgaccatttttgaatacagatttccttcttgcacagctggaatacagtgctgctttccagatagtggaaagtcattaagggcacacaggtagaccacaacgtgattgtggaagactgaaccatgaaatttactaaagggtaggattgtttaaaaaaggtttgaattgttcagaactccttttcttaaatatcctaaagtaaatacagaaaagattattttattgcctatccaggattgatttacacagtctataaatataagagtgattaccatgtaatgtgggagctattgcttctgcactaaaataagcctctctgcctccaagggtggacattctgctaccaggggagcagacttgattttctacttatcttttaatgatttcctgcaggcaaaaaaaactgaagccaacatcctgctgacatctgtttgttggtatgggtcttatttagaaccccaagtcctaggtaattattcgttttttgttggcagtaggattgtatagatcacaatgttttgcaacatgtaagctgtaataaataaaggaataaacaaagctcttttcttaaacattcagttacatggagcacccagaagacaaaccagagagcttatacggttttatgctagatcgtcactgaatagaatttatcattatcaaatgaaatattttatatttatcaaatttgacatttgatatttaaataaatgtatcactaatgataaatttgacatttctcattaacaaatggaaggcaaagaaactgctagcgttttcttttttttattttattttattttatttttaaactttacaaattgtattagttttgccaaatatcaaaatgaatccgccacaggtatacatgtgttctgcat

SEQ ID NO: 57470 - DNA, 1304 bp, Bovine  19866881827269
  misc_feature (1)..(1): n is a, c, g, or t
natttaaatcttgtgaaagtaaatgacttttaaagctttacttaaatctattcttagtcatttagtggttgaatggttcacagtcttagaattggaagaagtgtgatgcctgctcatgtatacacacacacacacacacacaaaccccaactggtaatttattgatttaaacaacaatatcaaaataaaactcaattgttagagattgtctattctccttgaagaagaagcaattttcatggcaataaacccactcatgcttataaacagagcttaataagcaaaggttatgtgagagatttataacacaatttgtccagtcggtctatgtaataaactcttttcctgtaaaataaaaacaaataacattcaatttttaaaatttaccccatttcgtgtttctctttgaaagctcttttccaaaggatatttgatttctgtaaatcaaaacccagggctagagtggtttcatgcactggccgctgctgtttacagctttccaaagagccgttacctagcaactgtatagaagaagcttccagtagtttaaatcatagacgagctcagaaaatactgtgaagcagaccttaaaaaaaatttctgacttgttaaaatgtaattaacaaatcgactttctgtcaaaatagatcaaaatagatttgatcatgtctattgataactttataactttaattataattgcttatctgaaaagctttcaaatcaaaaatgataaaaatagcaataaaatagaaaccatggatctcacataatcctgctgtttaaaagtcacagtcctgaaaactgtttccccttccttaagatggctactattaacagtttgagtcatgttgtcacacttttttgtgcatgtgtgtagtctgcttttgtatcagtggagttatatccttttactccttaaaattttaaactgtgtcattgacattatttcaagatggcttattgaaatttcatttttagtaatgccgaattgtgatgataaacatttagcatcatctaagtgatccctgggtcaggaagatcccctggagaaggaaatggcaacccactccagtactcttgcctggaaaattccatggatggaggagcctggtgggctacagtccatgatgccacagagtcggacgtgactgagcgacttcactttcacttttcactttttccagtgatctaaatgaagatgatcaccatcatctgtctagcattctgatcggcattttgttctcattatctactcttctcctcagaaaatcccatgaggtaaatactattactattcacat

SEQ ID NO: 57471 - DNA, 703 bp, Bovine  19866881877338
  misc_feature (1)..(1): n is a, c, g, or t
ntaaaaaaaattactagacgtttagattcactgatcagagaacataattccatttacatggacctgtaatgtctacagcttctaggaaagcctccaagtttaaaggcaaaaataaaaatgagtaaaaatgtaacttcctttaaactcatgatttatattctcattgtgtcttgaaacaaattgaaataattatttgcacacctaaagcaaataataacagtaataatctgttccttagattttatcaaatctcaacgatttaaatccagtctgatatgatttatatccaagtgatatgactttattacttgaaacacacaattctgagtgaacatacagagctacttgaaattgatctctttatcaagatttaatattcctcatgtttgaataatgatttcctttggagaattgataaagtttgcaccctttttttcccattgtttctttcatcaatcacagaactgcaagtaattggatgcctttttggggacagagacaatgagaaaaagcataactgttagtgatttaaaaactttttaattttaaaaattaatctcacattaaattacattttgagcaaagtattaaaagttcctggttcgaaactcaattttgaagtatctgtgttatatctcaattgcagtatatgtaagaaatcataattcataatgaacaattcaattaagcacaaatgacttag

SEQ ID NO: 57472 - DNA, 2091 bp, Bovine  19866881877348
  misc_feature (1)..(1): n is a, c, g, or t
nttcacaagatttaaatataagactcttattaaatatacagaattcaactcagcttgacgttggcaacattaaaaaaacagatgtatttcacttcaggtaatactgagtataaaacacatttttgtgtttttctaattacttgaatccttatgctatgttaatgctgtaacttttttaatgtatcacactaattaaaagctcaaaagaggaaccaagtttcctatatcctagagcaaaacagttttaattttattaacctttttctctaaaccatgtcacaaaaacagaagtattaatatttttttgaaaaattgctgacttcagaactcaatttatttagatgctaatggaaagcatttctcactagtttgtgatagtaattgatgtcatgaaaattgagagtgaatgatatatttattgaattaccttaatcatattgcaataataataatcccaaacaatatttcaccttttatgctaaatgattcatatacatgtacgtatgtgtgtgttattaaagctcacaaaagctctatgatatatattgtgttaaacagtttcagataaggaattagactttcagagaggtaatgtaacttgcctaaatccatattaaattcaaactgcctataaagaactctacaaaagctatacaagtctaaaattgattaaccaagtgcattacaatatatgaatcttctagtggttttcctgtctcctgaacgttctttaaagcttactacttgctaccagatggataagtggctcaaatcaccactaagttgaactgatgattgaaaaaatacaaacaccatgttactcaaactccaaccatttaatgacagagtttggaaagaattggccaatattatagctggactaaaatgatttgagtcactgattcaaagagcttctgaaacacctctaggagacttattagtagcaaatatacaatgataaattttaggacaagaatgcaagcactctaagaatttaaaaaggatatctttctttccctcaaggaatcagaaaaaaaatccccataaaagtgatgtgtaaactaagattttaaggataattaagagtctttagttgaaagatgaggaaaacatgcagtttcttaaaagttttcttaaaatttcttttaattttcttaaacataaatcagagaggtaggaagacatttaaatttccacggagataaattaacaaataaagattttaaaatgaaggggagaataatatcacaaagttgcagacagggcaccaggcattgggatccagcaaggagatgtctgtgtatgttagtcgctcagtcgtgtctgattctttgcaaccccctggactgtagcccaccaggttcctctgtccatggaattctccaggcaggaataccagagtgggtttccatgccctcctccagggcatcttcccaacccagagatcaatcctgggtctcccaagttgcaggcagattctttaccatctaagccaccagggaaaccagcatggaaataaggaaatactattgtaacgggagaaaagcaggaaagagtgggtgaaaaggaagtgacattggggagatacggtagcaaaaatctgaggaaatctttcatgcattgttttcccccatctaagaattaagtgatgagctaaagtttgaaactgtaactgcaagagtaagagcgtgttttaataaaagaaaaaaaaagtgcacactgtgaagggcctgtgagctgcaggaccatgaattcaccaataagagtctgactcactgcgtgaattttgtttctagtggcacttactcagccaaggagcaggagaaaaggatccatccatgtaggattttgtttatgtgtatgtttgctattgtcaatcaggagccatcaaaaatcacaacaaagggaaacagtatactgatatgcagctatgacggaccgcaaagtccaggcggtttacagagggcaggacaaacaaggaaggtgaggcgcaaaagactctacactgatgaggcactgagctggcttctcagctaattgtgatgaaagacagatgtctcttttcaatttccaacttatgcaaacacatat

SEQ ID NO: 57473 - DNA, 631 bp, Bovine  19866882127482
  misc_feature (1)..(1): n is a, c, g, or t
ntgtcctgcattggcattgaatatttaccactgaggcaccagggaaaccatagaggattttatgtatatgtatctacattttatataaatgtatctactacaaagatgccccccggggtgtaattgaaaagcatccatcttcagtggataaacaaagtcctacagtatagcatagggaactgtatttaatatcctgtgataaaccctaatggaaaagaatataaaaaacgtatgtatatttgtaactgaatcacttttcagtccagcagaagttagcacaacattgtcaaccagcaattcttcaataacaaataaaagctttcctcctttaactatttttgccgtgcaatttctttaaatgtactgtgaatttattttctttttctttttttttttttttttgtgaaccaaactcttgaaattttattggccactatggtaattggttgaactttgcaaataaagggataaaaaattcagtgtatgtgagggtaaatttattttcatttctggttttcttgagctggttatttacctttagcaatttcatttaatatttgaatacatttactactggcttacagcagctaaaaacattacccaccacagccataaaatcttattggctttt

SEQ ID NO: 57474 - DNA, 1009 bp, Bovine  19866880385572
  misc_feature (1)..(1): n is a, c, g, or t
ncccccttggacctgtcggggccccgcgttggctcacggccatcactcttttgaccccctccacgtatttgtgcccctgcgccctgagcaaaggccccttctctccccagcctctcattatccctcctgcctgacttctctggacctctttctctgatttttccttcccttgatattttcctttctctggaaagctctgcatgctgcaaaaacagtatttctcagtgccatatgcaacaggaagcgccagcacaggacggcttgtctttccttcttggttgaaaagactttgtagagagtcatcttgtttgaaatgtttaattcattggtgtaggtttctatgttttcagaaggaaatcgtccttctgttgtcagcagaaccagctttgctccctcttgccacacgcccttggccctgtggccaaaacacagaaaagtccttcctttcccaccctgtgcttccagctcccgaaagggccagccggccagcatttctgtctttaaactttcagcgtgagctgtggccaagacacacatgtgcagggtggcaatcttgtggggcaggggcctgcttgtgggaatgtgccccccccccgccccccacaaccgaccgccccgggggaggggaagaactcatcattcctggaagggccttgggtgatgtagactcaaaagagataaaacctgcgggcatgccggcctccaggagtgacaggagcccaggatacctcgcttgggctagtcctgagaattgaattgcagccttggtgagatggtggttggagttacaaatcaaacccagagatggtccatttacctgatcaggttcttgtcaattgcactgattgattctgattgggtggttctggacatgtgcttctaacagttcgggctccaaagacaaagagtcgagacagggtggccgagtggatcttagccagaggtgcgggtgggattccagtcagcacaggagaaggggccgctgatgactgggtgacgttttctcagt

SEQ ID NO: 57475 - DNA, 1475 bp, Bovine  19866880536542
  misc_feature (1)..(1): n is a, c, g, or t
ntagtagtaggcgtggaagaagctccactcctcgcactgggagaaggcagccgcgccgatgcacagcgtcccccatgcaggagaagaagcccacggtcaccatgttctccatggacacctcccgtgttgcgcaggccacagcacctcttgatgcgcttcagcaggtagcgcacgaacgtgttcatccgctcgcccaggctctggaacatgaccagggtcaggggaatgcccagcaccgcgtagaacatgcagaaggccttgcccgcatccgtgccgggagcagcgtgcccgtaacctgcaaggaggaggtgagaaaggggagaggcagtgaggcagggtctccttaagtcagggtggagtgcggtggggtggatgtgggtattgcagttgggatgcagctggggtaacctgaggcggggtggtgggaagaacaggcaagaatcaatgaagaaatgttcctccatgtttggaacacttaatttaggggaggaggagtttgggggttattttactgttcttagagtaacacgaaggttttccaaagaaaagcagcatattcactcatatgattttgcagaaagctgcagacgtagccagcccaagggagaaaaatgaaatacgcccaccatggatcatccctaagagcaaacagtcaaagaatgctaactgggttttcttgttgctgttgaccaccatgcttgtattcttaaataaacgctgggtctaaggccaggttaggtggacaggtgggtggaaagcccgggaagtgtggatccttgcacctccctcactgggagcagtggggccacccagggaggtgggggcatctcagaaggtaagagggtgcacaggctggaagggcatgatggatccacctgagtcgtttctatgtgtgctggtaaagggggagaaagaaccccagtttccacagcctcaaaggtggtgccagaaagctcagcatggtctagagaaccccctgcctcctgcccaggctccccgtacccagctcaggtagccaatcaactagttagtctgtgtgacccgcatcacacaccacctctttctaaccttgtgctgaccctataaaacagacacaatgcagacacaatgcatccgacaccactggcaggaaaacagttatttaatagcagggtaactcgatttcttcagaattgggatttaagcccagagttttcagcaaatgaggcttaaaagcagaggtcttgaatctagaggtccctgctgagtggagcataaacaccacaggggcaaagatgtttacctcttttgtgagaaataccgagcacacaaaatacctgtttaacaaaggacagaatacatccatgccactgtgtgaatgcggccctgtcagaatcgaggggacacacaatcctgaaagaccccacaattgtaggagcctctgaaactcttcacgcagctccacagaacacccctctgtggattccctgcatgag

SEQ ID NO: 57476 - DNA, 1100 bp, Bovine  19866880710978
  misc_feature (1)..(1): n is a, c, g, or t
ncttttctttacatcttctgcttctgttaggtccatacaatttctgtcctttattgagcccatcttggcaagaaatgtttccttggtatctctaattttcttgaagagatctctagtcattcccattctatcgtttccctctatttctttgcactgatcactgaggaaggctttttttctttttttttttcaggaaggctttcttatctctccttgctattctttggaactctgcattcaaatgggtatatctttccttttcatttctcttcttttcacagctatttgtaaggtctcctcagacagctagtttgcttttttgcatttcttttccatggggatggattcctgtctcctgtacaatgtcacgaacctccgtccatagttcatcaggcactctgtctatcagatctagtcccttaaatccatttctcacttccactgtataatcgtaagggatttgatttagggtactccaacagaggttttgaaaaataaagtaaaataatgaatgcatttaaggaccagcacctgagcaatcgggcagggcgagctgaccacacacatacggcactccctgatttgggagaaccgccctccatacccggcccctaggctgtcccaggggctcagggttcaagcccctgtcctgcatcagcaccccccccaccaccggtaataagctgggtgggaggggcttcctccaatatccatcaggtgaggggcgggaagagatggggactgtccacctgggtgtcctgactggcaggattctcatgctgggagctggaggttaattaaatggttatttgttctgccttccaaatgacggaaatatgcaccctaaagagctttcaggaggaaaaaagtgctgcatgatgattatttaatattttatgggtccataaacacagcaagcaccgcacagccaaacgctgtcaacctccggctgccgggactgcccgtcagcaggtggctctcagtggactctcctgactcccagcccctggtggcggcagcccagggtccctctgagttcaaaccccccgagaccaggcaggggctcgggacccggctccatcctccggagtcagaacgcg

SEQ ID NO: 57477 - DNA, 893 bp, Bovine  19866880782538
  misc_feature (1)..(1): n is a, c, g, or t
nagccctctccacccgctctgcctggaattatgcccacaccccccacctgctacccagagcctctcccacccttcaggccctggttcacctgcccctcatccagggggccctgtggtcacctggccagagcgccctcttcatccacctggcacttccttcacccccagggctggaggaaggtctcttgccacagtgccgtggaccccagctctccgggagctgggtgctctcggcatcaacctggggcccccgagggtggtggctgtggtccccacccctccagtggcatccacgcatacccaggagcaggcagctgctgctgaagttacgataatcccggctttaacagtctcgtcgtcagacagggccaggcccgctctgcggatgaggggtttggggacgggcaggtgtaggtcctaccatcatccttatcaccccgtccgactgacgaggggaggagggaggaacagaccggcgtccgccactcgcaggtggcagaggcgacagtcagacccagacaggctgagcccggcgcggccaggaatgcatgcgaggcggccagtgtgtgcggtcagccgggtctcagcacgggctctcctgccggctcgcttcctctctctctctctatcccattgtttgattcccctctattctactgtgctctttaatattctggctgtgacccgctaactttatttcatgacccactaatggatcaccgcccacagttcgacggtcttcctgggcagggctgtgtgggcccgggcaggtgcagtgggcacggggggtgcttggggtgggcccctgggctcaggggcacccactcggccctgggcatcactgcccccgactcggagccgtggctcaggagacctgcttggcagccccaggg

SEQ ID NO: 57478 - DNA, 1059 bp, Bovine  19866880183356
  misc_feature (1)..(1): n is a, c, g, or t
naaaagaaagcccatgagaaaatacttgaggaaataatagttgaaaacttccctaaaatggggaaggaaataatcacccaagtccaagaaacccagagagtcccaaacaggataaacccaaggcgaaacaccccaagacacatattaatcaaattaacaaagatcaaacacaaagaacaaatattaaaagcagcaggggaaaacaacaaatatcacacaaagggattcccataaggataacagctgatctttcaatagaaactcttcaggccaggagggaatggcaagacacacttaaagtgatgaaagaaaataacctacagcccagattactgtacccagcaagaatctcattcaaatatgaaggagagattaaaatattgtattttagtgtaaaattcctctagttgtaatctcatggtgctgccagtcttgtcctcatggtagttgtagaataacagtgtttatcccccaacacaacaccttctattcttcccacagaagatataaaaattcccagagggagaaaattttcagtaaacagtggtgtttatccttgataatactgtttattctttttccttttctgaacatttcagttaataactttgtaactaagggcagaggaggattctttttggaggtgtattagttagagatttgtgttaacattcctgagtagaacgttgcaatctttttggagttaataaaacaatcttttattctgggtattgtgcactgtacatatctagccctgaaaatcggttaaaacatttctgtttttaaaataaacagagctaaatttggcaataagagctagtaacacaattattcacaattatgacagtattctttacaaacataatacatagtagggataaatgactgattttttttttcagtaatattccttattttgaatttgtatattatcatttgtataaagcagtaagaaggatttttaattaataggttaaactttttgaaatcttattttaagcttatatgtacatcaagcaaatacaaacatattagggtatatccacatgtttaggtttt

SEQ ID NO: 57479 - DNA, 1172 bp, Bovine  19866880286696
  misc_feature (1)..(1): n is a, c, g, or t
nctatggtttttccgtggtctgtatggatgtgagagttggactgtgaagaaggctgagtgccgaagaattgatgcttttgaactgtggtgttgaagactctcaagagtctccttggactgcaaggagatccaaccagtccattctgaaggagatcagccctgggatttctttggaaggaattatgctaaagctgaaactccagtactttggccacctcatgtgaagagttgactcactggaaaagactctgatgctgggagggattgggggcaggaggagaaggcgacgacagaggatgagatggctggatggcatcactgactcaatggacgtgagtctgggtgaactccgggagttggtgatggacagggaggcctggtgtgctgcaattcatggggtcgcagagtcggacacgactgagcaacagaactgaacagtcccttacaattttgaggaggaaaatgcttgacgcttctatgtattaatacacaattctatacaaatataactataagcctctgtatttcagggaccacaaagacttctgagcaaacagtgataacaattactataactgttaaaaagttgacaattttagtctaaatgtaggggcgggggagaagaaacactttcagtatcactgaaactgcttataaaaaatacaaatgttaagattatactggtctttaaagtttcaaagacgatgtaattagaccttcaataactccaaagtctattatactacggatttaaaatatacttttcctaaaataatcttccttgcaatgggatggtttatattacaaaaggaaaggagaaagatctatgtagagcttagaaaatgttggcaaagcaaattggtttatgtaagtttaaataaaacattctgcttcattcaagcttacaatgctcaataaggaaatcccacaaactttgtctttacaggtgcaatgggagatcacaacttgtaaagtatgaacaaatataaaagcaaatgtgaaataagattagacaaatacaggcccagtagaatatagtaaaataatactcaagttattcaaatttatttgagcccccaataagactatggtatcccacgttaactgactttcaggagtaaattaaaatacctatactggtatatacaatgtattgatactaaagatacaaa

SEQ ID NO: 57480 - DNA, 2556 bp, Bovine  19866881003899
  misc_feature (1)..(1): n is a, c, g, or t
nctaccagacagagctttgacctggtcattcctaaatgctttgactggcagtcagattcttgttccgggagcagttctagcaagtcataacggggagtggtgggactccggggacccgatgtgccagtggcatctggagtggggccagtcttgtggagtgagcccttcacccatggagaccgtgttaactctgggtaacaagcgtcagaactgaatgcaatgttggacacccagctggtgcttctgagagttgttgaagtggtgttggaaaagttgtcaacataattgatgtcagaagcttggtggggaaaaacagcatgaaagtgttattccctccgttgtgtctgactcttttcaaccccatggaatgtaacccaccaggctcctctgactgtagcattctccaggcaagaacactggagtgggtagccattcccttctccaggggatcttcctgatccagggatcaaacacaggtttcctgccttggcaggcagattccttactgtctgagccaccagggaagcccataaaacagcttaacgtgacgaattcccacaaagtgttaacataggttaacactatgtgccacctctgcagggtgcaagggttcaatccctgcttgaggaactaatactctgcaagccttgcagtgtggccaacagaaaccccgcaaaacaaaaactgcctcccctcacacagcgggattgcttaaaaggagttcctgggttaccacttcctggtaggtttgagaccttgggtagaataagctcaagacgtggtgattcggatcatcatttcggtttggaaacagctcctcctgcctctttcctcccataacttccattggaatcactgaaatgaacagaattttagctatcagcattatttcaccctttagtttatttaataatggactttggctctggaaaacttctcatatgtccaaggatatatatttacccaaaagttcaatgatagattaccaaagttgatacagttgtagacttactgcataagggcctccttttggagaatattcccagcgtgggagtagtggtttgccgccctcttgtcaacgtggcatgccaggctcagtcactggctttggctgggaagacctcatctccctttctttacccttggatgtgtggcagaaatatcagcattgccgtgtttcccatccgtagtctggatattgtgaaaatggtgtcagtatccggccttaaaatatatttgtgtactcattctccagataagagaagtattttgaattttatgtttaatccattgggaagtaaagaaatatctcatctccctctttaaatttacagcaggtgctaatgcttttaaagacccagccgtgttacaatttcccctttatttcagttttcccggagcgtctccaataatgaactctgacatggtggcacgtgtacggatgcaggaaggagcctgaccacgttggcagagcaggtcacatgctgtcttcccttccgtccttaaaatgtgcatttatatcacatacaggtttgacactgaatgttgaaaagcaaagtaggatctgctacaggtccctttaaattttatagaaagcatcgagatttttaaaaggttacttaaatgtacactatcttaaaatacttgactgttgtcaataaagtgttagtatttgtgaaagtattagtcccattcagaaatatttcttatatttcctggaaatttgtggcataataaagcatatccagaggttatgtgtttatgatattattttccaaacaataagtttattatccttaggataaacatgacttgtttccttgatttcgggcatatattaacttgcgaattactgaagttatctgtttcatctttctaaaattgttactgattttgttgcactaccgttacctttagagaggaagaggaaggctttccggggtgtatttctaagggaatttactaaatgcaaatagcttgtcaatagagaaggcaatggcaccccactccagcgctcttacctggaaaatcccatggacggatgagcctggtaggctgcagtgcatgaggtcgctaagagtcggacacgaccaagccacttcacttcactcaccctcacacggttaaggaaactaagctaagaggtgaaagatgcctgcaaaaatctaactctgctaatgagtggcgaagcctgcatttgggctcagtcatccctggcggctcaaatgataaagagtctgcctgcaacgtggcacatctgggtctgattcctgggtcaggaagatcccctggaggaggaaatggaaacccgcttcagtattcttgcctggagagttccacagacagaggagcctagtgggctagagtccatggggccgcaaagagtcgtacagtactgaagcaactaacacaacaacactgatcccatctcaaagctcacagcctgccctgcgggagcactgggcaaggggctgagagagctgggacctgggacccccgctcagacctttcttctctttgtttgggcataaagggtgtccacttgctgttcatgta

SEQ ID NO: 57481 - DNA, 1544 bp, Bovine  19866881090576
  misc_feature (1)..(1): n is a, c, g, or t
natgcttttaataaaggagaaagctacttggtgtcgttgagcctatggggaaaaaaaaaaaaaaaagaatatgatccagttaggaaaggtagatttaaatcactaaagaaaattatgccagtaattttcatgttaactgtattctgtgttgaagtatgcaaaactactcagtataaattatagtcaatccatatatgatcagctgctgtacatgtttagatatatactatgggacatgaaatttacagtgtttatatgaccatataggcttttatccagggaaatatttgtgtttctttaaaatgtaaactattaatattttctatgattaaaggtaaatgatgtcatcagtggacattttagctttatggaagcaaatttttaagaaaaatagtagaaaggtgtctgattccttttattattcttgtagtgcagaagtataaacaaagatatcagttagaggcataggaaagttcatttgaagaacctgcaaatcacttttggtaagaatacattcatcttatacaagtgttcagaaaattgggaaaattatagccttttgtagcagattgaaagtttcatgtataagtagttcaggacagtaaacatcactaacttgaagtaaaattttgccagtaattttcacattaaccgtatttattatttgatgtaaatcagttaatcagtgaaaattgtaattgaatgaatggacatttcagaatgctaattaatgatcaatagaagcctaagagtacctcttgtaactcttttgagagcagtatatcttcagttttgttaagcagagtaactcagttaacaatttgaacataactgtaaccctaatttcgtatagggcatcctgagtggctcagtggtaaagaatctgcctgccattgcaggagtcttgggttcgatccctaggtcaggaagatcccctggaaaaggaaatggcaacccactccatacttctcttacctggagaagtccatggatagaggagcccggcaggctgcagtccatggaattgcaaaagggtcagtcatgacctctagtgccttaacaatttcatatatcgtgaaaacatttggtggttagttactcggtagccatatatgccaggcattgtgttcagtgctgtatttatttgattccttaaacttacgcaagaaagagattgggagattaatttgctcaaggtgacaaagcagtgttttgtaccttttgctatgacatacttttatgacataatcactgtcctattaaatattttcccagtggttctcagagtctggtccccacactggtatccttggcttcacttagaaacctgttagaatacaaattcttgggccccacccaacaacagaataaggtgaggcccaacaatctgttttaacaagcccttcaaatgattctgatgcaggtcaaagcttgcaaatttgcattatgcatttctatttttaagcaaagatctttggtctttcttttgtttttggacattgtataagcaatataacaagaacttgtggggggaaaaaagtgat

SEQ ID NO: 57482 - DNA, 2581 bp, Bovine  19866881159904
  misc_feature (1)..(1): n is a, c, g, or t
ntttgattctgcacattctctgaaagggttttgggaacccacaggggttcctttggaccttgttttggggtctgctagtttatcttcattttattagggggttgcaaaatggtgatactccaattcttattacgttggaatttgttagttggagagttttataaataatgcttctcttttatcacctgtttattagtaattaccttgagatgttatttgtacaaataagataggctcagtgcttgtttctttccctttagagagatggaagctttattgtatgtttcaccatgtaagagaaaggaccatgaagcccccttttgtactaattgaaaccattgcttacggttagaatctcctagaagggaagggaagccctctgctaatacatttgagttgccttcttaaattattaaggtgtagtttgtatcttacaggttgcttatttagtaatatatcatataacattgtaatctctttaagaaactactagaagaagctaaaaaggattgaaggcttccagggtatctgatgctttgagaaatgtgtgaagattaacaagattatgtctgtgaattgtttaaagctgttgtatattgtgagatatattactgttaactccatagagggaagaatataggctatcttatggaatgttaagttttgctacagttagattttagaaaactgaactttctaatctaattccagaattgcttccccaatttgagcactcttgaagtgagactgggagttgtaagctgtcataaatgataaaatccagaaactgaaactggaatggaatgaagtctggagagagaagatatgtgtcagagcagtataagcaatagattaattaggcataataaaacttaatttcttaattcatcttccccacaaatgaaaggggaaagtcatcttaatttcttacttgtgtgtacttgagatgaaatgtagagtcagttttcctgtactaaacagtttttattttaattggcttttggaatttttatgatacaatagaaatatgttgagatgagtttaatgagccaaccatctatagatctttaaatatttggcagtttaaatagctatttaatgtggcctggaagtgagaaggatgtgagttgaaggatataagttgaaccaaacagaataatctgtcagcaaaataaattttttctagtagaacttaatgtcttgtttttggacctggtgaaaattattttagagattaaaatttaatagcatagttgtggttagacggtatctgttttagttttatttgtagactataagaaaaattttaaaatatttatatatatattttttgaataatatttgcataataatattcaataaatattgaataatatttgtatttatagaagttcattgaaaaaagttaacattttttgggagaatcgtttgagtagccaccattattccatggaaaaatacctgtttggaaaataaattaaatcttttcattgttttttttttttttttaaattttacataattgtattagttttgccaaatatcaaaatgaatccatcacaggtatacatgtgctccccatcctgaaccctcctcccttaaatcttttcattgttttaatagttttttcccccttatatattgggggtaatatatcaaacctctttatagttgaaccttataaatgttgttgaattttggaaaaatatttggtgagcttgtccttccttcctggaagctgaagaattttctagtttttaatgaagaatgcagtgattggatgttcactacaaagttaaaattttttttgattaaagtagtgaggatgcacatttactatgtttacacaattatcaatatatgtttgttttcagtctttttttttcttaaaggataagctttggaactttaccaaaaaaaatgcttactttgactttgaaatactttagtatcacatttagaactttaaaatagtttggtatcacatttaggactttcttctgaatgctgtatttaaaagctttaaataacttttgaaaaacaatatatgaccccaaacaagctaattccatgggtttaaaaacgtaaacaaaaatacactttcagcgcatgttcaagtaaatatagattcaatttcttagtttttttttttaattgagatgtaattgacatataatattgtatttggtatgcaacataatgatttgatatgtatatcaattcaaaatgattaccacaataaaattagttatcatccatcactaaaaaaaaaacacgtggtatgataatttatagtaactgataatctgtctaaaagtatgacatgaccctaaagggtcaacatttagagaagacgtaaggcagtaaagaaccttttttgggtttaatttgttacttttttgggttttaatggaggattttgtagaggtgcagtgaaagactgggacttccctagtggctcagacagtaaagaacttgcctaacacatagtgaaaaatagggtcattctggtcttcctgggatcccaggtggcacaggataaagaattctgccaatgcaccaggaggtgcaggagacatgg

SEQ ID NO: 57483 - DNA, 1155 bp, Bovine  19866880678042
  misc_feature (1)..(1): n is a, c, g, or t
nataaaatggcatagaaagtagtaaaacactagtaaaagaaattaaaacaggaaaatagagaaaaaattcttatcagtaatgtttctgtacacttgatcttagctacataaacatagcttgggcagttaattaagcagttgaaaaaagatagatgaggagtgaaggaaagggaaataaataaaactctaagtgaaaattttctgacaaatgtgccttcttggttaattttcacatccagagctaagcaacatctgcatcacttgcacttcctttcattacccaagcaccaatcacttactcgtttatcattcctatacatacacatattactaaaatgtgatgattcgtcactattcattgatcaaataacattcagaattaccttccaaatgctttgcatgtagaggtgaccagatacctaaaaatgtttgacgcttccttttcataacagctccatgaaaagattcagtaaacctgattccttttaatgtctctcattagcaaggggactgtgctctctcactctagataggcctgcatgcctctctccctccatgcctgttcattccacatgctttcatgtgcaaatggacacaaattgctgtcagttgggaacattcggaaaccatttgccttgattttccttaagtaaaatataaaaagaactaggagcaaatacatgggactattatgtaagaagactctttaatatgttgcttgggtgctcagtcccaaggaaaacactgtttataagttgagcagatcagactttgtcaattagaacttagaccaccatccttctggaaagtggctacttttaggggagtgggttgtatatatgaaatggaaagaaatatggtctttacatgagtcatttttgcagccttctcagaacctacccatgggtcaactgcaggtattcagaaactgtttattgactgcagtgggcatgtggacttctgttttccaagttgcagagtctcatttagagatgttgttaaaggcgtcctgctctattatccctattagaagtttgtagaatctttaattcacagcagccacacatctaaactttgttctgagcaaactgctgaaggcagctgccctgacatttccctccataggtaagtagagctaaagacttgggctgaatt

SEQ ID NO: 57484 - DNA, 1277 bp, Bovine  19866880920404
  misc_feature (1)..(1): n is a, c, g, or t
nctaaatccttaagttttaaagttatgtatacttcatgcaccaaaaagaaattcgaaggctttttttcactcttttttggctccctaaatattttgagtagtttatgtttctttgttatagagagggctctaagtccattttgtttttttgtgggagtagaaactgggaattgtgctttgctaactgtaaacaatatcaaaaactaaagtatcttctggatttggatcagatccctaagtcaatgagattcagtagcttcttatattggcaaactatgttcccatctaccaaagatgaaaaatgggccaacaagtagcttaaggatttttgccagatatttacatataaatcaaaggtgatgtctccttaaattgtacttaatataggaaacagtctgtttgatttcaaacttaagtggtatttgatgcagtcattgcctgttcatgattaaaatcttgcagaaagcccaccaatgatgagcaatctaatatttgcggtctcaattgtaaactgtgccaatttcatgaaaatcatattaccatagttggatccaggctaaccacatagagctctttcccgatccataattacataattagattatttttatcttaaagaatactttaaggaacattttctctatggtatattattaaagaatcatgccttcttaaagtctctttgtaagccaagaaacccacatgttacacattataggggaaaaaaatagttttcatgagatttctgcccagctttgaatcaaggttcaagaactgtattacagtctgccagtgatattttgggagtgaagagaatacagttgcagagcaaactttattaaaataattgatgagacaagatattggatgttaaaaaatgctattactctcaatgccaaacctatctttctcaagagatagagttggacatttgagataagattttaaaactatattctctatatagaaactgcatctgctatcataggctgaggggaggaggcagtcttgatcttcaataagtctattttgttttaatgtttggttattaatatatacaatatctttcatcctcattctcagttttatataagccaaagagagtgtaaattcatcaatactacacaaaccaagcatacagagtttggtaactgactgtgaattctggtaaattgcttatatttctctagaaatgtcgatttgcagatctcatgcttgatatgctagaaatgagtgagaaagatataactcaaggtaaggacacaagtctagggaaa

SEQ ID NO: 57485 - DNA, 2426 bp, Bovine  19866881054166
  misc_feature (1)..(1): n is a, c, g, or t
nctctgctgtcttgatcttgtcctcctttagttctttttaaatggaaagaataataagacccaattctgtttatgagatagtacacaactattttgcaaagctctttaatgaaagcacttgattatattaataagaacataatattttaatatattccatattattatttggaatttaaataatacccatcttagaggaaatatatgagctttttaatctttgaactaattctgctatcacattggttatcactcaatagcattttacctctcatcactagtgtatacgaatatgttgtttattatgaatttgtgattaatgcttctgtggtgatcatcccagattatttgcttatttataaaaatcagcaactgatctgacctgatctgatctgaacacgtagtattaaagttttcagagatgaatgatatgttattatgaacaattcacaaagaaatttctacactaccaaaacactttaaaaataaaattttaaatataaaattctctcaattacatattgaattattagatatattctattcaatcaaaatttattatgtgcaaaatacccacatgtaaacaagtaaattaggatcacatagaggaattcaaggcactaaaattcttaacaatataaatattttcacattaaaatagaccaaacaacctattttagctgtaacatataaagaattttgaagttgtcattcccattcttgaaacaagaaaagagcttaataaattggaaggcaatgactagtcttaaactcatcagaaaaacatgtctgcaggatacatttatcactccaaaatctggatatttggatgaatccagagagttacctccaagaactgcttacctgaagcagaaggttttggagctataaactttaagtaacacagaacggtaattttgtcaaattgattaaagctaagtgtgggttagcctgagagttaaaaattcctgatttccaccaccttgaggggatgagatcaccaaaattttcatggacactaacttcaggaatcctgcccacttcttacagtcaagtgtcaagaaatattactcatagatctgaagagtgagggcaaatgtagctattgtgaagtatacccagagcctacacaaaggtctattctcaacacacacacatataacaaaactggtacggggagggaggagggaggagggttcaggatggggaacacgtgtatacctgtggcagattcatgttgatatatggcaaaaccaatacaatattgtaaagttaaaaaataaaataaaatatataaaaaaaagaaaaaaaaaaaaaaactgtctcacctaaaatgctggatggggaaaactaagagacacatgtgaatgtcacaatccagagcacgtctcattaaaagacagatatttaattgtaaaattttataatacttactcttccctcagctttaccaccatactaagagggccccaggataaaaactgtgtagaaccattgaaagagcttcagtgagaacagaaaagttcttaggaaagcttgaaaacaagagaagaggaaaaattaaggaaactagtagaatttaaagtctaacacatacagaagtatcagaaattaagcaggcccaactcctagccaaagtaacatacagctacattaaaatctttgtctcagttcctgttatccaatacactgtatacaaatttaaaccacaaaaaaaattacatggcatgttaaagacaagagaaacatagcctgaaatgacaaaacaaacaacagaaagattcagatatggtgcaggttttgcaaataaaaataactacataggaaatgtgaaagatttatgattaaaatattaaagactataggaaaaatagaaactatgaaggaataggtggataatgtaagcaaagagaaagaaactctaagaaataatttaaaagaaaactatagaaatcataaacattacagaaatgaaaaatgcctttggtacaccagttagacacagctgaggaaagaatcagtgagctttaagatacatcaatagaaactacacaaaatgaaaggagagtgaaaaacggaaaaaaaaaatatatatatatatatatatatatatacagaaccatcaaaggactgtgggacaatgtaaatagatgcacataggtataattagaacatgtaaagataagagacaaagagcaaatatatatatatatatttttttttttaatatatatatttttgaagtctccacctgtgagggcccagcagtcagggtgaattggcttcaggcaagagttgaagagccatcttcctacttaattggcctgtgaaagtatcctctgctctctttccagaaagaaaaagcatccctgccattcgggtcacggggacatgagcctcaacctcgtctctgtgggatttcagct

SEQ ID NO: 57486 - DNA, 1653 bp, Bovine  19866881325542
  misc_feature (1)..(1): n is a, c, g, or t
ncacacacctctgaggtcatggttaccttttgatcagggcgtttgcaaaatagccaaagccctgaggaaaccatgaagtttgtgaaacatttgtaggttctgacaagcttccaagcttcctggtgggaatactttgtgttcttttccatcctgctggaggaaagcagtggtttatggacaatctcctaggcaattagaattccataattcaaattaataaccccataaaatattgcagattatgtactgaaatacttgttttttttaacctataagtaaagtactattctcatagtgattttgaaattgcttggaattcatcccagtctggctgaaaacaatttttttaagttaaagacatttgcaataaaaaagattgagtttaatgaagattttttaaatttacaattagattttaagattagtgggacatgaaaaatatttgctttcactggtttgctttactgggaagtcaatgttaaggtcaagtttttcgcaagctgaccttttccaagtaggaaagggggaaatggcaggaggaggcaggaagacaacttcattttttcatattcctgttatgcttcatcacattgtctagtgaaaggaatgagtaaattaggttttgggtttcatgcactggattatgtgtttttatatatcttcctgcttttaatttagtagggcagttctttccattagaagatgggtctcattaaaagaaatgttattatggaaccgtgtgcattaggtttaattttcactcaatttaaaaagaatacttgagagactagtgcatggaagctcaagaaaatgattagttggggttccttttaaagagaggagctgaatgtgtgagaattagcgcctctggggcaaataaaacaatcaaacagtcagaaatggggttgtcagcttcgtgtaaatgacagactccactgctctattttcagatctcttgcctttctttaatgaccattcccctttctcttgagacagcagacaagaatagctaggggtagggggagaagtaaggctctggcccaacgagggtaggacccctagagggatgccttcagtattatattctggcaccaagagcaaagtcaagtctgtgactgagatgtggaatcctattccagcttgagcctttacttagcacaaaggtccttaaacttcagtgagcattagaatctcctggagggcttataaaacataggttgtcagtccaacctctagagcatacagtaggtctgggagtggaggcagagaatttgctttttttttttttttaacaatttcccgtgtgttgctgttcctgggaccacattttgaggactgacccagaacgtgcttatgaaggaccagcaggctccaaatagattaagtgcatatacacatgcaaatatgcataaattaggttttccttacaaattagttaggttgtaatcacatctgaggactgactgtagttctcagtgtttagtttattcttagttgccggaagaaatctaactgttagaagatctaacacagttagatctcccccatccattctagtgcctcaatctggaaagctctttagttctgcaaagatatttctattctcagttgacatcatgggaatgagatttattgaaagaggcaggaggagag

SEQ ID NO: 57487 - DNA, 874 bp, Bovine  19866880481419
  misc_feature (1)..(1): n is a, c, g, or t
nggattttccggcaagagtactggagtgggttgccattgccttctccgatctcatcactagggcttcctaaaactgatttaccctgatgcctggtggcctttggctgcttttgtctctgccaatctggacatttcccagctggctttagtgagcaatctgtcctctcttctgctgcctttggctttgacttcattgtatctggtcctaggtctgtttgctttgaccttagttatctatgagatagttgactcttaactgtgatctgattatcttatttttctcctatgattcctctcttgactttccacatttgaagacctgtctgtgtatgttttccactgatatttatatttggcacaacaagatagttagctttgttaagtaaaggtcagtcctgggtctttggtcctgaaaattatggttggacatatgaaattcttattatattttccaggacaccaagtatttctttaaactatatggtttgagggcataaaaattattcctggtttacagtcaaactccattagtgatgatgattaatcataataagaggccaaattaaagctataacattgttcagagtttaaaatggggcaacaaatctctttggattaccaagggggatttcttttctttcttttttttggggggggggggatttattttcctaaatgttctgcaggtagtttaaactaaaaatgtgcaatggagtagtattttgaagattattgatatgctttttaattttgcctttcagagtacaagaccattgtcttggtttgcctgaggcaacagtatgccagtgggacattaagatttgttacagagggaatactaagagaatatacccaaaaaataaaaataagaaag

SEQ ID NO: 57488 - DNA, 1826 bp, Bovine  19866880607256
  misc_feature (1)..(1): n is a, c, g, or t
ntgggtgttctttggaaggaatgatgttaaagctgaaactccagtactttggccacctcatgtgaagagttgactcattggaaaagactctgatgctgggagggattgggggcaggaggagaaggggacgacagaggatgagattgctggatggcatcaccaactcgatggatatgagtctgagtgaactccgggagttggtgatggacagggaggcctggtgtgctgcgattcatggggacacaaagagtcagacatgactgaatgactaaactaactacgaatgtctttctctggggcaaagattaaggagatttgctaggcatccctttcaaagcttagagtgtctgaaactccgggagttccttacctgttacacaagtctagtgtgcatgtagcatctacctggactgcttcttatcatcctcataggatctgggggcaaaggaagatgatacaaacatgacactaacatggccgcttttgctgtgagtaatgaagttctgtgcttctaatcttaagtctaatgtcttctattgcttctttgtaagcacaacagtctaatttgttaatgtgcaacaggttaaagtctcatactcttcacagttcttgaaaaccatgtgaattttgaggctgtgttcagtccttcaagaaagatgttctctgggagaattaaaccttaatgtctcaatctatccattatatgctcctatacatgcggaatggtagtatgtaaaattggaaaattaagataacagccatatctgaagatagggcttaattttctcatggaatccagttgaggacaagtgtttggcttcacatattccctgactagctggcactgtgaacatcttttgcaaacacaagattagggatagttcttcagatagtaatagatataaaacattgttctcttctcaaaacattaaatatgttatttatgtcaatattagtagtttgaggaagcagttctcataaaatcatgatgttctaactccatgtctttgatgagtatgatatggagagataaatcctaggagttagttaaaactgacctaatggaagtgaacctgaggatggcaactgagcaaacttgctttttgttggcagacacaatgctgaagactcttaggggctatctttgtatccttgccctttcccttgcttgttaaagaagaataaacagcaccattatctctgcagaagccaagggtatttaaagcagcttcagaaagttgacataatgacatttctaagcagaagaaattctatcacatttagtgtagttagaaagtaatatttataaatttatcttttctactgtatcataaaccaaatattagctgctaacacacagccagttgtggatttgggaaaagtttccccacgcgagtgtaggggacagaaaggagaggaactaggtatatagttttcccacttgtcttcacatcattttcacagtccataatgaagttctcctgacatgaaataatttcatccttaataaggttattgtttggatatctttgtgtagctcataatttgaatctttagattacaaagatgctagaccttggaaggaaagagtgagcagtccatggggtcgcaaagagttggacacgactgagcgactgaactgaatatcttctgtcttctttttctttacctaaaagccctgggctcttttcttctgaagattttgatgagtaaccaaagagctgcttcatatctaaacctcttctttttgttgtagcctttcattcttctggctcttgtgttttgtttcactttcttcctttatggaacattttctggtgttcacg

SEQ ID NO: 57489 - DNA, 2052 bp, Bovine  19866880644040
  misc_feature (1)..(1): n is a, c, g, or t
nggtgatagattctgtgtttcctttaacatttactgtggagagaggaaagttcatgggagctgtggtgccagctgaaaaaaaatgtgaagagaacatttagaaggtggtttggacttgagagggagcatgaaaagctgtgttgacaaatccaaggttctgctttttaatttgatattaatctgtcagaacaactcatttgatttttaaacaatttttaatgatgctgccttaacctatgttcccagtatcaaatgaatcttcagagtcctttgatgcaggttgagttaattaggtttagatcagtgatgttactgtaaattattacctccctatacatccagctttgaaccttaagtattaataaatattttagcatttgtagtttcctgacaaaaatgatctgaactaaatgataccaggttttgttgttgctgttgttcagttgctaagttgtgtcctattctttgcaaccccatggactgcagcacaccaggctcccttgtcctccattatctccaggagtttgtgcaaattcatatctattgagtgggtgatgtcaggtttatgtaattcaaacttttctgagcttaaaatatggtggatctaagctgttttccctcacagggaacctttaaaaactttggatcaagtaagtgatatgaccagtgagatattttaggcagaataatgttgtgtttgagagaagaatggactggagaaggggaaaccgcatggtgggcaaactagttaggaaataaggccactaataggtacaaggtcatgttatttgctttcttttgcagagaggctggaaaagagggcgtcaatatgaaagatgtactagaggtattaatacagttggcaagactgcacaaataactaacgggttttgggtaagtcaaagacaattttctaattttgagtctggatgacaaggatggatgacagttcttttcattatgacataaaacacaaatgcttgtctcattttatgaatctgaagtacagatattgagtaacattctcttacaaagttaaaattgcatatctttatgtgtaaaattcccatgattctctcttacttgagaaaaaaaatcatgtcttactttctgacggcagatctgtgaccagaagtcagatatgcacacagcactcatgcaaatagaaacagcatgaattaacagcaggagaactttatgaacaagattcttagtacatttttgcttgaaagcacaaataaatcagttctgtagaaaatctctgtcctgataaaacacctcccctcaaggtaatgagggtgctttcctcacttattacttgtctaagctttaacctttgtaacttcccctgagtcaacttacaattccagttttagtgtgatgatttatgtattatattattaaatattcagtataaaatgtactttcttctcagtatcccctaaagtcattttagctagaggtttttaaattttttttttcacccagtctacccttaaatctcaaattaagattgttaataatagaggaataaaagggcattttttttctctctcttttagctccttaggatacttgaatattttctctgtaggtttgaaaggaaaaaaatcctactttaacttttttgtagagctggaagacctgttctctaactcacgttcaaatccataagtagtttctcaccatgaccctttaactgatctctggcctgtgaattcagcagtgagctgaatgtctctgaaacagtttactaagttcagttcagttcagtccctcagtcatgtccgactctttgcttccccatggactgcagcataccaggcttccctctccatcacccaccctggagcttgctcattgagtttactaagttagctatgaccaaaagtaaaatacagatgctgtatttgggtaataagcaaaaactgactatcttaggtgaactagcttaaattagcaatatttatgttcattttggattaattattgggtgcataattttactcagtcgatctagaaatcctggaattttgacatgatactaataat

SEQ ID NO: 57490 - DNA, 1713 bp, Bovine  19866880874779
  misc_feature (1)..(1): n is a, c, g, or t
nttactcaataaatatgcattgctaaatgcatgagtaaatggaataggacagtggatttattattatttttttaaagattgttctattcttgaaaacattaggatctaataacctgggttaatttcatctgcaacaaagaattatgctattgggcactgggttttctatgtccttttgaactctcaacactgaatactgaccattgatattatatttgcttatcaactgagagttagttcattaacacattcttcccaagcttttcagtttttaaactcaaactatttaattttatagtctgatagtcattcagatttccctctggatttcttaattagcctgtgttccttaaataaaaatgtattttccaatcatcaatattttaaactcagagcttaaaagccctattgaaaacataaataaaaacagatatattttaacagtgaaaattattaaaaatgaagagtatattgtaactatagcatgatcaatgtaagcattactcagtcagagataatccctaaaaggattctagagtagtttcttgaaattttattttaaaacaaggtcatagctgttttagtacacagaccctatttggctaaaaaaccagcaaaggatttgagtatacatctgagttccttcattaaggaaatactgcagccatatatgacacatcaaacatattcaaatatccaactacagagactctagctgactttcagtcccttcagttcacaagctctctagaagaactgagcattgatgggtttttgcagaaaactgtctacattatcaaccccactccacaaaagtgacttggatattatttgacttttacagatttttaaagtcagaaaggatatgaggctacatgccaactctacaggggtcttttcattagtaataaataaagtttgattatgtttttcatagagatctttacagtcatgaaagtctgctatctgctccattaaaaataaagaaatcttttagggataatctcaactatattcacataaaggccttgcaaagatgtttcattctaatttgggagcacacaatgaatgtacttctttgcaactagcatttaatgccagtgcttttatggtttatgctataacgtttgtttctttttattcaacagaaaaggtcaatgtaactaataattagaactatgactctgagagaagaagactgtaattagactatttttcaacaaataatgaagtgtcagaaaaaaagaaagtgagttcttggtgtcagcaaaactagtttacacatagacaggaaaagtaattctttctcgcagatgcatatgtgggtgatcttccgataatctaccttgaacaataaatatacataaaaagtactatctagatattcaactggaggggtcccaccgacatctagcgggtaaaggccagggatgttgttaaccatcttacacacataggatcgtatcccacaacaaagaattacccgggccctaatatcacatcggttttaaggaactttgaataatgtcaaaaaactttcctattctgaaattaatgagtaagttttaaagtagtccatagtaattaaaccctataagggggtggtagtctactgacattctgagagagattttgtagccatcatagattaaaagaaagaaagtaagggatatgagactttttagaattctaagataatacttgatttcagga

SEQ ID NO: 57491 - DNA, 931 bp, Bovine  19866880879899
  misc_feature (1)..(1): n is a, c, g, or t
ngatgaaattgctgcagaataacagccttataagcagcctagcactactgtgctttcagtgtattattcacccattcagtttctctttactctttggaggcttcacagggtttcacagcatctcttctgaactgatgatattaatgatgccaataggcaggccccagagattgctgttttaagaaagctttactggagcaatcttaatataacttcctgagtctctttggatttttaaaattttctttggctctcttttccctttgctcttgagaagcccacaatttgctatttcttgttgctatttacagtttctcctctactgacactttggattaaggttgttattaagttaccattccattcctttggcacaaccctatctccatacattgtaggtagaaccttgccagcaacctgctgttcacaaatggggaactacagcagaagccaagcaattcctttgttgctgtcatttcagatactttgagcgctatcaatgtattgagtatacaaaacagaaggcgcctaccatctacatgcttacaatagtggccttcagagataggaaagctcttagggcaaacagagcagttaaaattagtgagggcagtgatataaacaaggtctaaaaataaagtaaaacttgttgtgctaagagcatttgcaaaatgaattcttcagctttgaagtcatcttctctatctctatttattctgttagcacgcctcacaaaagtttgaagttctttagacagagtctgatattttgtcattcagccatctttctcctggcccttgacaagccaggattcagcatgccacattctctgaagagaggtgtggccatctctgatcctacaggagagctcccgcagggctgcaagccaggcttcgagcaaggggtgccaatagacagagtggttcgcaat

SEQ ID NO: 57492 - DNA, 1580 bp, Bovine  19866880892068
  misc_feature (1)..(1): n is a, c, g, or t
nttgtttaattgctttaagaaaaagaaaatggtttttagtggctgatattctgttttgttgtaaagctgtgtttatttattaataaatgtccttctttatacctcagagagtatattgtaaaacttgctgtgaagtagatataaaaatataagaaaaaagaaaatgagaaaaaacccaaagaagattaacttttgtttaaaattttaattaattttatatttttatgtattttagaaatttgttttcagaactctccacaattgaataagccactttgttaattgctttggcatgaatactgaaatattgagacttaaatcaagtagttagtgggctactttaaaagtattaattctaagaatgagatatgaatttttaaagttcttatacagacaaccaaagtcctttgcctgtattataagttaatgattagaaatttccaaaaatataatgagccttaaatacatcttcctctattcattttgctttaattttctttcctcaaacctctattttttggcattttcttctatgtgtttaatttggtcgcttttgtaaatgcaattaagattttggcaaatttacagaagaagctgagaaactgctgtgaacacaaaggcagacataaaatagccattttggtaaatttgatagaagagagctaaatctaccaagcttttctttgaaaaaatggatagcagaatgtaagacatgccttcagctggctctaattgaagatgtatataaagcaaagatgctggaagccatcattatgactctttctacttaacagcaagcaaatacactggcagtaagtaagttggggtatatgtctgtgaaagggtataaatgagcactttctagaatttcatgtagaaagaaatagtaggaagaaagaagggccatttagcacaatttagagatatcttatataaaacaaaagtttgttagaaaatgtatttacagcaatagcccttggctagattctgaagttggtaaagttttgacctgtattcatctttctttcttgaggtgcaagcttctccacatcctatgtctactcccaaatctgtggtacttcttgtgagtctccatttgaagataaaactatacaagaatcactgcttttatccacagccagatgaaggggcaaaatcaggtagtcaggcagctctcaagagtccctgtacataaaggaccacgcaacattaatagggtgctaagacatggctggtaatgctgcagaaaggggattcccttccaggatctgagtgtgggctcttatgtaatacctggaaatgaattgtctgaggtgatacatgtgctgacaaaccaagagaatttattgggaagaggtgcctggacagagagctggagtgttagggaacccaggagggctgctttgccacatagctggcagtcaagggtttttatggtatgaccttagtttccaggttgtctctggcaaattattctgactcagggtccttcgcagtactgcacacattggtcagccaagatagattccagtgaggagaattctgggaggttggtagtacatgtggtgtttccttttgac

SEQ ID NO: 57493 - DNA, 1061 bp, Bovine  19866881148824
  misc_feature (1)..(1): n is a, c, g, or t
ntcgcatgtgtgtttgagtggcataaaatgaacaactggctccagaatataagtatcctccaggtcagtgttcccaagtggcatcaagggcagaaaaaccaacagtagtttgattctttggaagattttatgtaacattttagagcagccaatatctttaaaaaactctctattgagtaaatgaatatttttacatacaagtaggaatttgaacataagaatgacaacaaaaaccagaacccatgattctataataataatttttactttgtgtgtgataaagtagctgtagtgataataggaatggaatgccaagtcacttagttgcttgacaggcgtatatatttgaagtcaatgggcataggatacggatataagcgtggctaatattctgtaggaggaaccacaaaatagattttataatttctgtcactaagggctttatcttcatatctagacaaactctcagagaataggaagtcagggttaatccttacttgtcacatttactgctatacttggctacaatccaatttgatagactataaaaatgatgatttactcaatatattttaaacagagtagtaatcattgtaagctatgacatacaaaggccattttcttatggtgaacatgtctcaggtctacacaaagagggaaaagaagttcagaggtgtagctatgctgggtgaggggctcaataagtactgagggaggtactatgtgctgggaaagaagaacgaggtgggaatttggaaaagtgttgaaactttgggaagaggagactgagggcaaaccacacgtcttgtgacatttgattgaggtcatcaagatgatcacagccaaatgagggagacacacggtgttatggagtagagagactgccgagttttaactcatcaaatcaggttctagagactcatcctattctggcactaatttgctctttcaatttaagcaattgactttttaaagaatatttatttatttgactgagtcagctctttgttgtagcacatgggatctttcaccacagcctgtggattctcttattatggtgt

SEQ ID NO: 57494 - DNA, 1532 bp, Bovine  19866881173840
  misc_feature (1)..(1): n is a, c, g, or t
nctgatgggctgcagtcctggggtcgcacagagtcggacacgactgaagcgacttagcagtagcagatgaacttggttttggtttctgaaattaagtcattccagaaatggaaatgtcacttttcagtttaactttaaaagcttcctgttgttgactatatatatagtcatgtgactatatactatagtatactatatactatagacatgtgactatatacacatgtcaataatccattgtttaacagtgaaacccaggttcctgaaaaaacaagcaggtggagagaggacaattactcatcttaggagatgagatttttgaaagggacttttatagaaagttttaaaacacatttatttccattaaatattcccaccattataagcaacaaatacactgtgaaatagtcatggagatgcagaaaagtcctttttctagcttatttcacagcaatagcatttctcttcatacctcccttacatttttgttaacaattatttattattcttggttgtgctgggtcttcatcgctacgcacagcctttctctaattacagtgagtgggggcttctcctcttggctgcagtgcacaggttctcatcccatggccttctcttgttgtggagcacaggctctagagggcacaggctcaagttagatgtggcattgcctggcttagttgctctgttgcttgtggaatgttcccagactagggatcaaacccatgttccctgcattgaagtggattcttatccactgtaccaccagggaagtcccctcccttatatttttaaaacactttaaaactttttaaatcacttatcccattgtaaagtttaaaaactgtacatttcccttataaaagcccaactgaaccaacatacactaatattttataccacccatgtatttattgaattttgcttgtcatatgatatataaaccaacaaaataactgaacttaaaaattttctaaaactacatataaaaacaactgttctgagagctagatttttcatttgagttgtaaggggaaaataatttacaaacataaagcaagtgaaatttttcatatatcaagtcaatattactgatttttaactgggtgtttcttatataattagagtgccacctagcggggaagtacattagaccaggtgtgcttcagcaattctaacaagacagttccctaattttccatcttgctagtaaagctaacctagagaaggaaatggcaacccactccagtattcttgcctggagaatcccacggacagaagcctggcgggttagagactatggggtctcaaagagtcggacacaactgaagcgacatagcacagtaaagctaagatatgagatgatgattgtagttctgacgaagaaggttctgtacagaatggagggaaaatatagtcaccctgaaagccaatgttgtaattatagtttgttttctgagaactgcagactttcttagcataaagattctcagcacagatgactgtccattcctctgccacacacaccaaga

SEQ ID NO: 57495 - DNA, 660 bp, Bovine  19866881370063
  misc_feature (1)..(1): n is a, c, g, or t
natttaaataatgatgctaaattttaaaatgttaaaactatattagagctttaaaaaaatatccatctacaggactattccggtcggaaagtcaccaatttgcaatttctccagtttgggcccacctgattcaagaacatctccctcacattatacgtggtttcttaaatattaagcattctgatcctgaaaggaaaaaaattgtgaagactttaatccaaatggtctcataaaccatataccttcaacctaagcataagtatacactagtgatttgcttttcatttcactccaaatggaaggaatcactagaggattcttctactgcttactacaaaactgccaacatctgttcctattttcctatttcctctgtcttatctcctgttacaatggataaatgattcatgctcctctctaaggccgatgcatactttcaattgtgtcgtcaatcttttcatattcctttttactactaaaagccattgccttcgcaatgcaatgatgtttctctctgtgtctctgtctctagtgatcctcacacagcacaattccttagtattttccacattcaacagcctccactcccatcatagtgttctcacttcaacactctccatgaggattttatcccccaaattccctgaaaatatcaaaagc

SEQ ID NO: 57496 - DNA, 1410 bp, Bovine  19866881408926
  misc_feature (1)..(1): n is a, c, g, or t
ntgttatagagataacataagataacatgtctcttcctatgaagagtattttattctttactaaagttgcaatctttcagccatagattaaatcatgtaattttcagaatgttttcagaatattttacttttctaggaatactttttccgttaaagttgcaatgaagcagaaaggaaccacaaaacactgcaatttctgttacatcaattcactgatattaatatttagcttcactttgccaacagccacctttgaagcatgcttattgttctttgctgtatcttatttcaactcatttatttcaatgttagcatctgagcctttgcagcatatctagttatgtggaagaaaaatcactgaaatggtctactgcattactgaaatataaccaggcattattatctctgaagtactgccatgacagccatttgcatagtaactcgaagggtctaattcgcttcaacaatgtcctgtgatgggcaagggctgatgtatgagctctgtattgagaattacaatcaaatatatcattttaatgtacccaaatggatgcatgtataattccaaaatccataataactagtgtcatcataccatggtagctagaattttcatgcttatattcccacgaagcccacatagtttccctaatagtgcagttggttttaacattacaatgcctagactgaaatagactgaaattattctctgccatgattgctattaagtgacaccagagcattaaaatgaataaccatgagagagaaaggccaacttcctaatgtcttgtggaatacagtgctttttgttttaaaatacagagacaagaatcaacctcaattttcttcatataatccatgtaactgagtgactcattttctccagtttacacaaaaatcaactgttattccattttttccaatatttctctcaagtacatgttgaatattctttttaccatttaacagagtttacttttttttttaataatgcctatataaatattttccaggaagcttgtgttttctttaaaaagattttctttctacattatgcacaaattatattgggtttactccatgagcttttatctaattttcatgtaatgagtttatatatagtctacttgattgtatctgctactaaaacagaaaaatcctaaggtgaagaaagaataacctctatgtctcagcattgcagaattttttttttaatcttatgatgctaatgacagtgattgggatgataatgttaaaaaaatataacttatctgactcttagtttacagttttacagaattaaatgacaggcataaatgcaaacatgtttgagtgacttttgtacacttactgaagacaaaccatggagaaggcacacacagaaccttccctcctagagtttacagtata

SEQ ID NO: 57497 - DNA, 1030 bp, Bovine  19866880536099
  misc_feature (1)..(1): n is a, c, g, or t
ngatcacatgtgtgaagcattcacaccatagccgtggatagatcggctgccccgaccgtgcccagccagggggacaccaggcctgatatctgtgccacatcaagtgacactctctgccttccctgcatgagcctgtgggcccagccatgctgagggctgctctgtggcccctgaagcaaccccactgaggaggagggtgcaaggctggtgcgcagccaaggcaggcctggggccagctctgaccctgcagccggccgccctgccactgtgctctcttgctgtgtttgcaccaggacacgtggctgacccacctgtgttctcccctctcttaggtaaaaaggttagtcctcagtctactggaaagttccaagcagcaggatctgaccacattaattgcttttctaagtgactttcaacaagtaacactaaagagaaaaggagcattttctttccagaaaaatttctctggtacaaaacaagagactacttcaacctaaaattctccctggagggtcaggaatggggagtctcgaagccatgccgtctcacggtgcagctgggcctgtgttggggcgcctgacctgagggtgcccttgctgtcgcactgcctggctcccttctgagggctctgagcacaggttgggggcggcgcagacagggagccagcagccccgagcgcagtgagtgactgtctccttggttccagggttcctgaccatcaggatatagcttttggggccttgcagcaggggaccaactgcctggacacgttgggccacttcgcccgatggtgttgtcggcgtttacgagtgtcacaatgctgggggcaaccaggtacgtgcgtgggggcgccggggaagtgaggggcctgaagccgcacctcctttcaccgccctcctcctgagatggccaccactcacagctggcctcggggtcagaggggacgttctcctggagctgtggtcagccttgggcaggctctggtgcacagggcgggcgacctgggtctcccctccccccgtcctcctct

SEQ ID NO: 57498 - DNA, 754 bp, Bovine  19866880642206
  misc_feature (1)..(1): n is a, c, g, or t
ntgtgaaaaaagtcgatcccaatttaaggtaacataatttggctccattgtgttcttgcatttaggaggttgactaacaattacaaggataattataacaattttaggttcgtctgcacactgtcatttcattatcctccaacttattgtgcttgttcctaacatcctgctactacaaaagaggaaatcgaatagatgcatccttaatttcagctatattttatacttggctctaacacaattccattttcagattgcctgaatacattagaatgtgaatttcattgccacatcccactgcaatccattcaatcttagagtagtttagaaaaggaccgatcagttgggaccaaaatgatcaatatgttctccaccacccttgtgctctgtaaactccataccccatcttacccttcagcttttcttttccttgcaactgagcccatcagtgcctgagacttgggggctgctgtcactagcattttttcttttttactattattgactactatgtatctattaataaaaatgcatagtacaagccagtacaaagcctttaccccaatctaagtactcagtaaatgattataataaacccaggatggcacagatccatgccatgattttcttggcatgatttaaaaattcaaaagcagtaatttggggttttttccccctttgggagttttgactacagcaggtgggacccggaaatggcaaagatttgtcgatggttgggggctggcaatggaat

SEQ ID NO: 57499 - DNA, 1201 bp, Bovine  19866880885667
  misc_feature (1)..(1): n is a, c, g, or t
nctgcattggcaggcgggttctttaccactagtaccacctgggaagcccaatagtaaagacaaagatgtcttaacgtaaaggaacccaagggacgtttcaagtacactccaagtgaaaggcactcagctatgtctgactctttgcaaccccgtggcctgctcctctgttcacagaattctccaggccagaatactggagtgcggagctgctcccttctccaggggattttccgaacccaagtctcctgcaatgcaggtggattctctgagccaccagggaagttgtaagtacttttgtaaagggtccctttgtcattgcaatttccttttctgctgtttaataatgtttgagctgtgggttcccttaaatacaaacattgaaagataagaatggttgacttttgtcctcctcccatgagattagatttttcaaagaatcctaaatgatgaagcaattatgtaaatgttgttcaacagagccaattatcacactatgtatgacctagggacctacgggggaactgctcaggtcatctgcaaaggccagcctcacggcttctcctgatgtaacaagtccccaggagctgacagcctgtgggcacaggagggacagcctccatgtaagaggcagcaggcatcacccactccacggcctagagctaaagaggggcaggggtcaagcccagcctccagagccccacctggggcccccagtatgcccaccttgctgcacgggcgagtaggcattggtcaggaagcggaagtgccccttgttgtaccagcagatcagggacatgctccccttcatccggatgctgtgctggccccgggcaggtggtgtggctgggctgcttagcatggagggcggcaggccggtgcagtcactcttcctggagctgagcaggccacaacagtagatccctgcgggtaaagggaccgcacaagcctcagggcggctcccctgcttccccaggagagatgggaaattttggagttttcatcccagatgtgctgcctcccccacacttctgtatgtatctaagatcacacagaagatctaacacaagcagagcatcggcagtaagacagcagttctcacggccagagggcttgcgacctgccagtacagggctgaacctgtggacccattctcccatctgcttctagaacttctagctcacatgatgcacataactcaggc

SEQ ID NO: 57500 - DNA, 1008 bp, Bovine  19866880997499
  misc_feature (1)..(1): n is a, c, g, or t
ngaaatggcaatccctccagtattcttgcctggagaatccaatggacggaggagcctggtgggctacagtccacggagtcacaaagagttggacacaactgagcgacttcactttcactttcactatacctcaataaagtttaagaaatgatgactagcagatctggggtgttcaagccctgcacattattaagaaaagtctggcccttgacccgtttctaggagacagcttctaagccttggaatatgttgcctcataacagtatccttatttaacctgggccttaatgcatatcatataatttttgatgacagtgtgatctatggtgggagtcttaggccatgaaaaaccagtttgacttcaggtgtgactggagactgaatacctaagatcagccaggtatatctgattacttatctacaatcagtaaaatccctggagactaacacttggataaacttcgctggttggctacattccatgtgtgttggtatgcgtcactgtttgaatcattaagtactattcacatgattccagtgggagatgaccactgaaagcttgtgcctggtctctcctggactctacccatatgcctttttcttttgctgattttgatctgtatcatttcactgtaataaaccataaccaataggtgtaataacttttctgagttctttgaatctttctagtgagcaattgaatgtgagggggtcttgaaggccctgaacacactgtgttattagcatggtaacctttgttgttgttcagtggctaagtcttgtccaactctctgccaccccatgaactacagcataccggttttccctctccttcactatctcctcaaactcatgtccactgagtcagtgatgccatccaaccttctcatgatgccattctctattgcctccttctcctcctgccatcaatctttcccagaaacagcgtcttttccaataagtcagctcttcgcatcaggaggtcaaagtatggagcctcagcttcag

SEQ ID NO: 57501 - DNA, 1455 bp, Bovine  19866881409609
  misc_feature (1)..(1): n is a, c, g, or t
ncctcacacctcagactggaatttatactttataatgctttgaaattatataacatttctagatggttcaaaatactctcaaatatcctgtctcataggaacttcacctgtctcagacgcaagtcaaatagggttttaaatttccactgttcttaaataaaagcagagaaatggaggcacgttgctcggggattttttaaacaagtggcaacaccaacaatgggccggaacttctcgagctgggcccacggggaggcgcctaaagttcaggtagaagcagcaggcaaatgcagggggcctggccccacctgcactgggctccaggacttggcgcccatctcaagatcaaagcctcaagatgagctgactcggggggaagacctctgtaaatacagagcatcaccggctttaaaagaggctgagtcaaggaaaccagtcctccccactgagagcccggggtgccccccacctggccccagaccagcaggggaggatcggggaggaaagattagaaagaggccctgaaatagagcaactggctgctgtgtgtggacaacagggcagctattggaggggggtcacttagagctccctttcccatagtatcaaacaaattcaggtggatgaagagttaaatgtggaaaccaagcaaacaagccaaacatcagaacactgtgtaagtaaatattagttatatctgatttctaggtgagaaaggcatttctgagcttaaaagcaatggaagacaccacaaatgaagagaatgagaatttaactacacaaacttaagtctccttaacttaaaaagaaaaaaagagaaaaaacaaaaaaactctgctgaactattgctgctgctgctgctgctaagtcgcttcagtcatgtccgactctgtgcgaccccgtagatggcagcccaccaggcttctccgtccatgggattctccaggcaagaacaccggagtgggttgccatttccttctccagtgtgtgaaagtgaaaagtgaaagtgaagttgctcagtggtgtccgactcttcaagaccccatggactgcagcccaccaggctcctccatccatgggattttccaggcaagagtactggagtgggatgccattgcctaacctcccagaaatagacaaacaattgtcatttgtaatatttagtaaacagcaaatacaaagtcatgggaaaaacagttaatctaagtgggaagctgttccattcagcagaattaaggaactgaaaacggcaatgtcaactaccaccgacacaatgaacagagactttatttgcaaatattaatgtctattgtggcaaaggcacaaaagagtcttctggtccgagtatgaactgatacaaccttcctgaaaagaaggtgacaacatctatctcagaaatgttcaaactctctgaccctgtaattctgctcataggaatttattcttaaggaaaca

SEQ ID NO: 57502 - DNA, 1226 bp, Bovine  19866881431705
  misc_feature (1)..(1): n is a, c, g, or t
naatatttattgagcatgtaaaacataccagcaactcttttcagtgttagtaagataatggtgaataaaaaagacccaaaatgccgatcctcatgagaattataaataaatagataaaatatttagcatgctgcagggggatacatgcaatagtgaaaaattaagtcagggagagggaagggggatggggataaacaaagctccatcctcaccttgaagtccagtcaactcaaaggataataagcaaactggaggctgaggatgagatactttgttcttgtctctgagttcatcttcttagaggcaagatcaccttttttacccctcatccaaagtgacttaaaaaaaagaaaaaggacactatgagcagccacccttgtgcgtgcatgctaagttgcttcagtcgtgtccgactctttgagaccccatggactgtagcccaccaggctcctctgtccatgggattctccaggcaagaacactggagtggattgccatgcccttctccaacctccttctaaagggacaatctatgaagatcagtgcaagtggcaaagccatgagaggtaaatgcagtgaccctcgggcagtttggcagtggaggttgtctacagccaatctgagtcttcccaactttaaggaaaatgcaacaagctaattgggcagaaacccaaaggactgagagggtcctggtaagttggagagatattagaatttagcatttggaagactttgggaagaagggtgtttaaatcaaacccttctgagggaaagtgagtaagagattttgtgggttgtggccagttgtaaatttattttaatgccagagtttttaaaatgcggattttacaatctatgaatcagttttatttatgaacttaaacttaatctattttcttcctgttcccttgcataaaataggctgagcttgcctggtgtgactcaaactgtgaagcagaacaattgtgcaatatcagagttctccaacttgtaaaattcaaatttgtctaatttataaacaatattcatgaatggttttctaggataaaggcaccgttcttccgacacacttctgggcaattccatccctgtgcagatcctactgtgctcagccaggtggggagcacttcccagtctccgctgatgccccagagccagggacagagggagtacagcactgcccttcccgtgaggctctcagaactgacttccaccaccctgtgtgt

SEQ ID NO: 57503 - DNA, 1147 bp, Bovine  19866881596611
  misc_feature (1)..(1): n is a, c, g, or t
nttagtggaaagatagattctttggctaagagacagtgaagagcaggcaatcctagaggtttgaaaggtccctgaatgtaataccaacaatacttgtgcaattgatcttggaagaaaagggactggtacctaaagaataagtatagatgcccagaaagcagagctctgaaccaggagttctaaaggtggtgtggaaatgatgtaaacagtttggcagcaagcacaaagagaaaggacagtccagacacacaagaaaaacagcagtacagaaaaggtcacagttagctgggcttgttaattaaagaaaaaactaaagcaaactcaaaggattttgaagcttgttttgtttagtttaataacttaaacaatgtaaaatgattctccaactaagagagatcattcaagaggacacattatgtagagaggttggatggagaaaacacagaacaccacgtacccaggcatttgagagaacacaggcaaggggcctccacagtggaaggactcagtctaagtgtttgaaatattaatgtgcacatcaccttatatcttcttaaaatgcagatttcataagtctgagaggcaccctgagatcctgattttctaacaagctcccagatgatgctatcttctgagtagcaagagtgaaagtcactcaatttggccttgaaacaaatcacttaaaaaaaaaaatagcatgatgaattgactgggaagggccagagtctaggaatcatgaatgtacagttcacacggggctggttctcactcagtgctgagggaagactggcctgtgtgtgcccaaaccctagagaatctagtcttgtgagcagagaaggcacctaagaaagctgagaaaccagcaagaatcttcacacagactgtagtgtcagggaagaagaggcctggggagctgcagaagaacaggccagcccagcagcagtactgtcagtgagtgtggccaggtcagttaccaagaattactttggaagcgtctcttctccctctgatgactggtagacaggtaggtctggaaagtgcactaggactttggcagtttttcataacatgcttgtggactgtgtaaagaaatatggattacatgctatttacaattaagaggagtagccactagtttaataaccat

SEQ ID NO: 57504 - DNA, 2988 bp, Bovine  19866880256822
  misc_feature (1)..(1): n is a, c, g, or t
ntatcttttttggatgttagttctaaacggtcttgtaggtctccatagaaccgtccaacttcaggttcttcaacgttactggttgaggcatagacttggattaccgtgatattgagtggtttgccttggaaacgaacagagatcattctgtcgtttttgagatttcatccaagtactgcattctggactcttttgttgaccatgatggctactccactttttctaagggtttcctgcccgcaataatagatataatggtcattggagttaaattcacccattccagtccattttagttcgctgattcttagagtgcaatgttcactcttgccatctcctgtttgaccacttccaatttgccttgattcatggacctgacattccaggtttctgtgcaatattgctctttacagcatcggaccttgcttctatcaccagtcacatccacaactgggtattgtttttgctttggctccatcccttcattctttctggagttatttctccagtagcatattgggcacctactgacctgggaagttcctctttcagtgtcctatcattttgccttttcatactgttcatggggttctcaaggcaagaatactgaagtggtttgccattcccttctccagactctgtagtttacagttgtctatttcacatggatgcaaacttattttgtttcttccttttgaaagagatagaaatacatacattttctgtacctcacactgaaggctgtgttactctgctccagaaaaataccatatttgcagagcaaatgcaatggatgttgctattttgtaaagtttagttttctactgttctaggcaattatccatcccttatttttaacagatgttaaactggtgtcataaatgagaataagacagagactactacttctgccttctttaaatctttgtaaatgacattcattatacacagaacaagaaaccaatggggaaggatctgccaattagcaaagatgtgcaatccaataatatatttagaggtctcagaaaagagcacctgatgggtctgtggacatccatgtgccagatgaaggccagaattctgtttattatctggctccctcccatgtcttttctattaggaggactgttgaatcattctgggcctcaggatatcagttttagttttgactctgagtgaacagtccttgaaagttctggatatttctctttatccaatgcatagtcccttgagtaaagggtcttaagaatctttggaaaaggagtatgggaattatgacttcatgctatcatgacactgcttggtgccacctcttagagatctgtcctgtccttcagcagatagtcttcaaacaaaagtctgagactcaacccagttctccaaactgttcaagagatggtgagtggaaagtgggagtgatgtagagggaggaacagatcaaggagggaaacctgaactagtctgctattcatctgttcttgatttattctcattgtgtaaattgagcaacaccctgcccatctatcttgatgtgggaactccatattctatttatttactctatcttcttttttaaaagtaatacccagttttgccacgcctgtgttcctgcttattgcaatgattgcacctgcctttcttctggtcattaagtgccacttcttggtatttattatttagagattctgtcattcacatttttatcaggaatcctaggtctttaatgtcatttccaaccttccctacagaagacagctaccactgagcttctcagtgatactgatgtacctccccatagcacattctttagtatttggtaaatggagcatctgatgggctcgcccctagattatagttagctggtggggtttctgaccttacatatttattttttctcaggcatgcccaattcactgagtctttgatctcttcatccttcatctcccatgggagttctggaatttctacccacttagcataggtcataaattttctcaaatttctaagaaccatcctggcagctgctaataccatttcctaggatatgtgccagggttttaaattctgtatcacaggaaagtgctcttgtatcaattaactattgtatctcaatgtgtattctgtcacctgttgacaaggaccctcaggatccatgctgtgcatactctcccagctcctgcagatccttcaccaacttcactgatagcccctccatctcttagcaccccatagcatctctggcctggtggtgctgatatgtgaccattaacatttgtctggttgtcagggggactgatgtcagcaaattcacagggaaggcaggattatttatcagaaacctgcctcttgtcaggtctctacctggtctacaagttggactgtgcagagtagatcttataaaaagagagatagagccactttttacaagcccagggagaatctaggaaatctgatttctgaattgcatctatccaggtattacagttgtagctctcaggattcttctctctctctctctcttttttttttaatgtggactgtttttaaaatctttgttgaatttgctacaatactgcttctgtcttacgctttggttttttggccctgaggcatgtgggatcttagctcttgtaccaggaataaaactcacatcccctgtattggaaggcaaagtgtcaaccactgaaccaccaaagaaattccacaattgtgaatgttcttctgatcatggattaggagatcaaacttctctgaagtccggtgctttcatgactaagtgccaggcctggtcctttcctgtccttgctctctggctatagagggttagatatccttaaattttgcataagaagccctctggctttccctttttgcctggaattagtgattaatcaagtatactatttgctttcacttgagcaattttaaaaaacaaattgtatggaagatctgtttcatgctaggccctgagtatacacaatgaacaag

SEQ ID NO: 57505 - DNA, 1836 bp, Bovine  19866880351857
  misc_feature (1)..(1): n is a, c, g, or t
ntgtttatgacttttttccctgcatggaaaagtaagattaatttatttttctttctttactttaaaaccacattcacccctccacgataataaatggatacttagcctaaattcagaaaggatgtatgtcttactgattattgatccttttgatactgtgcttctttctacttcattaaatacaataacttacctgttatatttaccctttgaaccctggtttgctttcccatttaattttttttttttttccctttgctgtttgatatttctttgttcagaccagacctggtcttgatccagctgcactgtgcttgtgttcaagttcaaatacatgcactgaatcatgatggtactctctattaacttataagcattagagaaagtcagtttaaacagggatagaaatcccaaaggtcaactgccacttatactgaaacaacagctccaggtaaacactgaagtcgtttctttagttaagaataatgagtggccaggagccctctgagtgcaggctgcagagtctttatgcagcttgttttcagtcttcttttgccatcctgaaaatcacgcgaggacttaaaaatctatcatagagtataaatgctatcatacacacaaataattcaaagttttaatgaaatcctaaattggaagataggtttgcttcttcatttttattttattttttatgttatatgtctgttagtctacatagcttcctcttgtagaactagcatcacacacacacacatacacacacacacacacaaatacacacacacaccctcatatatacacaaaccttaagcaaaggaggtggctgcaaatagattttctcaaaaataacaaatcaacctgtaattcttcatgttcaagtttattcgcttcaggttaaaatgactgacctgaagatgaattatctttttctttttagtttttatttatttatttatttttttttttttgagatctgcctaccctgtcagggttctacatttggcatcattacacccagttaatgtaagacagcttatttttgcagtgtggtgttttatagattttttttattgcaccattaagagcattttgatttctgcaatatttccaggttttcttgtcacaacattccacagtctcactttgtgctaagcctcatagcattcacttacatccagttttctacctcagaaggccaggtaatgagatgagcttccagaaaagaaattgcaggcttagtttcttacattagagtccaagcagattgttttctcttcaaacattagccaaagctcaattcacagacatttcctctggtaagcaatcactgcagtttagtgtccagcagtgagttcataaatgtatttgactttcaatttttaaactgagaaataaaatgtctattttaatacactgtggattttaatggaaattttgtggaatttttcaacttctcaataaagtaaaaatattgtccatttatgacacagtaggcctattttaagcctagtgaaaaccattacgagtttagattattgatactgactacatctggcaatattatagaattatttcaatgacagaaagcaacctccagatttgaagtttacatagtttattactgtattatctgtgactttttactcaaagtacatacatatctcaaaaatactagttgagatttgtacctcattttgttattgcctggagaatcccatggatggaggagcctggtgggctgcagtccatagggtcgctaggagtgggacacgactgagcgacttcactttcacttttcactttcatgcatggagaaggaagggcaacccactccag

SEQ ID NO: 57506 - DNA, 1035 bp, Bovine  19866880381463
  misc_feature (1)..(1): n is a, c, g, or t
ntgaagctgcagagcctcctgagtggtccagcaggcgtcctgctctcctgctgtgaccctctgatgctccagataccgggctgtgggtatgaggtgggttgctccaccatgttcttctgtgtctttagctgtgatcagttttgattcaatcaaactcaagctcattctgtgattccacaggtatttgcttcgcatctgccctgtgccaaaccatgaggatgctggggttgaaggaactggacaacgttctctcaactggatgatggggacagaagtgctgtgggtggaaaagaggacctctcttgaactaactcagccacatctgggcctgtttgcatcgttcacacacacttccttttcccatttaagtgcttaaatgatttaaagtggtttaaatagaatccttgaaagtccctctcctccccgtttcttcctaaacagctcctacacagccttcagggcctcgttcaagggttgcccactgaagtacttacacctgccgcttcctcccatccaacaggtagagcatctcctcagtcagcccacaatacgtcacacaagtgtttggtggagcacaatagtcattgttttcatttgcctctgagccctttgggtggagcaaggacatggcttcctcatcatcactgaatcccaagcccggagtatttactggccccagtaatgtttgttccatgaatatttcttcttattgaggtctgacaggagaaagggctgagaaaaggaactgatacccatcaagcctgcagcaccttcagttataggcccaacgcctggccaggttagcataaatctccacactaaagacctctttacttccgttcctgaagcctataccacatgccaggctttcaacaaaaaattacaaggtctgccagaaagcaagaaaacactgaagcaagaaaagtctgaagagacaaagcaaacatcacaaccagactcagacatgacacagatgttaggattatcaggcaggggaatttaaaataactataattaatatgctaagaactctgt

SEQ ID NO: 57507 - DNA, 779 bp, Bovine  19866880449188
  misc_feature (1)..(1): n is a, c, g, or t
ntcagttaaataatcaagggaggaggcaacttgagatgagttattgtacatacagactggctagccatgttaattacttaccaactcccttcttcaggctgaccaaaggcattactcaatgcatgatctttatttattacctcccggttttttatgcttcatgaagcagtgtatagtaatttattttaaaaattaatagtgtagcgattcactttgggaaagcatttataaataatttttagttacaacattaaaaaatatagcctcagtaaagtggcattcctgtctctgaaagattattgacatttttatgtaaggcagaaacctttaatgagatctcaatcaaaaaaatgcttcattaatgacataagaattaatcgatgctgatcaaataaatctaccatagtccattctggatttcactttatgagtagctgcccaggtcaaaacactaacaaattcataagtgactactaatagcatttcacttgactatgcatttgtatctggctaattgtacaggacaatatttgaaagtacttcagattataatttattgtagtatagaattccttggagaagaaacacagcaggcaaaacaatataaattaagtcttaatctaaaataaaccatgcagaaatacttgaaggtatatgttgtattttatgggaactttggagaaaaaatagacaatttctaaaaaataacagcatttgggattatgttgaaaatttttgcaaagaatttgaaagtaagtaagctccaatatgatagcatt

SEQ ID NO: 57508 - DNA, 1560 bp, Bovine  19866880502372
  misc_feature (1)..(1): n is a, c, g, or t
nattacatgaatatttttgcaaaatacatctacttttcattattgaaaggccaattaattcttttctattactatcctcagtgtcatagaatagcttgcaatcaataatgatgaatcattataaaatattataccttgctatatttttaatctgtttctcttaaagaatttttagatactctattttgtaaaacttacaaaaaataaagaaaaaaaagttacacctatctagctccttcaccagagaaggcaatggcaacccactccagtactcttgcctggaaaatcccatggatggaggagccacataggcttcagtccatggggtcgagaagagtcagacagaaccgagcaacttcactttcacttttcattttcatgcactggagaaggaaatggcaacccactccagtgttcttgcctggagaatcccaaggacgggggagactggtgggttgccatctatggggtcgcacagggtcggacatgactgaagcaacttagcagcagcagcagctccttcacgcattatttcccttgcctatattctgttgaggactaacacagcttcacaacttaaaaaaaaattattctaataaaacttgtttctactctctgaatattaatgttttacttttgtttttcctcacacatcagcagtccttttccaattctgcagcaagagccacagctgtgcattttgaaaatgctattcaccttaaaacttctctcacactggaattaaaaatgagacaatcctccttttcccaatgctatagagggatggttttaccaacacattagttatttgtataaaaatgataaggataggaatcagactacttgagttatattgaaaatactgatattttcaatcaaattgaagaattatatagtctaacacatgaataagtaaatctgtgactatttagattgcattttttgtcactgatttatatcctgagggacccagatgactccctgaaatatcatgatctgtttttgtttctagtcaagatactaaaatttatataaaatattcaggctgacttgtatatgaactaattgacagatgtagggattattatttggggattaatcattgtgctggtacattcaagtacacgttagacaattctaagaaagatttccttgtcttttctctctagcattatctattttttattaaaaaattatgccaagcccatattctatgctctactgtttgaaattatgctcaaataagcagataataagtggagatgaattatggttgaagatattttataagataaaactttttccaatctgcattaccatcaacaaatcaataaagtaacattttttgctatagtaatatacttagcaacacgttgcatcacttcccagaatttaaataaaaagtcatcaagttcgatgcaggatacaggatgcttggggctggtgtactgggatgacccagagggatggtacggggagggaggtgggaggtggggttcagatggggagcacgtgtacacccgtggcggattcatgttgatgtaggcaaaaccaatacaa

SEQ ID NO: 57509 - DNA, 1294 bp, Bovine  19866880523968
  misc_feature (1)..(1): n is a, c, g, or t
nactgtggacacagttgttatgatgctattaatagagattaataactcatggggaatatgtttagatgagtagttagcttagtaaataataaaaaaggctaaaatatttttactgttccacatgtaaaactgtctcagtctgcctactggttatttcttttgaattaccattgtctctacatccattatagcaactggatcatcaggtcttgccttttatgaacagtgtatggctctaatttaaaggtcattagaccaagtcacttaagtgacctgccaagggcatgtacccaatgattagccaaatgagagagaattccttgttgggcagaatgatctttcctgtgctgcttcatggagacaacttgataacactcttttcaagacatggtagaaatgtagcaaaagagtataatttccagaacagtcattcttgtttccagcggagtctaacttttaaaccactcagaatatttctcttttttttttccttcaatctcaatctaacatcacaaatgaaacctagagctcccctgaaacaaatgaagatgaagtttagaatcatgcataaagaaaattttaactgaagttggagaaagttgccaagatcagagttacagagtgaacgaaacagaaaaatcctaacccacttgtcttaaaaatggtttttctatttgtattcatggcagggccaccaaatcagagatactgctaaaaataacttatcaaggggatttgaagtagcgatagttttctaaaatagaaaaaaaaaaaaaagtaggaatagttaaaaaaataattaactttttaccatggaaatgtttaaaccagaaactggagagaatggttatatacgttaaagccacttcaataattaatagaatcttgccaatttttatttcagctgtaaggattatagtatgtgtctctaactgctaaaggcattattatacagttactatttatcacatttaacaaaattagcaataatcccttaatgttttcacaatcctaatagaaaaaaatgacacattaaattgggctaattgggtataatttaatggatgaactattttgaaatatgtagatagggtctagggatttcacgagtaacaagtggcctggctccaatttgggaagagagtgttgcttttacaattctcttgtctggaattcagcagggagtgagaatagttgcctacactcagagaaaggaactataaccagttcactgggaatgctgttttccaagaacattggatttgtttttttcaagtttaaatttaaactacta

SEQ ID NO: 57510 - DNA, 1082 bp, Bovine  19866880543082
  misc_feature (1)..(1): n is a, c, g, or t
ncgcacagagctggacacgactgaagtgacttagcagcagcttagcagcatggaatctagaaagatggtgctgatgaacctatctacagggcaacaatggagaggaggacatagagaacagacttttggacacagtaggtgtgggagaagatgggatgacttgagagagtagcattgaaatgtatatattaccgtgtgtaaaatagatagccagtgggaattttctgtatgacacaggaaacccaaagctcgtgctctgtgacagcctagatgggtgggatggggagggagatagaagggaggttaagagggagggggaatatgtatagctatatgactgactcttgttgatatatggcagaaaccatcacaatattgtaatcattcttcaattaaaaataattttttttaaaaaaaagatctcactctttatacctgttgatttctaccctgaaagcattttcttgacattctcttaaaataggttgtcatttgctcctggttgtggtaaaatgttcatggtcaggcaggactcacagtatcggtggatacttttcatttgagcttggcaaaagcaagcctatattgtggctatagattattgacttttggtatcatgtaggactactacttcttttaaaatagtcaactcctagcaataatgtttaaaggtttctaatgacttaacaatataaagattcatgctttagcaaatgccagcgttaacgcagcacctgaaatggaaaaatgttagaaacaaaaatacatataaatcaacaaatattcctcgaatctggtcacttcatttttctgcagaaaaactatctcttttttcttccaaattcttatagaaatttattttctatttttcttcctttcaactttttagattctgttttcttctcagtacatcactcttttctcaactccatcccataaacacatgtacatatacacacatacacacaagcttattcacacattttctttttcttcctaaattgagacagcttttttcaataaacacagatctggctctaaattaagtgctattagaaatgttgtaaactcgaaatatttcc

SEQ ID NO: 57511 - DNA, 3170 bp, Bovine  19866880814219
  misc_feature (1)..(1): n is a, c, g, or t
natagatcttatgttttggtgttatcacaaaaaaggagggaaggaaacttttggaactgggatgtttatggcatagattatgatgatggttccatgagtgtattcttatttccaaactcatcaaattgtatacattaaatatattcagcttctatatgtcaattataccttaataatatagttttgttttaaaaaattgagagattaataaaaggtttgacattcatgattgttgtttagttgctacattgtgtccagctcttttgtgaccctatggattgtagcctgctaggctcctctgtccttggaattctacaggcaagaatactggagtgggttgcctttcccttctccaggggatcctgacccagggatcaaacccacatctcctgcattggcaggtggattgtttaccactgagccaccaggaaagtccaataaaaagttagcaacaatttaaaagtttagaacatttgatagtatgagtcaaacaagtgtatgaagcagattcatccctctggccaacaatttgtgacttttgctctctgaagagatgatatgagatgttccaaagaaagaggaactttaaggggaaaggagagattctgctagaccagccagggaaaggattgtggggatgggtcctgagaacagtgtagcaccacaggcagtgccctggaagagtcctgagaaggtgagaagatgtcctcagatggaagggctgagaaaaagccccgagacaagtctcagaaatcttcctcagttccacatgttcatggcatcaaaacgcaagcttgtgaccctgaataatcatggtaatatgacactaaacatgacagcctatttcaaattgtcctggatattatacaactttcagagaggaaaggttctttaaaatatctgagatggagtgtacagagaagatggataatgggaaaatgttaagcacaattacattgattaacagaaagtaaaggctataatatttttgttgaataccaaatgtgggttcacacacacacacatacacacacaatatgcattattcaaattattattttttccaaataaaagcatatcccctgatttcaaagagttgcatgaaaataactaccagagataaagaacagaaacaattaatttatttattttctccttgaattgatccacttgagcatgtgttcctcttccatacccatgacccttctttcaatatcctttctaagtgtggaaaataattgctgcccttttgttatgacaggggtcttaactatttcatagtgtttcagagacacggtctccttttagccatttcactaagaactgaaaccttttagttctcatgagtaaaaagctagtgaagatttttatgagataatttagatcatattaactcttcagccaatcataaaccctatattttctcagcagttttatatttcccagtttaaaatgtgtgtggcgagttggtaccatgtaatggattgaagtatggtcagtgacttaaccagagacttcaggctaaccgtttctttgctcatatttatctggatagactaacacacttagacacatttagaagattcaatttacctaccgaggctacttgtagatctgtgtagaagagctgaacatttaggtcatgtcagaactgaacatgaatgcttatattaagcctcagtatacaagttcccagggcttaccaggtggcacagtggtaaggaatcctcctgccaatgcaggagatgaaaaagactcaggtttgatccctgggtcagagagattccctggagtaggaaagggcaacccacttcagtattctgacctggaaaatcccatagaccgagaacctggcaggctatagtccatggggttgcgaaagagtgcaggactgagcagacaccaaacaagtttccgtgtgtccaaatgtcatctactgtagcatagcatgttgaaatttgtgaacaaaagaacggtcctgtcctcattttgcagtgtgtggtttaatataacgtatatcagtgatttacataaaagttaattagctgaaaaaacactactggacaatatttttaagtgcagttgcaccaactcattttcctcctagtcagtaatatgcttatctgtgagtaccatctccgattttctattttctcaagtagatggctctgggaagctcggttaacatgacaaaaggatagctatcttgaaattccttgggaaaggagaggacaggaatgatgctgaagtgccttttatgggtgccattcaactagcagctccagcctagctaaatattacaggttgtcagttggcatccagtttttctttgccccacacctactgacatagatagatgaagactggacatccttccagaggtcaccacgatatgtctcatggagacagaaatgaagctttgtgaagaacttgcatctcgtttatcccatctaaataaagctcttcacatttcctacagcttcatgacattttccagggcccaggggtctgtgactgtatagggtgtgctctgtaaaatctgaggagaggccattcacttgacaaggatgtgactggtgaccccaaagtgatgtggtatgcaacctggacagctacacgcactgacctgcagctttagcgacctctaggatctgaagctttgctttttgttactgtatcctggctgactcactccagcgtaaatgctttaatgctgaatattctggtttatacatatgacatttctccaaacatggatgaatcattgctgcccttggagtttattcattatcagaataaaaacacatgagaacaagattggatcaaaatatatatccatctctgagtgctattatagattttgtagtttattatttgttccttattccaatttatcactggctgatccagttatgagtattagggaaagtcctgaaaatgttgtgtgtgtgtcctttcctggagtgcagagaaactgtagagtattgaaagaataaagcttgaaacttattttttggggctactgttctttttgataccccaagcagagattattcgcacatctgttgatttttttttcacgttgcacacatttgcaccttttttttaatgttgactgaatcacttaattgtagaggaacattcattttaatgtaaatcttacagtatta

SEQ ID NO: 57512 - DNA, 1849 bp, Bovine  19866880856025
  misc_feature (1)..(1): n is a, c, g, or t
nataaaggctgtcttcctttctggagatttcctataaaaacatcatgaattcacagacaaataaggctgccaaagccactttcaattggcatcctatttgcaagctcattaaagcctgcaatgagataggacctagtcaccactgatctgtcagttgatatgtccaaagtaaagatgacacgtgaatgctttctcatccaataaaactcaaagcagcttaaggcttgtctcagcattagcaaagtgcttttagaaccacaagactccaaatgtaaccttaggctgtagagaaaatgatgatggaaaagaaatacagttgtatgggttttcttttgtttgcttcagtcgctgataaaagtcattgaattaaaaaaattgggcagatgtcaagcacagatcaataaaccacatggcattttaaatcaagttaagggggctgattgaaacagacatttcttatcgtaattgtttggctttatttttcatttgtttaagtgagtattcattcaaaaatatacccatttctgcatattatttttacatgataaaatttattatattagacagattatattgtatagatgtaaataggaacaaattgtggtagaatatatataaaaattcactcttgattattcttaaaattagcatttaatgatttcctattgtttataaattctctactttggggtcttcaatcaacacattcaaaaagcaatagcttaatctctcaacaatgactgaaaataaataaatgaaaatgaaattttaattcaatgagatcatattgataatttatagaatgccaagcactcctgcactcaaagaattgataattttcagattatcagataattgcatttataaatagcatacttttaattgttattacaaatgcttatttatcatattaaaatatacttgtagcatatttgcatacagataaataagatttgccattaaaactttttgaagtactgttcctcacctgtgagtgatttattaaattagtaattttgagtgttagagatgtcaaaagggaaaaataattgaaattatttttctgctgatcaacggaagttgaaattattcatgaggttgaaacactgaaagcatacttactgaatctggagctgacaggtactttaaatgctcgctttttcctgaggacattgatcatctgcagatacaagacaatgaaagggtaatcagatagggtgtcgttttctgtgatgccgcgaagaaaaatcactactgacagggcatcctttttctacagagtcagggggcagattctggagaggacgtattgagatgtaatattgttaaggagacagcccttcccagttcttcacttctgtgccataattgataaaagagaaaataacaaagcagtgccttgtaattttcaaacctcaattgaatagagaagcttctggaaccattgaaagggaggtatgtttgttcttttaaatattaactataattaatgagcagaaaagcagaaagtagaaaaactgaaaaaaaaattgagttctgaagctagttgaaattttaccctcctaaaattaaggtttttgtgtatgtgaatgtttttcttctctttttatacatcacttttggaaattccatcaattgatgggcacttaacatatggggactgcagttatgagtaagacatcatttctaccctgaaggaacttgtgaagtcataaaattagcacaataattacttaaataaaaaaggtggaatgtggtaaccttgacagaggtacaaatataactggaactgattcatgcatacacagttcccatagattatatgccaacactgtgcaaagaataaaaa

SEQ ID NO: 57513 - DNA, 827 bp, Bovine  19866880861417
  misc_feature (1)..(1): n is a, c, g, or t
ngtaaatgaagtggacaaagcaagaaaatgagattttaaaacaaaacagatttggtttaaatctgtttacatttaaacagcctcaaatctgttgagtctaatttaactgatttaaggaccagaccaaaaactctatgttgttaaccagtctgtgatcataactaaatgtatgcatgtgtgctaagctgcttcagtcatgttctttgcagctgtatgaactgtagcctgctgggctcctctgtccatgggattctccaggcaagggttgccatgccctcctctaggcgacccagggattgaacccatgccccttaggtcttctacactggcaggtgggttttttaccaccattgccacctgggaagaccagctaaatgtataaggttaagatacttcctttgtattttcagtaaaggcgtagggaaacatgtaagacaaggctaatgactataagaattctgattgctaactattccactaacttgatatttatggttatgagaattaagtagtcacatttttcctatactggagaagtaagaggctcttagtgactgactaggcttgaaggctattaaatcatagccatgcaaatatctatttgataggacatgtgggtggtaatatatatgatgcactaaaagtctcctagtctttctcagatttcttccagactcacagagtaattctaaaggaatcacagacccacttccaatttcagaagtacaaatatgaataaggttttaaatttcatgttggctttcactttttacacagcgtgtgatactaacttgtttctgggatatgttctgcaaaaactggaggac

SEQ ID NO: 57514 - DNA, 821 bp, Bovine  19866880864551
  misc_feature (1)..(1): n is a, c, g, or t
ntgattatatcttataaaaagaactacatttcattgaaaccctcaaatctatgctttttttttttaaataggaagttatactctctcatagcaaaagaataatgatgataataccagttcataaggaagaaacatggctgtaatgactacagtggagtcactttatattcatatggaagacagcaaactttcctcatatttgcaaacaacaggtagagatacattttttgaaatgacatataaaaatgcttgtatctaatgtgcatccttaaggcacacttgttaagccctcaggagacaatgaaacatgctacagaaacttcagacagaatcataaaacattctaacttagtatgtaaaaacaaaagagatgggtagtctaaaaatgcaatttttaacctgaattacttgtataagattaaagttgctcatatgtaaggtgaaagctgctctcaaagattgaatattttagtatgttttaattctctggaagaaagaaaaagaatatgtggttatataacactacttttatataagaggactttcttccttaacagagaaaacaattatttctttcctaatgttctttctcctgctttttgattccctggtagctcagttggtaaagaatccacctgcaaggccagagaccccagttcaaatcctgggtgaggaacagctacccactccagtattctggcctggagaattccatggacagaggagcctggcaggctatagtccatggggactcagagtcagacacgactaagcaatctgcactagaaagaattaggagtgttagaaggaaaagtataaaa

SEQ ID NO: 57515 - DNA, 1270 bp, Bovine  19866880874211
  misc_feature (1)..(1): n is a, c, g, or t
nacacagaaacctctcttctgctctctttatcctcatcagcaaaacgttagggttttgttctaaataagaaacatagtattgttagatttttggcaaatcagagtttgcccttatccccaccccctcctcagcagcacacatacaaaaggatactggtgaagatcaagttcttgggagctattttctttttttcttttcccttataaatcccaactagaagcttttgtgttaagggcatttaagctgagaataccttttttgtagtgctctctttcagagcacgcaggccatgtgctctgccactattttgggatggtgatgctttccctttaaaaatgcttatcctgccctcaaaggcaccattgtctgcctgggattctcagtttggttgcttttagcccctgataaattagtaatggaagagaataggaggcattgtggctcctgggccctgttattaaattgtggtttggtgctacaatgtatacaccacagcctctgtaatgataggtaactctctgactcattgggccaggctcaatagaatcacagagctacacggattttcaaattcttcgctctgcgtcatttcatgttttcaaggaagactgaggccttggaaattcagacttgtacagcaacataaaacggcaagcagcatagcttggtccatgacatattctgtttttcatactgttttcctttgaatggaagttctgatatctattaaagtattgagaaaatgaatttaaatttagctacagacttcttctggaaaaggtctgagagtcttataaaccatttttaaaagttcaaggcagctctttaaattttttagtcagtcatcaattcctaaatcattgtttactcataagagagcctgtattcccataggactctattcttttcaaaatgtgttcctatagttttttcccttcaagcttgacccgtattatatcaggtggaatactgtattttctataaagtttttaagggagatattattttctgtgatttatggtggctcaaatggcaaagaatctgcctgcaatgctgggggcccaggttcaatccctgggtcaggaagatcctctggagtaggaaatggcaacccacttcagtattcttgcctggagaattccatggacagaggagccttgtaagctacattccatggggtcacaaagagtcatacatggctgagcaatatcagaataataataataatgggtttatccaattttaatctaaatcctaacagctacatat

SEQ ID NO: 57516 - DNA, 809 bp, Bovine  19866881247032
  misc_feature (1)..(1): n is a, c, g, or t
natcaattttttatcatgagtggtgccaaatttttatagtgaaatacattcttttactaggctgtaaatgttcttatgggaagaactatatgttgttcagctttgcttattccctaggacctaggataatgtctcatttaatgaaagagtgttagaatgaaattaaaattgtgaacatatggatgattttctaaatatacaactcctctatgtagttactatgttccactgattactactggttaaaatgttctacctgctattttgtgcctaaatttgctggttctgcttttgggttaccaacatttctaggcagttaattaccaaaaagtaatctgattctcattttaaagttccatttctttgcaaggcaaattaaaatctttaaacccaggagataaatgataaatgttaactgtataaaaatgccaatgaaaaccctactaattaacttgaaaactgattatattttggatactatttaaatcacaaggtgtttatagttctagctaatgaaatactttttggaacatctttctaaattatgatgtaaataataaacaaaactttgatcttcttttcaaatcaggcaggtacatcacccactacaaaagtaacttgttttaaaacattttagtttagaactgacaaatgaaaatatatgagggtcatattcttacctcaaaataacttttaaaataggacattaatttgactttcttagaagttatactcaagtagaactgtataagtatcaatttattagttgaatactattacttatacgccacagagtgcttataatgcaa

SEQ ID NO: 57517 - DNA, 2190 bp, Bovine  19866881264699
  misc_feature (1)..(1): n is a, c, g, or t
ntggctcagtggtaaagaatctgcctgccagtgcaggagatgcaagagatgcaggtttgatccctgggtctggaagatcccttggagcaggatatagcgacccactccagtattcttgtctggagaatcccatggacaagagcctggcacactgtagactatggggtcaccaagagtcggacacaacagagcaagcacacaccattattacctttacctcagggagttattttcaatccctctgaccaagaatggttattactgagcagtacagacctctgatgaggaaagactttttttcccgatcaccctctctcacacttgctaaaaagacagacaaaagaacaaaaggaacaaatgagaatatttacactgctaagtttgcaactcagagtggtaaaaaaaaatgagtcctgggactcaacaggacatcaaaaaggaaattctgggactccgtttatgggaaagaagaaaagacgttggcatgaattctttacaaaatagcaaatacaagtatcctcccttggctaagagataaagtacaaggaaaagaaagacagagatactcatacactgttcttcactcagtctctccgtatagtccagattgttgttagctcaccagactagggtggtgtgttgtctggaaggatcatttcccagtacttcctgtctgtgttccctttcgtctttctttgcctgctcatagcttaaggcaagcctttttaatacataggcttgtgttgtcttgagttcccttcatgttttaccctctgtcttccaactctagccaagacacctcaagaaatcattcttccttttttaaaccattaaagcaaaatatcaagcatggataataagcttgagttgtttctgtatgtcaaagacaaaaggctatttttaaatggtcggcggattcttcctgttggtttggatgtagtctgtatctcacaattgttggagcttagaagcagatatcttagggcttgtgaagaatttttgcttcacagggagcctgaaatttgtcctctaattgggcatgctcatcattctgggaggtgcactttgcagagcatgttttagtcatacagatacctcttcatggctctgagagacaccttgaactagtaactagacaattcacagtaaatattaacttaacgtgtcttaggtgcttcgtaagaggtgcttctttcctattttggatgtccttaaaagattagttaattccagtaggaatctgagctcaccctgtgcttagagcatgcatatgccagggagagtgagacttaatcacagattttgagacccagtcgttctactttaaagattcgcttgcctttgtctccatggtctggatcaccctttatggtaggttgtaaatattctactatagcagatacatggtcacacttttaatcatacaaacacaaaggcaactttgggatcctgagggaaagagctcattttttcccctcctaaatttccctgaactttgaatggaagggattttgaacagctgtttttctactgaagacacatggcttctgaaacttccaagtacttaaggactaaggataaagagggcccataggtaggacttctggggaggtgagacttacacattctagaagcataagagctcagttgtgtctgactctttgcaaccccataaactgtagcccaccaggttgctctgaccattggattctccaggcaagaatactggaatgagtagccattgcctcctccagaggatcttcctgactgagcgatcaaacctgggtttcttgcgttggcagatggcttctttaccactgagccattttagaagcctgcgttctagaagaggggatatttaatactcactgtaatctgttactttccttcatttaattccctcctgttaaatctttattaagttgtatcatagatgggaggggagttaaaggagaggcagaagaatgcagaaggaatacaacaatctgaaccagtagttcatagctcactggagtgggccagcagaagaatctgggcagtggtcaccaggagataagtccttggcgggtttgtgtggtgtgaaagcattcctgagaactcttaaaaatattaataggaaaattcaataaaacctaatcaacttctccccaactcagaggaaggggcttccaaattgaacatgtaagccag

SEQ ID NO: 57518 - DNA, 717 bp, Bovine  19866881336341
  misc_feature (1)..(1): n is a, c, g, or t
nctttgtatacttgtaaatatgttatgctgctgctgctgcaaagtcacttcagtcgtgtctgactctgtgtgaccccatggactgcagaccaccgggctcccccatccctgggattctccaggcaagaacactggagtgggttgccatttccttctccaatgcatgaaagtgaaaaggaaaagtgaagttgctcagtcatgtccgacttagggaccccatggactgcagcctaccaggctcctctgtccatggggttttccaggcaagagtactggagtgggttgccattaccttgttcaaccaataaaagatttgcatgcttttcttaagggaaaacaagattcactttttccaaaaccgattagttgtttgttgttcaggaattcccaaagattctatatccttgaacatgtttatttcttaaatcatgcttaaatgatcatttaatcatttcttaagtcagttttaaattttaaaagaaaccaagaagaagaagaatttcttatatgtttttacattgtttttccttggattctttgagtacctcttcattttgaattctaaatcaataatcttgcatatgcttaaagaatcttgtacttatacacatatatacacaatatatgaatactaaaatgcatatgttctttttcattccatttttgctttatttatttattgccattgaagattaattcctccccaagaagcagctg

SEQ ID NO: 57519 - DNA, 1360 bp, Bovine  19866881359722
  misc_feature (1)..(1): n is a, c, g, or t
ngttatggccgtaaggaatcgaaaaatgcaaaattacacaaacagaaagttaacaccgcgtaaaatagaacttagaaaaccgtggtcaatattttcacatttaacacttggctattgcttatcaacaaaaaataatttcctaattaggaaaaccttactaatatgccttctgagtttgagttttaaaagatcagatttcatcaagcattttaaaaatatgattaacatctaagatttctgtttatatttatacacatagattgtttgagaaatgacatggattaacttgtggagtcattatgtttgttttctgagttcacaattgactctcgaatttatcccatccagccattacttacaacctccattttggtttaaataacattagcccatgcaagtaccactgaaaaatctaattccgttcccagcctttccagttaaagaaaccaatatgttacattcagattgattttcttaaaaattggttttactcattcactggatagattcatggataagaatatagaacttggaaacagactacccaggcttgagtcccagtcctgcctcttcctagttatgatctgggcaacttacttaacttctcagtttactagctctaaaagtatgtatcaaatacatggatgataaaagtacttaccttagaaagttgttatagacacgaaaactcaacctctgtgcaccagtgccgaatcaaatattggagacagagttttgggtgaagtctagcattattgctttgccaggcaaagggggacagaggggcttgtgccttaaaaactgtgtcccaacctgtgatgggggtggatttgatgccggagttttaccggcagtggttcaagggcagggttgctgataagaatcagtgtgtgcatggcctgcatccctttaatctggcctccggtggtctccggatgatctgtgattttcaatgttatcacactgtgaccttctctatggagtgaagaatgcttttccactggatggggtggtaattctatagaagagctcaaagatatcgttatgagtatcccttgaggcggaacagagactttgccccaagactgcactattgtttcctggctgttcctcccttgtctctgcatctcctccctttcccggttagcaactgtttgaacctgctctttggatctcagggaaggtcatggaggctgaaacttatttcctacaaacaagaaacttgggacacaacagagaaaggctttggtacccggagtcccacatggtcctacttggcttcattaagaagaataaatgtgttattatttgcaaaagatttaaagcgatgctggacacctctcaagtgcactgtgtttag

SEQ ID NO: 57520 - DNA, 1111 bp, Bovine  19866881409965
  misc_feature (1)..(1): n is a, c, g, or t
nagtcttttgttgggaaaatgaagctgagttataagaactgtgaaggttctaagagttacctatttgtatgtgaacaaatgaacttgccacagttctgtgggtgctggcagaggacgtgagtgtctgggtcagaaaccaagattgctgtctcaccgcaaagaagcagtaagagtctcagagctgatctagctctccaggcctgcaaagtctcttggggtgatgcagaggcccaagtaacaacatcaaagccgagaactctctggcttggggtaactaaagtgaaatgaaaagtgttagtcactcagtcatgtttgactcggcaaccccatggactgtagcccaccagattcctctgaccatgggattctccaggcaagaatactggagtgagtagccatttcattctcccaagggatcttcttcagccatgcatcaaacccaggtctcccgtgttgcaggcagattcttttcggtctgagccaccggggaagctattatcatatgcagtaaacaagcttgcttaacctttgtctataaaagagagattattttcattatatcagactgtaagtaaacctgccctctgctctggagggagatatgtctctacaatgcaaggctgtacgttgttgaaagaggacagttcttctgcttacaaaatgtgcagatgatcaagagacccatggagaactatctcccaggaagcatttccattaatgcttcatattatgatgcaaatttgacatttctggttctaatgtaagaattatttactatgaatttaattgagtgcttcaaatctggtggtttatgtcttgactaggaataggaaaaagtggtcaggaagcattactattaatattgtattatttagagaaacaagatgatcaggacatgtttatattatttcactcccacagaatttgtattagtgactcagtgcataataggtgctcaaaaaattattaggtctgtgtgttccaagaaatatggcaacttgactgacctgaagaattgagacctgcagtggtttctatagaatcccaataaatgatgtctaaaattaatctgagttggatacaatttggtgaatgatgtacaaggagtata

SEQ ID NO: 57521 - DNA, 1079 bp, Bovine  19866881497241
  misc_feature (1)..(1): n is a, c, g, or t
natacattattacacagatatgacagcccccatttatttcacattaaaattactgaaccatgaaggataatagttttaaatgtttttataccataaatttagtttctcttttcacatgtatatgacatagtaataaagctgattttttaaaaaatcagtaaataaagctgatttttaaaaacataccgttctccttgcttcccaccacttttggggttcacaaaaactaaaagtggatgagtaccaggaactggagtgatctagaagaaaagttgaatatgtggacaaattatttacattagatataaagagaactccttgttatttctactttactgctaagtcacttcagtcgtgtccaactctgtgcgaccccatagacaacagcccaccaggctcccctgtccctggtattctccaggcaaggatactggagtgggttgccatttccttctccaatgcatgaaggtgaaaagtgaaagtgaagtcgctcagtcctgtccgactcagagcgaccgcatggactgcagcctaccgggctttatgacattccaattagcaaattcaagaatatggttcatttgtcctgtaatgaggagataaacagcacagatagataatagatactagatctatttaataacctagttaaatcctgtgctttgtctccatatgtatcaacaggaatacccactccactagaacaggggcagagggtaaggcaggtataatatgaaaagagaataacctctcagtagctatgagatgaaaacaatagatccaattgtgggacactaaataaaccacctagaataaagcagaatatagtggggaagaaagttaggaaagaaagagctcaaattagagccatcttagaaatgatccctactccagagctttgtagcacatttggaatccatcttcccaacgacttgtgaacgagactctaaatagatcgtttggggccactttcagcctgagtccccatctgcacagcaaattcctcaatgctttcttttcctactcgagaagcagaatgccagttaatccaggctactgctaaacaggaattcattaaa

SEQ ID NO: 57522 - DNA, 1020 bp, Bovine  19866881709949
  misc_feature (1)..(1): n is a, c, g, or t
ntccaggacaatcacataatttgacaatagcacttaaacctttgaaaattatgtgagcattttttacataacagatggtacatgtcctcacaccttttctatcactcataatacaagacaggtctactcaatttttaaaaataccttttgttattaataattgcctaagccgcttcttcctttcctttttcagaatgaagaacaaattttggtattttgagtttggcacatctgaaactttctcagccacctgcaagaagctacatgaatctgtagaaatagaagtaagaaaatgaattctctttataattctatgaaatggcttgagtgtattaatttgttgtgatagcccatggaagaagttagaattttagcaatccacatagctttacccagtattctaaaatgtcatttctgtcacttattgaaaatttagcactatctgaaatactaatgaaaagctaagtgtgagtatgcattgtttaatacagcataaaataattgagaggtggaaataactgtagatatcactggatattgtatggacagaaagctgtaagataaaagaaagtacttgaagggaaagaaaaaagttgcagaatacatggaaaaaacatattatttttaggtctcaatatcatataacttttaaaaatacagttcactaaaattgtacttactttcatgaataaaggttaaaaaatatacttttccattccccatacccattcattagctaggttttctcagttcctgaggttgccattccccattacatttgtagaaagtgaaaaagtcaagaaagagagtgaagatagcaagaaaagatagactttaaaaaggtttggagcaaatatgtctatcaaaattaaatacattgtaggactaaaaatttggagacaggctataatagaaaatgacttagatttatttagaggattttaggggttaaagaaaaaggaaaagttaaattttgataagtagtaaagacaaatgaacagaatcatgaaacaaggatgc

SEQ ID NO: 57523 - DNA, 966 bp, Bovine  19866881832071
  misc_feature (1)..(1): n is a, c, g, or t
ntgcctccgtaagatgatacttagagattgtccctgcagatctttaggttaaaaaataacaacaattaaaaggatgttgaagaccaacagtaatatacatcaaagaactagcatgattacattcttatcatgtttttgtagggtatgaatgtatatatcctgaggaaagtaaaaacagaaagtatgtgtatacagagatagaagtgcatgcaaaagcaatggaaggcatatgtaaaagggcacagtcaactctacatgaaattaagatcctgccccatggaacacaaacaaaatttgtttcgtgaagtggcactcactttgaaggcagcacaatttcttggcctgcaaaatgtgtattataattaggtggcagagcaccacgagggatattaagttgtcacagtgtcacatggcaacagatcaaggaaggagaggaaagagaaagaaccactagaatagcaggaagccaaaggatatgaataggagcctccattaatgaccaacaaagccaccaggcagatcatcaagggagctgataaaaactagccagagtagacaaggcactgatattcaaatcacacactcatcaagtgacaagtcatgggttctggagaaaataaacataattaagcagtgtttttggatctcggtgaactcatagtctatctggaaagacaaacataaacacattcaccttcacatgaagcagcttggtgaacaagtgcacttttggaagcacagaggtgagaaagtgattctggctggaaagatcagggtgagctacaaagaggaagtgtacaatccaagtctgaccttgaataacatgttcaccaggagacagagaacaggacagagggctttccaggcagcgaaaacattgtggtcagcagtcaagagataacccaggcagagagtatggattgtacggtatgtcaggaatgaaaaccaaaatctgagcaaaagggg

SEQ ID NO: 57524 - DNA, 972 bp, Bovine  19866881969745
  misc_feature (1)..(1): n is a, c, g, or t
ncttttaatgactaacatgcaaaatgtatccagacaaggaattttttttaatattaaaaaaagccctacacacttggtaagagctataatgctgcaagtgacattgataaatgagactatattcgtgaagatgtaattaatctgcaacagggtgagaacagctccttaggtaaatgaaactaaatcagctgtgtagtctgtaattaacttacagccatattagtccaagtgtaatgttattcattatatatgtaaggtattattttctccatatgaaagttgtaatttgctaagtaatgattaacagttcatcttaatacttcagtcatattatcataatataattgtcatccattttcattttattccatttacccctctgtttgaaaggcaggattagatgtcagttcttcacattgcatgtacagaaatgaataaattgaagataaagcctgatttattgtgattacctctcactgacacttcatgcagcaggtctattttgaattctttgagaatgtggagatgtatacaataaatattaaagcagaggtgtggcattcagtctgcactgagtacatgtaaagaagaaaagattcaaagaaagtaagtaaatactgactttgaaaaccaggtatttattccatacattccatactgaatactgaatcttcacaagttcaggcattcagtgattgttatggttatgagttaccaggagagagcttactttgttcaaagtatggtgcttttctagacacattcaagaacattttagtgaattaggaaaacaaatgagactcaacacagatctaaaacatgatttggttctagagaactgcttggaattcacatggtcaaaacccaactcatgctagtttaagctaaaatgggaataattgactcacataactgatcaagtagtgtttcaggctagaagcgggtttagaggctcaacacaatcatcaatac

SEQ ID NO: 57525 - DNA, 813 bp, Bovine  19866880500082
  misc_feature (1)..(1): n is a, c, g, or t
naaaaaaatcatctattcaacttctgaaataccaataaagcatcccctactctcaaagaccctttgcaaaatgctcttctttaccgattaatatgttaaacataattagcttcctcagacggaacagaagctgaagatgtcatgggcatcataagtcatatgttttcgcgatttacatccaaatccttgagttccgaatgaacaacccttgaggcaggcctgtttacacgaatgaaatttgcacggtagctccagccacgctctggaagggctgggtcacactggcgcttttcaacactgctgggatttaatttctgtagtatcgtcgtagagagagagcactaatcgctttttaattattctcagcttccgagaataaacgggagggagaccagttcccagacaaaggaagaaaacattgggagctgagcagagataattatgtagcagtgccctagcgacaggacttcagaagggtcctctgccgcccatccacccagacggtagaactcagccacggtcctttccccagccttcagacctcatcctcgaaggccggcgatcctgggaagtcatggagaatttaggaagctttcgtcacattttcagcaaagctgcttgggatggggatgacagagtcgtagtagcagccatttgtcatgtctctgtagaagtcagagatagtgtagctctgacacaatggcttcgaaaaaaaaaatccacaaataaacattgctgggaataaaatgctataaaccttgtgtgataatttagagcattttttggctagtttgcttttcttcattgaaaaat

SEQ ID NO: 57526 - DNA, 713 bp, Bovine  19866880729767
  misc_feature (1)..(1): n is a, c, g, or t
naaaagaaaaaattttttaaaagtcatgtatcacccccacagctgagcagaaatgattttgaaattaaccatgccacagagggctggggcttccccagtggttcatctggtaaagaatctgccatttacaagagacacaggagaggagggtttgttccctaagttgggaagatccccctggagaaggaaatggcaagccactgcagtattcctgcctggagaatgccatggacagaggagcctggcaggctatctaccgtccataggggtcagagagagttggacatgactcagcagctaaacagcagcagcagcagagggatagagctttggcacctgtctgaattggtacaaatcgttgaatccgtgtttaaagctcacccactgtgtgtatgctctgagatgatctttcgacatccacggatgctctctgatacacacacacccaggagggcgcccatgcagaatggtgtccctctcgggaagaagaaccccgtctccatcactacgatgtcctcaatctccctgcacacagtgtgagtgttttttttcagggacagctcacgtttagccttttgaaggtgaaataaggactgaatttaagattggtcattatcttggaaagactgggggaggataaatttgagcctgtctttgaatttcaactacgccagcaggctctgaataaacagccagattctcattaaacgcca

SEQ ID NO: 57527 - DNA, 1806 bp, Bovine  19866880733479
  misc_feature (1)..(1): n is a, c, g, or t
ngagatggttggatgcctcctgactcatggacatgactttgagtaagctctgggagatggtgatggacagggaggcctggcgtgctgcagtccatggggttgcaaagagttggacacaactgagcgactgaactgaactaaacatgcctgaggcaggagttgttccctcccccgtggagtccggggctaagtgtctctcggggagacagttgaacatgaggaggaatggcactcgggggaagacccactggcaggacagggatgggctgatcgagatgctggctgaagtcttttcctcaggtgcctatctgagtcacagtactgtgttcatttccacataaaatatagctgtggtcggatagtgcttcttgcagcgttaattagccaactgtcctcttagaatgcaaacatcgagaagcagcatcgttggtacatgctgctggcatgtctgaaaatgttagtgaggaggaaggagtaggtgaatgaagtaactgccgccgtctttggtaatttagctgatgtgtgtgttagtcgatcagtcgtgtctgactctttgtgaccccacggactgtagcccaccaggctcctctgcccgtgggattttccaggcatggatactggagcggctggccattcctttctccaggggaatcttcctgacccaggggatcggacccaggtctcctgcactgcagcaggattctgtaccatctgagccaccaggaaagctgataatttatctgataaacattcattgacattggacttaaaatgtcacatgttgtttaaggacattttggaaaagatcatttttaatacctacgaattgctatcgtgtaggacttttacagtaatttgaggcatttctttctgtgaaactgagaatttctactttatttagtaaaatgtcttagttttataccacaaaatgctgggtggtcacaattaacgtggaattaagaatttttgcttaaggagcctgatgcctatctttgcctgaagtcttccagaaatctttttagtttataaggaaacataatacctccaccgttcttaactcacatagttattaacatgtgtatgaaaacagcccaagtgttttcttaagctctgttggataacagtataattgttctacctgggatacaggattatatcagcacatgttacaaacagatcattttctagaaacacacaaaaagagcagagatgaatttcagcgcccttacagggcccttacactcatcaccagagaccaaaattgctgtacctcaaactctcggagtcaagtgataaatgtctgctcacgtgctcaaagagttatttgttctagatttaatctcacagctatttcagtggggaagattgaacttcaaggtaaaatgtcactagatgtattttcagatctttctcaaagcttgattactctgtttatggagaataaagttttaatgattgccttgtgttcactgaaaagtcctggcgttttgttttttttttttttcctgtgattagtatcctgggaggagggaggaacatctctgtattgaagctggaagtttagcactggacgggtggagagctgaggttggggctgacacttgctcctttggacatcagtttgtgatgaatcagtcatgtactatgatggcaaaccttctaggaatctgcagtaccctgcgtgtggtaggcttgactcaggagagccatgaatgtgaaaaaacaaaaaaacaggcatagacagtaagtactgcagaaacattaccggcgtaatttaaaccagcgaatcggagctttcctgaccat

SEQ ID NO: 57528 - DNA, 2158 bp, Bovine  19866880972006
  misc_feature (1)..(1): n is a, c, g, or t
ntagaaggtttctactatttcttcttgacaaggctggctatagaatttttgagattcagtgcaaaatgaaaatgcagggcctcttgttcaaaatggaaaaataccgctaacggtactgatatatactgcttcttcctttcttccatgatctgtctctccctttatcatggtgtttttgttatttaatgcttttctaaataaagaaaaattaaaattttaaatcattatcatgtactgtttatctttactttgtatattaccagttgaacatgtaaaaataagtgcatttaattagtatgcagaatcaccaacattacaaaaatagtacatgcatatgtattttattcttatcagaacagtggaaattctgcacaaaactaaagcagctggtttcattttcacttttttatatgtacacattctaataacattctggtttcagctcagtggtgaataaggaaggactcaaagggaaggaactctggatttgcacaatcttttcttgtcctctgacatctccatatgtgattggctcatagggaattaacatgtgtaataaaaaatactataagaattcctgggtcactagagacaaccatcaccttctttctgcatttgaagcaatcgctggttcacatgagggatccttgggatggttggcatcgccactcagtcaaagccatcaccgctggccatcctcccatggagtctcacacacctcccaccgatcgtgaatccgctgagattctgtgctctgggggccctgagtgctctatgtcagcagcaggcatgcctgtcatagcgtgtgtcccctgctcatgcccatgctgtattatcccatcggacctcacaaaacacaagttccaagatacaattatgaagacttttgcaacagtgacagcatcaccttaatccactaagtccttctaagtgagggctctgtgcgactgttcaggacacgtgtcccgagaaacagctgtgcttcaggtttcaatgagaatccgactcagactggccagtgtcatgtcatctccagagccactggcagcaattaggagccaatgatgccttgacttcagatcaattctcagtccttagctctgtgtccaccttctccacatcttgctccaggcagcataggacacagcctccctcggtctcatagctggcctgctgctcagtccttgcagctctttcagagacaccaaacagtcctttctaaattgtttctggctcaagtggctctgatgaggctgagactgagtctgtcaagaatcaactagaggattttggtccttaggcactcagttcctccaaagagagatccagccccatgcctgccccagcagccaagcagagcaagagccccctgggcactttgtcactcctgtcccagctggctctcatcctaccagaacattgtgttgctctggtaaactcacccttgctcaggcaggcacaaggattcagcactcacacccgcctctgctttgtggtccccttgccctgtagtgggcttctcaggtggcccttcagttcagtcactgaactgaattcactgagttcagtcactcagttgtttctgactctttgtgaccccaatggactgtagcacgcctggccttcctgtccatcaccaactttcagagtgtactgaaacttatgtccattgagttggtgatgccacccaatcatctcatcctttgtcatccccttctcctcccaccttcaatctttcccagcatcagggtcttttcaaatgagtcagttctttgcatcaggtggccaaagttattcaagtagtcatgtacaaatgtgaaacttggaccataaagaaagctgagcactaaagaattgatgctttcgaattatagtgctggagaagactcttgagagtccttggactgcaaggagatcaaaccagtcaatcctacatgaaatcaatactgaatattcattggaaggactgatgctgaagttgaagctctaatactttggccacctcatgcaaagaactgactcactggaaaagaccctgatgctggaaaagattgaattgaaggcaggaggagaaggaggtgataaaggatgaaacggcttcaatgactcaatggacatgagtttgagcaaactctggagatagtaaggacaaggaagc

SEQ ID NO: 57529 - DNA, 770 bp, Bovine  19866881257785
  misc_feature (1)..(1): n is a, c, g, or t
ntaacttaataacgtcatgaattacattaatacatctcctaatattgaatcattttggtattcctaaaatagctgttatttcattatggggtattacttcttaaatatactgccggatcaaatgttcacttcaagagtttccattaatatttatataattcagatgacacattatgcatataaatttcttactctctggtcgctgtcagattttaataccagagttaatctacctttataatatttaatacaattaatcctttttatatggccttggtcagttttagtaccacagggattcattgttcctttaaagttcaatagcatagtaatttcacttgcctcgtattatggggaaaattacctatgaaataacctttatcggtcattttgtaaatgagcagagagagagtggaggaagcctttgacaacctttgtcaactgggaccatgactattggtctgtttaaactttcctaaatttcagcaagaagatgtacctcgtaacttacaaacattctattgctttccctatatatcccaactttatattctcacttaccatcgacatttctctctccatgtctcccacctctttctttacctcacttggactaggtgtacacaggatttttttctacaggttctgcactgtgtaccaggccccaggaaagtagactctacaagtaatgaccaggtttgtttctagatgataaaccagctcaaggacagcacacttaaatctgtaagcttctaatccttgtcttaccg

SEQ ID NO: 57530 - DNA, 854 bp, Bovine  19866881410123
  misc_feature (1)..(1): n is a, c, g, or t
ncaagagacaggggttcaatcccccggtggggaagatcccctggaagaaggaaagggcaacccactccagtgttcttgcctggagagtcccacgaacagaggaggctggcgggtcacagagtcggacgtgactgacatgcacacacagcagggcaaagcagctatacttgagtacatttttaaaaactttattgctgcttctttggatattaaaaataagggcaaagtttttttaaccaaatgaaaaaaggagggccctcgtcaatcattctcaaccacaaaatctcagttccaggttaccagggcccctgcactggactcttttccttttgttaaacagacacagacctatgagaccaaagtcataggaacagagttggagccaccagaataatgtcaacaatcatggatgttcctaaaggaaacggatgactacaggaaccacggatcccgcgtcggctctaggatgcttacctgccctttgtattccactggcttcagtcctgcatagatgggcaggaagctgctggccagcaggacctagtggacaaaataaagacacagctcgtgaaatgagacagcaacacgtcctaccatctatttcacacgtcacctactaggaagttacaattgtttaaacacaaagtgaagcgaaagtgaagtcgctcagccgtgtccgactctttgagaccccatggactgtagcttaccaggttcctccgtccatagcattttccaggcaagctgccatttccttctccaaaatctactataaaaatgaaacatggtccatgtatttcatgggacacagtgaaactgaaagcattagtagctcagtcatgcccaactctttg

SEQ ID NO: 57531 - DNA, 1760 bp, Bovine  19866880869132
  misc_feature (1)..(1): n is a, c, g, or t
nctgatgccacctgttacatagttagccccacgctggctaccttgaaagatccaaagaaaagtgtgttccttattagctgctgagaagttcaaattccttctcttcctcctccttcttctcttcctttccttctctttttcttttccaccattatcacaatggaatattatcagaaccagggttctgttaattgaaatttctgattaattgaggtggatcagataacccttgtaatttccacctttatcaaacatccttctgtaacatgtgagcccactctgttgtctagtaagtagcatcatgaaacattacagagggcccctgacttataatgattcaacttaccatttatcgactttactatggtgtgaaagaaaaacacattcagtagatgttgtgcttcaaattttgaattttactcttttccagggctagtgatatgctgtacgatcgcagctacaggtcccagtcggccacgtgattgtgagggtaaacaattggtacaaccattttgtaccctttccaccattctttcatttttagcatggaattcaataaattacatgtgataatccacactttattataaaggaggatttgcgttagaggattttacctagctgtaggctgatgtaaatgttctgggcattttaagataggcaaggctatgaagtttgctaagttaggtgtattacatgtattttccacttataatatcttcaacttacaatgggtttatcagggcataaccccatcgtaagttgaggaagatctgtaatttgatctttctttgatgatttgggaatagacagtgccacaggatggttattacaaacattaacaagaagtagaattctgtaagaaaaatgaagaaggttgaaggaattggactgaatttgtattgaccccaggatgtaacttcttcataaatcctcattttcacatttttcttccaaaagcaattctggcttgcaacgacactttgttgggttctggttatttattaataatttaaccagtgagtaaagagggctttctgagtagagttgtgtttattttccttaggccccatggtgattccctgcaagtcaattctgttttctgccaggctctgtgtccagggacagccccttttggtgctattagctgttttctcccctaatttatcaccttgtcccatcctgccttattattcagtatacatcattgcaataaagcaaaaattaaaacatcaggatagtcttcctgtttaaatacctaattatgtgacaattacttttcttgtgggctgttttgccatttttacaagcttatggaaagaagagtttatttgcatttcaaaattgaattttactgatggaaaatctgcaccaagaagacagaatcagagattattttctgttagtgacagcactgggcagacaacacattttagttgaacaaacaccttttttaggagtagcttagaagaataccagtttcttccttccaaaggatacttgcacacattctggcctttagttaaatcgtacaagaaagaggttcatcaaaaggaaagtttatgctttctttaagaaaataattttaccacaaaattttattattaacatatttgctaaattatataaattctgtgctgactcaaacatttctccgaatacttttaaggttttaaaaatcattattaaagtcctgtgtcttatatcccaaactctaatacatatttcaactggaatatccaatttcacaaaattcacaa

SEQ ID NO: 57532 - DNA, 1092 bp, Bovine  19866881076516
  misc_feature (1)..(1): n is a, c, g, or t
ncctgttagatccactgctgctgctgctgctgctgctgctaagtcacttcagtcgtgtccgactctgtgcgaccccatagacggcagcccatcaggctcccccgtccctgggattcgccaggcaagaatacaggagtgggttgccatttccttctccagtgcatggaagtgaaaagtgaaagtgaagtcgctcagtcgtgtccgactcttggcgactagaatgtcttaaatgctcaccgagcaattgcttgagcaatattatctctctagtggaacagaaaaggccaaacataaaaatcggactctcctcagccatttttcagcactgatgtaagccttttaagtcagatctgtcgagtttcatgttcctacctctgaagctgttggggatgacctagagaaaggcaagttgaaaagcagctatcaaaagtggggtcgggggcttgctgcgcatgcgcagacagggccgacgtgattagttggtgcgcctgtggcaaagagcagcgtggaggggagcggtccttggagatgcctgacctgttcagttctactctgttttgaggagtttccagcggcacgacagagcaagccagggacttctacacctgagaaggactacagaacagtgctgtacctgaggtaggaccccaagtcaaatggagggcagcctcactgaacaaccagcggtgggtgtcacctgtaccggaggcagtcaccgagtaggagcaactacctgtggtagatttccaggcagaactgagacaggtcttcttagctgagacaccaacaggtcattaaagcagtatcagaatacccaggtagctgataccaacaggaaacagatcaaaacaaggaagcttcttctactattggaagcttctgccccaacttgcagtgtttggtggagaacctgcatcataccttaatccgtaggcttccttgggtcttaaggatcccaaaactgtcctgtggacatcgaagttggtggaacagcaattgtgactatgggaaagaggtgcaagatgcacaggtgagatgtgtccggcaggatggttggatcttcactggcccttttaagggtttggaaagtag

SEQ ID NO: 57533 - DNA, 1085 bp, Bovine  19866881111569
  misc_feature (1)..(1): n is a, c, g, or t
ntaccactgagaaaattattaatactcactcacctcttatccctggtggagggggtctcattcctggagggggcatgcctattggtgtcccacgagtaggaggaagcccaattggtgggcccatgggtggtctcataccaggtggaggagccataattcctagaaagaaaaatggcaggaaaaaaaaaaagcacataaatcagctaagatggtagcataaagcacaagataatagttaaagaaataagccaggtactaagtaaagagttgaacacatttctccttgaccattgctacggcagatcatcccaattcaagagtccatagttttcattaaaaatcaatggccaaaagtgaaaacatattccaagctcctagttagggagttaggctgggccttaatttagtatcttcttaaagagtgcttttggtcatcataattttacttcccagatccacatctgtatctaagaaccaaattcttttagaattctttttagaaccaaattctccattgattccttacctggaggtggggttgctcgaccaacaggtgtaggtgcagtcccccgtcctggtggatactgagttggagctccagcaatgctggcagtagccgcaactgcagcagctgctacagtgcctcttccctgtggggtcattacctgagaaagaacgcacagacaggctgtaaatataaacacttcctcacatcattcaaatacagaaaagaaaaggctgatcatacactatttattaaacacaaagtaattatagcaattacgcacttctcccatttttctcatttaaggcgcactatcaccactatcacactctcctttaaaatgaacatgtccgcttttaacttcatcagccctttgcattctcaactctggtttatccatccatattcctcttcgctcatcagtgctgagttactgctatcatggtggcttcataatgtatatttgtacccctcttccctctacagcatatactgctttacacagtacaggatgttcactcagttttttcagtctcctcagtatcagattccaggtactttctctcaataacacttcctg

SEQ ID NO: 57534 - DNA, 1334 bp, Bovine  19866881172003
  misc_feature (1)..(1): n is a, c, g, or t
ntgcactgagttgttttatagatgctaaaacatcccaccaagtggaagaagttaactacttgatgaccacgaacatgtagcccccagacttactaaatcctgaggactgataatgttaacccttgtggcaccaccctgctactacatcatcagccagtaagagggttctgcacaagctgatcacacaccttgtgactcctctccctcacttgcttgtaggtggggagggatgtggaaggggggtacatgatggaggggacaaatgtatgcctgtggtcaattcatattgatatatgccaaaaaccatcacaatattgtaattatcctccaattgaaataaataaattaaaaaaaattattccctaaaacccactggggaattaggtattatagtctttggactgagacagtatccctgacttcatggcactgtgcatctactaacagaaataaatatacaaataaggggttttgagaaggtatatttaaagtaaaaacatgttttccattgttcctactattcagatgcttgctcaatgtttgttaatgattgaggttctagagttcatttaaatatctggctaagccaatttcctttttaatccataactattttttagttattaatcagctctttagaattatattctatagttctagagaatatatacataaataaacaatacataataaacacaagcataaatactacttaatagaatttgtgacagaggtttgtcaggaaaaacctttacttattcttagggcattaatgtcacagtcctaagtaacacataatcttcaacatagcttgccaggaaatatatggactgctctttttggtgaggcatattttaagttttgggaagaaataatgatgatgccatatatgatattgatatttcatatttctccatttaatatctctaaataatactctttttctagtacaatacaatatttaaaattgaactattttgtgtttcaaaaggaacaacatttatcgtataaaaacttcatggtcttgaagagatctaaaaagctcatgtacaactttccatgttgcaaaaatgaatgacaactaatttatgttaatcaaacaactaatttatgctaaagcagaaacaaaaatatagtacactgagatcacaaaacttatgaattatcatgttggtatcttgaaatcccaacaactaaaaagatgaggaaaatctcaaaatattttggcacatatagaattttactacaataattttttgatccactatgaaattgccaaaaattctctaaaatttgacatttttccatcaaagcagaaaaaagcaaaacaaaag

SEQ ID NO: 57535 - DNA, 1681 bp, Bovine  19866881410441
  misc_feature (1)..(1): n is a, c, g, or t
ncaatttctcttggtttattctttgaaatgaatcagaaactgaggcccaatcactgaagacaaggcaaacacaacaatatactagacagacagaaatctaaaattactatcctgttatatctggaaaaggagtttcctatgtctatgaaaacaatactggcaggtctttggtggaagtcagcttttgtaactgaactttcacaggaatagaatttcatgagaactgcagaacaaaaatatctacttggaggtgtctcattttctcagatttcataaaattcactatttttgctttagatctatcaatgatattgatactacatttattgtctagcactaaaagattcttgatcagtaacactgagacattacaaaaatatttgacaatctcctaggggtattttggctttaaacagatcactatgtatttatgaaagactggtattagattagtgaagcaaaagtttcttggtaacatcctgcacactagaggaatctgctaccttgataaactaagttatgccgtcagtatactttcggacatgacccaggttgtattttgacccatcaatttctactctaagaagagatcctcagataatttaattctagaagaaaaaaaaaattaatcttgatgttagaatccaagccttaccactcaaggggaactctgtattgcttaccttctcaagttcccacaatgaaaagatctaacttgaatgaaatttcagagtatactgccctctgtgatatactcctgagactctgccaagatgggctcttacggtcttaaaaggaacaagctttggtgatatttttcaggagctagcatttgctatatgtaatgtaatcagttattttaaaatgtatattttctcagagtcaccagcaatttttattgaacacataatgtgccagatgttattatctcttttaattttggtaatggctggcacatctacttccactcactacagagacaaccaggaaaccacggtgaatgggaattggaatccaggaaatctattccggcactcatttccttaatgagtatgcaattgtacctactaatatattctatttccatgattgcaggggcccttattatcttgctcacagctatttctccactgcctagaagagaaactttctcatactacatgatccataaatatgtttagggtgaatagatgaatttaaagcatattatatgctggtacacagagtgatatcctagaatgtgggctttgaatccagaagttcaaagttaagactaatatatatgctagtgaagtgaagtcgttcagtcatgtccgactctttgtgaccccacggactgtagcctaccaggctcctctgtccatgggattttccaggcaagagtactggagtgggttgccatttccttctccaggggatcttcccaacccagggatcaaacccaggtttcctgcattgtaggcagacactttaccatctgagccaccagggaagacactagtataaattatttaccttaaggtggagaaaataatatctaggtttgctctaaagatgacatggtaggattatattaagcagcaaccataggggctttccaggtgatcctagtggtgaaaaatctgccttccagtgcagaagatgcaagaaacataggttcgacacctgggtcaggaagaac

SEQ ID NO: 57536 - DNA, 931 bp, Bovine  19866880364047
  misc_feature (1)..(1): n is a, c, g, or t
nggtttttccgtggtctgtatggatgtgagagttggactgtgaagaaggctgagcgccgaagaattgatgcttttgaactgtggtgttggagaagactcttgagagtttcttggacttcaaggagatccaaccagtccattctgaaggagatcagtcctgggatttctttggaaggaatgatgctaaagctgaaactccagtactttggccacctcatgcgaagagttgactcattggaaaaaactctgatgccgggagggattgggggcaggaggagaaggggacgacagaggatgagatggctggatggcatgactgattcgagggacgtgagtctgagtgaactccaggggttggtgatggacagggaggcctggcgtgctgcgattcatggggtcgcaaagagttggacacgactgagcgattgatctgatctgatctgggcgagaaaaaagagaaaaatgacatagagcatgtcaggggcctagtaccacatctggtgactgatggctgttactgggaggggagctgggtgtgtgcctgcatgtgaatgtgtgtgtgtttgcgcccatgtgtgtgtgtatgttgcaatcagggatttgccccagactgctctgctggtggggcagtctgggctcagtgttgggcagtgccttgggcactggggatcgcagcacacctccaggccccgcttcctctgctctccgcaggatggcaacagctgcaatgtgggcagccccttcgccaaagacttcctgcccaagatggaggacggcagcctgcaggctggcccaggaggcgccagcgggccccgggccttggaaatcaataagatgatctcattttggaggaacgcccataagcgtatcaggtgggccgttgggggagggcagagacttgctgctatgcgtgcctctgaccaggtcaccg

SEQ ID NO: 57537 - DNA, 1341 bp, Bovine  19866880382781
  misc_feature (1)..(1): n is a, c, g, or t
natcaggagtggagaagggtggggtggtaaagaaaatgggaacccaggaaagtgtttactaacacagcccctgcagctgccttgggcccctctcccttcccccaccaggctggcagccggggagaagtcctgggacttgactcggaggtggggggtccccgcagtagattaggggccttgaatctacggggctggtggatacaaagtctggctcaaatctttgccttgtcgccctctcccacctttagcagtctacagctacccctgagtgtccatggctggtgtgccttttgtaactggttttgggggtcctttttcctcttacagcagaatgtacaggtccggactgcagacaaggagatggggctgcggggagaggtgctggcggctgcttggggtgggacctgctgtctcggccattgtcttcaggcaacatttcattttctcctccttcccggctaataaattagagaggaggccgtgggcttcgaagggacagactccccacggacagcgggcaggcaggtgggaaggcaagtctgtgagctcttggcagatgggctcacccagtgcttggctgctcacgccacacctggtcagacacttgcacagagcccaacaatgagcagcataaaaataccctctgtgtgtgtgtgtgtgtgtatgtgcgtgtgctcagttgtgtctgacttgccgtacaggctatagcccaccaggctccatgggattctccaggcaagaatactggagtgccatttcctcctccaggggatttttccaacctagggatcaaacctgcatctcctgccttggcaggtgggttctttaccacttgagccatcggggaaggcccatatacacacacacacacacacacatatatatatcacatgtaaatttatatacattatacaaatcctccaagattcctgaatgggcgatctgggcttgagcccttcgtcctaacagttccccagcaacttgtcgcactgagccctcctagacaggacgatgtaaacagacatgcacagcctgacactgacacgcagacataaaaagaaacacacacacccagaggcagcccccgacacacacactgacaatggtgtaatgaatgcaggacggcgacagcattcagtccaaagcccacaccgctggtcgcccagcaccagggtggctgaaaggttatggagtggctgcaggcctgctccccacagtgtcctctcccaggctctcggctctgtggagctgaggtgcaacaccatgccaggcacccaggtgggagcaaatgtctcctgagacagaaaggctggaactggactcagcccttagtcagggcag

SEQ ID NO: 57538 - DNA, 1470 bp, Bovine  19866880390038
  misc_feature (1)..(1): n is a, c, g, or t
nggcctcgcctggagaaggaagccccgcgaagctgtttgtcaagggcaacatgaaaggacatccgtgagaacttccaaggtatggcagggggtggggtgctccgggggtgcgggcaggggcaggcccctagaggccctgggagtgtagctgtcacacctgaccctgggccccagcggcagtagtgggatgactgcccaccctgcgccttcctgtcgcctgtgccaggacctgatgcagtactgtgcccaggacgcgtgggccacctatgaggttttccagcagcagcttccactcttcctggagaggtgagggagtgcccctctgggaacccctgggggtcagtgggttcccggtggtacctgggcccattgtagccaggtgctgctgggcctttctcaggctggggccctcagcctttctggcctgagagcacggagctgctctgtccaggggtggccacctgggccttgggctctcgggtgtctacagagtcctagaggagaggtcccaggctgtgcttatttcatggtctgctcagcgccctctctgaacccagatcctgagccacgggcttcacgtccatcttggttatgtgtcctagtgagtcagtctgatgatgcggtcagaattggaagcctcagccaaacccggttctgatcttaattgtccggtccagctcatgtgaccttgggcagggcagttggtttctctgagccctggtggtcttgtctgtgaagcacacacaggcatacttgactatccagttgtgaggctcttgtgtgacactttgtgtgtgtggagttgttaacgcagcgtctggctcctggtcattactcagcatgtggcagccacctccatttttgtgagctgtcattcccacattatccctgaagatggaatgatatccctattttatagatgaaggaacttgggctcagagagatgacatcacttatgcagggtctcatggctgggaagtaggagagagctggggtttaaacccctgtctctctgatgtgggtggttgggttgaggattgccaggccggctcagggcttgggccagagccttgcctcccgtggtcatttatggcagccctggtgtttgtcctgaaggtgtccccacccggtgactctggctggcatgttggagatgggtgtctcctacctgcccgtcaaccagaactgggagcgttacctggcggaggcccagggcacctacgaggagctccagcgggagatgaagaagtcgctgatggacctggccaacgacgcctgccagttgctctcgggagagaggtagccaggcccttgggtgggcagggtcctcctacaggggcccgggcagtgggaggcctggcctctggcgtggccttagccctgccctggtgaactggctgtgcaggtacaaagaggacccctggctctgggacctggagtgggacctgcaggagttcaagcagaagaagg

SEQ ID NO: 57539 - DNA, 1666 bp, Bovine  19866880410868
  misc_feature (1)..(1): n is a, c, g, or t
nggagcttgcttgcagctgtggtggccacacaggtggcctcgtcactcactttggtgctgagtggccttgaccctttggcgtgatccatggttcacaagaggctttttgctcagtggccgtttccctacacttatccttgtggatcttgagcaaactccggccttttcccgagtcagtgtcaggcccccaacagacagcactcaccccctgtccaccccaccccccagctctagcacgtacttctagaacatgtgcatacatctcctcctttctggcactttccctggtctgtcactgggggtggttgctcagaggcccagcaccttctccaaggtgcatgacttgctctttgtccttcggaatctttccagccgtcagatgattcatcctgtacctgtgtgcagcgtttgtctttttttgttttttttttttgccactttcaattaaaaaaaaattccactttgggtcctattataattgtctgtcccctttattagctctttgaacatgagctgtttcatgctcatagatgtgaggggttggtaacattcattaagacatctcagagccaagcacagacttggtgagccccagacctaacagacatcttgatggccaggctgcatgcccgtctgggacaccggggactgtggcgcatagctgccttcctctctgtggaggtggagaagtaaagaaggctttgtaactcctcctcactcccagcacggcccctgacagcaccccacccgacctccagctctgtgagggttaggagaccttgtccccagctgctaacgcaggacctgcatgtggtggaaggtgtgcagtggggcttgaggagcggggtgtgcacgtctctgggctgagcctgcctgcctctcacctcctcaggtattcctggtgcagccggcggctggtggaagagcgttactcttggaccagccagctgtcgccggctgacctcattcccctggaggtccctgccagtgccggcagccctgctcagcgagaccggcaggagcggttagtggtggggcacaatgtgtccttcgaccgagcccacatccgggagcagtacctgatccaggtagggatcctggggctgactgcaggtcctggctcggggtgggctcggagcccggcttccagtggctggggaaggactgcgtgtcctggctagtgcctccattgcctttgtagcagctccagggccccctgctgaccagccctgcccgtggtccttgtgcccagctcttgggtccccagcatccctggcacaggacctgagctgtcacagtactgatggcccttgtctgtatgcggcattttagagcttgacctgggctttggaggccgcgggccccacagcctgggcacgcgtcctgcctcagccactggtgagcagcatgtgcttcttgacacccctgagcctcagtttcctcttttgtaaaaagagggagatagcagaagttgcatcaaaggattgctgagagggtttgaacagtgcacatgtcagatacccagaaccatagtgtggcacttcctgagtttgtggaaagtgccccaggagaggtggggcaggtgggagcatccttggcctccagctgcagatgctgaggctcagacagccttgttaacttggccagggcctcatagctggtgagt

SEQ ID NO: 57540 - DNA, 1019 bp, Bovine  19866880487200
  misc_feature (1)..(1): n is a, c, g, or t
nttggagaaggggggcaggggctgaccgccagctgccaggcccaggaggaggcctccagaggcacccacaggtgggattccagccagaccagagctgcagagagagagaggactggaagttctctctcccaaaccaacccttgtaccctcccccaggcccccaggcaagcgtctttctcacttggctcccgctgcacacagggcccatcctgtccctggccagacttcttccagggctgggaccctgccccccaccccatccaggagcggcagctgattctcctcccccgtccctcccccctctctactttcggaggagaataacctgtgataatttttttcttcttctttctggcaactaatggactccttaaatagcaaaaattgcggcctgtaattaagatcttgctttttaaatgattaatcattgtaacccctttgagcagcatcctactttcctctcttctcacattgaaatgcagatcattggcggagggagggaggtgctcccaagccaccgaggagcaattaaaccttcccagctgtcactcgtcccgtctgcctcccggcctgtccagacgccgccacggagagagggcagggcattgctcagagcacccaagcccgccagtggcctgactggggcctcccggagagcgtgccttcaagcctgaccctggggtggcagcccagctgctggggtggctcttggaaatgcccaggaaggcagataatgcttgctgagcacttccaaatgtgcccagctctttagtaacgagatctaattcagtgttcgagctcgccacctgagagagaggggaaggtggcccatttctacaaagtgccaacatgtatcggcccaaaaagggttttccaagccttttgtctctttgacacccacatggactgaccacatgatttgaggagggtatatcattagagctaggaggagacttggaactctggtgtccatagctgtcaacttaaaaacaaacaaacaaacaaaaaaactggaaggg

SEQ ID NO: 57541 - DNA, 2646 bp, Bovine  19866880535261
  misc_feature (1)..(1): n is a, c, g, or t
nccgggagacctctgaaatattcggtgaaagacagagatggaggtagggtggcatgcttctgaagctgaatcccggctccagcaatttctagctgtgtgacttccagcaagttacctcccctctctgagttttgtccccagaggcatgtagttggagctcagctctgttgaatacatgtcaagaacctatcaaaacatggtcaggcagaaagcagaacaccatgcttgcaggggcagagatgctcctaccactggaggtgtgagcctagactctccaactctcttagaactcaagactccaaaccccaggctttgcccacaggtcccaccgttcccttggcccatctctcattcttcagacctaatctcattcctcaggctttttgcagaggtggggaggggaaagctgggaagtgacgggcagcacagtttgcctggctgcaagaaccctgggggggaagtcctgagactgcctgatccccctcggtcttcatgggatcttcctgaaggaggctaggatagcagagaccccagtcccaggtagaacaggtgagctttaggcttgcagactggctgcctcactgttgttcccactacctgagtgcctgtttcccgtgagagggtccggtgcacgcgagcgggtgatgtacgtgcaggctgagaagactagaggagccaggggtgagaagagacaaccctaaaccatcaggctggtctggaggctttcctgcacgggccacagtgcgcctgtacttcccgggaaactgccgccagagagcgttgttggacagcgcgccgagccgcgctccggagggcggcgaggtcagtacagtgaacaggaggacagcggacacacggaaagaacaggaggagggcttagggtgggaggccgggatatcctcataactcctgcgtcctgcaagagtcctggcattgcatagccaggtcttgggcgtgagcgggcttcagcctctccagcttcgggtcttgaaacctgtggcaaggaggatgaccaggtggcactgcgcgggctgcagcagagactccaggggcgcatagtctggcctctccgccatccatataggccgcagtcggttcctcgaagtctccccgtccctccggggtccccgcccgggggtccgagtcgcggggcttcctgggggagatcgtgcaaaagaggtcgcccacccgtcctccctccctccgcggcctgcgtagaccactatccagcgctcttcctctgcgctcccgggcccttctcccacgaagggtctggtcctcctatccccggcccgcctatgagctcatctaaccgctttccctccagttctgctcctgggaagggcgtgccaatcctcgaaatggacgaagcaggtcgagccagaggtttgagtgacctctggggccaggcgtctattcaccctgggctcagggactccatagtcctggagtagaagggtaggatgggggctgctggaaggctgggggctgctggaaggctaggggctggctggagggctggctgggagccaggaaaagaagtgctaacagtaatcgaccctttctttagtgggcactggttctggaatctcgatgttttttcccgtgggttcaagctgaactctcagtctctcctgggcttttaggggctcagagtgcaaacaccttcctgtaggaccgggagggacactcgctggagtgctcggtaggccctaggcatcggagtcggattcccaggctcgcaccaccgagctgagctctcagaggggttcctgggcactctctctcctcgggtcctgaggcaggagaggtgaggccactggggagcccgctctggcaccctgggagcctgaaagtcatgcctcagaccagagcatctctctctcatccttttcctagtgatctgagtgaagacctgtcatgctgaggagacgggccttcgaagggaacacggggcgccaggcgggcgcaggacagagctgatgtgcccttctgtgcttctcccctaacactgggctgcctttcttcacacccttaactcaggagaggcttgaactgactggaagctgggggtctgggctgggaggaaagagaggaagggaaattcgggttgcaggagagcaggggagggtggcgaagtcgcagtggtgtgtgctggctgtcccctcactgcccagtcctgaggccgagactgcggcctcctcaaaagctgccccgcggggcagacgacagggtctcagcaacccccagggtgagaacccgcaggctgggacagggtcagcaagaatcatactaggcctgcatccgcgcccattccctccggaaggggagaaacccatataaccttgggcggactccaccgaggcctccacaaagggcagctgggcgcgggagtggagaggaccagagtggggcaggagcccgggtttggcgggtgcctcaatgggcggcagggacccgagcagcggcctaatggattcaggcccgccggcaatagagcgcctgccccagctctcaatagcggacaatggagtcccggggtgacctgaacaaagaatttggaagtagttaaactgcagaacacgttctgggcctgggtgcctcctttcaaaaagagctcgggagaagaaaagaaagcactggggg

SEQ ID NO: 57542 - DNA, 778 bp, Bovine  19866880587815
  misc_feature (1)..(1): n is a, c, g, or t
ntgagaactactaattttattaactctaaacacctaagcatgacttttttaatgtcatattttaatatcctatgtgatgaaatgaaaattatgcataaagcataaaaagcataactgatgtatgaaaatgcttacctagagaaaaagcatttgtacaactgagtgataaactaaactagccactttttgcagagaacataatttttatgtggaacaacaactgccaaactatagttattcaaacttgtgtatttgatagacattttcttaaagatgaacaaagcgagcctgtcatttcaagaaaaaccagtgtttgcagccaatgatgacattcaaacaaaaattcaaattttgtaaaacttgcgttgacgccatgactttggcagctttccaatacaaacttttctggtggtgacattaacaaatacgatttttgtttcttatgctgtataacaaaatgtgtcaacatttggaatatgtgcataccagtattttccaaacgatcacaaatgggtagacgatccacccaaagtaaaaggtacatcaatagattttctcacaagagggtatgaaaagttcattgacctcatttcagatatcaaattacagctaactttttcaaaactactttttgttgagttttggtgcagtatcaaagaaaaataattatatgaaaaagctattcaaatacttctttttttctttctttcttttctccccctgctttattgaggtatgactgacaaataaaagttgtatatatttaggttatacagca

SEQ ID NO: 57543 - DNA, 1008 bp, Bovine  19866880590123
  misc_feature (1)..(1): n is a, c, g, or t
nccaggtcaccacaagtagagaaaaccacaagtagagaaaaactgcaaccctgcagttgaagacccagtacagtaaaaaaataataaataaacaaactgttgccaaggttggcttgagacatgttgtgtttgaagggcctgtgaatgtccaagagataatgtctggcttggagctagatatgggtgtgagtcagcgagacagcctgggagtgaggaagggagaggggcttagattgtgcgagtccagagagacaaggcacaaaggagcaagcggtttttagcctggctgtacctagggagttttttaaaagtactcactcccagtttctttgacataatcggcctggagtgaagcccagcatcactgtcttttaatctccccaagtgattccagttgcaaccagacttgagaaccactgccctagatcactgttcttcaaattttcatgctgtgtatcccctcaaggaattttggaaaactacatattgtcatattttgaagttgacatctaaattttttatcataattttaacagcagcaaaaaatataatttcctgcatgttgtatatattttctcgagaacctcagagttgcagatttggtttatttaatttatgggaaatgtctgccatataagctaatcggcaaagccagaattcattgtcaaacagccagcccaattagacttactctctgtcaaaagaaaaatctggattcatttttcagttcagataaatgtattaatacatagcctcatgacaaccatctcactttcatattctaagctaaatagacaatgcacagagccttgtcacctagaatatgtcccttagatggaataagatgctgtcccttcaatatttatagctgatgctctctgtgctttgtggagggggtctctccttcagaagtgtgctctctctaattgctcctttgtttgggtctacagtgctttgcacttgtctagatgacaaaccatgttcccacgggaatgaggaaaggtaagc

SEQ ID NO: 57544 - DNA, 1509 bp, Bovine  19866880591640
  misc_feature (1)..(1): n is a, c, g, or t
nggaggagcttccgggtcccctaacctgagtgaaacccctccaccttccatgaagctgatctggagggaacctcaggcctgggagtgagtggcagcccctcagcctttccagaaggccccacggagggcttggccaccccggaagtgagtggagagtcaaccactgcctttgacgtgagcgtagaggcatcaggctcaccttctgccactcccctggcttctggagacaggactgacaccagcggagacctgtctggccacacctcggggctggatattgtcatcagcaccaccatcccagaatccgagtggactcagcagacccagcgccctgcagaggcgcgtctagaaatcgaatcctcaagccctgtgcactcaggagaagagagccaaacagccgacacagccacctccccgactgatgcttctatcccagcctccgcaggagggacagatgattcagaggcaaccacaacaggtacagctgggatcattttcctttaagtgggtcggagtgattcagactgtagcatggtaggaagcagtgtagactcaaggttctgagctgtgcaggcttaggcaggtatcttaacctctctgagcctcatctgtaaaacagcaatagtaccagaggagagtaaatgagatataaatatgtcgagaacaaggctatatcttttgcacacagtacacacttgtaggttcacaattgttacagtcacagtagagttccatcacacaaacatttatatgtgaactcaactatcttactcggcacgagaagtactgtttagatagtgctggaaattcttctcctgcccctggctcatggaatgagcatgagaagagagaatgaatctgctgatgacatttatgtgccaatacttactttgtgcagggttaaaacctgcacagttcaagttaatatgaagcatcactccagctgtgtcctgcctttggaccctggctcctcaccccgaccctgtgcaagtaaaccctcctctgtactgtagtgatggtcttgccttgacacaaacccagaagcttctggttttcctttattttctggggccccttgcatccccctgtgtactgagagtccaatcagagaattcagccccaccagaagcaggggctcaggagggagagagtccccagaaatcatgttgacccaaaaccagccttgtgggtttctgtggcctgaggccccaccctggaggtcttggaggctgcgctgtaccccaggcagcaacattcttgatgcccagcctctccctgcgggttgcagcctctaccagttcctgtgccgaaaagccctgtagcgctgggacctgccaggagacggagggacacgtcatatgcttgtgccccccggccacactggcaagcactgagacgtaggtaagaccctcggcggccatgggggtgcagacagaagggtcgggaggaggcgtccaaggtcacctgaggtgcaggcttcttgtcacactggcgtagaagagtacatag

SEQ ID NO: 57545 - DNA, 2582 bp, Bovine  19866880593077
  misc_feature (1)..(1): n is a, c, g, or t
ntgatttacactttcacttttcactgcttaagaactcacctccaagtgccttagtgacctggaatgcacacagatttggcttaagaattgatgctttcgaactttggtgttggagaagactcttgagagtcccttgaacagcaagaaaatcaaacaagtcaatcttaaaggaaatcaaccccgaatattcattggaaggactgatgctgaagctgaaactccaacaccttggccacctgatgtggacagccgactcactggaaaagaaacctgatgctgggaaagattgaaggcagaaggagaagagggtgaccagaggatgaggtggctggatggcatcaccagttcaatggacatgaacttgggcaaactcagagagatggtgagggacaaggaagcctggtgtgctgcagtccatcgggttgcaaagagtgggacacgacttggctactgaacaacaacaagaactggaaaactggctaggacaaagacggccagtttaaaattgtaacgaagctgagagacatccctaaggctgcaggaccgtaagtacagaggcggaacttccctggcctttcttggaagcagaagccgtgaaatgcccaaagcacagtactggttggtgcagttcttttcccactcattcaccgctggccacgtgccttgatctctacctgttgaagagtccccacctctggtctttgggatgcaataaagagaagagaagagaagttcatccactcagtcttgtctgactctttgtaaccccatagactgcagcatgccaggcttccctgtccttcactatctcccggagtttgctcaaacttatgtccattgagtcggtgatgccatccaaccatctcgtcctctgttgtccccttctcctcctgtcttcaatctttcccagcatcagggtcttttccaatgagtcagttctttacatcaggtggccaacacattggagtttcagcttcagcatcagtgaagggaaggtgatgcaaatttgatatgtcctgctcctctgcgccctctagtggctaactgggcccactgctttctcgccccacacccccaaccatgccaggggagacttggattccagggactcttttgcaagtcagaacacttgcctgatggtatcacacgctcacatatccacccctacctcctcacatgcttatgacagcaaatgtgcttctcaaatgtttttgagaagttgcagttacataagtagattaagtatgttacttgtctgctaacagcatatttgcttgtgtacatgtgtgctgcgtatgcacccagcccccttgctataatttcaggagcctctcaggatggagccactaatcaaagccaggcctttctggtccttgagttaaaaacagattgtggctgtagccactgctgtccatatttaggctcttacttcccagggctctgttccagaagctgcctcctctttagccagggctgactgaaattccctggggagggggaggtcctgggaggagtcacgtggactctcagctttcaggcagaagggtctctcttgccgtgtgaccttgtcatctgtgtgacttgctgtgtgtcagtggtgccggaaggcacagtgagtttgagaacggctcagggcacgagattagtgggctcatctcctgatgcagttgtcaccaccatcacaatccccagtgttctgtgagttcttactgtgtgcaggggctcctcaggtggctcagtggtaaagaatccacctgccaatgcaggagacacaggagactagggtttgatccctgggttgagaagattcccctggagtagcatggcaatccactccagtattcttgcctggaaaattccatggacagaggagcctggtgggctacagtccatggggtcacaaagagtcggatacaactgagcaactgagcatgcacacacgagctatgtgcagagcacctttcagtaacttataaaaagtagaaaacagggacttccctggtggtccagtggttaagaatctgccttccaaagcaaagggttcgggctccatccttggttggggagctaagatcccacatgcttcatggccaaaaaaacaaaacaaaaaacagaagcaatattgtaacaaatttcaataaagatttaaaaaattatccacattaaaaaaaaaaaaaaacttagaagaaaaaagtagaaaacagtgtctccatcctccaaaagctatagttctatgggaaagggaggggatgacattaatccataggagaaaataactaaaaattctgtttaattccatcaaaaccagttgagtacttgtataaggagttgaagaaggcattttaaaggtgccttaaaacagcttagctagaatcttgtgaggaccacgtggataaggaatgggagatactaaaatgcaagggtcaatgatacaagatagggtaaggtcatgcctatactgactaggatccattctgatggaagtgtcagttatataaactcacgcaagccaaaaaaggaaaaagattattagtccatggaaaagaccctgatgcgggaaagactgaggccaagagcagaag

SEQ ID NO: 57546 - DNA, 1555 bp, Bovine  19866880645065
  misc_feature (1)..(1): n is a, c, g, or t
naaattcatctgtaattattcctcagttttggctgaacattggaattgcctgcggagttttaaaaaatgttggcacttgggtgacaccccccaagattccgatatgactagcccgcaatgtgaactgaactttggagattttttttattattattattatttttaattttattttatttttaaactttacataattgtattagttttgccaaaaggtcaccaagtggttctagtttgcccccaagactgagaatgggcgctaaagcgcaaatacctgaaggacccagcagagggcgctgcctccctgctcatccttggaaacgtgcgcgctcatcgggctgctagctacaaaaaacccgggtgatgcagttaagataagggaccccagatacctgatccttggattaagaaccattttgtgttctgagactcctagaaagttaccttgagaagtaataagctgtctgtttttctgagtaacttagaggtaagtcaaacaacccaagtcttggtttctgcatttttaaaacgggaaagtgggggaagggaaagggaggtgggaaacttggtctatagtcgttctttagatatatattgagcctcctgaagtgggcaaaatactgatctggggggaaggataaacatttaaatgggatccctgggttgggaagatcccctggagaaggaaatggcaacccactccagcattcttgcctgggaaatcccatggacagaggagcctggtgggttacagtccatggtgtcacaaagagtcagatgcgacttacactttcaacacatggtggatctcattcgttcctagttcaaggaaggggacctgtgggtaccctcagataccagaagagaaaaactatgaaacaagaggccaagagactactgttgagtatttacatgtgccattatatattatgacacctctcttgattaattatcataacctaacaaggtggacatgatcagttccattttataattaagacatctgaggctcagagatgttaagtcacacatctctttgatgcctcaaagtcacacagctactaagtgatgcatccaggattggaactgggggtgtgtctgaattggaagccaggcacccctacccaccccctaggaagtgcctctctccctctactttgcaccttgcccctagcaacagcagcactcctgtccatctctcaaatcaggaaagcacccacgacccaccctgccagatgtttgtttcacagaggcaggatctctctcccatctgtctccacagcaaccctggatactgaagactgcctgggagagatttgatccccctcctctcccggttatccacttctgtccccttctacccagtccagccccctttcctccggtgaagggcacgcacctgctgagtgacaacaatttgcagccttcccaagtgtgaatgagatttctaataggactggctgcccacctgcttcaggcaggattggaataaagagaatttaagaggcaggaaatgggcactaggagagccagttcaaaggagctagacagcgac

SEQ ID NO: 57547 - DNA, 2611 bp, Bovine  19866880712746
  misc_feature (1)..(1): n is a, c, g, or t
naaaaagaaattccagggaagtgagaggaaacatgtgtgaaaaatagacaccacactagatcagcgttcaatcaaaccaggacctgctgagaaacaagtgcagacctgctatgtctcgctgagtcctgttatctttactcggcaaattcaagcaagatttcatggttgaagaaagctacgatcctcaatgacaaagtgatccctttgctgtgtaggctgggggtgaggctgggagtttggggggaatggggtaggcctgatctgaacacgtgggcactggtaacaggctgattttagactctccatctccatctccttcaggggctcccatgaccgacttgagtataaaattctcaaaggccacaactcgtgaactccagtctggtttttgctcagtcccagctctatcaaacaggacaacgcgttgctgcctgtgtgccccgctgccttggcacttgataaccatggtaatggacactcgctcaggcactcaccacatgctaggtcctgagcttcccttatctcaatcctacaaggtaggaagtgttattaccttgacagatgagaaaacttacaccaggaatagttcctgactcacccaagatcacccagtaaatgggaatttgaacccagtccctagaaccaagggcttcccaggtggttctagtggtagagaacccgcctgctaatacaggagatgtgaaagacttggatttgatccctgagttgggaagatcccctggaggagggcatggcaacccactccagtattcttgcctggagaatcccatgggcagaagactgtgggctacagtccatggggttgcaaagagtagaacatgactgaagcgaaagcatgcacgtacgcacgcatgccccagaacctaaacacttgacaattatcgagatctttggaatcacagtgctacgtcctgtgtggtctctaggaaattgatgctatgaacattctggaagtttggggtgaagataccaaaagcaagagatgagaccaactgacctggatctcttgggagtccccagatggtctcctgttttagatcgttctctctttccccagctcacgttcatcgggtaccacaccttctccactagctgccctccaccccacccgctgacttgatggagcacaagttcctgggcaatgaccagcagcatcttcccttccccagcatgccagtctgcagagatggagccactgtcctgggggatggtgtgttgtgattgtcctgtctctttgaactcctcaccctggccagtcagggcttttgttacatgtaagataactgattgtcctgactccttgccatgcaggagggagacagtgaaagggagaggctggtgggtcaggtgaggtgctgtggccatagaaaggagcctcctaacttctgacagagtgtgtgtgcactcacttgccaagtcgtgtctgactctttgagaccctatgggttgtagcccgtcagtctcctctgtccatgagattgtcccggtaagagtacttgagtgggttgccatttcttcctccgggggatcttccgacccagagatcgaacctaagtctgtgtctcctgcactgcaggcagattgttttccgctgagccaccaggaagcccagcttctaatggagaacagcacccaaaccagaggaaaggatagaaatgttgcagtcttctatgctcttccaagtttccaggaagtcccccaaagtgccaaattgggagttcaagagagcagagtagattatgggctggtggaaggaaggtcatttgttacagggctccctaggctttgcccactgcccattaggcccaaaggtcaagtgaggcagttgagaaaaaaaaaaaaaaaattcctcactgtgaagtgtctgaggcccttttgagatgagagaatggccccctttcagcagccctgcttggagccaggacagtattcccagagggagcagactgctgaatgatcatctgtctgcccagatggaccaaagcctgacctgccagggaggagactcttgattctggttttctgttttcgaattcaggggctctggagtactgcaataaataaaaacctatttattgagctcctactgtgtgcacagcttcgtgaaggacacaaagaagcactgatttgaaaaaccacagatcagaatttattcatgcaaatgagcttgctccctgatactcacatacccagggaggccaccactatttgaggaactactcccagccccttctcccagtgatcttgaattttctcagggaagatggttggatgttttaaaattaaaaatagctaatggtcatttggcattcattcacccattgcttatgcattggagaaggaaatgggcaacccacttccagtgttcttgcctggaatcccaaggatggtggagcctggtgggctgccatctatggggtcgcacagagtcggacacgactgaagcgacttagcagcagcagcagcacccattgcttactatgagccagtcattgttcttgttgcttggggatgaagaagttcctgaaagtgttcatggcttgctaggggccatcagcaggttgaccagcctggtgaccaactggtcatc

SEQ ID NO: 57548 - DNA, 954 bp, Bovine  19866880760292
  misc_feature (1)..(1): n is a, c, g, or t
ntggggtccatggagaggagccccgggacaagtcggtagaactcacctcccagtagactgcatcctcaaagcagttctcatcaggtgcttgtccccagaatggtaatctcagaatgacccctaaaggaagttggaggtcccagaggtcaagaatgacttcttctctgcctacccagactttcccctcaactggaaaaatcctcccggtctcagagccatcagtgcagagacaaagggttcctgggggctccaggtgacctctggcacacactcttgggtcccccaaccacagggccccagcttctctggcatggtcacccccactcacctacgatgacgccgcccgccagggccatggccagtgacacaaagagcccggcagcctggaacctgccctgcgtgtttgggctccagtttaatttggatctttcaatgccaaaggcataggcaagcctggggtagagacaggaagcaggtcaggatcccctggagaggccaagtgactacccgctgtcaccccacacgcatgagtggacacaaaggctcaataacctctgggcctcagcctttccatctgcagaatgggggcactagaaagatcagatggtctctaagattcttatggaaggacagaggttgaggagagaggcccatgaaatagtggtccggggtgggtgagaaaggggacagagttagtcttggaccctagagaaacagtaggaaggaggaatggagaaggaaggagggaccgcctccattcttacccttcctccccatacagatcaatgttggcgatgcttgccgtcactgcgcccgcaataccgcctatgatgccaggaatgccatgcaggttgtgaacaccacacgtgtcctggatgtgcaaccgggactccaggaatggctggaaacagggcgatgagtgttgctcaggcagggggctgtggcaggctgtgg

SEQ ID NO: 57549 - DNA, 1643 bp, Bovine  19866880770842
  misc_feature (1)..(1): n is a, c, g, or t
ntcctccagcccgccctctacgtgttcctgtgcggacagccgggctgcaggctcctgagcagggcctcagcccttcccactccaaccccacgctctcaactcaacagggctcggaggcctggacagaaagactgccatcaaaaaagaactagaagccagacactccaactcaggctcctcaccctagcccgagctgggcttggcctctccaacaaggggaagggtcccgagatgccagccccttcctccccgagccagagccttacgtgtgggggcaggccgccccagccgacgtgggagtactgccggccgacacctgagccaggttgtcccgccgcccgggcaccaggtagccccagccatgctgctccgagtagtgcagagggaagccgtcccaggtcagcgccatgagcttaggtgtgacccgcatctggaggctgaggagactggggccaggggtccactcagggtcatcgagccggggacacagcttccgataccacctacaccgccagcagagagtgcgtcacagcagtcaggggaggacagcatgtaacgaggaaggctctctccacccgtgacaatgcccacccatcccaaggcctgctggtgacctcagcctgacattaccaccccctcccactgggactcagccaggacccccatggaggcccctagaataattcaaatattccccaaggacagatcctgtgtcagctccctattccaggacccatacacactgccaagggcaagactcctcgccaagctccacttcaccaggggaactgcccagagcagcgcacaggtctacccgacctctgctgctccagaagcacaccagggcccccagtgctccatccctcacgggctgttcaccaaagccaatgccagagctaggcaagtgaggcactcagggcacagatttaagggggcctcctctcagggaaacacaaaattggccccttgctgttcagtctggatgcccctattttcccatctctgccactttgtggggtgagaatgaaggtcacctcctcaaggaagccttccttgatttcaccaggcagagttttaggttctgcctcgacactgatgactctcctgtctcatgatggatatcaactccagcgcaggctggctcctcccagggagaagctactagaaaggagttatgcttctctttgcccctcagaggctgcagtaaggcccagaacacagcaggtgcttagtgcacttgtagtgaacaagcccagggacccaggggtgacagcaggacaggaagatggcaggaacagatggcagcgtgttagcaggggcgcatacgcatactaccctctgtgctggggcccagaatacgggtgtctcgaggtggagggagggatagggtggcttctggacatgtgaggggaagggctcaccctgggtgtccaggaaggtgctggggccgcttgggcaggagctctgtggtccccctcagctgctccaagcaggtgcgggctgtggcatctcgctggaactcctcctcctcactgggggggccggggtctgcacagggtggggaggacaatcaggaccagggaagggtatctcagaaagaccctcccaggacctgcccagcggtccagtccagggttcgaatt

SEQ ID NO: 57550 - DNA, 1034 bp, Bovine  19866880796808
  misc_feature (1)..(1): n is a, c, g, or t
naagctggggttgcaatgagcctgtactaagatctgagtctggcgggactcaagtccaaatctggcatcacagcccctccatttgttgggcagataagttctgggcaccagctcctggccaggcatgcgtggcacaacttttgtggagtctgcatggggctgagtgtgagccaggcatggggcaggggatctttacctggaactagcagagctggctgcattccctaaaaccatgcctttgggaagggccaccacatctcagtctagtcaggccccggggtgagcaagaggagtctcaccgggtacctacgtggggtatgacctcccctcttcccacagcctgaccgcgtaggcagtgagttgaaggccatggtccaggccccgcctggctacgtcctcgtgggtgccgacgtggactcccaggagctgtggatcgcagctgtgctgggagatgcccactttgccggcatgcatggtgagcgggagccagggctggagcagagtggaggcggcctgatgcctggccggcggagccgcctctctcactgtcgccctgccccccaggctgcacagccttcggctggatgaccctgcagggcaggaagagcaggggcactgatctgcacagcaagacagcagccaccgtgggcatcagccgtgagcatgccaagatcatcaactacggccgcatctatggggccgggcagcccttcgccgagcgcctgctcatgcagttcaaccaccgactcacgcggcaggaggcagctgagaaggcccagcagatgtatgcggtcaccaagggcctccgccggtgagtgtccccccttccctacccctgggcctcaggcttgctttattgtctttgctgcgcctgtctttttgaccttcccgttgcctgagccctcatacggcctctgacctagctctaggtgggttgtccttcggttgtgatgtttgctcgcttcacagtccgttttcctcatagccgtgagttatcactgagtggttgcagggtgcgtgctctgctcctgcag

SEQ ID NO: 57551 - DNA, 1285 bp, Bovine  19866880826550
  misc_feature (1)..(1): n is a, c, g, or t
natatggtgaattgcattgattttttttcctgatgctgagccattcttgctttccttagataaactctacttgattatggtgccttattaaaaaaaaatacatatttagattagttcagctgatatcttacttaggattttcacagttatgtttataaattaaacatgcttgtcattttcttttcttaagatgtcttccatcagttttgaaatcaaggttatgctaacctcgggaaatcattttattaatgtcattcctgttttctggaaaacttgtacaagatggagattattgtcccttaaaaggcccatataattatctagtcctagggctttttgatataggaaagtcttgggttactattccaatttttttaaatctttattggtctatgcaagttttctattgtttcctgtgacagtttggtcctgctgacttccacttacatctcaagggatagaactgtgtcccaaggtcacttcacttggaatggagactaagagagtaacagtttaatgtttcaacctctacagagaaaagcaataaggaaaaggggaataatactttatctgccaccgtttctggaagacaatatattgcttagtcatttttttttttattttattatccagtcagatcactgagtttaattcacttccatttattttaattgctggaatattaggacttatttcagccatttcactttgtgcttactgcatttaccatcttattttgtatttattctgttttctctctcctattttccactgcaggaatcagatttttttaggctagattgaaagttgtatattctattttcgttcttctagctgttccccctatttaaatatgatacttctgtttgtttttcactaccaatttcttttcccttggccctcacacacctctttccagtctctacatctcctcaccatcatccccaccctgccatggtgatatcacccagaattggttcttgatcgttatagacaattttcctattttgacttaaaattttatttttagagaatgacaaatcttagtaagttatttacaagccctcatttcccatgtgtcattccttcctcgtgagaaatctaatgtcaatacgattcttatatttgtgcatgatctgttgtttcttttgttttttctgaaagtaaactctcaaaattttctcctgtgttcggtgttctaagacttctctgtgatgcccttaacttgactatttgtttgtcttgagtcaatctgcccccatttaatactctgtgaacttttaaa

SEQ ID NO: 57552 - DNA, 1071 bp, Bovine  19866880846427
  misc_feature (1)..(1): n is a, c, g, or t
nttctggagccttggaccttggcagaataccttctgtaactctaggaagtgggcaagctccagaagcaagtggtcttccttctggatttagtggtgagtattctggggtggaccttgaaagtggcccatcctctggccttcctgatttcagtggacttccatctgggttcccaactgtctccctagtggatactacattggtggaagtcgtcacagccaccacagcaggtgaactagaaggaaggggaaccattgacatcagcggtgctggagaaacatctgggctgcccttcagtgagttggacattagtggaggagcaagcggactctcttcaggagctgaactcagtggccaagcatctgggtctcctgacatcagtggggaaacctctggactctttggtgtcagtggacagccctcagggtttcctgacattagtggggaaacttccgggcttcttgaggtcagtgggcagccatcagggttttatggagaaatatctggcgtgactgagcttagcggactggcctctggacaaccagaaatcagtggagaagcttctggaattctttctggccttggtccaccattcggcataaccgacctgagcggagaagcacccgggatccctgatctcagtgggcaaccatcgggcttgccagagttcagtgggacaacatccgggatccctgacctggtttccagtgctgtgagtggcagtggtgaatcttctggcattacgttcgtggacaccagtttggttgaagtgaccccaacgacatttaaagaagaagaaggcttaggatctgtggaactcagtggcctcccttcaggagaggtgggtgtctcaggcacatctgggctagcggatgtcagtggactgtcttctggagcaattgactccagtgggtttacgtcccagcctccagaattcagtggcctgccaagcggagtaactgaggtcagtggagaagcctccggagctgaaagtgggagcagcctgccctccggagcatatgacagcagtggacttccgtctggtttccccactgtctcttttgtagacagga

SEQ ID NO: 57553 - DNA, 1600 bp, Bovine  19866880931663
  misc_feature (1)..(1): n is a, c, g, or t
nttcatttcctttttccttttcttcttggctggttctttgttctgcccctcatgctctgatgcagtgccctagaaggggagagaagtaacgctgtaacgtgagaagcctgttcagaggcagtggaaataaaaacagaaatcctttatcttctcatcaaagcctgtgttggtcatgctttctcccccgtcccactcacgggaggtaactgttggagatgggggcaagctctgcagtagagcaaggtggtgctgactccttccctttggacttctgtaatgacgcagggaacacggtgacagagaaggggcatcaagatgctgcagaactcccctgaactcaaatgccagggaggcagaggcagtggacagggccaggtgtattatggcttagagtgtggtaaatggaagaatgtagattcaggattttttgagaagctagaaatccagggtggttgatgtcaacttccagtttatcttggatatatgtaaggtgatagaaattctgggcaccagaggtaaggaaacactgggttctgcttcagagatgctgtagggctcatagtgtgctgttcctctccctttagtctcagcagaggggaaaggaggctaagaaatgtgctgaccctcattcagagtagtggccctactttgaatgacagcatggtagaagagggaaaaactggtttctgagccagagtgcttaggctcataattttccaatggtttaaaaggttatggggagaagacccacagtaagaccttgttttcaacattccctttctggaaatgtccaccctaaaggtatacaagcctgggaaacttcggggatggttcaccgtttacaacctttctcttgagaatgcttagtttcgtctttgaccaccttttggctctttctctgtggctgctccctgacaggctactgacagccagccaggagggcagctgaagcctcctgcactctagtctgagcaggcactgacctcttcattttcatcctcctcctgccgaagaaccacgtccaggatgtttcccttgatcttgaagtctcgtgaggtgctgagctttatatgcttcatcaggttcacctgggacaggattgtaaacacaggcacagtttgccaccaataaaacctgcccaggactgcctaagccatcccggataaacccttcagttcctagagaagcaagtacacacccactagacttcacatcaggtcccctgtgtcaatgtttggcttcaggccatcagatcagaaatagcaaagaaacaaaagaaacgcagtcgcctccccccagtgcagttgtgttgcttcagtttgccaggtcccctcacaggctaagtggaaatcagtagaaaaattacagaatatgcttacctttgacctcttagaaaggtggatgagaaatttttcatactgttcaatggcaaagatgagattaggaattggcttggtttcccgaagagctctggcctacagggcaaagaagagaagacctaaatttggggttcaggggtggtaaagtgctctgaaactgcctatagcagaactgcttgggctttgagggaaagagagtctaacttccaataaatgcagtt

SEQ ID NO: 57554 - DNA, 1269 bp, Bovine  19866880941921
  misc_feature (1)..(1): n is a, c, g, or t
natacacaagtatatacttcatgaattgtttgagcaatgacattatatatcattatatatcatggagcctctggaaaactctactatatacttgggagagaattaacatgaacaaaacatatgaagtcatatattattaggaaaacagttttcaccttactgacccacttaaaggggtccctggatcacgtttgaagaacctctggcctagtggctcagctggtaaagaatctacttgcaccacaggatatggtctgcaatgcaggagactgggattcaatccctaggtcaggaagatcccctgcagaaggaaatggcaacccactctagtattcttgcctgggaagccccatggacagaagagcctggtgggctacagtccaggggattgcaaagagtcagtcacgactgagtaactaaaccatcaccaactggtctaaagtagtgttaaccttcttgccagtgattggcttaggcatagttatgtgacacaagtgaaacatgaagagaattctgctgcgtagtttctgggaaggtttcctagtccttaagagagaaatgcaagagataacctcttcttccactggtcattgttgggattgaatgtaatgcctgaaactattgcagacatttcatgcctttgaatttgctgattcatgtctaactttcatactccatgtctaatatgtcagaaaataccattagctctactgttaaaatacatccagcatctgaccttcttctaccacctccacgctcccctctcaagtccaagccatcatcatttctcacttggattattatcagtttcctaattttcctgttctcattgttccccagggcaaccaggtaagtcttttttatttttccttcagggtaaatcttttaaaaagaaatccaggtcatgtcactcttctgttcaaaactttttggtagctgtccttctcttaggataaaagcctagtccttactatgaccacaggatgttcctgatctggctcccagatacatcttctgatgcttgtccctcccttactcattccatcttccctacttgccttctgcccatcaaacaagccaagcatgctcttgtcttaaaacctttgcctaatgctcttctagatatctgcatggcttagttctaactaattctcccttgattattctaggcatttgctcagagatgcattccaattaccctcagtcccacctgggaacccttacccctttattcctgctttatttattttttttccatagcattaccat

SEQ ID NO: 57555 - DNA, 1636 bp, Bovine  19866880948756
  misc_feature (1)..(1): n is a, c, g, or t
ntgggccagctgtttgctgcctggaagttccgtggcctggacccgctgcgatgctggctggctggcagacggcagtgcccgctaccctgtggctcacccacgttccaactgtggggccctggagcctggggtccgaagctttggcttccccgacccacacagccgccagtacgggcgtctactgctaccggccgcgctagctccaggtcgctctataccctgccccctcccctcacgggcggtattaattattgagtagttcgttgtccctcgcaggttggggcaattttcatcttgtttttatactttccaacttaaaattatttttaaatattattttttgggtaaatcccacagatcccaaatcgtccctttactcgggtccctttgccaaggctctcaccctccctgaatcctcctgcctctctcctctgggacgtttgaagtccttgggctcatgagcgctctctgccatcgcggagtccatcccctctcccagccctggggaggttgttcccagagccggtagtggcagtggcacgaggagccagggctgcgacccgtcctccgcctccgcctggggacgagggggcagccaggtggctctggagctggggttcgggcctggtggtctcctgccccttgtacttctttggggagcagctggcccgtgtcagcatggcggaggagcctgggcaggaggtgggtccctgggcttccacgtgatgtcccagggtagggagagagatcccgccccatgttttccttctctcttggctccaaagagtctgtgttttgttctcatttttctctgtttggcgagtggccctcaggtctgtgtactattttggacaataaatggtgctgtgacccctccctccatcctgagccctcctctgtgtcacacttttttttttaacatttgcttctttacttatctggctgcaccaggtcttagttgtttcatgcgggattttcgatctgcattgcaacaggcaaacctttagttgggcatgtgggatctagttccttgaccagggatcaaacccaggctccctgtaatgggagtgtggagtcttagccactgaaccaccagggaagtctctgtgtctcagtctttatctcattcagtcttagggtccagctctctgcatgggggacggttctgtcctagactgaagaggtcgcctgggtctgtccactggcgtgggcagggaacgccatgggctgcaccttcaggctgccttggtcttgcctggcctgcctgtgtatatcctgcctcagggactgagctagtggctggaggccctggcgtgttctcccatcatcccactccgggctgtgtgtctgtgtggatccagcataagagtgggaggctggaggaggctattcctcaccctggtccccacccccatgtcagcctcaagatctcctgcttctgcacaggcatacctctgccacccacagttgatcctttagcaaggtgcttctccaagtgtggccggcaccaccagcttcacctgggaatgtgtttgagatgcaactttctgcacccgacccccagacccgctgagtcgaaaaccctggagtggggtctctcacaagtcctcctgatgcagactcaaggttaaaacca

SEQ ID NO: 57556 - DNA, 670 bp, Bovine  19866881003976
  misc_feature (1)..(1): n is a, c, g, or t
nccaagcatttaaagtacaaacacaggaaaagaagttcccttctgtctgcaaagaatcaaggtctgtaagaaatgagatggctagattcatagagacccagtggaaagaaactggaggttttggcctagggaattttggactgcgagggtcccagactcaccctttcaatcactgggaagctgtgaagagagaacaggaccagtggggctgggtgggggaaaagcaagaaaagggtctggagcagctcccctggatcctaagactcctgcacctggacaagaggggccatgctccaggtccccactccctgaccttccagcatttctgtgcggggctgtgcagacctggaaactctgacccataaagtcatctggaggtccagcccagcaggcgtccagcccctcatcctccatgccagggcctgcagggggcgaccaggacacacccagggcctcggccagcagctgctctcactccagtttctcctttgctgccactgccaggctcccctctgccagccgggtcctgcttgccaccactgcagggcaggggcagcagaggagagcctgggggcctgggggcaggggtgggttctgtgaggacctgagcagagaggctctacctgctccgagagcagaggcccacactccagtgtccgcagggggtaaa

SEQ ID NO: 57557 - DNA, 1786 bp, Bovine  19866881072922
  misc_feature (1)..(1): n is a, c, g, or t
natctcccagagtttgctcaaactcacatccattgagttggtgatgccatccaaccatctcatcctctgtcatccccttctcctgcctccaatctttcccagcatcagggtttttttccaatgagtcggctctttccatcagatgaccaaagtattggagtttccactgcagcatcagtccttccaatgaatattcagggctgatttcctttaggaaattggtttgatctccttgctgtccaagggactctcaagagtcttctccaacaccacaatgaatacctaatttacaataacccaacattctttgtaattttcattttagctctgggaatccccagaccaccttggctactggacagtatgtgaactgctctaccatgtgggaggcaccgtcttgccatttgaaagtttcagccaggattttaccaaagctggggaaacactgctcagtggtgaaagaaagctgtcaagtaaacctcacctctcttcatggatttcaactctgccaactgattctactttaaactgtttgctctataattctcctgagtatgaagcctcatttccacggatagaaggaacattatttttccctgtcgaaggtaagcaaatactgtttggggcaggggtagtgtggggatggagtggttggtctggtgtcattcatttcttcaaggcaggccgatgaattctttagaatttagaatttctagcagcctaggccctccgttaatgcttgtaattaaaagatgtctaagccaaatcagagataccacaggaaaggactgaagtctggtacactgtaagcccatgcagaaaggacaactgagtgatttaaaagggttttccaactttttgcagagttgtcaggtgccgaagcgaatgagtggtaaggtttcactgtcctatagatgagattgatacattgaagaccctagaaaatcagtgattgactaagaagacataacaaattagtcagttgaagtagaaaatggtgtttattaccataaagagccagcatacaggaatcttcataaatttgctttatcatatgatttgccatatagtgaatcataatttctgaatcattgtatattcaagcaatattatatagagatataaataaactgtattttacatgatgggcaatttaaggaaatttcaagagtattatttaagcaggtttgtcttacatggtctttagaatttaaccacataagataggatgtgctgtattttatggatttaaaaagcagcagatttcctgtgtgtgtattgcttgaatacttatttctaagtcataattattgagttctgacatcaattacacccttataattcctgtcacatacagcttttccttatagaatttactatgatagcctgttgatgatagagtgggggttgaagtgtaaactaagtgataatactggtacctcagctggcagtgtaatttttttcttcttaaccttgcatctctttttaggagctacttcttttattagaatttcaatatcctatattcctcacaggtaaagagcttcaggaaacatggacagtcacgctagagcccttggccatgcatcagagacattttcagaaaccagtcagaatttttctaaaaggcacagtgacccagtggtccctcccaacaagtggaactttgggcaccgatagctggatgctgcaaagtccagatggagacagatcaactcagaggatgttatttcagcacctggtaaacaggctgactgcgaagagttacatcggtaggtatcttcca

SEQ ID NO: 57558 - DNA, 1135 bp, Bovine  19866881128962
  misc_feature (1)..(1): n is a, c, g, or t
nttcttatttatctatttttggttgtccgcgtcttcgttgctgtgcttgggcttttctctatgctcgggtttttctctagttgccaggagcgggggctactcgtcagctgtggtgcacaggcctcactgcgggtggcttctcttgttgccaagcacgggctctagagcacaggctcaagagttgtggcgccagagcttagttgttgcgtggcatatgggatcttcccagatcagtgactgaacctgtgtctcctgcagtggcagatggattctttaccactgagccaccagggaagccgcgtgctgggtccttgttgcagtgcgcatgcgtctctagttatggtgcttgggcttagctgacccacagcacgtgggatcttagttcccgcaccagggatcaaacctgcatctcctgcaatggaaagcagagtcctaaccactagtccaccaaggaagtcccagatcatgtttcttaaagggtttatagagagtgcaagactctcagagaagggggacacggagtggtagaggagctgagactaggaggtccataagcagaagccatggaaggaacagaagcagatccttcaagcacagaggagcatggagccaggcattggaagcagcaacagaggctgagactccagggcaaggcagaagccagggcaaaatgcctggaccaagatgcacttgagggcatcccttggagcgaggccagcacctccactagccttgaaggctgagcagaagcttaccccacttctcccacggagccgccagagccaccaccatcctgaataatctaccagcctcctagacacctggcatcctcacctttctggtgaaaccttaaaataacctcacctttgccaggtcagacacctgagctggtctcttctctgcctccctgcaacctgagggagcctaacacattactacacattttcttggggaaattttagaaactatagacaaggcaagataagaaaataaagatcgcttctgaccccaccactcagaaatgaccactgataatatttcagtattctttctcaaagtcttttattctacgcacatatttttacaaaatagggtaacacaacataacatgactttctctaaatagcttcaagca

SEQ ID NO: 57559 - DNA, 2140 bp, Bovine  19866881198685
  misc_feature (1)..(1): n is a, c, g, or t
nactgtaggttcggcccctcactatcgttttatggctgtaaaatgcaaaattcttgagccgtccttccctcagtctacagagactctgagagcaggcctgacaatctccaggtgatcctgatgcatgcccaagtttgagacctactgtctaacgtgtttaactattcccctgtggttggacattcaaggttttccagtttcttattattaaaacttgtgttacaacacatccctttacatgtgtttttgtgtcctatgagaacatttcttctctctcacaattttcttggttaatttttcacatttgcttttccagatgaattttttaaatatttatttttacttatttattcgactgctctgggtgttagtcgtagcatgcagactcttagttgtggcatataggatccagttgcccgaccagggatccaactcagggccccctgcattgggagtgtggagtcttagccactggaccgtcaagaagtcccccagatgaactttagaatctgtttctaaattccactctcaatggtattgcattgtatatacactttaacttaggaaggatcgacatcttggcagtattgagttttcccgtcaactattgaaattctataggattttaagtgtaattcacatacttatatgtaatttaggcatgctttgttatgatcccaaatataacaactgcaggaaatattactataatggtcttctttccctaaattttatgaaactaagaatataatcataaaggatcaagcgtatgatcatcctattcttgttgggatagtctcatttcttatgttggcctctccatttctttcattgggtccgtgtgtgtgtggctgtgctgggtcttcactgttgtgtgtgggctttctctagttgcagcgagtggggtctcctttctagttgagaaagtagacagatttctatgggcaggtttctcacagcagtgacttctcttagtggtgggtctagctgctctgtggcacatgggatcttcccagaccagggatcgagcccgtgtcccgtgcattggcaggcagattcttaaccactggaccactggggaagtctcagcctctcaattgtgattcagtcaagcccatgtcttttgggggagcaaaggaaacttttttagaaatatcccctgtggacttcgccagtggtccagtggttaagactctgagcttccacttcctgggggagaaccgtgcggcacagccgaaaaaaaaaaagagaaatccttctcaatagacttctccccatttaaagcatgctccccaaccctagttcttccagactcttctcatcaaaaagtgcagtcagcacgctccccttgaatttgaccttggtgactgcttgaccaatttttggttgttgttcagtcgccaagttgtgtccgactctttgccacactatggactgcagcatggcaggcttccctgtccctcactgtctcctggagtttgcccaagttcatgtccattgaatcagtgatgccatccaaccagctcatcctttgtcaccctaaataccttagcatatgctaaataacaccgacagacaacatgacagttccaagaccagccatcaatggcaaaaatgtgagtggttgtttcagttcaaggaatccccacctctcctcccagatagttagaacattcctcccactcattaccctataaaattgcacagcctgtaactaccaccccattttaggcctctcttgccttctgagtttggcccacattctggactgtgcatctctctaaataaacttgttttcactttattatagtttgctcttgaattttttgttgcatgaagccaccttggcaacatgtccaagatactcactagagacctgagatagaccatcctcttgtgccccattttttccacaacagggggaaggttctgagaagagttttgcaggtaagatggggccaaagcatgttttgctggaagggaaggaaggctcactttatccattatcttcattcttactgatgttttcaatttctgcctttctcctgacatttcattttactctgtaattatgttattatctttcactcccattaatacattaagtttcttgattctgccaccgtttcaaactactagt

SEQ ID NO: 57560 - DNA, 815 bp, Bovine  19866881239892
  misc_feature (1)..(1): n is a, c, g, or t
ncattgcaggtggattctttaccagttgagccactagggaagcccaagaatgctggagtgggtagcctatcccttctccagtggatctttcccggcccagaaatcaaactggggtcttctgcattgcaggtggattctttaccagctgagctaccaaggaatccctaggcagtgaggggatgagctaagtggggaaggatccagaaggcagctatttttacccacaatagccttgttgtcttgcctgaaggcagcattaggagacctgcttcaggtcaagagcaacctcagtttttccaggggagtgggtgtccaagaagtgcccacagagttgcctccaggaaaatgagtcatttattgggaaactagcaaagaaaagaacttacttgccaagactatagagacattttacccaggaaccggaagtatatctttttctgttgctgccctgatgttgtcactggcaaggcaactcagctgcagaagccaaaaataggattcctgacccttaaaaagccttttgggcaacagactatggcccagaatggtcaacagataaaccaggatagttaacacaccaagggtattcctctgtgttttgaaaggtcaaagaaaactttctcccttttaaaatcctcaatcccacaccccttctaagtcagcagaacccattgcctacttcctgaatgagcagctacagagcctctgctgggtcaagaagcatctattaagtgctctgcatataatagacaaagtaattaaacatataagcatttgtacagtaaaggaaagcataaacaaaacaaaaaagacag

SEQ ID NO: 57561 - DNA, 1153 bp, Bovine  19866881267677
  misc_feature (1)..(1): n is a, c, g, or t
ncaggtggtcaggactgtgccagcttgctctagcaatagtacacattttactgaggctggtggtggatgcccggtctgggtacagagcagtattcctcttcctgaatgccctggcacatgggcattgccggtgctggcctggagtctcaaatgagactgcggaggtgtgggtggctacaggggcgaaaggagccccgctgaacacggaaggggagcctgagggaggtgctggagaggaaagaaaatttccatttggcttttccagcttcttgccacgtccctagagccccccaacttggcggctctcctagtgcctgatccctagtcttccttcatgaatttttcatttcaggcaaagagcccttatctctcaccggggctgctatgggagcctgctttcccagcatctggagacagagcagatgaagaattgcattaaggcagaattatctgtctctggagagaggaagggcactctgtgctcctggagggacagctcctatcccgtattactgtaggtttccatccttcagaagaaggctgggctactgttttttttttgggggggggaggctactgttttattgagatactatcgagggcacagagaagcccaccaggctcctctgtccatgggattttcccaggcaaggatactggagtggattgccatttccttttccaggggatattcttgacccagggatcaaactcccatctcctgcactgcatgtggattctctgccactgagccgccagcgaagccctccttgcacgctttgtacggtaacacatttgttgctgtctctgggtttccctcctcctggaattccctcctctcatctcctcatactatactctatctgtcctttaaggcccatctcaaatgccagtcctctttgatgctttccctgacttcccaggccaagagtgtggcttctttccctgaatttatcagatttgccctcttcacccctgctttatcagccatccctcctgcccaagctagttgcttcacaaatcatgattagaatgatggtggaatccagttttatgtgataggaaagtggctccgtgatcaacttcaggagagattattctatcatcagctaatttgtgtacctttttccccggagatttaataaactcaatt

SEQ ID NO: 57562 - DNA, 720 bp, Bovine  19866881387020
  misc_feature (1)..(1): n is a, c, g, or t
ntgccttactttcttacctgaaaacatgaaaaggtaaccgtaatcgcctcctgggcttgttgtggagatgaaacatagtccttgcaagccagcaccgtggtccatggcacaggtaagtcctcagagagtcagccggtgcgcctgtaggctcgcagattctgccgccagcacacatgtgtacagaggccatcagacacacgaacctgggcacacctttgtgtctgggcgcccaaatccaaagaggacatgcaggtgggctgaaggaacccatggacacaagcacatgtgcacatagaaaatgccccgagtgctggtgagagtggcaggtatacagacagcacaggggtggctgtcccaagcccgggctcaggctggagtcctctgtagtctcctggctggctgagatgcatgggagccatctctggctcccaggcggcccaccacgcacagatcaacttgggccctaggtcagctcctccaggacgctactctgggagaggactgagttcctgcctgctctgcctgccctgcccaggtgcacatccagaatgcgacgctcgccggaggagtgggcctgggcaccgttgccgagctgatggttcttcctttcggctccctcatcatcggcttcgtctgcggcatcgtctccaccctgggttttgtgtacctgacggtgagagctccagggccagggactgggggggcggggtggtttctagg

SEQ ID NO: 57563 - DNA, 1075 bp, Bovine  19866881400661
  misc_feature (1)..(1): n is a, c, g, or t
ntcctggtagctgcttgtgtccctggagcttggtttaggactggggaagcggctgaagacaatcagggcaaagggagtgggggcaagagagacccggccggtgcttctcagcaccatggccagggcccagctgcaccactgccgcctgcatctccctgcccagcactcaagtcagccccagtgtgtgcttccccataaggcctgtgctggggccctggcgccaaggcttggcgtgggacaaagtatgtagatgctagacccagtccactgtgcagagaagagagtgatccgggccagggcagatggggttctccccagtcgggcttggaatcggcctgctcaacagcctgccacctcagttgtccgtgtcaggcccacacaatgcacctccaccggaagggctccaacctggaccatttcctgggccccagtgtaagctgtgcgtggaggccggccacgagcctgaggagaacacggtcagccctgaccccgcagagtggtctccttcccaatgcctgtgccctcaaggtcggatttttctgtagtctccttcctaggagcagagctcaaagggccagctgcaagtgaagtgtaggggtcgctcattctgggagcatcccgctcaggcagggcctgggacctttgctggctggtttcatctgctccccgccaagggactcagtttctcagaaagggagtggatacgtggccctgaagacagtggcctctcacatctgaactcagcctaaatcaggcttttaattcttcctcccagagcccctactcgccctcagcaggccagtcgggcctccggcaccgccgctgtgttaccgtgagcctcgctgaggagccattttgtgcagcatcctggttaaatcacactccgaggggctcctttctcgctctcttcccccacgctccctctctctccttcctctcccgcaggtgagcagtgcttctccaccccttcctgccttctgcagccccacccttccaccctggggggtggcccagaggactagggctctggaggccacccacacacacacaccaagaaggggagatggtgcgggtt

SEQ ID NO: 57564 - DNA, 726 bp, Bovine  19866881410569
  misc_feature (1)..(1): n is a, c, g, or t
ntctcttcaaaaggaaggagtagaaccagatgaaaacaaaattcctatttgtgtagctctacagttaatcaaatgcttgtgagctaaatattaatacattacattggttaatcctcaaacaagtcacaaagtgcaccggtgttgacagtagagacctatatggaatttattgtttacagagtgcgtcctcagacattacctcactcggtactcatgacagttctgtgagttattactaatgccagggaggaggaggctgaggcctggagaccccccctgggccaggcctgggaagggctctaggaatacagagaaacaagccacctgtctgtcttagagagctttcacagagctggatggatcctgatccctttggctccactgacagcagctctgcacatcctctcccatcaaagaggggcttccggaaatatgcattcccctcacaggctctttggtggcaaagtcaagatttctctcgcaattttagggtaacatccagctatgtagaggcaataaatagagtgatgggtgacattaatgacagaccaagtgaaagggactgagttttctaaattgggaaaaaagtatgcttgactatcatctccttggcactttccatcatcttactatttagaagggcacattttttaatgtcattgacaagagtgagcgagcactttatttacatgatcagaatagaaacgggaattgcagcttggggta

SEQ ID NO: 57565 - DNA, 1347 bp, Bovine  19866881424069
  misc_feature (1)..(1): n is a, c, g, or t
ntagtacattaagcaataaccattttatcatatctcataattttttgagttaggaaatccagcagctgaacgtaggctggacgatttatctactctacatagtgtcaattgaagtggcaggtgggctgttctggagggtcccaggaactcacacacttcttgccctttctgtcaagtctggtgccttggcagaaagggctagaaggctgagctcagttggaaccatggacgggagtacttaacacatgcctctccaccacagctgtctcagggtagttaaattgcttatatgaagttcaagactcccagaaaaattgttccaagagacagaaagtgaagggcctgaagcctggcccctgaagctgctacagcatctcccatgtggtaggatagccacagagcatgcccaagttcaaggggaggggacctagacctcaccaagtgccagaggagaatcaaatcattgttaccgttttcacactgtgcttagtcactcagttgtgtccaactctttgtgacccccatggacttaccccaccagggctcctctgtccatggggattttccaggcaagaatattgaagtgggttgccatgccctcctccaggggatcttccccaaccccatggatcaaacccaggtctcctgcattgcaggcagaatctttaccatctgagccatgaaggaagcccaaagtaacacaataggaataaggaaatcaactctattttttagaaaaagatacagatggagagagaataagcaaaagagagagaagaggaagaggagaaaatataaaatgagcattagcatccatgaaaattatcttcaccatgtcccattctgattccagcatgcagatgagaaaactgagggcttgtgtgagttcacctggagtcagtttcctgactccccttttccacgccttcccaccatgtctatttagaatatgtgggaaattagcagctgcagttggagtcagtctggccagatgtgtccttgatgtgggatccctgccactttccctattctgggtttaaaatctctctttccggtattcttgcctggagaattccatggacagaggaacctgggaggctacagtccacggggttgcaaagagtcagaaacaactgtgcgactaacacactaactgtggcgggggtcaccccgtgaagaatgaatgagcacttcctgttcaattagagactgaagatcacctgcctcggccatgtagacaggattcccagcagcaaagtcgtgattgtacagccccaaagccatccgtcagttctgaaggaaccaaaaacaagtcatttattcaccatgctgtgggaaaaagcaaac

SEQ ID NO: 57566 - DNA, 910 bp, Bovine  19866881730177
  misc_feature (1)..(1): n is a, c, g, or t
nttatatcagctccacctcagatcatcaggcattcggtcccacaggttggggacccctgctttaaaacatttctaggttacttataatacctgataataccacgtaaatgctatgtaaatagttgcttatgtacggccagtttaagttttgatttttagaactctggaatttttttcccaaatattttcgatctgtgtttggttgaatctgcaggtgtagaacccacaaatacagaggatgggctgtatacttacatttctgtctgtctctctctcttaatgccttggcacccacttaagtaaccctcccagctcacattttctccaaactttgttgcatctgaaatgaccaagttctcttacctctctgtccacaggctgcacctgggaatttggagccatggtaaactacatcaagaagacatatcccctgacccagctggtggttgtgggcttcagcttgggcggtaacatcgtgtgtaaatacttgggggagacccagggccaaccaagaaaaggttctgtgctgcgtcagcgtgtgccagggctacagcgcactgaggtgagtgatcctggccacgtgctcccacttcctgctgccactggtcctccagttagctttcatttattgagatgtccccagcacaccagacactggcccgtgaagacctggggaaatgctagggcagactaagcagaagtgtctgggtcttgattttaccttgctttgcttccacatcatatactggagtggtcctgtcagaccccttcaacctgggatatgcagctgtattttgggggtcagatctgtaatggagtaagccaaagccccgcccctttaatagctgctgtttccctttggagtctctgagattacttaaattcttcatgctccaggagttttgtagaa

SEQ ID NO: 57567 - DNA, 1325 bp, Bovine  19866881776568
  misc_feature (1)..(1): n is a, c, g, or t
ntgcttggattgaataacttgcagctcctaaagcacccacacaattagctgtaactgctcctcagaatccgcctgctgatgcaggagacttaggtttgatccctgggccaggaagatcccctggagaaggaaatggcaacccactccagtattcttgcctgggaaatgccatggacagagaagcctgccaggctacaatctatagggtcataaaacagtcggacacaactgagcgactaaacaacagtatttcatttagcataatgtcctcaaggtttgtctttgtcacaacatgtgtcatgatttccttactttttaagactgaataatattccaccaaatacatgtcaacatctggtttattcattcatctgttgatggacacttttgttgcttccaccttttggctgttgtgaataaagctgtcatgaacatgggtgtccttaaatgatattttaaaaagaaaaaagaactaacacaataccctgtctaagccctttacctatatcatcttacttagtcctgacttcaccagcttctcaaggggccaccagctggtatcatccctcccgggcacactgggcccaagtgccctctccattcagaagtctcctctgtgtttctgaatgggtctgcctcccttgatacctgtctctacgtcaccaagaacattttaccttaatcccacagaacatgttggccatccctctggactgaagtttgtctttccttctccccgctggcaaggcgatcctgtaaacaacatccacttggtacttttcttaacaccatgaatcactgtacacgtgggtgtagcatcttgttttgtagcctaagatgctgatccctaagagtattgctcttgcttttgttttcctctgtgtgcgaaccgaggtgctcaggcacaccttgaatatatgttttgatttcagtgagtatgggaggggcttctcagctcccgcctctgaaggaggaaggcacacgcgtttggtaaatggccccttccctcatgggcgctacttatgctgtgtttcctcacactgaggggcctctgggagcttctcttgttggtcagttgctaagtcatgttcgactctttgcggccccatgaactgcagcacaccaggcttccctgtcctttactatcttcctggagcttgctcaaactcgtgtccattgagtctatgatgccatccaaccatctcatcctctgttgcccccttctcctcttgctctccatctttcccagcatcagggtcttttccaatgagtcagctctttgcatcaggtatgcaaagtgttagagcttcagcttcagcatcagt

SEQ ID NO: 57568 - DNA, 906 bp, Bovine  19866881796394
  misc_feature (1)..(1): n is a, c, g, or t
ncctccgggcgccgcctgaggacagagtagtcccgacagcagcacagacatggagcattacatggaggaccagtactggccggcggacccggcccatggcaccatcggagacccgggggcagcgccgggcataagggattgagggaggataatctcccctggggaacggggacaggatatcgcctggggcaggatgcctggctgcccccagggtctgaagatttgggaccacctgcccacagcatatccctcccctctctagggctgttgtcagcccttcctcccccaactcctgtggttttgcaaatggcactttatagacgccgtgaaaatggcaggtgggctagaacccagcagaagtagggaatgcaccaacggatggcatcaagccacccccaccctcatgctgtgctctaaagggatcagcctccttgggggtgctgggtggggggtgtcagtattccagagttcccttatctccacccagtgacctggggcaaagttttcttccctgttgtcaccagctacctcttcctccagtcactttctagagaataagtatgccctgaggctatacagttaaggccactccaaggccattttgtccctttctgaactagaactctggcagcaatggaacagcagagacctcagaccatggggagctgggtcctcacctgcttgcggggaggagtcaccaggtgctcttctgggaggagggaaggcagataagctctgggtggaggctggcatatgtatcttgacccaaggcaggtattcctcctgcccacccagcgctagtccctcaagcagaagtctgagaaacagtagagcagtttaaattctgggacccctctgcagaattgcccactgggatctttatttattgagagcaagaccacaggt

SEQ ID NO: 57569 - DNA, 1337 bp, Bovine  19866880099755
  misc_feature (1)..(1): n is a, c, g, or t
nttagcttctagtgtttgatttttaaaccacatacagcagaactgacttttgcgtgggcgtgtgtaccagtctgggaattttcacacgtgtgtggagtcatgtaactgtgtacgtgggatagttccaccacccaacagcccccttatgctgcgcttcccctccctcctcccctgggaattgctgaactttatccttttgctccaaaattactgcagatggtgactgcagccatgaaattaaaagacccttgctccttggaaggaaagttatgaccaacctagatagcatattaaaaagcagagacattactttgccaacaaaggtccgtctagtcaaggctatggttttttccagtggtcatgtatggatgtgagagttggactataaagaaagctgagcgccaaagaattgatgcttttgaactgtggtattggagaagactcttgagagtcccttggactgcaaggagatccaaccagtccatcctaaacgagatcagtcctgggtgttcattgcagggactgatgttgaagctgaaactccaatcctttggccacctgatgcgaagaactgactcatttgaaaagaccctgatgctgggaaagattgggggcaggaggagaaggggatgagagaggatgagatggttggatggcatcaccgattcgatggatatgagttgaataaactccaggagttggtgatggacagggaggcctgttgtgctgcagtccatggggttgcaaagagtcagacacgactgagcgactgaactgaactgacatatacacactactctatataaaacagataactaacaaggacctactgtatagcacaagaaactctacttaatattctgtggtgacctatatgggaaaagaatctaaaaacgagtgaatatatgtgtatatacaactgattcacttctctgtatacttgaaatgaacacaacattgtaaataaactatactctgataagaatttttaaataagagaatgaggagttgaggcataataatttaagttaattaatactaattacataaactgtgttgccagaagaagccatgtaaattaatggtataaataaggtaaaggggaatggattagattttcagaaataattcttagaaatgctggttaaaaaaaagtataaaagaaatagactcatgggaacagaactgtcttttttttatgatattcatatatgccaactatctaaaggacagacatcagaaaatgatggaccttaaacaacagaggaagctgaaacttctctttttggcagcctcaagagaagatgctgtctgactaaatgtgtcatatccgggac

SEQ ID NO: 57570 - DNA, 1572 bp, Bovine  19866880351067
  misc_feature (1)..(1): n is a, c, g, or t
natttgattttgcaaatactgcttatctaatgcttgaaatacaataattaatttaaaatgtacttgaattattacataattgtaaacagatcaagatctttatttactatatataggaaaactagaggtatattttgatagtgtgttaggaactaaaatactattttgtacttatggttttgaataggaacatgggtagatatagcatgagctcaaagttttaaatcaagttcaagcaaaatgtcaaaattaatttgagccttaaatacttaggtatgggtcttgaaatgagaggaaatattcaattaaggtgaataaaattgaaaagaacttctagtttcacacaatttccaaagtgtctgtactaagaaagcagaaaaatgtactgcataatcatccatatgtgttacacatgtttaaaaaaagaaaaagactgattggctatccaactacaagagacactatcttaaaagactgtctcctctcatagccactcagatatttcctatatttagatacaggcaataggagaatggatactcaattaatttgattgaaaacctgatacagttgaattttatgacatgtgaattatatctcaataaaactgttaaacataaataaataaataaacattaattcaatggcctgcctcttgagaaatctgtatgcaggtcatgaagcaacagttagaactggacatggaacgacagaccagttccaaatagggaaaggagtacgtcaaggctgtatattgtcaccctgcttatttaacttatatgctgagtacatcatgagaaatgctgggctggaagaagcacaagctggaatcaagactgccgggagaaatatcaataacctcagatatgcagatgacactatcgttatggcagaaagtgaagatgaactaaagagcctcttgatgaaagtgaaagaggagagtgaaaacgctggcttaaagctcaacattcaaaaaatgaagatcatggcatctggtcccatcacttcatggcaaatagatggggaaacagtggaaacagtgacagactttatttttgggggcttcaaaatcactgcagattgcgcctacagccatgaaattaaaagacgcttgctcctttggaagaaaagttatgaccaacctagacagcatattaaaacgcagagacattactttgtcaacaaaggtccatctagtcaaggctatggtttttacagtggtcatgtatggatgtgagagttggactgtgaagaaagctgagtgctgaagaattgatgcttttgaactgtggtgttggagaagactcttgagagtcccttggcctgtgaccagtccatcctaaaagagatcagtcctgggtgttcattggaaggcctgttgttgaagctgaaactccaatactttggtcacctcatgtgaagagctgactcattggaaaagatcctgatgctgggaaaggttgagggcaggaggagaaggggatgacagaggatgagatggttggatggcatcactgacttgatggacatgggtttgggtggactctgggagttggtgatggacagggaggc

SEQ ID NO: 57571 - DNA, 4528 bp, Bovine  19866880353855
  misc_feature (1)..(1): n is a, c, g, or t
ntataaatatagttgtattttatcttctaattctatggaaggaggtacaattattactcctgatttatacttgagagaactgaggggaaaaataatgaagttacccaaattcatgaagttagtgtcaggttagtatttgaatctaaattagtatggcttcagaggcccctggcttaaccactataccatagattcactcagtcagggggaaaaaaaatgatgaatgtaaacaaataaacaccctaaatatttacaccccagatgtgtgtacctgataactcccctgttaaaacatctggtgagagtttcactttcatactaatttccatgaaagaacaagagggatattatatatttccccaaatacagggtacctttgttgttatgagtagatggctaaatctcatttttgtcattgctattataattttaatattcatgtatcatttcattttcctacattgtactgaccatgtcactacattacgaaaaggagggcatggaagcctcttagcccacatttttgaaagtactttgcatgacttctactctaacatcatattatcctgtgttggattgtatttgtcaatatcctgttatcacccatcatatcatactgcctaatattgtattgaaattaaatcttaccctttaggagtcctgtgcaacattaaaaaaaaaatgggtcttcaacagtcttcctcttagatataattgaaaaagaggcaggcatcaaaacataccgccggggagcgatcctgaatcatccaaatgatgagcatacagtgaacatcttgcaccaaaaagatgacaattttctgtagcagtgttgtcaaaatgaaaatgtctagctgtcttggtgagagacctggcaggaagatacacacacacacacacacacacacatcccttgtagactcatccagctgatttttgttatcttatgcttgaagtgaagacttcagggtctatgaaattcttaagccatcagctggattctacagaaggctcctcactgaataaggagagtgttaggaaagcagtgagggagagaggtaacactaccagagttggtgctcagtgtacacttgttggatgagtgaaccaagacaagcacccagaacataagcaacattaaatacaactatgatccaccactgtgtttcttatcaactagatatcacaagttaaatgtagtccaaactcaccagtgtctgtactgactcctagtcccacttgtaagggaccatcaaatagatacaccttcagctggctctcttaaagtctaagtgcacaagaaatacttctttccaaaagcacagcagcagaggatcaatgcatttgctcacctgactcatgcaagtctactgtgtatgcaaattctgttttgggatctgggaaaagtcctgttttggatctgggaaaagtccaggcatccagaataccccagccccatcttccactcaccttatctgctctgccaaatatagggtttatgtgtcagataaatgctagagagtactgactttttgacccatgtatgaaaatctgaaaagccaagaaatctggcaaatacaaagcatcggcctgaaaaatccacactttcctctggcaccatttaagctgacaagtttatttgagacaggcacactcacatttgaagagcaggacttgtgctaaccattctcacatcaccagcaaagtgtgttctgagtccatattgcacagcatgcttgaagaagtgtggatttttccacatcatttggtgacattttgcacagtttcatttctgctctgtattgctagaccctacctttttttccctcgcaaatattccactaatgggattcccttgagtattcagattctttcctctgcttcagcatctatttgtactgcgagtgcacaaatctgtcatgatgtgcccctcagtcaaagtcaagcctccttgactgaaaggaaaatgatagaggtgctccgctgctgaggagagtcaggggaccgcgggccagcctatgaggggatgaagagatgcgttagaattccagggagaggtcaatgaggaagactccagggaacgatggtctagctggaggtgcccgttcctaacgcctcttcccaagtccaggtgaaaggcagcttttaagtggcaggtgaaaggcagcttttaagtgggagggggtgaagaagacaattgaaaccaaaattgttttgagctcaccatttttctagctatcagttctgaggtcacagtcactaaaactggaaacttaaaaatgacttcaaaaaggcaaacgctaactagatttcacagtggatttcattttacttggctttacagaaagaatgcaggtattaaatagactgtttcctgtatacaataaggttaattagtagtgagggatggaaaatcagtgtagacataactcttttcgacaggtatcaaaaataatcccctgatccctacagaccccagctgcattgaaagaggaacaatataaaagattctttaagcacaaaatttgcaaacattctccaggtgtccgcagcacccgcgcaataggccctgagcccctgtgcatgggctgctccgcaagcccttccgctgcagtaacttaaaggcgcagctactcaccgctgaattttgaggcgcagcataaaggctctgcttacaaagcggctgggatcgcaggcggagacaggagaacaaaaagaagaatatattgcggcctgaatgggacttcccctaagctccttatcaataaggttaataagggtctatgcaatttactgatcactaagatggaacaagcctccttgcgctccaaatctccacgttggcgccggtttttaatacttttcacagccaatcacataaaagcccctttgccccgcaccccagagaataaactctggttcaccattctggcctgcataaaatcgttggtccgttattatacttctacctgccctagttaagcagattaacagttatttcctagaattcgatcaatgaggttctttgtaattgaagctggagtactcagatatgtctttttttaaaaatgcatttctgaaaaacgaatttcttttttctctggtttaattttgttatcctcaatcgtatgcatgatacaaaaaaaaaaaaaaaaaatccaaacttctatctcctctataaaatacatgtcatatcaaaaaggtgacaagagggggggaaaagtaattagtgagttcacagagttcagtagaaaagttaaaatggagtaacacattactttttatgttaagatttcacaagacaaatcttgcctgtgttttaattgcatgtgaccctggcagtcctactctgaaatgaagtgccgtaaaattaaagatgacagacgctcaaaacaagtcttgtgatcttgattagactacaaagaccacactctctctctgctgcaactcagatatcatggactgttttatttggggaattgcttcattaatgccttctttgactagacatgtttattatttaaaaaaaatactgaatatggtgatatcttgcataactaaataattccctaaaagcaagttataaatgaagaatgtttaaatacccctaaaactaatttttatagatacttatacataaatatatatatatgtgtgtgtgtgtatggatgtgggtgcgtagatgtagatgtatatattatatatccatctttgatatgtgtataacctattctaacctacaattctctattatagcctgagaagcagagcagttaatctgtcatatttccttatatgttcccaggtcaatcgaatgtgtggaactatacattatcctataaaaaccatttctgagaaactctgtcagaattttaaactttctgagcattgtctaagtggaggatcagatttgactcacacctatatttcaaaatgatcaccagatcattcaacctaaattacataagccatggtataggtgcttttacacctcacttcttcctagttcaacgaaagcaggaaattcaggggcaagtcctcacagcattagactctgtcagctctgtgttccctcaggccagctcgagtcctgcttttgtctcaagtcctctgggtcagggcttcattcttactatgaggaggtcattagtgttcatctctaggactgcctaccttctaaatctctatgattcttttactttgtccgatttcaagaacactagtttaaattcatatattttgtattaggaaacaaaaggatttatgctggttatttgggtgttctatcaacagggatatatagattcagcctagaatcaaagattggtttctagagttcatttttttattgtgcatctgtaattccagaaaagtctgtatacacattctgcttccatttctttaaatttgaaatccatattgcaatttctctcctacctaacatcagggctcctgtgagaataaaatatgataacatacattaaagactcttttaaaaatatgtgaaacaaggcttcttaatcagtagtgt

SEQ ID NO: 57572 - DNA, 1228 bp, Bovine  19866880360022
  misc_feature (1)..(1): n is a, c, g, or t
ngtatggttcttagttgtctgccaagaaaaggctgacttgagcatctggaggatatttcctctgcaaaaaatgtataacttgaggccatttacacacctccttaccctcaattcaagccaatagaaacttctttccctatagtgtaaagtccaaaattccttttacaaagaaccaaggtgtggtttacacaatgaaaaaaatcccccaaatggaaaaataatattttgaaatctatctttatgataaacgattgatttacattttgtgactctaaacatcttcttagaagctcaaagggccttgcaaatggcaagactaaaaataaatttcctcctttcaggtctgttaccatttccaggtaaagaggcaaatgtgaagaagtcatagactgaggtcacgctccaagggagaatttgaatgcaaactttcgatgtgaggttcttgatgcaaatcttgacttttgctttaaaaatggcatctgggtggcaacacctaaccacctcttggaacctgccactaaatatgcttgatgacacagaaaaaaaagactaaaatgcttaaaataacagggactgaccggcaataaggtgacaaaaagttaaagagtaatttcctttaagacagatggaatttaattggaaaatgccagtggtgagaccacttgcactactgaactactgaaccagagactgtgcctatcttaaagcggatagaaatagccttctcttcctttcttcagccatctgatttcagaatcaaagactcagcccaaaggactaggcagcacccctttccatgcatacagatgaatactgtgaaggatttccttcctcacctgaattctccccttctaactatgtatggagatttctcttttgtctgcaataatatagagacagcaatttccacaaaataacgagggagattgagagcggaaggcagaatgatgatgatgatggtgataacaacaactgagagtggaaggcagataatggcacatatcaccgtaggaattgtagtcccatatgtaaaacatagaatcagtggagactggcaaaattctatttggaacacgttcttagaattctaatattgtatgtctttaatcttttagaatgtcaatgagctaagcaatgtggtgggagaaaaatcaccaggatagtagggtcataagacaataaatatgctagaaaagaattaatataagagctgtgtttatcaatttgt

SEQ ID NO: 57573 - DNA, 1664 bp, Bovine  19866880364397
  misc_feature (1)..(1): n is a, c, g, or t
nctgcagtcctctgggtctgtggttggttgaattccacattgagaggaacctactatgaattatacatggattaaccccctcttcctctcgttgttcacgggtcaactgcactttgcagatggctgaaatttcatcatcacctgttgctcctttgtcatatataggtcctcccgggagggggtaacacattgtgccctgcagacatttactctaaacagtttgaaggagtttatttgatattttaaatttagttcttgcaagtaaagtttagaaacaaagcaggaaaaggaacattgaacaagagggataataaacagaaaccaaggtattctttatgtcattcagttctactaagatcaattgaagaactattatatgaaatacataatattatgtacctagttttaggagtttaagttataatctctctctacagtgattcaggctgtttgttgactttgaatgctaattaatctagagacttagagtcccagataaggtaggcatatatgctggatagggatgcaagggagaattaattaactctcaggctaccttactcttatttgaatgcactatttacaaaccattaaattactaacttaagagatggtgaggttgcagaatgtggctttgagtagtttgcaaagaatactgtgtactgtaaggtctgcctcattagacaaaatatttgtatcattggaatgtctccttgaaaaaccatttgataaagagataatagtgacaaacaaggccactagatagataaaaggcatagtgcttgctccaatcagggaactttgagctatgcttcttatcttctttagtggaaacttttgtgtcagatgatatgggccagcctgtgcaaaactatggagaatagcagaccttctagaaattatccatccttgtttgcataatgcctttactttactcaacagactcattcctaaataccttcatgatattaaaatcccagtctattattatcagactgactctttttcttataatagtgagtagctagtgatatgccccttgtaatatttaaaaatagtgatacagctctcattaccgcatctattagccccagatttactcagccctggtctaaactgggtttctggacttttaaaaatttatcagtaacaatctctaaactctatctagagatgacttcataaatcaccaatatatgtcttagactgttggcaaatcacaagctgcttaagaaatatatgacaactagaaaaaaaccttctgcaataaacaaatagaagaaaacgtacttttaactaatgctatttctagtaaacttctgtgttcatgtggaactttggagatgagagaagttaaaatactaaatatttcaattgatacatctttatgaattttgttgatttggattttaaaggacagattctaatcttgcctttccctcatatttcctaataccatttaaaaaaagcatgttactgcagggtactttaattgatacaaaatgaatattaaaatattaaagatatctaacatcagtactaaggatttccatttctagccctctaatcctctatggaaatttctcttttgtctccgaactgtttgcctgatattcttttgcccctggattttgtatttcttttaagttgatttccctcactga

SEQ ID NO: 57574 - DNA, 1789 bp, Bovine  19866880428144
  misc_feature (1)..(1): n is a, c, g, or t
ntttatgggaaaatacttttttttttttttaaacaaacctggaccttatagaaagaaaatatttcatacatgcctataaatatgctggatatatgaaatatttaccttctatcaggaaatgcatagctgtacaacatctatatctacactaacatatgctcctctctataagttattctttcagaatattaaataattatagttaattttttctatatataatatgatacttatgcatgtaaatgtatgtttttacatgtgaatggggttcatcatcaacacagacattataacttagaaagacaaaataaaaatattgagtgggtagccaaattctaatcatttataataaaaggggtagtaagtgccatctgtttaaatgtaaaaaaaaaaatactgataaaaatgcatacatgtctagtaaattgagaccacagaatagttcatataaaacaaaatatatataaaataacatattttattagagtgatattgacaaacatatactactttcataatgattatataagaaaaatctcatgagtatttttggtgatataccacaaatatttttaaacacatgtagtctacttggtgggtgtaacaaaattgctcagttttctctgctgtattttcatgaccctcatctcttagacgatacttcttgcagatcactcttacttgcatagaagttcgttcacttgagcaaatttcttgtagcttcactagtccgttgtattacctatatttcccaaactggtaaaatgctactgatactatacttgtatccgaataacttgagctcttcactttgggaccatcaccaactcctttcactaatttctttttctcttttggaaagtatttagcattcttatttatccttagtaaatgtcttattttcttctctttgtgaatctccttcagaattcattgcttaacaatgccctctatccctcaaaatgtcccttccttacaattccattttcttaaaaaaaaaatgatggaaaataataaacagcaaaatatgtagaagaatctttctttgccttaccttagaatttaagaaatgtcccttgatatgtaatatatgcagatcagtatttataaaaggagatgtaaccgcaaaaaaaaaaattcaaaagtaaattgcaaaacatagtgatatttatggcaaacaaatttttcatgattttgatagaaatttttactaaaagtggcatcgtaggatatttcacttcaccccaagaccttaaatgaagacatatcttatgatatttacattcatctaaattttgagggagggataatttcttagactttcaaacatgactgaagagatggatttagtgtgatttcttctatgtgataagaacagaaagaaaacattaacatttacttttaacaatacaaaaatctataaaatcacatttctattaatatcaaggattaatctaaaacattgtgagctgtaaccatttaaaaaacaacaaatccacaaaagatgtaagatacttcactaagagttaaagagactttcttagtggctcagacggttaagaatctgcctgcaacgcaggatatgtgtgttcaatccctgggtcgggaaggtcccctggagaagggaatggctacccagtctagtatccttgcctgggaaatcctatggacagaggagcctggagggctacagtccatggtgccgcaaagtctgatgtgactgagcgactaacactttcactttcaaacacattacaaagaagtagaagacagaagtaggattacagag

SEQ ID NO: 57575 - DNA, 1845 bp, Bovine  19866880461200
  misc_feature (1)..(1): n is a, c, g, or t
nactaagttgaatctgggggtctctagcccccttgggaaaatgtattaagtctcagatcaaatcagtatgtaccatgtcaaaccattaacttctcatattatgtattattggggaaaatcaaaatagttaaaatgggtgacaatggcaaaataatgggtaacagagaaacacaacctcagccaagagggaaaatattccataactaatataaaaaaggattgtcattcttattctctcaaaatgtgtatttaacaattaacactgagaaagtgaaattaatgacattcaaaatactctgtattaatctgtatttattctatctaaacatgcacccatgccatttatttgtcatttgtcgagcttaaattttgagtttgtcttgtcaggaccgcagacttcatgattatttaatgtttgcctttattttgcacctgccactcactttgataggatagttggtttaaggtaagggtatattggagtttataaaacaaaatagagaaaatacagcttactgacttatatggggaaggaggtttataatcataactaggatttttattataatggctcttctagtaagttgagttaatcagctgagtgtttgcaaggatgggttatgtacatgtttctataataacaaaaatgaacagagatatagcagataaattgtcttaacaggttttgcttggttttagtgcaaaaacttactaattaatgcaagtgttgcaatcatttttatgacattccctgaagatggcactttaagggttatgccatatgctgattgacagcagccataattccatacaatgagactgtatcatattgtttgaagtgaggtgatattcatctcttgaaactgatcaaacatatcattgcatcaaacagtattacaatataatcacactgtatgtggagcctgccaaggctgatcatcatgttgtactcttttcccacggacttctctaatagaacttgtgacacaccactgcatccacattttcctttaagaactcagaatctacgaaagagaaaaatctgcataaaatcgtggtttggttatgctgtgtgagtgttcatttgtcgactgctttagaattacaaatttccttccacaaagatctccctaagtatacaaataaaaacctggtaagaccaagataaaaagagaagattccaaacagggcagaaaataattcaaatgccttttatttgtcttccataaacaagcaaacatggaagacatgtctttcgtaaaaaatactttttagtgtcagaaactcccaatggtgtttttcctaatgtactgttttgcaaagtcacttactatatgtactgactttggggctattgcagctgcaggtgaaaattatattagaacctattcttctactggtcgtagttgctgctgatcttggaaaagcaatgctaggatgggcagaaataaatgagggtgatttggcctattagtggcatttttagtggtatgaaattctataacagtagcttttagactgtgatataatttaggaattgccctttaattatccatccatccatctctccatccatccatccattcagtaacttgtaaaaaagccatggggatactttggggattatgttcagaatagtttacaaacaggatgctaggatgggagccatcgcctattcacactgacattcactaagagatgtgttaccgcttctggtcctccagtgctgacctgtgtgaatctctgcgatgtcgccatcctatctggaccttattaatttgcctgagccagccctagccctaacctgttaggtttagcgtccttagccttctgggcctgcagaaa

SEQ ID NO: 57576 - DNA, 2548 bp, Bovine  19866880484722
  misc_feature (1)..(1): n is a, c, g, or t
nataacctcagatatgcagatgacaccacccttatggcagaaagtgaagaagaactaaagagcctcttgatgaaagtgacagaggagagtgaaaaagttggcttaaagctcaacattcagaaaactaagatcatggcatcctgtcccatcacttcatggaaaatagatggggaaacagtggaaatagtggcagactttatttttttaggctccagaatcactgcagatggtgattgcagccttgaaattaagagacacttactccttgaaaggaaagttatgaccaatctagacaacatattaaaaaacagagacattagtttttcaacaaaggtctgtctaatcaaggctatggtttttccagtggtcatgtatggatgtgagagttggactataaagctgagtgcagaagaattgatgcttttgaactgtggtgttggagaagactcttgagagtcccttggactgcaaggagatccacccagtccttcctaaaggagatcagtcctgggtgttcattgcaaggactgatgttgcagttgaaactccaatactttggccacctgatgcgaagagctgactcatttgaaaagaccctgatgctgggaaagactgagggcaggaggagtaggggatgacagaggatgagatgattggatggcatcacctgactcagtggacatgggtttgggtgaactctgggagttggtgatggacagggaggcctggcgtgctgtggttcatggggtcgcaaagagtcggacacaactgagtgactgaatggaactgaataccactttgccaagtatgggtaaagaatacattttgtgccaaggactgggtaggatacccctgggggagactagagaagtgtgggcaaattgcttctgccaagtgtaagtaactaactgaatgaatggatgaatagaggaatgaatgagtaaatggtgagagatgctctcctaatgttgcttcatttgtaatcaagaatgttagaagcatttagggcttccctggtagatcaactggtaaagaatctacctgcaatgcaggagaccccggttcaattcctgggttgggaagatcccctggaaaagggataggtcaccctctccagtattcttgggcttccctggtggctcaaatggtaaaggttctgcctgcagtgtgggagacctgggttcgatccctgggttgggaagatcccctgaggaggacatggcaatctactccaatattcttgcctggagaatctccatggcagaggaccctggggggctctagtccatggggtcacaaagagtcgggcatgactgagcaactaagcacagcacagaagcatttaaaaaatattactgcagtttgtaaatgattttttaaggtggggaaaataatctcgagaaaaaagaaaggaaacaattagtttttatgtaacagctgatgtgctgctgtagtgaggattgagaccattttcctaagtctgtgagaataaacacacagttttcattaaacatgcctttcccataacaggtccataagcatttcccatgactctgcagttgggtatcttggctggaagaggatctggccattagaaggagggctctagatacgctgagtccagccgtgctgagagacttggcacctttatatgttactttctaacaccaaccccagcacaaaatgtcatcagaaacctacataaacattggacttatattcacataaattatttctgtactgaggtgctttatgccagaatttagcaaaaacaacactttgagtaaacagaattggcatataaatgtaagaatattaattcaacaaaatgatcatagaaaaatataatcaacagcacacacttgtaaatcttgtgagaggtttttgtgcctttgagttttgttgaacatttccatagagttcctttaagctgatattgccaaaatgctttgaattatctgctgctttaaggaatcgtagtctttgtttcattaaaacatttaggaattatattaataatcattatatgtgattagtgcctatctagtgctgaatctacaaattcattttaagagaaaacattgggatgatgaaatataaggccaaatatgattgcccctgtcagcaaaaacatggttttattttattaaaaatcaccaataaaatgccatggacaaaacatatagtttctatttataggcattttcaattctgcaataccatgatatctgcatgccacaagactgtgtctagcagggttttcattttgcctggggtatatacagaaaaagagaggtataaaatcctttttaaaatgtgcacacatcttattatgcacagcttcccccaaagtcctatttggatttttgttctaatatgacagtgcttacactgtcaatactgagtatttataagtgagtgaagatttccagaaaatgatgataatttaactattggcaataataacattataatattttcagtgatccatttggctctaagtatttattaaataatatttattcctaaaatacgtactcacacaatt

SEQ ID NO: 57577 - DNA, 731 bp, Bovine  19866880543538
  misc_feature (1)..(1): n is a, c, g, or t
ntttttcgggggaagcattttgcgtcccattctttttatttaattctgccagctgtctgctaaacaaatctagccaggtggggcttacaacccatgactaaaaaaccgctagtgcagctgtccagcttgcccgaaggaagaattcagacaaatggcaggaacgaaaagattgttttgttttcaagaaagtagctactgtaccttctttggattcagttttttttttttttcccctctgtctgcttaagttaatccattacttcttaaggttttatatcaaatagaaaaatagcttcaccttttaaaatttttagtgtatttttgttataacaagtttattatgattttcccttaagtaaaagctgtcttttatattgcaacctggtactgagttgtcctctttctttgctttttttttttttgggggagagttaactgattgctaaatctttttcttctctctctttcttaggagagaacaagttattagtgaactatgactgaaatttatttctagatacagcagaattaaatgtggagctatttaaaggtgaaggttggcatggcttactcttgagcagaggaacagaacaggcttctttgcactgcatcatcgggggacctcaactgtgaatttctagtcagcaaataggcgcttcatttggggcgtctgagcggaggaccacaagggctgcgctaaaaacgaccacgtcgccatctgatctataact

SEQ ID NO: 57578 - DNA, 1708 bp, Bovine  19866880564367
  misc_feature (1)..(1): n is a, c, g, or t
ngggtcagatgtttattatcttcctttaggtgaatatgactcatgtacatcccagagtaagacatgacatttagcttcatttgctgtcatttataatttctgccaaaagtaggttatgagtttccctatatttttaaagagaatttactggttaccatttaacctttcttaataaatcacagtcatctattagatgtacaagctgtacaatcatggagaaatgtctgcagggttcttcagtgtgcagagttgcctgccctgccctacaatggctccaggctgctatgctttttcacttctcatatattttttttaatagtttatctctctcctcccttgttgtcaagctgtcagtcagctgtcactttttactgctgtcagtgagcctgcctttatcgcacccccaatttgatgctgttaatctgctgtcagctgaaaaatcagataatcaagacctccgaaattgcatttacaataagtgatgggctgaacactggatggaggttttgagataggagttccagtttcagttccagttcctgtctctatctagctgtgtgattaccagaagacacaaaacttctctgggccctggtgccttcatttttaaaataagcagggcctgattgtgtgagagagagaaagagacagaaagaaaaagagatctcatttcgacttgaagtctgtttctctggctaccaaaaaaattaggaaattttattgtgagttaacagaatgcaaggtggggtatcactgtccctttaagtgtcaaattcaagcatagctttagtcatcactttatttaatttcactcctctgaattagctactgcccatctccttaaagggattcccaggtggctcagtggtaaagaatccacctctgccaaggcaggagacataagagatgtgtgttcgatccctaggtcaggaaaatcccctggaagaggatatggcaacccactccagtattcttgatgggataatcccatggacagaggagctgggctggtacagtccattagcctaagccatctccttaaaattctcttccctttgtcccacaggataattctctcattgatgaccttctgactctaatcttctcatttcaatcctgggctcttcctccattaatcccttaagtttcaaaagtgctaaaggccagttcaaagctaaagatcaaagtcatattgagaaaccagcaacaatcctgagaagcagaacctgtgtcctaggagccacctttaagactatgtcacagtgtgtcccatgctgctgatgtgtgatgtaagacgaggaatgagaactgaccacaggcatggaagtcatcagtgaccttgacaaaaacagttgcagtggagcagcttcaagagaaaacagtgggaatgaaattgaaaaaaaaaaaagacttttttagagcttttgatattgagagagaaaaaaaatttttttagaggttttgctattaagagagagaaagaaatgaggcagtagcagaaaaagaactggaatcaaaagagaatgtttttaagatgtaaaacaaatagcatttttgtatgctaataggaaccatccagaaaagaggaaaatggatgatgcagatcagagaaaaaaattactagaaaagttaatttttaggtaagcaaggaagatgggctcccacaaagaaatggagcggaccttgacagaaacaaggtcagtccatc

SEQ ID NO: 57579 - DNA, 1428 bp, Bovine  19866880565795
  misc_feature (1)..(1): n is a, c, g, or t
ntggcaaaactctattagtctttgccctgcctcattctgtattcccggccaaatagtattacaatactactaaaacactacaaaattttttgtaatattttataaacaaagtaaatgcattagtatagatgatgttacatatatccagtggaataactatgcagttgttaaaaagaatgaaataggttcatatttactcatcagaaagatgcttttgatatattattatgtatttttttaatctgaaggacaatttcgaaacaatgaagacaaaataaattgtgtgtatgtgtgtgggttctacactgattaaaaggaaaatgaaccaatttcactagtacagctgactgctgaccaaaaatgagatgtaagtctattttgagaaacatgaatagatttctatgagagttaagtaaactgtcaagcctcagttactatcatttaaaacaagaatgaagaaaaattaaattaaaaatattaattgcccttcttgtctcaaattttgaagttatatgctttgtaattctgtcatcattactaacttttaacccgttgaatcataaaggcttgctctctcaactgtttcaatactcttcatatcattcccactacctagtagtgggatactctgccaacatttgcttcgtatatgaagagaactcattacctatgaaagtggctgatttatttctggacaactctgactattagaatttatttttctaatttatttttccctggaaccaaaatctctcttcttatagcttcctcaatgttctgtttccctttggggacatatagaacatttttctctcaacagcctatctaaaactgtagacggttgttcttgttctaataatttaccttgtcccctacatatagttaatgtttaaaagatctcttagtagctttgtcttgtcgtcagaggaaaaaaaaaaaaagacagtgaaattagtcagtactaatgttgattacaacttaattccaaatctagacattattggtagtgttggataagacagtatatacatttgtggttctctgtaaacattctaaaatttggggtttctagaagagagaatttttttatacatatgccttccttctctcccacattcacattacccatcatatagttaagtatattatgtgcccactgtactagaaaaaggtcagttttcattccagtcacaaagaaaggcaatgccaaagaatgctcaaactaccacacaaatgcgctcatctcacacgctagtaaagtaatgctcaaaattctccaagccagacttcgacaatacatgatctgtgaacttccagatgttcaagctggttttagaaaaggcagaggaaccagagatcaaattgccaacatccgttagattatcgaaaaagcaagagagttccaaaaaaacatctatttctgcttta

SEQ ID NO: 57580 - DNA, 1678 bp, Bovine  19866880631609
  misc_feature (1)..(1): n is a, c, g, or t
nctgcaggggagttcaattatggcccaataaatgaataacaaagcatcttatttcaaaatccctgagttttaggatttgaatatctgtaagaacattcctttcattacagattcaaaagtttaaggctttcaaatgctacaacacacctgtctctgagttataggcattgcttccgtgaaaaaatagcttaaaatccatgaaatgaaatcaactccacataaagctatcacatgactctgatcgctaatctgacttgtaaattagatgtctgtaacttccactattcagcaatccgcagattttttttcctagcaggatggctatgttggctgcaacgcactctgaccaaaaatgtgcggtagcagcagtgtcacactgacaaactgaatgctatagaccttaaatagaggtttcatttaagtcatgagaaaatctttctctgtagatgaatgacgcaaaatgtaatctatgttttgtatcctgggctgccaggatttttgttgaatgctagatggaaaaaaaaaaagactcactgaggaaaaaaatgggatttgactttaagagaatccacccacttcattctcagcactgctttcaaatcttctatgaagtgaaagtcactcaatcgtgtccgactcattgcgaccccatggactatacagtgcgtggaattctccaggccagaatactggagtggatagcctttcccttctccaggggatcttcccaatccagggatcgaacccaggtctcctgcattgcaggcagattctttaccagctgacccacaagggaagcccaagaatactgagctatgtttcaataactgatataaacaaatgaataccaaacgcagggattctaaccaaataaaatattgagtttggttcagagagaactttgatgctccagttttcttgtgattcaacagttctagaaaatatataggtttatttccagttcacacatgctcattaaatcattttaagtgaatttagttaacaggtctgaagacattaatttattattagcagctgttagtattaatttataatattatgttctatgcacattaatactgtacagcatgatttcctacttactattgagttcaacagcctacacaaaaggatattttcctaaaaaattctggctacagtagcaaatagaagcatatttacacactctaggggaaagcaaaatttcaaaaattccccaaacaaaaacttccacatgaaatcacagtccttattttgacctttttagtttaagctaaaagagatgcttaagatgttttttaggttaagctaaaaaagatgttaagctaagagatgatgcactagtagaccaatgaagttgaaaaagaaggctggcctacttggattactggcagaatgtgacaccaatatggcatcaagccctgctgtgattccaaggacttcatgactgaataaagattttttttttttttttttgagtgggggtggttaaagtaaatttgatctttcacttggggaatgtgtaatatattattattccataatgatatatggtaattgctttggtaatcaaaccttaaagatcctatttatggaaattaatatagttatcaccttttagtattgggctttcttacactaagggaaaagatctaaagagaagtatctcaaatttaaa

SEQ ID NO: 57581 - DNA, 1807 bp, Bovine  19866880653856
  misc_feature (1)..(1): n is a, c, g, or t
ntcatatgtgttattgaattgaaacgtggaactgcagctttgcctctcatgtcatgtgctagaatatattttcataaagtctataaaatagattcgttatttcaaccatcttaatcataatagaaaaagcccaactatagttaaaatattgatactatgtccactcacatgtagtgatattctttaaaaacaaacaaacaaacaaaaaaagaggtttaacatctttgttgaaacagagcaaatacagaaaagtacacagatcttgagagcgttattaatttggaattattttttataaaattgattttccaggcttgtatgtttgtgactcttttctctggtgattaatcataaattatctctgttgaatttgtaaatatgaaactgagtgtaagctgtctcatttctgggtataaaacttaggacattgtttttcatctcttaacctaacctaaaggtccctagggtaggagccgagtcttagttatcttcgtagctgcagctctaggtgaatgtaaagacataacatgctttgtgctggttgtttcatataattcctcttttaacgacccattgtaattagcagcaatggactgctgaagtgcggtaatgaaaaggactggccatgaggtaaataaaagaggaggaaactgtgcttaatattacccattttactgataacggatttaagaattaactgctaacatttctccgaatgtccttcatcttctttaaaactctgtgaaaatgtcaccatcagaagaatataccaactcttgttttcgtactttctgtatgacaaaatggcattactatataatttacaaagacttcatctttgtggcttgaaagtttatgagagaataaagaggaaattaaatgaacaaagaaaggattttgatcagctagtgaacttttgcagtattcaaagggttacctgaactcctcctaaaacaacttgccagacttaaatgcagggcagtggtggagagaacagtgaaactgtactataaaaataaattactgtcatgaatattaagcaacaagaatataataaacatgactgtttgcatgattctgatttattggtattgaaatgtgtataaattacgacactcagtgtttattctagttgtttcagaatatgggccaaacaaagctgggtggacacttcccgcagacctttccatctgccaccaaatccccattcctctgctcctgtgctgagtttcttatttctgtggcatcaggaccatgtgtgagcagccattccttttagtttacttgcagactgaagtagctggcctttccaggatctggtgttacaactactacccttacgaagtttctgctctcttgcagtccaaaacctccagcttcaaagcatcacagaggccattcctacttgctctattaaacagtgctcacttttgacgtgggagggttcatgactatgtttatggacttccggggcaccagatttgggatttcccaatgctaagcagtattgtattttacaaagttgcttagcagtgggtgttctggataactagttctgctaggttaaagataaagtgagagagcattgtgtatccatgtaaaatctggtggtacctcaactcccataagataactacatgaatagcacaagcttgcacttgctgatattcacaagttgaagttattaagatttgccatcagttttaattgacactctttggaaccagatatttgttaaacagatggccagaataaggtatcacacaagaaaatagcattctccttcctcaggttttttagttttaat

SEQ ID NO: 57582 - DNA, 1784 bp, Bovine  19866880655903
  misc_feature (1)..(1): n is a, c, g, or t
naaacttaaactacagtttacccttgtaaagcaaaggaaggatggcatctctctctctcttttttaaacacagaatatcactcaatttataaataaaaataaatgaaaaatagggtgggaatgaaaacctactgttagtcctggcagtatatgttttatacaatgaccccatttgtacttttgtgctattttcaatactggtaacaaggtggtgaacagaagttttcctctaaagcattttaaaatctaatgatcaaagtctctctaaaagcaaaaagtactgatctcaagtaattgttggcaattttcagtaagtaaattcccattgtcaaaatgagaccccccaaaaatataacttccccggtataagacttacttgggttgtaaaaggaagccctatgttactgttagaagttaatccttggttgattactttacgattatttctagaatcttgtgttcaagagtcataaaagagctccctattacagatgaactgaaacctactttatctctgtggcaagtgtgtggctgcggggtgtaacctacttagaaagggacgtgtcctgtaagtacaagaaacctgcagtccagtggctgagcctcgtggcaaactttttaagaaatggctttagatttttaaaaaattcagaacagggttttaagttttaaaaataattaagaaatgtgatttctgcatgcatttctctaaatatcttaagtaaaatgtctgtgtgagagggaaggggagcacacttgcatgcacacgaggaatttaaacatttcaagtctgaaaccatttcaggtgagaagtcatgggcatggagttttgtagcagaaagagtcactttaagaaaaaaaaggtatcaaattctgtttctgcttttcagttactagcattctgtttcaaatcctgcttcaagttatagcccccaaactctcactcatattgaaagtataatgtctcatgtgagaaaaaagccaagtgttagtagccttattctagtcattaaatttctaagtgtgaatccatatgaaaaatcttatcctaaagtgaactctacatgataagtagttgagatgattttaaaatgtaaacttttaacaacaacaaaaaagagtaaggtgtaaaaatgtgaaaggagcaaattaaagaattcagtgactttctatccttttagatcttagaagcatatgtttttaaaagcaaaacagcactgtccaatggaataaatttaaaaagaaaacctcaatactctctgtataatatacatacaagtctcttccattgcctaagaaaagtacaaagctgccttggggaaaataattctctgatatttagtgagggaaaatgttacctgaaatgtgaatatttataaaacgtaaggtaaaaaaaaaatagtgtaatgtattaaatcttaatgataaagttatagctggcattccttttctgttttagctctaaatcttattacaaccacccaactagatctgtggtccttgtgatttttatcagtttgtcctggcaactgcattgtaaagctcttgattatttctaattcctgggctaacttattcatttttgagattaatttttggatacatgtcatcaagatctagaatgaggatatatatcaatgtgtataatagatttataagaaaaaaaaatccatgttaaaagtacataaaataaataatatatagaaattcttataaatgcttatgcataaaacactaatttcttaaactgacttggaccatgttagggatgcatggactagtaa

SEQ ID NO: 57583 - DNA, 1499 bp, Bovine  19866880664808
  misc_feature (1)..(1): n is a, c, g, or t
nctttacagtgactctagttagtttccggtagtttctgctttgtggctctaacacctcaaccttataagttggaaaggagagaagtgaagaataacataggagtttttcattgacttcccccagaagtaacacgtacaatttctatgtataattcattggccaggactagtcattcaatcctacctaaatgcaaggttgctgggaagtatagcttttcatgttcccaagaaagaggaatttgaaatggaatttgtctctgtcacaatgcctaagcatcaaacagtgaataaagggaaagagttaaaatttggcccagatctgatgcccaagttcagtaccatgttcccatgactctatctgatctagaaggtaaggcttatgttttttttcctgtttgtattttcaaaacacagcatatacctgacatgtggagatgctcaaaatagttattaaaattgaaggaaggaagaaagaaaggaagggaaggaagatgggagagtgtgaaagaggaatagaaggagggagggaggaagatctttattgctttttaacttcataactgattgattctttgacagctggtaaaggacagatacaatacagtcattacttcctagtccttacaatgtcttctggcagtattaaaatgaaaaagtaaaagtgtagagaccagtatagccattttcaagatttgccccaatacaacttgcaaatatccccatctatgaaagaaagtagggcttcccaggtgatgctaatggtaaagaactttcctgccagtgcagaagacacaggagaggaggggtttgatctctgagttgggaagatcccttagagaagggaatgggcaacccacctagtattcttgcctggagaatcctaaggacagagaagcctggcaggctgcagtccatagggtcacaccgagttggacacgactgaagcaatttagcacacacgcatgcacacatgaaaaaactgcggagagaggagatcaaaaaagaaagaaaaaattaagaaaaaaaaagattacatgactctcatgaggaggaaatagaggcaaaaggaatctgtttggaatgtcaattggtgtgagtaataagccctgagatctttggtgggagaagtgacatataaaggaagtgctacagcaaaattatttaataagagtactgtatttcttctttgttatacaatttacagtacaatcaaaagactgagcttttacacagcccttacaggaaaagcaagacatgggcaagcagaaataaattaagtatctaccattgattgtcatggatagcaccaacttattgagctaatactttattagtgtgctctagcttggatgatgatggtctttttattgtttttgtggtaactctttattttaagtatcttatcattatgaattcatttagtattgattgcaatagcactgatcataaagaattaatttgacattaccatgaatgtcatatgcacttatataagagtt

SEQ ID NO: 57584 - DNA, 3876 bp, Bovine  19866880704300
  misc_feature (1)..(1): n is a, c, g, or t
naactacttgatacttcttgcagtcttccttgtttatttgtttattgtctttctccccttttttaatgtcgtgtgagctccttcctagaaaaagtcttatggatcttcattcctatctgcctgacacctatgaggcactcagtaacaaatgcataagatgaatgaataaatgtgataaataaatcactcaatgtccttcacaagccatggtctgcctgacactctcagcttttccttgggacagagtttactggcctgatagaaatttgtaaacactttatgtcaaattttagaaaaagtactattgcattaatgacaaatagagtactttcataaggtgttaactttgttttatatatttcagccagagagattttaagaaaaattagcacttccttaatattaactcttcaaagaaataatttcagacttgaaagatacctataatctctgttcttgataaagatattaggttttgaaagaaggaataccaaattacctatgttacttttgtaggtatctacttttccaggaaaggttaacgatgctaactactttcaaacaatcagaaaaaaagaagggttttcatttaagatccaattcccacagtactagggaaggtgagagagtgagaggtgtgctattgaaaggaattcagaatgagtaatcgttctgaatgtgtgtacatcggagactcctcaaagcctgcctggcaatctggttttcatgtaagtttgtttttatctgtggtagggagcgttgatatttaaatttgcattaactactttccataatgaataagaagtacatagctaaacttgatttgtagcaaatcaattttggcagacagcaaaaagtcaaaaagttgtttttgtttctaaagtagacagcttctgttaggccgttaaagattttcagagaaaagaaatcattaataggagtaaccaagattagtgtaatgatacgaatagttatgaaactgctgagaggtttagggaaagttccccattttttacgttctgaaaaattgggtataatcttgtcttctacaatagaactgctccatcattctgaaatatttattttcacaatctgtcaatatttatagtgaagcttgaagaatcaccaaattgtaaggtccaaagtactgttgagaaatcattcattaactcaacaaatattgagtacctatccattttccacactgccaacagagtgatctttcaaggacaattgtgatctttctctgcagaaaatcctttgaagattatttattgcctgaagaatgcaattcaaacttctgaccatggtatataagactcttaatagtccaatctctgttttctgatcctctttcaccaatcttcttctctgacctttcttgatcatgccactccacgctaaatacccttcaacacttactgagtttatattctctcccagaattgacaactctttgtcaacaaacatatctatgcttcataggtgctgttcaatcttcctgaattagtctctgtacacaattccttgcctgcaaggtgaactcctactcatctatcaaaacccagatgaaatatcatattccctgtaaaaatgttttttctctgtatgcaagcttcccatttgtgcttccatatcatggtaaaagcatcctatgctacaaatcatactaccatcttcattcactcagcaacaatttatcaagcttccattatgtgctaggcattgaggatatatctctgaacaaaacaaaatttctaatctcatagaatttagattcaagtcttaatcacaggaaatagaataagacaattaatctatatgtttatagcatgtggtatataatactgtattacacacctttttggttagtgtggagttctaagaggattaaatgaaagatgtgtagtattgaaggggtgattaatactgttgatagttgtggccagggaaggactcaccatcaagagattttgagcaaaataactagtaatcatttaactacaatgcatctttctccatagtttgaaaacttattcttctgagtttttttgtttgtttgttttttcattacctttttgcctcatctagaactcagcatagtttctggcatacaggagtaaaagaatagatagagtctgggacttaggtgaaataattctatacaaacctaaaggttgtcaggacgatgggtggaatgctatgatttatttctgcctcttggagctttagtgctagacacagaccctgtgaggcttatagcctttaaaatgcaattacttatacaataatactgaagaatcatcatgtgtctagaaaaataccctctaagtaggcaaattactctattgccatacaggagagaaagatcatggaatattcacattaaaaatccctttattaaggctttattaatagcatgaaaaatgaatcatctttccagttccagacacttgttttcctcatgaaatgttatactgcgaactgagtattatttccttccaaagcctgttctgttctgcagtttgtatgtccaagacatgtaggacagacacttcccatatgaggacattttttccccacaaaacactagcaataccaatgatatccatgaaaagcccagaagcatctattgatatgtgggatagagctggcacttttcacaaatctacaaatcatcacaattgtatatgatgttgttatgtacaatgggtaaaattctgctcttaaatgagcatatagctcataataagtcctagggcatttggaaacataagttcagggctatctctgtaattctgacaaaatatatgtgcattgtgaagaattttggctaggtcaaatataaaataggattcatatttatttttaatgattaaaattcttctttaaaattcaaaacttatatttaagacccctaagaagtagaactggcaagaatgaaaaattaccatgattttgtgaaattctaaattctgtgtaattttaagtatgcttcttggtacactggtcaaggcaatttgtatccactgaatttattaaataagtggaaggagaaataataattactatgctttttgttggaaattggagagacagtctgtatatcattatttaacagagaggaaatgcagagtgagtgagaaattttagaagcttacatgtgagggaaaaatgaaatgattttaatggacaatctgatggagagagatttcatgtttcattcctttcacatgcacttgttgcttcagaccgagcatagccacaaccaagaaggacagggatctgggggtgaaactaaacagactgatcatatatcatttcaaaataatttccccaaaatgtatcagtcagtgagtttaacagagttatttatactagacacagtctcatgcaccggctgcccttgccagagacttctgaggagtctgttagttttatctggaaagttgtcatgtagatgaaatattttcttatagttttgtaacagtagagaataatgtaaagatctcaattcaaatgtaatagtgtctttaaaaaggattcttcagacatttaatgagtagctactaggtaggggtttttctaagacaatgaagatgagaaaaaaatatgatttagctcttcctctcaatgaacttcccagaaaagggaagctagagacataaattaatacaagaaagaacaaaatcataatggcaagacctgtaagtgttcatagagaagagaacatttccctacatgttatagaaaacaattaagtccaatgaaagaatggctgtcctacaaattgtgaaaactatttgtgtaatctatcttacgttagttaattcacatagtttaaaattttcagtattcgatttcttattagatagc

SEQ ID NO: 57585 - DNA, 1168 bp, Bovine  19866880705208
  misc_feature (1)..(1): n is a, c, g, or t
naatttgctaaaagaaaagtgctagagcagctctttgcccacaaacaattccgagatggctgcccaattagtcagtagcattctgatcctcctttcaggccccgtggccctctgaggacacaagaaggctccgatgataacctggcaacctaggtagaaacccagccaagtgagagcgtttgaagctgcagtttggctgccatcgtgtcggcgaaaagaaagaattcaggcaccatgtcatccagtacaaaggataaaaacggattcaaccggaaattcaatgtggcaccacatatgggatacatgagtgcggttatacaacaggccacatattttttttgaacagtctcctccatgtgatgctgaggacatgtgtaaccatcataacgtctctaggaatctgtatttaatttgagttggggtggtggcagggattggagatctgaagccgccacaggtttgtggcagatggctctgtgtcagctatgacaagcagccaggctcagcttcctctgcagattttcttttctctctgatcaggtaaatatgggcacactctggaaagttctacagattctgccttaggctgcaagtttgtgacttagccccatctgtcacaaatcttccctaggttctgctgtaagcagagacctgaatttaccatgtagggctgcccaagaaaaaggagccatttcaccctgtaagggagagggagagaagaaaaagcaatgaagaagcattaacgactgaaagactaaagcatgctgaaaattcatattgtaaatttgcataacttacgtcaattagatttcaaaaagccaccaagtaaatggttctcaagtttcatcacctcaggaaatcccagtttctgattggcttaaagtgaactatattttcaaccattgtggaaagctgccccccccaactccgcctttttttttttgcaaatgggtatattctactgcacacaaatttcctggtttatgttatggctgacagctatcagaagtttatcatccaacttttaacttttctgaacataagatagacaacactcttaatacatgttttttgtgaatgtgaattttacttttaagtggcgaaggcacaagagaaatgccattactattacgtggaatttataaagcacttcaagtttacaaacggg

SEQ ID NO: 57586 - DNA, 3529 bp, Bovine  19866880709266
  misc_feature (1)..(1): n is a, c, g, or t
nattgctgaaatcttttttcacatttttatttccaggataaaaataatacacgagaagtacagaaaacttagaagataaatacaacagtatttttcactgttaaactcgttagccagatttactttgtggcatgcattttggaggccaaaacaatctcaaatgtttgaggatgggtaggggaagatataaaagaacattcaatccccaacgaggtataccatcgtccagagaaagttaaaatatctcagaaatgtgtagcatttagaggtgcttaaaataatgtcattcactgattttcaaaaacagctttggaagaatatatttgctgaagattttaggtgcaaataaacattgttgtaggagacttgcactttgtaaagtaggctaagaaaagcgtccagctgttctttgaattccaaggtgaaaaaatgatatggctgaatagacagatctcatggaagcatgccagttgaatgcttcattgaaaggtgaaactgttgagctgtggctattttgtgcgagtaaactgatatttaaagcttctctgtgatcttcatggatgttaaataaaatattctacaaaggcatgtcagaagaactccaatgacgatgacctagaagtatagggattgtatgaggaaatgatgctgaggaagtaattcatctacccagcctgtaaaatggtcctgtgggtgtttctgagcttttgggagggtggggggatgaggcatagcctgagatggactggaaagcctgtgagtcctcacccttctccctgttaaagagtgatggctggtgaagctctgcctcccatcaaggcctctgaaagctctgctctggtgtgccttggagcaagctgtgttttcctgtgctgccttctggcactccaccctttttctgtacactttggtctctcacccaaccacaatacctgatatccaaagacttgcaggccgtgggtatttttactggaaaataaagaacctgagcaaattgttattttccctttttctctttcttttttttccccctgagaaacaagggctgcaagttgtttgaaataagccagaagcctaatagctcctttgcttgtgtgtttgaaatggcaccctaatcactttgaagagctaatgtacttcctatgggtctgaaatttctcaactggactcccgtggcagaatttggcctggtagttaagaaaattaattactctgatcctgaggatgaagcaatagttcccaactccctgtagtaatcattaaaatgtcatctacttaggagacatcttggcatgggattcataaggtttgtgagcatgggactaaggttcaatgatccttccactggtggatccttgttctgcaggaaggctttgggagataaggtttttaagacgggagtaaaatgactttagatcttttgatttaacatttgaatgttaacattaaccactgaataatagaaaacaaagcaaaacttaacatggctactgcccatttatcactgtcttctcgactattagtgatggcccatctcatggggtatttccctcctaaaaggtaagtttttttaagctgtcccagccttctccaccatgaatcttagccttttacctagagggaaagacccagggatttagaatcaaaagacataggctcaaatcccaacctcagcccttagaaactgtaagccactcagtcatgtgtgactctttgtagcctgctgttccctctttccatgggatttttcagacaagagtactggagtggttgccatttcctactctaggggatcctcttgatccaggaacgaacccaagtctcttgtgtcttctgcattgcaggcagattctttacccctgaaccatcagggaagtataatattaggaaagcctttaatgcctctaaccctcccttttacttatctgtgaaataggtcaagtaaattcacactgtgaaaatgttaactgtggagtcctatccactcattccttcaggaagtcttaaaggagtgcctactgtattccaggcgctggactagatcagagattggcaagctatggccatggatgacacccagcctgctgcctatttttatcaacaaagttttattgggaaacacaacatacttatgtgtttatgtattgccaagtggctgttttcatgctacagtggcaaaagttaaatcactgtaacaagttgcacaaggccaaaaatagttactatccaaccctttacagaaagtgtttacctacctttcaattgaataccaggggcacaaggaagattcctaccctcacttatcctatggtttcccaggattgataaatgagtaaacaattataataaatacagtgtgatatcacaagacactatgagagcactaagcaggagctgacgtttagccaagagaaaccaaagaatgcctcccacaagagaagacatgggctatttttaaggatgtcattttggcagacaaaggcctctataggcagaaggaagactgtgtacaaagcggcaggaagaaggagaattacagtacgataaagacatggtgactcctctggaatgataaattaggaaccataaaagaggggataggacagaagcccagaatgtagtaaattagagctaaattgtgatgaacctcatatgctttgctaaggagttcgaaattcattcatagacactaggtaaatcactgaatgatctgaagcaggcagagatgtgatttgacttgtatttataaagatcacaatctttttaaatgtgaagaataactagtaggagggcagcactagatgtagtaggagtagttaagaggctgatacagtgtctaagtctgagataccattctaagggagtgacggggagaggagggaaagggatggctacaagaggcatggaggaagtagattcaatagaacatgctcagtgagtacatgcaagaggttaagaggaaagaagattccagcatggcacccaggaactagctaaatggtgaaacccttaactcaaacagagcaaaagaagaaaattagagacatgaaagaagttgaaatcttttggacatgatgtgatttggtcattgtttatattctattaaagaataagaaatctatgttggaatgcaggaaagctgattgggatctaggtatgaatctggtagtctggtttaaagatagcattgggtgaggtcatgaataaacccaagggaaggtgtgaacctagaagagagctgaggaaagactcctgggggtgtccctattgaagaagcggccagaggaagagatactgggaaaggaatctgagaatagtagacctggttatagaaagaaaacttgatggagcagaggtattttattttgtggctaaaactactgcttccagaaaagggacctagaaatttctcatggtaatgggacattgagcagatattctagtagggctgctgctgctgctgctgctaagtcgcttcagtcgtgtccgactctgtgcgaccccatagacggcagcccaccaggctccc

SEQ ID NO: 57587 - DNA, 970 bp, Bovine  19866880720525
  misc_feature (1)..(1): n is a, c, g, or t
ntatgaaagtgtaaaatattatgctatataaggcattactactccaaccatcttcaccagaacagagatgctcaagagagtacaacatttaggaggaagcacagaacgtgtatgcgagatttaaagttgtctgaatgccactatttagtttcagcaaattctattctattaatatatcatctgattttagtaggagtataacctgtatgtaccaaatcgtggtcattagggctaaaacactaaagccttatctagaggaatttgttaggaaatatctcagtagctacctatgtgcaatactttgtccaaaagggcattttgtatatacaaacgggcaaaatgttgatgattgaaaggttttgtgactaaatggtatttaagtgcaataatataggagcttgataaacattggaaagtggagcagagagaattctctaagtgataactgtactgatagattcttgcttctgatagatgcttgaagagcaatgcagattcacagacaaaaccaggtctgtccatgagagtccagtttcccaaaatagcttgcaaggatccataatggagggtcttggaaaattccaatccaacatttggattggaattttcaatcaaataaacaaaaacaagagaaacagccaggctcaaaagaattgatttttctaactgccagaacaaaactctgcatttgagcctgatatctttggctgccttcagtctatccttaaatttgaaatcttataagcaatgcaaccactactttgagaaattattttgtagtctaatggatctcattgtcaggaaatggtttttgatattcagccaaaatcaagctttccagaaacaacttttatttgtgcatttccctcctttaatatttatggctaatgtagatatttcatttatgggcttcttttttcaagcttcaaattggtagatgaggaaagggaagatgaggagaatttcttca

SEQ ID NO: 57588 - DNA, 1845 bp, Bovine  19866880727341
  misc_feature (1)..(1): n is a, c, g, or t
nagaccttccactacatatgcacagaaaggctccttgaaggtcaaaaagtgaggggacaccacccatggtaaatgatgccaacctacccacagtcctcgtcattagaggactaagagatgcatgcacacccatgggaggaccctgagacataccaaatacagactcgtgcatccatgctaagtcacttcagtcatgtctgactctttgcaaccctatgaatgatataacctgccaggcttctctgtccatggtattctctagccaagaatacaggagtgggttgtcatgccctcctccagggaatcttccagacccagggatctaacccagtctcttttctttgctgcactggtaggcaggttctttaccatgaggaccacctcaaatatggactcagaaacaggcaaagcaagatgattggcaaaggaaacccagaagaaatgccccataaaagtgactcacagcactgtaagggtaccagtctctctctctgaggccgcctatgggtctatccacacatactctttttcctctaatgaacactttacttgtttcactacccatctctatattggaagttcatttctacagagttgtgggccagggtcttgtcactggtcacggatcttgtggctagattcagtgctctcactgcctcatcccaatctcaatctctggccaggaactgaaacttgtgcttcaattgtgcaggcggaggccacctgagatcactttggacaaatgagtaagtattatcatgtcctgcctctcaaatctggagaaggcaatggcatcccactctagtactttttgcctagaaaatcccatgaacggaggagcctggtaggctgcagtccatggggtcgctaagagtcggacacgactgatcgacttcactttcacttttcactttcatgcattggagaaggaaatggcaacccactccagtgttcttgcctggagaatcccagggacggggaagcctggtgggctgccatctatggggtcacacagagtcgaacatgactaaagcaacgcagcagcagcagcaccagcctttcaaatcggagaaggcaatagcaccccactccagtattcttgcctggaaaatcccatggatggaggagcctggaaggctgcagtccatggggtcgctgagagttggacacgactgagcgacttcactttcactttcatgcattggagaaggaaatggcaacccactccagtgttcttgcctggagaatcccagggacgggggagcctggtgggctgtgcgtctatggggtcgtacagagttggacacgacttaagtgacttagcagcagcagcagcagcctctcaaatccactaaacttaacctagacccagttgtcatcctctgtaatactaatattataaggaagagaggtcaggtaaatatagttgaagagctaatgatggtgaacaggtaaatgctcaaagtagtcaaccacacaccattcaatgtttattcagaaaagtttaagattgtaaaaatacatatcattcaagccatatttaaaagtattacaaaatgctcagaaacctcaccctctaaatgaaacttcacaaattaagtcattgacctgcattgagttgaacaccaagcaaggtgccccttcttctaaagtaatgaatattcttcaaacagcaagggaacaaggctgctgtttgatgctgatgacattgaaaatttaggagaacggaaatcccatcatttttcatttgtatgcaaatttgtctgttccagaaattaacccccagaccccacgtcagttttcatctccaggaattttttttgccagcaccacacggtgtaggct

SEQ ID NO: 57589 - DNA, 2193 bp, Bovine  19866880745109
  misc_feature (1)..(1): n is a, c, g, or t
ntatctattagtaagtattgaaacattgcacactcttggaaagtactagctttatttctttttctttttttttaaatttgtattaatatgcatttgagacatttttaaacacacagcacaaacatacttgacttatgatttatcatattttgtttttcatactttttgatggcatcttaaaacaagactttttatctcaagtttaaattgtaaaataattaagaacataatagtaggtttcaagaacatatagtaattactaatgaacatgagtacatatgtaaacatacacattattatatactaatatgagtatataatatatacttatatttaatatacttgcttcttggaagaaaagccatgacaatactagacagtgtattaaaaagcagagacatcactctatggacaaaggtccttgtggtcaaagttctggttcctccagtagtcatgtatggatgttagagtcagaccataaagaaagctgagcaccgaagaattgatgccttctagctgcggtgctgttgaagacccctaagagtcccctggacagcaaggagaccaatccagcactagctttatttctaacctaaaacttcagtactaaaatttctgatgatttaattctagccttgatttaaaaaaacaccaaaatgatatgatcttctgtagaatgatataggatatatatgtcttatataggatgatgtaacagacatatatttggcagcagctagttatttattcttccagcaagatttcttttagataaacagtcacagaaaggcagtgtaggatgatggaaggtatttatgttttagagtctgcagcttaatgctaagcctaatcttctgagccacatgaacttgggaagtattttgcgacttgcttgattcctctgaaaaatgaatttctttcaaatcatttattgagcacctaatacagagtgaggaaaacgttatgctgtataattctcatagaaactttatgagctagaaattattttccacatgatttttccatttcttctgtatcctgtgttatcatcagaaatgaatgatataaaaagtgccaacgagttttcctttcccaggaattttgaaaagatgcaggtagtaaaatggaaaagacactgtttgttgcctctttcctttggatctgtagaagtaccagaacaaaagagatgggaatagaggtaaacagtacatttcctaggatttagaggtactggaaatgtccacaagcccagcaggcttttagctacaagactgcatcacctatcataaaactctaaagctgtgtttttgtactgagttcacatttaaggtattaataatgccttcagcacaagttatttccagggaattaatttcctagtagtcagtgggttaaatcccctacgaaataacatgcaggtgacccagttgtattgacctcaggtatagaatttcagatcaatagctgcagtacttggattctgaaatataaaataatcgcaggtgtttttgttaccccaatgggtgttattagacagggatcactatggcaattgcaggttcttatcatattaatgtttgtttttggtccaaaaagaaactacttaaaaaagtaaatgccttctgttccctcttcttggaatatgtaatgatgactttcaaacatataataaaaactaacagtatttcaaacagcacaaatgatcattaattgatcttacatgaaataatatttcttcttcaggagcagagcattacagctggatgcaaaattctttttggtctattcaccttttaactctgtcatgaaagcataacagaagatctctcaatttgtgaccaaagagaaacattaagccttcacaaactgggcttggaggtagtgaggcagtaaagggaaatacttttatagctacctgaaccatgacattgactggcatgacatttgctagtgactaatcagtgaccagacatcgcttcaagcattgacgccaatagagggaactgattacccatgtggtaaagaagctgagagccaagtaaggaagagtgtagtaaccaagtaactagagactgcagaaagccactacccagctagaggggcaaatggaggagtgtccccatcaccagatggaagctggagccagaatggactaaagacatggaggagatggatccttgggtagggaagcta

SEQ ID NO: 57590 - DNA, 911 bp, Bovine  19866880758746
  misc_feature (1)..(1): n is a, c, g, or t
ncctggtaggctgccgtctatggggtcgcacagtagtcggacacgactgaagcgacttagcagcagcagcagcagcatatctaaagtcactatttgtctactttgacacttctatgcagctataattttcccttttttttttcctatactcacttaagggtagcttggttcaaatgctcccagcagcttgcctctcaagtttccagattccttctcatctaggaaggctttgtaatacttctatagatgtatctgatttccttttgaaattacttttaccctgaatggcacattcctggcacatacaccaccatttctcatccaaatccccatgtagacattattgattggtcacatagctctttcagcttcagggtcgttccccacagagcagacagccaccatcagccaggtaaagctgtgtcatctcagccaaagtgggtctcttggtccattgccaccattcttttataggtgttatgaaaacaaaaatgcagactacagacacacccttatgcttccaagagaacaggaggcttgtgtctgtttcctcaaaaattccctaagtctgcctttttctttcaatctttattttaataaataaatataagtcttatagtgaagatatccatgctgtcctgtgcttagtcactcagtcgtgtctgactctttgagaccccatggactgtagtctaccaggctcctctatccagggggattctccaggcaagaatactggagtgggttgccatgccctcctccaggggatcttcccaaccctggagtcgaactggggtctcctgcatttcagacagattctttacctgctgagctaccaggaaagcccaaaatatgcatacataccctgtatgtgtcaattatatgtaaagcatatacgtacataggtaaga

SEQ ID NO: 57591 - DNA, 1906 bp, Bovine  19866880769757
  misc_feature (1)..(1): n is a, c, g, or t
ntcattgaccactggtccccatcttagatgaacccggaacaatagaccaatcctattaccctccttttgagccagatcttcaactgttaaaaagttcctttgttaattcccactttagacaaatgtcaccatctacatgtgaaggggagagaggtgattgaggtttttaattgatgtggatttaattatgctaatttagacagctgtaaagcatttcagtatagctgcataatagggagagcaaatacaggtgcccttcactgtaggggcttaatttttaacctacatagctttaaaacagaaagggagttcaaaagcgtgggcaatttacaatttatagagggaggtccacccacgctctgaaatgtttagcaggctctacatgtacttaagagagagtcgaaagaaaccctcaattttgattgaaaacttcaaatttgtctctaactataagaggcaatttaaaatgatgtgtatgtcaagactcgatttgagataacactaaactagaagctgggaattaaaaaatgacctttattttcatctcggagaaagaaatctcacaatggaaatggtgataaaagctagcaagaattttaaaaatttttgaagaaagggcttttgaatttttgaactttaatgacaaggtgagttgacttcaccatgtatctgacgacgactttcattaccaggaacgtgacatgacactcagtgttatcagcgggaaaacagtttttgttcaaattgctgaataatcctgttttgatttcttggcattttatctggagtgaatgatgcagcagaccctactgaagttgtactgagtcttaaccaagtacgacctaggatcctgtttcaaggattagatgctcgagaaacactaagtagttaaatcactgctccaaaggcggcctggttttaaagggcgatgttgcacaggccggtatataacagtatgaatgaagaggaggagaatcaaagacattttatagcacttttagtgtgcatgtggcttgctgaggaagggaggtctgaaaacactccagctcttctgttctctttctcctctgggtgactcttccttcaaggcccaagctgccccctagacactgagtctctcctcctaggaggcctattgcatttctagaggacaaagagcttatcaatgaatcatcttcctttctccccggccatttccttctcaaccttgtcaggcttctcttctgtgcattttcctttgtcctacactaatcagacatgtaattagctggcaaagaaaagaagaaagaagcaggggcatctgtcctctgtttcacacagtgggtggagagtgacctttccaatcctgcccagtttttggtgaaaacacacagatttgggcatgcattttgactcaggattttactaattcttccgatcttggatgagctgtctaatttctctgacttctttgatttatcaaatgaaataatcattcgttgttcatacatttgttgactctacctatgagctgtggatgaaatgtttctactgttctgtccagcacacaataggtacaaatggtccttgatctgttcctctcatcatcacccacaacgcttcgcgctttctccatctcagcaccccacgcctcactctgtctttctctgacccatagcttttgttgttattatactttcatttatttacttatttaacttatttttggctgtgcttctcattgcggtgacttctcttgtttgagagtacaggccctagagcacaggctcagcagttgtggcgcagaggtttagttgctccaagacatgtggaatcttcctggaccagggatcaaatccatgtctcctgtactggcaggtggatgctttactgagctaccagtgaagcccaattcataacttcttta

SEQ ID NO: 57592 - DNA, 1849 bp, Bovine  19866880781628
  misc_feature (1)..(1): n is a, c, g, or t
naaaatggtacagatgaacttattcgaaggcagaaatagagacacagatgtagagaacaaacatatggacactaagggaggaagcaggagtaggatggattagaatactgggattgacatatatacactactatctataaagtagataactaatgagaacctactgcatagcacaaggaactcgcaatgctctgtggtgacctaaatgcgaaggaaatccaaaaaagaggggatacatgtatacatatagctgattcactttgctctacagcacacactaacataatattgtaaagcaactatagtccaataaaaaataataataaaatagaatttaaaaatttaaaattttaatgtttaattacaaaaatttttaatgtgatagagcaagggtttaaactcagagcttctaaccccatattcacatattttcccattgagcttcactccaggcatatgatataacctaagtaaaagatgcctccgttttctaatcttggtagtttttgcattaaataacaatattattattatgtaaataatatactgcagtataaatgtatatgttcatgggatgtaaatgtcattattcgatgataaatgcatttattgtataatatggctaatattggggctctctcaggggctcagtaaagatctgccggccaactgcaggaaacacaggttcgatccttagatcacgaagatgttctggaggaggaaatggcaactcactccagtattcttgcctgggaaatcccatgaggagcctggtaggctacagtcatggggctgcaaaaaagtcagacacgacttagtgactaaacaacaacaaacatatgtaatgataactcccattagtctgtaaacctaggacactggtgatgtaagtcacacagaactgaacatcaaatagttaggatcacaaatctcaaacttctgtgatttcttcctgagtccagcataatcaatcctctccctttacctcacaacttttatccatcacccaccagctctagactggcaactttttgataggataacaagatggatgaaggacaatatccaagattgatgtaacaagaatggagtgtgaagtgggaggggagaagtcaggcatagggctatgtaggaaattatttcataagctgctacagtcaccattaaacaaagtccaagtgcccttgataaaacaatctgtagtacttctcagtgcttattccctgtagaccacatttacatgagtgattatataggacccatttcctcccctggatattaagttccatgaggatactgaacaggtctacttgcttaccactagaccctcagcaagtagcaaacagaagttgttcaacaaatgtggttgagtcaataaaccataaaaccctgtaaaaatggcattgataatttcttcctatttcattcaaggtcgcaaatactcaccctttactaccactaattactatttactctcacaaacgtaacttaatgcacacattctatcatcatctaaatataagaggtagcattttatcatattcaaaatgatacactttctaaggaaaacagttctaccaatagtcctggtaaggtgtttagaagtcatgttgcacatcatgggcaactctaccttctctgagctgactagactccataagaatatttaacccaaggacagtcaagtctataacctgaaagattcaactggttaaccattagactgacattttttattagacagagtcattatcttgctactctacattgacttctatgccaaattttaactcagacctggtttgtgcaaggtaattatcaatatacacaccacagaaatttaaaataa

SEQ ID NO: 57593 - DNA, 1717 bp, Bovine  19866880787465
  misc_feature (1)..(1): n is a, c, g, or t
nactcagcaattgcatataatgatgtgaacagtggattctctaaaaagtaagatatagttccaccaacttttattgattgtaacagccttgttccacaagtgttaaaccctgaaaaataggtgtaaagaaagcataacaaagacagaccaaagaaaaataaaaataaacagagcaggtaaaaaaaaatacccataagcaagcaggaaagagtgctggatagttcaagtactttaaatgtcatcatcaatgacttacattatatgaagttattttaatgaactaagtcatgagaagagatggaaaaaacaactcatgttatattggtgcatggattacccataggagagcaaattaaaccttacattctttactaatcaccacaagcatcagaaattcaggtagcaacacaaagaggtcaattcagaggcctgtgagtggtaactaaaactgataaagtgtaacagagcagcaagtctgatcttacacaggggaagggcagggcggtggacactgagcatataccatactctgggtaaaacactttatctgtgttctctctcactttttccttatatcaactctatgatttaacgttagggaaactaaaggtcagatagggtaacataattcgaccaacttgcccatctagaaagtggctgagccaagactgaaaatcacccaggtgtgattaataatgaacttaatgttcttcccctgcaccatgtccgcctataatacatgagactcttccctgacccccaaccctcactctggtgtactttgaactaatccatcagctcaccccaagaagtatcagccagctatgcaaacaggactcaaagaaaaaaggaagattcacctgatagcccgaaggaagaagcagaatgggcatagcaccaacaccaccatgcactagacttttccaatattctctgcagacagaaatgaagggaacgcataggaaaagtttctaatcataaaggataggtaatttatacaaaatttacaaagagaagcataaaaatctgatagttgtatataatattggttcattcagaagttgagacaccaagtcccagaaaagaatggaaaatcattttcaggttctgagctttaaatgctggaaactccttttcttcactcctagaataaggtttacatgaaaagcccaatgtttactggaagagcaaaatatgttataagcaaatagagctggctgagtcatatgtattttcatctcaaaatgagttatagataggacagctagatattttcagtgaaaataggaacaagttcctatgcaactgaaatgttttagactcttctaagaaatttctgcacaccatttactactgatgaaattgatctatgttatcagtgatgattaatcctaccctactaatattactaatacaatgaagagccctggtcacacattctaatcacctcatgagttttttcaagtggtaaccaaattgtgactatatcactagctataacttcaggtaaaaacccctctgctgtaattttcccaggtattaagtgaaggaattaagacaagatttctaaagttcttgtttcttaggtactcttccagctctgcaaagttccagttctatttttcataaaaataccaactgcctaaagttgaaaacaaaacaaatttgtccacaatacaaatgtgtttgacatttctaattgtgctatttcagttaa

SEQ ID NO: 57594 - DNA, 1348 bp, Bovine  19866880848070
  misc_feature (1)..(1): n is a, c, g, or t
nagagagtgaataaaggaagataccactcatctgccagtgtaaaatagatgtcttaccatgcactgtggccaaacaagttttaaatctgaccagaatatgcctcctgggcagtggcttcttttaactttggaaataaattattcccttaaggtctccctcatcagctttcagatacattcacaagctatggataaatgtataactcaaacgtatttagaaaatttgtggatgtaacttagtaagatgtagatctaatacaatgaactattcatcaatagtagcaagttgcaagccagatagacactggtccaatgatgggaaattccctcagtatcctagaaaatgataaatctcacgatagttcactgtgatccacaacaattgagggaggaactcactatattgatgattcttagctataatttattcagggatggagactatttcttaggattagcagtaatccagttaatggcaatagagccatcttgatgaagtaggcatcagtttgagagaggtgttagggaaaagtttgagctgatagtattggaaggaagtgtgtctgctggacagaatacagaatgaaacagtaagtaaacagaatacattccaagctgttagagtcagagtgtgagttccaacctgaaataacaagaatatttaataggccaattggataatcaatgaactcacagaaatggctcattttggggtactcgtatgaccatctgccttgaatgcaaatacagattattactgattacatgtcttataattaaggtagatgagacaggtggaaggtggaattaaggaagggaggcagtcaggatcaaggagatgctcagcagagctctagttcctgaaaaggagactggcaaaaagcacttgcaccagctgagaggatctggtgcacaatgtaagccatcagaatagggaatcagaagccaagaaacaagataagggtaaaggtatgaaactgagtttcaacaaagacaggatattgagattgggtacattctaaattggattcctgagtggctcagtggtaaagaatctgcctgccaacacaagagactcagaaaacacagatttgatccctgggttgggaaaatcctctgcaggaggaattcttgtctggaaaatcccatggacagaggagcctggtgggctgcagtccatggggtcgcaaagagtaggacacaacttagtgactgaacacacacatgcacattctaaattatcagagactgagatcatgtcaagccccccaggagtgagctaaaggtctaaatccaatgccaagcatcaccaaagcttagcatctaaaaccaaaggcagagaaacaag

SEQ ID NO: 57595 - DNA, 3040 bp, Bovine  19866880883955
  misc_feature (1)..(1): n is a, c, g, or t
ncttgcctgggaagtcctatagattgctgaacctggagggctatagtccatggtatcacaaaagagtcagacatgatttagcgactagacaaaaacaataggtacagatgggtggacaaacagttccagagagagacacacagagaaaaagagaggggagggaagaagagaagggaagggagaagaagagagaggagagggattgacagataacaaggaaccaaactgatctacatgcttgtggggttggctgagtctgcaggccatagggcaagtaatccgaaagggaagaccgcaaccaggctggaacctcataggcagaggctgaagctaattatccatagacagtaagaaaagagacatgaagccaaagctggaatttcctgagcagaagtgatttggagtttctgaccccagcgaagacttcagccctcttttaaagagctcagctgattagattttaagaaatgtatttaaataacctctttaatttattgaattgatgttaggacaattaagaaacaattacaatttatttaattgtatttattataatggtagctagtaagttagatacaatttgatacatctaaggaatagactgaaattataataattaagaaaaaataaaggtctaaacttgaataaacagaacgaattacattggtgattgaggacatacaaaaacataacttaaagtgaatttttattaatatggcaaacatattatggcaaacatagaaagagtaagtaaataaataactctttgtatattcatgtaaattttgaaagctgtgcttagtcttgccagacaagttatttatatttctaaatgtatgtagcagaaaattctgtgacaatttctagtcaagacaacttctgttaacagtggaaatgatgtaaccaaggctagttcggcatcttgttgatgatcaagacatctcaagaagtttgttttggaggctagttacacttctggagatttttattatagactacaccctcattatgtttcttagctttttccttttatcaaatgtaatatgatttcaaaatcctatagattttctttagatttccacatcaatttaaagccttttactatataagttttcattatcttttaagaaaatccttttcatgttgtgtaaagcagtaatgacattttcacagttagtattataacaaattttacttttttaaactttttaaagcctattttaaaacaaaaactagttgcttaggttaatgaatgttttttcagctttaaaatgttgcagtttttctcccatcattccctcaaaatggctctactgtccctcccattgctattttctttccctccttcttatttctctcccccttaaactcctcctatttttgtttttttgtagctggctttccattaacatttaagaataccctttaatgagcattaacgaaaacatccgataggaacaaaggagggggcaaaggaagctagagagggaggagaagacggaagagatgaacagcaggcattgctatcagtcttcaactaatttctgcagctgactctcatttccagagctggaccaaagttctacagtattgcataggtgaccaaatcagagaaaatgaaggatcttagtaacaaaaagtctgcaatccttgcaacatggattactgccataatatttacctttaaatggaaatggcaacccactccattattcctgcctggaaaatcctatggaaagaggaacctggttaggctacagtccatgggatcgcaaagagtcagacatgactgagtgacttcactcactcactcatgcgcgattgaaagtactgggaatctagtcactgttggtctgtttttaaattagtttatttttttttttaattgaaggataattgctttacaatattgtgctgatttctgccatatatcatcatgagtcaaccatagacatacatatgccccttccttcttaaaactctgtcccacatcccaccatatcccacccctccagattgtcacagagcaccagtttgaactccccagagtcatactggaaactctcactggctatccattttacatatggtaatgtatatatttccatgctactttctccatcatctcacgctcttccttcccccccacccacccatgtccacagtctgttctctgcatctccattgctgccctgaaaataggctcatcagtaccatctttctagattccatatatatgtattaatacatgacatttgttctcctatttctgacttacttcattctgtataatacgctctagttgagccacctcattaggactgcctcacatctgttcttgtgtgtgtgtgtgtgtgtatctcttaccttggtggttcagctggtaaagagaccacctaacaatgaaggagatgcaaaaaggttctaggttcatccatcccattagaactgactcacatatgttcctttttatggctgagtaattattgtacaatcacttcgtggtaaatagatggggaaacagtggaaacaatggctgactttattttcctgggctccaaaatcactgcagacggtgattgtagccaggaaatttaaagatacttactccttgaaaggaaagttatgaccaacctagatagcatattaaaaagcagagacgttacattgtcaacaaaggtccgtctagtcatggctatggtttttccagtggtcatgtatggatgtgagagttggactataaagaaagctgagtgccaaagaattgatgcttttgaactgtggtgttggagaagactcttgagagtcccttggactgcaaggagatctaaccaactcaccctaaaggagatcagtcctgggtgttcattggtaggactgattctgaaactgaaactccagtactttggccacctgatgcgaagagctgactcatttgaaaagactttgatgctgggaaagattgagggcaggaggagaaggggatgacagaggatgagatggttggatggcgtcaccgactcaatggacatgagtttgg

SEQ ID NO: 57596 - DNA, 1486 bp, Bovine  19866880894298
  misc_feature (1)..(1): n is a, c, g, or t
ntattcaccaaatatatattggatgacttcttatggacatgatatactgaacgttaaaaatggtaagatgagcaggacagggtaccacttttatgaagttcacagtccagcagcgaaacagacatgtgacaggatctttacagcacaagggcaaccccacaatgaagacatgaaagggcctgagctaacaaagggtctctcttccactgctcatggtgtttcaagatgacatccttgatgatgatgctccaaatgaaagaagatagaacacaaaagcaataaatgcattgcgatttgagacctgttgcatatgttaaagctggctttttttcccctttttactggaagccacttattagcagggcctgtctcagtttggaggttctgcctttttgcttacagactgtctgacgcctttataaagtgggccactatattgttgattactgcacaccagggtgggtctgtgagctgcttttttctgccatgccacagttagacagaatcttctgaagttctggtctcataggtccttggagaatggttagtgtttcctaagaagcttaagtctggatgatttacatgtaacattttaaactcctgttgtgtaatgcctggactgagatttatatatactgaatacagtttttcaggtctgtgcatgacattaagttacatattgtatcagctacccccatttatacatttggctggagaagatgttcatgggatgcgcagtaatgagggtctgaaaattctgtattctacccccaagtattaataccatcatgtgcgtagatgttccagctccttaggataatctcataatcaagtgattaagtgttttgtcaacccaagttagatgtgtttaattctgacgtgaaaagacaaaagagagaggcaactgggagaagttaagatttgaaaaggtcagaattcctgaccggggttcgttttctcccattaacttttttgctttcttccaagtaaacagcctatttcctggatatgagagtttgtcaaatgatctaaaaaaattctgaaaacaatttcaatgaatgaaaaataaaaacttatactcactgtcatgagcattaaagatagtaatacgtgaagatccattgaaatgtgattatcaagctacactgactcaaaccagaagacccagaatgtagtgtgtcaactagaccacatgtggtggcagtgtgcatgttgtttggagtgtgtatgtgagatgtatcattgccatagtgtaaaagagttgaattagcttccacttgactagatgagagctcttagttcttattttgaaagcaatcaattgagcatggttaattaggatatcaccaagtagttaagaaaaaaaaaaaaaggcaagccacttattagaaagtatattttaaatctgctcacattatagtgctgatcgaaggattagaaaagaattcaccaaaactgggttgttaggtgctttctgcacaaacac

SEQ ID NO: 57597 - DNA, 1043 bp, Bovine  19866880898882
  misc_feature (1)..(1): n is a, c, g, or t
ngtcttctttttgctagattaacatcctgtttgactcacctcaagctacacttcctccaaaagcgttcccaaatttctgtggtgagtcaggagatcctcaatattcagtacatatctcttccattgcaacagacaaagtgtattacaacaagctaggtatcaatgtctgtttgtctatccactagactactagactctgaagaagactactctgtctcatttacctttatctgcaactagcaaagtggcttaatgatatttgaaagtattcagaaatgtgcaatgataaattagtgaatgaatagatgagggtattcaaatgatcattactaatatacttctcattctgtgctaaaaattaagataaaattgctaaaatatttttaggaaagtaatagattattgcttcatcctggctacttgtgctggttggtattttaaagtcagtatttgtatgcctctctgaattttctcttaggactgtgaatctcaaagaaatgacattttttaataggtctcatgcactgtacccagcaacatcaggtacacatatctgttttatcacacaatgaagatgaaaatgactaagatttggaggagagagaagagaaaatcctagttcctttgcttaaagttactgtcctctcagcatatttctatcatgccttctagcctccagttttaattgagagaatcattctggttcatagtaattcttgatgctgtcctgtgggctctgacttagaattttcaaggctctattggaggcaaggaaaaaggaaaaactctataatgtataaaaagatagtaatagtagttttgataatttttagaagactgagaatagtttcctctatggtcagtatatttgaaaaaatctaggaaatttatgaaaatccacacaaaagttagaaaagggtacatgtcttcttcaaaaggttgttgggattgtgttaaaaatttgtgtctaagaatctgaaattgtatgtacaatttttacctccaagataaactagccataagatttggacaagtttcttaag

SEQ ID NO: 57598 - DNA, 734 bp, Bovine  19866880915735
  misc_feature (1)..(1): n is a, c, g, or t
ntagaaaaaaaaattgaaattcattcttttttattgagatacaattggtaaataaatttgtatgtttcaagtgtataacattgtgattcaatatttgttagaatgcagtagtatacaaccagtgaaacatgaatcccagataaatcaacataaatatatctctaatacttaatattgagtcacagagtaatacattatgattccttttatataaagtacaaaagaaggctaaataaaatagcagagattcagatttttataagtatatgcacatatgatttctacttagattaatacatgcacatacatgacaaacttgaaggaaaacaagggctggggttagttcacataattcaggaaagtagttaccttcagggcagaggaagggggctttcaactgggcagaaactcacaaaacataggctttcaaatacaaaggtaatatcttatttcttaagctgaattaagagcagtgatcattttgtttttaaaaaatgcaacttcggtatactatatccattcttttagtatgctgtatttcactatataaagtattatattcacaatagacaacacaatactttatagaagtaaaaagtaagtctgagtaggaaaaaggaatcgagtctaaattttaggaaaattattctggtggacatacagaagagagacattgatggtgtctattatccccaggagaatatgaggttcgaaccgggcaagccagtcaaggg

SEQ ID NO: 57599 - DNA, 1235 bp, Bovine  19866880936819
  misc_feature (1)..(1): n is a, c, g, or t
naatattgggacagtatggtagaatttgaaataaacataagcttttcagttatataaattgttgataggaaaatcatcattaaatgatcactcaaggaccattcctatgccaaatttatgaatagtattgtaagaatgaagtttccatatcccctaagctatagaattatgatatagaaatagctagtgtttgggagtgcttactaagctgtaagccccattttaagcagtgtacatgttctctctcatttaattctgtgaatgaacctacgaggtacaatggcattatcatcacacccattttaccaggtggtaagtgaggcactgaatggtttgtcaatgtgcccaaggtgacacagctgaaaagaggcagagttagaattcaaaaccaagcattctgactctgcagcctggagccataaccattgttctgtgaggattcggggtttgggaatgaggctgaagttttcgttacttacatattaatagatctataaacttgagccagtcatttaacctcactaatattctgttttatcatcttgaaaatggccatctacctcacagagttgtttagaagcataaattagattatgcaagtagtgtttctagcactgctttgcataacataagaactcactaaatgttaatactgacattggtacatgtatttaattttgatctttagtattttgaagagtcttcctaatttgtttaaggaaaggttaccttagaaatagatgactgagttctcttagattaacatattttcaaaaattcttttggatttatagggaaaaaatagcatatggaatgacttacagaagactgaactctatgtcgtcagtctgaacttagtcatatgtcgtccttttgtttccatttataaaagtcttgattcaaaattaacatagatatattatattagcttacttagtgaaaacaaatttatccaatcataaaagagatgatgaagatagggggtcaatttatttgtttctagagacagactcctcttgccaaatctgatatgcttcagtgcatttgtcttacttcagaagacagcagaaaactcagctaactggtataattatataacttggatagtcatattgaggggcttcagctttggcaatataatgaggaattacaaagttcagtgaagttgcaggaatttaactggaattacttatcagcattttgactgggaataaacagaaaaggaacaaattgat

SEQ ID NO: 57600 - DNA, 1399 bp, Bovine  19866880941443
  misc_feature (1)..(1): n is a, c, g, or t
nactaactccctaagttgcctttgggagtaactaacttgcctctttgggctatttccagttgcaataaatatataaaaccaattaatgtttcagctaatttttcacaggcttccagacataggtcaagaaaagagttacatgaaatgtgacatatgttccagtcttaaactaaggattctgttaagataagcagagttgcggccactctttattgagaatagctattcagattgtatctaattcaccaaagcaaaataaatgataatcctcccacttccttttgccagttctcatttttattttctacagaatttttttaatgatttcctacattttctattgcatatttatatgtattaacttatttagactaagaataaaagattctccaactccttcctttggcgaccttggaaagcataaagccttggttaatataatcagaccaatcctagaaaattaaaatcaccacccaaaatgcttctgcattaataaaaaatggagccagacagactgttaggtaaagcatatgttaacaaagcacagaagtggttaaacacaacgacatttccctatataggagaccaaaggcccaaatattcaataacaaaaattttagccatatgtgcacttgtgtagaacagattattaactgttatcctctgtaaatataagaaatgaattacaataaatctgaatagttttaaattattttctttctgaaatcacagccattaagcagtggtgatcattcagtggaaatattcatcaagatacatgtatgacagaaataccaagttcattttgggatgtcaaatggaggcagattctacaaatgcttatattcaaaaacattttcagagtaattacgcatttttggacaacgttttcagcatcctttttctttttttcttacatatgtttctaaatctgtgtttggaatccaaattttaaatttaattacaagcagaagaatatgcttacttaacatccaatttaatcctaaattaccctgaaattcatagaggctcatgggagtttagggtttggaagtttcctaaagtttatctaatccagtggttttcaaagattaatacgctctagaatcatgtagttgttctttgggttaccctggtggctcaaactgtaaaggatctgcctgcaatgcgggagaactgggttcaatccctaggtcaggaagatcccttacagaagggagtggctacccctccagtattcttgcctgaagaaccccatggacagaggagtctggcaggctacagtccatggggtcacaaagaattggcatgactgaacaactaacacatttggaatcaccctagaagacttattaaaatacagattgctgggtttcaccctctaagtttttgaatccat

SEQ ID NO: 57601 - DNA, 1579 bp, Bovine  19866880976360
  misc_feature (1)..(1): n is a, c, g, or t
natcttttgagctccccctccggtccttaactctaccttccatgataagattggtctttgacacttttctgtattttttctctgagtaaagctcccaccttcaaatactgttacagtggaagttaggatttcaatgaaacaatttggggggtagagtgaacaaaaacattcagtagcagaaatcattcttgagtggaaaattttagatgtgctactaatcagtgtggataaagtttcttgccttattctggcagtatctttttatcactgcaacacaaggtttaactagctctttattaatagtagtttattcttatttgattgtattattggggtctaaaactgaatttaaagtttcgggtgtcacttttacccatttctctttcacattaaatttgtgcactttttaacctacaagaagatttatgaatgcaaccctctactattgtgctttttccctcatgatcccaggctatcagaacaataacattggcagaggagattcgctttaagttttgcatattcacaagacttatctcacctgagtcacataacaattagaccaaaatgcaagtttttaactgtaaatcctttagtcttaccatctgatcttcctctcagcattgtggcatttgcaaatccgaacactgtgtattccttgggtcttgaatacatttcaggaccatgcagcatagactggaaagccatttgaaacaatggagcaatgagagagaacaatttataacattttgttaagaatttcaaatactgtgccaataagaagaactgtagaaaagagcatcacaaatttataatatagacattctttagacatttggacagttttaagaagtcatttgaattataaatgttatagtctaatagaataatgttaatgtataaataaatccagaaacagctcatgtaattacagtttcaatttatgggttacttaccatattttcacttgcataaagccaagtacaatatgtccatttttccatttaaagtagtatttaggacctcctttgtgataggtgttgttactcccattgtttcagcttagaaaactgaggctcgtgaaaatgaaatagcgtaccagctgggaagttgctagctgagatttgaaccccaaactggaagactccaaagctgttgttcttaaccaggaaactaacacttctgcctaatttggatgaagtgataacaagtctacttagaatttaggtaattagtagatttagatgtggctcagataaagactctgttgtcaagaattataatgagaggaaactaaatagaacatgaataaattgttatgttcatacacatggtcacaaaacctcattatttatttaagaaaagcttctgtcctagctattcaatttataacaaatttaatgaaatttttttattgctttctgtatccaaggcaacattgcaggtactcattctcattcctggtcattggaaaaacttttaaaaataaaactaagcaccagtgaaattcaaacattcctagcagatgggagaagaaatccttaaagtgtagaaacaagactctatgttcttactacat

SEQ ID NO: 57602 - DNA, 2691 bp, Bovine  19866880993305
  misc_feature (1)..(1): n is a, c, g, or t
ncttcaaatcaaatttaagggctgagaaaggtattctagttggtcccattccttgattcaagcctccacctttggcccaaacaacagtaacaaaacatggccaggtttactttcttgaagaaaaaggaatatcctggtgagttttgagaacactgagtgaggcaaattggaaaaagacactggacccgtattatgaaagggctagcatgtccaagtaaggagccaacagattcttacctaacagataacagaaaaccactgctggttttcaagtcaaggatattgacccatatgatgagactagaggagtccaggtacatgcagacttgaaaaggctctataaccttccaagatgggagggaagcaatgctggtggttctgatatacttgggagagcagaaaaagacaataaccttagcagaaggagctggtaagcaataagtgagagagtcaagtgtctgagcagtccctctagggctcttggggggaaactgaaaaacagaaccaagtatcaaaaccacaagtgagactgggcacatacgcctcagtcctgctgcatcctaaaatcaatgaactagcaggatgcacaggccctttagaagaaacttttgtacagttgaggccgacaagaaacagtaccaagaatctcaggaaagtatcttttgtcattctacatcatcatttctactaaaattaaaggaacatgtgttcaaactttcagtccttatgaaattagaaacccagtgtctcgcaggttatcgaaaaggatttatgtttcctctagttgttttgggcttgatttcctgcttcagctgaacccacaagtcatgcatgcctgatcacttaccagtgttgcctcatcttaactttgccttgtttctaaaagctcactctaggacgtaggacttagacatttactgaagattcatggaggatagaaggattacatctcacccagcctagcagataatttaaaatttaaacttcagtactaggcattcctattactccccttcttattctccctatgccctccactgggaattttgtggggtgtctctttcatttagcccccaatttcccaccatgtaattctgcctcaacacccttctttcatattctttctttttatacatgaccttcataagtctatttcatgttttatagagagaatttggttagctctttttctgctgtgttctaaggattatctttccacaaccaaaatgctgtgctaagaaagaaaaattatgtttttgcccttaagaggaattctgctaccagctattaagtcaggcttttcccctagtatacttgaatctataacttgaacatagtggtacctcttttttacttaagtatggattagtatatctaaactgacctgcagattcgtctactgggataccctgtactgtgctggcctttctggctatcactgtctgacagcatattaggaacaccactcatgtcagaccctaccccttgcctttcctcttgacaatttatagatccaatgctatttagacaggtggagaggtaatctcaccagcgaggcaattcccttgggccattatacatgcaagatatttcctcaattcaaaaatgctattggaggatttcactgaacactccagtaaagaaattcctgaaactgcagtgttgaaactagcaaaagggctctgctataagaagtaatattctcaccaagctgttgataccatttgagaaatttacatcttgagacagtatcggatggcagtgataacaagctcctgtgtcaatgattctccatgtctgtcaattgatctcatcccaggtaaagcaggggcagtgactgtcttattgcaagataagtgcaggcccccaaactaccagaagcacccatgaacactttagtgcctaaaagagagtgaaatcctatcagaaaacaatgaacataggttctgttcagtttcctttccaaggaccatgtctgtatgcttgggagttgatttaaactgcttcttgtttttcaaatactcaaactgtcctacccacttggggaggaaatatttgaagttatcgatcattgagagaaaaaaatacaacaggcaaggatctagcagctatattaatgtacatattgctgggggaagtgcttcaatgtcctgtccctcaacctctccccagtgtttgaaagtgaagtgaaagtgtttgtagctcagttgcgtccaattctttgcaagcccatggatcgtaccccaccaggcttctctgtccatgggattctccaggcaagaatactggagtgagttgccatttcctcctccaggggatcttcccaacgcagaaattgaactcaggtctcctggattgcagacagattctttaccatctgatctatcagagaagtccccaaatccctgaacccaacaatgacagagctgtgaaagaccaacacgactcaccctcactgagtagtgggggtctcttggcaaccagggtgaaaacatcaccttagcaggtgacagacacttgagccttggctagggcattaatgaacgatattaataaagactaattagatagtgtttgttgaaatgtttccaaagtgatgagcaaaataaagccaacctaaagaaaatattgaaaagcctcccactgagcatgctcagaaagagcatttgaacttcttttatttttaaaatg

SEQ ID NO: 57603 - DNA, 952 bp, Bovine  19866881056872
  misc_feature (1)..(1): n is a, c, g, or t
nagttacctggggtctccttggagacttaatgcaagggttcacagtggagggggcgtgtggtggaacacgaaaggtaaagaaggccatggaaagcccccggacatcctgggactgtgtgttccctcgcgctctctgaatcaataccctgcacaaaagttattacaggtccaggccttttgccttcaaagctgcttaggccgtatgtggcattaattctcttctgtacaaaaatgtggttgataatcacctggctaaggaaaggatttagggccagaacagcagatttcctcacagattacagaataaaacctagtttcttaggataaattgggacagttaactgtagtgaaatatgttaccctcgttgattcatgcccatgtgatacctttgttacatgtcactgaagagaaacatttacgccattatgggaggtgagatctgatttctactctgttctaaggtgtgctgtgctgcacaatacatatttttattttcttggtttagggagcctgctttaactccagaggccagttattaagcaagcacttagctcagttgactcctaattatacagttacaaaataaaatgatccgctacgactggtccccttccttgtcaccggtgagcacagtcagggccctgaactgagcttgcccacatggctgtcagagactgcagaatttccttcccaccatcactcccagaacaggatacacctctccctgggagaaggaagatttggaacagccaaagaagacccaagggttttttcagcatgacagcaaaccgaaattgtatattttccttttcttttttaaggaaaatcatgagcaaaaacattgccttaattcacatttcaaaaagtaattactacagattcaagacatttatcatgttgtcattggaaccgggaaaggttattcttgtggtacttcaggtcacaaacaag

SEQ ID NO: 57604 - DNA, 1107 bp, Bovine  19866881093643
  misc_feature (1)..(1): n is a, c, g, or t
naacatttttggaaagacaatggaagaccttttacttctaaatgatattttaccctttgttttgtgttaactttgctcgacatgttaagaaaaatgttaggagttactcaaaccagactgtaatttgagacagacatacagcttgataatgtaatttcttgagtggtcataaacacctttgagaccaagtaatttaactataagtataaccatgacaacctccatatcaaatgtggagtgtaatgcaagatgaaaaaaaaaaaaaatgctaatctgagggttttttaaaagtcattgttacttcaatttagttacttcaatttcactatgatgtgaccaagggtatatgtatttcttatgctgttagaattaaagatacaaccaaaattaacaaaaaataatttattttcacttcaaatgaatttactatacttgacataattaaattctattcctcttaaatgggtaatctacctatttgtaggtagccatatcatttaacatttttcaaaactctttgtatatctggaatactttagaatgcatttcctatatacagtttcaactttattaacatggagtaaaccttccttaggctcataatcagatttgatcctaagcaaaatgtgaaagacatttagttcaaacataggattgttttagtcttttgtaggatgtcaaggagtttattggataacccaactatgttttgggcttccctggttgctcagtggtaagaatgcacttaacagtgcagaagaagtaggttcatccctgggttgggaagatcctctggagaaggaagacaaccaactcttgtactcttgcctggagaatcccatggacggaggaacctggcaggctacagtcagtggagtgtcaaaagagttggacaccactgagcacacgggcaatgcactttcatagtaggatagtggctgtccttgagggaaaaaaagaaagcatctgagtaagaatattggtggatcttttaaaattgtcctatctttaacatgacagtaaagaaacaagcaactttagtctaaggtctgtagtctgcatttcacaactaaaccaaacctttaggtccttttctcattgcacagt

SEQ ID NO: 57605 - DNA, 1110 bp, Bovine  19866881131564
  misc_feature (1)..(1): n is a, c, g, or t
ngaaggagccttgagaggtgccacctaaagcagtaattttatactaaatcagatgataagtggcaatctacatgctactaacagaggtttactagaatgggattttctaaagaagtatgtgtgggcccagtttcacttatataacaggaaaacactttggaggaggaggaggcgaaaatacacactgaatcacagagagataatcaattgaaagagagttgtactttttttttttttttatgatgggggaaaaatgtcaacaaaagttctaaactaagtttctagaagtcaatccattattttcacgttgatagggacagtttctagtatatgaatagaggaagagaaccaaagtgattttgattttgatgttgaagggacagagtattttaggggatattgatgctaagagcacttttttgctttgtctacatcccacagagaaagttatcagaagtcaaagaactgacaaaatgtgatttcagtggaggcaacacagcaataaagacaaaataggattctgggcaataaatctttttctactctgtaaatacccctctttcaatataaaggctctttaaggaaataagacaacaaagctttcagaaggggcttgatacattatttatgaatttatcaagtgaaaaaaacacccactcagacattttaataaaaactttcaactaatgtatctaattttattggtattaaaaaaaagccaattatgaactagaaagttactgtttgttaaactgctatacagctttctgcaaatagaatatttacaaaccacttggaatcactttcccaaagtttcagtttctgaaggtcaaataactatgtaactgcttaataaagaagcaaagaagtacctctaaatatctcccagctctgatgggcttatatgctgctccttaggtgaggtattagcaaagcttatttattttcatttccaaggcttttatttgctcattcccttgtggtaaagctgatttccatgatgattcccttcttaattttaataccctttttactcatcatatagacataagaattttccataaaataatgaaatccttgcaaaggaacgaagacaagtcagagaataaa

SEQ ID NO: 57606 - DNA, 1307 bp, Bovine  19866881155548
  misc_feature (1)..(1): n is a, c, g, or t
naaaatgttttttgaggctcttacatccaagcacccacattgtcaatatcacaaattatttccgttttttacaagatggctgccccaagccttcactatagaatagcagtgctatttgagcaggacttaaaatagttttaaaggtatgatttgctaaaaagcactttctacatttatatgtcacatttttaaacacaatttttctaaaaagacgactttaatgagatttatatatcacaaattccatctgttttatataatacaacttaatgacttttaatcaatttacagagttctctaaccatcactacaatgcaattttagaacatttttatctccccagtaagaatcttcattcctctttgcagtctatccctgttttcatcctcacctcaggaaaacactaatgtgcttactctctctacaggtttgccttttctggacatttcatgtaaatggaatcatacactatgtgatctttagcatctggtttctttcactcagatcagagctcctgagctttgtccatgttgtagcaaatagcagtggtctgttcctttctgaagctgaataatattcctttgcatgaatataacacattacgattattcatttgtcatttgatagatgtttggactgcttctgattttttaatgattgtgaataatattcctctgaacattttcataatgtctttgcccagacacatgttttcattttgcttaggtagatacctagggatggaattgctgagttgtctgataagtttacatttgactttttaagaaacaagcaaataacttttaaggataacacttactaactcttcctgcttagattcattcaagatcaacatgtacacactgttatatttaaaatggataaccaacaagggcctactgtatagctcagggaactctgctcaatgttatgtggcagcctagataggaggggtgttgggcaagaatggatccacgtacgtatgtgactgagtccctttgctgttcacctgaaaccatcacaacatcactaaccaactcgattccaatataaaataaaaagttttgaaaaatttttattgaacttcttataaagccagtcattgtagtaaaccagatagggtcaactcttgttttttcactttcattggaatgaagtgtaggctggacatttaaaatctcctcattattcataaacctaatgctggccactttttcaggtgtcttcagcaaaatatctatcatcttaatattatctgaaacagataccaaagggctatgtgataggttgctaccaggaatccaaag

SEQ ID NO: 57607 - DNA, 923 bp, Bovine  19866881181179
  misc_feature (1)..(1): n is a, c, g, or t
nattggtttttgctcagtgactcttaaaatttttctatgcctcactttatcttttaacataagctgcaattgcattccaaagtctgtgagacattgctcaattgaaaactttgtagccttgaaattaggagctctgggtcctagtctgagccttctctaaatagctgtgcagtggagagcatgctatttgtactataagtgcacttcagcatccttatctattaaaaataaaaagaaaaacaatgcttaacctgttaacctcatctcacatgactaatgtgaaaatgtgagacatcgagtacatgaaaatgtcttgaaagatttcaaacaaagtgcaaaattcagacattaaaatcaaataaaggttttttgggggttgttgatggagtaaaatatttccatgaaactattaactgatgactttacttaataaaactgtgtgacttgccaaaaaatgaattggtgttaattataaaattaccttttaattaatgcattcattaatgatctaatcaatatcaattgaaggtttattattttaaggaggatgggcaattagcagtttaacaccatgaaaaagagataaccaactgacggatgggtccccatcaagtttaattttaatttgttttaaaagtatcttcttgaggaatgagtttaaatgcacatcactctttctcctttcagaaaatgaatatataagttgtttagaaagcatatctgaatgaccaagaatgaagttggcatacgtaacaagaaatgagcacatcttctaaatgggctcgatggtatggtataagttctattctctcacacagtaatataactggattgctctttaaattaagtgaatttgtatgtccgctttcccttaatggaatcagttttgatatactactttgttcatgctgttaggcttcagt

SEQ ID NO: 57608 - DNA, 1410 bp, Bovine  19866881181693
  misc_feature (1)..(1): n is a, c, g, or t
nggtaataagaatgttatagtcagtcatgtccagctctttgtgactttatggactgtccacgaactttccccaggcaggaacactggagtgggttgctgagcccttctccaggagctctttctgacccagggatggatctttaccactagtgccacctgggaaggtctgtacaatatatatgaatattaatagagtaagttcatggctttgcgaccaaatggcttgactgaatctgaatcctagcttcactattagtaattctgtgacctggataagtgattttctctgtaatccactttctacacttataaggtgtgatgttaacaatacctccttgaaatggttgtcatacaggatgaggaattactgcttggtgttggtagacatgcaaccatgatggtactgctaccatagatgtttgattccttattatcaatttcatgttgatggacatatagattgattgcaatttttcttctcatacatcatgcactaatgaacatcctcctaagcagaatgctgtgagtatttctaaagagtacattttagaagtgcaattttctaatcaaaggtgatatacatttttaaatgatagatattgttgtgtaatcatcccctaaaagtaactatttactctgtgaataaaagtgaatggaaaaagctggggatcattagaaatattttattaagactttcatctatgcatcaaaaatgcataaccctttttatacaaagaagtgggggattactgtaacacaacataagcaacacttgttttatattatccataaaaatcagaaagctttttatgcataatgctcatgattttcagttctgcaagtctttgagcccctctttctccagagaaagaattcatagcatattgtcttcctataatcagttattatttattaactgcagaacataatattccatcaggcagctattcataaatatctaccaatcagatgtgtaacaaatgcttactaaaattaataagttatgaaacagaacaattatgtcatattctacaggtgtggtagcagtggttctgaaatccagattgaacatagcctgaccactctaccacatattcagaatttgagatggttccagctacttttctggagttataccagagcccaaagaagaaaaaaaaaaaaaaaaaaacatactgaaagcaaatgctttaatgtctggtaatacctggtatacctgtggtgtgagaggctatgtcctcaagcagtgagcactgaatattttacagcttctggaaatacttacacatttctttctagttcttcagcatacagctcatttgaggctttatcagggatcatcacatctgatgcaatgacagcaatatccatctctgcgtatcaaaacagagtccaaaaattttttttaaa

SEQ ID NO: 57609 - DNA, 1224 bp, Bovine  19866881194864
  misc_feature (1)..(1): n is a, c, g, or t
ntcagccactgtttccccatctatttgctatgaagtgatgggaccaggtgccatgaacttagttttctgaatgttgagctttaagccaactttctcactctcctctctcactttcatcaagagtcttcttcactttctgccgtaagggtattagttgcacttttaaattttgaatgtcttggacactgcctagaagaaaatctcttagtgagccgaatgtaaaccaatttagcgaatcacttgtttaatatgtttccttatcttgatttggatttcctttattcctctaaaccaccagagcattctcctccttaccaactattgtaactagattaaagttctttctgtggtttctgacattgtctgcttagcccagaaaatatacgcagaacttggagggccaactgtgaaggagtgtgttagtctttaaaacttttccaagtggttcattttcctgtgccttgcccttacagttttggactatgtgtgtgtgtgtgtgtgtgtgaaattttaaataaccagtgagaaattgaatttttgtttcttcttctagagaaaattatacaaaaaatattgaatgattattcagctaatgctcaatagacatggtaaactgaccaaaagcaggagatcatctgacagtttttttaaagcctggaggaacaagcatgtagggggtgtaccttgtgacatactggtggtatatagctctaaacagagagaagttcagttttcagcgctttatgaaatgctttctgtagttcacaatgatctaagaggtatatagaaattgctttcttaaaagtagagtcacttttatcacttagagacaaggacctagagatatgaaccaaagaaagtacttcatctaaactggtataattagtactaaaaccttaatccatagggtttttttttgtatatgaaaagtctgtaactgactattctttgtgaaggccagtcatttggaaagagccccacaaagtgtgcgacacattgtaaacactcagtaatattggctgaatgaagtaatagaactagtgttactgcacttcagcaacaggtaattagctgctcagatgcctattctgtatcattccccatactaccatctgagaatacagaggagatacacattaaacaaactgtggtaagtcctagaaagaaaagaatagatattgtgcggaagaaagaacaaccactacaataatattttaaaaatag

SEQ ID NO: 57610 - DNA, 806 bp, Bovine  19866881232824
  misc_feature (1)..(1): n is a, c, g, or t
ntcatatctgactctgcgaacccatggactgtagcctgccaggatcttctgtccatagaattctccagccaaagatactggagtaggttgccattcccttctccagggatcaaacctgggtctcctgcattgcaggcagactttttaccatctgatccaccaggaagagagcagcgcaattatttttcaaacccagcccaattgccaaacaacccttatgctttctcaggcatgagtcaagaatcagtcctttgtgacctcagaccatgtactacagttgaactcctctcactaagcttcatgaagtattctgatgcctatcttgtaagaggtagggctaaaacacacagcacttcaataacactctgagtttgcctaatgaaatctctccctcttttgatatcctctatgtaataaagggattcaaagatcacaaaattagcttgccacaactctgtatatgctacagcacttccttgggatatagcagtatctgttgaatactgatatgtcaactcaaagttccactccttcaggacgcatgtctttttttatccttttagtgccagcactagcactcaacacatcatgggtcctcaagaaaatgttttttgaggggatgatctcaacaaatgacagcaggtataaataagtggaagagtacataaaattaagcaatgacggatgactttcactatctgaagaactatctgaaaatagactgctcagtgagcgaacactgggctaagcaaagcacatttggtcctccctaatttatacacctagatataggcctgctgctgctg

SEQ ID NO: 57611 - DNA, 1161 bp, Bovine  19866881233172
  misc_feature (1)..(1): n is a, c, g, or t
ntgctgcatggatctgatgtagcgttttttgcagtagctagagtgagatttgaatatattaatagttctagcagcagagcccagggagtctagttaataacttatgcatggatatatagatatatttcagacagaggtaaggttttcagctctcatgttggtaatacttagagggatcgaatgaaaggggctgttcccccagagcctttgttgtgggcatgcattgtgacagtatggagccagagttcttctggttgtctacacagcctggattcaataaactgttatatatgcatattatgacaatgtggtcaaggaaaccagatttttttactctaccttccagtgcctatatagcttaaatctggtgtttatttttcttgtccccattcagtatgtaaacatattcataatttaatacaggttatgtgcattttataattaacattatggacttagttgggaaagcactcagaccacactgtatgaaaaatatgtatctttttctatattagactatatggttcagtgtgaatcctaaaggtggataatcccagattatcttactttgctgggactactttaacaaaatgccacagactaggctgcttaaacaacagaaatgtattgtctctcaattatgaatactgtgagaatcattccatccgttatggaagtgtgggatcaaggtgtcggcaggtttaccttcttcttaggtctctgtccttggacggcagaaggctgccttcttactgtgtccttacaggctcttttgtctatgtgtgcacatcccaactgtcttagtcccagtttcttcttcttgtaaagacatcaatcatattggatgaaggcccatcccaacagtctcattttaacttaattactcaaagccctatctccaaatatagtcacattatgaggtactgggagttaacatttcaacagatgaatcggggtgtgtgtggtgaggggtgggtaggggatgtaattcagtccataacacagtccaagagaatacccatatccgggctactgcaaatatgattctcagccacttctcccatcaggaagaaacaaggctgactttctaaggtttaggggaacgagcagcagcaagactcttctcctgccttcggctagacggaaggaagcagcttcaga

SEQ ID NO: 57612 - DNA, 1628 bp, Bovine  19866881288354
  misc_feature (1)..(1): n is a, c, g, or t
ntaagctctcgtcaccttacacaacccacttcagcatgcatgcatcagaatcacctggagtacttgttaaatcacagatggccagccgcaccccagagattctgattcagtaagtctgaggtatggttcattaattttcatttctaacattgtcctatgtgatgccaatatggctggtgctgagaccacatttgtatgaccagggcctagaacatctttctttccccatctcagtccatcaaaatccaatgaatcccttactgccattgaatgaaccagttcatactctgtgctagcacagtgcctaagggttctaaaggcttagaaccagattactggactctagctaaatatctgcgtgaacctggataagttacttaatactggacccatttccctatcagtaaaactggaaaaaataatagtgcttatagcgtatgttgatgtgaaaataaatgaacgtatgtgaagcacttagaatagtgcctgagaaggactcaattctattatgttacctagtagttcatatctttaatctaacactccacttagcatattatgacatttagagtttgcagaacaaagtcctttactagatattaagcaccctgaaaacagagaccacatctccatgaattcccagaaacataaccccaggcctagcactttatagaaattaagtataaaaacctttcaattcaattgaaattcagaaaagattgcaaagaaatcttaagtaaaactcttctaatcagtaaacaaaaccatccatttgtttttcccttatcataaagatgcataaaaatgcggtcagttattaataatacattgaaagtaggtttgccttttcctttgacttttctaaactctataattaaaacagcttcaaattgaaagattgtaaagaagaaattaatcttattggtaagtaaaaaagcaaatcccatggttgatgatagatatgacctgttagcaatagttccacttttatacttccttctcttacaatcagcgtgtggagaccagcataatccaattaattgtaattcccttttgtagagtcagtaaagtagtgcatgatactgaaacaccattgaagtcttatctctggtcagataatccacacggattttccttttccaactaccagcaggtttttataaacttcaggaaaatagaatattttgacttccttgaacttgtgataaatgtgatacacaataattgtctctgaactttaatcctttgtatatgcctagccatcagttttctaggcttctttctctgctgtacaatggtttcatgaatacacctgagtttttctctatctcctgactgcatttaaaatattgtttttccacagtgaatatgcagtattttaacacaacagagcatctcaactaagctgtttgctgctggtacctcttggacacataacctctcatccatatactcctgatccgtcttgctcactcctggcaaagcacaggaaaaattataacaatatgctgaaataaaagttatgtgactgtgctctttcacacacagaatatcttactgtactcatttaatgccttttccatcttaactaaagttcagcagtttgaggtgcaacagtaaaactagca

SEQ ID NO: 57613 - DNA, 741 bp, Bovine  19866881306218
  misc_feature (1)..(1): n is a, c, g, or t
ngaattctgtaggtgattctcgtctagtggtcttaaaagtgttggtggctcagtcatgtctgactctgtgtcgccgtggactgtagcccaccaggctcctctgtccatgggatttcccaggcaggaatactggagtcggtagccattctcttctgcaggggatcttcccaacttagggatcaaacccgggtctcccacatcgcaggcagattccttaccatctgagcgaggctttaggcctttgtataatctcttatactatcagaagcaattcacctttgaggcgagccaagtgtcctaactccctctgtgctcatacatacacagagtaagagatggctactattagttacttagaggaacattcatcttcaatgcatcatgcaccgggtatagaaaaagataactaaaccacattagaaagtcaagattaaaatgaaaatatttggacatttggcatcaaatgtgctagtagagtgcatgcaactctataatatcacatgtgtattagttttttcacagtaatactaccacactattttctaaatttcctcatcaatgatttatttataagccatgccagagatcactataataataacatactataccccccataaccattttatataataggaaagcttcagtaaagtggcagtgaatattctccaatcaactgtgcaagcaaagcataattatattcaattaacataggtgggaaatggtagagattaagttatt

SEQ ID NO: 57614 - DNA, 1174 bp, Bovine  19866881336052
  misc_feature (1)..(1): n is a, c, g, or t
natagtgggactctactaagtgcagacgcaccccttattttcacttcatttcctgtcattttccctgcctttcaattacagcacggaacatgttccctaaagaccacccccaggtggcagtgcatgttgccacctgggggcggtgccacctgggctctctaaagaccatctccaggtggcaatgcatgtttgattctctggtactcagcagagacatcctttatttcagggagtcttctaaagatactctttatattacttggcttccattacaagctaagcaaaattctatttaattttatatttattatattgcactctaatgtatctgatatttttttacttgcctcattaaatattctgcttttcaagggttttcctagagaaggtatatctgggtttccatgttactatattacgttattgtgtgcataatagcatagagaggtatgaagattaattatattgtgtgtgtgtgtatatatatatatatatatttatatgtgactttcttgtcagttaagtacctcaaaaggtctaaacatatctcttgaaataaattataagttttacattttttgttcacctttcaataaactcctcttatttaaactcaggtcaataaattataatatctataatccttttaattggcaaaattagcttctaattatttatttagttaaaccctatattatagctgtataaaaaggtggctgaaaaatggcagtacagtgaatccaagcctatttttagattattcaaattaatgctgtttgtgacatacagtggtttattttataaaccttcctaataatacatgaagcatgaattagagatatgaaggcatattaaaaaagcaacaacaaaaataatacaccaacacagatgagaaaagtgaagtgaaatggaggttgcaagaagaaatatataaaaaaagacagagagagcaaatggaaagtcctaaaagataaattaatgtatgcccaaaggcaatgaatgccatttagtaataaatatactagaaataaaaatggagccaattagtatgaacaagaaagtgcaaaaataatcaggaataaagaagaggaatatccagagtaagttgcacgagacgcagagcagtatgcggaagattataaaataaggaagggagtacaaaataatagaaagg

SEQ ID NO: 57615 - DNA, 894 bp, Bovine  19866881343877
  misc_feature (1)..(1): n is a, c, g, or t
nttagagggagagagagagacggaaggacagacaccaaaaaaacccctattttaatatgtcactccactaaataatttggtaattttatttaaaaggttggggttatagctgatgtgcaaaaacaggttatttgagtgatgggcctgtgcctttatcacagttggctggtctttctccctctttcttccctggaaacaatcgcgtattggtgttggcaaggaagcagagtgtggtctagtggactggaaatcaggtgacttgaggtctggttgatttttttcccccttctactttgaagttatgtgtctccactccataaaacaggggaactgaatttctttatacacttataagcagaggtcaagccttggtaataataattttttctccttacctgatgctaaataattcaaggtaataggaagtcaatattggatctggaacaaaagatggacaggaaggttggatgatatgacgagacaagagagatagagattctttaattgagtagtgagactactgacaggagaaaaaaaaaatctaagttttgaaattccaagatctgttacaaatctgagataatcaagcaactagaagaactggcaatcccattctgggctgtagtgattgatttaaaaggctccaacactggtgggtggtcacggagtccctgatcaagacttagcaaagtcagctttgttgagcacccattgatcattatactctggacctcctaacatgatgaatgttaatattgcctcttttctaattagacctgttcttctcttcatcatgatgaaaagataaacataaggtgaggagacagaagcttgagaaaaacaattcacttaacaatatcctcgaaatggaatattccctagtcctagtctata

SEQ ID NO: 57616 - DNA, 1004 bp, Bovine  19866881353815
  misc_feature (1)..(1): n is a, c, g, or t
ntgggcttaatcaaacttaagaaggtagcagagtgtctggaagtcatgaatgatgatattataaacttgaaatatctcatttccgtttttgtgttgaatcagatactctgttaggcttaattccaatactgaaagagatagcatgtatctaataatatttttagaaaatttgaggaaaaagcttaacattgagaattttattctttaatatatgttatccactgtgaaattggggaaacacagtgttacttaaactttttgataggacaccacttagagctaaaataatgcagtttttctactggagcaaagtttgaaaattgtgaattgaatgatcctgattgttaccataggccacattttaaggccaccttcgtttcactttataaagatatatttttcagtatatagactcctggaagcaacatgactttcagagttcagactgcctttacaagctgtctttaaatgatactttaaacagtttttggctgatgtgatgtgcttcatgatggatatacagaaaaaataaagcaaaaaccccaaataaaaacaaaaacaccaagaccccactatattttctttttctcttagacttatattttctttctttaatagattattataatgttttgtttattttaaaaaaaatgaggaaaattttcaagcgtttcttttggagagtagcaccactccaccatttgaatagccttggcaaataatgtttgggcaaatgcaaggctgtttccatagtgttatttctgtttgagtatgttgaattgtataaataatagtcttcacagggacatcatctttggactacatgcactttttcctctctcctgacactgttactaaaaacagttgtatagtagagtgtgtatgtatgtgttgtgtatgtgttagtcgctcaagtcgtgtctgactctttgcgaccccatgaactcctctgtccatggaattctccagccaagaatactagaatgggttgccatttcctcctc

SEQ ID NO: 57617 - DNA, 697 bp, Bovine  19866881377531
  misc_feature (1)..(1): n is a, c, g, or t
naaaatcctgaactcatactctttcgaaaacctttgctgactaaattcaaggctaggcaagataactttcaacatatactttctacaaatgcatttggttgttttgatttaaagcaatctagatccttatttcattatatttttaatctgtatctggactctctcttctttgttgtgatctgtcttagcttataactttattgaagaagcagaatatgtcaaatacacttttagacagcttttcagagtactatgagaatttctggttcatttatttcacaaacaattactaagcaataatctacctgcaatgcaggagacctgggtttgatccctgggttggaaagacctcctggagaaaggaatggttaccactccagtattcttctctgggagaattccatggacagagaagtctggttgggctacagtccatggggtcacaaagagtcagacacgactgagcaactaacactttcacttcacttcataagtgccagacactggaccaggttctagcattataagaatgtgtacatgtgctagtcactcagtcattgtttgcgacctcatggactgcaacccttcagactcttctatacatggaattctccagaatggccagcatatatgcaccaccgtggaagtcatataaagcagaagtgttgtttcagcaggaaaagatagactatgcaat

SEQ ID NO: 57618 - DNA, 1124 bp, Bovine  19866881380348
  misc_feature (1)..(1): n is a, c, g, or t
ncttttcgaagtgggctgaagttaaaaaattatgaattacaagtataaacatataaaaagtataaaagtatgatttaagtaagtatgaataatacaaactgttattttgctgctctgctgtgcttagtcattcagtcatgtctgactctttgccactccatggactgtagcctgccagggtcctctgtctatggggattctccaggcaagaataatggagtgggttgccatgccctccttcagggcatcttcctgacccagggatcaaacccaggcctcttaggtctcctgcattggcacgcgggttctttaccactagcaccacctagaaaggcctttatctataactacttgccaagtgagagtgctactgccacatcctgacagcgtaatacagaggaaataatcatggacttcagaaaaagactgatatggattccaattcaggatttacattacaagcctacattctctgaaagatttttgtattccatagaatagtctttgccaagtgcttgatagagtagtttgcccctaatatatgtgtctcaatatatcacaatcatcattttattgataatactttaaaacagtatgaacagtgtattatatctatggaacaaatacctgccttgcttactacaaattcaactagcaattagaatttttgcaagtttggatgagaaagttgatcaaactgaagtctgtttaaaatcaacacctttacattacatgattactttgtcaaaatgattatttttaataaattaaaggatttaaaaaaattatgctatgtatttaaaatatattaaaatccacgtttaagtttaaaggtctgtttgcttttggttcttctaagaaaaagcagaaaataaattttacataatttgccattttaaggaaattggcataatatttataatatttacaatctttctctgatgtggtctacaatttacagaaccacaatttaggaaaaagaagagataaaatatgatcagtgaatactatttgaagagcataagtatcactgaattagattatggaaatgaactgaacaatatactatgaacacagttataagatgctttctaacatagcatgcaaatgtgaaaattgcattt

SEQ ID NO: 57619 - DNA, 1425 bp, Bovine  19866881396993
  misc_feature (1)..(1): n is a, c, g, or t
nttttatgcatacatgtatctattctttttcaaattctttttccactaggttgttatataatatcaagcagagttccctgtgctatagagtagatctttgttggttatcaatgttaaatatagaagtgtacacatgtcaatccaaaacttcctaacttaaaagggttgtctcgtttgtctccctttacctccatgataactctatgtgagtttcaggcaaaatgacataaaaaaaaaaaaaaaaaaacagggaaaaaagatctttctatgtgtctcagagctggtatgttgctgctttttctcagtttgtgtgttaacaattctgttattcagaccattgtgttgaatcatatcaggacactgagaaatacatgaccatgttttttttctggaagaatgtattttgtctttcactgctgattggaaatagaggtttttgtaatgaaagcagataaacagcataggttagagataatgagggcaggcaagaaaggtgtgatttctttttatgttgtagccatgaaactgaaaaatataagaaagagaaaaaaatttttttaattaaggtatggaaattatcaacttgaatcaatggaaaataacactttacatgaacatatatagggtggctgttttatttcatttacagctgagatgtcattttgttcaattccttggaatgtcagcctttaaaacatatatatgtatgtatgtatgtatatataggacagaataacagtgatagaaatagtaactgtaacaccacaggctttttcgaagccttccttaggattttgaagattttaaaaggtaacaaaaaatcaatttcatggatatagatggcagttctgtaagtcatttttgtgcttacctgggggagggatttgcttgtagaagttttaaataaacaatctaaatggaaaggagagattagatcataggacagaaaatttgggggattatatacatcttttctgtagcctttcttttttattccttcatagatatactcgatggttactttgtggtgggaatagcatggatattatgaggcctcagatttatttagaaaggtaaataaagctcttctctattgtcaagtaaattaaaatgcactagagcctattaggagaaggcaatggcaccccactccagtactcttgcctggaaaatcccatggacggaggagcctggtgagctgcagtccgtggggtagcctgagagtcagacacgactaagcgacttcactttcacttatcactttccactttcatgcaacggagaaggaaatggcaacccactccagtgttcttgcctggagaatcccagggatggtggagcctggtgggctgccatctatggggttgcacagagtcgaaaacgactgaagcgacttagcagcagcagttttaagaaggaattttt

SEQ ID NO: 57620 - DNA, 1670 bp, Bovine  19866881411031
  misc_feature (1)..(1): n is a, c, g, or t
ntggtgtggtttcttatagatttacctttactggcctgattgacctgatcctgcacacagaggccaatagtggtctctgggatctctgaaccttgtctgggtggagttggcatcacaccctaccaacagaagtacaggataaaaacctcagtagttgcactgttatgctgagaccagtttaagaaaaaggatatcagaggaacaaacctagggttggcaataaaatcactagaggttgctgagcatggttaacacacggaacaaggagagtgacccactgaatctcaaatagctcaagttctaaaatctgaagaagtgggggaggtggataaaaggattaagggattgtgatttgggcagttcttaatataatctagccaggagatcttcaaatttcatttctgtatccaaactctaaacaaacaattaggtttatttcatgtagaaaaatgatggtgctcattactggagggacagagaaaggatcccctcctcatcccagtaaaatgtaagttttgataatttatttatattcccttaaaatatttgtgactaaggatgtggttaaaagccatggaacaaaacacagctaaatgacctcctcagagagtaagcttatgtctttggtcttaacttgtatagaatcacactaagtgaacaattttttcctgtctgcattctgaaaattgaagtgattgtccattgtcaagcaagggcttcattctttgctctaaactactgatgaattttataaattcttaatcaaaatctttgagggaaattatataatgcaaaatatttttatttcattatcttcctcgagatcaatgagtttaacctttcagtcttactaccttctgaattgcgacagatggtgtaggtggcaaatattacacatttggtaagaaaacatcatggatataaatacccttgtctttttccctcagatcagtggagagctttaagaacaggataaatacccatctgcctggaaaattgcctggaggcagggtgatggactagatgtctcagattccttctagccttctgattcagagctcctcactgttgccaaaagagttagttctggtgggatacatccaggactgcagacccttctgcctgtgtacataaggcctggagatttttcaatgagattagctaagaacaagctttccttttgatctctacagaaatattgctgcttctgaaatgtgtctgctctatggacttgaaggtgtggggctctagtgaatgatgaatgaatgaaagtgaatagatcttgctggagatgaggatcaccctttcaggggccccagtgtctttgtaacttatgtgtatgtagggggcttggcatgtagcctaaatacctaagctcacctaccaggtgataaactgttggggtcattatggcagacaatttaaaacagttaatggtactctcatctgcaatatggtcttacagtggaagctgggagtctcagtcatgggataaatgttctcatttacaatcctaatgagcaaagagacagcagtatgctttcatgttgatgtatacatgtaccgtgcgtgtttatttttgtttttatttaattttcaaagcaagccatactctccttaaaacatttttaagaaagcagaaatgtatgaagactaaaacaaaaataatc

SEQ ID NO: 57621 - DNA, 1090 bp, Bovine  19866881441556
  misc_feature (1)..(1): n is a, c, g, or t
natcagcccagcacatccccaaaatgtctttgtaaaagaaatcaaattatatgagttaattgattccaggcaacatcagcaagtgcaggtggagactgaataacaggatgtttattaatgaagtactattaatcaaaattgacaataccaattcctctttgttgtatttgaaagctaccttcagttatagacataactgttgaattttaaatcagttttaaaaaggaaaaacatgggggggcatagtaacacatgggatttttcgctgtggattttggattactggtatttaaacactggaaagctactcttaaatgcaatttgacaagcaatgccaaagatgccagtggtaattaattagcacttaattgagaccacagaacaacagaacgcagaattggtactcagtgccatttcccccttaaggctccatctcatgagggtcaggagtgtggctgcatgctgaaggtcaggaagtaaattgggagaacacattgacactggacatttcatgatggatctccttcatcctatactactgctcccggccatctctgatgagaaaaaggactgtgtttgaaggggagtcagtgttcatgcacatctaaaccaaggtaagcactgccttcatatccaaaattagttaggttgatcacttcacaaaaagataaagctcctacattgaatgttaacatgaatgagagtaataggcctgtataaaagcaaattaaatttagagtgaagtgttatttgaagttactggttttgttcgtttatgttcaatctttgtaaaaataaatttagactgggtttcttttttaatagttcggatttgtatgatgcctgttaaagactttagagatgtttgaaaattcaaatttagaaattgtacatattcccccaattcttcttcagacactgaccccctgtctttaatagataggtgtcaatattctttaacagagaggaaagaacattcttgattcataatttcattgactgagcaaataaaaaaggaaactaattgtagtctctgaataaatcttgagacactttcgatgaaaatgtatagtagcatgtcataacacag

SEQ ID NO: 57622 - DNA, 1485 bp, Bovine  19866881558982
  misc_feature (1)..(1): n is a, c, g, or t
ntgatggtggtggagcagccttctactctatctatccttccccagctaaccagtacaagaactgagtcaagaatgactatgccttatttttgtttttcctcagatttcatttgaatgtaaataataacataataaataggtacaactgaaatttgtgaagcaggcaccacagatggaaactataacaaacgtgtcactgcttttgcatctttaatttataatggcataacatacagcatcttcccatcgtaactccatgtataatgccaccttataaaaggctgttatggacattacttttctctcctggctcctaggtttttttgtctaggcatccgaggggaggtagccctgttcagactctaacaacagtaacaatgataaaaatgaattgactttgttaggatcgtaaattttaaaaaaggatacctttcatgataccaatatatacttctttaattcctttctcactcagagcttccaatactgctcttatttccatgcagtcaaaggctttttgtgctctgcagacactatacacaatggttcattttatttgaccatcttctccaaacagattctgaattcactcaaattccatggatgatttcatacattacatacgccaaagggtagagaatccataggattaaatttcaagtcatttttgaaagttttcttcgttatcggctctaagtttcaacactatcgctttttgttctctctgagttatattacatttgtaaataccaagcagaaggtcaggtcaaaacatatctcataatgatatctaggaaataaatataactaaggtctataaatacccgtatacagataatatgtctattgtaggtatgtgcatatatatagatattgcttaacatactggtttccttacttgtccaatgagaactgttatctctccctcctaattttgtgtgagaattcagtgaagagatataaaagatctagtataggcttgttatacattattagaaaatttatttgagtattatctttgtcagtcagactttggcaaatattttcagaatcttttataatatctggcttaaattactccttttactgtactgtcataagagatgtaacttctgatgaaaagaaaagtttgactctttaagtaagaactgataaacaattgatgcttaacaaatatataacaataatacagctgaccgttgaacgacctgggtttgaactgcaagggtttacttaatatacaagtttttttcaaatactgcagtgctaaatgacccgcacttggtcaaatcagcagacgcagagccatggctacagaggaactgcgcatatggagggtggattataaattatattccggttttcaactggtggaagttttgccacacctaatcccctcagtgctcaggggtcaacggtaagtacaaatcaaaaaaataaacccaacaacagtgactgttttctgatgaaataaaaatctaaata

SEQ ID NO: 57623 - DNA, 1034 bp, Bovine  19866881623743
  misc_feature (1)..(1): n is a, c, g, or t
ntcctagcagcattcttgacactaaacaagcacaatgagctgctaatacagcatgggtcatttattttctgttttgggtcacttctttcctctattgaaggaaaggaacatgacagctctctgttaataatgccaaactcaaaaatccattttctttctaaaatctgagtatcatgtccctttaaccacacctcctttttaatcctggcattcatttctgtccatatttttcaagatcctacttagtaactaagacatgccacctgaaagaattgagaggttaaaggaaacccgagccaccatcaccagttcctatgagcagagtcgattatgctttcagagctgctatgtgcattctcccttagccctccttcctcacagaacccgaagagcaaaacaatacatcgccccatgaatatattatcagtaccaacttgacagcctcgctgttgacgatactggttgtacttcatttccctcctgtaatccaaaaccagatccagcccccctgggcccagactggggctgtacagcagctgaagggccaactgccaatgggtctggaacagagtgtttccagcctcggcacctgacttcctggctgcctccatgtcaggtctcattggttgatgtggcagctgtgattctgacaacaagcttggtgttgggtcaagtttttgtttggctgacttactcccatagaagccattttccttgactcacccttgattactgaaaatactctttattaccttttaaaatcatgtgatatccataagtaaaaattgggattaacatttttgaaagcattacccatgactgattttttttttttttttttaatgctgaaatgcaagaagtaaagccagaggcagctcaatcctgtgtttagcacagtggtgtatcaaataccatttgtaacttcagaataaaatgcacagcttttttccttgttcttaggaacctggatgaaatgatcacctacggaaacagtttacagatgcaaaagtatgtagtgtttatatattagaaag

SEQ ID NO: 57624 - DNA, 679 bp, Bovine  19866881922036
  misc_feature (1)..(1): n is a, c, g, or t
ntgtgcacctgtaagttcctattaatacacaatctttcaaaagtaaacttgagcatgagccatttgaatatttcatagctaggagggaaaaaatgattttgtcttaacaaaaatacattgaaaaaattgtcaattactaacaaatagaaaatgataaacaaatgaaaatatcactgcaaaaaaaaaaaaaaaaaaccagaaaaataagcctcaaagaacagaaagcacttttcatccaaaaatcaaatgtttaatattctcatatagtttgtatttatcatgaatttccagtttaactttagtttctttccattgctacttatggacatggatcacttttctcactctttctctctctcttctgccagttctgctatttcttatcatgtgtatctgcctcgatgagttttaaatggctaaactgtttgcttagaatccaggtgtttttcttagcagattttttttcaagctgaagctggtccctttgaatgtagtgttgaattccaaatgtccccctaaaacataaccatgaaagtaatttctttcctcatcaacacttcagatagttaatagctgcaggcacatgttataaaagaagttgctgaagaagggaacttgaagtgaatttggcatagagttgtggatggtactaaacacatgggatgaagttatttactta

SEQ ID NO: 57625 - DNA, 977 bp, Bovine  19866880824348
  misc_feature (1)..(1): n is a, c, g, or t
ntagatgtttagaacattcagttccttttcagtctgtgagttgcaagaaataagagacataatttaggctacttctgttgagcatgatttcattagttatttttttttaccctagttttctttttttgttgttgttgatgttgtttatatgtatagcagatggccacaatcatagaaatcaggacagcaatcaaaggatcagtggtatgatgcaactttgtcaaggtcactggactcacccactgggaaaatagtgacaacatctgaaagcaagtgctgagcactgtatctgcttagtaatcagacaagatcaggaccaagggtgacctggaactgctgaaggaaataagggaagataaaaaaaggagaccagaagtttatttacagcaaggagactacataggcaaaagcatccttcttgctacttccagtagtttaatggtcattgcactcttgatagctccctgttcgttgggataacgtggttaattgcttgagccaaaatgaagataggcacagatttgcataagaatattctcagcttttttttttttagtacacaagaatacatgctgaaatctgagcatttctgagaaatgtcatcaaaattcaaattctcatctgagttcaaaatggtctgggtaattctaatgattttgtgcaaattcaacatgaacacattaatgaaaattatattataaacatctgtataactttttaaaatgttcaaaggattttaattttgattttttaaaccactcttcctttttcttcttgatttcattgtcctaatatcctccgaagcagaaggttttctagtttcaggtaaccaatcttttcttcatctcaggttctcaatttaggggaaaacattcattttttgttttcttacctggatgaatacaactttatgatttttttaagttgcttttattcgtttttgggctgtgctgagtcttcattggtggcccagtttt

SEQ ID NO: 57626 - DNA, 1351 bp, Bovine  19866881183598
  misc_feature (1)..(1): n is a, c, g, or t
natctacttagttcttagaaagcattaattatgaatggtgatttgcaccatccgtcttttaattattttatttgcagtgtcaaggtttgctgattcatgaaactgtaaatttgccagtctatttggagaatgaaaatagttttagctgaaagacactaataatctttataagatattttaatgctatagagaatttagtggctattaatagtaattagcaaaacaaaataaactttgtgataatcactgataaatggaaaataaaatgttatataccattcctccagtgttttaattgtaacctagaattaaaaatattgtgttatctttgaaacttataaaagacaatattctcaagaaagataaagtgataatatttttatgattttgtaaaataagttgcaataactgataaatatagaaaatgcaatttacctgactccctaactctctatctccttgctaaatctttcttacaatggttatacatgaactttcacaagaatcattgaatatatacaatgccacggatatcagaaagggtgacaatagcctagaaaggctgaataaattctgcaagccaattatcacagaagaagcaggtgaaaaccatgcctctagtaacaaaagacaatattatgcaatttatggcttagaacccagaatatgctcagaaaggaacaaactaaaagtagtgattttggtacagcattgaaaatggaaatttcagagcaaaatctgtaaacaaaagtcttaaatcctattgaccaaactgccataaaattacccatctgtaatggatagaatgaaagtgaaaagaaagtgaagttgctcagtcatgtctgactctttgccaccccatggactgtagcctaccaggatcctccgtccatgggattttcctgacaagagtactggagtgggttgccatttcagtggcccccaaaatatatgtgcacacaccaaccactggaacctatgaatatgactttatttggaaaacgggtctttgaaaatctagctaagcattttgagattagatcattctgggttaccagaatgttctttaaaccaacggacaattatccctgaaagagaaaggcaaatggagataagatagagaaaaagaaaagacatagacaaagagaggcaaggaacagattttctcctagagcctcttcaggcaacacaaatctgccttcacacttatctctaacttctgacctcctgagctatcaaataataagtttggttaagtcaaaaaatccgggtaatttgttattagaagtcacaggaaacttaaacacctaccctccccctgataaaggaatgaaagtttgttctctctggg

SEQ ID NO: 57627 - DNA, 1407 bp, Bovine  19866880417832
  misc_feature (1)..(1): n is a, c, g, or t
naaaatggtgcgctgattctatttgtgcaatgaatggaagggatgatctcagaactcaccttattctcaaaggaaccaggcttccatctgttgggaatggccaaattcaatcctaacagtccagtggaaatactaaattcagtcagtgacttagaggactccctggtagatgccagtttttagctagtttccagctttaggtcatgatttacagcccgcattcacgaggcagttaaggtcacaataggaaacacgggacacaagtatccaagtaaggataacacatctgttctcttagagaagaaaaggaaaagaggcacacgatagaaaaagcaaaagctccagtggtaaatcaagggcagagctgggaggaggactcacactttctagttctcacctatgacaatgtcgagcactcacacaagaggaaagtcgtattgcttgtgacagcagcccggtcaaggacaagaacgaggaccaacagcttctgtttttaccattgccaacacccttcccaccattgttttgaacaatatcctttggtgttaactccttaaaagccacccatctgtttccgtggaggtgactgtctattatcctctgcaaaaaagtccctgcacagtctgtctggaattaaaaaggagcagtggatctcgccagaatctcgattgtgcaagttgtcattgagaagagacagcagtggattcagggcccctccagctcatttgaaagagaatctttgccttggcctgatgaccggctgaaggtagaaaaaaagaccagttggaatacacacacacgggaggcttagaatccacagtaaaagaggttgcctccccgacagctgggatttctccacttcaataactagggtggagtacttagtgtttttctgcactgctcaaagttacaggagcatgctggaaaggcagaaaattagactttgaggggagctgctctctggttttgctcaatacagatcctcttgtgaaatggaggcaggttcagagtaattcttctagctggggttaacactgccatgattcacaatcctaatgagaatggagtcagcacagcagggtagagatgacctagacacagagggggacagagaaaggaatactttccccaagcctacctgagctgcggagaacttactttcatgctcctctgagcagacacacagactttcttcacttaacagttctgtttgactactaactagggcaactcatctgcagatctagtgcccctcattcaaatggaagtatgtgtctccaggaaagaagatacaggacacagttaaagaatacagattctagagccatgttgcctggtccatcacttcaggtccagaatccctggcacattatcccatctctgtacccaccaccacataggactctc

SEQ ID NO: 57628 - DNA, 1628 bp, Bovine  19866880576406
  misc_feature (1)..(1): n is a, c, g, or t
nattacaggcaacaacatggccactgagtgtgagtgaaaatattcaagctgatcactgcaaatactaagaaacactagctgttcacaaaaatgttgactccccttaagttataattgtttctggctcatcttgatattttgaaatatacttaaaataatattccacttccctcaaatatgtttttatcattcttttcatccaaaacatgggtcctttttgagaaaacaacttttattgtcaaattgctaattcccatttatgatctatagtatgaagaattctacacaatcacagaaagtactttcttcaaggaagcagtgacccaaacacagcaaatactttttatgattagttcattcgttctttcagcaaaacctttgactggtgtctgtatgactcaggatctttttaattagtaggttggttggttaaattgttcataaaagccaggagttcaatcctgcttttacggggaacaatgtgatttgtttcaattttaaaaaaaaatatgagtgacaaatttataaaaattagttgatattataggatatagatatactttagccctcatttatttagccttagtgtaaaatgggtcaaaaatgaaaagcagagtggtaaggtgtatggacaaaaccactcgtttgactgctcttgcagacatgtcactgtaggcctcctccaaggataacatccaggcagcaccacctctcaccaccgccctgagacacgccaggaaatgcaaggacacatagctggatcattcgtacctgtgaatccttgactttgtttgtcctggaggatgcctgtgctggtgctctatttttactacattattgttttgaaattttcagcagcatgatcacaggccatatgtgaagtacaaacagaatttattactcagtttgtcagtctctatatttaaagggtttatagcatgtcagaatttctggaaacagcctcttgtataattagttgcctcattcttcagagctaatgggatgagttggaagccagagtgagattgtttatgaaaaatatttcctccccagtactctgtcagaatctgtccctctcatcagtgtaattgtcagggtaatttttgtcaggtctttcataaaaaaggaaaaatattaagggcaatatggaggaaacaaccagatcctaattggcttaaggtacatggatacattcctctcatttttattactggggagaaggtcggaaccaagtgaggatgagaagaaaaataaaaattttcatctaatttcttttaaaattgtgcaataaattgatgtcactaatacgataattgggaattttacataattgaactgaatgatgacttcactaatcccattctgtaagacagaattctattttggatgaacattcttgattgctttcttccaggtaagacccatccatctcattcccagaggccattgtttataataaaattgaaacaattttatgaagctgattacacttaaactcaccctctttctcgggtctcttttatgatttccctttgatagaaaatatagtcagagcttcaaagagtagcctagggaagaaagaaaattatctaggaaaatgtgtggtataaactagggaagtcatcaga

SEQ ID NO: 57629 - DNA, 2918 bp, Bovine  19866880602388
  misc_feature (1)..(1): n is a, c, g, or t
ntctactgatctgtgccgggcagagcccaatcttttaattatgtaactttgtatttcatcattttataaggtgtgttttagctcattagcgttttttcagaatatgagagatttcctatagtgtttgtatacctgtcatgctgctaagttgcttcagtcatgtccgactctgtgcaaccccatagatggcggcccaccacactcccccatccctgggattctccaggcaagaacactggagtgggttgccatttccttctcctatgcatgaaagtgaaaagtcaaagtgaagttgctcagtcatgtctgacttttggcgaccccatggactacagcccaccaggctcctctgtccatgggattttccaggcaagagtcctggagtgggttgccattgccttctctgatacctctcatagaatggacattttctatatgcttctataaatttgacattatctgacttttccttctttttttctttctcttttaccatttccttgtttttgcttaagtttagagaaaggaggatcttggacaacagtaagattttccaaagattaaccatgactaatctgagattagttcagataattctcattaagaagaaataaacccccctgagagagaaagcagctaattaataagaaatgaacagagcaggaaattttgacaatcacaattcccattgagttcttttatacagtatatttcttgaaatttcccctaattactgaggttgaggcatagaaaactaatgagagtagtaaatctgattcaaagaaagatcacatagtgccttctaaaatttgattcccagtgtattttaaatttttcactctagatggccatggactatgtaatatcatactgcattcatgaagaaatctttgaattatagtcccagctactttctgtgtttaaccactctagatatactaatggaaaatcagtgacagttctagtcagtggaaaagtgaaagaaagaagtgaagtcgaagtcgctcagttgtgtctaactctttgtgaccccatggactgtagcctaccaggctcctctgtccatgggattttccaggcaatagtactggagtggattgtcatttccttctccaggggacttcccaacccagggatcgaacctaggtctcctgcattgtagacagacactttactgtctgagccactaggaaagtcaaagaacattgaatttagtcagcagaactggattctaagctcttactatagcctgagtgagaaggtgtatgtgtggggaagtagccatgaaaggagttttatctccccttaacaccgagtcctgtctctagcagtgttagacaaaatatattttccattctctttctatcccccttccaaaccagttcatgagcataacatcactaagagtctagaacacacctttatgggctgaatgttggatatgctgtgcttacagaggcagaattaatgctgtgcttggcaaggatacaaagaaattagaaaataaatttgtgtgagatctctatagtgaaaaggtagaaaccagtatgaaattagttgctttgacagctcagttgatatactgattataatgatcaatttaagagtagtaaaattgctttcagaaagttctttcttgagttctttgagattttctctaactttactattcttagataccatttaaaattagtcttatttttattcaacttcattttctaaaacagggaaactgatatctattgcataagaattttatttaaatatacctgataagataaatatttccagtgtgttagagatgagaattttgcttccctcgtggctcagatggtaaagaatctgcctgcaatgagggtgacctgagttccatccctggtttgggaagatgccctggaggagggcctggcaacccactcctgtattcttgcctggaaaatcctcacgaacaaaggatcctggcaggctgtagtgcatggagtctcaaagagttcaacacgactgagtgactaagcacacagagatgagaactgtagcataattaggtcatctgcttaagaaaagtctatttcattgcctcctaatggcatttgaatagttaaatgtgttttgatgggtcagaaggatttttaaagaattgaccttttattaacattttaagattcttgaaattattggcagaatcaaaatctttagccccatataatgtcaagtattttttcccctctatttaagtaagtctttgcctatgattccatgttttgttgtttttaagaacttgaactttagtcagactaatttttgcttttgatataagcaagggaaattagtcaaggggccactagcctaatgaaagagagaagaagaactaaaaaaggacaactgaaaagtggctggatttctatagacagcaataaatacaaatgctaatgatattgacaaatctctgattaattgggtgacagattttcatataattttcatgcatttactttgaggaaatatcacagtgttcttaatattagacatgaactaaatttacttagatattacagtggataaagagacacatttttaattaaaaatatgaactgtgtgaaaatcaaactctgtttaggaagccctctatgtagaaataattttttggtttaatagaattctgcctgtttgaaatgatttaatttactactcaaaatcaatgttattttactttgataaagtcagtgttaaaataatatgaaaggtctaattatcccttcctttgattacactgttagaatactcagaacacatcctatcaagaaacaggaagtaccggaaatccaacagaagggctggtttctctaagattgcaggtcagcgggatttttaatggtctgtgtgtatcctgatactggaggaatacaggatttcaaact

SEQ ID NO: 57630 - DNA, 1100 bp, Bovine  19866880675012
  misc_feature (1)..(1): n is a, c, g, or t
nttttcaagaagtttaaattcttgaagggtacagcatcacacgaattctgtgtccaatggccttagcaggaaggttgcttcggaatttggcactaaccatgccactgtttccatgagcttgagttatctttccccagattactctggttttgttaggttttccaccagcagttactgtgttgttctttgctttgtacacataaggcacatctcttgcctaaatagaattcaatttcatctcgagcatatacaccttcaattttcaggaaagcagtgtgttccctttggttccgtagaccccatttatagccagcaaagatggccttggaccacagccttccagacatatttgtcgttttagaagtcccgttcccagcaggccttcacagggtccaagatggctgaaagagcaggtattattatatttctttttatagatgaggaagctgaaataagtcacacaattattaattgcagagccagaggtgaaatcctggctgatgggtgccagaaactgggccctcaaaaaccaaaaaacaatactgagctcctaacattaaaaggtagattccctgcctgaaagatccagggcacttttctcttccctccatcctattcaacaaaccatccataccagagcagactaagaggatagtccctggggcagcatgatcctatctagacaaggcagggagagagggggattccagataaaagggggcccaaaggaggaagagaaaagtttttccttactgaccataatagatgtctgcacatggcatgaccctgtacaaagaactcactcttttttactcaagcccaaagtgaaatactattttttaccttatctcaacaatttctatatgactgactgcagatgaggctttcccagtggctcaagaggcccaggtttaatcgctgggcaggaagattccctggagaagggaatggcaatccactctaatgttcttgcctggagaatcccatagacagaggagcctggtgtgttactgcccatggagtcaggacattttgcccaaagcccttcggatgccagcttcctcataacaattagtaaccgtgagggttttgagctgcag

SEQ ID NO: 57631 - DNA, 926 bp, Bovine  19866880697778
  misc_feature (1)..(1): n is a, c, g, or t
natcctaaagagaatgggccttcaaatggcatggcatatgttatcagtctaagaaaaatgagggactgccagctgaaacttcaaacaatgagatttggtctcattctcgaaaagataatctggtaccttgtatatatttaaccgtatttaatcctcactaacaagccggtgaggtaacagtgtcagtctccattttaggaaggaaaaaaaggagactgcaggagaaaactggtctgtaagaatcagagctgatacataaacccaggactcctggctctcaatgccatgttctcttattgtactaagaatcctcttactgtactgagcctccctatctcattcacttctttcctgttttatctcctctgacctgatgagctttcccctgattcctgttgagtgcctgctttgcagctgcctctcaatacatggttaatttcccagcattttctgtgagcagatgttctgaaggagcagagctgttaccccatccctggcactatttcccacagattaccggattgaacacagtagctgctggccatccttttgatctgaaaagaaagacttccccactgggatattcctcatgatgatgtaattagcttcctagacatacctaacaaatttctttctaatcacaagggatgagcagaaaggagaaagaaccgttcatcttggaccgtgcgcagctattgccatgcacatgcatcctcctcgtgcaatgtcttctttggtgactgttcaaagattcagaggcaacaagctgctcttcaaaagcaatggggaacttcacattcataaagggggctcaggcacgattgaattgctttttcaaacctggcaaagacattaaaactgccagtcctttcagctcccaactgtcttcagcattaggaacaggtgaagctcttaataacttttgg

SEQ ID NO: 57632 - DNA, 1916 bp, Bovine  19866880802723
  misc_feature (1)..(1): n is a, c, g, or t
ntaacattaagatgaatggggttttaggattttattatctaaataattatcttgtttcgaagaatttagctttgctagtggagacaaagcgatggttactaaatttctgcaagttatagagatgaagaccttttgtgcttacaaagcaaattgtgattgagaacttagaagttagggaattggtttattttaagcaatctggagagttccatcgagaacagttttgctccttcagtgcagcaaatttttaatttctggaatttctaataattaggtaattatctcaactgtgtttatttcaataagcagactctgtgtacacaaaactgagcataagaacctataagattcttcctggtgtttgacttcaaatctaagctgagatgatgtgatgttatagtaaaaaacaatactactccccttgttcatatcttctggtaataataatgacctctcacattttgtgaacatgtgatcttttgagtctcacaacttactgagacaagctaggcaggttcactcatctcattctgtatgcaagaaaactgagaccagataagtgatttcacacgtctgaggtcagaaagtgagtcagtggcagaatatggagtagaccagaacccaggtaccctgactccccacccagcaccttgatcaaccccattgtcacagccttggtacccatctgtgtgaccttctcagctgaatcaattacaaaagcatgccaacatgcattctatttccagtcttcttctcccagctccatttctagttcatgctcatattttcatggagtaagggctctaacattgaacttagtagtgaagatagctgccctggggctttattgttagtgctacagtgatagcccattgggtgtccgcgctcccatacttttaacttgaaaatatgtggaagttaatgtcagagggagaggagtttggaacagtggcatttggaagcctttatgaaaaatttcccactctccctcctttctccatccattctcagctgattctgaaataaagttgggtccgtggggaaatattcccaattttggagcaattggttgcatgtagtggcaccagttacaaaatatatccttatattggctcttccgccttgcctgcttcactcttaattccttactcctatttcctaggctaggtagcctgtttcctaagctctgctttgtggggaggccagaccaagaagtaagatgtaagaaatgtgggttagatccctgggtagagaagatgtgctggagaaggaaacggcaacccaagtttatctatgtctcactcttcagcacacagacttctcctctgctctcccagttgggttactgcaatatgcctgtctgttgatccaaatcttattcttcattgctctttcttccaaggttgttttccatggtgtctctgaccttaggtaatttctttctctcagaaacctccatctttacattgaacaaggagaaccacagtatgcctgtatctcctgtggcaaatatttatagataactttgtctaagctgaccttcttggtaattcatatatacctttaagtccctcggttatgtatcttatatccacagcacctgcatgatgtgtttattttccaactgcacataatacaagggaagagtgaattgctctttctgatctgctgcatctcccatctgactcaaggttgctttggttataacatgtctgaaggagtgtgacagtacagttctgctgtagttgggttatttgttctgtgttaatgtgagactagttaaaactcataagccacttccttctttatgtcatattttctttatatgccaagtttttggctaaaccaaagcatttggaaatcaaagacaaggagaatttttcaaggatgtaagcatttttattctgcaactcata

SEQ ID NO: 57633 - DNA, 1151 bp, Bovine  19866880937300
  misc_feature (1)..(1): n is a, c, g, or t
ntgtctttgcttcctgctgctctgtggtattgcgtattatacacatccacctcatttgacttatcccagttcccagatttgaacatctaggttacccctgatgccgtactatcatagcagctctgaagcaaaagcattcactcatcaccacttatggaactgtgagcatttctctgaagtacccactcagaggtggaataattggacagaggctatatataagcataattgacctaccttctaccaaattgctccctaatacaattttatcagtttgtattctcaacaggaatacattaaggttcccactaaaaattctttttatttttcttttaagaaatttgtgtcatttatgggaaaagggaagactttgccagtttaattttagaattgtatttaaaaggagtggatatggtcctgacaatattagtgtaagctttttgtgtcttctgacagattatacattagatattagcatgtgctcaaaatataaaagcattgaaacaacagtgaatctgtggccaagtattcaaataaatacttttctttaatttgtctttgaaaatccacaagtcctagagttatatcatcatacaataatagtatattttaaggagacatttaaaaataactaacccaaatatatctctgcaacttcttaagcatttccaagaatggtggtgttttgtaattgaaaccacactctattgtgagttcacaaggtaattggcagagtgggggcaggggggttcatgtcctcttgcttatttatttaaaaatcattaatattttgcttttgtatgcaggtgtaattataatgttgcctgagtaagatttttgtttttgattcatttttgtattggaggttcagaatctgaaatgccctgagagaattacaaatgacatcaagttagagaacatgacctaagtgaaaacatatgatgcgtctagctactgttggatttacatactttctttaatttcccccttgtgtgatttctggactttgtgtgactcctttattaacttcttcctaacccctaaaatctaactccctccctagcgtgcttcagagattgctttctaagaccagccatgttattgccaaacatgaatgccttttcttcagtcatccaattttaaaaactctt

SEQ ID NO: 57634 - DNA, 1294 bp, Bovine  19866880938126
  misc_feature (1)..(1): n is a, c, g, or t
ncatatcagttcacagaaacaattactagttccttcctgtgacagggtggagtaagtgcatctggataagtgtttgctgaaggattaaaccaaagagagccaattcttacctaaatttttgggtaaatgcacttgtgaacagattttgccaactttattttagattcaaatcgtgaatgcatatataccagcagtgacttgaggaaggacaggagattgtttgcaaacataccgtattccttccataaggaagcttaagaagggaatagtattaattaatactgtatattatgaacagtcaagttaaagcctatgtgtgcttgctattacattttttggaagatagttcatcaactgagaatgaaatgcatgagctggaaaaatgcagaacattttgtttcttttattccctctccctctgccaagacagaatggcatatggtatcaaaagaattaaaaaggattacttggcacacatggctatctgtttatccacatgggtgcatcgtttcatgaacttttaactgtggaattaatattctgtgtcttactagctgggacttttttgtgggcaggagactattcagctttctatatccaaccttaccattttctatatggctaccatagagtaagggtttaatgtgtgacaaacattctattgaacattctctgtaatgataattttttcccaaagagaaaggatattgttgcttgggaaggcatttgtatgttttgcgtatggtggattagattaggcaagtttgggagtcacagcggggagttactgcagaatctggtgtttggaaggcagtccagaaaagagtcatcagctatgggatgtgaaactgaaatctggatgagggcaagagggtcaggagagaaccaatcaagtgaaaaccaaccaaccaagaagccaaaatccaaacaaacaaggaagtcagagaacaagggtatgatatgtatgtatgtggagtttgaatttacttgctttgggatatgtccagtagcccccatctgataaccagctgctgctgctgctgctaagtcgcttcagtcgtgtctgactctatgtgaccccatagacggcagcccaccaggctcctccgtccctgggattctccaggcaagaacactggagtgggttgccatttccttctccaactgataaccagtagctcttagtaaattctaagattcagacactgcacagagttctcctttttttttttaaatgcacctgtgacaactcatatttagaaacaattgttcaagtggtagaagagatcatgag

SEQ ID NO: 57635 - DNA, 1069 bp, Bovine  19866881053891
  misc_feature (1)..(1): n is a, c, g, or t
nattcatagctgtaaagtaaaaactatggataatttataacttaagaaagttttcttataatgctgtgagggcggaaagtatttcaaacatttaaaaaatgagtatgctggtgttccaaagtaaggggataaatcagaaatcttttatttattcataaaacaaagagctttattattgagcattgcctgtgaccttaacctcgcataaactgaacataatgccacctctgaaatcagccttttcttctgccagagagaaaggctgttgccaaattaccctgattgtcctgaatagtcgacaaataatcatgggaatgctttgaactcatggaacacctttcatccacaaagctcaaaacacttcaaaaagaatgtcacacattcacataatcacccaaacccctcttgctgggggtggggatggggttaagtgtagtagcgtgaagtgttccactttgttcaggaaaataaattaaagttataaaatgaaagtattttcaggtaagaaagtttaaaatacaaggatgactcaactggattgaaagcttatgaaaccgagtgataagcaagtggttgaaggtgaatttgggagaaacaggcaaataccagggctaggatgggggtgacataaaagaggtgcccacaattgcacaagtgcctcattgaattgcacactggggctcctgttctggcttcatcctagtgtcagcaatttgactagagctgcagctctgcctggtatagcattgctgcacagtgtgtggtggtggtggtaaggggcaggctgactttagatgcaaaggcaatatggtaggcattggccacagagcctgagatctgtgatgtgagctcagttcagagtggctgcaaaagcaatcctgtccattctgaggtgggatggatttgtcatctcatctcggtaacttggagaattgaactccactgcatcagatccatctggagacagagcaggtggatatagccaaccaaggggaagagaacttcagttcacttccgtagctcagtcgtgtccaactctttgtgaccccatgaactgcagcacaccagg

SEQ ID NO: 57636 - DNA, 1021 bp, Bovine  19866881200889
  misc_feature (1)..(1): n is a, c, g, or t
ncattccttttaataaactcaaggattctcaaattttagcatgtttaagaattatgagccttccctggtggctcagacggtaaagtgtctgcctacaatgtgggagacccaggttcaatccctgggtggggaagatcctctggagaaggaaatggcaacccactccatgcttgcacatacaaacatggatatttttctttacaggagttttaagagattttcaaaagtcaatctaactgtacatgattttagctataggcactaactgtaaaatctgagcccttgatgaaagatgctattttaagcatttactcttaatttttaattcagtcttaccaaatacttttcaagtgctcaactcagagaaacaattattgtgaagaattgcctgaagtctttccattcactaaggtagagatttaactgcaggagtccatgagtagttttcaggagacctaaaaatgcccccaaattatatgtaacactggatttctgtggatatttttcaggagagacagttttcactaccttaatcagattttataagtcagaacttaccaacatttttcatgtcctggtacaaaaagaaaattagattttttttgtattgcatgctgagggattttgggcaatctaagttgcaaatgactttaaaattcatcatattttcttatattatgtaattataaacatgaaatgcaaagcattagagaagatagtaattattagatatgcatgtgtccaaataaaaattttcaaatatttaatgagactctttagcttgcttttgagaaccaaatttttaatattcttaaaatagctagatgcagctctccattaaatttttaaatagggattgtattcaaaatcctgagagtcaccatccatgagaaaattgctacaaataggtaacaaaaagtgtgaagccaatccaagatgaagcaaaggaacctggtttattcgcccactgagaaaaacaatcagttcagttcagtgcgagtcagtccgactctttgcgacc

SEQ ID NO: 57637 - DNA, 1328 bp, Bovine  19866881379554
  misc_feature (1)..(1): n is a, c, g, or t
ntgaatctggttgttagagtagcagtaactccaggctgtgaacacaccaatgcctggagtccttggcaggcagtgtgagctatagcctgctgccagctgctgtattgaaggctgcttttgattagaatgcatatgtacatctaaaatttatagttgaacatggattcatggatcactttaaataggcagccagcccaacctttaaagttacagaaggctagagactaaattacacattaacctgagcttgaagatatgctacaaacaggtttgctttggaagtgactggagaccacacctccccagcactttgcttccagggatgttctcaaagattaaccttgggagggttagggcaaaagtgaagtaagaagacagtgatttttgccatatatccaaaggaggactgcaggtcaggtgtgaggtttacttacatatagtaagcatacagtttaaaagagctaagtagatgtcctcagagcaagaaacagattcagatctttttaggtgcagtactactgttaggtaagagctgggaagatgtctgttcagccttgtgacttcaatgctgacatatgcagggcatggttagctctttttattcgttggtattagcccatgtttctttaggcaagagagggaaagaaggagaaagaactaactttggaaatgaaaagatgcaacatttttatacagggctggagaatatataaatgaatattcataatgaatatgatttaaagagtagctaatattgtctgaagctcaccagctttagaatggttgatgatcccttaggatttactttttttctgaaagccttcacttctgaagtttccaatccttttgctcttaaactcaattctgtcttctttatttagcattggaatttgcttttgctgtctccttctcttactttgatttttcttcttcttttttaagaataatgtatcaggtgatgttctttcattgtatggacttctgtgccattatggttttatcttttacaaatgagggtcagttcattttcactgacctgactctacctgaatttctctgtcctgctggtactcatgtcagagtctgagccatcttcctcaataatctcctgctgcctttggggcacatagctcatcttccatccttttgctttttataggctctactttgtaccctaagtctatatttaatgcaccagtcactgtgatatttgcaaacctatgcaaatcttattcagtccattcttttcttgtcaagacatctgaggcaacatgcccttggtcacatgggtatactctcttgcatactggcttggtatttattttttc

SEQ ID NO: 57638 - DNA, 2186 bp, Bovine  19866881383375
  misc_feature (1)..(1): n is a, c, g, or t
ncttttaatgtatgtgacatagtatattgaactatatatcgtgatggcgtttcctcattagctatggaacgcattataaaataaaatcaagctttaaaaatagacattgtgcttatggaaaccattgattgtgtttcaagactaaaagcattgagagctttaacctgtttgcagtgtaattttcttatgttcccatggttggaaacctctttaagaaaactattcattccattcatcaggattccttcattaggaatgtgattctccctcaacatatcattttttatgaaataaggcttcagagttagattacctgctggctctaagtgtgggatctagttaaggcatctctcaatgccggtacatgcctcatgaccttctgcaaagttcctctgccactggcaggattcagggcagcctgtttactgtgtgatatgaagaactgttaatggactctgttcagacctctaaagctttccataatcttttgtctacctctgttttgttttgatatgggtccccttttctatgagaggaggagacaatcattattttctcctattttgttcattcaggtccacctgtgtgagtgtttggaattgtgaatgattttgtttttctcctgacctttctagaagctccaggattcaaaccccaacttttttacatggtgagatcaatgtgttatcagtgcaatgaggtatataatcactagcctacctatttaaacttccattagttacaattttagttgttaaggatcattaaataagcattctgtggcctgagcatctaacacctcaaagtcatgcaaatgctggttcatgaattctgataaatacctttgaacagttttcggcataggacaccgtgtttttcaatgagtatgaaaaatctctcaagaatagctgattgaagtcaggtataaatatttaaaaacagcttttttcattgccaactgggaaaagaaagtatgccaaatgaaactgttggctagccctgttgtagatattatgaagagtgtatctagatgatggtcagtacataaagttctgttagtactttggagctgctgctcaaagatactaaatatttaacaaataacatgtggtggctcctatctactgaggtaggtaatcaaggtggaggagaccaagaggttgaagatagagctcttttctgtaagacatgaataattgtaatagtccaaagtacagtgacaattttggagccaggagaccagcaggagtagaagaattaagtgtagaaagaagaccatggcttgtgccaatccaggctaagtacctcttgtcaagataggagataccatcaagtccatttgtcacagagcctaggaaaaaggtcattaattacatggataattttaacaagcagcacagttcctatttcattcatagtaaagatggatggatgatcttcctgactcttaactagtccctaagaaaccactttactaaaataaatattttattagctaacagtcttatttctagtgttacaatgtcttatcttacaaactaacttttatgttcttatttaaacaactaggggctaccatgttttccttcttgaaaacacactcaatgtctgttttcaaataatgtcacagagctgtggaactggaagacaattttgatattcattataaatgacagactttaattatttgcataattcaatatagtagcatcttaccattaatacttggaatattttaggtaaaagtgacatttttggcttttcttatgcaaataaatttgctacaatcctttatttcactttgaatgcagagagtagcttacttattatatagtcaggtgggagaaatttaattattttaatctggtatcttaaatcaataatttctgcattttaatagtttctttgttccttctcctatagtcttatcttttaggattgaggcaagtttttgaaatttgttttattaaaagcataaaaggaaagaaataagtgaatagatagcaaacatcagtctatgtaggacaattatcaagaaaataaatatagccaaatgttcagctatcttagaaatcccctcataaaccacagcattgcctcacataactaataggaaccaatcaatttactctcattattttttaatgttcattcactgcaaaagtgtatacatgactctaaaccaa

SEQ ID NO: 57639 - DNA, 1086 bp, Bovine  19866881638635
  misc_feature (1)..(1): n is a, c, g, or t
ntgctgtggatgctgaaacatgtgcataattagtccagtcatgaggcgtgcctggagaggatacacactcacagtttctaatgcacacatgtgtaacttggattacctggaaagctattagaacaagtgtttcaagattcagggcaggaaatttccttttagcttttctcaagtgctgttgaacaaaaagccatattcatttgcatccatgttattgcaagagcgagtcagggagttttccccagcacgttactggtcttctgaggacaacatgtcggttgctgccagatctcttctctgttagacagctacacggccaggcttcatctttccctttggatccactcctccattcctttgctgttggttcaaactttttggctccctctgtagagaattgcctcccaaatgcactcggttctctcctttgcatcacgggtctttctgaggctccaggctcctgagttcatctgctggcatcacaactgacacaccgctgggcacgatgggaagagtgctcgggagtattggggctctttcaatgggcaagtagagaaaaaacagatcgcacagaggaaatagtaaaaagactggcttttggtcgtcttggagcttggtgttggaggagaggaatttattataagggtaatcgggcgtggtgatgggccgtagatgaagagaacacactgcgggtatggacatgcttggccactcacaacatgaggaaaacagcgatggcttggggtgaacatccagatctctggataacatctttcttgttaataaaagaggccttgccagaatgccagcttgtcaaagacagtattgcagggaggaggtggccccaccttataagtgctttctggtcttcacatctgtaacctggacaagttctctctttggctcagaaggcaaaggcaatggaaatcgagcctgccaagacaataaaagctttttcaagaccgtgagctgttagataaacaattttccttctgctcccaattccataaatccactgctgactctgacttatttttgtgtgcatctcagaatataaaatcttttattaaccacaaagtaatggga

SEQ ID NO: 57640 - DNA, 1487 bp, Bovine  19866881921590
  misc_feature (1)..(1): n is a, c, g, or t
ntctgctggtgttttaactcgacaaaacaagaatgagatgctaaacacactggggtcactttttttatgctttgtagttacataatggtttaactctatcatcttcaaaaatcaatttgagggagtctgagctcaaaaactcagtggtatgtttgtgatctaaaaagttgaccttcattggctatccaccttccaaacctccttgcctgtcacctgaagatacggctcaaactcaaccaaccaaaggaatccctaagctacttgttaaagtccagactctgagccccatttaagaattaatacttctgagtctagggtgaagggaaatttgcctttttagtaaaggtcccaggtgattttaaattcagccacacttaagaaccactgccataggagcagtccttatagtataaatcatgtgtgattttgttttctcattttgagtgatatatgacagcaaagacattttgtgtcatgggaactattacaatagacatataaaactttcacgaacagcctttccaaattatgtaccaaaccatcatttgatcacctttaaaaaatctatataggagccagataagtatcctatgggaacaagtagacttgagggaaaaaaaaaactgcacccctgattgcttctgaatgtaattaagagtaaagtgttcactccagccacctgtgaacaatcatgcttgacatgtgacgtggagagcagtcacttgttttagactccacgccagcacttctgtagatttatggtgatagagatagaaattcatttccttagcttttagtccaatagaagctaaattctcaatttactacttcatgacctttgccagaaaaaccagttgaacgctataaagagaaaattctttctttggttgtgtaatatgcggccacagaagatgaaggacttgaaaaaacaggaagtgttttcagcgtggtgtctcaagtggcataaggaaattctaaaaagtaaaattttggctaatctaagaattgattacagtgtttgctaaattcctccagagctaatagttactctctaaagctttttagattgacaccttaaaactaattggcttagttctttttaaagttcatcacctataattaatgaactaaaagactgggaacatgaagattttcaagtctgcagtttataatcccttggattttagatttacgtgacctttagcctctcctttcctttaaacatcacatttaggcaaaaaatggaagagaagttgctactcattgcattgacctcagaatcctagtaaatagctgaaatgtatctttagatgttggagtctcctcgtcccaagctttcttaattcctacctagcactagtatcgctctcttcaacaaaacattaatttgcgtcattttggctgacgacaaaatgaaacaaagatggactaaagtccatcttaatatcctcaaaaaatcatctgctgtgtccacacagacccagaca

SEQ ID NO: 57641 - DNA, 1151 bp, Bovine  19866879966073
  misc_feature (1)..(1): n is a, c, g, or t
natcttttaactgctcaaaggactctgcatttagacagtttagaacatctcatgcctctcacagttgggaggctctgagcaatcacatgtggccggaaaaacctattcaggcaggctagaggatttccaaaggagtttgtaggttgaaacactgtcacacccaggaattattaactggagctgtaagctaactcttttttcagagagaggtagtgggggacagcccaccataaagtcagaggtgtaggtgaaagcacaaagcagaaagtaggcagactctggttttgggggtagatgctcgagaatttccagggggactcctgaggctccatcccgcctttgcgtatgccgagcctccttcctcatgacctttgccatgggcggagttcctcacgctggctcccggcagtgatagaattccagttgagctattccagatcctgaaagatgatgctgtggaaagtgctgcactcaatatgcaatatgcactctatatgcaatatgccggctcccggcacctaccaatttgtaaaaacgtatgtgatgctagtccttgctacacagaaataagcagctgagagatgtttttaaccatgccccactccaccagaaatgaaggaataaagttttgccttttgcacagttcatttcttcctcatagttaaatcacttccatgtgtcacatgatcttgcttaagttcccaacatcatcgtgatagagttgaggagctggcatcatcacgtccactccacagcttgcaaaagcggcaaaaaaaatgagggctccatcgaggcacaccaacagtgacaaagatgacttgaaaagtaacaggaacttatggctatttcctttattaagcttgtggcttttcttaatctggcttctccttttctcaccaggtctatgagacaggaagtcaccactctgcattgggtttgttcattcttcttatttactatgcaggagagctttactgttgctgcatcctgataaagtacaaacaggatatttctcatattttgtgctctggtggtatatttattaacatacaacttattttagatcaggcaattgatttgacccagcgtgtatgctgtgtaactttaggcaaattacttaacctctcgagtcaatttctataactgtaaca

SEQ ID NO: 57642 - DNA, 2477 bp, Bovine  19866880123641
  misc_feature (1)..(1): n is a, c, g, or t
nattgttttagttttgccaatatcgaaatggatccgccacaggtatacatgtgttccccatcctgaaccctcctccctcctccctccccataccatccctctgggtcgtcccagtgcaccagccccaagcatccagtatcgtgcatcaaacctggactggcaactcgtttcatacatgatattatacatgtttcagtgccattctcccaaatcttcccaccctctccctctccaacagagtccataagactgttctatatatcagtgtctcttttgctgtcttgtacacagggttattgttaccatctttctaaattccacatatatgcgttagtatactgtattggtgtttttctttctggcttacttcactctgtataataggctccagtttcatccacctcattagaactgattcaaatgtattctttttaatggctgatatcttgaggtaggaccatcctaaaggagatcagtcctgggtgtttattggagggactgacactaaagctgaaattccaatactttggccacctcatgcaaagagttgactcattggaaaagaccctgatgctgggagggattgagggcaggaggagaagggcacgacagaggatgagatggctggatggcatcacttactcgatggatatgagtttgagtgaacttcaggagctggtgatggacagggaggcctggcatgctgcgattcatggggtcgcaaagagtcggacacgactgagtgactgaactgaacttaactgaactgaggagcttattattgatttgagaactatttacctcaattcacttagtgttataaatttccctcagcaatagcttagctgcactcaacaaattttgacacgttgtacttttatttttgtttagttctatgtatttttaaaatttcctctgagtcttcgacttccatctatggattctttaagagaatgttgtttaatttccaagttttgggagattttcctcatatctttctgttactgacttctagtttgatttctttatggttggaggatatactctgcatgattttgattcctttaaatttgttgagatttgttttatgacccaggatatacattcagccctccatttccttaggttctacatctggaaattcaaccaaccacggatcaaaatatttgagaaaaaggaaaaaattccagaaagttccaaaaagcaaaacttgagtttgccacatgggctgacaactatttgcagagcctttacatggtgttgggtattataagtaatctatagatgagttacgttacatgggaggctattctaagttatatgaaaatacttcacaattttatataagggacttgaacatcctttgatactggtatctgttgtgtgggggtgggggaatcccagaactaatacccccaaggtagattattggctaccttggtggatatgccaccatgttatatctgataaactcattgtaaattgaaaatgtcataagtggaaaatgcatttaatacatctaacctgctgaacaacacacattggcttagcctaacttaaatgtgctcagaatgcttacattatcatacagtggggcaaaatgatctaacataaatcctgttgtaaagggtcaaatatctcatgtaagttattgaatactataccaaaagttaacaacagaattattgttatgtataggctgttaccctcaggagtgtgtggctcactgccaccacctagcatcataagagagtgtcctaatgcacatcactagcctgggaaaagatgaaaattcaaagtttgaagtacagtttctaccaaatatgtgtagtttctgcatcatggttaaaaaaaaaaaagtaagtcagagaaactttcctggtgatctagcagttaagaatctgtcttgcaatgcaggggatgcgagggaagtaagatcccatatgccatgtgcaactaagcccttgagcggcaaccactgagaccgtaagccacgactagagagtccgtgtgccacaaggaaaggtccctcacgctgcaactaaaacttgaagcagccaaataaatagataaataaatatatttttagaatcataagtcaaactattgtaaatcaggggccatctgtattctgttcatattgattattatgttattattcatcattatattttatagatatctattgcgtgagtgcatgttaataagtcacctcagtcgtgtctatctctttgagaccctatggactgtagcccaccaggctcctctgtccatggggattctccaggcaagaatactgaaatgggttaccatgccgtcctccaggggatcttcctgacccagggatggaaccaggatctcttacttctcctgcattggcaggtgggttccttaccactagcaccatctgggaagcccagatgtttattaggtcccattgactgatagtgtttttttcctaagtattatttatccat

SEQ ID NO: 57643 - DNA, 809 bp, Bovine  19866880363365
  misc_feature (1)..(1): n is a, c, g, or t
ngcagttcttagtatgagatttcattttcttaaaatctatcataacatatttctcttaagggaaaaagtaattgtcataataatctgacaactgactgaatgatcaagataaaccctatacccaggaggaatggcacctatattaatggtgggatgtgtactatatattttcataatttaaatataaatttgatgtcttcaaaaacccggtgtacaagacagcaaaagagacactgatgtatagaacagtcttatgaactctgtgggagaaggagagggtaagaagatttgggagactgacattgaaacatgtaaaatatcatgtaagaaacgagttgccagtccaggtttgatgcacgatactggatgcttggggctagtgcactgggatgacccagagggatggtatggggagggaggagggaggagggttcaggatggggaacacatgtatacctgtggcggattcattttgatatttggcaaaactaatacaattatgtaaagtttaaaaataaaataaaatttaaaaaaaaagaaaaaaaaagtaagcaaaactgagaaagtaagcaaagagtatggtttctctggctttgtgctaaatatacaaagttagccattttgaaaattatttttgttatcttaaagtactctggaagtactttgatctgagtgagccaggattggctcactgcgatattcactaattattgacttcagatgtgttcttcaaccatgtcttcccagtatcttctgggcagagtgtaggtaagacttatgtacaaagccctaaggacctggcacaagtc

SEQ ID NO: 57644 - DNA, 944 bp, Bovine  19866880421397
  misc_feature (1)..(1): n is a, c, g, or t
ngccaacataaagcagagctttaagctaatcaatgataactaatagagactaataagcatgacattgacagaaagagatgagaatgttctactcgtagcttgttactctgaaaattcaatggtattaatatttaataccaagcactaagttggctcgaaggcctgttaaaaagcagtccaggaagtgttccaatttcttggctcctggcctcttacagaagtgttaactgtaccagtttagttggcttgggtactcagagagcagaatgactctgaaagttgttctttttcaacagttttcatcaagatgctgagtgcctgttcaaacaaatattttggaatcttttcaatgcagattctttttaaaaatatacaactcagcatattttaactgaattattagaaacatatgctaaagcttcatctgagaaagcaaaaaatatgaattatatttctaaattgaacttttgttgaatttgaaaacacttttaaaatggaaactatacagagaatattcagaataaaacattttttgaaactttttcttttgaacagtttcacatgaatgctccctatcaatggtacttctcatttgaaatgcagctcaactgtgtcacactggaaagaaattataatatttcatgcacaagttatgtttatctcaccttaaaaatatttatggtcatgctacagaaaaaaaaaatgtttttaacattcagcaaaatttttaaaatatttaaaaatgtgactcaaaaccctgtattttcatttaatacacttataaacaaagaaaccttatttttacctaacaccttttctaggttccactccttaaattccttaaaaatttttggcttttaaatctgtctccacccttctactgaccagttacgcttctctgaaatttactaacaattccagactcttaagaaggttcattctca

SEQ ID NO: 57645 - DNA, 1453 bp, Bovine  19866880422594
  misc_feature (1)..(1): n is a, c, g, or t
ncttcttaattttattatgctataatatatttgtttctgtgaagtctgtgttccctaccagaatgtaagttctttgtgggcggagatcacatccatgtctgtcttgttctgagttctatcctcaatgccatgcactaaccctaacacatggtagatatttcaattaacattccatgagtaagtaaatgaatccaaggttttaacaggaaatacctctctttggtgcaaaccaaaaaagatcctgggtagcaaatctgagtttaacctttagttttagctgtcttcctctgacacggctccagtgagaaaagaaaggctgccacctcattcctggcaagtggaggtggagtccaggtttcccacttaggcttcactgatgcctgagcaagggaccccttcattacactgggctggggagccagttctggcttcccacgagatccccactgaaacgtgtctgccttagagggttaggactgctcactattgatccccacatgccctctactgacacctcatgggcacgggccactcactacctctcagtgggaatgaagtcccagctccctactcagttttctctgtcaccactccaagtaggaggaacttgagaaaacttattatagactgggtagaagtctaagattcccacctggtttctgctggcatggcaagggacccagagtttttttgtggaggttgacttgagtagttttcttcccccccacaagctttccatctttctaggctgctcctttcctggccctttgactagagagagcaagcttttgttggggccttcttttgtccgcacacatgggtgtttgcaggttgccagctcactcagctaccagtctgggataataagggcagaaagaaaacctgaagaactcaccactgagttctttggatctccaggtcctaagcagtcttgtcttcttctctccaactttcagcgtctccttatgcttgtttcgtatataatatccaagaaggaataggataaagtacgtttactatgtcttcccagaagtggaattctggcattgcaccttttactccttttttctaacactgatgtgttaggcagtattttatcactatgacattgcacgtatcctcatctatttatttgctagatcgatgagaatttattgaattcttaccacatgttcaacactgaatcagtctctgaagttaaaaggaagaacaagatcacattttctcagtccactggaggacataatataaaatgaagcagactattttccagtagtcacatgtggatgtaagagttggaccataaagaaggctgagcactgaagaattgatacttttgaactgtggtgttagagaagagtcccttggactgcaaggagatcaaaccaatcttaaaggaaatcaaccctgaatattcattggaaggactgatgctgaagctgaagctccaata

SEQ ID NO: 57646 - DNA, 1075 bp, Bovine  19866880424033
  misc_feature (1)..(1): n is a, c, g, or t
ntctcactgtttttgtaccacagcatgcagttactttaggctagtgttacccatgactatctgaatttaaggttatatcttgtgctcagttttacttctcatcaaaagaccccactaagtctaaaccacaagccactgtcttttcatctttccaaccacctggcttacatcaaactgagaatgacatgatcaacaggaaatgagcccacccaggtgacttgtggtccctatgaccacatagcttctgataaatgaaagagagcttcacaatgccacaccaagaagccagatagttactcatagactcagtgctaaccatgaaaacctgcagttgtgagaattacaaggttactagaaatatatacccaagcactgccaataatggttcaaaaaaatcaagtacaaactgttagttacaaaataaataaatcatgagactctaatgtacagcatgttgaaagttgcttaaaaagtagatcttaaaagttatcatcacaagaaaaaaattctgtcactatatctggtgacagttgtaaactagatttattgtggtgatcatttgtaatatatacaaatatatcattaatgttgtatacctgaagctaatataacattctgtttttttttttaaagtaatacccaaagaaccaacaaaaaacttctggaactaatgggtgattataaaaagatataagattaatatacaaaagtcaattactttcctatatactagcaacaagctactggaactttaaaagcacaataccatttacataagtccccccagattaaatacttaaatataaatccaacaaaatatgtacaaggtctgtataagggaaaactacaaaacattaatcaaaaaaaagctaaataaatgaaaaggtatttcatgtacatggataacaagactaaacattattaacattagctcatcccaccttgatttatagatacaatgctctacaagttaaaatcccagcaagttactgtgtaaacattgccaagctggttgtaaagtgtatgggaaaaaagtcaacacaataaggacctccactatcgactttaagactca

SEQ ID NO: 57647 - DNA, 1500 bp, Bovine  19866880511512
  misc_feature (1)..(1): n is a, c, g, or t
ncactggaaaaaccatagccttgactagacagatctttgttggcaacgtaatatctctgcttttgaatatgctatctaggttggtcataactttcctttcaaggagtaagtgtcttttaatttcatggctgcaatcaccatctgctgtgattttggagcccagaaaatatgctacttggaggcaaaccattcaataaagtaattaacctctaattaaaataaataaattaaataataataataataatactagtgctatacaaagtgctacaggagacccaggagaagtcaattcattggaatggggtagagatgaaggtggagtaggttcagggaaggttccatagaggaagaagctattgaattagattaaagaatgagtaggagctttccaggtagataagaggaaaaagttgttacaggcaaaattaacagcatgaataaaggcacagaggcagaaagtggggaacaagtagctccttgaaggaggagcatgggatagaagaaaaaaagtgatgagtggaaaatagatgggagaaagatcatatatcatgtcacaaaaggccagagccacagtttttctcaagcaaaactcatgcaggctgtactacatggatggcaaaatacacttcctgttcagatgtggcagaactgagtctccttccatgcttggttgttatgaattaccctctttatccagccaaagcacatttctgtcagcagtttgtcagttccaggttccccaggcattgccacaatcatatcccaaagagagaggagccctgtgtgtctctcagccaattagtggtccacttgcgcctgccagcaatttgaagcctcagaaacattttcccatgaagtttatttatgttgctgctgccctaaaaactaaaatgatagaacaaaagatcaagaaagaaaataacaatattaaatggaaggaagaccttaaacaaaggctccaaacttaatcttattcctaatgggaggcctgcatataaaggaagtgggactgaaattgacgggctttggctggaacagcatgtttgtctgacaggctacaggagcggcagctgtaatcgaccggaggatttggccctttgatgacaatcaacaattctgttggggactctcatggacaggctgtcccctattgtggtgtgtttcatgatcctttgaccttaagctttagtagctctgttgtgtccaactctttgtgaccccatgcgctgtatcccagcaggctcctctgtccctgggattctccaggcaagaatactggagtgggttgccatttccttctccaggggatcttccccaacccagagattgaacccaggtctcttgcattggtagcagattctttaccatctgagccaccagggaagcccagagtgaagatataagttaagactcatggtgaccttaaggcaggaccacaaacttcattcctattaaattaagtttactacccatgctatgagggggcagaaaacagaa

SEQ ID NO: 57648 - DNA, 1893 bp, Bovine  19866880600000
  misc_feature (1)..(1): n is a, c, g, or t
nctaaaatatcatcctagtaactctcttatctcttttagatatcagcatgagatttcatttctaatataagggttcttatcaccagctgcatattaaaatcattggggaaacttataaaaagaacactttgtcctggttctcatcaaattaaataaaaatttctaaaagtgaggcatagacattggtcattttaaagagcctgttaagtctaatgggcagccatggttgaaaaccagtgggccagtattttggtcagtctataagctctgtcccctcgtttgttttaagaagctgtctcatagtgttgctgtatgttctcagtttggacataccatgtgtttatatgtatatgtttacatatgtatacatacacacacataagatttatattccaaaacgaactgatagaaatcaaaggaatctgttcatataatcttgatgtggctactgggctgatgactatccactatgttcagcatgctgaatgaacatcttggtttctctcccaaaggaaactttcagaccatgattcagcactcactccctagtatgagatggcagccaccataaccatgttgattgtacctacccaggctcaaggacgaggagaatcaagaaatcacctagctaacccaaggcttaaattcaaactactgagaaaagaggctgactttctctagctaagtgccttgttaatatcccctagaattgtaatttccatttcttgcctgctttgaaaaatactctaagacatttcctgtttctgcttctcccaatggactcaggttcttgtatataaatctgagaagcaggtgttggtgtggaacaatggcctgtgaagggcaaatatttccttttaatccaaatgctccagactggctgcttctgtttcttgcagaattgctgggcccttgactgtacttgttactagacagactgaccttagtgttcctcctgctgggcccagcccattgaatcagtgaagtgaataattcaagtcaaatttgcatgtcacttgtcacatggatgacacaggtgaccatggtcccttgatctgtcctttgcattatcccaaggtctctatattactctgttccactttgctggtggatatctgcctgctatatgttataggaggcaagtacagtgatagaagttgattttatttataatgaaattaagaaacgacagcactgggtgtatatctgaagaaaaccataattcaaaaagatatatgcatcccaatgttcattgcagcaccacttaacaataaccaggacgtggaagcaacctaaatgtccatcagaggaatggataataaagatgtggtacatatatacaatggaatattactcagccataaaaaagaacaaagtaatgtcatttgcagcaatatggatgtagattgtcatactgagtgaagtaagtcagacacagaaggtcaaatatcatatgatatcacatgtatgtggaatcgaaaaaaaagggtaaaatgaacttactgatgaaacaaaagtagagtcacagatgtagaaaacaaacttaaggttatcagggatggggggagtgatatattgagagattgggactgacatatacatactactatcaatttatttaaaataggtaactaataagaacctgctatatagcacagggaactctatttaatagtctgcaatggcttatataggaaaagaatctaaaaaaagagtggatatatgtgtaactctgattcactttgctgtacacctgaaactaatacaacattgtaaatcaactatacttcaagacaatttttttaaaaagtaacagcaaatgaaatacaagtatttaaactgcttgcttcatagtcttaactatccagttgaggtgtttctttgagagaagtg

SEQ ID NO: 57649 - DNA, 1935 bp, Bovine  19866880643795
  misc_feature (1)..(1): n is a, c, g, or t
ncgcgagcccggggtggggtgcatcggtggggtgcgggcgtgtgtccgctgggaggtgactcgccgggaatcgcggacgggcgtggggggcgtgtgcctgacgcgcgagccttgcccggctagacgctggggcggcttccgcagcccggggaccctgcttcgcagcccgcatccccgcgtggccgctgctgtcagtctgcctttctattgcccgccggtgcgctgagcccaccctgcttggatgctgttcacgcctctgcgctccatcccttgctctcctgtcctctgtttcccgtttcactcccagcagagagggtggggtcctcccctcgctgatgtagggaagcttggtggtcactggctcatcaggtttggtgacaaaaccggagggttttgatgcactgggaattctcagtaactggcgccagtgccaggtttatcttccttgtgggaagcagttttaagttttcgtctataaaaggttagaacgctcctaattagaaggtgttaccggcttgtaaattgtcaggctgtaagtgggtgtgatgatgccaggtttctgcctataggtttgaagaagcttacttttgagggggatggggttggcgtggtgtgccccagacctgctgtttccttttctgcacagacctcgtcatcgtgtaggtttccatctcctgtgagagcccacaaggagcattggacgtttctttggctgcagcgaatttggcgttgtctttctgactgaagagttcagtcgtagggcttctggtcgccagttgctcttttgacgaaaaagaatcgaagtcatctgggtaaggtctaggcattggaaggagagattttcaccgtcttcatatgtattgtgtaaggcagtatctttgaactatttatacgttttggaaaaaaaatacttaccagaagacctgctcgatgttcgggtagtcctcatgtttgagtatcgaagtaatagtattggcgagctctcagcgttggagagctgtgactttagcatcctagacgcaggtctgcataatggcttttcggtgagaggaaacttcctccgcttttaatccagtaccgtctcccctgcctcaaacctgaccatttaggtgcttgtagtcttgccgaagttttataaattctgttacctgttttttgaggaaaagtcttgctcatgaaacatctttattgtttaccaggacatttcctatatagccccacagtgaattttagaaattccgtttaggaaagggaaacacgattttggaacactatttttataaaaacacaagtgatcctttcagatgcccagacatattcataattacattaattatattcagatttattggcaatgaaaagtttaccttggtaaatatgttatattttaaaatgtatttaaatttatactcagtgtttgtggagctttgttaaatttcatttatgtttcagtgaggggagaggaaaatgttgtcagaagtgatttttaaaattctaatatattggatattatcctattattgccacatactgtactgtcagagttatatataaagttcccatttttcctaccttatgcagttactaatttttgaaacaaatgcgttttctctttgggccaagcactgaagcaggatagatgaaacataatactgctcttaggtagatcaatgttattaaacacagagccatatactaaatctatgttttgtttattttaattcatgtatatttgagggaactattgcagtacaactttataaaattgtggggttttgtagtctgttttcaacatgctgcaagcatcccataactgtccaatagaattaagagtaattttattgctaacttggcctgacagctgcagaatttatgatgactctcaataaaagataaaattgttatttctgatttttaaaatcctttggttttggg

SEQ ID NO: 57650 - DNA, 970 bp, Bovine  19866880752712
  misc_feature (1)..(1): n is a, c, g, or t
nctgttcctttgtgttattgtcacaaattcacattttcatacattatgtacccatcaacagagatttataattatagctttatatagttgacttttaaatgagaaataaaaattaaaaaaaaatagatttgtactgtttttaaagtttagtttgctgttatcattactgttgctctttatgttttcatttttcttaataacaaataggtaataataaataaaacatcttaatctgtccttcatttctgaaagacagttgtgctggatataaggctctttatggacagtatttttcttttagcaccttgactaccacatccctgccttctgactccatcagctctgatgagaaactagctgttaatgttattaggatttcttgtacatgatggattacttctctctttctgctttcaagatgcttgttttgtctttagacagtttgattataatgtctgtagcctagatctctttgagtttatattcttcttggggttctttgagctttttgagtttgtagattagcatttttgaaattaagtttcagccattatttcttcaaatattctgcctccttttctttctcttctctttctgggacttcccttgtgtgcatgttgctgtttattgggatctcacaggtctctgaggctatgatcacttttcattttcccccttttctcctcaagactaggaattgacctactctcacactcactggttcttctgtctcctgagatctaacgttgagtccctctattcaagttactgtaatttccaaatacagaacttccatctgcttttaaaaatattatctctattctctctttagtgaggtatttttttaaaaactttaattctttagacatggttttctctagctccttgaacatgtttaaaataaatgatttagcttctttgtctagtgaacccaatgtctcagcttcttcaaggatcatttctattgatt

SEQ ID NO: 57651 - DNA, 1844 bp, Bovine  19866880756367
  misc_feature (1)..(1): n is a, c, g, or t
ntgagcaaagatgtttaattcaaggaaatgctaattggtacagggtaggtgaacatggaatagacttttcaaatctattatagatttcactgtaaatgtattataatacaaaaataagacaaaattttacttaatcttggagttataaacatttggacatgatttgtattccttctaattccagagcatgacgtggcatctggagacggcaatgctgtgagagaagaacttgtgaaggagaatgatgccccatctcctgtaatgaagtggttaaatccacgctgatcctgggtgggatttctgagagaagaccctgttttaacaatcattcaacacacagccaacattttaggaattctctgtattatagtatatggacatatgatttttggagaccaagtgtgatttagggtgggtccacaaaaaaaaagtaggctactaacaatccataaaatgcatatgactgaactcttttagatatttgttaaatatttgaatgcatatagatttgttaaatatgtgtttttagtcatagtgaagaactaaagatgcaatttggataaccttaacttggagggaaatcagccaaagagaaggctagccaaagctgaagaccacagccagtctatggctctctgactcgatgtacattaatgtccagatatgggctggagagaattaagagcaagagaaggtgggggtgcaggctgggagggtatgatatttaggtcttcctttggtagcttcagtagaacttacttgtgcttttattttttttttttcactttggaaaaagtcaaaacaaaacaatccctgaaggaagtgggacttttgaagcttgtgggactttgagcagcagccttgaactgaggcaggtttcaaaggatggctaatgtagttcccagtttactgcgtctgagggatggttcttgggtacagggcaaatacacactccataaatggttttaaagaatgccacctctgattgagagtaaggaagtattttgcccacttaggagaagtgtgaaggtaaatatttatatatatattttaaacacttgttagtacaagtcatcctccatacccatgtttatcactctcttgagaaaataagcataatatcgttgtttaaaatggttagaataaaagtataattctctaagcttttcaaacatccaaggcatggtaaatttgttatcaataattatagtaatattaacattaagtataagagaaacctggaaaaatttagtccccatggatttataaaatgtcgaaacacatgagggaatttatttaaaagtaagtgcaatgatttagatgagctttaaatttaaagtagaaaatgctttttattaagtttggaaaagagtcaattttagcaggaaatgtcaactttaaaatatagttcattttaatgtatttttttctttaaacttgggtgataagtggaattatgagtacccttggaaggatcttagcacaaacaggactgttgtactagattttgttaggaaatatttgcagaagtattttatttggagtgaagaattatttaagattatttcactatttgcctgtattttattctcgaagtttgcctacagagttgtgaatgtgtgtgtgaggctcttttaatgtaagctgaataagctgtttggatttcttttaaaaagacaagtttacaattgatcaataaaaaaaaacaaaacagtcactcctgagtccattcatgacttcattgatcattaaaatatttaaacgattcattcaatgaataataactcattaatgcacattaaaggacaggcttctcatgtaaattttctcctacagataagcat

SEQ ID NO: 57652 - DNA, 1772 bp, Bovine  19866880860507
  misc_feature (1)..(1): n is a, c, g, or t
natatatatatacccatcctctttacccatttaactgtcaatgaacgcttaggttgcatccatgtcttggctactgtaaatagtgctgctatgaatgccgaagttcagatacctttcaaattagaattattgtcttttctggatatgtgcccaggagtagaattgctcggtcatacggtaactctcattttttgaggaagagttctttaaagaggctgcaccaatttacactcccaccaatagtgtagtagcgttcctttttctgtatactttctctagcagttattaattatagactttttaatgatggacattctgactggtgtgaggtaatacctcattgcagttttgatttgcattctctaataattagcagtgttgagcatcatgtgcctgttggccatctgtatatcttctttggagaaatgtctgtttatgttttctgcccatttttttatttttttttacattaagctgtatgagctgattgtatattttagaaattactcccttgccagtagcatcatttgcaaatattttctcccatttcataggttgtcttttccttttgtttttggtttcctaagctttttcatccaaaacttatgggactcaacaaaagcagttctaagcaggaagtttatactgatacaagcttacctcaggaaacaagaaaaatcccaaacaacatttgaacccaagaacctgtttctttgaaaggataagcaaaactaataaacttttagtcaggaagttcctttaaagaaagctgaatcagcaggaaggagtgtccttttccccttcctccttcctactgccgggattgtaaatgtgatgactagaactccagcaaaaatcctggtaccatgtggcaaacttgaatagagaccaagtgttggtgacagcggaacagagaggagcctctgtaccattcctgtactctttacctgagaacttcctttacatgaaagaaaacaacatttatattaatccactattatttggaactttctgttacatacatctttatgcgtgcgtgctcagtcttgtccaactctttgtgaccccatggactatagtccgccagtctcttctgtccatgggatttcccaggcaagaatactggagtgggttgccactttctcattcaggggatcttcctgacccagagatcaaactcatatctcctgtgtcttctgcattggcaggcagattctttgccactgagccaccgcggaagtccattatacatccttgaccaatcctaatagataaaatcagaaatctaacatttctgtccctggtatatgctccaaacagtgacaagcatgtgtctttatgcccttatgcccatatcctcaaaacttcctaatgattttaaccctattaaaataagaattgattcagaaaagtaacttttaaatgttataatcaataaatcacttccttcttgttgtttcatcctgtggcttaacatggaaaaaaaatgccctgacttatttgaaaagatatttttatcttaaccacatactgctgcatggcaaacattcttgttcctactataaaaataatacatggtactcagtctgtaacactattttctccttttgtgtatattttgtaagtagatcttgtagaattgctttttaagtgcgatgaaaataattttctctgacatttgagattattatttattttattatttcacaaccatttgaaataatatagcagcttttccatccgaactacaagagcaactccacggcttccag

SEQ ID NO: 57653 - DNA, 1500 bp, Bovine  19866880910303
  misc_feature (1)..(1): n is a, c, g, or t
ncgggtctgtggactgacagaaacctctgctgaaagaaagaatagctggtcttgaatatggggctctttaccaggtttaaaaaaacatttcatctgtttttctcataggaaggaaataacaaatttatgtattattttggaattgggtattaacacagtactgtttaatgtgaccataaaatcagagaaaactaccttttccagctgaacatagaagtttcattacatggaaaacatggatttggattttagtttaacttttagtttgaaaggaaaagagaagttttaattacaagaatttagattgcctaatccttttctcagatccaagtagcttttcttatggggatttaacctctaccctgtcagttacttctgtggtggctcaagtggtagataatctgcctgcagagcaggagatccaggttcaatacctgggtcaggaagatgccttggagaagggaatggcaacccactccagtattcttgcctggagaattccaaagacagaggagcctggcaggctacagtccacggggttgcaaagagtcagacatgactgagtacctaacactttaacattgccaattacagaagtaagctgtgtgggggtggtctccttctggaggtcatactttaaacagaagtaatcctttcctgtgttgaagaaatcactttcaccccctgcaaagaatatacttttaaggaggtctcactccttctgactcctctctattcccttaacaccttatacatctctctcttccatgcttcttacactcttcctcattggtccagtcatcaaattctacgcaatcttcagggatccaaaaaaagcaaaagagcccactggatcttggagggcaaccatacgtgttcctatggaaactggggctggggaactagaactggatcagaaacaaagaggagtcagactgcaacaaattcccctagttcctttattttgtataagtttcacaaccatggggtctgtattaacattgtagatttttttttcctgttttaaaaacagatattaaggactcacataagaattctactaacactgatgtcatggacactttttaaaaaatgaggtatttggtttactgtccaaaacagtaaaggtttgggcaaactgaagaaatgatctagcaagtaataaaatgaaactgaatcactgaaacagaaatgggacctggcaatacagttgctgtgacaccctgagaacctttattgtagccaaaataaacctacccaccttacgtctctaaaagtaaaacctagcatgatttttcctagaggcatatgtttctacttggaaaagacagtgagaatgaagagatgagtgaatatgagaaaggtaaagagattaagaccactcttactgcccttttccccactctaataataattactgactaatggacccttatttccttgttatcaaatgaccttaggaaaatatttacagtcagagcaagaacagcattttcaagt

SEQ ID NO: 57654 - DNA, 1691 bp, Bovine  19866880990534
  misc_feature (1)..(1): n is a, c, g, or t
nttctatgctgcgtataggagactccttcagatgcaggacacacagtcttaaaaatgaaggaatggaaaaagatattccatgcaaaacagaaaccaaaagaaagtcttggtagctacacttacataaaacaaaattaactttaaaactgtaacaacatacaaagaaggacatgacataatgataaaggggccagcccaacaagacgatatagtatttatagacatttatgcacccaacacaagagcacctaaatgtacccagcaaatattaacagttctaaaatcccatttaaaaagaaagctactcactcagcgcaaacagtttttcctgctgatgtatgtgcagatactaaaacagactgattattatcaacacactgaatggcttctctttgaaaagcatcaagaatgaatggatattcctataaaaaaaaattaatatatgtatgaagataccttgccacatcagaacatacttaaaaccaagagatgctacccccagaagcgttatggaagcatttatgagtctacttgggaaacattctgtccactagagaaaattaggaagaattaaaaagaaaactttaatcagacagaatatgttatttctgctgtctaatctttcaattattatgcttacacatatactaattacaacatgattattaccatatattaagaacatgctttatgggaggcactgtggaacacatttcccacatattaatctccacagcaactcctaacataggtgtagttttctttcccagctgggaacactgagagtctgaaaagtcaagtcctcaatgaagttcactcatcagaggcagaataatatatctatcagactttaaaaattcaagtttaccgcacagtactgccatttttacttaaagaaaatgacttggaaaacctacactactcttttatagtctatcagtgattcaaaatacatttagtatcagcattagagtttaagtttcattagaagcttgttaggctccagaactgtatgcaaaacatattgtacatatgcatttttttctagagaaagattgatacttttcattagattctttgaaatggctgagaattatgcttaaaaatcttatcacatgatgcttggttttcagtatgggttgtttactgatttggttttcacccatatctgacttcaagtggaagcttcagagtgtgtatctacatacacatacacacaaacacacacagaaatataaaaatctcattttaaagtttacctttaagatttttaggaaaacagactcacacaactgtaccaactgtaccgctcaaggtacaaacctttgcagcttttccaactcgaggtttaagtggtagataatcttcatctgcaggaagtgcaacctgatgtttaaaaaaaaaaatttaccattcaagaattgatgtattcagcataccataattaaagatggtttgaaaaataaaggtgatgaactaaagtgttgctgacagtcttagacactacaaaattaaataaccatcttcaagaacaaggcaaatgcaaatgttacaacattccaaaaaagtgtttacctaatagttatataatcaaaagcatttaagtctacctcccaaaagaaactttattaagttctaggacttatctcagctatctttgtatattctgtatctaatgtacttctgacatt

SEQ ID NO: 57655 - DNA, 1658 bp, Bovine  19866881034605
  misc_feature (1)..(1): n is a, c, g, or t
ntgtgtgacagtaataccccaagattgtcacccccaaatctctattttcatggccaaccaagcacaaagtactacagtttttgacctgcatggcagcaaaggcaaaggctgctctttagattcaaaacccagctccgtatctgaaaggccaggcttccttctctattaccttgtcactttccttgacggaacttttgttacatgttctgttgtcagagtgagtcctcaagaatctgtttattgggcaagtatttactaagtgttgggtatgtgcagagccccgtgttcaatcatatgacaatggggaaaaataataatagacaaggtagagtgctcaccaccaagacatttactctaatacattgcttttttctgtcagcctcaatagcaacttgatttcaaacccatgagcaccgaaatgaaattcttaattttaaaatttcttttatttcagtggattatttcaaatttccttgtctcccatttcttaatgaataaagctcaacaatcccagcgactgctaaaagacatatacatatacatagtcttcgagacagggacatggacaaagagaggcagagagacaaatggacagaaccattgttctggatggagagagagatacagagaacctgtacagctcaggggctgtagcaggcactctgcaggacacaaagaaaccaatgacccagattaataatcatttgatggttattaacagttgatggtccaaaaagttcaacgtcttcttgccaaatatctgcccgttttgttctttccagggtgactcagggggccccttggtctgcaaaggtgcctttcatgccttagtttctggaggtcccaaatgtggtgatgccaagaaacctggaatctacatcctactaacccggaaattccaagcttggatcaaaagcaacttggccccatctcatgcagactaagactacagatgattttcttggctctatcagctgcttgttttcatttttgtttcattaatgtgttctacaggctaacttatctgcacaggtacttgaatgtagttaaagtggagaacagtcaaggtccactcctgacctgttaggactgattttgttgaggaatcaagttctttttcacatgtaccactgatgtatttcttctatgctgcttttattctgaataaaatttagaatagacgagtgtctattcatcttatatggaaataagatacaaagaatgatatgtcctgcaactcaatctacaacccccacaaagtgcaaaaagatgattaaaaaagacagttgtggcatcaccttcaaccatgtttatgttgttatttctgctgtatcattcttaaagctgtatttttaaaattattggtgttgttcagttgctaagtcatgtctgaagaaacactaaattcaaacatcccagctcaagtgaaggaaaaaatcatcaaggtttatacaaatatttaaatagtgcttattagttttatatcacattttcttccaaacaggatttaaagcaacatataaaaatacctgcaattaaaaaaatgtgaaattgtaaacacttttcccttaaaaaaatagaaataccatgtgacccatcaatttcactttcaaatcttgaagaaaattaaaacactacctcaaaaagatacatgcacc

SEQ ID NO: 57656 - DNA, 1384 bp, Bovine  19866881050496
  misc_feature (1)..(1): n is a, c, g, or t
nctctatgctacttaaggtataaaaactactttggaaaataaagtgcgggccttgttcactgaaacttggtctccccatgtcgctctctctctcactctggctgagtctccatctggagcgtggaacccaccatgcttactaattatgcctgggcttctaagatccgaccggggaggcctcagtgtctcctctccttcgggagaacggaaggatgcctgcggcctacgtaagtggtgcaaacttcttgtcttgaagttttattggtttcccacgtaaaccaagctactcagcctcttttctccactgaatttcctcactgagctatcctcatcctattactctttatatctttgataaatatttaaataaataggtcgcctatgccgtctctcctttgaataccctggatcagccggggctggaccccggcaggtaggcattttcaactcagttcccaggggaagtcactgatattagtcttgctttgttgataaagacttgatgggaaagtacccgagctagcaggtggcagagtttgttcttaaacccttaggtgctggctccaggctgcatgtggctttcaacctgaccacatgcctgccgggctttgagaagttctgtggcttagatgctctaagaggcaagctggctgtgcaaagggaaaaaaggatttagctgtatacactgcaattagacatggtgaggtgtaatttaattgggaggacagtctcataactcttgtagctgaccaggaaaattctgtgaatcatgtcagtttatagtcaagagttacttggtttgggctttagaccgatgtgtgggtcagtgggatcatttattataccattcaggatcttggatttgagaacagtgggctgtgtaacatgatgagctctgagatctaatttatttctgggtgttggtttttgttctgttgagtctgctacggggagagcagtgtttgctttggatggattttgcagcagctgtgctgggctgagcaagtgcgaggcagtgctttgtgctggactcgctcacgggtcggtggccttgagcttcctcgctgtgttgtgttcagctgtccttattcgctgcttttggggatgctgattttgagcttggggtttttgttttcctccatccctcttctctcttgacccttctatgttttgagagactcatatagaacagctgtctagaaactccaaaggccacatgtggttctccccagtgggcttttatcacttcattagccactccctctaaagttttgtcactcaaagcatggccctcagacctgtgctggtctgtgacctgtttagtatccatcccaggcaagaagaaggcagaagttgagagtcagagtttagaagttgttacagc

SEQ ID NO: 57657 - DNA, 1408 bp, Bovine  19866881063893
  misc_feature (1)..(1): n is a, c, g, or t
nttggtctctccacccagcaatggacatttggctctcaagtccattcctggccgtagcattcagaacttcacccaggctcagatcaatgagggccagctagtgtttgtacacaacggtaggtaactgagcaaagcaatgtgaaactaaagtgcgtttcagtcaaaggttaacatgtagtcacacctaatagctgctgacggaaaaccacaagccatctaaaaaccttgcagactgtatagtttttttaaaaagtgacacattttagtaaggctagtacatttaagcttacatttgagtaaggccaataatagcaaacatcagagggtacctataactcatacttggcttactcacattctcatgtgaggtgaaatatgtacatttcagattcttttccgttatgggttattgcaatatgggttattgaatatagttccctatgccatatagtaagtccttattgtttatccattatatataaaatagataaatgtaaccttctcagagatctttttcctgaccgcccgctgaaatcacatctcttccatttatcgctatcacttattctggctaccttacgttctagtatagactgattcgttcatttgtgtgctgtctgtcttccccactagagtataagggctagaagaataggatctttcttttgtttgctcttacattctcagcacctaataacagtgactggaacgtagtaggtgcttaataaaaatttgttgtaagaatgaaatcctattgatacctattatgtgccgggtaatgttccaaatgctggaatacattggtgaacacaacaaatgcatttattaaattaatgaatataaggatgaatgaatggatataactgtaaatctaagagaccctgatattaaaaggctttgttttcttctctctggtcatcagtaaatcaataagccacatcaccactgtacatctgcaggaggggtgatctagctggcctctgtttcctggctgcccttgacagtggtcagagagggcaagctgcccattctcagccacaggaggaagtggggggaggaggagtgtgagcctggggtgcatgatggtaaagctaaaagctgtatctttccagccacttttaattaccttctttgaaaataaagaaaacaaagataaaaatctgctaaactcaaaggtagtaatttcctgattatctctgcagttaagtacaaagaattcccagataacctgaaaagcatttactatgtgactgctcttatctagtggttccaaacctgtagcctggggacctgttgggggttagttttattgcaataaaatcgtaaatctacccacatgtgtaaaagcgttgtttctagactgaatgatcttttccacatgtgttttattttttaattgtatgcagtt

SEQ ID NO: 57658 - DNA, 991 bp, Bovine  19866881157951
  misc_feature (1)..(1): n is a, c, g, or t
ntccgcggaagttctttcccggtagcagcggctgaaccgggtatcggtgtacgaggatcccccagacgccgagacccctgcactgccaggtgagcacggtggtccctgctcgacccctcgagttccccaagtcgggtgggtggggcgcgcgaggctgaaaagaacctggggtttcggaatgtctggcggcgatgcccgcggctagcccttgcgggaggctcagggtccgcccggcgcgtgtctcgggttctcgccgcgcagcgctcaccaccatagacctgcaggacctcgctgactgctcctcgtttcttgggtccgacccgccgcctggtggtgactcagccgcctcacaggtacttcccctggtggaatgccccctgcctctcagcccaatgttctatttcccgagtttccttaaagagccgtttggggaggagagcacaggaacacctggttagcagggagagatgtcctgcaggaatccgaaccgcgagaataggaacttcctcctccctcctagtatgttaacggtggctccattctcagagctgttttgaccaactctgcacagggagggctcccctgccagacgggtctcccgttctcctccccatctatttcttggagctgcggtagagcaactcggaggttgcacaccgagagatcaggtgggtgggtgggagcacagttgcgctctgggcaccagatcagcgcgtgctctctgtccttccaacatgcctttccgggtcattcattaactattttcattccctggatgtctaaggagtgtggagattggagaataacttctccatcaagaccggaaaaaacgaagagaatttacatttggaggaagccagaagagtaacaaaggatttgaagaaatctgactgaaaacgttgttctctacagagatggcccttcagcagatgggcactttataaaagtccttttcaccctctgcaaaggctactgtcactcccatgaggga

SEQ ID NO: 57659 - DNA, 1116 bp, Bovine  19866881239114
  misc_feature (1)..(1): n is a, c, g, or t
ncagagaaaatataccttctcttaagcaaaattagccctcttctgatactaacccttagtatccacttattaaatcaccagtcacttgttaaaatgaaagtgaaagttgctcagtcgcttccgactctttgcaatcccaaggactgtagcctgccaggctcctttgcccatggaattctccaggccagaacactggagtgggtagccattcctttctccaggggatctcccaacccagggatcaaacttaggtctcctgcattgcaggcggattatttaccatctgagccaccagggaagcccagtcacttgttaagaagcattgaattcatcatgacagaattgagactatgcagttatagtactgcatatgcgagaaaccttttcggactgatttaatactaaacaaggctttgccaaaatgtttcatttcatgttttatttgagccagcaccaaatgataggcattgtttccttttaattgaacccatatgcaaatcggtagaatactccagatcctctggaagaaatctttccaagctctatttgaattacttgatttatgactgagtcttgacatctggatctcacacagatgttcttattctagcaggcacactcacaaacaatatgaattatcattttaaagcagttgtgtgtgtcttattccaaaatggacaccaagtttgtttggagttgcagagttaacaggaaaaagaggagggaaatcaggcttttttgtttggtttggctggtagtcctagctccagagactttatggctgaagcaaggaagaggccaacatagtcatagagccaagtatgtccagctcttccacaaagaacaggtattttccttcccagtcaaaggagagcaaaggctcacttactgtatgcaaagatactccttggccttttctttctatgtacaaactcaagcacacattgccattctgcttctgctgagtgtctgactacttagaacagacctaagaacaatcctatgttgtacagtgatcaaaccaaccttggattatgactctcattcctccttttttctaaagggatcaagtacaaaaaacactgggaggtctatataaaattcaggaatccagaa

SEQ ID NO: 57660 - DNA, 753 bp, Bovine  19866881310550
  misc_feature (1)..(1): n is a, c, g, or t
naaatgtgtgttatcacacatcagtgatccaccctcaacatcaattcttattaatatccacatcatttatttttacaatggtaaattcttacatatcatagatcttgatttcactactctgtagcagcaataaagtgttagaaggcccatcagcatgatgacacacattccagtagtaaacccagcctgtttaaaaaaataaaaatatagaacaacatgtatcatgtcagaataaattaatatgcaaccatattaagttactctaaacaattatcataaatatctgatagctaatataaaactaaatataataatctatttctttaataattttatgtagacttatgaaaacttgtaaaactcacaatacaaagagaaaaaaattctaatacaaagtgtgctgaaaattatattacctgttttatgccccaaggaatacttagtatagatgttcccagcatggtattccaaatcataaaactgaaagcagagtaatagtagtaaaacataaagtttgactcttcaaatattttaattaagacaaaaattaaaataatcagtaatttttatttacacataatttaagttatgctccaaaaagtattttaactcacatggttactaaactggtgtttttaccatatccttcagtgtaacattgaagtttataagcagaacccagtgggctatatacgtagcactcttctggagcggaactacagatctggggcaatcggttaaaaaaaagaaaga

SEQ ID NO: 57661 - DNA, 759 bp, Bovine  19866881315330
  misc_feature (1)..(1): n is a, c, g, or t
ncaaatctttgaatgtagtacagtaccggatctgactccaatcaacagaacgctgagaaaaggtactgatttgtttccactcgccacctggcccttgctgctgaatttggccaaagcgaggcggataagtgataacataacgggtgtccacctcagggcgttcaccattaacctccaccgacaagttgctctgagtaatcagaactgaaccaccctgctgtacggccacaccggtccgattggccactgccaagtcccaaggaatagccatgacccgcaacaccaccgtactgctaaccagctctccatcatttgctctcagaaggatccgggagtttggatggcctctgtgcacacagaaaatgttgccatctcttaaatccccatatgagaaaccattaatggctctcccaggatcattgatgttttctaaaaacccagcatccgaattgaagttgccaagcactgagacactaagactcgaggaatctgtgtctgggtctgaaacatgtatgatatttggagtcagtcgtttcttagaattctcaaacacgagaagcaagtttccttcagggagcttaaggtttgggggatcatttactggaatgacaacaatgttaaacacataagaaacatgtccttgcagatacagtggcacttccctcttgctgttggaagagactgaaaatgtgaaataatccctaggttcttctgaaccgtcatggacataccaaacgttcccttgctccaaatccaaca

SEQ ID NO: 57662 - DNA, 802 bp, Bovine  19866881319453
  misc_feature (1)..(1): n is a, c, g, or t
ntgtgtgtaatgccctaaggaagtacaccttccagtattaatgcctttctgtaacccccttccacgaagattttgaattggccacatgacttgcttcagccaatgtgacatcagcaacagtgatacaagcagaggcttgataaaaatttgtacactggtgtttactatcttgagatacttgctcttggaagccagatgtcaagtaagaagtctgaccattctaatatcaaaatgtaaggggaaacctaaactaatcatgtggagagagagatgccttgctagcaagatcccagctgaggctctagtcatgtgagtaaataaaccattttggatcttctagcctgaggagatacctcttggatcagacaaactgcctagctgagctcagtccaaactgcaaaatcataaggaataaaatgttggtttaagtcacttcattttcgggtggtttgttatgtagcaatagataactgaaatgacaatgctaatgaatttgccaaacccattagacattttcaatgagtaaaaacataacggcaacctaatacttatactcttatgaactgttacacatttcactcgattttatactttaaatgttgaattcttaaattaccatgatcttaggatcttcttcccgctttttggttttaggttgcaatggaggtgaaatagtggcttgcgtttgaggatactggaattttggcctacttttaagttgttgctcttcaaattcctgactgaatccttcaggaagcgcatcttaagagaaattgggataaaaataatgtacatgatacag

SEQ ID NO: 57663 - DNA, 1481 bp, Bovine  19866881371699
  misc_feature (1)..(1): n is a, c, g, or t
nctccacagctaccgagccttccctctagggcctgtgctccgcaagagaagccactgcaaagagaagctcctgcaaaaccccacatgcagcaagaaagccctagcacagtcaaaaacaaataaatatctttttaaacattaccatgtgtcgagggagggtaagcatattcacattaaaagaaacagaaccatcaatgtttcctttaggaaattttcagtagctatagtcaattaaaacttgacttttttagtctgcattaaaattattcaccaaaaccagaagcagggtatccccctattttactgaaaatgattcacctttgatgcaccagtgatagctgagaaaaggaaacacaggggtctcagtggggtttctttctaaggtcatgtgatttctgaaaaagcaagctctgagtttgaaagtctcagggtgttggggatggctggttaacagccaacaccctgatcaaacacattactatttatgtagtataatgaccacatcctcagctcagaaaaagagctaatgacatttctaatagaaagcataccgaatactcttccttcagagactgagactgatccttcttagagttgttctccaatatcggaacaaaatagcgatgtctgactcccattttcctttcttagctaaatccagaaagaaggtagggaggaaggaaaggaaggaggaagagaggaagggaaggagggagagaggagaaattcagatactctcacatgtctaaagtggtaaaatcaaaccgtcaggggaagcacaatcagaggacggcctggaaaaaaccagtgctccctaaccccaccagcctctgtccccacctgccaggttccagataggggcacaacaaattacctccacaaagtggagaaggaaaatccaggcaagagcttatgaataaataagattccctcctacatttccatttgtccttggccgattcattcttgcaaaatcctaggcaataactaaaaagacatttggctagtgaccaatttttaggtgactgattttaaatctctgattaaagactataaagggctttcatttatgatagggtaatggatagagaagataatgttggtgatgatgaaaactagaatgctcaaaatctcagctgaaacgtttgaggtctcttcttgtatactatcttctgatggcaacaaggccccatagtccctgcctccctctccccacagaggtcctcgccgaggggggcacacccactggtgaggagtggttactcaccattctcacttgtgaggtttctttccctaatgcctaactttgaaatgggaaagaaagaaaagaaaggaaaccacatcctttgtactctcagtatataaataagagctagtcaagaactgaaaacacatttcacattgattgatgtggggacaccagccacaatgaggaactcctctacctttctggcagccactctctcaattgtcgtttttct

SEQ ID NO: 57664 - DNA, 1755 bp, Bovine  19866881415534
  misc_feature (1)..(1): n is a, c, g, or t
ntactttgtattactatgtgtatatcaccttatatttgaagttattaatttactgttatacataagcaaaaaatacctgtattgtagttgaaattggctagctcttaaaacaggcaaggcccttcctcattttacatgattataatataattaaagctatggttagtacctctgaaagtgagagtttggaaacattaaactttggtcatttttcttacgtagatggaaaaaagcacggcaggaaggaggctatcgttctgaaatagcatattgccggaagaactttcttaatagaacatcactgttaaccctagaggtaagtcttaatgcagctgtcttaatttagggtcatatggtggaccagtgggattatgttgggaaaagaaatgcctaggatagtgcttgacacatagtgtttaataaacatttgctaaattaataaatttgtgatttttttgttttgtttaccacaacaggtaacctgtattacatggttattcaaaatagtatttaacagggacttccttggctgttcagtggttcaaactttgcttccaaaatagtgtttaacaatcatattatattcaggaagtggtcaaagatgcaatatgatttcatagaaataactagtttgggaattaggatagttgtctattcaacagctcaagcttggagaaggttaatttagtctcagtttctcattttaaaaaaagaaattgaattggggatatgctacagtttttctcagctctgaaaatcagttgttactttgaattatcatggaaattttcaactatacataaacgtgacaatagtatagtgaactcctgtgtacttacttcacacttcatagttaccaacatgtgctcagtcttgttttacttatactccccttaatccactctctgccctctagatgatcttgaagcaaatcccagatgtcaggttgttatatatctctgaagtataggacttgtttttttctttagcattatcatgccttgaaaaataattcctttatatcgtcaactatacagtgtgtaaatatccctgatttttcatatttttttttttacagctagttcaaatcatgatccacacaaggtccacacgttaaaatcggttgatacgtctcaagtgtagtacagcatttaaagggaaatggtgtttagagcagacgtgctataaaagcattcagaaaataaacttaacctctcacataattcccctattctatgctcatattttaaaaggttgtctggcttgggttcaagatatggagagataagcaacgctcctttgtctgcactccacttcctccagaccttcaagttgccccccactcccttccttctatcagccttgtcttcacctcccctaggctacagggttttcagttctttaccagtctggtggtattacagcaactgtctgtctgatttttcttctcctggaattgaagtcccttaagtcccaaaccagaaaactcaaggaaatcctaaatgtaaacttcatcttttaatcacttgtatcctgtctactttaaaaatgctcatccttgcgagacagcaaaagagacacagatataaagaacagacttttggactctgtgggagaaggcaagggtgggatgatttgagagaatagcattgaaacatgtatattatcatatgtgaaatagatccgccagtccaggcttgatgcatgagacagggcgctcagggctggtacaccaggatgacccttaaggatggg

SEQ ID NO: 57665 - DNA, 1104 bp, Bovine  19866881417825
  misc_feature (1)..(1): n is a, c, g, or t
ncttcccctctctttcctgtaatcttcaatctcttcttctgtttttcatcacctaaaagcaaactctaatcctaaaaatctctttcttgatattatgaccgcctcatcctgtaatctaatttcattcctactcttctaatcaaaccctttgaagtgctatctgcatgtgatgtctcctcttctttgtgtcccatccatacaggcttgaacaatttctgtctccctctgagctagtctcatcaaggtcagttttatggagaattccctagtggtccagtggttagcacttgacgctttcactgctggagccccaggttcaatccctggttggggaactaagatcctgcaacatgtgcagcatgccaaaagaaaaaaacattagctttatcccagtggtcaaaaccactgcatgacctttatccttcactgctctagatgcctttagcactgttgagccctcctgatgaacactgacgactccctcattctccatgaagcaagatgtcctggttctcttggtgactctgtgagactgctcacttgcagtctcctccacagtcagctgtcactagcccattacctggactaacaccatatgaagatacagaacatctggctgtttctacttcctgcgatggcaccagacacacggggtcaagggcaggtggacagagaaggggctcagaaaagctggtgatgctctttattcctgacttgaaaaccctcagtgctctggatctggaggagtcaagtggctgagggatctttttagcacttagtttttttcaagtctcacccaactgtggggtgaaggtgggaaggagtcggccacatgtgtaacttgtgcaagagggaggccaaacgcagcactcaattgttcttggggaagcagagttcaacaatttaaaatcaacttttgttctcagatagccaaaaatagtttcctgtggcttcttttatttctttcactagggttaccagaactcagctttgtgttagaaatgcaagtttagcagaaacatcttcccctaatgaggcctggtgccctgtcggtattatgtctgagtccctggggctgttcagtggggtgattttccagttgtt

SEQ ID NO: 57666 - DNA, 1135 bp, Bovine  19866881481295
  misc_feature (1)..(1): n is a, c, g, or t
ngaaattaaccaggaaagtattttaaagaaagattttcagaactgtttgctttcactgaaattagaattgtcttttcataatacagtatttttggtaactttatatcataactttttatgtactgtgtttcttctaaaatgttctatagatgatacggcataagtgtaaaaacttattttttaaattaaaataaaaaaccaccaaagcaaacttctctgctagaatatttgcattatacagattcctaagatgaagtcctaagagaagggctgaagttataaaacagctcttattcatgctgtatcattcgagtggaataacttcacttggaaaggaaagccacattttaccccacaaatgcatccgtaagagccttgacagtgtttcaccatggtattgacggcccatacttgatcaaactgatgtcgagtatttattcaagagatcactaactttatgcactagctccccaggtggcgctagtgataaagaacccgcctgccaatgcaggagatgcaagagacgctgattcgatcagtcaggaagatcccctagaggagggcatggcaacccacttcagtattcttgcctgaagaatcccatggacagaggagtctggcagactacagtccatagagtcacacagtctaatacgactgaagcaatttagctcacatgcgcacaacttaatccacagcactctaagaaagaagaaagcttacaaatgtgaaaaaaattagcacaaatatctaacatgccctagaaggcccaacctcctttattcactgaaagcaaatcccaatagggaaagttccaacagtctctcccacaagggtcaggtccactaacatttaagttaagaaagaaaatcaatgagtgaatagatatttgctccacggctgcaggcagggcagctgacccgggtgttcactaggctgggagggtgggacgggtccctggctccatatctgtataccaaatgtgttgctgacacagttgggagggtggcggagaagcaagtagtaggcccaaggccactgtgaggatggaaatcttaggtttccaggaagagctggagcaatccacagtcctggaatcctggctattgcaaaacatgtcgcaccagcctctcaa

SEQ ID NO: 57667 - DNA, 1425 bp, Bovine  19866881560174
  misc_feature (1)..(1): n is a, c, g, or t
nctagatacacccactgtcatgagcagagagtcaaagcaatgcattaccacacctctgttaattaatacattacagtcattcttacacatctgtaggattttagttccaggaccatcccctccctatatcccccaccactgctgctaagtcacttcagtcgtatccgactctgtgcgaccccataaatggcagcctaccaggctcccccatccctgggattctccaggcaagaacactggagtgggttgccatttccttctccaatgcaggaaagtgaaaagtcaaagtgaagttgctcagttgtatgcaactcttagtgaccccatggactgcagcctaccaggctcctccacccatgggattttccaggcaagagtactggagtggggtgccattgccttctccgatcccccaccactgcagatactaaaatctaagaatgctcaagtcccatatataaaatggaattgtatttgcatataacctgcacatattcttctatatactttaaatcatttctagattacttacaatacttaatacaatataaatgccttataaatcatggccagtatgtaacacataacaattttgacttttggaactctatggaattttttttccaaatgtttttgatccatggttggttgaatctttgggtgtggaacccacggatatggaagaccatatttccaaatactgactgttgaaaatttctctgtaaattatatgatagtttatcctcagaacttttgacatggacagtcaagtactttggcagaacctacctgtaagttcagatattgtaatagatagcaggtcagaaaaagatgtgacctctaggaattcagggttgaatattttatctctagccttcccttcttggttatagtcactgttgttggaggaagggctgctcgcatggtattttcatggtaaacccatgaaaataatgagtttaggcagttgtatcaacaagatactgggttgggaccatctccatcaattgatataaaaaggaccttgatagtgttatgtgacagcctggatgggagggtagtttggaagagaatggatacgtgtatatgtatgattgagtttgctgtccaccggaaactatcacaacattgataattggctatactccaatataaaataaaaagcttttcaaaaaaaggacagtgataggtcacagacattaaggactttggttaaatcttgaaaactatctcaagcaagatgggaaaacttaaaaatcagtaggagttatacttgcaagagaatgatatacaccatatattaaaattcatgaattaatgatgattctcaagcaaataaaacaaaaccagtggtcagtgtttggagattggagccaagggactcattcttctgaaaatatattacaaggaaaagaataaaacact

SEQ ID NO: 57668 - DNA, 1672 bp, Bovine  19866881560550
  misc_feature (1)..(1): n is a, c, g, or t
nagtgtctatgaggagatgctttggaacctctaaatatcctgtttctcatcataatttagctcactagtttcagcagtcattttaggattcttacctgaagcgtttattactagttggttgccagatggtgagttttcttttctcttttaaaacaatggtgcctgtaatttatttttggctgtgttggggcttcattgctgtgtgggctttctctagttgcggcaggcggggctactctccagttgtggagcacggacttctcactgcggtggcttcccttgctgcagcgcatgggctctaaggtgcgcaggcttcagtagctgggacgcttgggcttcatagttgggctcaagggctctagagcacaggctcagtagttgtggcgcacgggcttagttgttccgtagcatgtggaatgttccgggatcagggatggaacctgtgtctcctgcattggcaggcggattctttactactgagccaccagggaaaccctgacttttctgattttctatttttctttctatattgaaattatacaccattcagtttctaatgacataccagaaagattgtaaaagagaaaatatctgggctaatctaaatccataggaaccaaaaacacccctttcccctccccttaatcccagagcccaggtactttgctaagtggcttatctgtctatatttaacacagtggaaatatgcagagctgttggaagttgttcctaaggctgctttctatttgagataacaagtaattcctaatcttctctgagaaccttctctcctcaggttgaccctgcactttttctcataaggtcttgatcttattcttcctttcctggccctctctcagcatgcacacacacacaggcactctcacaaatacaccaactcacacacacacaccccttagaacctgacttttaaagctggtgaagccaaagttgttttctaaacatcacctcaaccctcttatcctctttcaaggcatgactggcaagttgacattccacaggtgccctcacttcctttgacttctagctcagccctttcagttacctgttctcgggtcttggaagctcacacactcaagatgaatctaattccattctctctctctctccagtgtaaaatgtcactttgttatctacaatttcttactcttaaaatgcgtttcaaaaacagaactcagaacagacctctcctacattaggcacctgaaatacggaactatgtttaagactctttgccagttacttctttcagaagatttctgaccttcatgtctattcttcccatttatgaaaaccattctttcattgggaaaatcattttccttacaatagacatcaaaagatcttagattattctaacaatttgttatatgttttttaggggagctgactttcactcataccaaagaaacagtggccatgaatgacccatatccacaaaaaccttcctcctggttaatagtctgttaattttcatattaagaaactggatcttgtttgccttataatattatacttctcaagcagaatggaaacatttcagaaaccatcctctgggtctaaaatccatggcacagtcacctacttctaggaggaggaatatattgataactaaccttttgtcataaatcttaaactaggaatagaaatg

SEQ ID NO: 57669 - DNA, 1301 bp, Bovine  19866881905464
  misc_feature (1)..(1): n is a, c, g, or t
naacaactactttcgcgaaagaaagtgtatacacgaatagttctacaaccatccgtgttctgagagtcttgttctctgaacacggatggtgtagcaccaggtggtcaaaaatgctccttcgcctttcctgcaggcctcaactccagacttcggacacgcaccgtgctactggactctccggcaggaagcagaaagaccccaaaggacagcttcaaacccctacccaccccaacggttcttcacttggcccgaagtccagctactactaggaaggccagagcgttgggatgactcctgtactgggaaaagagccggcggcctactcacctctccgcggcttgctctcccggggtcctcacaggcgctgacgcggcttaaacggctgcacgtgcaggacgcagactgcgtctggtgcgcttatccaacaacaaatggcaccaggcgacgaactccatcagccaatcagcgtcaggcagccatgtcgtcccgcccccatctcccgcctctcctaccctacgcgttcgcgttcgaggccgctgtcggctgacccattacgttctggacggagtggcccgttaggcctgggggtacaaggttgatcgtgggtcactttctctggatgcttgtgcggggtcctcaatctggagaggctatagaattttcctatgtaagcactgcaagtcaaagtttaaaatagaagaggaattaaaacgtcctcctacctacctctttaagttttctctcctttttttgcctactgcagtccctggcagttggcctctatttctgaggcgcttgcttcacatccagggggttcccaggtacctcaaagtatggctgaggccgggggtggtggtgtatttctttttcttcccagaccgaagttatgagactgtcacgctgatacctaggaggctgtgaagacagtaacttgtcttaaagagctagaggtcgaattcttttgggcaccctctgatccggaaaggaaaattaaattgtgctggtgaaggtcgttcattagatttgtgacccacctgtttatagccctacttactggccaaacctaagggtgtccgaaggtagttcagacttacactcatcaaccagttagtgttctggcccacaaaaagtcagagaaatctttccatattttcctatccttccaaaaggcataacaacacaccactggaaaaatgccatttttatttttggctttatattcatcattttccatgctctgaatcttttaataaattcctgaatagttcagaaatgtaagtcccaacacagtctgacactca

SEQ ID NO: 57670 - DNA, 1513 bp, Bovine  19866880476643
  misc_feature (1)..(1): n is a, c, g, or t
ncctgggctacgtatcagggccaacaggcagatagatatatccttttagatattggaagcacctcccatgagctggcactcagtgcatctctgtgatggtaagttgttgtgacgatgactgtccccgacgtgcactgcaggtaccaaccagtctccagcttccagggacagcccaaatggactaggggtgccccggaggctgagaattggggatcctagggtgctttgaggaggacaacgatgggagaattgcaggttaaaccttaaacggcaagtcccccctccccccatttcggagtccagcactaggcaatgtgacctggtgatccttgccccctgggagggtggtttgcaagtggaataggcagctctggagttaccatggcaatggcatgtgtccacagcgagatggacacttctctcccagactctcaccccctctctcaacccgtacataagggatgctgggtaacagccaaggtccagagagggtgtgggtttgggaaaaaatacagagcatgttctggcctggtgggatctgagcttctgggaatggttattataattaatttaaaacattattagtcatgggaattatttaaattatcattatttttctttttgacttgtgagatcttagtttcccgatcagggattgagtctctgccctcagcagtaagagcccagtcctaaccactggaccatcagggaattccctaaaattattattaatataaaccatgctactgtttggggggcacgatgtcctaaggtttttcctgcatggatagatatttccctgcaagggaatctctctctgcaaggtgaggaagggtcaagctattctggtccattttacagatggggaaactgaggctcagaggggtgatgtcaagcctcagaagggatttagctcagcctgtcacagcctgggctctctccccctcacaggacccctgtcctctgccccgactcctcccaggtgcaaaggagaaatagaggaaagtactgggtttggttgatttccaagcagttcagggatcttggctcaaagatgggtgttcaagagatgggtctgctgagggttgggcccccgggaggctcctttcgcagcccaagccggccgcccctcaaccccgctccgcctcaacccccgccgtcttcctgcaggcccatggcggagagctccctctatcggcagcgactagaggtcatcgcggtaagtgacgccctaccagtgcgctgcgccctgagccctgggcacccctcgccataaccaggcctcttcctcacctctttcctatcacagggagcaggcctagcgctctgaacgtggggggagcaccctcagctccagccgtgcctggagcgccccaccaaaatcctcaggcccctctgctcctcagttcttctgtatgatcatcaacatccccagaatggagctctgcggactccgcactctcaaatcggcagcatctgtttcattcttgaaccctgtctcccaaacacacca

SEQ ID NO: 57671 - DNA, 1859 bp, Bovine  19866880533211
  misc_feature (1)..(1): n is a, c, g, or t
nagccaaagtaaggcatcaaggagagatgggggctgtggaaaacccacagcttactgtggccaggtgcatcagttactggatctatggatactggataatgttcctggatctatggtatggacttcaaggacaacccagagagccagattttaagtaaagtcatcttagttttcaaagacccatatgttgtacagcatgtggattatatcttaatagaggcattaccaaaacaaaatcccaaacccctcaaatcatggagatgcctcaaattattagaccatctcatggggatccttttcccatttttggggctgaattctgagaacacatccccacattttcttatctttttttatttttggccaaactgtgcggcttgtgggatcattttagtaatcccaaccagggattgaacccagaccactatagtgaaagcaccaagtcctaaccgccagggaactcccagccccccagccccaaccctgccccacaacattttctgactactttcctcatttaggtcatattggcaatcaaatatcaaaatagggcttccctagtgctcagatgataaaaaatctgcctgcaatgcaggagaccccagttcaatccctggatcaggaagatcccctggagaaggaaatagcaactctagtattcttgcctggagaattccatgaacagaggagcttggcaggctacagtccatggggtcgcaatgagtcgaacacgactgagcgattaacacaacacgacaacatatcaaaacattccattgtgcctgcttccggtaccaagctatgatctcattgaccttctctcacgcctcttccagcggtgtgctattgttatatatccccattttagagatggggaaactgaggcttaggcatggaaagcaatttgcccaagaccacaagaggacccaggatctaaactgtgcttgggtacttctctggtggtccagtggttaagtacccgcatttccactgcaggaagcacaggtttgatccctggtcagggaattaagacagccacatggcagggtcacaaaaaaacacaacaactgtgcttggagaggtactgctttgagctctgctggtcacatcccctagttcctcacctgtcgtcgccaggtgggcctgcctgagggcttgtgctgggcacctgtggacgcactctgcagcagctgcagctgggattggagtctggggaagagaaggggctgctgggagcctggaccccaggctcaatgggctacccccaaccggaagtctcagcgaagtaggcagaggagactggcctagtcagagaggcaaagccaccaggcagggggccctactcacgtgaacaagctgtcttccaggttccggatgcgggcctgagcttggtcttcaggcgactgggggtcctgtgaggtgggatcctggggccgctctggctcctcagctgccccgtccattagccagcgttcccggagagacttcctctggccatgagaaggggcatgtggatggacagacattactgcctcaggctgggatacgtgccctaataatgccaggtgggaagccaccccgttcccagccgacagctttcccacgctggaagaaacacccatcaatctccccaacttttccagaatgggacagacacccccaaaggggaaataaacgtccctcttagcccctctctaccccaaagcggaacaaacacgttcccaagatcttcccaaaggtggaacaaacgtcccccattaccaccaaccactctttccaagctggggaagacgcccatccccgaagctggaaccaactcccccaaccccatgtctaaagagaggctcttggttcccaga

SEQ ID NO: 57672 - DNA, 2135 bp, Bovine  19866880556370
  misc_feature (1)..(1): n is a, c, g, or t
nctccatcccttcctcactccactccaagccacccttgacccttttgtatcccttgaacttgcctaattcattatagcctcagggctttgcactcgcctttcccctcttcctgggaaatccctttcccacctcttgactcaaggctggctcttctcacctttcaggccttttgggttcagtgtcaccacctccaagaggccctcctgcatcaatttttttttttttttttaatacttatttggctgcatcagatcttagttgcagcatgtgggatctagttccctgaccaggggtcgaaccggtgcccctgcgttgggagcatggagtcttagccactggaccaccagggaagtccccctcctgcattttatacctacaggaggcaccccatcacctcccaggcatttcttagccttttccccctgctattacagcccttctcacttcctgaattacagatttgtattttatgtttattacctgcttccttccactggaatttaagttctaatagcaaaagtcttaagtatcccttaagtgggatttcctaggtgactcagttgtaaagaatccgcctgctggtgcaggagatgtgtttgatccctgggttgggaagatcccctggagtaggaaatggcaacccgatctcatattcttgcctggaaaattccacgggcagaggagcctggcaggctgcagttcacggggtcacaaagagtcagacatgactgagcacgcatgcatgtcccttaagtaacctcagtagctagcagagtagatccccaatagagggagtggctgcatggacacaggattgactgggtacatacgatgtgcaaggcagtgcagcagagggagataagacaggtgaggaagactgatggtttggtccggaagtaatggggagccatcaggggagtttgagcagagtaggggtgctggcatgctggaggctggaagtgagatgtgggctgccctgaccttgtttctgccatccctgcagggtcaccgtcctctctcccagcccaacgtggagtcaggtcctgcaggtgggtgttttgaggtctggggattgcaagaggaagggcctgaatcttactctgttgccccatctctcctcttccctgactcccccaggccagaccgatctaaacaagagagcctccttaccagccggaccggtgggcgcatacccggagtccccctccgagcccagaactgaggctgccggggttccagcagccccgagggcgggtccctggggcagcagggacctcctcagaagccaatggcccctgccctggatccagcccccctctggagcaggagccgagtcagggggtgctaacacctgagggggcagtgaatgaggccaaaggaggaggcatggtgaaggtggtgtgggaggggctgaggcccacagaggactgtgccatcggggccacaggcctggagctggaggctaaggtggaggagatggtgctggaggccatcggggacagacaggaagccagccgtccagagctcccctcatgggtcaaggaggacagggccatcacggaggtggtctgggaggggatggggggcacagagggcagtgacttggaggccatggcggaggcaggcaggggcccagaggccgtgcagaccagctccctggggctccgggagggatcagggggaacagctcctggacaaggtgcccccaggagcagccctgatggtgatgggcagggggtctttggagaggaggggtccttcatctgggtggaaagagtgaccctcagtgaggaatgggaggagctggaggtggaggggttggaagggccaaaggcactgggaagggaggaagaggatgagagtccattgggggcggagggcagaggcgaggaggaaacgtgggaggcggagaggaggcgggtggagggacctgaaggtgcagagaagagaggcagtgaggggaaggcaggcacggagccagaaggagcagagacatcactggcgcttgagaagaaaggaagcccagactccatggagccagagagaagaggtgaggaacgcgtggaaacagagatggcaggaggtaacgaaccgttgtcagccgaaagaaaagaagttgagggacctctagggg

SEQ ID NO: 57673 - DNA, 1635 bp, Bovine  19866880714394
  misc_feature (1)..(1): n is a, c, g, or t
ntaagtcacttgccctcagtcacacagctggtaagagacactgtcagagacagtgtcttggcaacctgactccagggactctgctctgatttctaaactgtctctctgggtgagatgcagtcatcctggggaccaggaatgtatggaaagttcataaaccacagtggattctgggtggggttgtttcctcctatcctgtttcctctgattgtttggggattttcatttctttctctcatgagcactagctctcctggaaggtttggctctatcacatcctctgggggagacacaggaagctgggtaaaaggacagggagctttctcctccccagtcctcactcagaaagtttaattcatttggcataaacttgaccatctgggggcccaatccttccagtcctagcagacctccactgccttccccacctcctacaccttcatgtgggatccccaacccttcctctattgctgcctgtacgagctggtgatcaagtattacaggggagaaaattcccaaggccagagagcagagctctgagctgaggttttagaaatgtcctttcacctcttcacccagcctgcttcccttcctcttccagggcctgcgaggtcctcctgaagcccccagagaaccagaaccatgcccccacctgccctcagagattcccagggatacctagccgggcagggctcaggacacctccatgcaaacctcagtaactcctgccctgaccagttaactcagtacttactctacattaaataccaattgggccaatttactgctgtaattaaaacctcagcagatgtgttccctgctcatcagtgatgagtttattaacgtccagctctgaaggaatgtggggcagggagaaaaacagaatggggcttgctctgggactgggagagtggatgctgggagaggttgagtttgaaactgttcagtctcccttgtttggctccaggcagggggcaggcagccacgtttatgaaagtgtctgcatctctgggttttctgtttctaccgtggaaactcggaaatatctgccctgcccctcttatctgctgcaaacctgggcctgctgtatataacggatccttttttgaaaatcacattttcttgactactgacaaacagtgtgtctggaacctataaacacagccccttatagctcagcaatctgggcttgtttgttatgtagcataacctaggctgtcctgactactacatattatagctccacttacagacagtgaaactaaggtccagtttgcttactaatataggagagaccaagatagttcttgccaagggagcctggagacagacctctgagttggataagagaagcaggccaggctagtcctcagctctgctcaaggtgagtagttcatgactgctggtgggttggaagctcactgcttagtacactcatggcagctcaagcaatcggctccttctgatcatcagagaacacctgcacagtggagcatgattcagccccaagaagtcactctactttttttttttgtaattaggagattttattttttagagcagttttacatttataggacaactggatgaatagtgcagacagtttgcatatctctcctgccaatttctcctatt

SEQ ID NO: 57674 - DNA, 1251 bp, Bovine  19866880804189
  misc_feature (1)..(1): n is a, c, g, or t
naacctttgatttctcctcgcaggtgaccgcagatgtgctgggggagataagagcctcatgtgcttccatagctttcttcttttactccttaccctttcctttcagcgaccgaggcctccagtcaccgcctgagggggacgcccatctgatccttgaagcctccccacagcactggggacactgcccaccccctgtgggctggggcagcaggggaagggggacaggagttggggagcacagcacagtggaaaaatctagactgggttcgaggttcagccccggcccttgggttttctggctcggaaactggagcaaatgacttaaatttctctgggccgctgcagaagaaggcaagagtctgggaggtcatgtgtgcaaggcgcccagcccagggcccgccacagagcccagtcgtggtggcaaagtgctggatgtaaactccccccacagggcagagacctcatcttcaaccccctccccagcgcccagacccaagcctggttcgggatgtgctcagtaatggtttgggtgccctttcaatccagctgagcctacacctccctctgtgacgctgggaggggatcaaacacctctgagatgctgccaggactccggagaacgtgggtaaagagctctctgtgcacccccagcgggagatgtgaaggaaactgcacccgttctgtttacttcacttcattgaagtcgtgttgcttcacttcattgaacctgtttcctcatttatagacaggattctcgaaacgctgccagaggggtgcttagctcgcttcctggcgcctaataagcgctgagcacttagtagtcgttgcttttcttttgaccactcaccatgacttttaccaattattattgctattggtaatcaaaaataaaactaacaccagctgacaagcccagtttctcctgagaccaggcagataaaaagcagggggggggaaaatctcttggtccaagtggcgtgcaaaagcaagtgggaaaaaaaaacaaaaacaaatgagtggatactatgcaggtacagaagtagggaagaggtgtagagacttcctagagctgaacctccgagtgtgggtgggagggcatgacccacagagaccaggagggctcagggaatgggcagcccccagtctgatgggagagagctaccttgagccctgggagaggcagtggcacacgcgtcttgggtgcgcatgcacacacacacattctcacactcactgacacggaggatgtat

SEQ ID NO: 57675 - DNA, 2668 bp, Bovine  19866880884111
  misc_feature (1)..(1): n is a, c, g, or t
ncctcacggggtgacacctaagttactgtgtttgttttgtttcatggtagttgagatactgtagattcagattcctcagctcagggggaacgagaacccaccggaaccccgagagaccacttccaaggatgatgcccatggacagccccaaggtggtggggtggggcgtcgggctcacctgaacctcccgatccgtcgcaggtgtgagaacatctccccaccgggcacgtactccatgaccatgtataaatttgagttgtcctgcgggaagcagcaagtgatcagggctctgctccccaagctccgggccccatctgcaggcctagtgccctggcccggcaggtgttcagaaagtgacaaccaccatcctggctcccaggcggagcgcgtcccacgtgccaggcgctgtgctcaccagttacctgtctcatttccttctgcccgagagaaactaggggcagccgtcatcctgctcacgggggcccaaagtgagggccggttaggggtacatgagggaactggccggcatcggggctgcagtcagaactccatggtggctcatgtctgtgactgtcctgagcaaggctcttggggccacggttttatcatctgtcaactgggaccaggatgggctacagaatttgtggggccccccaaataaaagtgtgaggccccttgttaaaaaacttgattacaaatttcaagaaggtggcagcagaggcttcaactaagtgcagggcccttgtgactgcaggggtcacagaccctgagtggcctttcccagctctcgcagtcaaggcttaggatgatgcccaaaacagctcacacagggcgctcatgctgtgctttgaattgttatggcagccccaagtggggactgccaccgatacccattatacagatgaagaaaccaaggctcaggggagtaaagtccctggccagggtcacacggccaggaagaacagggctggcactggaacccaggctgagtggcatggcttgtggccatgtgtcaggttcttgctataaacggagtgatgattttgagggacgttatccagactgagggactagccccagggtatcaagctagaggctggcaggcccagttgaacttggggctatcagagccccaggctgattttcacgcccccgccccatcagtggacagccactggtggtgatcagcctggctccggctctgggaacccagaggctgcactgcctggcagcggccccggtctgccgccactggaaccccaccttgaaggagaactcgagtttgacaaggaacggaaagttgaccgcctgcaggatgcgcttctcattcagggtgtgctcaatctgtttcagcttcaccacctgcaggagtgggaggggagagtggagaagacggggtgtgagcgagtcctttccctcctgaccacccaaaaaaaaggagaggtgccagggccgggccaggtccttcatctagaattgtatgagtggggacttccctggtgctcaagtggtgaagaatccgcctgccaatgcaggggacacgggtttgatccctggtctgggacaatgccacatgccatggggcagctaaacccatgcatcacaacaagtgagcctgtgagtcccaactactgaagctcacatgccctatagcccatgctccgcaacaagagaagccatggcaatgagaagcccgtacaccacatagcaactagagagaactcctactcgccgcaactggagaaagcctgtgtgcactgcacaacaaagacccagtgcagtcataaataaataaataagctttgacctaaaacacacacacacacacacacacacacacacacacacacacacacacacacacacgctgttttagtgcctggggactgtcaagccctgggccaggtgcctgtccccacatggcatgcagtcatgcaattcagggcaagaacacatgagtcaccaggccacaggggtcagagccgtggtgggggaagctgggggcctgtggatgcccagataaggcacccggtgaagtctgaggagtcagagaagacttcttggaggaaggggcagctgagctgaaacagaacatacaagcagaaggggcacccaaggggtggggggtttagaaataccttccttgcaactagagcgcacccctccccacaatccacctgaacccagggctaattcctcctccgccctcagccatccccagcagccgcctcacacactgacaggaatcctgaggaggatgcactgggaacatgcatgtctggaagtccagatgcagagaagggaagtgtggtgcccaaggtcacatgcagctagtcaacctcagaccagcttgtcacacgcacgcaatctggcccctcggtcagctctgagccccactgcaatggggcttcttctgctttgttcacgacatcctctgggtctatacctgcactgtccaggacagtccacgctagccacgtatgactgctgagtacttgaaacctggctggttgactgacagatggagtttaaaatgcaaagtatcttggggcttccctggtggctcagtggtaaagaatatgcctgccaatgtcggagatgtaggtttgatccctgatccgggaagatctcacctgcctcagagcaactaagctcacggccacaacta

SEQ ID NO: 57676 - DNA, 1806 bp, Bovine  19866880918808
  misc_feature (1)..(1): n is a, c, g, or t
nataaccgcaagggatggtcttcccttgtggctcagcggcaaagtctggtgggctacagtccatggggtccccaaagagccagacacgactgatcgagtaaacaacaataatggtgcttgtgaatttcatgaatccttcaggcaaatcatcaaagctgagagtggcctggggcacttctctaacttcacaccacccccacgcacagagcagggagggtgtattagggaatgtcctcatgttctggaagaaaccacagagcctgactttgctacttcccagctgacaggccaggtgggtcctttgggccagggttcctcccagtgtggccctgggcatatccacactgtgttcagagtgcagattctgagtgcccctagacccaggcctgctgatcccgaatctcgggggtgaaaccaggagcccccaaatgggtacacccacccgtgattcccatgcacactctcgtctggacagctgctgctggtgcctcaccaggcctgtttctggatctgtaaaatgggcaaaccacagcccagggatgtactgggaggcttctgtgctagaagatgttctggaaggaggtgctgtggacagcgagggcatcccagggagggggccctggctttcacttgggaaacttcctagggttgccatgacaatggaagaacttgccatgggagtgcctggctcttggaggggctacattgtcacatgtcagctcccttcctgtgcctttcagggactgcaagctgggactcaggagcccagtggttagggtttaaatcccagtgcagccactccctggctggtggcttcacgtagtcactgaccaccccagtgcccttacttcctattctagggagccaacaacgcctacctcacgggcctctgctgaggggtgcagaactggtccgcagtgagcagacaggcccctgattactactgtcaggaggatgattaaggcagctcgtctctgggggacagagcgggctcagcaccatccacgcctgccggggcagccaccttcttgcacactggtcccagccaggcctatgccaggggtccgagggaagcagggatacacagcagggtcccaagccaccaacatggagactgtcactggtggatggagagaaagtcccagtgtgcgttggcagcagagacagacggaccccctgtgttgcgatctagtccctctgatgccagctgggggcccaacagggttggcagccaggccctcggggttttttggggtgagttgagtcccacttggggaaaagttttacatgtgttcctccagcgccatctgctcccacatctaattttagtccttcctgggtctgggaaggaggctgggggtggagggctggctcagatgggtctgggggtggaagcagccccacccggccccactggggctgtagggcaggacctggacgggcagagaacacgggtgctgtgggattggagggtgccagctggccggagcagtgccaaggcctggtggcatggctgaatgacgccccctctacctttgaggctctctgtgagagggagcgctggtgagcagggctcaccaccagcagcctccagacagggctgggaagagtggggcagggggcacccccagggcgagggtgaagccggcaggcctcctctctctgcttctcatcccgcgctgcccttgcccccgcctgggcccaccgtagggacagtaattgagtaatcgggcgagggtgggcgggtaggctccgggcactaattgtggcgtgtgcgggatccagggccagcatagggccgagccg

SEQ ID NO: 57677 - DNA, 1367 bp, Bovine  19866880935972
  misc_feature (1)..(1): n is a, c, g, or t
nattcatagggctgttgcaaagatccaatgtgatcagcagagcaccaagcactgagaagtgagaagtagaagttgctattatcattattcactcaacaagcatccatggggttggaggggaaaggagagagacgcaatcctcaagctcttagaaacaggcaccaagcagagattctgactctggtgttcatcagcctcacctggggagtcagttaaatgcagactcctaggcccactgacagagtctgggatgaccctggagtctgccgtttgagctagtcgccaggataattctggggcaggttgtacagggcactgagaagccctggcctggactttcccagccttaggaaggtggccccttgtggcccctcccaccataaaagggctttaaaacctccacgcttgccggtgctttctccccttcaaggtgcaaaccctgtaggcctccttgtctccactcgaggacagggggaggtggcatggacacaactgagctcaaaatggggaaggggagatgggtaaaacagctaagccagcttctctactggagaccttctcagcattgtcattgttagtctccaggaagaacgatacagaatgccaaatttcccataattatttcaccggggaacctccctttttattttttccaattgtggaaggctaggttgagcagagttcagtagggtgttccctggagaggaataagtcacaaatatctatacaggatgaggtgtgttctccatctatttgagcatgactcagcaaatctgttccttagcaatgaaactgccaaaaaatgcaccagtggctgcacctatcttcaaagccaacacctgttttttggagaatgtttgaatccattctttaggacggggctggcatatttctgtgaagggccagccagaagtcaagatttttgactccaaggacagacaagtctattccagtgactcagctctgccactggactgtgaaaacagccgtgacaatatgtaaacaagcagttgcgtggctgtgtgccaataaaagtttatttctagacactgagatttgaattttacataattttcacatatcacgatatattattcatgtcacaaaatgtccttaaaaatgtaaaaacattctcagatcacagacagtaaaaaacaggtgaaggtttagctgtaatggtttacatctgggacaaggccctcccaaggaaatgaaaagaaaacctcactttcctcacctgtagactggcttcaaaaacgaacttttgggggaatggggaaattaaatataacagtgtgagtttccctcatcctctatatccagtttgggttgttttttttttttttttttggtgtggtggggggggt

SEQ ID NO: 57678 - DNA, 959 bp, Bovine  19866880959492
  misc_feature (1)..(1): n is a, c, g, or t
ntgggctgcagaccgtagtgatcctggtctattcggaatcaggctgcagagcaggaggtgagtggtgggccagcaaatgaagctttatctgtatttacagctgctctgcatcatttgcattaccgcctgagctccacctcctatcagatcagcggtggcattaatattctcataggagcgtgaacgctactgtgaactgtgcattcaaggggtctagattgcgcgctgcttatgagaaacatccgaaaacaatcgtccccataccccgtccatggaaaaaattgtcttccatgaaaccagtccctggtaccaaaaaggttggggaccgctgttctaagatactggggcttagggcttgatttcagcatctgaattggtggaggggggaagacctgatttaacccattaacagttcacacaggctatcctggcatggctccaggcccccaagtaaagacactcttctcacaaaggacactagaagggctcataggacacgtcccaggagccagactcttcttgggctgggctaatggccttactacacaagtgggcacaccgagaagcccatttcacagatgagtaaactgaggttcatacagcctgcaggccgatacagtcaagctggaggtggagcctcttcagtggggttctgtcccacccctcctgggcctggtggtgaccgactccctctctcttctccctgcaggcctgagccgggctgggctcccatttgggctgatgcgccgggagctggcatgtgaaggctaccccatcgagctgcggtgcccgggcagcgacgttatcatggtggagaatgccaactatgggcgcacagatgacaagatctgcgacgccgaccctttccagatggagaacgtgcagtgctacctgccggatgccttcaagatcatgtcccaaaaggtgaggggctccaggaggaaaggggtgacagcagt

SEQ ID NO: 57679 - DNA, 1359 bp, Bovine  19866880969786
  misc_feature (1)..(1): n is a, c, g, or t
natccctgcctgtggaggggcacatccgttaaaaaagagaaatagtcacatttgaaccaaggtttgaaggaggccagggagcagaggaagaggccgtgtgaataactggcaggcagaagattcacccagaggaagtgacaagtgccgaggccctggggcagggtctgggctgcttgaagaagagcaggaggcaagagtggggtcagggagcttaccgggctggttgataggctttcaactgtggggggaaaaacaaccagtcgtcagggctcttttgtgagattccaaactgtaaataagaggcttggaaagtatgagcttgtccctggtgttgagaccataggacagacgtgggggatgcgagtagaggacagaccaagggtttgcacactagaagtgaagtgagagtcactcagttgtgtcccactctttgcgaccccatggactctgcagtccatggaattctccaggccagaatactggagtgggtagtctttcccttctccagcggatcttcccaacccagggatcaaacctaggtctcccacattgtaggcggattctttaccaactgagctatcagggaatgagagccagataaaacatggggtgctggaacttgcctggtggtctagtgattaataatcagccttgcaattcagggggtgcagattcgatccctggccagggaactaagatcccgcatgccacaaagcaactacacccatgccacacaactactgagctggtgaaccacgactaagaactcagccaaataagtaaaagagaaactgttttttaaaaaagaaacatgggtgctgaccctcctcagagaaggtacatttctagcaagttgctgtccaggctggtgcccctgggccagggtcatacttgaagaaccggggtgtagatggagcaaaagaccaagggtggagatctgggtgtcccatcttaggagtatcgcaggggagacagaagcagtgagaagaggagaggctaggagggagaaaaagtggtcagaacccggctctgtgccctcgaagccgctgtgcccgggaaggacagactggggaagagggggctagcctgggagggcatacagctcccacccctcctccagcctccccagcccctccaggggctgcaccccacccctcaccccgcctgcccatctccagctcaccctgagggtccccccgagaggaaagaggggacttagttgtccctggtccctgatctgtggcgccagccagctggattctaattagcttccagagccagagagacaggaagccaaggggctgggggtggggccctggactcctgcccaagcccgcgaggctgcaggccggggccaag

SEQ ID NO: 57680 - DNA, 1318 bp, Bovine  19866881050891
  misc_feature (1)..(1): n is a, c, g, or t
nccctgatatacttggccctcctgccgagccctcagtcctgggaatttcctgtgtttgataggcggggtctcacggagcacttttccttttatctggccagaagagagccaggaatgggggtctcccaactggaggggatgccagagagttggggttcaggatggccttagggtgccacgtttgtggactgagtcgctgtcacccgaaggtccgagagcaggtgtgaccttggtgttggatctggaggacccggggactggccagctcccccagcgacctcatctccccctcctgccggctggctctccgaccagattgcaacccgccgtcctgccccagttgtcgagggatctactcagttcagtggcaccagtccctgtgtgtgaaagaggatgctgcctcctgtcccagctccctgctcttccctcctcagcatgtctctgagcctccatcacgtggccattaattcagcctctgccatacggttcaccctcaggctctgaggggcctgagttgccctggaggtgcatagtcaaggtcacctggccaagttaggcccacaggagaactttccccactggaaatagagcttcgtgcctgccctggtgaccagcaacacagtgcctggccctgggtgcccagtggatgtcgggtgttctttattaaaattaaaaaaaaaattttaatagattttattattcacagcaaccctcccaggttttccccattttacagatgcagaaattgaggcatggcgaggttaaagaatttctcaaggtcacaggacagaagcggggattcagaccttggcaggttacctgcagtagatgtcagatgtccttgagaattaaaatctaccaatgtattaaggactgatgcaaaactaccacgagaaggccctttcccagctttcttgctgttaaattatttctgttcctaacacccgtatccttgcagacctggagtggaagatcatttacgttggctcagctgagagcgaggagtttgatcaaatcctagactcagtactggttggccctgtcccagcaggaagacacatgttcgtcttccaggtaagaaagactcggccttggtccttgacacctagaaacatcctctctaaaaaaaaaaaaaaaagaaagaaagaaaagatagaaacatcctctctgacccaaaagcacacagatggttcattggtccgagttcaggttcagatcctggctccactctcaagcactgtctgacctctcaaaggtagttcagacatctcccatctctattacatcatagctgttaccatgagccaccaatttacag

SEQ ID NO: 57681 - DNA, 1023 bp, Bovine  19866881332368
  misc_feature (1)..(1): n is a, c, g, or t
nttgtgggatcttagttcccaaacctgggattgaatgagggccttccttccgcagtgaaatcatgaagtcctaaccaaggactgccagggaattccctccagttgcttttggaaaccagagacttgacaccactcacactttgagctcactcactcaaagcattggtgatacagaggaacccctacctccttcctgctgaaacaaggtctttgttttacagcacaccttctctcttttaatatctgtctggggtctgtaagggcttccctggtggctaagacagtaaagaatctgcgtgcaattttggagacctgggttccgtccctgggttgggaggcaactgactcagtattcttgcctggagaattacatggactgaggagcctggcgagctacagttcatgggatctcaaagagtcagaaacgactgagcagctaacacacacacgctggggtctgtaagcgtgtgaggtttacagttgctaggcagattataaatggccttacatgccctgctaaggagcttgaactaccaacaccacttttttttttttttttttgatagctattgtttatatgcccaggacgggaaccacctcttatcacttctgtctagccagcaccatgcgcggggcacgttgtttggcaccaataaaagttgacgaaatctagaaagggagggcatgagttcgtttgtcccaaagccgcagttcgcacccgcatcgctagggggcactaggaccccggcagggccgggggagaccagaggccacggaacccggcgacaaggggacattctgcattccggctggcgtctcccgtgtgtctcaggcctacctcgtctcgccgcgctcctgccccaccccaggagaagagaacccagaagaaaacagcctgcactgtccagaaagaaagggctttattggggagtaggcccagccgaggatccctgtcctctaacagacaaggccagaaggagaggctaaggcgcagaagggctgggcagttttactagcagggtg

SEQ ID NO: 57682 - DNA, 687 bp, Bovine  19866881413300
  misc_feature (1)..(1): n is a, c, g, or t
nctgacagggagaaaaggcctcagtattgtcacatgcctacctgagaacctgaaggcaccttttaatgagtttccactttacctctaaaatttaagccctcaaacagaagaacaagaaactactcactgctcacttttcattgctgccccttcccctcccagctacttcctatgctatagagatacatgggaagacacaggcaagagtcccgccaattcctgcccccagattcagaagctgtggtccatcggccgatggatgcccctaggaccagccgaggatgacctttattcatggtaggagcaagggcaatggtaaggtgggtgggatcggagggagggacagaaaccaaccagagaccatctgccttcctcaacactgttaccattgataataattaattttattgtgccctgaaaagcgtttatgcagactcatgtaacaacccactgaggtctatactactagccccattttacaaaggaaacaggtgttcagagaggttaagttacctgccgaaggacacacagctcgttgagcagtcagccaggtcagggataaaactgctcagcctcccagagccttaccctctaggtttctcatcaacaaggaaaccactttcccacccccagctgaaacaaagcctctttcagccacagcctttcgctcaaggggaggggctcccg

SEQ ID NO: 57683 - DNA, 799 bp, Bovine  19866880403952
  misc_feature (1)..(1): n is a, c, g, or t
nccagggcctggggtgctctgtgtttactctgaaggtgttggggagccgtggaaaggtcccaggcaggcaaggggcagggtcagttctggacccaagtggaggacggacaggaaaccaggaggccagggaggaagtcggggccaaaatccagggctttaaatcccacctccatactgatgatgccgccccagacgacccctctggtgtagacgggctcatcatcctggcttctggagaggggagcccggtggccacacccctcctggcgctcagccgctgctccctctaccctacaaggtcggcagctggagtccgtccgggccgaggtggccgagaagggtgatgtggggctggtggccgagagcagccgcagcacccagaggcttgtgctgcccccgcctgcgctcactgccgccggcgtcttcgccaagttccgggacatcgcgcagctggcaggcagcgctgtgagtgggcgggcggctggctctccccagaccttctcctcttggggacctggaaggctctggttcgactgctcagggcggtgtcacctgggtcctgcttttgggatcagagcttctcttctcctgctgctctcaagactgcgggactctcctcctgagaccctagccccgatgtagtgcgggccgtggggctccgtgaacacctgctgagcagagccggggtgggaggccggaaggacaagcttcttactgttctctgcgctccaggccgtggaaccggggagcaggggtgggaaggcgggcaggtctccaagggtggcagctccccaggcag

SEQ ID NO: 57684 - DNA, 1080 bp, Bovine  19866880408588
  misc_feature (1)..(1): n is a, c, g, or t
ntgggtcttgtactacagagcctggccgcccccttctcgaaaactaaaacagaaatgcaagcggtctagaaattaaagcgacagccctggaatgacaacgtgataagagaaggaactcggggcgagccccagggtgcagcgcggcccctcccctgctgcccgcctccctctaggcccttccatggcagaaggatgagatgctgcctgcctgccacaccgcctctggggtatcttggggacagcagctctaacacggaagcgcgaactccacggggatgaggtgcggctcaggggagaggagggtgctctctgagcagggggccctgtgctggccaccccagggatggagggaggggagcctggtggcagccagcccggggcgaggctgtggatgggtggaggcgggcagggggtatttcatggaggcgagtacctgggctcagtctgcagtgctccgggagccgctccaggccgtgttccagaagcacggggacgatccgctccaggtcaggtacctcactggggcagggagcaagaacaaggcgggcgggggtgttcttctagaaccctgctcgctggctgcaagatccccactgcctgcctgtcaccccttcccagggtcggcttctgcctccctcgactcccctcatcaccccaactgtcgtcatccttcatgtttcttccaggccggcctccccctcccaatattccggcttaacaatggtctggggccagcctgaaagcaacagtctacaggtctccaagcaggggcagagttctctccatgaccgtcacgaccctcacagtgtgcccatcaccaggccccgtctgggtttctcatggcctttccacaggcacagtcctgcctggaactcagaagcctctgcctgcccctctccttggctgtcaggatcaccgcctctcccgtccctgtgtccctgacccctcgctgtcagacgcctccctgatctttgtcacctccccgtgcccagcgcctgtcttgtctggatccccacccagggctctgtcacctaggtctcaccagaaagtctgcttcaggatcatgccttgctcctccag

SEQ ID NO: 57685 - DNA, 1531 bp, Bovine  19866880483943
  misc_feature (1)..(1): n is a, c, g, or t
nccctcccagccctgccagccgcggcacctcccatcccggctgtcccacccagctgtgcctctcccctcccccagatgtgacccttcccgcccctccccactcacctacccgccccggagcggcgtccacctcccacaatgccccgcgccgcggcccggcccggcccttgctcccgggatgccccgcgcggcctcccgcctctcttcccgccgtgcctcgcgcggtggctcccaccagatctccgttttcccgccggtcactcctcaatccagagcaacagtggctcggggctgtttcccagcgtgctctgcgggagggctcgccccacttcatcccctttccagggagtctcacgaccgggagactacaactcccagcgtcctcctcgcgacggcggctcggacgtcgcccggccccgcccctggactcggccccgcccccgcccgccgaagtctgcgcgcgaagtcggtggcgcgaaattgggactgcggggtcgctccaggagagacgctcaggacagcggcgcgcgggcctggcgcgaggcaagtggcaccagccttgcggggcttcagggctgttcaacagagcgcatgtcggcaactcggggctccagctttcgccgaataggtcggctgcaaaggagaggacatgggggcaggctgatacggccgggagcgcgccgcggaggggagtgcgcgggctacgggccgctggagggggcgggacggcgtccgtcagaggttcaggatcaggtagaaggtagacgaagaccgaaaactgcacaagacaggatctgcagagacgcctggagggacgggactacctgaaaggggcgtggttatatagggatgagggggcggggaacggctctaggtgggcggggtcatccggaagttggaagggccggagaggcaggcccacctggaagggggtgggtctagggggaagtttaatagtgggcggggccggggaaaggttgaaggaaaagggtctactaaggggagagcccggggagctggaggtggggcggggcaagtcagtggtaagatctaggcctaaagcaaaggccttttgaaaggtcgagaaccttctgaacagggagcggtctggccttgtgtatgcctgatgagggggcggagtcaagggaagagacgtgaaggtgtggggtccaggggaggggagctgaaaggtctgggcttattgtgggcttctcaggtggcgctagtggtaaagaacctgcctgccaatacaggggacttgaaagacacaacttcgatccctgggtctggaagattgatgccctgttggagagcatagcaacccactccagtattcttgccaggaaaatccctacggcccatagggtcgcaaaaactctgaaacgatttagcacacaaagcactgcgcttattattgcccaggatggtggagggaggcctagaagagcttggggagggaagagacaaggatcttgagctggtctgattgggtctgagatgttggttaaatatccagatagagatatcagca

SEQ ID NO: 57686 - DNA, 850 bp, Bovine  19866880514463
  misc_feature (1)..(1): n is a, c, g, or t
ncaccccaggtcacctgccactctccttttctcccccagccacaaagttgcacgcctataagcacagcaatgatgccggccgctggcactggattatgagagcaatcatctcattctctctgctaagtattcgcttgcccagcctccctcgcaactagtgagggtgacatgacaattttggccaatgagagtgaagaagttttctagggtgcaggatgagggggctcctggaacagatctttcataataagtaaagaccccttccctccttcctatttggcatgctgggataagaatgtgatggccggagctgtggcagccatattgtaaaaggctgagagaactacattccaattgacaactctgtctctctgggacagggcaggattgggtggaagatgatggcaggtgctggagtggggcagaggctaccttgcgtttgcgggtggtgaggacttggaatggctggatctgcttcttttcccggtcccaagctacagcttctgtgtctaggatgaaggatgtgaccgatgggagtttaatctgaaaggtgaaagggggaaatgcaaagctcatgagaggtggtggatgaggccaaaagacagatggagagaaaccagtttattccccttctacatggagaagatccaatgacaaactgatgccagccttagagatacgcgtgaaaacagatgccttctggtccccactgagaggggaaaaaactaagttttctgaggacttactatgtggtcccacaagctggaaacccaggagcctttgtcatcttcctcttttgctcacttcacattcaattcagccatgaacttgcccattctctctgtgaaat

SEQ ID NO: 57687 - DNA, 2338 bp, Bovine  19866880578830
  misc_feature (1)..(1): n is a, c, g, or t
ncctttgtgtcgtgttgggcagcaaggatggggccggctgtgtacctacctcctggggcagacagcgagaaagcaggcaggaccaggcgaggaggagggagggcgcaagagtggagtgcccccaagagccgcgggcgggggcagggagggatgcgcagcgggtgggacagagagagccggaaacagcagagagaaacacacagagagggagggagggagagagagggaagaaaaccagttacatccacatgagggggtaatggccagaccctgtccctccggggaggcccaggatgctgagttggccatgagcacctcccagcgtcagtgcctgactccagccccactcccaggatctatcccagccgggcaggctctctgttgccacggtgacgatggggcagtcatcaccaagaggcagaagaggaaacccccagtccgtgggccaaggtggccgtggggacccctgttagcaccagtaggacctatctgtgtgactttaggacaaccacttgccctctctggacccccatctggagatccacgcaggcccacaccttcctgctgcaaagtgacctacttctgggctccttgtggtcccggaagaagtcaacagcagcagtaaacacttttattaaccatctttttcactataaccgctaccagtaccactgattcccttttgtatttcactgtttaagaggtgccttttactagtatcttgtgctgcgctctggtcaaatctgggtccaatgccacctctgccctgtggctgcgggacagtgaccgagcctcagtttcctcatccaagaaatgggagggagtcctgcggctgcgggggaggtggggccgagcgcagtttggaagagaaccagtctctcaggaagctgcccttccggtttttctttcccgtccactcactgccaggggcatcatttgacctcccataaaggatctaaattcctctgggatcccccaggccagtctgcctcccttggagctgctgcaggaatccatctgccccggcaagttggctgaaaggagcgatccacatttcgtgtgcaccagggacctgcctctgtggcctgagaagagattcccccttctaagaacacaattccatgtgtacccctctgccaccccaccagagagtagatactgagacttgaaaggaggaaaggcctgccttgagcctgcacccaggctgaaagcttcctctggaccatacccctgtctgggctgcttccactgtaattcctcgccagattctatctccctggggcagccactcaccacttttccatgaaaatgccactgccaaccctccctaggcacctactatttaccaggcccagctctgagccagcagttctcaacctgtgccacacattgggaaccgcctggagagctttcaacatgaccaatggcctatcctgcccacagagaccctgatttcacgagcctgtggcctggcccctgtggtttccaggtgaatctcccaggcagccggggtggagaaccgctccagctctcagccagctgcccttgccggacctctgctaactgaaccagagtccgctggtgccacgtgttccaagggggactggcccctgtcccacccatcccaccgtggccagggctccccattctcctaagtcagccagggtgcttcctctccccacgtacgtgctaaatcacttcagtcttgtctgactctgtgatcccatggactgcagcctgccaggttcctctgtccatgggattctccaggcaagaatactggagtgggttgccatgccctcctccagggaatcttcccgactcagggatcaaactccctgtctctaaagtctcctgtgttggcaggagggttctttaccactagtgccacccaggaagctcttcccctccccaccaggaaccaatccgaccagctgagaagtgcatctgggcattccgggacccgtttctgcaggctctttactgcctacaggagacatctggggaacgaagacacttctagaacagccaccatgctacagggctgagcaggaggccacaggaggtggggataaaaatacaggagtctcagagtgggtctgccccagactccccgagagttcctgccaagcaaggtaaaaggcccagttccttgggttgttttgtttgctacagctgagagcagcctgagtcatgaacactctccccgcagggcctgtgctctttggttctcggctgtgtcctcagtccctacaccagggcccggcacgggggagggctttcataaacttgtgccccccaacagaaggggtgagacagcaccgattccaaggccagc
